United States Patent Application Publication US 2004/0123343 A1 - sequence listing, part 43

SEQ ID NO: 137794 - protein, 1508 aa, Oryza sativa
  Clone ID: PAT_MRT4530_39243C.1.pep
MAGFADTLRPDKFTGVHFKRWQIRVSTGKPEGVLTAEQQKQFEEATTLFVGCILSVLGDRLVEVYMHMTDAKELWDALNTKFGATDASNDLYIMEQFHDYKMADNRSVVEQAHEIQTIAKELELLKCVLPDKFVAGCIIAKLPPSWRSFNTALKHKRQEYSVEELIASLDVEEKAREKDAASKGDDGQSSANVVHKAQNKSKGKYKAQQTTNFKKQKNNNNNPNQDERTCFVCGQPGHLARKCPQRKGMKAPAGQTSKSANVTIGNTGDGNGNLVSGSRLTRDGFKLVFESNKVVVSKHGYFIGKGYECGGLFRFSLSDFCNKSVNHICGSVDDEANVWHSRLCHINFGLMSRLSSMCLIPKFSIVKGSKCHSCVQSKQPRKPHKAAEERNLAHLELLHSDLCEMNGVLTKGGKRYFMTLIDDATRFCYVYLLKTKDEALDYFKIYKAEVENQLDRNIKRLRSDRGGEFFLYEFDLFCEEYGIIHERTPPYSPESNGIAERKNRTLTDLVNAMLDTAGLPKAWWGESRDVTFFESFFPMKDTHSNSSQPSEIIPSSFTPPEQIEYTHEHVTEEDDSEAPRRSKRQRTTKSFGDDFTVYLVDDTPKSISEAYASPDADYWKEAVRSEMDSIIANGTWEVTERPYGCKPVGCKWVFKKKLRPDSTIEKYKARLVAKGYTQKEGEDFFDTYSPVARLTTICVLLSLAASHGILVHQMDVKTAFLNGELDEEIYMDQPDGFVVEGQEAKVCKLLKSLYSLKQAPKQWHEKFDRTLTSACFAVNETDKCVYYRHGGGEGVILCLYVDDILIFRTNLEVINEVKSFLSQKFDMKDLGVADVILNIKLIRGKNGITLLQSHYVEKILNHFGYIDSKPSPTPYDPNLLLRKNKRIARNQLEYSQIIGSLMYLASATRPDISFAVSKLSRFTSNPGDDHWRALERVMRYLKGTMELGLHYSGYPAVLEGYSDSNWISDVDEIKATSGYVFTLGGSAVSWRSCKQTILTRSTMEAELTALDTATVEAEWLRDLLMDLPIVEKPVPAILMNCDNQTVIVKVNSSKDNMKSSRHVKRRLKSVRKLRNSGVITLDYIQTTRNLADPFTKGLSRNVIDNASKEMGLRPIEDAVLQSILERTHLCELDCWSQSMKILGESSRKLTKDLGDCGHCGRALAAHAAGLQQCASAALRLRRQPAKAADCIHMLVLVPCILLLIACPFLMLILNPCRCNSLQDEKTIRLSRLGDKWNIRLSDSSGNRRMVGGCRKFAEDNDVGVGDICLFEPVFGGLDSGLLLGREAVDDERAVHVDRHLPEVDVAQPERHRRADVHVERHVAGLLALLQRALQPRPEAVPPLHGHPHHRRVPVALVERRQPPRAQRRAAVRHRRPRPGAVADPDHVVGVLRADGRHQLGVHGEVGGAHVEPRHGHVGHGVGRGLGPARVQEVRRRRRHRHDEEEEEAAAPAEAAAQAATVRDAVPGHVAAGARRDRGQRAGAVLLREHHVPRRRRRLGRPRAPVVRH

SEQ ID NO: 137795 - protein, 236 aa, Oryza sativa
  Clone ID: PAT_MRT4530_39244C.1.pep
MVEPVNDLPTFGVGHSLGSVIHLLIGSRYAVQRSGNILMAFNNKEASLAVPLFSPVIVPMAQSFGPIFSQLTSYPTLRFGVKSYYGISRNLLIKFKDDQIDETSILAQVLSSESAISSLLDMSIRSLPGDHGLPLQQVLPDVPPAMADAVNRGGELLTNLATGTPWEAVAKEVGTGGAQYCTVLSANLQFSFTRNVHLVATEDGYFIRLLQQQQQQQLILSHMGSTYPDIKYCMCV

SEQ ID NO: 137796 - protein, 151 aa, Oryza sativa
  unsure (1)..(151): unsure at all Xaa locations
  Clone ID: PAT_MRT4530_39245C.1.pep
FFFFFFSTXXXAGFWXKSPLSRCIAFTSTRPACDINPSHQAHXHLQPTTQSRGFXWHTSIHCGARHSGACHTTQGHQXRGQWANTGADAXPVATQSVGAISEAISVSSPSEAAXNNVRTGSPRGPPSXTQCRTHCHNPXLFTNPGLFRCGL

SEQ ID NO: 137797 - protein, 1282 aa, Oryza sativa
  unsure (1)..(1282): unsure at all Xaa locations
  Clone ID: PAT_MRT4530_39246C.1.pep
MAGFADALRPDKFTGMHFKRWQIRVTLWLTAMKCFWVSTGKPEGILTADQQKQFEEATTLFVGCILSVLGERLVEVYMHMTDAKELWDALNTKFVATNASNDLYIMEQFHDYRIADNRSIVEQAHEIQTIAKELELLKCVLPDKFVAGCIIAKLPPSSRSFGTALKHKRQEYSVEGLVASLNGEEKARKKTPRLRAMNKSKGKYKAQQNTNFKKQKKNNNNPNQDERTCFVCGQPGHLARKYPQRKGMKAPAGQTSKSANVTIGNTGDGSGYSNLPTVFSVNQSTNWWVDTAANVARSSTVLMGNGSHASVHGVGTVDLKFTLGKIVQLKNVQHVPSIDRNLVSGSRLTRDGFKLVFESNKVVVSKHGYFIGKGYECGGLFRFSLSDFCNKSVNHICGSVDDEANVWHSRLCHINFGLMSRLSSMCLIPKFSIVKGSKCHSCVQSKQPRKPHKAAEERNLAPLELLHSDLCEMNGVLTKGGKRYFMTLIDDATRFCYVYLLKTKDEALDYFKIYKAEVENQLDRKIKRLRSDRGGEFFSNEFDLFCEEHGIIHERTPPYSPESNGIAERKNRTLTDLVNAMLDTAGLPKAWWGEALLTSNHVLNRVPNRNKDKTPYEIWIGRKPSLSYLRTWGCLAKVNVPITKKRKLGPKTVDCVFLGYAHHSIAYRFLIVKSEVPDMHVGTIMESRDATFFESFFPMKDTHSGSNQPSEIIPSSITPPEQTEHTHELVSEEDVSEAPRRSKRQRTAKSFGDDFTVYLVDDTPKSISEAYASPDADYWKEAVRSEMDSIIANGTWEVTERPYGCKPVGCKWVFKKKLRPDGTIEKYKARLVAKGYTQKEGEDFFDTYSPVARLTTIRVLLSLAASHGLLVHQMDVKTTFLNGELDEEIYMDQPDGFVVEGQEGKVCKLLKSLYGLKQAPKQWHEKFNKTLTSAGFAVNEADKCVYYRHGGGEGVILCLYVDDILIFGTNLEXVINEVKSFLSQIFDMKDLGVADVILNIKLIRGENGITLLQSHYVEKILNRFGYIDSKPSPTPYDPSLLLRKNKRIARNQLEYSQIXGSLMYLASATRPDISFAVSKLSRFTSNPGDDHWRALERVMRYLKGTVELGLHYTGYPAVLEGYSDSNWISDVDEIKATSGYVFTLGGGAVSWRSCKQTILTRSTMEAELTALDTATVEAEWLRDLLMDLPVVEKPTCEKTIEVCQEIKKLRSYNVGLHPNSEKPGRSLHEGTITKCDRQCIEGDGFETHSILEGTHLCELDCWSQSMKILGESSRKLTKDLGV

SEQ ID NO: 137798 - protein, 107 aa, Oryza sativa
  Clone ID: PAT_MRT4530_39247C.1.pep
QVLSSESAISSLLDMSIRSLPGDHGLPLQQVLPDVPPAMADAVNRGGELLTNLATGTPWEAVAKEVGSTLGADSGVLRAQISKDVNTLVDVIVSWIESNSGPRLLRS

SEQ ID NO: 137799 - protein, 746 aa, Oryza sativa
  Clone ID: PAT_MRT4530_39248C.1.pep
MKCFWVSTGKPEGILIADQQKQFEEATTLFVGCILSILGNRLVEVYMHMTDAKELWDALNTKFVATNASNDLYIMEQFHDYRIADNRSIVEQAHEIQTIAKELELLKCVLPDKFVAGCIIAKLPPSSRSFGTALKHKRQEYSVEGLVASLNVEEKAREKDAASKGDVNQSTNWWVDTAANVARSSTVLMGNGSHASVHGVGTVDLKFTLGKIVQLKNVQHVPSIDRNLVSGSRLTRDGFKLVFESNKVVVSKHGYFIGKDEALDYFKIYKAEVENQLDRKIKRLRSDRGGEFFSNEFELFCEEHGIIHERTPLYSPETNGIAEKKNRTLTDLDTHSSSSQPSEIIPSSITPPEQTEHTHEHVTKEDVSEAPRRSKRQRTAKSFGDNFTVYLVDDTPKSISKAYVSPDADYWKEAVHSEMDSIIANGTWEVTEQPYGCKPVGCKWVFKKKLRPDVTIEKYKARLVAKGYTQKEDEDIFDTYSPVTRFTTIRVLLSLAASHGLLVHQMDVKTTFLNGELDEEIYMDQPDGFVVEGQEGKVCKLLKSLYGLKQAPKQWHEKFDKTLTSAVFAVNEADKCVYYRHGGGDGVILCLYVDDILIFGQTLRGENRITLLQSHYVEKILNHFGYIDSKPSPTPYDPSLLLRKNKRIATNQLEYSQIIGSLMYLASATRPDISFVVSKLSRFTSNPGDDHWRALKRVMRCLKGTMELGLHYTVYPAVLEGYSDSNWISDVDEIVNNQIWLYQYRR

SEQ ID NO: 137800 - protein, 397 aa, Oryza sativa
  Clone ID: PAT_MRT4530_39249C.1.pep
MASVYSWLRLMVAVDRELLPHPSPAAAAAPFRLAPLLPLAAVLELVLAFALLAVVFVFVSVSSRPTDSPPSAPTPRRSHGRIESIDRPRSPRRASNRATATQASAGARAAARRRGGVESAAMIRVVSPPPPSTVQLRGGGGTPGPSSSSAVCRFWGSRRGSRVAATSSWGWGKSRRRRRAAISCCSAEEGEGPRVATPSAPPAPSEGSIQLYSQIERVITEAAKQSREGWGSTGDWTEIEGAWVLKPKSQEPSFVVHFVGGIFVGAAPQITYRFFLERLADKGALVIATPYASGFDHFFIADEVQFKFDRCLRNMVEPVNDLPTFGVGHSLGSVIHLLIGSRYAVQRSGNILMAFNNKEASLAVPLFSPVIVPMTQSFGPIFSQLVGPLLASLQFTL

SEQ ID NO: 137801 - protein, 282 aa, Oryza sativa
  unsure (1)..(282): unsure at all Xaa locations
  Clone ID: PAT_MRT4530_3924C.1.pep
FKRVYCVSRGEGARGPGPREWGPRGSLTVHGGPGAPGLTPAGAVGPTRQPHPRARAADGRAPRGSRSARPKAATPARPAGGGXARAPMVAGGGHGHVGAAAERGEGKGETRRXRSTAHPRSTATTKRQPGAEEGGGAARVDGVGGAPAVGERNGGVDEVGEDAAKPKEAAPRWEVVRGDDGGGPELGGDGGERERRRELDSGEEEGRREAETDGGGRGRGGGSGGRKGMTGGPHPSARVAGGPARQRRARGERPGGPRGEEREGEGDGPSRPKREREGKGTF

SEQ ID NO: 137802 - protein, 52 aa, Oryza sativa
  Clone ID: PAT_MRT4530_39250C.1.pep
FVCEEQATSGIQYHMFLVLTMDLPAWIYLNDTVYTMDLRVIIIALCHSSVLT

SEQ ID NO: 137803 - protein, 232 aa, Oryza sativa
  Clone ID: PAT_MRT4530_39251C.1.pep
SAPPPPASRSAAASFTSNSATGTAPATATPASSSASPTGSAPILIPSWALRRRPRRSASMPASWSRSSPWPRATASSSSSSASPTMPATAASTAATASFSRGGATVSMCASAASSPAAATSPRSSLPWILPCMSTWRATRTSTRRRCSPWAPPAAAAAGRRSSCLSWTATCEPRRSRRRKEDGTPSARLTWHPATTSGGRGCRCPTRSPPSSGAPCTGSVSRATTGKTAPTV

SEQ ID NO: 137804 - protein, 117 aa, Oryza sativa
  Clone ID: PAT_MRT4530_39252C.1.pep
MAATEAAATPATAPPQNSSLYVGDLDREATEASLYELFSQVGPVASIRVCRDAVTRRSLGYAYVNYNSALDSAAAERALEALNYTEVNGKPIRIMWSHRDPQFRKSGVGNIFIKKPD

SEQ ID NO: 137805 - protein, 36 aa, Oryza sativa
  Clone ID: PAT_MRT4530_39253C.1.pep
MEMAPAGRGWRPRRRRPLPPCLRTPSSPPHRCHASL

SEQ ID NO: 137806 - protein, 1867 aa, Oryza sativa
  Clone ID: PAT_MRT4530_39254C.1.pep
MASSSSAAAAAAGAGAGAVALGRLVDRTRVPDPTLQRHAVAALFRHLLTSVPPPLPSAAHDALSSLLASPHPAVAAHAAASVARLAASRADLLSPELALPLLIAPLSASPSPRLASCFVKAVAALVSCALRSGSAASRFPPHDHPFVQALASGADGARAELQRQAARLVAEGVHGVVGFLRPFVMFAAVRKGDTAFVKDLIGALAAAAVAAARPDSAVPVLKLLAECLLHFGRGDGEEVRLWLSSVECLVDAYVVLLRKFAHAQMATYDAQANSVELIEMLLSQCSLHHQFMGNTSVVLGLSKHLFLAQKDLGLCYLPEISVVLSSLAFILSGLEFEHEQLSGLKLLAFLIEWRHENALRTNEAVHHFSEEIVCVLPVINLVISPSKSVKSVASHVLSRFHVLVLDLLASCSSEQQDSSMVHHISKPTSILPKLVHHLWSQSSSSGFIFTKYITSRGLAESAGNSTEPNYWTHQINEYLSALRKEKLSLDSLSSKKIQSVAISSLLSSAVSVLVMHPKIGTSAAQSLALLGATDPKLGMPLLVLILFYTKVLYSNNNCDANILLSLLESLPSLAVHGFVLPLSLQLISSMLKKDVKSVLYPIAVRLLCKMWTVTDWAFQNLQGTLDPENFSNSVDDREVFTSIAASVRDVCKQNPDRGVDLILSVSACIESRDSVVQALGLESLSYLCEEDVVDFYTAWKVISKQLLDFSIDPTVSHGLCILLRWGAMDSEAYPGTSKHLIQILWSIGTYREKNVDPLWVKARGTAFQSLSHYKISLIKDAIPDFWRINYECFTTERNLEVLKAMDNFQAEIINFEHINRRRLTTDKITTVHKFEKLLDAFPQAVFKEIGTLSCCMFNTAASGFNSLQSQIVGKSAHHRFPGAALLTLNFTPKDILHEGKSKDLPRVHAAYEQALVEMAESMYISRNMVVALLALHSWKSFVSNWMQAVIACLDTKESSKLNKASKAADDIFKILCKCVPVSTPSVVVSIALAIGALCLVVPPTAHLVISSASDFLLRWLFQYEHEHQQWSTALSLGLISNCFHPTDKRSKLQVINGLLEVISKTESYLVKGACGLGLGYCCQALLARADNAADSELEATTQLTERASVEEILHTLTTSLVQLCPFSCYSLKKLSICGIKSLEGMEEKYVSLEDDPWAVAGLVLGLGNSVVSLYRLGAYEAIIEVKNILISWIPDVDSSSLLFDEEDSASLCMGSCLALPSVLAFCQKVELLNDDLDALFNRYTSLATNLLSLKKSGTIFQNLLMAICIGAGSFLSSILNDGVHAMKFTDVKDLLDTLKHIYTHPYPPLVHLGGMLGTVNAFGAGAGDLTGICRQPTNSQIKHEKESSLVRGPVLTSSVGETLSTSMIQEIFLLAKDAEDDHIKDYAAWAISFLRSRWLSKNQIIFDDDCSQRNSSDSNQSTSFSDESLVWNLSQWLRDLNFEKPDSMVSTSTVATVLRCLSKAPRLPSIDWGVIVRRCMNVEVHIPDMLTNHHDPKLLREECLYISLAHASHISPLLHFIDDLTDLSRFRRLEINLQSILLQYLSTLMKLFSLSRLDKLSEDLTEYLYSPTSSYLDYSSEQRSMLRTSFWKGIRECLVEDVSEESSGFSCIKKCIQSLSPLLSLHKDGQPEFIEEWSAAIKCLTVAQKGLLGDMLQVEISSSFNELEHIDVAKKIIIRARMCSSGCGSVDELGNIKTTILSTRLDGVWWNVLVEVAGALYYADSRMKKQWLLDALDIGCVTAHPSTVLHFVGLLCGSCCIYMPLLIVNPTNVLSDLPVTLPSFLSSSIWDDLRNSVADKLWLLTARIYTWAEQLTHSVGLARHDHIHGSEAEMAIFLANILRCTCIAVEDHLAVEKKLKLANLEAL

SEQ ID NO: 137807 - protein, 40 aa, Oryza sativa
  Clone ID: PAT_MRT4530_39255C.1.pep
MTTTSGRTPSPRLRYNELLQPMLAVVATLRTIKRFQSSTP

SEQ ID NO: 137808 - protein, 77 aa, Oryza sativa
  Clone ID: PAT_MRT4530_39256C.1.pep
QLDETTKSCQATVVGQTSSRLVSQTNLQLTSQFSSVQADCRKQLQLHRSVLSTWIRLKLKLKLCCHLNVAIHMWYLS

SEQ ID NO: 137809 - protein, 59 aa, Oryza sativa
  unsure (1)..(59): unsure at all Xaa locations
  Clone ID: PAT_MRT4530_39257C.1.pep
FLDDKVTPIKGXIKXSHFYKKDTSTPVEXRGTNNKPRDPQKLVSTEGGTQHPGSMGXDR

SEQ ID NO: 137810 - protein, 120 aa, Oryza sativa
  Clone ID: PAT_MRT4530_39258C.1.pep
RLPLLMLYVAFRPPVFGSVTLRSSSRLLATSGSLTMFLRTEAFTSIWRWSSPCASPQSANSPYRSPPVIRFSSPHSCPCSHSLIADLTFLFRSFQLSVCVMCLTYNDMCFAPVFVLPCIV

SEQ ID NO: 137811 - protein, 84 aa, Oryza sativa
  Clone ID: PAT_MRT4530_39259C.1.pep
ALVISQRIRSGKTLFILLAVFLKTLVRSVRSSYSLIFMILLHVPSNMSPSLWDFLAFLKMPLSCLSTVAAYCDIVILVPFFPAI

SEQ ID NO: 137812 - protein, 74 aa, Oryza sativa
  Clone ID: PAT_MRT4530_3925C.1.pep
RTNQLASAATAALYVIFPRLQPLSVLSDPAWVAPSTPMCRLCEEAIGPGGGGGLAPQRGGDDGLAPRRRRPMRR

SEQ ID NO: 137813 - protein, 54 aa, Oryza sativa
  Clone ID: PAT_MRT4530_39260C.1.pep
SIKMLEGIIATSYSEGDKFYIDPMKLLPLSRFLPQPKGQSQGGGRGGGRGGGRG

SEQ ID NO: 137814 - protein, 106 aa, Oryza sativa
  Clone ID: PAT_MRT4530_39261C.1.pep
QKVFSPTNPLFTRSLLANKPSQSKKPLFNGSNNSRQGLPPMFGCSPQVNVPLQLTPRDPALFLFHLISLQLLGKGGLVHPKFFCVPPIFIKNISAPRFMFLNKKKM

SEQ ID NO: 137815 - protein, 305 aa, Oryza sativa
  Clone ID: PAT_MRT4530_39262C.1.pep
MDEGARCDTAVELCFLRPLSKDQLPNLVLLVFGKTDLQGEFATAVRSEWRFPSIPISMPYALPQRFHIVHMDIKYIICLFIHILQISRKASRKDPSGALSSWNTSTHFCWWKGVMCTTARPFRVSTLNLSAQSLAGEITSSLANLTFLRALDLSSNRFFGRFPLLNHLQHLGFLYMNDNSLDGIISDTLTNCSKLTQIDLSNNQLQGAIPPRIGSLEYLNLGNNSLTGIIPATIGNLVKFGYLNLGMNNLTGIIPATVENLTLLTVLRLEYNQFEGKIPDGVWQLANLTYLLLGQNRLSGGFHRP

SEQ ID NO: 137816 - protein, 251 aa, Oryza sativa
  Clone ID: PAT_MRT4530_39263C.1.pep
VSPSSHMGQRHRATAAGLTARRLAVSPSSHRRRSGDSPFASALTIPASTACHSAADAGGLAAVPLLQTTRPNAWRRRRGRHGGDRQDESKILIREGRIGEGTGHRLRRSSRVEGRSLVATGESPDARSSSWRHPLLVSSVPHQENGHFITLSENQLYTCRWLLLSVDVIPEQKPEEGDTLTDRIGMADTRRLAAAVVRRVFFPGPEVAVVQSMYPFRPSGHTAERGCLLMATVYDVDDDATCSEEVGWAAC

SEQ ID NO: 137817 - protein, 395 aa, Oryza sativa
  Clone ID: PAT_MRT4530_39264C.1.pep
MEGGGGGGHGHHGGGGGGHGHHGGIGGGEAQIKGTLTHGGRYVQYNVYGNLFEVSSKYVPPIRPVGRGACGIICAVVNAQTRQEVAIKKIGNAFDNQIDAKRTLREIKLLRHMDHDNALVVISIKDIIRPPRRENFNDVYIVYELMDTDLHHLLRSNQPLTDDHCQYFLYQVLRGLKYVHSANVLHRDLRPSNLLLNAKCDLKIGDFGLARTTNETDFMMEYVVTRWYRAPELLLNCSEYTAAIDIWSVGCILGEIVTREPLFPGKDYVHQLRLITELIGSPDDSSLGFLRSDNARRYVRSLPQYPKQQFRARFPTMSSGAMDLLERMLVFDPSKRITVDEALCHPYLASLHEIYDEPVCPAPFSFDFEQPSLTEEDIKEIIWREALKFNPEPIH

SEQ ID NO: 137818 - protein, 163 aa, Oryza sativa
  unsure (1)..(163): unsure at all Xaa locations
  Clone ID: PAT_MRT4530_39265C.1.pep
YHHATRRGNDDNERARXETNGEKTTSAAILGXRRDAAGTRLGDAEPRTKTMTGLRHLTERGRRTRTAXRRDERHGDRERREDGDDDDRGQRGGDVGSRQWLDGDEDGVEHAVANPTTEAAPRDDVPGXRRDVDVEDEXDDDDGQWRGWDGGKAMPRMTLPLRF

SEQ ID NO: 137819 - protein, 46 aa, Oryza sativa
  Clone ID: PAT_MRT4530_39266C.1.pep
KLLQLYQTKQGKPILLSAPKMALVRLEDHMTLVLNSSKSEQLIKQA

SEQ ID NO: 137820 - protein, 50 aa, Oryza sativa
  Clone ID: PAT_MRT4530_39267C.1.pep
MRNGANGGAKAGVARCSGSGMMGLVVEEEERPELRRKQCDAESGGGGHQP

SEQ ID NO: 137821 - protein, 1096 aa, Oryza sativa
  unsure (1)..(1096): unsure at all Xaa locations
  Clone ID: PAT_MRT4530_39268C.1.pep
MAGFADALRPDKFTGVHFKRWQIRVTLWLTAMKCFWVSTGKPEGVLTAEQQKQFEEATTLFVGCILSVLGDRLVEVYMHMTDAKELWDALNTKFGATDASNDLYIMEQFHDYKMADNRSVVEQAHEIQTMAKELELLKCVLPDKFVAGCIIAKLPPSWRSFGTALKHKRQEYSVEGLIASLDVEEKAREKDAASKGDGGQSSANVVHKAQNKSKGKYKAQQTTNFKKQKKNNNNPNQDERTCFVCGQVGHLARKCPQRKGMKAPAGQTSKSANVTIGNTGDGSGYGNLPTVFSVNQSTNWWVDTGANVARGSTVLMGNGSHASVHGVGTVDLKFTSGKIVQLKNVQHVPSIDRNLVSGSRLTRDGFKLVFESNKVVVSKHGYFIGKGYECGGLFRFSLSDFCNKSVNHICGSVDDEANVWHSRLCHINFGLMSRLSSMCLIPKFSIVKGSKCHSCVQSKQPRKPHKAAEERNLAPLELLHSDLCEMNGVLTKGGKRYFMTLIDDATRFCYVYLLKTKDEALDYFKIYKAEVENQLDRKIKRLRSDRGGEFFSNEFNLFCEEHGIIHERTPPYSPESNGIAERKNRTLTDLVNAMLDTAGLPKAWWGEALLTSNHVPDMHVGTIMESRDATFFESFFPMKDTHSGSNQPSEIIPSSITPPEQTEHTHELVSEEDVSEAPRRSKRQRTAKSFGDDFTVYLVDDTPKSISEAYASPDADYWKEAVRSEMDSIIANGTWEVTERPYGCKPVGCKWVFKKKLRPDGTIEKYKARLVAKGYTQKEGEDFFDTYSPVARLTTIRVLLSLAASHGLLVHQMDVKTAFLNGELDEEIYMDQPDGFVVEGQEGKVCKLLKSLYGLKQAPKQWHEKFDKTLTSAGFAVNEADKCVYYRHGGGEGVILCLYVDDILIFGTNLEVINEVKSFLSQNFDMKDLGVADVILNIKLIRGENGITLLQSHYVEKILNRFGYIDSKPSPTPYDPSLLLRKNKRIARNQLEYSQIIGSLMYLASATRPDISFAVSKLSRFTSNPGDDHWRALERVMRYLKGTVELGLHYXGILRYWRVIVILTGSLMWMRSKPLVDMFSHWVVVLFHGGLANRQF

SEQ ID NO: 137822 - protein, 123 aa, Oryza sativa
  Clone ID: PAT_MRT4530_39269C.1.pep
MGKLEVISEADRMNVFPGIQCTSPWNYPVKDIQSYENTTNNVCYAETQANSNNKKGHMELTKDFTLALLRSMLLPAYAVCPLLSKPAAIPGAAAMGRRELGNVSLLEMDMAKGREPGIDDYML

SEQ ID NO: 137823 - protein, 1794 aa, Oryza sativa
  unsure (1)..(1794): unsure at all Xaa locations
  Clone ID: PAT_MRT4530_3926C.1.pep
MSYYVDPRTSVPQYPLYLVYGDPPLTMVPQVRGLGAQGSTTIXSSLVNNSVDPSVNLGVPTTTMLVWTQVGEIVFPVYTTVPVSTGPSMTGSENVVAITPDDPMSKDPPAVAENGTSTTSKPEEDPSVAKSCPSDKNHELTRTTSEATRSWCPIHKTRKHTLQACWVFLNAQADIRACKESGIXRTSPTHDVYCPIHKTKNHDLSSCKILLKAMKTXPPKVQHSQISPRDVNKERGATVISDRFVGVIDIDPHEPSVLHSLDDQGSSSTSTPRDVFAIGGTSASARADAEAENQVVTPAQHIGGINAILRETPYDPVLNDDLARWTERLRESVTNLSNAFEEAAATAHPKXPPAGGANGEPPEXRASPQQATPPPRGTSDLRDHLNGCREAXRAQDNENRSRHRLSSRRRENEERGGHPSENRDRDNRHNRHERDDREQRMPGDIGRGRRHNDDDDGDXRRDNNGGRRQDSREPRRHPRNRTPEPSDSSSSSSSSSSSSSDRHPRRTDDRRQPTAPSAGYRAFNRSLRDVRWPERFXPGATEKYDGSTDPEEFLQVYSTXNNNIIQYKPIGFNECRNTNPEITDASVIRAFKTGVRNRYTTQELATRRITTTRRFFEIVDRCAHADDALXRKNDKPKLGGEKKPAKDALEPSKKKSSKSGKRKAQAEVLASEYKRPPKHPDPQGSDTKRIWCPIHKSDKHSLDDCLVFKKSLEKQLALEKGKRVRVVEKATEATTQDLDSAYLDSDLHVSHIFGGSTAYYSKREYKKMEREVCSTWQGAAPKMKWSEQKIEFSDEDHPKAAIIPGRYPIVVEPTIRNIKVARVLIDGGSSINLFFACTLDVMGIPRSELTPTNQPFHGITPQSSSKPLGKITLPHITFDVAEFDTAYNAIIGRNALAKFMAASHYAYQVLKMPGPKGTITIQGNAKLAVQCDKRSLDMVEHTASPPATAEPPKKPSDMPGVPREVIEYKLMVRPNAKPVKQKLXRFAPDRKQAIXEELDKLLKAGFIREVLHPEWLANPVMVRKANGKWRMCVDFTDLNKACPXKDHFPLPRIDQLVDLTVGCMAKEDEEKTAFITPFSVFCYVKMPFGLITAGNTLQRTVQGALNDQLGNNVEAYIDDIVVKTKTGDSLINDLRETYNLXRYRLILNLEKCTFGVPSGKLLGFLVSGRGIEANPEKIKAIENMKSPTRLKEVQKLTGCMAALSRFVTRMGERGQTFFALLKKQDKFVWTQXAKEAFIALKRYLSNPPVLVAPQPNEELFLYIAATPYSMSTVIVVEREKVQRPVYYVSKALHDAKTRYPQIQKLLYAVIMTSKKLRHYLQAHRVTVVSSFPLGEVVRNKDVAGRIAKWVVKLSQFDVHFVPRTAIKSQVLDSQTDNEMWTMAFDGALNSQGAGAGFILTSPSGDQFKHAIHLNFRATNNTAEYEGLLAGIRAAAALGVKRLIMKGDSELVANQVHKDYKYSSPELSKYLAEVRKLEKRFDGIEVXHVYRKDNIEPDNLARRASRREPLEPDTFLDVLTKPSMKEANDENSDALPEDNAEAKKITRQAKIYCMISNDLYKKAPNRVLLKCVSSDDGKHLLLDIHEGICGSLATGRTLVGKAFRQGFFWPTALKEACDMVQRCEACQFYSKHTKLPAQALQTIPLTWPFSCWGLDILGTFPRGQGSYKFLFVAIDKFTKWIEATPMGEIKADNTIKFIKGIFCRYGLPHRIITNNGSQFISANFQDYYIGLGVKICFALVSHPQSNGQVERANSIVLQGIKTRVYDRLMSHDKKWVEELPSVLWAVRTTPTTSNK

SEQ ID NO: 137824 - protein, 1177 aa, Oryza sativa
  Clone ID: PAT_MRT4530_39270C.1.pep
MANGDGKPREDDVGGRTSFGFTGVDCTMAGFADALRPDKFTGVHFKRWQIRVTLWLIAMKCFWVSTGKSKGILTADQQKQFEEATTLFVGCILSVLGYRLVEVYMHMTDAKELWDALNTKFGATDASNDLYIIEQFHDYKMADNRSVVKQAHEIQTMAKELELLKCVLLNKFVAGCIIAKLPPSWRSFGTALKHKRQEYSVEGLIASFDVEEKAREKDAPSKGDGGKCPQRKGMKAPAGQTSKSANVARGSTVLMGNGSHASVHGVGTVDLKFTSGKIVQLKNVQHVSSIDRNLISGSRLTRDGFKLVFESNKVVMSKHGYFIGKGYECGGLFRFSLSDFCNKSVNHICGSVDDEANVWHSRLCHINFGLMSRFSSMCLIPKFSIVKGSKCHSYVQSKQPRKPHKAAEERNLAPLELLHSDLCEMNGVLTKGGKRYFMTLIDDATRFCYVYLLKTKDEALDYFKIYKAEVENQLDRKIKRLRSDRGGEFFSNEFDLFCEEHGIIHERMPPYSPESNGIVERKNRTLTDLVNAMLDTAGLPKAWWGEALLTSNHVLNRVPNRNKDKTPYEIWIGRKPSLSYLCTWRCLAKVNVPITKKRKLGPKTVDCVFLGYAHHSIAYRFLIVKSEVPDMHVGTIMESRDATFFESFFPMKDTHSGSSQPSEIILSSITPPEQTKHTHEHVSEEDVSEAPRRSKRQRTAKSFGNDFTVYHVDDTPKSISEAYASPDADNWKEAVCSEMDSIIANWTWEVTEQPYGYKPVGCKWVFKKKLRPDGTIEKYKARLVAKGYTQKEGEDFFDTYSPVARLTTIRVLLSLAASHGLLVHQMDVKTAFLNGELDEEIYMDQPDGFVVEGQEGKVCKLLKSLYGLKQAPKQWHEKFDKTLTSAGFAVNEADKCVYYRHGGGEGVILCLYVDDILIFGTNLEVINEVKSFLSQNFDMKDLGVADVILNIKLIRGENEITLLQSHYVEKILNRFGYIDSKPSPTPYDPSLLLRKNKRIARNQLKYSQIIGSLMYLASATRADISFAVSKLSRFTSNPGDDHWRALERVIRYLKGTMKLGLHYTGYPAVLEGYSDSNWISDVDEIKATSGYVFTLGGGAVSCRSCKQTILTRSTMEAELTALDTATVETEWLRDLLMDLPIVEKPVSAILMNCDNQMVTVKVNSSKDNMKSSRHVKR

SEQ ID NO: 137825 - protein, 51 aa, Oryza sativa
  Clone ID: PAT_MRT4530_39271C.1.pep
VLSVLFVTYHSQMMWILRTALNCSYIISTSEFKVFVYSFMCHSKLTECYVC

SEQ ID NO: 137826 - protein, 1432 aa, Oryza sativa
  Clone ID: PAT_MRT4530_39272C.1.pep
MAKTMEQEWREAKSRASALPGQRRLRRRVQGEDYLPKEDDFALASSPPRGPKKPFRPIKPRGNRAGDRQMAHQGPMSPYIIMYPCKCPFHKDYSIPLAGVHRRSGEQVSGTSAFDVLHREKAAIRHCDFTMAGFADALRPDKFTGVHFKRWQIRVTLWLTAMKCFWVSTGKPEGVLTAEQQKQFEEATTLFVGCILSVLGDRLVEVYMHMIDAKELWDALNTKFGATDASNDLYIMEQFHDYKMADNHSVVEQAHEIQTMAKELELLKCVLPDKFVAGCIIAKLPPSWRSFGTALKHKRQEYSVEGLIASLDVEEKAREKDAASKGDGGQSSANVVHKAQNKSKGKYKAQQTTNFKKQKKNNNNPNQDERTCFVCGQVGHLARKCPQRKGMKAPAEQTSKSANVTIGNTGDGSGYGNLPTVFSVNQSTNWWVDTGANVHVCADISLFSSYQVARGSTVLMGNGSHASVHGVGTVDLKFTSGKIVQLKNVQHVPSIDRNLISGSRLTRDGFKLVFESNKVVVSKHGYFIGKGYECGGLFRFSLSDFCNKSVNHTCGSVDDEANVWHSRLCHINFGLMSRLSSMCLIPKFSIVKGSKCHSCVQSKQPRKPHKAAEERNLAPLELLHSDLCEMNGVLTKGGKRYFMTLIDDATRFCYVYLLKTKDEALDYFKIYKAEVENQLDRKIKRLRSDRGGEFFSNEFDLFCEEHGIIHERTPPYSPESNGIAERKNRTLTDLVNAMLDTAGLPKAWWGEALLTSNHVLNRVPNRNKDKTPYEIWIGRKPSLSYLRTWGCLVKVNVPITKKRKLGPKTVDCVFLGYAHHSIAYRFLIVKSEVPDMHVGTIMESRDATFFESFFPMKDTHSGSNQPSEIIPSSITPPEQTEYTHELVSEEDVSEAPRRSKRQRTAKSFGDDFTVYLVDDTPKSISEAYASPDADYWKEAVRSEMDSIIANGTWEVTERPYGCKPVGCKWVFKKKLRPDGTIEKYKARLVAKGYTQKEGEDFFDTYSPVARLTTIRVLLSLAASHGLLVHQMDVKTAFLNGELDEEIYMDQPDGFVVEGQEGKVCKLLKSLYGLKQAPKQWHEKFDKTLTSAGFGVNEADKCVYYRHGGGEGVILCLYVDDILIFGTNLEVINEVKSFLSQNFDMKDLGVADVILNIKLIRGENGITLLQSHYMEKILNRFGYIDSKPSPTPYDPRLLLRKNKRIARNQLEYSQIIGSLMYLASATRPDISFAVSKLSRFTSNPGDDHWRALERVMRYLKGTVELGLHYTGYPAVLEGYSDSNWISDVDEIKATSGYVFTLGGGAVSWRSCKQTILTRSTMEAELTALDTATVEAEWLRDLLMDLPVVEKPVPAILMNCDNQTIIVKVNSSKDNMKSSRHVKRRLKSVRKLRNSGLITLDYIQTARNLADPFTKGLSRNVIDNASKEMGLRPM

SEQ ID NO: 137827 - protein, 807 aa, Oryza sativa
  Clone ID: PAT_MRT4530_39273C.1.pep
MSNQADKKLLLRLLPQHYHHHLKPKANDYSIPLAGVHRRSGEQVSRTFAFDVLHREKAAIRHCDFTMAGFSDALRPDKFTGVHFKRWQIRVTLWLTAMKCFWVSTGKPEGVLTAEQQKQFEEATTLFVGCILSVLGDRLVEVYMHMTDAKELWDALNTKFGATDASNDLYIMEQFHDYKMADNRSVVEQAHEIQTMAKELELLKCVLPDKFVAGCIIAKLPPSWRSFGTALKHKRQEYSVEGLIASLDVEEKAREKDAASKGDGGQSSANVVHKAQNKSKGKYKAQQTTNFKKQKKNKNNPNQDERTCFVCGQVGHLARKCPQRKGMKAPAGQTSKSANVTIGNTGDGSGYGNLPTVARGSTVLMGNGSHASVHGVGTVYLKFTSGKIVQLKNVQHVPSIDRNLVSGSRLTRDGFKLVFESNKVVVSKHGYFIGKGYECGCLFRFSLSDFCNKSVNHICGSVDDEANVWHSHYWKEAVHSEMDSIIANGTWEVTERPYGCKPVGCKWVFKKKLRPDDTIEKYKARLVAKGYTQKEGEDFFDTYSPVARLTTIRVLLSLAASHGLLVHQMDVKTAFLNGELDEEIYMDQPDGFVVEGFAVNEADKCVYYRHGGGEGVILCLYVDDILIFGTNLEVINESHYVEKILNRFGYIDSKPSPTPYDPSLLLRKNKRIARNQLEYSQIIGSLMYLASATRPDISFAVSKLSRFTSNPGDDHWRALERVMRYLKDYSIPLVGVHWRSGEQVSGTSAFDVLHREKAAIRFLGSASRDCSLFVRDGSSSSPLACFAPSSTLAIASSSSWMTLLMGL

SEQ ID NO: 137828 - protein, 70 aa, Oryza sativa
  Clone ID: PAT_MRT4530_39274C.1.pep
VFKDTRAATRAIYESLGRWIMSSNLFYYFIRAWRATFNTNRGWRRTTFCLWTVQKDYVPLVDKHGLARGY

SEQ ID NO: 137829 - protein, 53 aa, Oryza sativa
  Clone ID: PAT_MRT4530_39275C.1.pep
RQAMLFTLLIFEYYREKFHRRTHASPDIGLTMQMDTGLCIHMRLKISEHPNET

SEQ ID NO: 137830 - protein, 497 aa, Oryza sativa
  Clone ID: PAT_MRT4530_39276C.1.pep
MGTRRRRNPVIFLFLWFVMAFELCASLNHEGVALMRFKEMIDADPFDALLDWDEGNASPCSWFGVECSDDGRVVALNLPNLGLKGMLPQEIGTLAHMRSIILHNNSFYGIIPTEMKYLHELKVLDLGYNTFSGPFPSELRNILSLKFLFLEGNKLSGSLPIEYELASMDQTSLNKISTERKTSTVVPFSPTASGQLHTATLGGITKFKRSELETACEGFSNIIDTLPRFTLYKGTLPCGAEIAAVSTLVTYASGWTTVAEAQFKDKVEVLSKVSHKNLMNLVGYCEDEEPFTRMMVFEYVSNGTLFEHLHVKEADQLDWQSCLRIAMGVMYCLNYMQQLNPPVLLRDLSTSCIYLTEDNAAKVSDISFWGDKKEDEKSEASDEHITVYKFALLLLETISGRRPYSDDYGLLILWAHRYLIGDKPLMDMVDPTLKSVPEEQVRELTKLVKLCLSEDPMERPTVAEVTAWMQEITGISEEEAIPKNSPLWWAELEIITS

SEQ ID NO: 137831 - protein, 1061 aa, Oryza sativa
  unsure (1)..(1061): unsure at all Xaa locations
  Clone ID: PAT_MRT4530_39277C.1.pep
NASGVLGDRLXEVYMHMTDAKELWDALNTKFGATDASNDLYIMEEFHDYRMVDNRSVVEQAHEIQTMAKELELLKSFGTALKHKRQEYSIEGLIASLDVEEKAREKDAASKGDGGQSSANVVHKAQNKSKGKYKAQQTTNFKKQKKNNNNPNQDERTCFVCGQPSHLARKCPQRKGMKAPAGQTSKSANVTIGNTGDGSGYGNLPTVFSVNQSTNWWVDTGANVARGSTVLMGNGSHAPVHGVGTVDLKFTSGKIVQLKNVQHVPSIDRNLVSGSRLTRDGFKLVFESNKVVVSKHGYFIGKGYECGGLFRFSLSDFCNKSVNHICGSVDDEANVWHSRLCHINFGLMSRLSSMCLIPKFSIVKGSKCHSCVQSKQPRKPHKAAEERNLAPVELLHSDLCEINGVLTKGGKRYFMTLIDDATRFCYVYLLKTKDEALDYFKIYKAEVENQLNRKIKRLRTDRGREFFSNEFDLFREEHGIIHKRTPPYSHESNGIAERKNRTLTDLVSGTVTXAGLPKAWWGEALLTSNHVLNRVPNRNKDKTPYEISIGRKPSLSYLRTWGCLAKVNVPITKKRKLGPKTVDRVFLGYAHHNIAYRFLIVKSEVPDMHVGTIMESRDATFFESFFPMKDTHSSSSRPSKIIYSSISPPEQTEHTHEHVTEEDDSEAPRRSKRQRTAKSFGDDFTVYLVDXDTPMSILEAYASPDADYWKEAVPSEMDSIIANGTWEVTERPYGCKPLGCKWVFKKKLRPDGTIEKYKARLVAKGYTQKEGEDFFDTYSPVARLTTIRVLLSLAASHGLLVHQMDVKTTFLNGELDEEIYMDQPDGFVVEGQEGKVINEVKSFLSQNFDMKDLGVADVILNIKLIRGENGITLLQSHYVEKILNRFGYIDSKPSPAPYDPSLLLRKNKRIARNQLEYSQIIGSLMYLASATRPDISFAVSKLSRFTSNLGDDHWRALERVMRYLKGTMALGLHYTGYPAILEGYSDSNWISDVDEIKATSGYVFTLGGGAVSWRSCKQTILTRSTMEAELTALHTATVEAEWLRDLLMDLPIVEKMVPAIF

SEQ ID NO: 137832 - protein, 49 aa, Oryza sativa
  Clone ID: PAT_MRT4530_39278C.1.pep
PLTGGPTCRPPPAPGMPFHTKVAACPPLTKKVSINLSLSTQVSYVCVDN

SEQ ID NO: 137833 - protein, 1377 aa, Oryza sativa
  Clone ID: PAT_MRT4530_39279C.1.pep
MLLLSAVIRGGRCIIAGDCDADRAGSEIDVHDPDAEIWVTRDVQRSSEADVQRRGCAVLRISDRRQSRGGPTAGGGVRRAGGWGGAIWMGRTERWCSRTGTGTATEDRDEEAEAEAEGERRRRRPPIPSPSSYRCGFSHKGYPFYCPWAEPHSEHSVQPIEKEASSRIKLTSRSHLRRTWALPASTVRWPPLPSWRQAPGLPRFIKFDFNIAQTYPEADYSISLAGVHRRSGEQVSGTSAFDVLHREKAAIRVTLWLTAMKCFWVSTGKPEGVLTAEQQKQFEEATTLFVGCILSVLGDRLVEVYMHMTDAKELWDALNTKFGATDASNDLYIMEQFHDYKMADNRSVVEQAHEIQTMAKELELLKCVLLDKFVAGCIIAKLPPSWRSFGTALKHKRQEYSVEGLIASLDVEEKAREKDAASKGDGGQSSSNVVHKAQNKSKGKYKAQQTTNFKKQKKNNNNPNQDERTCFVCGQVGHLARKCPQRKGMKAPAGQTSKSANVTIGNTGDGSGYGNLPTVARGSTVLMGNGSHASVHGVGTVDLKFTSGKIVQLKNVQHVPSIDRNLVSCSRLTRDRFKLVFESNKVVVSKHGYFIGKGYECGGLFRFSLSDFCNKSVNHICGSVDDEANVWHSRLCHINFGLMSRLSSMCLIPKFSIVKGSKCHSCVQSKQPRKPHKAAEERNLAPLELLHSDLCEMNGVLTKGGKRYFMTLIDDATRFCYVYLLKTKDEALDYFKIYKAEVENQLDRKIKRLRSDRGGEFFSNKFDLFCEEHGIIHERTPPYSPESNGIAERKNRTLSNLVNAMLDTAGLPKACSITPPEQTEHTHEHITEEDDSEAPRRSKRQRTAKSFGDDFTVYLVDDTPKSISEAYASPNADYWKEAVRSEIDSIIANGTWEVTERPYGCKPVGCKWVFKKKLRPDSTIEKYKARLVAKGYTHKEGEDFFDTYSPVARLTPIRVLLFLAASHGFLVHQMDVKTAFLNGQLDEEIYMDQPDGFVVEGQEGKVSKLLKSLYGLKQAPKQWHEKFDKTLTSAIFAVNEANKCVYYHHGGGEGVILCLYVDDILIFGTKLEVINEVKSFLSQNFDMKDLGVADVILNIKLIRGENGITLLQSHYVEKILNRFGYIDSKPSPTLYDPSLFLRKNKRIARNQLEYSQIIGLLMYLASATRPDICCTMELGLHYTGYLAVLEGYSDSNWISDVDEIKATSGYVFTLGGGAVSSRSCKQTILTRSTMEAELTALDTATVEAEWLRDLLMDLPIVEKPVPAILMNCDNQTVIIKVNSSKDNMKSSRHVKRRLKSVRKLRNSGVITLDYIQTARNLADPFTKGLSRNMIDNASKEMGLRPIAFLKELTFVSLTVGRSLWRFWVNLLGSLLKT

SEQ ID NO: 137834 - protein, 63 aa, Oryza sativa
  unsure (1)..(63): unsure at all Xaa locations
  Clone ID: PAT_MRT4530_3927C.1.pep
QPSIIYKHEKNTKTSLFMFLEQQLKKNSKHSSPXIXLSLHYPLTXCNXDRAPXIQXIXWKYXY

SEQ ID NO: 137835 - protein, 1332 aa, Oryza sativa
  Clone ID: PAT_MRT4530_39280C.1.pep
MAHLATGGGGGDIGKRIGHGGGDGGDDDGDDDDYFDDFDDGDEEEGGLFRRRIVIQELFNREFVDAVMQEWCKTMSNLPAGLRQAYEMGLVSSAQMVRYLAIFARPTHSRSFSRALPGWLSRGLVGRFEQEWDLAVVNALTASCCNVMVLGLLAPCRSYGSTSRFDFQNAIEKLPNNIFEKSYPLRQFDLQKRISAFFYKAAELSLLGVVAGSIQGGLSKALSARKERSTNALGYGAFLGLYANLRYQLLCGLDQYMVRRFDVLGVAIFFSTALRLTNIQIGESSRRTWLGEEADPQYSDRLLRAYKRPVEVAGDQQDSRWFISKDAIVSGLGLLGIKQDYSIPLAGVHRRSGEQVSKTSAFDVLHREKAVSETSAFDVLHREKAAIRFLGSASRDCSLFVRDGSPSSPLACFAPSSMLVTASSSCRATGLSATSIRVTLWLTAMKCFWVSTGKPIGVLNADQQKEFDEATTLFVGCILSVLSDRLVEVYMHMTDAKELWDALNTKFGATDASNDLYIMEQFHDYKMADNRSVVKQAHEIQTMAKELELLKCVLPDKFVAGCIIAKLPPSWRGFGTALKHKRQEYSVEGLIASLDVEEKAREKDVASKGDGGQSSANVVYKAQNKSKGKYKAQQTTNFKKQKKNNNNPNLDERTCFVCGQPGHLARKCLQRKGMKAPAGQTSKSANVSIGNTGDGSGYVARGSTVLMGNGSHASVHGVSMAEVENQLNRKIKRLRTDRGREFFSNEFDLFREEHGIIHKRTPPYSHESNGIAERKNRTLTDLGLPKAWWGEALLTSNHVLNRVPNRNKDKTPYEISIGRKPSLSYLRTWGCLAKVNVPITKKRKLGPKTVDRVFLGYAHHNIAYRFLIVKSEVPDMHVGTIMESRDATFFESFFPMKDTHSSSSRPSKIIYSSISPPEQTEHTHEHVTEEDDSEAPRRSKRQRTAKSFGDDFTVYLVDDTPMSILEAYASPDADYWKEAVRSEMDFIIANGTWEVTERLYGCKLVGCKWVFKKKLRPDGTIEKYKARLVVINEVKSFLSQNFDMKDLGVADVILNIKLIRGENGITLLQSHYVEKILNRFGYIDSKPSPTPYDPSLLLRKNKRIARNQLEYSQIIGSLMYLASATRLDISFAMSKLSRFASNPGDDHWRALERVMHYLKGTMELGLHYTGYPAVLEGYSDSNWISDVDEIKATSGYVFTLGGGPVSWRSCKQTILTRSTMESELTAPDTTTVEAEWLRDLLMNLPIVEKPVPTILMKCDNQTVIVKVNSSKDNMKSSRHVKRRLKSVRKLRNSRVITLDYIQTARNLADPFTKGLSRNVIDNASKEMGLRPM

SEQ ID NO: 137836 - protein, 68 aa, Oryza sativa
  Clone ID: PAT_MRT4530_39281C.1.pep
GCTKKKKKKKKKKKKKKKKKKKKKKKKKKNKKKKLKKKKGGARFKKNQSLLPRPSNVKAFFWGHLKLN

SEQ ID NO: 137837 - protein, 174 aa, Oryza sativa
  unsure (1)..(174): unsure at all Xaa locations
  Clone ID: PAT_MRT4530_39282C.1.pep
MAESTAATAPPGDEPEAKGRSNSILLPILGILLVYLLYRYLRPRLRGLRLDRLTSRXLLRFVRPACALTSDEASAAARRIGAVSHPNLVPLRAFYVGPRGEKLLVHPFYAAGSLRRFLQEGIVDSQRWNIICKLSISIVKGLDYLHTGXLEKPIIHGXNIKTNNIXLLDANYEC

SEQ ID NO: 137838 - protein, 1286 aa, Oryza sativa
  Clone ID: PAT_MRT4530_39283C.1.pep
MAGFADALRPDKFTGVHFKRWQIRVTLWLTAMKCFWVSTGKPEGVLTAEQQKQFEEATTLFVGCILSVLGDRLVEVYMHMTDAKELWDALNTKFGATDASNDLYIMEQFHDYKMADNRSVVEQAHEIQTMAKELELLKCVLPDKFVAGCIIAKLPPSWRSFGTALKHKRQEYSVEGLIASLDVEEKAREKDAASKGDGGQSSANIVHKAQNKSKGKYKAQQTTNFKKQKKNNNNPNQDERTCFVCGQVGHLARKCPQRKGMKAPAGQTSKSANVTIGNTGDGSGYGNLPTVFSVNQSTNWWVDTGANVHVCADISLFSSYQVARGSTVLMGNGSHASVHGVGTVDLKFTSGKIVQLKNVQHVPSINRNLVSGSRLTRDGFKLVFESNKVVVSKHGYFIGKGYECGGLFRFSLSDFCNKSVNHICGSVDDEANVWHSRLCHINFGLMSRLSSMCLIPKFSIVKGSKCHSCVQSKQPRKPHKAAEERNLAPLELLHSDLCEMNGVLTKGGKRYFMTLIDDATRFCYVYLLKTKDEALDYFKIYKAEVENQLDRKIKRLRSDRGGEFFSNEFDLFCEEHGIIHERTPPYSPESNGIAERKNRTLTDLVNAMLDTAGLPKAWWGEALLTSNHVLNRVPNRNKDKTPYEIWIGRKPSLSYLRTWGCLAKVNVPITKKRKLGPKTVDCVFLGYAHHSIAYRFLIVKSEVPDMHVGTIMESRDATFFESFFPMKDTHSGSNQPSEIIPSSITPPEQTEHTHELVSEEDVSEAPRRSKRQRTAKSFGDDFTVYLVDDTPKSISEAYASPDADYWKEAVRSEMDSIIANGTWEVTEQPYGCKPVGCKWVFKKKLRPDGTIEKYKARLVAKGYTQKEGEDFFDTYSPVARLTTIRVLLSLAASHGLLVHQMDVKTAFLNGELDEEIYMDQPDGFVVEGFAVNEADKCMYYRHGGGEGVILCLYVDDILIFGTNLEVINEVKSFLSQNFDMKDLGVADVILNIKLIRGENGITLLQSHYVEKILNRFGYIDSKPSPTPYDPSLLLRKNKRIARNQLEYSQIIGSLMYLASATRPDISFAVSKLSRFTSNPGDDHWRALERVMRYLKGTVELGLHYTGYPVVLEGYSDSNWISDVDEIKATSGYVFTLVGGAVSWRSCKQTILTRSTMEAELTALDTATVEAEWLRDLLMDLPVVEKPVPAILMNCDNQTTCEKTIEVYQEIKKLRSYNVGLHPNSEKPGRSLHEGTITKCDRQCIEGDGFETHSILEGTHLCELDCWSQSMKILGESSRKLTKDLGV

SEQ ID NO: 137839 - protein, 48 aa, Oryza sativa
  Clone ID: PAT_MRT4530_39284C.1.pep
YPFSQIAMLLRDPVRYVRHICVGRLDPLCYTWFTLLNCTPSISQFKSF

SEQ ID NO: 137840 - protein, 411 aa, Oryza sativa
  Clone ID: PAT_MRT4530_39285C.1.pep
MAESTAATAPPGDEPEAKGRSNSILLPILGILLVYLLYRYLRPRLRGLRLDRLTSRLPACLRRSRTANTMLPYFAPIADRLGALQPYLAPIADRLGVGAQGGVGAGAYGRADALVKFPGGEALSVAAILEAPGEVVAKSSHSTLYRAAMRSGEAAVLLRFVRPACALTSDEASAAARRIGAVSHPNLVPLRAFYVGPRGEKLLVHPFYAAGSLRRFLQEGIVDSQRWNIICKLSISIVKGLDYLHTGLEKPIIHGNIKTNNILLDANYECKISDFGLYLLLNPAGAQEMLETSAAQGYKAPELIKMRDATRETDIYSLGVVLLEMLAQKESAKDNTPNPRDILLPVSFKNLVLERKISDAFSSDLVRQSKKSGKEKNLNAFFELATACCSPSPSLRPNTKFILKKLEEIAK

SEQ ID NO: 137841 - protein, 1381 aa, Oryza sativa
  unsure (1)..(1381): unsure at all Xaa locations
  Clone ID: PAT_MRT4530_39286C.1.pep
MARLPLCSRAARLHRRSQPRVVPAEQPVFPPPRSNDALMLVYICNVMIYLWNILNHYMPIFSTIQKPYYRRYDFTMAGFADALRPDKFTGVHFKRWQIRVTLWLTAMKCFWVSTGKPMGVLNADQQKEFDEATTLFVGCILSVLGDRLVEVYMHMTDAKELWDALNTKFGATDASNDLYIMEQFHDYKMADNRSVVEQAHEIQTTAKELELLKCVLPDKFVAGCTIAKLTPSWRGFGTALKHKRQEYSVEGLIASLDVEEKAREKDAASKGDGGQSTANVVHKAQNKSKGKYKAQQTTNFKKKNNNNNPNQDERTCFVCGQPGYLARKCPQRKGMKAPAGQTSKSANVTIGNTGDGSGYGNLPTVFSVNQSTNWWVDTGANAHVCADISLFSSXVARGSTVLMGNRSHAFVHGVGTVDLKFTSGKIVQLKNVQHVPSIDRNLVSGSRLTRDRFKLVFESXKVVVSKHGYFIGKGYECGGLFCFSLSDFCNKSMNHICGSVDDEANVWHSRLCHINFGLMSRLSSMCLIPKFSIVKGSKCHSCVQSKQPRKPHKAAEERNLAPLELLHSDLCEMNRVLTKGEKRYFMTLIDDATRFCYVYLLKTKDEALDYFKIYKAEVENQLDRKXKRLRSDRDVEFFXNEFDLFCEEHDIIHERTPPYSPESNGFAESENRTLTDLVNAMLDTAGLPKAWWGEALLTSNHVLNRVPNRNKDKTPYKIWIGRKPSLSYLRTWGCLAKVNASITKKRKLGPKTVDCVFLGYAHHSIAYRFLIVKSEVPDMHLGTIMESRYATFFESFFPMKDTHSSSSQPSEIIPSSITLPEQTEHTHEHVTEEDDSEAPRRSKRQRTAKSFGDDFTVYLVDDTPKSILEAXASPDADYWKXAVRSEMDSIIANGTWEVTERPYGCKPMGCKWVFKKKLRPDGTIEKYKARLVAKGYTQKEGEDFFDTYSPVARLTTVRMLLSLAASHGLLVHQMDVKTAFLNGELDEEIYMDQPDGFVVEGQEGKVCKLLKSLYGLTQAPKQWHEKFDKTLTSAGFAVNEADKCVYYRHGGGEGVILXLYVDDILIFGTNLEVINEVKSFLSQNFDIKDLGVADVILNIKLIRGENGITLLQSHYVEKIFNRFGYIDSKPSPTPYDPSLLLRKNKRIARNQLEYSQIIGSLMYLASATRPDISFAVSKLSQFTSNPGDDHWRAVERVMRYLKGTMELGLHYSGYPAVLEGYSDSNWISDVDEIKATSGYVFTLGGGAVSWRSCKQTILTRSTMEAELTALDTATVEAEWLCDLLMDLPIVEKPTCEKTIEVCQEIEKLRSYNVGLHPNNXKPSRSLHEGTITKCDRXCIEGDGFETHSILERTHLCKLDCWSQSMKILSESSRKLTKDLGV

SEQ ID NO: 137842 - protein, 1128 aa, Oryza sativa
  unsure (1)..(1128): unsure at all Xaa locations
  Clone ID: PAT_MRT4530_39287C.1.pep
KPGRSLHKGTITKCDRQCIEGDGFETHGLPPTLCCAVARRLLHPARWRAPAIGRAGLRNLCLRRPAPGEGDNKVFGKRFARLLPVRPRRLVFLFARVLRAFVDAGKPEGILTADQQKQFEEATTLFVGCILSVLGDRLVEVYMHMTDAKELWDALNTKFGATDASNDLYIMEQFHDYKMADNRSVVEQAHEIQTMANELELLKCVLPDKFVAGCIIAKLPPSWRSFGTALKHKRPEYSVEGLIASLDVEEKAREKDAASQGDGGQSSANVVHKAQNKSKGKYKAQQTTNFKKQKKNNINPNQDERTCFVCGQPGHLARKYPQRKGMKAPAGQTSKSANVTIGNTGDGSGYGSKCHSCVQSKQPRMPHKAAEERNLAPLELLHSDLCEMNGVLTKGGKRYFMTLIDDATRFCYVYLLKTKDEALDYFKIYKAEVENQLDRKIKWLKSDRGGEFFSNEFDLFYEEHGIIHERTPPYSPESNGIAERKNRTLTDLVNAMLDTAGLPKAWWGEALLTSNHVLNRVPNRNKDKTPYEIWIGRKPSLSYLRTWGCLAKVNVPITKKRKLGPKTVDCVFLGYAHHSIAYRFLIVKSEVPDMHVGTIMESRDATFFESFFPMKDTHSSSSQPSEVIPSSITPPEQTEHTHEHVTEEDVSEAPRRSKRQRTAKSFGDDFTVYLVDDTPKSISEAYASPNADYWKVAVRSEMDSIIANGTWEVTERPYGCKSVGCKWVFKKKFRPDGTIEKYKAWLVTMGYTQKEGEDFFETYSPIVRLTTIRVLLSLAASHGLLVHQMDVKITFLNGELDEEIYMDQPDGFVVEGQEGKVCKLLKSLYGLKQAPKQWHEKFDKTLTSAGFAVNEADKCVYYRHGGGEGVILCLYVDDILIFGTNLEVINEVKLFLSQNFDMKDLGVADVILNIKLIRGENVITLLQSHYVEKILNRFGYIDSSMELWLHYSGYPVVLEGYSDSNWISDVDEIKATSGYVFTLGGGAVSWRSCKQTILTRSTMEAELTALDTATVEAEWLRDLLMDLPIVEKPTCEKTIEVCQEIEKLRSYNVGLHPNSXKPGGSLHEGTITKCDRQCIEGDGFETHRGLPGGSGRNFRAPFHCKKFPKCCLEVPGIFARNLLAASPL

SEQ ID NO: 137843 - protein, 229 aa, Oryza sativa
  unsure (1)..(229): unsure at all Xaa locations
  Clone ID: PAT_MRT4530_39288C.1.pep
MIQAVMVMSTQGKPRLLKFYSYHAPEKHQELVRAVFQLLSARPDSVSNFVKVDAIFGPGAKLIYKHLATLYLGFVFDGSENELAVLDLVQVFVETLDRCFKNVCELDIVFNFNKLHTILDEMILGGQVIETSSEQIMRSVEEIAXAGETVKHNQPHTEVDFRAFQPLSRESFTHVMDRNFECVSRRNQIAFFSSRVAILSSREHLPFDMNMRACSHREYLCVSRMKLNM

SEQ ID NO: 137844 - protein, 175 aa, Oryza sativa
  Clone ID: PAT_MRT4530_39289C.1.pep
MAAAAGSAKEEFAAAAPGSVEGGAGRWRCRSGRSAPGGRHRARWGSATCVGEDAGGDDKEGQHLSGQCRGSWEDDGGGGGLGGGGAWLGGGRRRSVEAAPGSVEEAGSVVAAAGSVAAVAVSVAVAAREDDGGEICHIVKINFKLLETRLYRQMTKIKVIDLDNLYNFVVDHISI

SEQ ID NO: 137845 - protein, 152 aa, Oryza sativa
  unsure (1)..(152): unsure at all Xaa locations
  Clone ID: PAT_MRT4530_3928C.1.pep
RHLRRWLGRLGGSAARSRKLVGEXRRGGANGRHQHDAGDEANSPVTKATAEEQRTTSATMKKRRRPSAXRRRRCSGGQQRRRRGGRGRRRLGDHDGDLPERRRRLERRRSTAGATATTAARGYTALGLFRRREAKAKVATGRGDTGDPFIGV

SEQ ID NO: 137846 - protein, 774 aa, Oryza sativa
  Clone ID: PAT_MRT4530_39290C.1.pep
MGFFSPSNSTPAKLYLGIWYNDIPVRTVVWVANQETPVTNGTALSLTDSSDLVVSDADGRVRWTANVTGGAAGAGNGNTTAVLMNTGNLVVRSPNGTALWQSFEHPTDSFLPGMKLRMMYTTRASDRLVSWRGPGDPSPGSFSYGGDTDTLLQVFMWNGTRPVMRDGPWTGDVVDGQYQTNSTAINYLAILSRDDEVSIEFAVPAGAPHTRYALTYAGEYQLQRWSAASSAWSVLQEWPTGCGRYGHCGANGYCDNTAAPVPTCRCLAGFEPAASGGCRRAVAVRCGDGFLAVAGMKPPDKFVHVANVATLEACAAECSGNCSCLAYAYANLSSSRSRGDTTRCLVWSGDLIDTAKVGLGSGHSDTLYLRIAGLDTGGTAKSDAVKIVLPVLACILTVLCISFAWLKIKGKRRNRQKHRELILDVMSTSDDVGKRNLVQDFEFLFVKFEDIALATHNFSEAYKIGEGGFGKVYKAMIGGKEVAVKRLSKDSQQGTEEFRNEVILIAKLQHRNLVRLLGCCVERDEKLLIYEYLPNKGLDATLFDGSRKPKLDWTMRFNIIKGVARGLLYLHQDSRLTIIHRDLKASNVLMDAEMRPKIADFGMARIFCDNQQNANTRRVVGTYGYMAPEYAMEGIFSTKSDVYSFGVLLLEVITGIRRSSTSNIMDFPNLIIYAWNMWKEEKTKDLADSSIIGSCLLDEVLLCIHVALLCVQDNPNDRPLMSSTVFILENGSSSALPAPSRPAYFAYRSDESEQSRENIQNSMNTFTLTNIEGR

SEQ ID NO: 137847 - protein, 71 aa, Oryza sativa
  Clone ID: PAT_MRT4530_39291C.1.pep
MASSSSTTSSANPLQGSSVSEKLGKTNHALWNVQGHLTGAAEKPDAEITVTADGKTEKKANPAFEDWEAVD

SEQ ID NO: 137848 - protein, 74 aa, Oryza sativa
  Clone ID: PAT_MRT4530_39292C.1.pep
ESICPRKMLLKMKVFGIADLVISELDIEMPSYLGLLTLLQNDWHTRKRSMETWRMEMFSSSIVQRSLVYLVVHG

SEQ ID NO: 137849 - protein, 48 aa, Oryza sativa
  Clone ID: PAT_MRT4530_39293C.1.pep
YYIRGVYALVKHPSSPTRFEVCVVHDLILYVKGQHLQILPTSDTVPYS

SEQ ID NO: 137850 - protein, 565 aa, Oryza sativa
  Clone ID: PAT_MRT4530_39294C.1.pep
MAAATRAATASAARQVTKRNFAEAVQDLAAHVEACDYVAIAAQRTGAPTGWRRALPVDTPETAYLKAKLAAESFQPLHFAICPFRVDATSPSTLVAYPYNFHLFPRDELQLGMPAYSFSCQSSYLSSMAHSGFDFNMCIYDGSLVNTLRQLILGSESYGSRPSFSIDVCSDRQVQLVLEAANHISDDLVPLVVPDKAGTARAIGSMCLYKIKGRCHVFRIRSYGNHFQMDIKKMEDEHNLKFRGFREVIDLLSSSQKPIISYNFLNDFTMIHSKFVAPLPPNLHEFMCSLRMVFSNVIDISHMWREIGPLRKAKNIQGALSYLQRQYFVPMDVEIPQQDGNNSVTKSGENVLRITKLFAKLSNLLKISPNGQTHSGDKCHTVEEYSYILYPSCTAEESEDDKSSNESNTTRSVRTDNVVFLWGFRETSVKELRSRLASLHHAFSKDFELRLLDNSCSALIFHSSDTAIDLLREINSESPSLNNFFSEGLKAAGFDAYRKVCRSGLWDSDLAEALDGVSSEPSTSTLSGRGTSEICWNTSLMLDLKEYPGRSCLYGASTENPGTPR

SEQ ID NO: 137851 - protein, 513 aa, Oryza sativa
  Clone ID: PAT_MRT4530_39295C.1.pep
MAASRSELLRPAFGEPSPSLGPFVVNPHTCSYRWWQKFLIVLVLYTAWASPFELAMEKSASAALAVTELVVDAFFAVDIAVSFFVAYRDASTGLLVTDRKKIATRHLARPCLALDVASTIPLQMIYRIVSGKRQALYGLLNLLRLWRLRRVSKLFARLEKDIRFSYLWTRLIKLLYVTLFAVHFASCIYLWMAFHHKAKELTWIGSQFHGFEDRSVWFCYTCAVYWSITTLATVGYGDLHAANTGEMLFSIAFMLFNMGLTSYIIGNITNLVVHETTNTFKMVAEMKAESFPPKADIILENEASTDCYIIVSGEVEVLTTLEDGTEKQVMRIGPRGMAGEIGVMFNIPQPFTIRSRKLTQLVRISHSHMVSTIRPNTADGVVVFSNFVLYLESLKVKAKETAFVRDHLRNGYSTVLGSATMFDVDESKESAHKMLPCKEPKRVSIHEHLLNGTGTALNGSSGKLVILPDSMQDLMKLSEKKFGKAARGILTVGGAEVEDIEVIRDGDHLFFSW

SEQ ID NO: 137852 - protein, 105 aa, Oryza sativa
  unsure (1)..(105): unsure at all Xaa locations
  Clone ID: PAT_MRT4530_39296C.1.pep
MGRTLSGNCRGIPFTLRYTSHINMACPRMXGHSLYVLRKSFTELANGKRPTQTRLGCQRIVCGSTSPSPAWRPPGLRYKRDPXEDLRDRISQPTPPPQPTKSDPT

SEQ ID NO: 137853 - protein, 593 aa, Oryza sativa
  Clone ID: PAT_MRT4530_39297C.1.pep
MAASRSELLRPAFGEPSPSLGPFVVNPHTCSYRWWQKFLIVLVLYTAWASPFELAMEKSASAALAVTELVVDAFFAVDIAVSFFVAYRDASTGLLVTDRKKIATRHLARPCLALDVASTIPLQMIYRIVSGKRQALYGLLNLLRLWRLRRVSKLFARLEKDIRFSYLWTRLIKLLYVTLFAVHFASCIYLWMAFHHKAKELTWIGSQFHGFEDRSVWFCYTCAVYWSITTLATVGYGDLHAANTGEMLFSIAFMLFNMGLTSYIIGNITNLVVHETTNTFKMRDMVQRTSVFGRTNRLPVAMREQMMESLQLRFRAEEQLQQEMLSELPKAVRSGIAQHMFRGAVQSCYLFQGVSDKLVLPLVAEMKAESFPPKADIILENEASTDCYIIVSGEVEVLTTLEDGTEKQVMRIGPRGMAGEIGVMFNIPQPFTIRSRKLTQLVRISHSHMVSTIRPNTADGVVVFSNFVLYLESLKVKAKETAFVRDHLRNGYSTVLGSATMFDVDESKESAHKMLPCKEPKRVSIHEHLLNGTGTALNGSSGKLVILPDSMQDLMKLSEKKFGKAARGILTVGGAEVEDIEVIRDGDHLFFSW

SEQ ID NO: 137854 - protein, 296 aa, Oryza sativa
  Clone ID: PAT_MRT4530_39298C.1.pep
MPYYVDPRSNGPQVYGYPPLTVARQVGRLGAQGSTTMTSSLFDDSVDPGINQGASTSTMLVWTQVGEIVFPVYTTMPISNGPAITRSENGVVTTPVDSTSKDPPAEAENGTSPTFEPEKDPNTAKSCLPDEKHEPTRITSEATRTWCPIHKTKRHTLQACSVFPDVQAEIRKTHDLSSYKVLLSAMRTSPPKASSSTSTARNVYAIDGTSTSTGGNTEAEDQLATQAQHIRTINAILRETPYDPVLNADLDQWMKRLRESVANLSNAFEEAAARAPPEQPPTGGANGEQPEQRTPP

SEQ ID NO: 137855 - protein, 261 aa, Oryza sativa
  unsure (1)..(261): unsure at all Xaa locations
  Clone ID: PAT_MRT4530_39299C.1.pep
MAPPVCFSDLPPEALDDIARRAGALNNVVCSAVCRPWRRALKTTRLGLLKQPNRPYSVNLELWCGSIELHPIRRCINGERTVRIANHDGAAPVTRIVGSSHGWLVTVDEDGGLSLLEAVTGRLYPLPPITSSGSKKVAKDLDQMGESMFQKAELVPGHRLGTFAVMLIHGGGFGMSFLRPGAKCWTAVRVPKWMKQKFVDVVFHQGAFYTPRQECAXVSLVVSIGGGDLLMVSRLHEREGAWLAVEDLGEAAILVGSSCSL

SEQ ID NO: 137856 - protein, 120 aa, Oryza sativa
  Clone ID: PAT_MRT4530_3929C.1.pep
MFHHLRRRLLCTAAAPPIRVALTESSGRGVFATRPISAGEVLHSAQPLVSHPSPPLIHEVCYSCLRRKSGSGGGSSGSCYFCSDACREHAKGFHGVEKKADWSLFDDHCSSRGLLYPYMA

SEQ ID NO: 137857 - protein, 134 aa, Oryza sativa
  Clone ID: PAT_MRT4530_392C.1.pep
MTTMAKVITSVVIAAVVALAMVSLVAADSGTATFYTPPYTPSACYGFEDQGTMIAAASDVFWNGGAACGQQYVVTCTGPTNQGVPQPCTGQSVTVKIVDHCPSGCAGTIDLSQEAFAIIANPDAGKVFIDYQQV

SEQ ID NO: 137858 - protein, 1830 aa, Oryza sativa
  Clone ID: PAT_MRT4530_39300C.1.pep
MAGFADALRPDKFTGVHFKRWQIRVTLWLTAIKCFWVSTGKPEGVLTAEQQKQFEEATTLFVGCILSVLGDRLVEVYMHMTDAKELWDALNTKFGATDASNDLYIMEQFHDYKMADNRSVVEQAHEIQTMAKELELLKCVLPDKFVAGCIIAKLPPSWRSFGTALKHKRQEYSVEGLIASLDVEEKAREKDAASKGDGGQSSANVVHKAQNKSKGKYKAQQTTNFKKQKKNNNNPNQDERICFVCGQVGHLARKCPQRKGMKAPAGQTSKSANVTIGNTGDGSGYGNLPTVARGSTVLMGNGSHASVHGVGTVDLKFTSGKIVQLKNVQHVPSIDRNLDTHSGSNQPSEIIPSSITPPEQTEHTHELVSEEDVSEAPRRSKRQRTAKSFGDDFTVYLVDDTPKSISEAYASPDADYWKEAVRSEMDSIVANGTWEVTERPYGCKPVGCKWVFKKKLRPDASHGLLVHQMDVKTAFLNGELDEEIYMDQPDGFVVEGFAVNEADKCVYYRHGGGEGVILCLYVDDILIFGTNLESHYVEKILNRFGYIDSKPSPTPYDPSLLLRKNKRIARNQLEYSQIIGSLMYLASATRPDISFAVSKLSRFTSNPGDDHWRALERVMRYLKGTVELGLHYTGYPAVLEGYSDSNWISDVDEIKATSGYVFTLGGGAVSWRSCKQTILTRSTMEAELTALDTATVEAEWLRDLLMDLPVVEKPVPAILMNCDNQTEIKKLRSYNVGLHPNSEKPGRSLHEGTITKYYSIPLAGVHRRSGEQVSGTSAFDVLHREKAAIRVTLWLTAMKCFWVSTGKPEGVLTAEQQKQFEEATTLFVGCILSVLGDRLVEVYMHMTDAKELWDALNTKFGATDASNDLYIMEQFHDYKMADNRSVVEQAHEIQTMAKELELLKCVLPDKFVAGCIIAKLPPSWRSFGTALKHKRQEYSVEGLIASLDVEEKAREKDAASKGDGGQSSANVVHKAQNKSKGKYKAQQTTNFKKQKKNNNNPNQDERTCFVCGQVGHLARKCPQRKGMKAPAGQTSKSANVTIGNTGDGSGYGNLPTVFSVNQSTNWWVDTGANVHVCADISLFSSYQVARGSTVLMGNGSHASVHGVGMVDLKFTSGKIVQLKNVQHVPSIDRNLVSGSRLTRDGFKLVFESNKVVVSKHGYFIGKGYECGGLFRFSLSDFCNKSVNHICGKVENQLDRKIKRLRSDRGGEFFSNEFDLFCEEHGIIHERTPPYSPESNGIAERKNRTLTDLVNAMLDTAGLPKACEAPRRSKRQRTAKSFGDDFTVYLVDDTPKSISEAYASPDADYWKEAVRSEMDSIIANGTWEVTERPYGCKPVGCKWVFKKKLRPDGTIEKYKARLVAKGYTQKEGEDFFDTYSPVARLTTIRVLLSLAASHGLLVHQMDVKTAFLNRELDEEIYMDQPDGFVVEGQEGKVCKLLKSLYGLKQAPKQCHEKFDKTLTSAGFAVNEADKCVYYRHGGDEGVILCLYVDDILIFGTNLEVINEAKSFLSQNFDMKDLGVADVILNIKLIRGENGITLLQSHYVEKILNRFGYIDSKPSPTPYDPSLLLRKNKRIARNQLEYSQIIGSLMYLASATRPDISFAVSKLSRFTSNPGDDHWRALERVMRYLKGTVELGLHYTGYPAVLEGYSDSNWISDVDEIKATSGYVFTLGGGAVSWRSCKQTILTRSIMEAELTALDTATVEAEWLRDLLMDLPVVEKPVPAILMNCDNQTTCEKTIEVCQEIKKLRSYNVGLHPNSEKPGRSLHEGTITKCDRQCIEGDGFETHIKSLYVYNLNRSSLVTLRSCRLLDGLEELPSDLSEKIVEKA

SEQ ID NO: 137859 - protein, 76 aa, Oryza sativa
  unsure (1)..(76): unsure at all Xaa locations
  Clone ID: PAT_MRT4530_39301C.1.pep
KNSDTTRKSIIASGRKGSLQAGRPSACKPTTVKIADLRRRGGRLPAKIXFAGGRWLVRSACENRNRPPAKKKNFRL

SEQ ID NO: 137860 - protein, 1134 aa, Oryza sativa
  unsure (1)..(1134): unsure at all Xaa locations
  Clone ID: PAT_MRT4530_39302C.1.pep
MCRSNDALILVYICNVMIYLWNILNHYMPIFSTIQKPYYRRCDFTMAGFADALRPNKFTGVHFKRWQIRVTLWLPAMKCFWVSTSKPMGILNADQQKEFDEATTLFVGCILSMLGDRLVEVYMHMTDAKELWDALNTKFDATNASNDLYIMEQFHDYKMADNRSVVEQAHEIQTMAKELELLKCVLPDKFVAGCIIAKLPPSWRGFGTALKHKRQEYSVEGLIASLDVEEKAQKKDATSKGDGGQSTANVVHKAQNKSKGKYKAQQTTNFKKKNNNNNPNQDERTCFXRTGFHRPNGEWVTCFCSWCWHGRSEVYFAKDRAAEERAACPFYRQESCYECGGLFRFSLSDFCNKSVNHICGSVDDEANVWHSRLCHINFGLMSRLSSMCLILKFSIVKGSNCHSCVQSKQPRKPHKAAEERNLAPLELLHSDLCEMNGVLTKGEKRYFMTLIDDATRFCYVYLLKTKDEALDYFKIYKAEVENQLDRKIKRLRSDRGGEFFSNEFDLFCEEHGIIHERTPPYSPESNGIAERKNRTLTDLVNAMLDTADYLRHVPNRNKDKTPYEIWIGRKPSLSYLRTWGCLAKVNVPITKKSKLGPKTVDCIFLGYAHHSIAYRFLIVKSEVPDMHVGTIMESRDATFFESFFPMKDTHSSSSQPSKIIPSSITPPEQTEHTHEHVTEEDDSEAPRRSKRQRTTKSFGDDFTVYLVDDTPKSISEAYASPDADYWKEAVHSEMDSIIANGTWEVTERPYGCKPVGCKWVFKKKLRPDGTIEKYKARLVAKGYTQKEGEDFFDTYSPVARLTTIRFAVNEADKCVYYRHGGGEGVILCLYVDDILIFGTNLEVINEVKSFLFQNFDMKDLGVADVILNIKLIRGENEITLLQSHYVEKILNRFGYFDSKPSPTPYDPSLLLRKNKRIARNQLEYSQIIGSLMYLASATRPDISFAVSKLSRFTSNPGDDHWRALERVMRYLKGTMELGLHYSGYPVILEGYSDSNWISDVDEIKATSGYVFTLGGGAVSWRSCKQTILTRSTMEAELAALDTATVEAEWLRDLLMDLPIVENPTCEKTIEVCQEIEKLRSYNVGLHPNSXKPGRSLHEGTITKCDRXCIEGDGFETHENSDLFCCWKHSEKSCA

SEQ ID NO: 137861 - protein, 47 aa, Oryza sativa
  Clone ID: PAT_MRT4530_39303C.1.pep
ITREHGLVISCNTALLMSAKVYVQLSKHKHKNALFVCPKQKHNIYYE

SEQ ID NO: 137862 - protein, 2697 aa, Oryza sativa
  Clone ID: PAT_MRT4530_39304C.1.pep
MCGGEKRGNTRELARLASPRLASPGRAGQVARVHDVCVEWSATARRLQPRVVRAEQPVFPPPRHCDFTMASFTDALRPDKFTGVHFKRWQIRVTLWLTAMKCFWVSTGKPMGVLKADQQKEFDEATTLFVGCILSVLGDRLIEVYMHMTDAKELWDALNTKFGATDASNDLYIMEQFHDYKMVGNRSVVEQAHEIQAMDKELRLLKCVLPDKFVVGCIIAKLPPSWRGFYTALKHKRQEYSVEGLIASLDVEEKAREKDAASKGDGGQSTANVVHMAQNKSKGKYKAQQTTNFKKKKNNNNPNEDERTCFVCGQPGHLARKCPQRKGMKAPAGQTSKSANVTIGNTGDGSGYGNLPTVFSVNQSTNWWVDTGANVARGSTVLMGNGLHASVRGVGTVDLKFTSGKIVQLKNVQHVPSIDRNLVSGSRLTRDGFKLVFESNKVVVSKHGYFIGSKCHSCVQSKQPRKPHKAAEERNLAPLELLHSDLYEMNGVLTKGGKRYFMTLIDDATRLCYVYLLKTKDKALDYFKIYKAEDENQLDRKIKRLWSDRGGEFFSNEFDLFCEEYGIIHERTPPYSPESNGIAKRKNHTLTDLVNAMLDTAGLPKAWWGETLLTSNHVLNRVSNRNKDKTPYEIWIRRKPSLSYLRTWGCLAKVNIPITKKRKLGPKTVDCVFLGYVHHSIAYRFLIVKFEVPDIHIGTIMESRDATFFESFFPMKDTHSSSSQTSEIIPNSITPLEQTEHTHEHVTEEDDSEALRRSKRQRTAKSFGDDFTVYLVDDTPKSISEAYASPDADYWKEAVRSEMDSIIANGTWEMTERPYGCKPVGCKWVFKKKLRPDGTIEKYKARLVAKGYTQKEGEDFFYTYSPVSRLTTIRVLLSLAASHGLLVHQMDIKTAFLNGELDEEIYMDQPDGFVVEGFAVNETDKCVYYRHGGGEGVILCLYVDDILIFGTNLEVINEVKSFLSQKFDMKDLGLADVILNIKLIRGENGIALLQSHYVEKILNRFGYIDSNPSPTPYDSSLLLRKNKRIARNQLEYFQIIGSLMYLASATRPDISFAVSKLSRFTSNPGDDHWRALERVMRYLKGTIELGLHYSRYPAVLEGYSDFNWISDVDEIKATSGYAFTLGGGAVSWRSCKQTILTRSTMEAELTALDTATVEAEWLRDLLMDLPIVEKPVPAILMSYDNQTVIVKVNSSKDNMKSSRHVKRRLKSVRKLRNSGVITFDYIQTARKLADPFTKGLSRNVIDNVSKEMGLRPMKIRICFVLETLRKIRVCLLLYTAPSLIDYSIPLAGVHRRSGEQVSGTSAFDVLHREKAAIRFLGSASRDCSLFVRDGSPSSSLACFAPSLTLATASSSCRATGLSATSVSTGKPEGILTADQQKQFEEATTLFVGCILSVLGDRPVEVYMQMTDAKELWDALNTKFGATDVSNDLYIMEQFHDYKMAGNRSIVEQAHEIQTMAKELKLLKCVLPDKFVAGCIIAKLPPSWRSFGTALKYKRQEYSVEGLIASLDVEEKAREKDAAYKGDGGQSSANVVHKAQNKSKGKYKAQQTTNFKKQKKNNNNPNQDKRTCFVCGQPGHLARKCPQRKGMKAPAGQTSKSANVTIGNTGNGSGYGNLPTVFSVNQSTNWWVDTGANVHVCADISLFSSYQVARGSTVLMGNGSHASVHGVGTVDLKFTSGKIVQLKNVQHVPSIDRNLVSGSRLTRDGFKLVFESNKVFVSKHGYFIGKGYECGGLFRFSLSDFCNKSVNHICGSVDDEANVWHSRLCHIIFGLMSRLSSMCLIPKFSIVKGSKCHSCVQSKQPRKPHKAAEERNLAPLELLHSDLCEMNGVLMKGGKRYFMTLIDDATRFCYVYLLKTKDEALDYFKIYKAEVENQLDRKIKRLRSDRGGEFFSNEFDLFCEEHGIIHERTPPYSPESNGIAERKNRTLTDLVNAMLDTAGLLKAWWGEALLTSNHVLNRVLNRNKDKTPYEIWIGRKPSLSYLRTWGCLAKVNVPITKKRKLGPKTVDCVFLGYAHHSIAYRFLLVKSEVPDMHVGTIMKSRDATFFESFFPMKDTHSGSSQPSEIIPSSITPPEQIEHTHEHVSEEDVSEAPRRSKRQRTAKSFGDDFTVYLVDDTPKSISEAYASPDADYWKEAVRSEMDSIIANGTWEVTERPYGCKPVGCKWVFKKKLRPDGTIEKYKARLVAKGYTQKEGEDFFDTYSPVARLTTIRVLLSLAASHGLLVHQMNVKTAFLNGELDEEIYMDQPNGFVVVGQGKVCKLLKSLYGLKQAPKQWYKKFNKTLTSAGFAVNEADKCVYYRHGGGEGVILCLYVDDILILGQTLRGENGITLLQSHYVEKILNRFGYIDSKPSPTPYDPSLLLRKNKIIARNQLEYSQIIGSLMYLASATRPDISFVVSKLSRFTSNPGDDHWHALERVMHYLKGTMELGLHYTGYRAVLEGYSDSNWISDVDEIKATSGYVFTLGGGAVSWRSCKQTILTRSTMEAKLTALDTATVEAEWLRDLLMDLPIVKKPVPAILMNCDNQTVIVKVNSSKDNMKSSRHVKRRLKSVRKLRNSGVITLDYIQTARNLADPFTKGLSRNVIDNASKEMGLRPIEDAVLQSSLERTHLCKLDYWSQSMEILGESSRKLTKDLGMPAKSFDRAAGLSATSVRSSAAIALGPGARPSYACRPAATTRGRRRLDGDRSVPPMQVN

SEQ ID NO: 137863 - protein, 109 aa, Oryza sativa
  Clone ID: PAT_MRT4530_39305C.1.pep
VRQREAYQHFVWGPRPSRGGLGQRAASQQNVQTTVPQGVLTSELLPRAPGIISLLFFGFFGSELSLQFHGTYMVFCLLNLFGACVDFVGLLGVTVSLGGGLGFLGGAWG

SEQ ID NO: 137864 - protein, 1377 aa, Oryza sativa
  Clone ID: PAT_MRT4530_39306C.1.pep
MLRIFDLFMLYCVVYMYRSNDAFMLVFICNVMIYLWNRLNHYTSIISTIQKPYYRHCDFTMAGFADALRPDKFTGVHFKRWQIRVTLWLTAMKCFWVSTGKPEGVLTAEQQKQFEEATTLFVGCILSILGDRLVEVYMHMTDAKELWDALNTKFGATDASNDLYIMEQFHDYKMADNRSVVEQAHEIQTMAKELELLKCVLPDKFVAGCIIAKLPPSWRSFGTALKHKRQEYSVEGLIASLDVEEKARKKDAASKGDGGQSSANVVHKAQNKSKGKYKAQQTTNFKKQKKNNNNPNQDERTCFVCGQVGHLVRKCPQRKGMKAPAGQTSKSANVTIGNTGDGSGYGNLPTVFSVNQSTNWWVDTGANVHVCADISLFSSYQVARGSTVLMGNGSHASVHGVGTVDLKFTSGKIVQLKNVQHVPSIDRNLVSGSRLTRDGFKLVFESNKVVVSKHGYFIGKGYECEGLFRFSLSDFCNKSVNHICGSVDDEANVWHSRLCHINFGLMSRLSSMCLIPKFSIVKGSKCHSCVQSKQPRKPHKAAEERNLAPLELLHSDLCEMNGVLTKGGKRYFMTLIDDATRFCYVYLLKTKDEALDYFKIYKAEVENQLDRKIKRLRSDRGGEFFSNEFDLFCEEHGIIHERTPPYSPESNGIAERKNRTLTDLVNAMLDTAGLPKAWWGEALLTSNHVLNRVPNRNKDKTPYEIWIGRKPSLSYLRTWGCLAKVNVPITKKRKLGPKTVDCVFLGYAHHSIAYRFLIVKSEVPDMHVGTIMESRDATFFESFFPMKDTHSGSNQPSEIIPSSITPPEQTEHTHELVSEEDVSEAPRRSKRQRTAKSFGDDFTVYLVDDTPKSISEAYASPDADYWKEAVRSEMDSIIANGTWEVTERPYGCKPVGCKWVFKKKLRPDGTIEKYKARLVAKGYTQKEGEDFFDTYSPVARLTTIRVLLSLAASHGLLVHQMDVKTAFLNGELDEEIYIDQPDGFVVEGQEGKVCKLLKSLYGLKQAPKQWHEKFDKTLISAGFAVNEADKCVYYRHGGGEGVILCLYVDDILIFGTNLEVINEVKSFLSQNFDMKDLGVADVILNIKLIRGENGITLLQSHYVEKILNRFGYIDSKPSPTPYDPSLLLRKNKRIARNQLEYSQIIGSLMYLASATRPDISFAGYSDSNWISDVDEIKATSGYVFTLGGGAVSWKSCKQTILTRSTMEAELTALDTATVEAEWLRDLLMDLPVVEKPVPAILMNCDNQTTCEKTIEVCQEIKKLRSYNVGLHPNSEKPGRSLHEGTITKCDRQCIEGDGFETHWRQRGRVAAATGGAKGEGGMVEGVDQGRIYRQRPRGAMARLGASGAWWQQPRGGGGLVQILRPQRRQQRMAQGSQ

SEQ ID NO: 137865 - protein, 2353 aa, Oryza sativa
  Clone ID: PAT_MRT4530_39307C.1.pep
MAGFADALRPDKFTGVHFKRWQIRVTLWLTAMKCFWVSTGKPEGVLTAEQQKQFEEATTLFVGCILSVLGDRLVEVYMHMTDAKELWDALNTKFGATDASNDLYIMEQFHDYKMADNRSVVEQAHEIQTMAKELELLKCVLPDKFVAGCIIAKLPPSWRSFGTALKHKRQEYSVEGLIASLDVEEKAREKDAASKGDGGQSSANVVHKAQNKSKGKYKAQQTTNFKKQKKNNNNPNQDERTCFVCGQVGHLARKCPQRKGMKAPAGQTSKSANVTIGNTGDGSGYGNLPTVARGSTVLMGNGSHASVHGVGTVDLKFTSGKIVQLKNVQHVPSIDRNLVSGSRLTRDGFKLVFESNKVVVSKHGYFIGKGYECGGLFRFSLSDFCNNMCLIPKFSIVKGSKCHSCVQSKQPRKPHKAAEERNLAPLELLHSDLCEMNGVLTKEVENQLDRKIKRLRSDRGGEFFSNEFDLFCEEHGIIHERTPPYSPESNGIAERKNRTLTDLVNAMLDTAGLPKACEAPRRSKRQRTAKSFGDDFTVYLVDDTPKSISEAYASPDADYWKEAVRSEMDSIIANGTWEVTERPYGCKPVGCKWVFKKKLRPDASHGLLVHQMDVKTAFLNGELDEEIYMDQPDGFVLEGFAVNEADKCVYYRHGGGEGVILCLYVDDILIFGTNIEVINESHYVEKILNRFGYIDSKPSPTPYDPSLSLRKNKRIARNQLEYSQIIGSLMYLASATRPDIFFAVSKLSRFTSNPGDDHWRALERVMRYLKGTVELGLHYTGYPAVLEGYSDSNWISDVDEIKATSGYVFTLGGGAVSWSKDVVLQSILEGTHLCELDCWSQSMKILGESSRKLTKDLGGLPPTLYCAVARRPGVHQRSGEQVSGTSAFDVLHREKAAIRSNDAFMLVFICNVMIYLWNKLNPYMPIISTIQKPYYRHCDFTMAGFADALRPDKFTGVHFKRWQIRVTLWLTAMKCFWVSTGKPEGVLTAEQQKQFEEATTLFVGCILSVLGDRLVVVYMHMTDAKELWDALNTKFGATDASNDLYIMEQFHDYKMADNRSVVEQAHEIQTMAKELELLKCVLPDKFVAGCIIAKLPPSWRSFGTALKHKRQEYSVEGLIASLDVEEKAREKDAASKGDGGQSSANVVHKAQNKSKGKYKAQQTTNFKKQKKNNNNPNQDERTCFVCGQVGHLARKCPQRKGMKAPAGQTSKSANVTIGNTGDGSGYGNLPTVFSVNQSTNWWVDTGANVARGSTVLMGNGSHASVHGVGTVDLKFTSGKIVQLKNVQHVPSIDRNLVSGSRLTRDGFKLVFESNKVVVSKHGYFIGKGYECGGLFRFSLSDFCNKSVNHICGSVDDEANVWHSRLCHINFGLMSRLSSMCLIPKFSIVKGSKCHSCVQSKQPRKPHKAAEERNLAPLELLHSDLCEMNGVLTKGGKRYFMTLIDDATRFCYVYLLKTKDEALDYFKIYKAEVENQLDRKIKRLRSDRGGEFFSNEFDLFCEEHGIIHERTPPYSPESNGIAERKNRTLTDLVNAMLDTAGLPKAWWGEALLTSNHVLNRVPNRNKDKTPYEIWIGRKPSLSYLRTWGCLAKVNVPITKKRKLGPKTVDCVFLGYAHHSIAYRFLIVKSEVPDMHVGTIMESRDATFFESFFPMKDTHSGSNQPSEIIPSSITPPEQTEHTHELVSEEDVSEAPRRKRPYGCKPVGCKWVFKKKLRPDGTIEKYKARLVAKGYTQKEGEDFFDTYSPVARLTTIRVLLSLAASHGLLVHQMDVKTAFLNGELDEEIYMDQPDGFVVEGQEGKVCKLLKSLYGLKQAPKQWHEKFDKTLTSAGFAVNEADKCVYYRHGGGEGVILCLYVDDILIFGTNLEVINVVKSFLSQNFDMKDLGVADVILNIKLIRGENGITLLQSHYVEKILNRFGYIDSKPSPTPYDPSLLLRKNKRIARNQLEYSQIIGSLMYLASATRPDISFAVSKLSRFTSNPGDDHWRALERVMRYLKGTMELGLHYTGYPAVLEGYSDSNWISDVDEIKATSGYVFTLGGGAVSWRSCKQTILTRSTMEAELTALDTATVEAEWLRDLLMDLPVVEKPVPAILMNCDNQTTCEKTIEVCQEIKKLRSYNVGLHPNSEKPGRSLHEGTITKCDRQCIEGDGFETHSILEGTHLCELDCWSQSMKILGEERFFACTGVFIDFNGSTSRVVTSASLVRISADENKIADNLKIKVYLPNKRIAVGELQHCNLSYNIAVVSVKGFCCLRTAELDKQMQIEPHREVVAIGRIFESGKLMATSGILSDEESKLDCRELMISTCKITKAGIGGPLIDFDGNFVGINFYGTKETHYLPRLMIQRLLKDFDG

SEQ ID NO: 137866 - protein, 1948 aa, Oryza sativa
  Clone ID: PAT_MRT4530_39308C.1.pep
MLVFICNVMIYLWNKLNHYMPIISTIQKPYYRHCDFTMAGFADALRPDKFTGVHFKRWQIRVTLWLTAMKCFWVSTGKPEGVLTAEQQKQFEEATTLFVGCILSVLGDRLVEVYMHMTDAKELWDALNTKFGATDASNDLYIMEQFHDYKMADNRSVVEQAHEIQTMAKELELLKCVLPDKFVAGCIIAKLPPSWRSFGTALKHKRQEYSVEGLIASLDVEEKAREKDAASKGDGGQSSANVVHKAQNKSKGKYKAQQTTNFKKQKKNNNNPNQDERTCFVCGQVGHLARKCPQRKGMKAPAGQTSKSANVTIGNTGDGSGYGNLPTVFSVNQSTNWWVDTGANVHVCADISLFSSYQVARGSTVLMGNGSHASVHGVGTVDLKFTSGKIVQLKNVQHVPSIDRNLVSGSRLTRDGFKLVFESNKVVVSKHGYFIGKGYECGGLFRFSLSDFCNKSVNHICGSVDDEANVWHSRLCHINFGLMSRLSSMCLIPKFSIVKGSKCHSCVQSKQPRKPHKAAEERNLAPLELLHSDLCEMNGVLTKGGKRYFMTLIDDATRFCYVYLLKTKDEALDYFKIYKAEVENQLDRKIKRLRSDRGGEFFSNEFDLFCEEHGIIHERTPPYSPESNGIAERKNRTLTDLVNAMLDTAGLPKAWWGEALLTSNHVLNRVPNRNKDKTPYEIWIGRKPSLSYLRTWGCLAKVNVPITKKRKLGPKTVDCVFLGYAHHSIAYRFLIVKSEVPDMHVGTIMESRDATFFESFFPMKDTHSGSNQPSEIIPSSITPPEQTEHTHELVSEEDVSEAPRRSKRQRTAKSFGDDFTVYLVDDTPKSISEAYASPDADYWKEAVRSEMDSIIANGTWEVTERPYGCKPVGCKWVFKKKLRPDGTIEKYKARLVAKGYTQKEGEDFFDTYSPVARLTTIRVLLSLAASHGLLVHQMDVKTAFLNGELDEEIYMDQPDGFVVEGQEGKVCKLLKSLYGLKQAPKQWHEKFDKTLTSAGFAVNEADKCVYYRHGGGEGVILCLYVDDILIFGTNLEVINEVKSFLSQNFDMKDLGVADVILNIKLIRGENGITLLQSHYVEKILNRFGYIDSKPSPTPYDPSLLLRKNKRIARNQLEYSQIIGSLMYLASATRPDISFAVSKLSRFTSNPGDDHWRALERVMRYLKGTVELGLHYTGYPAVLEGYSDSNWISDVDEIKATSGYVFTLGGGAVSWRSCKQTILTRSTMEAELTALDTATVEAEWLRDLLMDLPVVEKPVPAILMNCDNQTVIVKVNSSKDNMKSSRHVKRRLKSVRKLRNSGVITLDYIQTARNLADPFTKGLSRNVIDNASKEMGLRPISNDAFMLVFICNVMTYLWNKLNHYMPIISTVLSHDKTCGYQSSGHLQKNKESGDTETDPLMPIPADIDLPILENMPKTKRGGDDLARSLHKNRKTCNGGRTDSLASGCLHGDPNEDVWTELNDVVKSNLSKSVASLSLRNGVAVDRQGRLTKFLTSASLVELLVRALNDTNKNHGDLELEVYHEGNEVCQGYLTDFDLDHNLAIVEIWTDFDVHVGLLQHAVEFLPHCKVIAIGREITGKLMARRVQLMDDLSVSEDSEDLDCKIKEAWEGAPLFSFDGNFVGMNLFLAMGRAFFLPWGTIQKHWASLQNKTGLPESNSLKVYRFGTSSTAEKSNSHPEVNNDILDPEQIHIDSMGYPKFPTHMFAAFCTTNNYAIMYLSPDGMILVNTFEETFGDLRGEGVWSKLSKKSCSNIDRSVVALASFSGERRFFACTGFFVEWNGSTVILTSASLVRSSGDENKIVDNLRIEVLLPNKQRVEGMLQHCNLHYNVALVSVGYRALRPAHGQLDWWGKSSKVVAVGRCFKSGALMAASGTVTPWTGTLDCDFLERSSCKITKAGIGGPVVTLDGDCIGMNFYDTRIGTPFLSWEVIVDIVASFEEKRWPVPMPY

SEQ ID NO: 137867 - protein, 53 aa, Oryza sativa
  Clone ID: PAT_MRT4530_39309C.1.pep
RNYSATTSLYIYIYSYTQPRYISSVETLNLPAINHNKVVKELFCHYFAIYIYI

SEQ ID NO: 137868 - protein, 164 aa, Oryza sativa
  unsure (1)..(164): unsure at all Xaa locations
  Clone ID: PAT_MRT4530_3930C.1.pep
MCGGFRAKPRGGRGGGLRHHAEGGTAAPADARARRKGAAGGDVDEEEGEAXRATAFRRNSGDAVALPGKRTALRCRERWWRRRPAHRGRGRGDRRRNRGGNTTVAGGEALPEVSAGDRGXAGEEEAAAMLEEATARPDGAPARRERRLEAAGGTGGRGRRRGGG

SEQ ID NO: 137869 - protein, 103 aa, Oryza sativa
  Clone ID: PAT_MRT4530_39310C.1.pep
SPGGPPTRAPIPPPPPAGSAPLSSASSPAAARRDQPPTVKTTAPATRPNHPRCSLPCPRRLRHDAHRLRWPGAHGRIQSSPWAAAAGEGRTGCGRRRRGTGTP

SEQ ID NO: 137870 - protein, 1677 aa, Oryza sativa
  Clone ID: PAT_MRT4530_39311C.1.pep
MHMIDVKELWDALNTKFGATDASNDLYIIEQFHDYKMADNRSVVEQAHEIQTMAKKLELLKCVLPDKFVAGCIIAKLPPSWRSFGTALKHKRHEYSVEGLIASLDVEEKAREKDAASKGDGGQSSANVVHKAQNKSKEKYKTQQTTNFKKQKKNNNNPNQDERTCFVCGQPGYLARKFPRRKGMKAPAGQTSKSANVTIGNTGDGSGYGNLPTVARGSTVLMGNGSHASAHGVGTVDLKFTSGKIVQLKNVQHVPSIDRNLISGSRLTRDGFKLVFESNKLVVSKHGYFIGKGYECGGMFRFSLSDFCNKSVNHICGSVDDEANDWHSHYWKEAVRSEMDSIIANGTWEVTERPYGCKPVGCKWVFKKKLRPDASYGLLVHQMYVKTTFLNGELDEEIYMDQPDGFVVEGFAVNEANKCVYYRHGGGEGVILYLDVDDILIFGTNLEVINESHYVEKILNRFGYIDNYSIPLAGVHRRSGEQVSGTSAFDVLHREKAAIRVTLWLTAMKCFWVSTGKPEGVLTAEQQKQFEEATTLFVGCILSVLGDRLVEVYMHMTDAKELWDALNTKFGTTDASNDLYIMEQFHDYKMADNRSVVEQAHEIQTMAKELELLKCVLPDKFVAGCIIAKLPPSWRSFGTALKHKRQEYSVEGLIASLDVEEKAREKDAASKGDGGQSSANVVHKAQNKSKGKYKAQQTTNFKKQKKNNNNPNQDERTCFVCGQVGHLARKCPQRKGMKAPAGQTSKSANVTIGNTGDGSGYGNLPTVARGSTVLMGNGSHASVHGVGTVDLKFTSEKIVQLKNMQHVPSIDRNLVSGSRLTRDGFKLVFESNKVVVSKHGYFIGKGYECGGLFRFSLSDFCNKSVNHICGSVDDEANVWHSQVENQLDRKIKRLRSDRGGEFFSNEFDLFCEEHGIIHERTPPYSPKSNGIAERKNRTLTDLVNAMLDTAGLPKACEAPRRSKRQRTAKSFGDDFTVYLVDDTPKSISEAYASPDADYWKEAVRSEMDSIIANGTWEVTERPYGCKPVGCKWVFKKKLRPDASHGLLVHQMDVKTAFLNGELDEEIYMYQPDGFVVEGFAVNEADKCVYYRHGGGEGVILCLYVDDILIFGTNLEVINESHYVEKILNRFGYIDNKPSPTPYDPSLLLRKNKRIARNQLEYSQIIGLLMYLASATRPDISFAVSKLSRFTSNPGDDHWRALERVMRYLKGTVELGLHYTGYPAVLEGYSDSNWISDVDEIKATSGYVFTLGGGAVSWSSQRRQRLVLASRRHRACTCFLPLRLPAPTRSSRLAAINKPTPTPAFPRLPAVMAPVLERPHGVAVLTAFLPPRRHRQADVGFVLGRSSPASPRLCHASPLRRRRPPPPPLSRRRPPPLPSRVGYLADKRIYHGGYRVSSLHFRYSPPTSSSWICQAVTWSPRRWMAEQTMNKALLGGDSLRTASRMSKGRMDNGGDDSASTGKLSPRRLHPHLPPVAAVSVFRSSLALDGSFVEAAPSSSTSPPPFPSSSPFALPLWSCHRRPSPLACADLVDRGDFNRAHHVAACRARRRRPLGRGYKEGHSGDEGMTKTKEAMAAPDRDSDMCDTCGSHAESAVTSDNTGVKTTEWPKVNGAAAAAHFARGRSEEAHGRAFGEWAYRCRVQELKAPLGSLVVALKSSNESTSVLFPAIVVQRMLPVP

SEQ ID NO: 137871 - protein, 2705 aa, Oryza sativa
  Clone ID: PAT_MRT4530_39312C.1.pep
MGDPNDLKTSVEALTTAMKEMQASIAANAKAIAALSSGRTSSSGATTDSGEPRTVRPPRFQKMDFPRYDGKSDPLTFLNWCESYFHQQRIMDEEKVWMASYNLEDGAQLWYMQVQADEGKPSWRRFRELLVLRYGPPLRSAPLFELADCRRTTTVEDYQDHFQALLPRAGRLTKAQRVQLFTGGLLPPLSLKVQMQNPQSLVTAMSLARQFELMEQCTATLAKAPGHGILPTLGPRQAPPQPPAPRAASPPVLIDGRPVKRLSQAEQDERRRLGLCFNYYSIPLAGVHQRSGEQVSGTSAFDVLHREKAAIRHCDFTMAGFADALRPDKFTGVHFKRWQIRVTLWLTAMKCFWVSTGKPEGILTAEQQKQFEEATTLFVGCILSVLGDRLVEVYMHMTDAKELWDALNTKFGATDASNDLYIMEQFHDYKMADNRSVVEQAQEIQTMAKELELLKCVLPDKFVAGCIIAKLPPSWRSFGTALKHKRQEYSVEGLIASLDVEEKAREKDAASKGDGGQSSANVVHKAQNKSKGKYKAQQTTNFKKQKKNNNNPNQDERTCFVCGQVGHLARKCPQRKGMKAPAGQTSKSANVTIGNTGDGSGYGNLPTVARGSTVLMGNGSHASVHGVGTVDLKFTSGKIVQLKNVQHVPSIDRNLVSGSRLTRDGFKLVFESNKVVVSKHGYFIGKGYECGGLFRFSLSDFCNNMCLIPKFSIVKGSKCHSCVQSKQPRKPHKAAEERNLAPLELLHSDLCEMNGVLTKEVENQLDRKIKRLRSDRGGEFFSNEFDLFCEEHGIIHERTPPYSPESNGIAERKNRTLTDLVNAMLDTAGLPKACEAPRRSKRQRTAKSFGDDFTVYLVDDTPKSISEAYASPDADYWKEAVHSEMDSIIANGTWEVTERPYGCKPVGCKWVFKKKLRPDASHGLLVHQMDVKTAFLNGELDEEIYMDQPDGFVVEGFAVNEADKCVYYRHGGGEGVILCLYVDDILIFGTNLEVINESHYVEKILNRFGYIDSKPSPTPYDPSLLLRKNKRIARNQLEYSQIIGSLMYLASATRPDISFAVSKLSRFTSNPGDDHWRALERVMRYLKGTVELGLHYTGYPAVLEGYSDSNWISDVDEIKATSGYVFTLGGGAVSWSKDVVLQSILERTHLCELDCWSQSMKILDYSIPLAGVHQRSGEQVSGTSAFDVLHREKAAIRSNDAFMLVFICNVMIYLWNRLNHYMSIISTIQKPYYRHCDFTMAGFADALRPDKFTGVHFKRWQIRVTLWLTAMKCFWVSTGKPEGVLTAEQQKQFEEATTLFVGCILSVLGDRLVEVYMHMTDAKELWDALNTKFGATDASNDLYIMEQFHDYKMADNRSVVEQAHEIQTMAKELELLKCVLPDKFVAGCIIAKLPPSWRSFGTALKHKRQEYSVEGLIASLDVEEKAREKDAASKGDGGQSSANVVHKAQNKSKGKYKAQQTTNFKKQKKNNNNPNQDERTCFVCGQVGHLARKCPQRKGMKAPAGQTSKSANVTIGNTGDGSGYGNLPTVFSVNQSTNWWVDTGANVHVCADISLFSSYQVARGSTVLMGNGSHASVHGVGTVDLKFTSGKIVQLKNVQHVPSIDRNLVSGSRLTRDGFKLVFESNKVVVSKHGYFIGKGYECGGLFRFSLSDFCNKSVNHICGSVDDEANVWHSRLCHINFGLMSRLSSMCLIPKFSIVKGSKCHSCVQSKQPRKPHKAAEERNLAPLELLHSDLCEMNGVLTKGGKRYFMTLIDDATRFCYVYLLKTKDEALDYFKIYKAEVENQLDRKIKRLRSDRGGEFFSNEFDLFCEEHGIIHERTPPYSPESNGIAERKNRTLTDLVNAMLDTAGLPKAWWGEALLTSNHVLNRVPNRNKDKTPYEIWIGRKPSLSYLRTWGCLAKVNVPITKKRKLGPKTVDCVFLGYAHHSIAYRFLIVKSEVPDMHVGTIMESRDATFFESFFPMKDTHSGSNQPSEIIPSSITPPEQTEHTHELVSEEDVSEAPRRSKRQRTAKSFGDDFTVYLVDDTPKSISEAYASPDADYWKEAVRSEMDSIIANGTWEVTERPYGCKPVGCKWVFKKKLRPDGTIEKYKARLVAKGYTQKEGEDFFDTYSPVARLTTIRVLLSLAASHGLLVHQMDVKTTFLNGELDEEIYMDQPDGFVVEGQEGKVCKLLKSLYGLKQAPKQWHEKFDKTLTSAGFAVNEADKCVYYRHGGGEGVILCLYVDDILIFGTNLEVINEVKSFLSQNFDMKDLGVADVILNIKLIRGENGITLLQSHYVEKILNRFGYIDSKPSPTPYDPSLLLRKNKRIARNQLEYSQIIGSLMYLASATRPDISFAVSKLSRFTSNPGDDHWRALERVMRYLKGTVELGLHYTGYPAVLEGYSDSNWISDVDEIKATSGYVFTLGGGAVSWRSCKQTILTRSTMEAELTALDTATVEAEWLRDLLMDLPVVEKPVPAILMNCDNQTTCEKTIEVCQEIKKLRSYNVGLHPNSEKPGRSLHEGTITKCDRQCIEGDGFETHMSYTMVSILERTHLCELDCWSQSMKILGESSRKLTKDLGRQHQPRIEQQQSNQQRSKQQWWWRPAGGDGFGGGSSKSAAGGRFGCGSARNSARTPGGGEDSKTAVRSIPILLEDDDGGGTDSVVAQANPPPVVVWQSREHIQWWRRGRGELIAAVDGGSGCGSARSSARMPSGGEDSKTR

SEQ ID NO: 137872 - protein, 1863 aa, Oryza sativa
  Clone ID: PAT_MRT4530_39313C.1.pep
MAGFADALRPDKFTGVHFKRWQIRVTLWLTAMKCFWVSTGKPEGVLTAEQQKQFEEATTLFVGCILSVLGDRLVEVYMHMTDAKELWDALNTKFGATDASNDLYIMEQFHDYKMADNRSVVEQAHEIQTMAKELELLKCVLPDKFMAGCIIAKLPPSWRSFGTALKHKRQEYSVEGLIASLDVEEKAREKDAASKGDGGQSSANVVHKAQNKSKGKYKAQQTTNFKKQKKNNNNPNQDERTCFVCGQVGHLARKCPQRKGMKAPAGQTSKSANVTIGNTGDGSGYGNLPTVARGSTVLMGNGSHASVHVVGTVDLKFTSGKIVQLKNVQHVPSIDRNLVSDSRLIRDGFKLVFESNKVVVSKHGYFIGKGYECGGLFRFSLSDFCNKSVNHICGSVDDEANVWHSQVENQLDRKIKRLRSDRGGEFFSNEFDLFFEEHGIIHERTPPYSPESNGIAERKNRTLTDLVNAMLDTAGLPKACEAPRRSKRQRTAKSFGDDFTVYLVDDTPKSISEAYASPDADYWKEAVRSEMDSIIANGTWEVTERPYGCKPVGCKWVFKKKLRPDASHGLLVHQMDVKTAFLNGELDEEIYMDQPDGFVVEGFAVNEADKCVYYRHGGGEGVILCLYVDDILIFGTNLEVINESHYVEKILNRFGYIDSKPSPTPYDPSLLLRKNKRIARNQLEYSQIIGSLMYLASATRPDISFASILERTHLCELDCWSQSMKILDYSIPLAGVHLRSGEQVSGTSAFDVLHREKAAIRHCDFTMAGFADALRPDKFTGVHFKRWQIRVTLWLTAMKCFWVSTGKPEGVLTAEQQKQFEEATTLFVGCILSVLGDRLVEVYMHMTDAKELWDALNTKFGATDASNDLYIIEQFHDYKMADNRSVIEQAHEIQTMAKELELRKCVLPDKFVAGCIIAKLPSSWRSFGTALKHKRQEYSVEGLIASLDVEEKAREKDAASKGDGGQSSANVVHKAQNKSKGKYKAQQTTNFKKQKKNNNNPNQDERTCFVCGQVGHLARKCPQRKGMKAPAGQTSKSANVTIGNTGDGSGYGNLPTVARGSTVLMGNGSQASVHGVGTVDLKFTSGKIVQLKNVQHVPSIDRNLVSGSRLTRDGFKLVFESNKVVVSKHGYFIGKGYECGGLFRFSLSDFCNKSVNHICGSVDDEANVWHSHYWKEAVRSEMDSIIANGTWEVTERPYGCKPVGCKWVFKKKLRPDGFAVNEADKCVYYRHGGGEGVILCLYVDDILIFGTNLEVINESHYVEKILNRFGYIDSKPSPTPYDPSLLLRKNKRIARNQLEYSQIIGSLMYLASATRPDISFAVSKLSRFTSNPGDDHWRALERVMRYLKGTVELGLHYTGYPAVLEGYSDSNWISDVDEIKATSGYVFTLGGGAVSWRSCKQTILTRSTMEAELTALDTATVEAEWLRDLLMDLPVVEKPVPAILMNCDNQTEIKKLRSYNVGLHPNSEKPGRSLHEGTITKCDKQCIEGDGFETHVSGTSAFDVLHREKAAIRYSSNTPALACPALRSGGGGDHGGETQQRGAPAAALLSLGGAATCTRFGSAGEPADCGTAAAGLRPTRLLFTPAMARLSCVQAAVTTCRLPLTNPWDTQQTKLWELSKTPSTVIGKASATYTWRARMRDADLCEDTHWQYHKVESSDTIDNVKAKIQDKEGIPPDQQRLIFAGKQLEDGRTLADYNIQKESTLHLVLRLRGGMQIFVKTLTRKTHHFGASLSLLASSLRMDKEGIPPDQQRLIFAGKQLKDGRTLADYNIQKESTLHLVLRLRGGMQIFVKTLTGKTITLEVESSDTIDNVKAKIQDKEGIPPDQQRLIFAGKQLEDGRTLAGYNIQKESTLHLALRLRGG

SEQ ID NO: 137873 - protein, 882 aa, Oryza sativa
  unsure (1)..(882): unsure at all Xaa locations
  Clone ID: PAT_MRT4530_39314C.1.pep
MGVMSRRVLPAWSSLCYFCPSLPARSRQPVKRYKKIIAEIYQLPPDGEPNDRRIGKLCDYVSRNPTRIPKITDIIRTLLDQRMNDDLRVLGCLMLVDFLNGQVDSTHMFNLEGLIPKLCQISQELREGDKGHRMRNAPLQALAPMIKHMXDDSHIATGHAKVQFEIGCCSEVNCNVSRKGDVRHQNDQDFIINGSLTGLSFSGQNCAKGASDIMPATVNPARWATVCFHSMGSIAXEATSVWGVNDSLFRLFDSHNYWSPENGIAFSILQEMQALMDKSGQNGHLLLSFTIKHIDHKSVAKKPAKQTSILKVASLLAKHAKLKASVTIASATSDLIKHLRKCMHCAVESPNAQNDVDKWNSALYVALEECLVQLTEKVGDVGPVLDMVGVMLENLSCTATIARTTISSVFRTVQIAASIHKSLYNQKASFLAFPEALFHQLLLAMMHPDKKTRVGSHRVLSTIIAPSLLCPWSGISFPIPVKGNDSQSITLLALSAFSSEAVMDEVRIKSRTHEQLQNNVKPETVVGSENGYTHTEPNSRKSPGLGIPLKDELTHFLPLKQNLKFMKLNSSQLVLLLSSIWSQAPLEDNSPANFEAMCHTYNIALLCSMTKSSSHAALVRCFQLAFSLRRMSLNQETKVADIPQTIPLVKAAVPEKMVDPHLCLIDDCRLVISSPQSSNSGIVYGSEEDESDARNFLSCVNKNDTQLKEIVISHFKEKFENLSEKFNGIEEQLLQEFSLDDSFPLSAPLFMETPHSCSMYAEKDDHCFDEEVIPCEMDDDDDIVFEHSGSQSDRKTSGSMASSDVLNVNQLIESVHETARQVANAPVSANLVPYDQMKSQCEALVMEKQQKMSVLLSFKHSRTDSRGSTAENGLETNESSAR

SEQ ID NO: 137874 - protein, 185 aa, Oryza sativa
  unsure (1)..(185): unsure at all Xaa locations
  Clone ID: PAT_MRT4530_39315C.1.pep
GTRLHHRIRGLVRWVVAEVAAGRSPSVALHRYQNYCSSASAAAASPCACSYDVPVGTDVLSLLHRGSHASRLNVLLRVLLVVQQLLQQNKHCSKRDIYYMYXXPYSKKQAVVDRAINDICVLFKCSRHNLNVVPVAKGLVMGWIRFLEGEKEVYCIMNVNAAFSIPVSIEAIKDVVSVADYILIV

SEQ ID NO: 137875 - protein, 736 aa, Oryza sativa
  Clone ID: PAT_MRT4530_39316C.1.pep
MEQQHLSVAQNVTRAATAWAASPVGLLVRVEALVTASCALLATLVFLGSGRRTSRSAAFRFVVWLALMLSYPAVSYTIGLMQSGSFRNDMVVVWACFLLGCADGIAACSLDGADQQARTMISQATQVFYVMLLLISYLGSLQLQLKVLLSLLWLLNVAKLVLRLRGLLAAGRDRVLTADNWLISKYMAHEKVSSIWDFDPATMRGYRYVVTGDDKKNVQYQYGAAEYKVNDELVTVEKAWEQHDGSLLSDDDKLKDLCLSFSLFKLLRQRLNLNGKPFHEPKDIRTLVFVRRGLAGGDSCEDHDRMYRVIEVELGFLFDFYYARYPSPKQTLVPETATFMAAAALSLSTLFSPALLHHHHHHSPPPGGGAVDYTTTSVDIWLARLVISLFLVLELSQYLSLVLSDWHRVKMLCRYVRHRPWWQGHPILEKFLWLTCRATLTRSYWSNSVGQYSLLHSCLENQSSCLLTRVPLHRWVKDQLATTRAVTRRSLPVAVKRQIHRLLRSEWLSNVKYGDRTLQRNDMLQVFDWSTSRYKFGTMGSILIWHIATAICDDELSKLFGAAGGKARPRAAHNAVAADSREVATVLSNYCAYLLLQAPELVTDEVHDERLLMEAVQEAIQNYLRNIGCRRSKDAMFASLREFMPADEANFTGEAVLADGAQLGYQLLSAMADEAALWNLLAEMWVELLLAVAPSENVTGHVKKLATGGELITHLWALLTHGGIIKRREKPYYDSR

SEQ ID NO: 137876 - protein, 175 aa, Oryza sativa
  unsure (1)..(175): unsure at all Xaa locations
  Clone ID: PAT_MRT4530_39317C.1.pep
DAWVKDENLKFMKLNSSQLVLLLSSMWSQAPLEDNSPANFEAMCHTYNIALLCSMTKSSSHAALVRCFQLAFSLRRMSLNQENGLQPSRRRCLYTMASAMLIFSAKVADIPQTIPLVKAAVPEKMVDPHLCLIDDCRLVISSPQSSNSGIVYGXEEDEXDARNFLFCXNKNDSQL

SEQ ID NO: 137877 - protein, 49 aa, Oryza sativa
  Clone ID: PAT_MRT4530_39318C.1.pep
GASAFAPLIVFLTSLVTGSLIIYLCSRQIQCLETAFPANVIIPTIKKNK

SEQ ID NO: 137878 - protein, 74 aa, Oryza sativa
  Clone ID: PAT_MRT4530_39319C.1.pep
PKKQKHKHKKVKLRVPKFSKVDDSGKVSRLRKQCPQCGPGIFMATHFDRVYCGKCTTTYLVEEQAKGGKGKGKK

SEQ ID NO: 137879 - protein, 84 aa, Oryza sativa
  Clone ID: PAT_MRT4530_3931C.1.pep
MAKMVSWNRRSSRQGCSSDDEASGALAAAAEEILWRKCRPLQFPGRITYGSYGNQLQGLPATSPPLRLPARSTGLVACLFPICC

SEQ ID NO: 137880 - protein, 121 aa, Oryza sativa
  Clone ID: PAT_MRT4530_39320C.1.pep
MAIVRREEGGGDAGGEIRAAAAARHRPSPQPPAAAARHRPSPQPPATAAHRRRRRPPKPSPQPLPRSRQSRPLSPPAAAARRAACRSSPRPLPPAAARRSPPRPPTRRRRPSPPRPAPLWM

SEQ ID NO: 137881 - protein, 61 aa, Oryza sativa
  Clone ID: PAT_MRT4530_39321C.1.pep
FTIYFEPADVSLRTVDHTYPPLHNLLYVSLSPNLGLPQYSALNRLSSHLSSSSTMHPWRFF

SEQ ID NO: 137882 - protein, 126 aa, Oryza sativa
  unsure (1)..(126): unsure at all Xaa locations
  Clone ID: PAT_MRT4530_39322C.1.pep
RRLRRQRNGRSRPHCCLISYLTSATHLLPPLAGVTSPPPPFRLPPPPPTPRPTSPSAAGSVAPFIFSWGEAREGDGXGGGGGGGSGGLGGVFWAGAAPSPPAVAAAAAGGIGGWMARGRQRGGRWM

SEQ ID NO: 137883 - protein, 70 aa, Oryza sativa
  Clone ID: PAT_MRT4530_39323C.1.pep
TAHTNLSYDMVFWIINLQSFSSKGFRVIVLQKWMYLSENHEFTLEQLLPSLHSLVRCIFAPLFLFFFSFE

SEQ ID NO: 137884 - protein, 379 aa, Oryza sativa
  Clone ID: PAT_MRT4530_39324C.1.pep
MGGVEPRLIITDECASMKAAISVDFPTSTHRLCMWHIMRKLKDKVGYPLREDKEFLDRFNKCVWCTETDEEFEAQWTSIISDYGLEDHEWLTTRFDTALEEQRHKELENDNVTVHSNQKLKTEWGFEKHGREVFTHEIFDTFQKEVVAVMEKCIVENIEIEGDVKITTVSDSSLRERKVLYNTSTKDISCTCMLFESLGIPCRHVILVLRSARLNQLPEHLVLRRWTKMCKKEPVFDSEGTLLEESESTSTDPMMKKLVFDVFNTMEETIHLAKQSIDSMQLLKNGVLDIAKQVRQMVPATQRTRVSEIEEFLGCSIPTQIDIHPPNDVRAKGKCNRLLGHLDKGKARKKASNDDKEGEVQQNNKKKRKANGSKKPLDP

SEQ ID NO: 137885 - protein, 383 aa, Oryza sativa
  Clone ID: PAT_MRT4530_39325C.1.pep
MAKLLPDDVLTIILRCLAPHDLAMSRCVCKLWCTIIDTHRMLRVDLLPHSVGGIFINFHDLGLSEFFARPSTGPTISGNINYLPLTSIVRGHCNGLLLLYSHISRPGMKQFYVVNPATRQWVQLPPPPRPDIGIMHLDNLYLAFDPTLSSHFEVFQIPYVDVFRHRSELNPAIEGIEWPPSTCVLHVFSTRTRQWEERSFVREGEAAGSLAIIRRDFPNFLHNAVYCRGVLYVRCQTNFVMRISLSDGKYRIIKPPVEIERYNYHEYPDAYGHDNSEAIEEQNFDWDSDNDNFINTTDERNLRYGRITFLGFHPYKEVVFSSHSLSRGLAYHLNTMKFRGFGKIQDLGNLGPKYYGGCMGIQPFIEESFLCTPWMGEFPKDIN

SEQ ID NO: 137886 - protein, 145 aa, Oryza sativa
  Clone ID: PAT_MRT4530_39326C.1.pep
MKQFYVVNPATRQWVQLPPPPRPDIGIMHLDNLYLAFDPPCRHTLRISLSDGKYRIIKPPVEIERYEESNIYMGLSQKRVYCTFFDDPDIIYILDESYGKMEWVQKNAISCLVIHAFQQTDGPWTLQDITIMNILMRTDMTTVRQ

SEQ ID NO: 137887 - protein, 101 aa, Oryza sativa
  Clone ID: PAT_MRT4530_39327C.1.pep
MRISLSDGKYRIIKPPVEIERYEESNVYMGLSQKRVYCTFFDDPDIIYILDESYGKMEWVQKNAISCLVIHAFQQTDGPWTLQDITIMNILMRTDMTTVRQ

SEQ ID NO: 137888 - protein, 140 aa, Oryza sativa
  Clone ID: PAT_MRT4530_39328C.1.pep
MAALVLSVVSFFVPKRWVQVRRRRNGKRGGAETELAAGATTPAGGRQRTASNALSRTPTFVCECPLESGGEILKGLLRRRRADADAARRGPQSPQRRVSPGGTNHRSGSRAPATQPMSAPALPDELWTDHDLLERCSKLL

SEQ ID NO: 137889 - protein, 247 aa, Oryza sativa
  unsure (1)..(247): unsure at all Xaa locations
  Clone ID: PAT_MRT4530_39329C.1.pep
MGRKFFXVGGNXKCNGTTDQVDKIVKILNEGQIVPTVHTTEHTTXPIMFXPFVKSQLRPEIQVAAQNCWVKKGGAFTGEVSAEMLVNLSIPWVILGHSERRSLLGESNEFVGDKVAYALSQGLKVIACVGETLEQRETGSXLMNDAAITKXWTFVVVAYEPVWAIGTGKVATPDQAQEVHDGLRKWLAANVSAEVAESTRIIYGGSVTGANCKELAAKPDVDGFLVGGASLKPEFIDIINSATVKSA

SEQ ID NO: 137890 - protein, 190 aa, Oryza sativa
  unsure (1)..(190): unsure at all Xaa locations
  Clone ID: PAT_MRT4530_3932C.1.pep
PRARAADGRSPHGCRGARPKAATPAQPTGGGAPAPRWSPPVTTGAVERRPREGREGGSETAVHGSPRVDGGDGNGDRSGGRRRHGSGRRGRRRSSGRRAKRRGGRGRXGRGEAEGGDAEAGGGPGRRRRRTEARRRRRRERTTARARFXRGEKAARVGNGGGRHGECLNRAGGERGWPEGKETGAAISAP

SEQ ID NO: 137891 - protein, 149 aa, Oryza sativa
  Clone ID: PAT_MRT4530_39330C.1.pep
PPAPPPPHPPPAAFCPPSAPARPGPLCGRPPRPRGPAPSSSAASAPAARRRRRPSPPLPPPGSCAAQCSCRASPRSTSCAAFPGPPPSPRQCFRPPLFLQLLSPCAASRGPPARPPLLFRAWPASPFPRGALPGLGGWARCAQSTLHQK

SEQ ID NO: 137892 - protein, 305 aa, Oryza sativa
  Clone ID: PAT_MRT4530_39331C.1.pep
MRDRLLLQMLLRDPPVHLMCSSPLARPPQKPKSNLQLSSPPRPVPSNQLLVEMGRKFFVGGNWKCNGTTDQVDKIVKILNEGQIASTDVVEVVVSPPYVFLPVVKSQLRPEIQVAAQNCWVKKGGAFTGEVSAEMLVNLSIPWVILGHSERRSLLGESNEFVGDKVAYALSQGLKVIACVGETLEQRESGSTMDVVAAQTKAISERIKDWTNVVVAYEPVWAIGTGKVATPDQAQEVHDGLRKWLAANVSAEVAESTRIIYGGSVTGANCKELAAKPDVDGFLVGGASLKPEFIDIINSATVKSA

SEQ ID NO: 137893 - protein, 95 aa, Oryza sativa
  unsure (1)..(95): unsure at all Xaa locations
  Clone ID: PAT_MRT4530_39332C.1.pep
NFKVEYSCRSAEPLAATTPRGRRPPNRPDRLSLAEWRAPAAALRGSTXPARAASPRRRLGFGNGERREGAEPGRDGSRRESERGPCGRVVAKWVN

SEQ ID NO: 137894 - protein, 43 aa, Oryza sativa
  Clone ID: PAT_MRT4530_39333C.1.pep
SCLVIPVPACYSCYHCHKLSGLYLCLICVSCEMMPISHVLLLF

SEQ ID NO: 137895 - protein, 133 aa, Oryza sativa
  unsure (1)..(133): unsure at all Xaa locations
  Clone ID: PAT_MRT4530_39334C.1.pep
RCSIDRAKKNYKITTLEDRNQEKGKKYXTTHTQTAPIHRSGRRLAPDQPPLSVTYHXRATKEHRRDRQKNTLTTNTKPNSILERACINRSRGFGKGMLKQRLQGEKRQENCRCRPSGFQKSQDWAFARQPPLL

SEQ ID NO: 137896 - protein, 487 aa, Oryza sativa
  Clone ID: PAT_MRT4530_39335C.1.pep
MTWSFLLLQVKVSGLAWTVRTWFLTYMTVYRWRVQSCVSSVRRLLSSAWHRARTLPSSWFSSSPAPSSTSWWIPLDLALPSLTLPAPVLRRLVPATQATRASMTLPLPGPPLWATTRTPAPAAPMPRSTATRSIPTPRLTATIPGGTLRSLPATPTTRSTPAAVPGLRAASSPSPLPAPTTPSRMRSRSTPLSSPAAVPPPWLLTKPPCSSSSPAPTSTTSPMSPSAPMPSTPSTTRAPRATRASTTLPLPGPPPRAMRPAPAPAPAAAAAAPMPRSTAAATSPLTWTSPLTSAATTSPLTWTSPRTSTPRTSSPSSTATTPPAPTPTPRLTLAVAAAPATMTSTAPLPEPWPWLAASTPPPPIPALRLTLAATPATRSRSTTAPAAVPGVTAASSSTTTPPLLTTMPVALLTAPPSATRSIPLPLSRPTTATPATRSIPLPSPKPRPTATPAARSTSTPLPLPLPAPAPPWLMTRARLLMTARAAR

SEQ ID NO: 137897 - protein, 130 aa, Oryza sativa
  unsure (1)..(130): unsure at all Xaa locations
  Clone ID: PAT_MRT4530_39336C.1.pep
YILLFSGILVAELIPRRRSHLKRCMESDHKTISPDMIKHVSQFWFNVAEAIRDQHSVERLAEEMLRXLASQHTSDEEAYWILWTLFNQSFMHKTVMRAMFVDKFLLWQTFPLCCLRWILHYAVFEFPANS

SEQ ID NO: 137898 - protein, 87 aa, Oryza sativa
  Clone ID: PAT_MRT4530_39337C.1.pep
MCCCCGGGGDGDGDGCKCRPLGWLLGLPFALLAVLVSIVGAIIWIIGLPISCICPCCLCVTLVLEAAVELIKAPLHVMTWFTSKIPC

SEQ ID NO: 137899 - protein, 587 aa, Oryza sativa
  Clone ID: PAT_MRT4530_39338C.1.pep
MELAAGEDANGLDASNSVFLFVGEVISRVSRRGSTGILVAELIPRIRSHLKRCMESDHKTISPDKIKHVSQFWFNVVEAIRDQHSVERLESPIDLIRKMASAIALTFSKVVDPNNPLYLDDNCCENVEWDFGVLSPKEITAPSKDVELISKLKPSLPENKKHAGERRAKAIKHDTSENRAKIIEIKSLDSCETSGSAVNGHFEEEECDEEIMNIDASSDSSLEPYDLSDDDSDLQKKFTQLKDLAAALRKPDDPDGVENALSSAEKLVRASPDELRHNSGDLVRALVHVRCSDVAMEGEEDSAEEKRQKALVALLVTCTFESLDVLTKLLYSSSVDVSQRILIIDVMTEAAQELAETKIVRRELRHGNLISDTSPSWLVPSDQGPAGAGPWREVSESGTLLNWSHRYEREVPSRSGQVKSGKSRKWGLGKAKDLQTEWSKNRFPLYAAAFMLPVMQGYDKRSHGVDLLNRDFVVLGKLIYMLGVCMKCMAMHPEASAVAPALLDMIRSRAVSQHPEAYVRRSVLFAASCILIALHPSYVASSLIEGNQDVSTGARYPWGPPATGWGHSSSVGSAARDDPTEEIRPVQ

SEQ ID NO: 137900 - protein, 73 aa, Oryza sativa
  Clone ID: PAT_MRT4530_39339C.1.pep
SPAPIRTHHALDRRPPSGPVPLATSHEPNTATSALLQPLSATWFKSRNSSKIEIYPTKRLFMLKVRKSSQACK

SEQ ID NO: 137901 - protein, 524 aa, Oryza sativa
  Clone ID: PAT_MRT4530_3933C.1.pep
MDGRHLLLLHVLALLLLAVVVAAGGGAVVGRDSAVLQLRELQWGSSGQVRYSQSKRFEKKMTGEHKKAAAAARTRTRSTTVLELKHHSLTAIPDHPAAQETYLRRLLAADEARANSLQLRNKAAFTQSGKKATAAAAAAAGAEVPLTSGIRFQTLNYVTTIALGGGGSSRAGAGNLTVIVDTGSDLTWVQCKPCSVCYAQRDPLFDPSGSASYAAVPCNASACEASLKAATGVPGSCATVGGGGGGGKSERCYYSLAYGDGSFSRGVLATDTVALGGASVDGFVFGCGLSNRGLFGGTAGLMGLGRTELSLVSQTAPRFGGVFSYCLPAATSGDAAGSLSLGGDTSSYRNATPVSYTRMIADPAQPPFYFMNVTGASVGGAAVAAAGLGAANVLLDSGTVITRLAPSVYRAVRAEFARQFGAERYPAAPPFSLLDACYNLTGHDEVKVPLLTLRLEGGADMTVDAAGMLFMARKDGSQVCLAMASLSFEDQTPIIGNYQQKNKRVVYDTVGSRLGFADEDCSYA

SEQ ID NO: 137902 - protein, 1478 aa, Oryza sativa
  Clone ID: PAT_MRT4530_39340C.1.pep
MASNPSSSAAGGGGDHGGARLEDLALDKVAEAADAVAAASSAGEVVRAIHAVAAIVFPVDSATVAGTVDEPFRSQIINGVSLSSDERGSWRHAFCHGPAFPTLSKILLGHVALKWLHQIRACARKEICDSFFVKGSPTEVIQALVPALSHKLLVATEQAAMELAADEDANGLDPSNSVFLFVGEVISRASRRGSTGILGAELIPRIRSHLKRCMESDHKTISPDKIKHVSQFWFNVVEAIRDQHSVERLAEEMLRQLASQHTSDEEAYWILWTLFNQSFMHKTVFEFIHIGSSVSGMLHLSVKEKVLLRAMFVDKFLRWKTFPLCCLRWILHYAVFELPPNSGIETQKQRTSSFLAIGLCLEKMSKRELETTKDVLNNILEGVSCRLESPIDLIRKMASAIALTFSKVVDPNNPLYLDDNCCENVEWDFGVLSPKEITAPSKDVELISKLKPSLPENKKHAGERRAKAIKHDTSENRAKIIEIKSLDSCETSGSAVNGHFGEEECDEEIMNIDASSDSSLEPYDLSDDDSDLQKKFTQLKDLAAALRKPDDPDGVENALSSAEKLVRASPDELRHNSGDLVRALVHVRCSDVAMEGEEDSAEEKRQKALVALLVTCTFEPLDVLTKLLYSSSVDVSQRILIIDVMTEAAQELAETKIVRRELRHGNLISDTSPSWLVPSDQGPAGAGPWREVSESGTLLNWSHRYEREVPSRSGQVKSGKSRKWGLGKAKDLQTEWSKNRFPLYAAAFMLPVMQGYDKRSHGVDLLNRDFVVLGKLIYMLGVCMKCMAMHPEASAVAPALLDMIRSRYAKPKTSISVLKTFLVITKWAVSQHPEAYVRRSVLFAASCILIALHPSYVASSLIEGNQDVSTGLEWIRTWALHVAETDPDTECTSLMMMSKRELDESCRGEVSVGTTSHRMGPLLERWISREGRSDGGDSSGPAQPLFRISLSLASQEQRQSKASSAMGNSLPVESKFTFEEENDRIKYVVSSMQGWGEKMEDAHAAILNLDDATSTSFFGVYDGHGGAEVALYCAKQFHIELCNHEDYHNDLINALDNVFLSMDENLQQSDAWRELVIPHDNGCMYFLKAGVCAKPFPQATYTGPAYEGSTACVVVIRGNQMIVGHVGDSRCVLSRQGGLAIDLSFDHKPCTRTESERERVQNAGGRSLGLRCEQVMGNYVVKEQWVLGDFGGGDFAFKKNKDLDREKQMLVCDPDILADDITDDMEFLVIASQGLWSCVDSADVVSYIHDRLSVEGAELRVICEEVVEFGLASGENTTVILVQFKPGAFQYQLVDPAGFGTAVSNIASTSAAPAGASDTSDEGVMADSCATADTSGSARAESGELVPTPSANNTVTDEVDPTGTVAADDKVDPNSSANADADDGAPKPSLGAVIESDEVALDATATGHQVAVRQQEEFDPKKCWICGKGYKKILLEPSSARARNPLLAHAKTCESEDKKAKKKITKYMMKANVTNQYH

SEQ ID NO: 137903 - protein, 205 aa, Oryza sativa
  unsure (1)..(205): unsure at all Xaa locations
  Clone ID: PAT_MRT4530_39341C.1.pep
GCATVDPSCRKVDGKRKEARPSRRLEATIPENPRLPNSDENDMDAGGEEAKQERHLVLAHELFLLSRPDLDDLANVALRSDALDAVKSDGMAPLFESLATAGVLLKPDDAXLLAEMRARIDEEDSKLTPTGLLILQWATATATVSCRGRRPTAARHDAEMGKCCLGDWDWLIAEQWRGSQTDARRSRQDWQRRDAAYEKSRREKI

SEQ ID NO: 137904 - protein, 195 aa, Oryza sativa
  unsure (1)..(195): unsure at all Xaa locations
  Clone ID: PAT_MRT4530_39342C.1.pep
MSTSASPPRASTVEYVEHLSHQIAVPSITDEHQIFLGPVSNPDPTEFINGETNRIPFRFANPDLSLWKNTFKSWPSAEKSWPAWYMRMSASKLTHXEEIGISQALALTVADMAKEEPMMVAATYFWSTAMNAFLFSQGPMTPTLLDIKMITGLDITSSANLASLNTKSTHEFKTRSICGWTGYAAKNMVTGSIST

SEQ ID NO: 137905 - protein, 200 aa, Oryza sativa
  Clone ID: PAT_MRT4530_39343C.1.pep
RVQSCVSSVRRLLSSAWHRARTLPSSWFSSSPAPSSTSWWIPLDLALPSLTLPAPVLRRLVPATQATRASMTLPLPGPPLWATTRTPAPAAPMPRSTATRSIPTPRLTATIPGGTLRSLPATPTTRSTPAAVPGLRAASSPSPLPAPTTPSRMRSRSTPLSSPAAVPPPWLLTKPPWCRCCRPSWITTTPLTPARSQRGG

SEQ ID NO: 137906 - protein, 174 aa, Oryza sativa
  Clone ID: PAT_MRT4530_39344C.1.pep
MGNSLPVESKVTVEEENDRIKYVVSSMQGLGDKMEDAHAAILSLDDTTSTSFFGVYDGHGGAEVASYCAKQFHIELCNHEDYHNDLTNALNNVFFSMDENLQQSDAWRELVIPRDNGWMYFLKAGICANFWPFVQCAYCIYEKGNGRMYVISRLLFFLEMYFGVGRDMFNPNLD

SEQ ID NO: 137907 - protein, 1518 aa, Oryza sativa
  unsure (1)..(1518): unsure at all Xaa locations
  Clone ID: PAT_MRT4530_39345C.1.pep
MASNPSSSAARAAGSQGGGHGGARLEDLALDKVAEAADAVAAASSAGEVVRAIHAVAALVFPVDSAAVAGTVDEPFRSQIINGVSLSNDERGSWRHAFYHGPAFPTISKILLGHVALKWLRQIRASARKEIYDSFFVKGPPTEVIQALVPALSHKGGSKEDHNIMCSNIERLLILCLVENKGVSQIIAEFTLLVATEQAAMELAAGEDANGLDASNSVFLFVGEVISRVSRRGSTGILVAELIPRIRSHLKRCMESDHKTISPDKIKHVSQFWFNVVEAIRDQHSVERLAEEMLRQLASQHTSDEEAYWILWTLFNQSFMHKTVFEFIHIGSSVSGMLHLSVKEKVLLRAMFVDKFLRWKTFPLCCLRWILHYAVFELPPNSGIETQKQRTSSFLAIGLCLEKMSKRELETTKDVLNNILEGVSCRLESPIDLIRKMASAIALTFSKVVDPNNPLYLDDNCCENVEWDFGVLSPKEITAPSKDVELISKLKPSLPENKKHAGERRAKAIKHDTSENRAKIIEIKSLDSCETSGSAVNGHFGEEECDEEIMNIDASSDSSLEPYDLSDDDSDLQKKFTQLKDLAAALRKPDDPDGVENALSSAEKLVRASPDELRHNSGDLVRALVHVRCSDVAMEGEEDSAEEKRQKALVALLVTCTFEPLDVLTKLLYSSSVDVSQRILIIDVMTEAAQELAETKIVRRELRHGNLISDTSPSWLVPSDQGPAGAGPWREVSESGTLLNWSHRYEREVPSRSGQVKSGKSRKWGLGKAKDLQTEWSKNRFPLYAAAFMLPVMQGYDKRSHGVDLLNRDFVVLGKLIYMLGVCMKCMAMHPEASAVAPALLDMIEXRYAKPKTSISVLKTFLVITKWAVSQHPEAYVRRSVLFAASCILIALHPSYVASSLIEGNQDVSTGLEWIRTWALHVAETDPDTECTSLMMMSKRELDESCRGEVSVGTTSHRMGPLLERWISREGRSDGGDSSGPAQPLFRISLSLASQEQRQSKASSAMGNSLPVESKFTFEEENDRIKYVVSSMQGWGEKMEDAHAAILNLDDATSTSFFGVYDGHGGAEVALYCAKQFHIELCNHEDYHNDLINALDNVFLSMDENLQQSDAWRELVIPHDNGCMYFLKAGVCAKPFPQATYTGPAYEGSTACVVVIRGNQMIVGHVGDSRCVLSRQGGLAIDLSFDHKPCTRTESERERVQNAGGRSLGLRCEQVMGNYVVKEQWVLGDFGGGDFAFKKNKDLDREKQMLVCDPDILADDITDDMEFLVIASQGLWSCVDSADVVSYIHDRLSVEGAELRVICEEVVEFGLASGENTTVILVQFKPGAFQYQLVDPAGFGTAVSNIASTSAAPAGASDTSDEGVMADSSATADTSGSARAESGELVPTPSANNTVTDEVDPTGTVAADDKVDPNSSANADADDGAPKPSLGAVIESDEVALDATATGHQVAVRQQEEFDPKKCWICGKGYKKILLEPSSARARNPLLAHAKTCESEDKKAKKKITKYMMKANVTNQYH

SEQ ID NO: 137908 - protein, 82 aa, Oryza sativa
  Clone ID: PAT_MRT4530_39346C.1.pep
VDPRAAGSLTPSRRLRRLAAARCLRRKPSTHLFPSFPCLFCLLGVQDRPQSYAGSASKGQRVMHFSQVMSQQGSCMAQLASR

SEQ ID NO: 137909 - protein, 122 aa, Oryza sativa
  unsure (1)..(122): unsure at all Xaa locations
  Clone ID: PAT_MRT4530_39347C.1.pep
KALLEGCMTWWCPCITFGRVAEIVDRGSTSCGHSGALYVFLAVITGXSGCTCTYRGKMRAQYGLSGEPCGDCCIHCWCEPCALIQEYRELAARGYDPKLGWHLNMERRAAAAAAPAVQHMGR

SEQ ID NO: 137910 - protein, 63 aa, Oryza sativa
  unsure (1)..(63): unsure at all Xaa locations
  Clone ID: PAT_MRT4530_39348C.1.pep
NPNSMVSHIAGKSSIFRALPNDVLANAYRISREEAXRLKHNRGMSSGITPTKQSYQTLYAQNL

SEQ ID NO: 137911 - protein, 108 aa, Oryza sativa
  Clone ID: PAT_MRT4530_39349C.1.pep
IITDNGTQFTGGVFKDFCEDFGIKICYTSIAHPMSNGQVEHANANGLISCHKFFGLFALHPVGLWANHQERYEDDRVNDLNRLEEAREAALIQSARYLQGLRRYHNRN

SEQ ID NO: 137912 - protein, 992 aa, Oryza sativa
  unsure (1)..(992): unsure at all Xaa locations
  Clone ID: PAT_MRT4530_3934C.1.pep
AKLFAQKLRRFAPDRKQAIREEIDKLLKAGFIREVLYPEXLANPVMVQKANGKWRMCVDFTDLNKACPKDHFPLPQIDQLVDSTAGCELLSFLDAYSGYHQISMAKEDEEKTSFITPFGVFCYVKMPFGLITTGNTFQRTVQGALNDQLGNNVEAYIDDIVVKIKTSDSLIDDLRETFDNLRRYCLILNPEKCTFGVPSGKLLGFLVSGRGIEANPEKIKAIKNMKSPTRLKEVQKLTGYMAALSRFVARMGERGQPFFALLKKHDKFVWTQEAEEAFIAVKRYLSNPPVLVAPQPNEELFLYIAATPYSVSTVIVVEREKVQRPVYYISEALHDVKTRYPXIQKLLYAVIMMSRKLRHYFQAHKVTVVSSFPLGEVVRNKDVVGRIAKWVVELSXFDVHFVPRTAIKSQVLADFVANWTMPENRSDSQIDNETWIMAFDGALNSQGVGAGFILTSPSGDQFKHAIHLNFRATNNTAEYEGLLAGIRAATVLGVKRLIVKGDSELVANQVHKDYKCSSPELSKYLAEVRKLEKRFDGIEVRHVYRNDNIEPDDLARRASRREPLEPGNFLDVLTKPSVKEANNEDSLVAPDISSGAIEAERAVADIETIDDWQIPLIKFISSDELPEDDAEAEKITRQAKIYCMIDNDLYKKAPNGVLVKCVSFDDGKHLLLDIHEGICGSHVAGRTLVGKAFRQGFFWPIALKDACDMXTHXATSASASDYPSYLAVLVLGARHTQTIPTRTRRLQVPIXAIDKFTKWIEATPTGEIKANNAIKFIKGIFCRYGLPHRIITDNGSQFICADFQDYCIRLGVKICFASVSHPQFNGQVERANDIVLQGMKTLLXAVRTTPTTSNKETPFFLVYXSWAMLPTELRHQSTRVXKYFDENQEEQRNDDVNLLEEHRERVAVRAASYQQALRRYHEKRIRARTLSIGDYVLRRVQSQAGRNKLSPKWEGPYTITHVLRPGTFKIADGDGRELANSWNIDQLRKFYV

SEQ ID NO: 137913 - protein, 72 aa, Oryza sativa
  unsure (1)..(72): unsure at all Xaa locations
  Clone ID: PAT_MRT4530_39350C.1.pep
MEVAVREIATYWFEDQRASRIISQTPMEVAVREIAMYWFENQRASRIMSRKPMDVXAVREIATYWFEDQRTC

SEQ ID NO: 137914 - protein, 128 aa, Oryza sativa
  Clone ID: PAT_MRT4530_39351C.1.pep
MDEARMRWKREKRNTESGVVKKRKKTNRGNVGCGGKVVCSCNESKTVLLILYISLIMQPAATYVFVADQVFIAASSDEAPFLNSDLFSLCHVPSGDEPTCPPFQTIGAITIHTESAGATAVLSVIYSS

SEQ ID NO: 137915 - protein, 441 aa, Oryza sativa
  Clone ID: PAT_MRT4530_39352C.1.pep
MAAFLVWILLLLPYVAISSTASHGVRLELTHADDRGGYVGAERVRRAADRSHRRVNGFLGAIEGPSSTARLGSDGAGAGGAEASVHASTATYLVDIAIGTPPLPLTAVLDTGSDLIWTQCDAPCRRCFPQPAPLYAPARSATYANVSCRSPMCQALQSPWSRCSPPDTGCAYYFSYGDGTSTDGVLATETFTLGSDTAVRGVAFGCGTENLGSTDNSSGLVGMGRGPLSLVSQLGVTRFSYCFTPFNATAASPLFLGSSARLSSAAKTTPFVPSPSGGARRRSSYYYLSLEGITVGDTLLPIDPAVFRLTPMGDGGVIIDSGTTFTALEERAFVALARALASRVRLPLASGAHLGLSLCFAAASPEAVEVPRLVLHFDGADMELRRESYVVEDRSAGVACLGMVSARGMSVLGSMQQQNTHILYDLERGILSFEPAKCGEL

SEQ ID NO: 137916 - protein, 84 aa, Oryza sativa
  Clone ID: PAT_MRT4530_39353C.1.pep
GKRFLFNHLIGQILNCLDSLPKLLMIENALISMHWNQCPKNAYVVVHFLNPRHVYILEWSRLLPTLGPQIKKSYPFNTPYLPTH

SEQ ID NO: 137917 - protein, 101 aa, Oryza sativa
  Clone ID: PAT_MRT4530_39354C.1.pep
MGVGVEMEGWLEGRVTAGEVEAKVRLVMESEQGRKLRDRVEAHREATAMAWKDGGSSRAAFAQLLSDIDDARGKQNQTKFSIPDYIAERLKCHFSKRTVRT

SEQ ID NO: 137918 - protein, 556 aa, Oryza sativa
  unsure (1)..(556): unsure at all Xaa locations
  Clone ID: PAT_MRT4530_39355C.1.pep
PRRAAATQQVCTSDIYCSRCRACSTPRSAGSTRTPPPTRTRSPSPPALSGPAPSASPRTTAPPPPPAPPAAPAAAGTLSAARXPPPPPPPPLFPPPPLLPPPPLLPPPPLLPPPPPPSPPLPPPPGPPPTPPPPPPSPPLPPPTPPPPSPPLPPPKPPPPGPPPPPPPPPLSPLPTWPTTWQPPQPRARXPGQVAPSQHPPSVFPPPPPSVHPAXAPEPRAPETLAPAPACALPTVNPTTAMWVPRGGPRPPASASLSPRPLSWAAPPAPAPXPLGPAQPHXTPRAAPKPPPWPPPRTAALPSSSPRSPCPLSSRRPPRRGAAPTXPTTKPPPPPCQPPPPTPTPATPTTPPTPWTPPPATPTPPTPTPWTPTPATPPPTPATPATPTTPPTPAPAPPPPATPAARCCPASPTSTPRSASAPPSRPXARPQPRPPPRSPWPPPPPRTAALPSPRSSWRRWPCPRSSRRPRRAPTXPTPKPPPPPPPAPSGVPCPPPPYTPTPATPTGKCPPASPTSTPRSASAPPSRPRRSASASSSPLPSPCSSTSAASTSPPAS

SEQ ID NO: 137919 - protein, 49 aa, Oryza sativa
  Clone ID: PAT_MRT4530_39356C.1.pep
MDYRKDRWDMDYRKAGAVVKKISSFVPRRRWDMDYCKARWDMDYRVNAS

SEQ ID NO: 137920 - protein, 306 aa, Oryza sativa
  Clone ID: PAT_MRT4530_39357C.1.pep
TKPPPPPCQPPPPTPTPATPTTPPTPWTPPPATPTPPTPTPWTPTPATPPPTPATPATPTTPPTPAPAPSTPTGKCPVDTLKLLACVDALNGLVHAVVGATAGDTCCPLLSGVADLDAALCLCTAIKAKALGLSLVLPVAISVLVNDCGKYVPSDFQCPSTDPPRPSPSSLHPTWPVPPFPLLPAPYCPTPKPPPPPPPAPSGVPCPPPPYTPTPATPTGKCPVNTLKLLACVDALNGLVHAVVGAKASDTCCPLLSGVADLDAALCLCTAIKAKALGVSLVLPVAISVLVNECGKHVPSSFQCPS

SEQ ID NO: 137921 - protein, 218 aa, Oryza sativa
  Clone ID: PAT_MRT4530_39358C.1.pep
MSPVKVFGRAISTNVSRVLVCLEEVGADYELVTVDFLAGEQNSPEHVERNPFGKIPALQDGDLVLFESRAIAKYILRKYKSSKVDLLRESDIREAALVDVWTEVEAHQYYPALSPIVFECIIFPIMRGVPTNQQVVHESLEKLKKVLETYEARLSGSRYLAGDFLSFADLNHFPFTFYFMATPCASLFDAYPHVKAWWEGLMSRPSIKKISANMPTKF

SEQ ID NO: 137922 - protein, 45 aa, Oryza sativa
  Clone ID: PAT_MRT4530_39359C.1.pep
SLHRCDSTLQEQSRHPSLSLLDVSIVVTKSECAPYARACFRLTRE

SEQ ID NO: 137923 - protein, 93 aa, Oryza sativa
  Clone ID: PAT_MRT4530_3935C.1.pep
MAFRLGCGPFQRRRPAKGICIGLARGASTQPDDRRGCTQCDDRRGSTQHGGGYGSMPNIGSKSMAASLRVDRRSWVSESTMQLWKTNNSMEKN

SEQ ID NO: 137924 - protein, 270 aa, Oryza sativa
  Clone ID: PAT_MRT4530_39360C.1.pep
EERKIDDYVRNSHFTIYSNVGEETLLDHWIAQTHSAMSSSSMESPDSLGSNSLTSVRSFPSKSSHFTLPFSAHLLSAQSAFFRLLFSGAGGGAATATAVFTSSSSSSSSSSPSTSLLSSPSFSLPPPQSSEPAAACPPRRPPGQRRRRLHPWICGRRRRLHLWIWGGRGCSTGEGRSSSHSARASSNLGISSPGAAAESEPRTHHIKSNPPKNRFALAANQSEPTRSTKKLHARNPSRANLKNSSSRLNLALGKAQLERDQGEEEDRRRR

SEQ ID NO: 137925 - protein, 61 aa, Oryza sativa
  Clone ID: PAT_MRT4530_39361C.1.pep
MGRNVMGRKVLGRYGHLKRVGPWAVAVPPAGDKLPPATATVDVMIRHCQSLQISTFLSQSP

SEQ ID NO: 137926 - protein, 86 aa, Oryza sativa
  Clone ID: PAT_MRT4530_39362C.1.pep
MDKVWSAAIMRRCVASWSWLSSSAGTSEVRVLPIKECGGGKNDKDALLPRRECGVSVLTFLIVFKTLLTVSFVRRLTKATFSLSIY

SEQ ID NO: 137927 - protein, 34 aa, Oryza sativa
  Clone ID: PAT_MRT4530_39363C.1.pep
MVVVVTEDAEEMTSLIFGCGRGEGNTRGSWNGKS

SEQ ID NO: 137928 - protein, 122 aa, Oryza sativa
  Clone ID: PAT_MRT4530_39364C.1.pep
YLRGAFTSTMSCSQENNNPHPAHPLSYVAKKLMFIQVQFFCPWNSIVILGKHSLNKYHLNSLLAGSLSMWCKTIIGTASLQPSNTFTNLFWWGSSISRWCKNIYQCKASLISCKDSSYTVVP

SEQ ID NO: 137929 - protein, 93 aa, Oryza sativa
  Clone ID: PAT_MRT4530_39365C.1.pep
KTHKSRRLKVRWKVLRVSIVRGNMAFQVSSMIQKKTCRHRLSEKRIIPVPLNGEWPLSSPNNGQWLIHLPVVLRLSVWYKGKLLQGFVLWFCL

SEQ ID NO: 137930 - protein, 64 aa, Oryza sativa
  Clone ID: PAT_MRT4530_39366C.1.pep
FLLTLPQNKTYFKIPPILKSPNNHYISYLSKHILNFNTTKFHHFIISKSFKIKIHLNHQFVNTS

SEQ ID NO: 137931 - protein, 51 aa, Oryza sativa
  Clone ID: PAT_MRT4530_39367C.1.pep
ASVHSLYLKTPRCFSNLNPEQLNRVTQHSAPVCFYVMQLFPLPLKKKKQAA

SEQ ID NO: 137932 - protein, 484 aa, Oryza sativa
  Clone ID: PAT_MRT4530_39368C.1.pep
MASLICSQIKLSKAHIRNRRQIHENGQIRLPKSLYWKPLHSGHFENIVLRCTQNLSWEASLPYASAEDGANIIKGTEVVEPIDTEEAPEIPILQSDQDFVEVIKEPSMQLTTFKLPIWLLGPSILLVTSIVPTLWLPLSSVFLGPNIAGLLSLVGLDFIFNMGAMLFFLMADACGRPEANSSELIKQIPTSYRFWNLAASIVGFLVPLALFFASHKGTLQPHIPFIPFAVLLGPYLLLLSVQVLTEMLTWHWKSPVWLVAPVVYEGYRVLQLMRGLQLADEITAPGWMVQSLRGLVSWWVLVLGIQLMRVAWFAGLKFASTSSTKCYSDATPGTVWGCSQVPSSSTSSVDRIDEQLSDFETKKQISCSMQLTNRTDDYIAFKFNKGSGNVVDERKLKVVYVQPPRPPSPVLEGSDEGSSPRASLSEGGNLNYQDTTRAHKDAEDVTSDSETSALISRLTEERNSAIQQNNKLLEEMDLVRREIH

SEQ ID NO: 137933 - protein, 253 aa, Oryza sativa
  unsure (1)..(253): unsure at all Xaa locations
  Clone ID: PAT_MRT4530_39369C.1.pep
MGSDSKELLGIEPLELRVSFETKKQISCSMQLTNRTDDYIAFKVKTTSPKKYCVRPNSGIVPPRSTSDVIVTMQAQREAPADMQCKDKFLVQSVVVTEGTTTKDVTGEMFNKGSGNVVDERKLKVVYVQPPRPPSPVREGSEEGSSPRASLSEGGNLNYQDTQTTRESDEPPLLSATRAHKDAEDVTSDSETSALISRLTEERNSAIQQNNKLLEEMDLLRXREISKQNGGFPXVFVVVVALLGILTGYIMKR

SEQ ID NO: 137934 - protein, 50 aa, Oryza sativa
  Clone ID: PAT_MRT4530_3936C.1.pep
TRPPTMRRRVHGSKHLGRTLIAPSALSHCTLWSSHAPREIGEPMASLTAP

SEQ ID NO: 137935 - protein, 81 aa, Oryza sativa
  Clone ID: PAT_MRT4530_39370C.1.pep
KKWTPPRHHANHYAASRQSRSPHHPVAPTSPLSPRCDLLIRDFAISPHSNLFAGIAPLSPIAPQPFCHLPPPADLSNASFS

SEQ ID NO: 137936 - protein, 90 aa, Oryza sativa
  Clone ID: PAT_MRT4530_39371C.1.pep
QVLTKMLTWHWKSPVWLVAPVVYEGYRVLQLMRGLQLADEITAPGWMVQSLRGLVSWWVLVLGIQLMRVAWFAGLKFASTSRYGASDDNK

SEQ ID NO: 137937 - protein, 339 aa, Oryza sativa
  Clone ID: PAT_MRT4530_39372C.1.pep
MSRSLSMRSSMSMRSRRDLPPPQQTIEKLENMVAEGNYYEAQQMYKSTGARYIAAQKYLEALDILQSGALVQLKHGQVTCGGELAIMFVDTLVKAALPYNEETFDRIRKMYDAFPRISVPHFLGDDYDDDGQKLSEAISAAKVRSESCSSFLRAAIRWSAEVGASRSGSPELHVMLAEYIYSESPETVRVDCRWMQDMTKVSSHFVRGNDPKKFASMLANFMGKCYPGEDDTAIARGVLMYLSQGNLRDANLLMDELKDQLKSADLEIPKTDLIQFIKYLLPTLERDAYPLFRTLRQKYKTSTDRDPVFEELLDEIAAKFYGIRSQSALEGLFGDMFRV

SEQ ID NO: 137938 - protein, 39 aa, Oryza sativa
  Clone ID: PAT_MRT4530_39373C.1.pep
VQRLDASYLVSSQTCDVCSMPQYSSILLGILIHAALTLF

SEQ ID NO: 137939 - protein, 250 aa, Oryza sativa
  unsure (1)..(250): unsure at all Xaa locations
  Clone ID: PAT_MRT4530_39374C.1.pep
MRTCMVGNVIKANWSKVCSPVQYGGLGISNLEQFARAFWLGWLWFKWRTPEKSWIGTETPCNELNKDLFVASTKVQIGDEKKGSFXESNWIGGQSLRSQAPXPLYRHSKRKNHTVQDALXKEGWINNIRHSLTIPLLDELFNVWEVLAHDTPQLTYGAXDSIVWXMDNDEEYSAKSAYQFQFNRMVXSPSTKLSWEAWAPAKCKIFTWLVHQNQVWIANXLQIKGWANNYFYQLCFRNLKLPITFCSNVQ

SEQ ID NO: 137940 - protein, 278 aa, Oryza sativa
  Clone ID: PAT_MRT4530_39375C.1.pep
MPGAVKVFGSPSSAEVARVLACLFEKDVEFQLIRVDSFRGSKRMPQYLKLQPHGEALTFEDGNVTLVESRKIIRHIADKYKNQGNPDLIGMGALERSSIEQWLQTEAQSFDVPSADVVYSLAYLPAATTQPNKGAAAADGGRCEEEKNDDGGRDRQYSSQRQGGAGAGGGRDGQMAAAHRQKVEEMKQLFEKSSKELSKVLDIYEQRLEEAEYLAGDKFTLADLSHLPNADRLAADPRTLRMLQSRRNVSRWWADVSGRESWKQVKSLNRPPSAEAPF

SEQ ID NO: 137941 - protein, 603 aa, Oryza sativa
  Clone ID: PAT_MRT4530_39376C.1.pep
MSSAAGGGGGYGGGGGEHQHQQQQHHLLLGQAAGQLYHVPQHSRREKLRFPPDHPAESPPPPPPGSWPLPPAFYSYASSSSSYSPHSPTLAHAQLVAHGMPPGAATSGGAQIPSQNFALSLSSASSNPPPTPRRQFGGGGGGGGAAGPYGPFTGYAAVLGRSRFLGPAQKLLEEICDVGGRPAQLDRGSDEGLLDVDAMDAAGSVDHEMDGSDRAVADAVTVSGAEQQWRKTRLISLMEDFKALLSSLLKLAGGDPQFIYNQKVCKRYRQYYQQLQAVVSSFETVAGLSNAAPFASMALRTMSKHFKYLKGIILNQLRNTGKGATKDGLGKEDTTNFGLMGGGAGLLRGNNVNSFSQPHNIWRPQRGLPERAVSVLRAWLFEHFLHPYPTDSDKQMLAKQTGLTRNQVSNWFINARVRLWKPMVEEIHNLEMRQLQKNPSLDKNQLSMQHTQHSSDSSGKPCDPSNSLQGQSSSMTRNHSISASRHIEDGLSQMPHDISGQVSFAYNGLAAHHSIAMAHHHQPDLIGTGGAANAGGVSLTLGLHQNNNRAYIAEPLPAALPLNLAHRFGLEDVSDAYVMSSFGGQDRHFTKEIGGHLLHDFVG

SEQ ID NO: 137942 - protein, 82 aa, Oryza sativa
  Clone ID: PAT_MRT4530_39377C.1.pep
MGASASVPLPVAAALVRPFAPPAAAGVTEVEKELRGAATRLPVCCCPAGPPLSTLLLSVRATASLKSVRVENEGDGRTYLLS

SEQ ID NO: 137943 - protein, 922 aa, Oryza sativa
  Clone ID: PAT_MRT4530_39378C.1.pep
MEETSFTFEFKRGSKRAKKTMLPEESHKGKNDSTKGFSNKRNLVPAKTPSAKERPEQVEFTHCSPGIVARLMGLDTVPRPKKALDRCQSDIQCNMQRVLSGGDQVYDASSEDQPCSSSADDLPELKDVFEVTEMENKETCIGLQSGNEEPCPRSDKDDLEFVRQKFLDAKRLSTDESHRNSKEFAEALEILYSKKDAFLEILQENSGALPGFSGHIFGHNGLQYSKLFEQENCSRMGVERDEFFNVPKELENPIPSSRLNETYGVPLDSLPPKGSKSKGSSRRSQIVVLKPNLQRKSFTPVLSSETSHFGEMSTNNCSRPQHHCMHRGRVTHSAPLNNDQVLQPKRDTPGLRGAIETPKIGSRRKSSERECQLAIGSGRATDTPSSFEDNLPIYPPNHSVGSSVCRKAKKHLSERWQMAYQSDEEISMPKDTITLGEMLEMTDRDATKVITHKISSETNYNHDNVQKAPACPVGISSKDGWKTGIYCKDNSRSGTSRNFSRSKSLPTSATNNAKLPCRKQSAPICNLPILKDLLNAPTDESGSEHVRNRSSFRKTKQRSGKAIIHAGKENMLPVKEIHVTSEKARHSICISDLSRASNTHSEHPDGVMSNEDHQTSGSTALDDDLQSSKERMGWTELKLTPPLPVTKEDTSIHNQDNIVLKDQEGRNQQVEIDIAEAESQAIDSSHIISLENHKCSNSTASLQQICGHDTAYSGIFKGVSDGIQELRMQLKMLKMGDQDDTCGDDIYMLSSDECSDTDNLTYQLMEEQLPVFKDEYDRDFSYTNDILGSASDFLVYPEDWQVSPDVFVWLEDKYSKLLLWSKSDRRLLFDLINSILADMTAPGNSLCSNIMVKCWSEMDPRKLAENVWQTVLNRRNYEPFSLDCVEALPLDHHSEVEAIGAEIVKMLHDDILEESVAEFISQ

SEQ ID NO: 137944 - protein, 35 aa, Oryza sativa
  Clone ID: PAT_MRT4530_39379C.1.pep
MAVAGQFGHFPFANQINATTAEFLYTFMEMLLPPP

SEQ ID NO: 137945 - protein, 233 aa, Oryza sativa
  Clone ID: PAT_MRT4530_3937C.1.pep
MTMTTNTGGVRSKGRRGRGRRRGCDAEGGGGAANRCTGEEGRAAEQLRRGGWRGSRRCAAASGRNRGVDEVEGYVTVPREGTAAPADARAWRKGLPEETLTRRKVRPARATVFRRNSGEEEVMPGMRAASRSRGRWWRRRPVLRQGDRGGWRRPARRKGKGDGGNAAPGVSAGNGGQAGEGEATAMLEEATARPDGAPARRERRLEAAGGTGERRTAGRGLGTTGDRGRGLKR

SEQ ID NO: 137946 - protein, 136 aa, Oryza sativa
  unsure (1)..(136): unsure at all Xaa locations
  Clone ID: PAT_MRT4530_39380C.1.pep
GAGLRPSVLXGILVTGXYYSDXXXGQTTIFSYSEXQRXRLGPNYLLLXPIAPXXAHHNYHYDGFMNFMRRDXEVDYXPSXYXPAXXAPRYXIPSATLXXXRXXVVXXNENNXPQPGERYRXWDPARQDRFIXKWID

SEQ ID NO: 137947 - protein, 81 aa, Oryza sativa
  Clone ID: PAT_MRT4530_39381C.1.pep
FFSQRTLIVGPFFLDGPRGAICPFPPYKIFFFPKKKRGFLFKTLFKKNLGFFPLGKKFLEKTPGGGFKKGPVFSFPGIGPP

SEQ ID NO: 137948 - protein, 115 aa, Oryza sativa
  unsure (1)..(115): unsure at all Xaa locations
  Clone ID: PAT_MRT4530_39382C.1.pep
PSFAAGPTGGARSFLQAVSTVTEEAPSPLRVVQMEGLAVLKIITHCEEFAPALLTGQLLGXDVGSVLYLTNWYPFPMREDDEEADADGAXYFFAIMTCLRDVNVDNITVGWCQSC

SEQ ID NO: 137949 - protein, 327 aa, Oryza sativa
  Clone ID: PAT_MRT4530_39383C.1.pep
MEIWPGVSRRLDGCRVEAAWRVSQGMVEDEGLGYFYRTLRERSGGGEGQRPKERCGGGAAKGEVRLPSLSSPSALLSSAAGHDDDDYRKTTTTPPPADRAVAPPRELVADASSPPDRRPPPPPPPHLPTAGHWIWPTRRGSGHRGLSPAAVAAATAAASNAEKAAGAASAAVAAVRAERGSAAAAGAAALARLAGLARLSSRPTVSSPAAALARLARIGGGGSRGLEWRRRRAGEGWFEDVGLPAPGFCWGSRLLYKPELPLPPLRARNENDIDNNGKSETELFKGNTSKEVILLFSTNYLYRMVRSMQLQKGESVHSRTFEFDKRL

SEQ ID NO: 137950 - protein, 110 aa, Oryza sativa
  unsure (1)..(110): unsure at all Xaa locations
  Clone ID: PAT_MRT4530_39384C.1.pep
GVKLSLDDAIHIVHRTICHGSPIVTTSGVSAKXNFDTDLEAGPVGINVPIPVPRPFFSFTGSQASFAXGDLNFLRPSAGVPFXTPIKTVTQHVEGVPAQRVSLSMPPSQK

SEQ ID NO: 137951 - protein, 69 aa, Oryza sativa
  Clone ID: PAT_MRT4530_39385C.1.pep
CAAASHGPSPASATSSATTSANAPSAPPPKPFPTGCGGSGCGVVGGEVIAGGGRPAATAKRGFLLCEGS

SEQ ID NO: 137952 - protein, 42 aa, Oryza sativa
  Clone ID: PAT_MRT4530_39386C.1.pep
LSLIAPLEPVWGNCTSRGQDGHGPLNVNASSNQFFKANHQNG

SEQ ID NO: 137953 - protein, 101 aa, Oryza sativa
  Clone ID: PAT_MRT4530_39387C.1.pep
SEESRIIVVSLANGNIDTLGRCLHRAYTDHQTCVNHNGPAHWTMFLVRRGTAELRMARVRVVVRFLCAAAVLFLSMFRAYCCPWLCYSKPTDCCLVKGCGG

SEQ ID NO: 137954 - protein, 210 aa, Oryza sativa
  unsure (1)..(210): unsure at all Xaa locations
  Clone ID: PAT_MRT4530_39388C.1.pep
SVDRIERRLSATSVFLSYGNKLTMVNSVFYXLPTYYMCTLKLPKTIIDNIDRGRRHRLXRGYDVNSNKKSLAVWDKVCKPKTKGVLGVINLTIQNLLLKYLDKFYDSKNLPRVNLIXSSYYRNGVPHLSTLKGSFRWKDVCNLIDFIGGIARCLIGDGVSCSFWNDGPPLSIHMPRLSSFVLNAKIPVTIFFQFXLEDNFHLPLSQEAYL

SEQ ID NO: 137955 - protein, 95 aa, Oryza sativa
  Clone ID: PAT_MRT4530_39389C.1.pep
MTVLIFSVPNNGHPGGVIPSTTESIRPPRLQRRRPARRTVRSAAVPIVTDRPSRPDRPNHRCPGGVVTGAAASLASDYRASTADVLMAPLSPSSP

SEQ ID NO: 137956 - protein, 60 aa, Oryza sativa
  Clone ID: PAT_MRT4530_3938C.1.pep
MVSAAPAGRIRWSAKVLPWIHSEFGGGGDPAVAVMSAAPTGGSGGGDISGGGKIRRRGRR

SEQ ID NO: 137957 - protein, 127 aa, Oryza sativa
  Clone ID: PAT_MRT4530_39390C.1.pep
KWILKYFLTVFLITIHILTAICRMFYGPGGPYALFAGKDASRALAKMSFEPQDLTGDISGLGPFELDALQDWEYKFMGKYVKVGTVKKTVPVEDGAPSTSPETTETAAAAEPEKAPATEEKPREVSS

SEQ ID NO: 137958 - protein, 231 aa, Oryza sativa
  Clone ID: PAT_MRT4530_39391C.1.pep
MAAAVAELWETLKQAIVAYTGLSPAAFFTAVAAAAALYHVVSGIFAGPPPPPPRPRDEPEAEPLPPPVQLGEVSEEELRQYDGSDPKKPLLMAIKGQIYDVTQSRMFYGPGGPYALFAGKDASRALAKMSFEPQDLTGDISGLGPFELDALQDWEYKFMGKYVKVGTVKKTVPVEDGAPSTSPETTETAAAAEPEKAPATEEKPREVSSEEVKEKEDAVAAAAPDEGAKES

SEQ ID NO: 137959 - protein, 94 aa, Oryza sativa
  Clone ID: PAT_MRT4530_39392C.1.pep
EAENWLVAGGDQQAIYFPGGKVSFVAEMNFLPESQRDRINCYRVLDDDGRTISGSTFQEVSKELALKMYNEMATLQVMDTIFFEAHRRGRISFY

SEQ ID NO: 137960 - protein, 213 aa, Oryza sativa
  unsure (1)..(213): unsure at all Xaa locations
  Clone ID: PAT_MRT4530_39393C.1.pep
MAAAVAELWETLKQAIVAYTGLSPAAFFXPPPPRPRDEPEAEPLPPPVQLGEVSEEELRQYDGSDPKKPLLMAIKGQIYDVTQSRMFYGPGGPYALFAGKDASRALAKMSFEPQDLTGDISGLGPFELDALQDWEYKFMGKYVKVGTVKKTVPVEDGAPSTSPETTETAAAAEPEKAPATEEKPREVSSEEVKEKEDAVAAAAPDEGAKESES

SEQ ID NO: 137961 - protein, 91 aa, Oryza sativa
  Clone ID: PAT_MRT4530_39394C.1.pep
SSSITTSPVLLAHVGHRVLDEDSDPHAAAPVARGLDIAGAELGPRRPPEEGDEAMERALRDGACLGGEKGSPVTGDGDNLGEDLIPRRRRG

SEQ ID NO: 137962 - protein, 71 aa, Oryza sativa
  Clone ID: PAT_MRT4530_39395C.1.pep
MVIQLVLADDDKPTFALLTKLHLSETVITDDEGGYVSQRANLTKMQVKDCFVIELKDSAMSLSMPAMEEFC

SEQ ID NO: 137963 - protein, 466 aa, Oryza sativa
  Clone ID: PAT_MRT4530_39396C.1.pep
MVHEAINGHGHEVTVKVTSASTVAPALPVQEHRLPLSNLDLILPPMDVGVFFCYGAGEGSGGGGALLPAATLKAALAKVLVAYYPLAGEVVANTRGEGELLCSGRGVDFAEATAGDAVLRQLRLAVVDESAEKLVPKKKAGVMCVQVTKFKCGGAVVGCTFDHRVCDAYSFNMFLVAWAAAARGSSAAPAPSFDRSFLAPTSPAPPCPDALSDRLFVPVSCVPAPPSSAPEAAAAAVNRIFRVAAADVAALQAAAGPGRTKLEAFTAHLWQLHARAAASPPRHRRSCCMGVVVDGRTRLRRDGAMGAYFGNVLTIPYGAMSSGDLSAMPLADVAGDVHRWVAEAATRDHFRGLVDWVEQLRPEPSVARAYLGGDGGAEAAACVVSSGMRMPVGEVDFGRGRPAFASYHFPWPGGAGYVMPMPSARGDGDWVVYVHAAAEVVKAMEEEETTVFRALESDYVFGPVQQ

SEQ ID NO: 137964 - protein, 128 aa, Oryza sativa
  unsure (1)..(128): unsure at all Xaa locations
  Clone ID: PAT_MRT4530_39397C.1.pep
DEVVEAYQDLKLGHXNRYFIAKLNADNTEIVVVKKAPASASYEDFLAELPANECRYAVFDFEYDAGEGQRNKILFVVWAPDSSKIREKMLFASSKDALRKKLVGIGAEIQATDYSEISKDTVNERVAK

SEQ ID NO: 137965 - protein, 145 aa, Oryza sativa
  Clone ID: PAT_MRT4530_39398C.1.pep
MVERAPASVALHCALPACTVAAAAGGGKLFLQPGIWTPSVIGHDLINATLRRVTGVAFSLHSTVAHYAALSGRPGVTEQTTTAGIFRLPNPGTQTRRSHQPAPNLPPLRRGIVVGVLVWTRPPTGLHFRSTIYKTKMTSRGRRIQ

SEQ ID NO: 137966 - protein, 49 aa, Oryza sativa
  Clone ID: PAT_MRT4530_39399C.1.pep
ARGVFFLREGESSVRARAMCHGEPHQRRDVECGNKVISLRLQYYLRARG

SEQ ID NO: 137967 - protein, 95 aa, Oryza sativa
  Clone ID: PAT_MRT4530_3939C.1.pep
SEEGRPPYAFECHHCGVNAKATPMMRRGPDGPRTLCNACGLMWANKGMLRDLSKAPPTPIQVVALVNDGNGSAAAPTTELEIPAPATVNGHESST

SEQ ID NO: 137968 - protein, 534 aa, Oryza sativa
  unsure (1)..(534): unsure at all Xaa locations
  Clone ID: PAT_MRT4530_393C.1.pep
MGAVGVEAGVFDTVDGLVGEVMRLHRSLPARPAVEEVEAAEALAAAADREERARADAGAGRGXPPPGPTGSSGVAQEMPRALAGFQCREQKRDAAXLLELEALHPLLDDLIQGASQCLPSTSTRAAPGIAAPAAATTTTSTAAAGSSSSSAVGNAERHASSGTNGFTASRVAGTSTSTGRVSMDDSYVRKAKAAMWDGDDNEKLSLIKLASMIEVSAKKGARDLNLQGKLMAQIEWLPDSIGKLTGLVTLDISENRLLALPDAIGKLFSLAKLDIHANRISQLPESIGDLRSLIYLNMRGNQLSSLPSSIGRLLNLEELDVGSNGLSSLPDSIGSLTRLKKLIVETNDLDELPYTIGHCVSLVELQAGYNHLKALPEAVGKLEPLEILSVRYNNLRSLPTTMACLPKLKEVDVILNDLEAIPDYSCFASSLIKEIVANNFDVLHFLPGSIGKHEMQDELEMSNNQIRVLTAFFGNLKHLRVLRAEENPLQVPPRDIALKGAQAVVQYMSDASKRTTKSEPMKPKKTWGARGIMS

SEQ ID NO: 137969 - protein, 90 aa, Oryza sativa
  Clone ID: PAT_MRT4530_39400C.1.pep
SSFTSDFSQSKIQCPLGQPQCVMVRHLVRQAGPQFWNSCILCLQFEVPPPPCPVRQWWSLSVFGGAALVVIMLIPLVCHLVVASIYCVLA

SEQ ID NO: 137970 - protein, 105 aa, Oryza sativa
  unsure (1)..(105): unsure at all Xaa locations
  Clone ID: PAT_MRT4530_39401C.1.pep
MVTDYAPMASQVMKSILLCFKPWGPVGAYLTWRPTFTGNVIQYEKPTYQVMHPINGDHFICRLQTPVTYSPLVDWNLYNLPSYRTRFSPLMRAIEAXLAHCYLLV

SEQ ID NO: 137971 - protein, 72 aa, Oryza sativa
  Clone ID: PAT_MRT4530_39402C.1.pep
RSGRLAPLAARRFRHRSCLSNPPPQLNLMPHYHSCNDVVGASGGVGMEWEGRGGEGGESGGLEEGVKVHVVE

SEQ ID NO: 137972 - protein, 73 aa, Oryza sativa
  Clone ID: PAT_MRT4530_39403C.1.pep
IFLCSVFTSFTKKKKKKKEYSLLLATDQAPIKLTVVSLWSENSPRNMMAVCLTEMFLKHENKSDLGISLIHQR

SEQ ID NO: 137973 - protein, 270 aa, Oryza sativa
  unsure (1)..(270): unsure at all Xaa locations
  Clone ID: PAT_MRT4530_39404C.1.pep
MDGAAADGLRAASAAAVAAAVARIQLRQVRDWSGAGATGDGDGGGARAWRRGHNSDEQDDSGDDGAGRPWWGGSEPGTVARRNVRGGGHRAHRGGGGGAQERCRPGGHRAPYSCCQLPEPPRGRRGHGWRQVQEEXKGAVSRRTWSGRGPVSEEEELQSLFRIMARSTPERSRPVRRRALGRASYCSLSTAAXAHLTVDAAAAAXLIALDTEWGRGAVAGSVLPSPPTHSVARRPRXHRPPQPPLRHPLADAATXPRLPSALVKGREREK

SEQ ID NO: 137974 - protein, 100 aa, Oryza sativa
  unsure (1)..(100): unsure at all Xaa locations
  Clone ID: PAT_MRT4530_39405C.1.pep
PCFCSPPAIERLFGGLFXEVIVANSLFLPEPKCFPPLAGLSKGNLVAETIWHVHPDGFVSSIFQKRRVLWVPRCPLCVGWRRPLMVGPLWVGIHFGGKTK

SEQ ID NO: 137975 - protein, 53 aa, Oryza sativa
  Clone ID: PAT_MRT4530_39406C.1.pep
PAGTELQFRPTPTHGGAHHVYTFSEWIDYTPSHSLTNDVKAQEDAVFLNQFTG

SEQ ID NO: 137976 - protein, 63 aa, Oryza sativa
  unsure (1)..(63): unsure at all Xaa locations
  Clone ID: PAT_MRT4530_39407C.1.pep
PGGQVNYTELLIDGKLXDSAXLAETFPTLDYHKAELIAHAAAGESRDIHCERHADRRGFNVRP

SEQ ID NO: 137977 - protein, 116 aa, Oryza sativa
  Clone ID: PAT_MRT4530_39408C.1.pep
ELSKTVATFIVQKILLDDVGLAYICATAERFFAVGAVLSNMVQMLAEQPSVRLLKHIIRCYLRLSDNPRACEALRNCLPDLLRDTTFSACLRDDVTTRRWLQELLMRVGPPISPHP

SEQ ID NO: 137978 - protein, 59 aa, Oryza sativa
  Clone ID: PAT_MRT4530_39409C.1.pep
SYVGIVPLAWAFMRLNSIFGSDVKNMFNMAPSLYVVFKWKFCSSCAPYYKKKLSVISVA

SEQ ID NO: 137979 - protein, 398 aa, Oryza sativa
  Clone ID: PAT_MRT4530_3940C.1.pep
MRSRTRVFLVIHRAPLEPRVRCPYCGARVWSMTTAGLARLSSSSSSDGERSTDSDSNHSDDETFATADVSLPLPLAGRVSPGVRQIISQNALIMERSQVPGHMSPSAESPRARSLSPVARRAFDSLDRFDPNFKDAPQFFDWENAEVLCKHLKVFYDATVVVSGTSYPTVTRYFHEFWKVKVMILNESNNEDDLVASLVSKMDTKFQKYWDLQFLQIWVPVIFDPRFKLKFLEFRLKAGFGDKATGPNGYLPRIKRTDIKSFDISGKLPCEFYAIWVLRNFASSGAVPARSSRAGNADAARAVRNRAVCTPTVCLRVRFRAEEIELPLRRGAAAACVGSELLELPRSCGGGGGKESRDGEGDGDADAASGGEGRRRKEESGFHCSPPVDCAECSRGSG

SEQ ID NO: 137980 - protein, 100 aa, Oryza sativa
  unsure (1)..(100): unsure at all Xaa locations
  Clone ID: PAT_MRT4530_39410C.1.pep
MTVVMVGMVGNTLQPSLGINPNRPXKPCIQRRRGRFSRTPLFGRTRGRPNQPKFWLAASSVASLHRLVNFGPIHRVNSEFLVHSCISLILDIVRLIYHLS

SEQ ID NO: 137981 - protein, 90 aa, Oryza sativa
  Clone ID: PAT_MRT4530_39411C.1.pep
MSYQGPPPGTAGIEISWFLDLIGELPAYPPPGTGYPPPAYGAPPPVAADYGGYQQQQPPPPPQDSQSRGDGFLKGCCAALCCCCLLDMCF

SEQ ID NO: 137982 - protein, 115 aa, Oryza sativa
  unsure (1)..(115): unsure at all Xaa locations
  Clone ID: PAT_MRT4530_39412C.1.pep
HGEIAGDAAPPASSGFASTVPSPAIPAASPERRPTSLPPLSVLLRHPLLRPGCGVARSSPERRRRANCLFLLVGXVAPLHHHLHQHRSVVFHXAQPLLAAIVISSSPFVLADRRP

SEQ ID NO: 137983 - protein, 536 aa, Oryza sativa
  unsure (1)..(536): unsure at all Xaa locations
  Clone ID: PAT_MRT4530_39413C.1.pep
MGAAGLPAPGCLQKFGHIVDAERFVLNMSNRGIHKALSFQCFASDGRGFGAGSTNRRKIKSKKRQKDVAQEPSKVISGGSKNRDQWALDLGTRRESKYAKTVMDKQFLEKVEAVRRSALEKKKADENKNYQAIDYDAPIESDKSTIGFGTRVGIGIAVMVFGLVFAFGDFLPYGSVSPSKESTVVSKQLSEEEIQNFKTALEGFEATLRTSPNDPTALEFFAELVAWNTFLKPYLIRPQDGDSFFPNIATNGMRHTFFDKTMAKSGICNQIALYINLMVYCSCSQTGAAVSLVELGEYQKASEFLEKLVKVIPDKVEAYRLLGEVKFELKDYDGSSSSYRKSLSASENIDFEVLRGLTNALLAAKKPDQAVDVILSCRQKLNEKSQTQVANLAAANDDGAPKSQYIDLIQKGYNNLNINGVKDNELRSRKLMRLNVGSGLTRSILEQLAVTEVEEEEHGNWWVDLLLGKAYSDWGHISDAVAVYENLITEHPEDFRGYLAKGIILKENGKSGEAERMFIQXLPDAVKALVDRYAQR

SEQ ID NO: 137984 - protein, 100 aa, Oryza sativa
  Clone ID: PAT_MRT4530_39414C.1.pep
LDGYCFIYKIFLFATKLGFLFRGRGRGVTYRAFNFLITKNFFLKKNKHNKNFRIPLFETFKCCEKSKVRLGLKSIFLNRRAEVCPSQHGNSTHQGPTKIC

SEQ ID NO: 137985 - protein, 99 aa, Oryza sativa
  Clone ID: PAT_MRT4530_39415C.1.pep
TFNFFQESHPKSKTSINQKLHFSLSGFAKSPVGSSRPPVADPHKTIKWQVLNVQITVGTFGTFGHICLLDQNNHIEFRSNLPSSVTNISIMLILGVGTL

SEQ ID NO: 137986 - protein, 214 aa, Oryza sativa
  Clone ID: PAT_MRT4530_39416C.1.pep
MEGFSQEHVIGIPLASFAYAEEKIERKTSRSSLVHKKGKKNSIIYRMSKLSQKTDSYVQGFKEHITLGPKISDTLKGKLSLGAKVLQAGSIDKVFRQYFQVDKDEKLLKAFQCYLSTTAGPIAGMLFISTEKIAFHSDRPLDLTSPKGGITRVPYKVLIPAKRIKSAAVRENLYNPDEKYIDVVTVDGFDFWFMGFISHTKSFEYLQRVISEFR

SEQ ID NO: 137987 - protein, 42 aa, Oryza sativa
  Clone ID: PAT_MRT4530_39417C.1.pep
MVPPASSMMPTAPPLHPTSASAQRATYGTPLLQPFPPPTPPP

SEQ ID NO: 137988 - protein, 107 aa, Oryza sativa
  unsure (1)..(107): unsure at all Xaa locations
  Clone ID: PAT_MRT4530_39418C.1.pep
TLLTKGLKTFKMEQNPHHLNQPYISIRHGISQLPQELASTKVPFLTLRTNTFSLNPGAGXFSRCRPHSFHNSVASTCRAHTFLLAPVQCNNTLPYCTSAIQSPQGLA

SEQ ID NO: 137989 - protein, 192 aa, Oryza sativa
  Clone ID: PAT_MRT4530_39419C.1.pep
MVVAQPLVPPPPLCLCQQSPSSSPSSRHGGDDAAHGVDIQDASERAASSAVHHSGGALSLRRRRRSRTAAPLVHHFSLPSPCRTNPHPVPHKQATSSVRQHVQRCGNKPRGVAEGWVAVAANTTTLDWDVVAAAATMVGKGWVLVAVTYTKGWVVTMSMAAGCKFKFTPDSNNEVDDHRFSLDQEFVPETEF

SEQ ID NO: 137990 - protein, 353 aa, Oryza sativa
  unsure (1)..(353): unsure at all Xaa locations
  Clone ID: PAT_MRT4530_3941C.1.pep
TSRGEGARGPGPREWGPRGSLTVHGGPGAPGLTPAGAVGPTRQPHPRTRAADGRAPRGGHSARPAGGGARAPMVAGGGHRHGGAAVERGEGKGEKRRRSTAHPRLTAATEEAAGAEGGGRAARVDGVDSVPAVGDRNGEVDEVGEDAANPKEAAPRWEVVRGDDGGGPELGGDGGERERRRELESGEEEGRREAETDGGGAGRVXIGLEGGESGRRGRNXVREVRPPSMAPARFAXGQIRLFEREREGKKWGERERGSRGVISPTLLHAGTAGGGGIRGGGGAKARGRRREQREEGDDGWAPPVSKGGGRARPSAARARGEAEWAVGRGERGGGRWAGPAQGREGGLLGFFFL

SEQ ID NO: 137991 - protein, 155 aa, Oryza sativa
  unsure (1)..(155): unsure at all Xaa locations
  Clone ID: PAT_MRT4530_39420C.1.pep
RHRRPPSPSPPPLPPSPPPPPXPPSLSLPLSPPTPRPRPRPPPPSLSPRPPPPSLLGPPFGPPPPPXPTTPPSPPPPPPSLSPTPTEPNAARPAPTCPTGAXPPPSPAPPPRTPPSPSPPPPPPRPLPPSSPALPPLTGDXPPPSPTGHPQVSPP

SEQ ID NO: 137992 - protein, 174 aa, Oryza sativa
  Clone ID: PAT_MRT4530_39421C.1.pep
MNGNVRSLAFADGGNQLLSSGGDGHVYHWDLRTRKCIHKGTDEGSLAGISLCTSPDSSLFATGSTSGIVNVYKRDDFLGGKRKPLKTIENLTTEIGEMKFNHDAQVLAISSRKERNGMRLVHVPSLTVFQNWPGPRFSLHYPRCLDFSPGSGFLSVGHAGGKVLLYKLHHYQNA

SEQ ID NO: 137993 - protein, 54 aa, Oryza sativa
  Clone ID: PAT_MRT4530_39422C.1.pep
QVTQQQTEFYRSTYPSYGHTKAESLRLIFLSFSKNYLLPESYSCSIHAYSCFHI

SEQ ID NO: 137994 - protein, 424 aa, Oryza sativa
  unsure (1)..(424): unsure at all Xaa locations
  Clone ID: PAT_MRT4530_39423C.1.pep
MAMDSEEEETSSMSPWSSSLLSAAASSQPLLLNPAYARSKSVIHDELRSFRVFLQWCALDHSSRAARAASYAAFLALALAVPAAVSLSLRADAGASPVSASAITFNRVAQAPATGLAAISFAALACFFRRGGGLRQLLFLDGGLRDDTAFVRRGYARELDXALPLLDALLLPSLCVEAAHRPYSSSPPYASSRLSPFPASACRGXAVALVATVASWVYRTGVFLLVCVLFRLTCELQILRFEGIYHMFDVEARAAAAEIFAEHRRIRTQLLATSHRYRAFILSCLVTITVSQLGALVVALSSKDGKSFANSGDLPRRLAXGSSVQLSGFFMCLFGAARITHRAQRIVSIASQWHMSMEAVAHHAKSAPLPAAPSSSASDVDAPHQPELGTTTTAACACATTAAGSHCSGSRWTGDCSTPSSPSR

SEQ ID NO: 137995 - protein, 137 aa, Oryza sativa
  Clone ID: PAT_MRT4530_39424C.1.pep
WIPRAARIRHDTCCTRRYTTMRWHGCPTSIPRETCHIHNYQWSLGYACHFMMRILGGGTRHHLSCGLCAWRICLYHRSHSQPSGWPACAHLLSKHQTSKDSNDCFMPVCTMKKTTYLRTLIHVFLFLLIHKCDFSCL

SEQ ID NO: 137996 - protein, 369 aa, Oryza sativa
  unsure (1)..(369): unsure at all Xaa locations
  Clone ID: PAT_MRT4530_39425C.1.pep
MDSEEEETSSMSPWSSSLLSAAASSQPLLLNPAYARSKSVIHDELRSFRVFLQWCALDHSSRAARAASYAAFLALALAVPAAVSLSLRADAGASPVSASAITFNRVAQAPATGLAAISFAALACFFRRGGGLRQLLFLDGGLRDDTAFVRRGYARELDXALPLLDALLLPSLCVEAAHRPYSSSPPYASSRLSPFPASACRGARWRWAFILSCLVTITVSQLGALVVALSSKDGKSFANSGDLLVGSSVQLSGFFMCLFGAARITHRAQRIVSIASQWHMSMEAVAHHAKSAPLPAAPSSSASDVDAPHQPELGTTTTAACAYRSRHALVTYLCHNSGGITLFGFTLDRGLLHTIFAFEMTLVLWILSK

SEQ ID NO: 137997 - protein, 53 aa, Oryza sativa
  Clone ID: PAT_MRT4530_39426C.1.pep
ACAYRSRHALVTYLCHNSGGITLFGFTLDRGLLHTIFAFEMTLVLWILSKVLS

SEQ ID NO: 137998 - protein, 190 aa, Oryza sativa
  Clone ID: PAT_MRT4530_39427C.1.pep
MDSEEEETSSMSPWSSSLLSAAASSQPLLLNPAYARSKSVIHDELRSFRVFLQWCALDHSSRAARAASYAAFLALALAVPAAVSLSLRADAGASPVSASAITFNRVAQAPATGLAAISFAALASFFRRGGGLRQLLFLDGGLRDDTAFVRRGYARELDRAFRLLAALLLPSLCVEAAHKAVFFFATVRVE

SEQ ID NO: 137999 - protein, 73 aa, Oryza sativa
  Clone ID: PAT_MRT4530_39428C.1.pep
TNRVYQGIHLLDIFYSLLYPSLGFFLFNNPAWFRICNFPVFVARESVWLMQIFGYINMPVFWLICYSKGGGKV

SEQ ID NO: 138000 - protein, 1108 aa, Oryza sativa
  unsure (1)..(1108): unsure at all Xaa locations
  Clone ID: PAT_MRT4530_39429C.1.pep
MALLKDVGRHGGDLGLERRLGTQGGTTCCRRAGAPNLLPKYVKFFQNLSKFGQIRNIYTLYPERRGKCVRAKGKGESGMFFSGDPTARKRVDLGGRSSKERDRQVLLEQTREERRRRLGLRLQNSSATKIQKCFRGKRDLELARSEVRGNFCSTFGEHCQRVDWSSFGANSDFLRQFLFFFNAKKDSDIAILCQVCNLLLYYVKHGGDVLRLFGGTNYSSLEPLVIHRVKKLALICVQTVHQKRHDWGSQLLMPPESTPKPCGSLLETAACLINPKLAWNCKVVGYLQRKKIYCLFRGIIISIPQTARNLEHNNNTSALEQVLMLIASHIGDDPCCCPVVGXGYRLTIFLSWKSEXFPIISRNHKLIPENGLSKYYIHQIACFLPSCADVLPNDISSNHPGYACVHTWIGCCLTRPSPTLGMLTPPETLMVLHEKLLLDALPTITSPTGRADDDDDTPMDDVINGLDADLEKQITAAIDSRLLQHLVNALFRGTISTDYSYPTGPSDIEVEAVGSICAFLHVTFNTLPAERIMTGLAYRTEIVPALWNFIKRCNENQSWPQFSKFVSSPPADAVGWLLPVSVFCPIYKHMLKIIDNGEFYEQEKPLSLKDLKSLVLILKKALWELLWVIPSHASPAKKVLPNPSGFKKLSIENVKIGARIGLSELLAQLQDWNNRLPFTSSNDFYSQQATSENFVSQALLGNTRASEIIKLAPFLAPFTSRVKIFTSQLANSRQSTTSHSALTRHRFKIRRNRLLEDAFDQLSMLSEEDLKGPIRVVFVNEHGVEEAGIDGGGIFKDFMENITRAAFDVQYGLFKETADHLLYPNPGSGLVHEQHLQYFHFLGSLLGKAIYEGILVDLPFATFFLSKLKHKYNFLNDLPSLDPELYRHLLSLKHYDGDISQLELYFVIVNNEYGEQSEEELLPRGRDMRVTSENVITYIHLVANHRLNYQIRAQSTHFLRGFQQLIPNEWINMFNEHEFQVLISGSLESLDIDDLRSNTNYSGGYHPDHELIDIFWEVLKSFSSHNQKKFLKFVTGCSRGPLLGFQYLEPKFCIQRAGVPGMEEEDEDRLPTSATCMNLLKLPPYRNKTQLESKLLYAINAEAGFDLS

SEQ ID NO: 138001 - protein, 1914 aa, Oryza sativa
  unsure (1)..(1914): unsure at all Xaa locations
  Clone ID: PAT_MRT4530_3942C.1.pep
MSYYVDPCTNVPQYLLYPVYGYHPSTVARQVEGLGTQGSTTMSSSFVDNNVSTSLSQVLPASTMLVWTQVGEIVFPVYTTTPISVGPPMTGDENAVATNQGDSMSKNPPIETENGISTTSKLKKDSDTAKPCPSDMNHEPTKMTSEATRSWCPIHKTKKHTLQDCWVFLNVRAEIRACKERGIQRTSLTRDVYCPIHKTKNHDLSSCKVFLGAMKAQSPKSYIPIRDNSKEQGATPTSDRFVGVIDIDPHEPSVLHLLEDYGSSTTSAPREVLAIDDIGTSAHANTEAGNQSTTPAQHIRAVQAILRETPYDPVLNVDLEHWTERLRESVTNLSNAFEEAATVAHQEQPPTSEANGEDPERRESPXQATPPPRGTGDLQDQINGRREARRTRDNXRHPRRTHDRRQXTAPNAGSRAFGRSLRDVRWPERFRPGAIEKYDGCTDPEEFLQVYSTVLYAAGADNNALANYLPTALKGSARSWLMHLPPYSISSWADLWQQFIANFQGTYKRHAIEDDLHALTQNSGESLREYVRRFNECRNTIPEITDASVIRAFKSGVRDRYTTQELATRRITTTRRLFEIVERCAHADDALRHKNDRLKTGGEKKPATDTSESSKKKNRKNGKRKAQVEVLAAEYANPPKRPDPQSSDTKKSWCPIHKTDRHSLEDCLVFKKSLEKHMAFEKGKRVRVVETNEETAPHESDSAYPDSDLHVSHIXAVPQHTPPNENTRKWNVKSARHGRGLHXKMKCTLDVMGIPQNELTPTDQPFHGITPQSSSRPLGKITLPVTFGQANNFRTKQITFDVAEFDTAYNAIIGRTALAKFMAASHYAYQVLKMLRPKGTITIQGNAKLAVKCEKKSLDMVEQMPSPPATTEPPKKVTKTNKTPKSDGAIKIVPLSSANLDKTELAVITFLRDNADVFAWQPSDMPGVPREVIEHKLMVRPDAKPVKQRLRRFAPDRKQAIREELDKLLKAGFIREVLHSEWLANPVMVRKSNEKWRMCVDFTDLNKACPKDHFPLPRIDQLVDSTAGCELLSFLDAYSGYHQISMAKEDEEKTAFITPFGVFCYVKMPFGLITAGNTFQRTVQGALSNQLGNNVEAYVDDIVVKTKTGDSLIDDLWETFDNLRRYRLMLNPEKCTFGVPSGKLLGFLVSGRGIEANPEKIKVIENMKSPTRLKEVQKLTGCMAALSRFVARMGEQGQTFFTLLKKQDKFVWTQEAEEAFIALKRYLSNPPVLVAPQPNEELFLYIAATPHSVSTVIVVEREKVQRLVYYVSEALHHAKTRYPQIQKLLYAVIMTSRKLRHYFQAHRVTVVSSFPLGEVPSSPXVLADFVADRTMPDNKSDNQGDNATWTMAFDGALNSQGAGXATNNTAEGLLAGIRAAATLGAKRLIVKGDSELVVNQVHKDYKCSNPELSKYLAEVRKLEKKFDGIEVRHVYRKDNVEPDDLARRASRRESLEPGTFLDILTKPSVKEVSGEVSPNTPDISSEVTEAERAVADIETTDDWRIPLIKFISSEELPEDDTVAEKITRKAKIYCMVGNDLYKKAPNGELLKCVSTDDGRXLLLDIHEGICGSHAAGRTLVSKAFRQGFFWPTALKDACDMVQRCEACQFHSXTHKATRASAPDYPSDLAILVLGARYTWAIPTRTGWLQIPIXVAIDKFTKWIEAVPTGEIKADNAIKFIKGIFCRYGLPHYIITDNGSQFISADFQDYCIGQGVKICFASVSHPQSNGQVERANGIVLQGMKTRVYDRLMSHDKRWVEELPSVLWAVRTTPTTSYKETPFILVYGSEAMLPSELQHQSTRVQKYSDENQEEQXDIDVNLLEEHRERVAVRAASYQQTLRRYHEKRIRARILSIGDYVLRRVQSQAGRNKLSPKWEGPYTITQVLRPGAFKIADGDGRELANSWNIDQIRKFYV

SEQ ID NO: 138002 - protein, 131 aa, Oryza sativa
  Clone ID: PAT_MRT4530_39430C.1.pep
CIRYTFLGMRPTQKGTLDHRSRREGTVPPPLPPTCKIHVCYSGTVLCRSTHSGAADMTASSKMASLSGTNRQASTAAAAVAAPRASLLAGDRVACTTLITTECVPFECWIILAGYPGQSHYMPLNYCRYVS

SEQ ID NO: 138003 - protein, 61 aa, Oryza sativa
  unsure (1)..(61): unsure at all Xaa locations
  Clone ID: PAT_MRT4530_39431C.1.pep
RFVDYKVVLHFLLXKXKKKNKKKKKKKKKKKKKKKKKKKKKKKKKKKKKKKKKGGLGGPLF

SEQ ID NO: 138004 - protein, 61 aa, Oryza sativa
  Clone ID: PAT_MRT4530_39432C.1.pep
ARLTVGPDAGPVAQPRERGPFRHRPVRCVPRASPVLIELGCPSTTAAVEPVVDQAPPQHVV

SEQ ID NO: 138005 - protein, 62 aa, Oryza sativa
  Clone ID: PAT_MRT4530_39433C.1.pep
VTIFDWAFCELEKQLHRIFSPFLIRVCIIQFFDFLCNTPKERNANPVKVHHEMFGIGGIMLQ

SEQ ID NO: 138006 - protein, 82 aa, Oryza sativa
  Clone ID: PAT_MRT4530_39434C.1.pep
GIRRQILVLKKMVEGLLFSEQGLLDFNGGGPSPSVLEPSVMELSGVLNPNIVVLGGPNLVSPMVKLAPPTPILAPSYKWGRG

SEQ ID NO: 138007 - protein, 67 aa, Oryza sativa
  unsure (1)..(67): unsure at all Xaa locations
  Clone ID: PAT_MRT4530_39435C.1.pep
VPNRRIYPVVALIPVGCTTLIPCRSTLVVLRYPCSLSAYTKYHTYTVDCRKFGKWIXEALKTRHMVS

SEQ ID NO: 138008 - protein, 202 aa, Oryza sativa
  unsure (1)..(202): unsure at all Xaa locations
  Clone ID: PAT_MRT4530_39436C.1.pep
WAPVPAHYPSLSAATVSWDATAESYYCGQQGRPATGAAKCAAGAGHDALLDRRCANCGTASTPLWRNGPRGPKXHFAVSPTYVVSLTLPPSYVSLQSLCNACGIRYKKEERRAAATTTTADGAAGCGFITAQRGRGSTAAKAAPAVTTCGEETSPYVVGGGGGGGEVADAAYLAWRLNVVPPAATATAFSVWPERASLYHYN

SEQ ID NO: 138009 - protein, 194 aa, Oryza sativa
  Clone ID: PAT_MRT4530_39437C.1.pep
MEGMSKLAGGGGDVTFVGGGRRMAAAAAAALRLVELDLIGTVGAAVPGQATAPRLLVVSPAPAKEEERDGDDDGEPRQLFACHYCRREFYSSQALGGHQNAHKRERTLARRGAGAGAGGEQASSSSFAIHHGAFVSASPGWMARVLHGEAPPAISVAGDGGGGERWWWGGGNVGYYWPRDGDDQTRQLDLTLKL

SEQ ID NO: 138010 - protein, 295 aa, Oryza sativa
  Clone ID: PAT_MRT4530_39438C.1.pep
MASSTFSLFFPMSNGQCWPPSTVEESAAYDDHSTVTTSPSSPSSSSTGSVDCTLSLGTPSSRRAEPVAAAAPAANHGAPVPAHYPSLSAATVSWDATAESYYCGQQGRPATGAAKCAAGAGHDALLDRRCANCGTASTPLWRNGPRGPKVRRRRRSLSPSLFSISAVHFAVSPTYVVSLTLPPSYVSLQSLCNACGIRYKKEERRAAATTTTADGAAGCGFITAQRGRGSTAAKAAPAVTTCGEETSPYVVGGGGGGGEVADAAYLAWRLNVVPPAATATAFSVWPERASLYHYN

SEQ ID NO: 138011 - protein, 177 aa, Oryza sativa
  unsure (1)..(177): unsure at all Xaa locations
  Clone ID: PAT_MRT4530_39439C.1.pep
MAVRSGGNGGGDGSGRGAVAATCHEGGARKDGAEAKRAALCTQLRGRRRRRNGARAEGEHTVGMHIMAGMRAVTPRRTLSGRSSHLTQSMSATAXAAVFAPCHVRXSATRNRLRFPTAALPLSSTCCSHPTGGNHPQLPTTVPTVRRRSRGFESITTTRCSWLITLWTWGVGRTALP

SEQ ID NO: 138012 - protein, 136 aa, Oryza sativa
  unsure (1)..(136): unsure at all Xaa locations
  Clone ID: PAT_MRT4530_3943C.1.pep
KNLKKKKKREGGEKKKKTGGRPKPTNPTTPSQQRQISSIEPPKTNPLADIQQRHYFKNRRWTQLNLHAPQTPFTNYHNNKNPPTYPPYQXLHIQNXKSNPPXIXPLTPPXXFTTHXTTPPLTIPLPPPPFPFLPSF

SEQ ID NO: 138013 - protein, 147 aa, Oryza sativa
  unsure (1)..(147): unsure at all Xaa locations
  Clone ID: PAT_MRT4530_39440C.1.pep
IGYVNFLRACGSNSAAAVAVTSRLXPGWVRLHLAAFIGHRLSSQTNTSLFCTLCPHSCAPGKNFPIGHPSXITLGQARLTLEFFGDRLPEKKLQLVDMSILLILLSPRLGCHSRPPLLLVGEHGEEADAAALLPSPPPIEIRDIYLS

SEQ ID NO: 138014 - protein, 59 aa, Oryza sativa
  unsure (1)..(59): unsure at all Xaa locations
  Clone ID: PAT_MRT4530_39441C.1.pep
VPPIGQSPTSLCPVILSNPARVPGIKPKVPIPIPKGXKMAAPPVGYKWGNYTLPLPFSP

SEQ ID NO: 138015 - protein, 195 aa, Oryza sativa
  Clone ID: PAT_MRT4530_39442C.1.pep
LADEANAIGTFDAVILNAGLLYGPFRKSDLGVPASVFVNLVSPYIFAALLNPPKRLIFIASVLHHEADTSLKDIFWLERGEKEWKDFPAYCDAKFHVVLLVNAIARRFKDTSVIAVHPGYVPTKLAGQDAPGKMEDGIETYVMLAEGDYDTSLTGVYFDPKKERAQPHALTADLDKQEAVVKACEELTGIKLPSP

SEQ ID NO: 138016 - protein, 62 aa, Oryza sativa
  unsure (1)..(62): unsure at all Xaa locations
  Clone ID: PAT_MRT4530_39443C.1.pep
GKIFVTWKIILKLSLEAPKGFGFLCVXXFFICPALEIYXXLIADVPRKIYXQKQCLSHHFXL

SEQ ID NO: 138017 - protein, 109 aa, Oryza sativa
  Clone ID: PAT_MRT4530_39444C.1.pep
MEPQLNNSPKFRSKQTTIKPKREAFRSTREAEFEAKKKKEQRGRGCSYLCSPTTRRWEQRARTVALVARGKRVTKTSALLDAGRDEELVGSRDRVEAELPMAEERGIQR

SEQ ID NO: 138018 - protein, 91 aa, Oryza sativa
  Clone ID: PAT_MRT4530_39445C.1.pep
RVRTDDTITQKAIEVDADMYGIEPISADWTDSKMTIIGEMDTVSIAKMLKMIGKIDMVSGGPAKEERMGERRGGRIEGKREEKKDDKLVEM

SEQ ID NO: 138019 - protein, 229 aa, Oryza sativa
  Clone ID: PAT_MRT4530_39446C.1.pep
WIPGLRLLPLLFAASKALRLLSHLQRRTSTSTSLPVPVVSVGNLTWGGNGKTPMVDFLARAFHRIGVSPLILTRGYAGGDESRMLRRRLSDTSAKIGVGPNRAAVATSMLRKYGAQIGVAILDDGMQHLSLLRDVDIVMINALNPWGNKHLIPRGPMREPLTALTRAHILLIHHANLVSQPQLKTILSTVHDNGAACPVFFSKLVPSHIFQVNQPMHRLPLHVLHGIIV

SEQ ID NO: 138020 - protein, 144 aa, Oryza sativa
  Clone ID: PAT_MRT4530_39447C.1.pep
MLVALEAGGLFRGLLLLLLYSLYPMLLRLGHDRATKLMVMVSFADVRKEDGRRRSGWASRSLVPRAMRPICLEMAKTTVTVGVGMARDRQRPPIAQVRSLCSCIVHAAVTAELLRDSVEVLEEVIDGCHIVLGRVQHATVEDDL

SEQ ID NO: 138021 - protein, 188 aa, Oryza sativa
  Clone ID: PAT_MRT4530_39448C.1.pep
NIWVISSIYMDSVTTNSGTRRLVMPHTSSRLTAILATDVMVPKPSRLRLLPLSPIYIVTLLPRFDGVTTIAMSGAILGLVATATILGAAFAVADAPPTPPPQAHTTSAPAPRCVQVQAPWMDCGGDARRRVVLPPTGDAVAAGTVPRSPLGLPTTFRAIPHGSPSYTLPNGVGGRGGQRPNPIGLLLR

SEQ ID NO: 138022 - protein, 204 aa, Oryza sativa
  unsure (1)..(204): unsure at all Xaa locations
  Clone ID: PAT_MRT4530_39449C.1.pep
MTVRLQHTTPVNGIGAAVAGEPRHNNANGGHREEEHETTVLTNTYAMTDSDGRWPATSFEGRRGTVHGGDDFPAMCGNNGGVAGLHFAAANPMEATAKLGDDGRSSSGLAGDQNAAASFGLTVSAXSGDLRRKRRTGRGRRRPRDADEGDGDRRRRPKRRLGAAGAAPALGERRRARGERFRRRRKMELEGIGRGRRGGPLYRH

SEQ ID NO: 138023 - protein, 838 aa, Oryza sativa
  Clone ID: PAT_MRT4530_3944C.1.pep
MRTFRTGLSMAYLKKTQWMDVEGNEGADELGQILRDLQEDCESEKKVQKLERMLADHRTALYPSCEKGYKKLSTILEFLQWKDKNDVSDKAFGELLKLVKNILPEGNELPESTYEAKKTVCPLGLERKYIMMPIIIQGPKQPGNDIDVYLRPLVEELKVLWWKEGVAVWDEDKQEQFNLQALLFVTINDWPALSNLSGQSNKGYNACTHCMDETEMFEMVKDLKVVFVKGPGSQPIESEDGHAAMWKKNSIFWELPYWEVLDVRHAIDVMHLTKNLCVNLMGFLGVYGKSKDTLEACNDLKHMEQYEGLHPEPNEKGSHYLSPASYTLSKEEKDSMFQCLESIKLLPVIIRGILPDNVRATITKLCAFMNTISQKVIDPESLAALQQDVRYIGVLKKYVRNRSRPEASIAKWYGTEEVIEFCVDFIEDLEPIVVPESIHEGRLRGKGTLGRRAIMTVDNDLFRKAHLTVLQQSLLVAPYIDEHLAIVRSENSGKSDAWIKRHHIDTFPAWLREHLLGNETIDRQLAFLARGPSGSVTTFQGYEINGYTFYTRAQDKKSTNQNSGVRIDAIGHDGPTSTYYGVIDNIWELEYGPLKVPLFRCQWVRLTGGGVMIDDSGMTTVDLNKVGYSDEPFVLANDVTQVFYVKDMDNKPKKGKGPDEPRRHVVLPSKRKIVGVEDKTDENYDLFEGQPPFVVTVDPSILEKARQRLADRRERKDIEATIQHNRQLVHVEKSKLDQLSEGPIKSNIDRLEARKIDLMAQLQECNAELDMEHKKLADLPQDIEEQKAKLKSAIKNVADMTKSLKVIPGTDTQDAQAIEDVEHIRQKAISAIKQYLSQ

SEQ ID NO: 138024 - protein, 54 aa, Oryza sativa
  Clone ID: PAT_MRT4530_39450C.1.pep
TDWHARISSSLGPALELSRSPRPVCIFGVNSGLCTRDREDAPRRTKRIVMIVKI

SEQ ID NO: 138025 - protein, 46 aa, Oryza sativa
  Clone ID: PAT_MRT4530_39451C.1.pep
QPLCQKSFRDRKHTRNKTSDHWIRHTVCQLQTAILTTTIMEIHSNV

SEQ ID NO: 138026 - protein, 115 aa, Oryza sativa
  unsure (1)..(115): unsure at all Xaa locations
  Clone ID: PAT_MRT4530_39452C.1.pep
GIPSTFGYTSCIDMVYLRVYGRFLYTLRKSITESTDGRSPTRTELGRHCIVXGPISLSFTWXLTDLRYKXDPRKDLRHRISQLRQPPQPTKPEPTGAKSLGDLVEPTRLRSRRYH

SEQ ID NO: 138027 - protein, 204 aa, Oryza sativa
  unsure (1)..(204): unsure at all Xaa locations
  Clone ID: PAT_MRT4530_39453C.1.pep
MVGSGLLLGSGAQGRAVGHRRHRGSSSERSCRAPSHLPAPGSATETGGRGSIEDAGMDGDRESRSTSPFYSPIPLXTPDPKASSVMRHGARVGCRARVGSNGGGHNSNNAGTPVPAPVPASSSSVSMGKPSRRPRRRRMWLHESEAVVMELTEPELVDSMIEMLCTNGVRPLEDLQDLLACYLSLNAPSTTAPSSRSSAAWPSS

SEQ ID NO: 138028 - protein, 99 aa, Oryza sativa
  Clone ID: PAT_MRT4530_39454C.1.pep
MSAIKINCDKVSMSPYHRKVSIAVAGNLDGSCEVVVAPSKPWFPELLSRSRSFVTFRWPDINLLGIQQHDPINRRNLQNRLIAMQISSKPEQIPHNSTE

SEQ ID NO: 138029 - protein, 79 aa, Oryza sativa
  unsure (1)..(79): unsure at all Xaa locations
  Clone ID: PAT_MRT4530_39455C.1.pep
GIRCSTSPSSDSKRISNSGNVCNLPKAKTIQGQQPLRGSVYGSIMYPNMEDHXDGIQGCHHLSPTSDKSVRYPTNKGNL

SEQ ID NO: 138030 - protein, 80 aa, Oryza sativa
  unsure (1)..(80): unsure at all Xaa locations
  Clone ID: PAT_MRT4530_39456C.1.pep
GVVAVIVVALFFXXFFFYXLYFIFYXLARRASCHLRGSCVLYAYSMASDLCSLMALRQLYMLYSFKILCFSSLSQDHSHL

SEQ ID NO: 138031 - protein, 101 aa, Oryza sativa
  unsure (1)..(101): unsure at all Xaa locations
  Clone ID: PAT_MRT4530_39457C.1.pep
MARRDRGGGVGPSSLVSRLLCVDRRVGPIDFLEVAEIKPHKXKKQYAICDLFQQMDRVVAHYQRQKLLSKRHDDHRLALEPMVGSGVSTLSAAADTDADEN

SEQ ID NO: 138032 - protein, 54 aa, Oryza sativa
  Clone ID: PAT_MRT4530_39458C.1.pep
NEAQTSFTFEKEKLEVLNILFFFAGVVYRGFFFPLWNKLLLCFSYNSIIVYFEP

SEQ ID NO: 138033 - protein, 430 aa, Oryza sativa
  Clone ID: PAT_MRT4530_39459C.1.pep
MFPSSSPSPSPSSSKKQQQLSGGVGVGGAAAAASSNDRPPLCVQGDSGLVLTTDPKPRLRWTVELHDRFVDAVTQLGGPDKATPKTIMRVMGVKGLTLYHLKSHLQKFRLGKQHKDFNDHSVKDAMDMQRNAASSSGIMGRSMNDVHVNEALRMKMEVQRRFHEQLEVQKHLQMRVEAQGKYMQTILEKAYQAISSSGDCATWHAGYKSLGSQAVLDIGSSMSFPSLQDDLQLYGGSHLDHLHQQHEQMEIRPSIDTFLAFNYSSSTGKSPMVWPGADDGGGEPAKISGDHQLQMAAPATTTMMMEAITMSGGDSMGSKGFEGQMSSKLDMRSPPPQQTVLPVGSERMSSPIVGAKARNISYGRNVHVNGADKKAQSQEQQEAEKHLQMRVEAQEKYMRSMMEKAHQALASGATWPAANEQAKISPPGRK

SEQ ID NO: 138034 - protein, 254 aa, Oryza sativa
  Clone ID: PAT_MRT4530_3945C.1.pep
MVRTVTMFKEEQRSSAVGIPCEKVTRVGNLGGQLRSTVGIRTKLREELRSRRSKIPGDEVGYEMTYDGWISCGRDLRNGLHKARLGWPMWQSVHEAWQQRRRQCGDLTGGVRAVRPAATGLRRDFHRFQEFITNKSLRSPKCKSCYEEISPASAEARSLSATHLGTRPSIGGDEVGQQGHTGLEVQLPEVAKEVLEERGIGRVPRVDGGLKNTNGRVESAIIVHTRGSPCRIDGLEQGPCLVCRDCVERGIPWL

SEQ ID NO: 138035 - protein, 82 aa, Oryza sativa
  Clone ID: PAT_MRT4530_39460C.1.pep
MESLERRGHRKLKKWILLIKEIQFLALKTEIDEVDEGISKGELEEALLRRRNAHGIKTRQKRRGRQTGLQRIGHVRGEVGLV

SEQ ID NO: 138036 - protein, 367 aa, Oryza sativa
  Clone ID: PAT_MRT4530_39461C.1.pep
MSSDDTTPTPLGRRTKPKPPMSRLMRLSLKAVDWATDATRRADGTLNRLALSVLDPRVPAFSSPCRGVASRDVLVHPPTRLRARLFYPSAAAGKDERPPPPRPLPVIVFFHGGGFAFLSAASAAYDAACRRIARYASAAVLSVDYRRAPEHRCPAAYDDGIAALRYLDDPKNHHGGGGGGVPPLDAARCYLGGDSAGGNIAHHVARRYACDAAAFENVRVAGLVAIQPFFGGEERTDSELRLDGAPIVTVSRTDWMWRAFLPDGCDRTHEAANFAAPSAAPGVDSPAFPPVLLAIGGYDPLQDWQRRYAEMLRGKGKDVRVFEYPNAIHAFYVFPAFDDGRDLMIRIAEFVAESAAAAAAASGGGSE

SEQ ID NO: 138037 - protein, 132 aa, Oryza sativa
  Clone ID: PAT_MRT4530_39462C.1.pep
MPSQDPTPPLGSVVVVAQSHRRHARICCSRHHAEASTSVASGSTTVVVTQRSCAVLARSRRIVVVVVRKPPPLLRLDPSSSVSFEGGGEAAESAREGEMPPDPPVPSPQWVDLSVWGRKVAGSARSEAAVAS

SEQ ID NO: 138038 - protein, 1310 aa, Oryza sativa
  unsure (1)..(1310): unsure at all Xaa locations
  Clone ID: PAT_MRT4530_39463C.1.pep
MAAEEGAEPSAPVAEAGGAQAPSQPPSAPATSVHVPNEADVAKAAAAARALQTRAEILSTSQPVVPQAAPSQPAATTTALTVVQSQTSLDPEAQAEADMEAMRQNMTRLQDMLRQMQEQQQAYEAARRVKATSAPILQYSAGYVPHQVHPQVTTQPFPPQAAQAPAPTVRQQAPTPGFGTNQAPIQAAMTWSQPIFDPSMAAQQVPPVGAGQPNAMAQPHAQAAISPFTRPYPQQGAVNRAGGEKGLPLSGGIKTHPIPPQFKFPPVPRYSGETDPKEFLSIYESAIEAAHGDENTKAKVIHLALDGIARSWYFNLPANSIYSWEQLRDVFVLNFRGTYEEPKAQQHLLGIRQRPGKSIREYMSRFSQARCQVQDITEASVINAASAGLLEGELTRKIANKEPQTLEHLLRIIDGFARGEEDSRRRQAIQAEYDKGSVAAAQAQAQVQIAEPPPLSVRQSQPAIQGQPPRQGQAPMTWRKFRTDRAGKAVMAVEEVQALRKEFDAQQTSNHQQLARKKMGLPTQALTPAQTSLRGFSGEAVQVLGQALLLIAFGSGENRREEQILFDVVNIPYNYNAIFGRATLNKFEAISHHNYLKLKMPGPKGVIVVKGLQHSAASKLNLAIINRAVHNVETEPHERPKHTPKPTPHGKVTKVQIDDADPTKLVSLGGDMGEEEVESILEVLKKNIDIFAWSPDEMSADRQEAVKAEVQKLLRAGVIQEIDDPEWLANPVLVRKSNGKWRMCVDFTDLNKACPKDDFPLPRIDQLVDSTAGSSPVAVSAALVQETESGQKPVYFVSEALQGAKTRYIEMEKLAYALVMASRKLKNYFQAHKVIVPSQYPLGEILRCKEVTGRLSKWAAELCPFDMHFVARSAIKSQVLADFVAEWTPVLAPDPEPDDQFWVMCSDSSWSHKGAGVAAVLFSPNGVPIRYAARLQFDTTNNAAEYEAVLLGLRKAKALGVRRLLIRTDSKLVAGHVDKSFEAKEEGMKRDQNEEADALAKSAACGGPHSPGIFFEVLHAPSVPMDSSEVMTIDQEKLGEDPYDWRTPFVKHLETGWLPVDEAEVKCLQLRATKYKMVSGQLYRSGVLQPLHRFISFVEGEEMAKEIHQGLCGAHQAARTVASKVFRQGVYWPTVLKVCVEQIKKCKSCQRHGQSQAVPQYDLQPIAPIWPFARWGLDIIGPFPIEAEPLGLITSAAVQKFVWKNIVCHFGVPKEFITENGKQFDSDKFREMCEGLNLEIRFASVAHPQSNGAAEHTNGKILEALKKRLEGAAKGKWPEELFXVLWALRTTPTRPTKFSPFMLLYGDEAM

SEQ ID NO: 138039 - protein, 556 aa, Oryza sativa
  Clone ID: PAT_MRT4530_39464C.1.pep
MEAMRQNMTWLQDMLRQMQEQQQAYEAARRTKATCQCTSPGSNRPQQCIRPVTCNCKLNQSLPKYTINHLAKRHKQWRKGLRLCRRNSKLSFSNSTNPTAFQAQPHRPTRRGIQVKFDFVNAAQAPTVRQRTPSFGTNQAPIQAATTWSQPIFDPSMAAQQGGRRKGFGQKPVYFVSEALHGAKTRYIEMEKLAYALVMASRKLKHYFQAHKVIVPSQYPLSEILRGKEVTGRLSKWATELSPFDLHFVARSAIKSQVLADFVAEWTPVLAPDPEPTEQFWVMCSDGSWSHRGAGIAAVLCSPNGVPIRYAARLQFDTTNNAGEYEAVLLGLRKAKAQGVQRLLIQTDSKLVAGHVDKSFEAKEEGMKRYLEVVRSMQKCFTGITVEHLPRDQNEEADALAKSAACGGPHSPGIFFEVLHAPSVPMDSSEVMVIDQEKLGEDSYDWQTPFVKHLQTGWLPVDEAEAKREEMAKETHQGLCGAHQAARTVASKVFRQGVYWPTVLKVCVEQIKKCESCQRHGRSQAAPQYDLQPIAPIWPFARWGLDIIRPFPMGRN

SEQ ID NO: 138040 - protein, 108 aa, Oryza sativa
  Clone ID: PAT_MRT4530_39465C.1.pep
AIVCGHFTTFSRAPHRIPPSTAPPGRRGAKYQELNKLDTAETPAAAPPTRKHEEPGPPRRKPPRPWQPPPPPPPPPPLPDLAAAAGCRHLAALPPRRVCAGGRLSPPE

SEQ ID NO: 138041 - protein, 993 aa, Oryza sativa
  unsure (1)..(993): unsure at all Xaa locations
  Clone ID: PAT_MRT4530_39466C.1.pep
MEQERREAKSRTSALPGQRRLRRRVQDEDYLPKEDDFAMASSPPQGPRKPFRPIKPRGYRAGDRQTAHQGPMSPYNIMYPCKCPFRKVAAQVHHQPPGQAPQTVAEAASALQAQLQAFLQQLNQPHCISSTTPSAHPEENTSQGAPNWLPPIQPGLGASPWNQGPQFDFINAAQRPTVRQQAPGFGTNQAPIQAATTWSQPIFDPSMAAQQVPPVGARQSNAMAQPHAQDAILPFATPYPQQSAVNRAGGEKGLPLSGGIKTRPIPPQFKFPPVPRYSGETDLKEFLSIYELAIEAAHGDENTKAKVIHLALDGIARSWYFNLPANSIYSWEQLRDVFVLNFRGTYEEPKTQQHLLGIRQRPGESIREYMHRFSQAWCQVQDITEASVINAASAGLLEGELTRKIANKEPQTLEHLLRIIDGXAQVQVAKPPPLSVRQSQPAIQGQPPKQGQAPITWRXKFRTDHAGKAVMAVEEVQALRKEFDAQQASNHQQPARKKVRKDLYCAFHGRSSHTTEQCRNIRQRGNGQDPRPQQGTTVEAPREVVQEQTPPAEQRQDVQRSVIQVITRADPPSQLSKRQKKMHIRMVHSITSAGEGAPQYLNQLISFGPEDAEGVMFPHQDPLVISAEIAGFEVRQILVDGGSSADVIFAEAYAKMGLPTQALTPAPASLRGFGGEAVQVLGQALLLIAFGSGKNRREEQILFDVVDIPYNYNAIFGRATLNKFEAISHHNYLKLKMPSPTVVIVVMGLQPSAASKGDLAIINRAVHSVETEPYERPKHTPKPTPHGKITKVQIDDADPTKLVSLGGDMGEEEVESILEVLKKNIDIFAWSPDEVGGVLADLIMHHLAVKPDIKPKKQKLRKMSADCQEAAKAEVQKLLRAGVIQEIDHLEWLANPVLVRKSNGKWRMCVDFTDLNKACPKDDFPLPRIDQLWGRRGARSIARTLRRSKGRSARAHAQVRHKHFGNLQQKSSTHAADAWSSCPKEEGESSSGW

SEQ ID NO: 138042 - protein, 110 aa, Oryza sativa
  unsure (1)..(110): unsure at all Xaa locations
  Clone ID: PAT_MRT4530_39467C.1.pep
MPSGRHSDDADAPASSYPRRHNDADATPRDAGGPRHHAAVPPRRHAAAPRQAAATPHRRRDTIITKVDEDGRPSAPAEAAKNFVRHSGWVVXGDDDSFVPKSEKEMLWTT

SEQ ID NO: 138043 - protein, 995 aa, Oryza sativa
  unsure (1)..(995): unsure at all Xaa locations
  Clone ID: PAT_MRT4530_39468C.1.pep
MPPKRVVKEKVIRRKESDAGPDMAAEEGAEPSASVAEDGEAQAPSQPPSAPAPSEPSSAPATSVQVPNTADVAKAATAXRALQTRAEILSTNQLVVPQAAPSQPAAAPTALTVIQAQISLDPEAQAEADMEAMRQNMTRLQDMLRQMQEQQQAYEAARRTKATSALILQYSAGYAPPQVRPQVVTQPSPPLATQAPVNFAGQHQPPGQAPQSVAEGAXGSAGATPSFPSATQPTPLHFKHNPIGSPGGEYKSWSEEDSKRRQAIXAAAQAQAQVQVAEPPPLSVRQSQPAIQGQPPRQGQAPMTWRKFRTDRAGKAVMAVEEVQALRKEFDAQQASNHQQPARKKADVIFAEAYAKMGLPTQALTPAPTSLRGFGGEAVQVLGQALLLIAFGSGENRREEQILFQETESGQKPVYFVFEALQGAKTRYIEMEKLAYALVMASRKLKHYFQAHKVIVPSQYPLGEILRGKEVTGRLSKWAVELSPFDLHFVARSAIKSQVLADFVAEWTPVFAPDPEPTEQFWVMCSDGSWSHKGAGVAAVLFSPNGVPIRYAARLQFDTTNNTAEYEAVLLGLRKAKALGVRCLLIRTDSKLVAGHVDKSFEAKEEGMKSVPMDCSEVMAIDKEKWGEDPHDWRTPFVKHLKTGWLLVDEAEAKHLQLRATKYKMVSGQLYRTGAARTVASKVFRQGVYWPTVLKVCVEQIKKCESCQRHGRSQAAPQYDLQPIAPVWPFARWGLDIIGPFPVARNGYKFAIVAVEYFSRWIEAEPLGAITLAAVQKFVWKNIVCRFGVPKEFITDNGKQFDLEIKLASVAHPQSNGAAERTNGKILEALKKRLEGAAKGKWPEELLSVLWALQTTPTRPTKFSPFMLLYGDEAITPAELGANSPRVMFFGGEGREVSLELLEAVRVEALEHMHKYAASTSATYNKKVRPTELMPGHLVLRKKANPVAVGKLESKWEGPYLIKRKSRTGSFRLATLEGEEFDHSWNAASLKRFYV

SEQ ID NO: 138044 - protein, 132 aa, Oryza sativa
  Clone ID: PAT_MRT4530_39469C.1.pep
MNANFTLCSCYTDYTASLSGRCIGTGIMFAYAITLCHDDDIIVVSGSLGMVSRLLGIIILGYMLQMRGGPLMVTAQYEYSSARVYSPKLISWGGYSSVFSPGCMVMTGCRKELGSQGWLLEVLGGHQKKGIS

SEQ ID NO: 138045 - protein, 907 aa, Oryza sativa
  Clone ID: PAT_MRT4530_3946C.1.pep
MRTFRTGLSMAYLKKTQWMDVEGNEGADELGQILRDLQEDCESEKKVQKLERMLADHRTALYPSCEKGYKKLSTILEFLQWKDKNDVSDKAFGELLKLVKNILPEGNELPESTYEAKKTVCPLGPKQPGNDIDVYLRPLVEELKVLWWKEGVAVWDEDKQEQFNLQALLFVTINDWPALSNLSGQSNKGYNACTHCMDETESTYLKHCRKVVYMGHRRFLAANHPVRKKGKHFEQKADHRTKPKHCNRKAVFEMVKDLKVVFVKGPGSQPIESEDGHAAMWKKNSIFWELPYWEVLDVRHAIDVMHLTKNLCVNLMGFLGVYGKSKDTLEACNDLKHMEQYEGLHPEPNEKGSHYLSPASYTLSKEEKDSMFQCLESIKVPSGYSSNVKRIISTKDKKFTNLKSHDCHVLMTQLLPVIIRGILPDNVRATITKLCAFMNTISQKVIDPESLAALQQDVRYIGVLKKYVRNRSRPEASIAKWYGTEEVIEFCVDFIEDLEPIVVPESIHEGRLRGKGTLGRRAIMTVDNDLFRKAHLTVLQQSLLVAPYIDEHLAIVRSENSGKSDAWIKRHHIDTFPAWLREHLLGNETIDRQLAFLARGPSGSVTTFQGYEINGYTFYTRAQDKKSTNQNSGVRIDAIGHDGPTSTYYGVIDNIWELEYGPLKVPLFRCQWVRLTGGGVMIDDSGMTTVDLNKVGYSDEPFVLANDVTQVFYVKDMDNKPKKGKGPDEPRRHVVLPSKRKIVGVEDKTDENYDLFEGQPPFVVTVDPSILEKARQRLADRRERKDIEATIQHNRQLVHVEKSKLDQLSEGPIKSNIDRLEARKIDLMAQLQECNAELDMEHKKLADLPQDIEEQKAKLKSAIKNVADMTKSLKVIPGTDTQDAQAIEDVEHIRQKAISAIKQYLSQ

SEQ ID NO: 138046 - protein, 48 aa, Oryza sativa
  unsure (1)..(48): unsure at all Xaa locations
  Clone ID: PAT_MRT4530_39470C.1.pep
PDAKLTVKSKGAEKPSAKGRXGKAGKDLNKLKRATYALLVFMEEFRKE

SEQ ID NO: 138047 - protein, 98 aa, Oryza sativa
  Clone ID: PAT_MRT4530_39471C.1.pep
KEMAKEIHQGLCGAHQAARKVASKRHGRSQATPQYDLQPIAPIWPFARWGLDIIGPFPVARNGFVSVAHPQSNGAAERTNGKILEALKKGKWPEELLS

SEQ ID NO: 138048 - protein, 91 aa, Oryza sativa
  Clone ID: PAT_MRT4530_39472C.1.pep
MVFKLRDIIIWGYILRMRGGPLMVTAQYGYSSAPIYNPKLISWGGYSSIFSPGWMVMTGCHKELDSQGWLLEVPGGHRIEVSFAEVPAWVK

SEQ ID NO: 138049 - protein, 76 aa, Oryza sativa
  unsure (1)..(76): unsure at all Xaa locations
  Clone ID: PAT_MRT4530_39473C.1.pep
MAPDPSFTLRWWQIVREKDEEGSKGGDYTYNHGYYMIGYIDEXENQRTIQKGTQAQGGGPSIRDAIDYGEPKKMKK

SEQ ID NO: 138050 - protein, 678 aa, Oryza sativa
  Clone ID: PAT_MRT4530_39474C.1.pep
MEAMRQNMTRLQDMLRQMQNNNKHTRRQGGPRSRRLRRNSKLSFSNSTNPTTFQVQPHRPTRRGIQVKAPTVRQQAPTPGFGTNQAPLVGAGQSNAMAQPHAQAAISPFATPYPQQGAVNRAGGEKGLPLSRGIKTRPIPPQFKFPPVPRYSGETDPKEFLSIYESAIETAHGDENTKAKPIAFTHRSNCAMFLSLTFETPMRSRRRSNTYSAFAKGRGESIREYMRRFSQARCQVQDITKALVINAASAGLLEGELKRKIANKEPQTLEHLLCIIDGFARGEEDSKRRQAIQAEYDKASVAAAQAQAQQCRNIRQRGNAQDPRPQQGTTVEAPREAVQEQTPPAEQRQDVQRRVIQVITRADPPSQLFKRQKKMQIRMVHSITSAGEGAPQYLNQLISFGPEDAEGVMFPHQDPLVISAEIAGFEVLRILVDGGSSADVIFAEAYAKMRLPTQALTPAPASLRAFGSGENRREEQILFDVIDIPYNYNAIFGRATLNKFEAISHHNYLKLKMPGPKGVIVVKGLQPSAASKGNLAIINRVVHSVETEPHERPKHMPKPTPHGKITKVQIDDADPTKLVLLGGDMGEEEVEALEHMHKYATSTSATYNKKVRSTELMPGHLVLRKKANPVAVGKLESKWEGPYLIKHKSRTGSFRLATLEGEEFDHSWNANSLKRFYV

SEQ ID NO: 138051 - protein, 134 aa, Oryza sativa
  unsure (1)..(134): unsure at all Xaa locations
  Clone ID: PAT_MRT4530_39475C.1.pep
MSTYFTLCSCYTEYTASLSGRCFGASIVFAYAITLCHDDDIRVVSGSLDMVSRLRDIIIWGYILRMRGRPLMVTAQYGYSSAPIYNPKLISWGGYSSVFSPGWMVTTGCHKELGSQGWLLEVPXGHRIEEKCTS

SEQ ID NO: 138052 - protein, 324 aa, Oryza sativa
  Clone ID: PAT_MRT4530_39476C.1.pep
MDEIKGVFEEKGIEEIEKIRKTREIARKHGLEPIFVHSCAVYSTVLLRVTQALGSFSSCLSILVDIWAYNTTKKVPRLGRLAPGVRGLEGSRVAPAGGAQAWGDPGEVPGDGDGVVPDHAPRDTLEGAGEYINRAVGPAVAVRGLEPPFLAASAVADDLLGYLVVLSRLEEVLHFLSDNCGIASQWLSFAEYLGDRSLADPCFVSDLAEVLSHLKTPSANLDGGLLVAALDILEDEFCRLLKEHSASLAMKEPNYSRPRLHLRAHCRGRSAPPPPPRPTPRCPPARGRFTGGGDTARRRHSQPAAALAFSCIAAAAVTSSPASL

SEQ ID NO: 138053 - protein, 48 aa, Oryza sativa
  Clone ID: PAT_MRT4530_39477C.1.pep
MTTTLPRSLDLDDVLLLVSSISCLPLYRNPHQLDYFEGLRCHKPKTRK

SEQ ID NO: 138054 - protein, 1609 aa, Oryza sativa
  unsure (1)..(1609): unsure at all Xaa locations
  Clone ID: PAT_MRT4530_39478C.1.pep
MAAEEGAEPSAPVAEDGGGQAPSQPSSAPATSVQEPNAADVAKAAAAARALQTKAEILSTSQLVVPQAAPSQPAAAPTALGVEQAQVSPDPETQAEADMEATRQNMTRLQDMLRQMQEQQQAYEAARRVKATSAPILQYSAGYVPPQVHPQMTTQPFPPQAAHAPVYFAGQQPAAAVQLQAQPVAAQVHHQPPGQVPQTVAEGASSLQAQLQAFLQQLNQPHCISSTTPLAHPKGNTSQGAPNWLPPIQPGLGVSPWNQGPQFDFVNAAQAPTVRQQAPIPGFETNQAPIQAATTWSQPIFDPSMAAQQVPPVGAGQSNTMAQPHAQAAILPLATPYPHQSAVNRAGGEKGLPLSGGIKTRLIPPQFKFPPVPRYSGETDPKEFLSIYESAIEAAHGDKITKAKAGESIRKYMHRFSQARCQVQDITEVSVINAASAGLLEGELTRKIANKEPQMLEHLLRIIDGFVRGEEDSKRRQAIQVQYDKASVAAAQAQAQVQVVEPPPLSVRQSQPAIQGQPPRQGQAPMTWRKFRTDRAGKTVMAVEEVQALRKEFDAQQASNHQQPARKKVRKDLYYAYHGRSSHTTEQCRNIRQRGNAQDPRPQQETTVEAPREVVQEQTPPAEQRQDAQRRIIQVITRADPPSQLSKRQKKMQIRMVHNITLVGEGAPQYLNQLISFGPEDAEGVMFLHQDPLVISAEIAGFEVRRILVDGGSSADVIFAEAYAKMGLPTQAFTLAPASLRGFGGETVQVLSQALLLIAFGSGENRREEQILFDVVDIPYNYNAIFGRATLNKFEAISHHNYLKLKMPGPIGVIVVKGLQPSAASKGDLAIINRAVHSVETEPHERPKHTPKPTPHGKITKVQIDDADPTKLVSLGGDKGEEEVESILESPDEVGGVPADLIMHHLAVKPDIKPRKQKLRKMSTDRQEAVKAEVQKLLRAGVIQEIDHPEWLANPVLVRKSNGKWRMCVDFTDLNKACPKDDFPLPQIDQLVDSTAGCELMSFLDAYSSYHQIHMNLLDIPKTFFITPFGTFCHLRMPFGLRNAGATFARLVYKVLGKQLGRNVEAYVDDIVVKSRKAFNQAIDLQETFDSLRTAGIRLNPEKCVFGVRAGKLLGFLVSERGIEANPEKIDAIQQMKPPSSVHEVQKLAGRIAALSRFLSKTAERGLPFFKTLRGAGKFNSTPECQAAFNELKQYLQSPPTLISPPPGSALLLYLAASPVAVSAALVQETEFGQKPVYFVSEALQGAKTRGAGIAAVLFSPKGVPIRYTARLQFDTTNNAAEYEAVLLGLRKAKALGVRRLLIRTDSKLVAGHVDKSFEAKEEGMKRYLEAVRSMEKCFTGITVEHLPKDQNEEADALAKSAACGGPHSPGIFFEVLHAPSVPMDSSEVMAIDXEKLGEEMAKEIHQGLCGAHQAARTVASXKWGLDIIGPFSVARNGYKFAIVAVEYFSRWIEAEPLGAITSAVVQKFVWKNIVCCFGVPKEFITDNGKQFDSDKFREMCEGFNLEIRFTSVAHPQSNGAAERTNGKILEALKKRLEGAAKGKWPEELLSVLWALRTTPTRPTKFSPFMLLYGDEVMTPAELGANSPRVMFSGXEEGREVSLELLEGV

SEQ ID NO: 138055 - protein, 132 aa, Oryza sativa
  unsure (1)..(132): unsure at all Xaa locations
  Clone ID: PAT_MRT4530_39479C.1.pep
MNAYFTLCSCYTGYTANLSGRCFGAGIIFTYAITLCHDDDIRVVSGSLDVVSRLRDIIIXGYMLRMRGGPLMVTAQYGYSSVPVYNPKLIPWGGYSSVFSPGCMVMTGCRKELGSQGWLLEVPGGHRIEDIS

SEQ ID NO: 138056 - protein, 66 aa, Oryza sativa
  Clone ID: PAT_MRT4530_3947C.1.pep
ASSTVLGQPNRASPQISAGCLGKTKEVRTKELPWHATSHAFSLIQENIKKIVSREYEGFANSSPIR

SEQ ID NO: 138057 - protein, 157 aa, Oryza sativa
  Clone ID: PAT_MRT4530_39480C.1.pep
RPGPSFSPHLRNPAAAMAAAATARSGFRRMFSISAFSPPKPPTPPPKADPSPNLFISGLSKRTTTDGLKEAFAKFGEVIHARVVTDRVTGFSKGFGFIRYATVEDAAKGIEGMDGKFLDGWVIFAEYARPRTPPQQPEMNSQPQQSWGPPSSSWGAQ

SEQ ID NO: 138058 - protein, 968 aa, Oryza sativa
  unsure (1)..(968): unsure at all Xaa locations
  Clone ID: PAT_MRT4530_39481C.1.pep
MEQEWRETKSRTSALPGQRRLRRRVQGEDYLPKEDDFAMAIVISTTTGADRGNLRAKPLRANATEEGREGEGCQAEGKRRRTGYGRRGRSRAFGARGRRWRRTSVITTAFGPCNLRASAERGRRGEGGCGGEGTPDQGGDPFDKPTGGAPSRTSREAIQEQTPPAEQHQDVQRRVIQVITRADPPSQLSKRQKKMQIRMVHSITSAGEGAPQYLNQLISFGPEDAEGVMFPHQDPLVISAEIAGFEVRRILVDGGSLADVIFAEAYAKMGLPTQALTPAPASLRGFGGEAVQVLGQALLLIAFGPGENRREEEILFDIVDILYNYNAIFNRATLNKFEAISHHNYLKLKMLGPTGVIVVKGLQPSAASKGDLAIINRAVHSFETKPHERPKHTPKPTPHGKITKVQIDDADPTKLVSLGATWAKKKLRIHMNPLDIPKTSFITPFDTFCHLRMPFGLRNAGATFARLVYKVLGKKLGRNVEAYVDDIVVKSHKAFDHAIDLQETFDSLHTAGIRLNPENAALVQEIKFGQKPVYFVSEALQGAKTRYIEIEKLAYALVMASRKLKHYFQAHKVIVPSQYPLGEILRGKEVTGRLSKWAAALSPFYLHFVARSAIKSQVIADFVAEWTPILATDPEPAEQSWFDTTNNAAEYEAVLLGLRKAKALGVRCLLIRTDSKLVAGHVDKSFEAKEEGMKRYLEAVRSMEKCFTSITVEHLPRDQNEKANALAKSAACGGPHSPGIFFNVLHAPRVPMDSSEVMAIDXRNWAKTHMTGEPXFVKHLETGWLPVDEAEAKREEMAKEIHQGLCGTHQAARTVASKSIAPIWPFARWGLDIIGPFPVARNGDEAMTPAELGANSKRVMLSGGEEGREVSLEVLEGVRVEALEHLHKYATSTSATYNKKVRPTELMPSHLVLRKKANPVAIGKLESKWEGPYLIKHKSRTGSFRLATLEGEEFDHSWNAASLKRFYV

SEQ ID NO: 138059 - protein, 240 aa, Oryza sativa
  Clone ID: PAT_MRT4530_39482C.1.pep
MALAAFLSSFVSFVLLLEYSSIYIYGIEILSKYMNTYFTLCSCYTEYTASLSGRCFGAGIMFAYAITLCHDDDIRVVSGSLGVVSRLRDIIIWGYILRMRGGPLMVTAQYGYSSAPVYNPKLIPWGGYSSVFSPGCMVMTGCRSASQNPRGFGGGGGTNKAAVTRTGDGEARRRRDVGMKYQAAATVGRHEGEARAPRTVARTTGGHKGEARRGQRDAGEAHARPTIVGTAPRNSAAGGK

SEQ ID NO: 138060 - protein, 172 aa, Oryza sativa
  Clone ID: PAT_MRT4530_39483C.1.pep
MAAAATARSGFRRMFSISAFSPPKPPTPPPKADPSPNLFISGLSKRTTTDGLKEAFAKFGEVIHARVVTDRVTGFSKGFGFVRYATVEDAAKGIEGMDGKNCLISLAATGKAETSTNFYHSENKMKRLFGVFLDGWVIFAEYARPRTPPQQPEMNSQPQQSWGPPSSSWGAQ

SEQ ID NO: 138061 - protein, 101 aa, Oryza sativa
  Clone ID: PAT_MRT4530_39484C.1.pep
LLSSPITAVGLDELVLSLRYWLRPILSSLIGFAFVPVSQGSCLAWLCAPEPPSASARGYPRERGRPHGFQGAGARGAQGGSGLGFQNRPGPLGTGSSLGKS

SEQ ID NO: 138062 - protein, 147 aa, Oryza sativa
  unsure (1)..(147): unsure at all Xaa locations
  Clone ID: PAT_MRT4530_39485C.1.pep
VAKTMEQERCEAKSRTSALPGQRRLRRRVQGEDYLPKEDDFAMASSLPXRGPKKPFRPIKPRGYRAGDRLTAHQGPMSPYNIMYPCKCPFRKGNHTSSPSASDDLALSATSRTSANVLCRAAIGRSSASGPSRATVGLCLVGTVVHL

SEQ ID NO: 138063 - protein, 1495 aa, Oryza sativa
  unsure (1)..(1495): unsure at all Xaa locations
  Clone ID: PAT_MRT4530_39486C.1.pep
VAKTMEQEQREARGRASTLSSQRRPRRRVQGEEYLPKEDDFAMASSPPRGPKKPFRPIKPRGYRAGGRPTAHQGPMSLHNIMYPCKCPFRXGNHLSFRQQLAPSVGTSERYHRERMPPKKVVKEKVTRRKESDTGADMAAEEGAEPSAPVAEDGGGPSASASAPSLLPSAPATSEQVPNAANVAKAAAAARALQTRAEILSTSQLVVPQAVPSQPAAAPTVLAAVQAQVSPDPETQAEADMEAMRQNMTXLQDMLRQMQEQQQAYEAARRTKVTSAPILQYSAGYVPPQVHPQVTTQPFPPQAAQAPMYFAGQPSTAAAHPAPHVQLQAQPVAAQVQHQPPGQATKTVAEGASALQAQLQAHYISSTTPSAHPVGNTSQGAPNWLPPIQQGSGPSPWSQGQQFDFGNTAQVPTVRQQVPTPGFGTNQAPIQAAMTWSQPIFDPSMAAQQVPPVGAGQPNAMAQLHAQAAISPFATPYPQQGAVKRAGGEKGLPLSGGIKTRPIPPQFKFPPVPRYSGETDPKEFLSIYESAIEAAHGDENTKAKXNSIYSWEQLRDVFXVLNFRGTYEEPKTQQHLLGICQRPGELIREYMRRFSQARCQVQDITEASVINAASAGLLEGELTRKITNKEPQTLEHLLCIIDGFARGEKDSKRRQAIQAEYDKASVATAQAQAQVQIAEPPPLSVRQSQPAIQGQPPRQGQARMTWRKFRTDWAGKAVMAVEENAIFGRATLNKFEAISHHNYLKLKIPGPTGVIVVKGLQPAAASKRDLAVINRAVHNVETEPHERPKHTPKPTPHGKVTKVQIDDADSTKLVSLGGDMGEEEVESILEVLKKNIDIFAWSPDEIYMNPLDIPKTSFITSFGTFCHLRMPFGLRNAGATFTRLVYKVLGKQLGQNVEAYVDDIVVKSRKAFDHAIDLQETFDSLRAAGIKLNPEKCVFGVRAGKLLGFLVSERGIEANPEKIDAIQQMKPPSSTQSIPLKGGRKSAALVQETESGQKPVYFVSEALQGAKTRYIEMEKLAYALVMASRKLKHYFQAHKVIVPSQYPLGGILRGKKVTGRLSKWAVELSPFDLHFVARSAIKSQVLADFVAEWTPVLAPNPEPEDQFWVMCSDGSWSHKGAGVAAVLFWPNGVPIRYTAKLQFDTTNNAAEYKAVLLGLRKAKALGVRRLLIRTDSKLVAGHVDKSFEAKEEGMNRYLEAVRSTEKCFTGITVEHLPRDQNEEADALAKSAACGGPHLPGIFFEVLHAPSVPVDSPEVMAIDQEKLGQYPYDWRTPFVKHLETGWLPVDEAEAKRLQLRATKYKMVSAVEYFSRWIEAEPLGAITSAAVQKFVWKNIVCRFGMPKEFITDNGKQFDSDKFREMCEGLNLEIRFASIAHPQSNGAAERTNGKILEALKKRLEGGGAKGKWPEELLSVLWALRTTPTRPTKFSPFMLLYGDEAMTPTELGANSPMVMFSGGEAGREVSLELLEGVRVEALEHMRKYATSTSATYNKK

SEQ ID NO: 138064 - protein, 35 aa, Oryza sativa
  Clone ID: PAT_MRT4530_39487C.1.pep
LMTPQQRHGVAFTLKADAIGSRLRRRDTRIVAFSN

SEQ ID NO: 138065 - protein, 196 aa, Oryza sativa
  Clone ID: PAT_MRT4530_39488C.1.pep
MEDDKSKEGKSSSSYRGVRKRPWGKFAAEIRDPERGGARVWLGTFDTAEEAARAYDRAAFAMKGATAMLNFPGDHHHGAASRMTSTGSSSSSFTTPPPANSSAAAGRGGSDRTTDKVELECLDDKVLEDLLAETNYLRGERDAAGFATAHTQAGPVMGCVGAHAIRRRPLESPPPASDSPTPLRHATTAMLQTLPL

SEQ ID NO: 138066 - protein, 175 aa, Oryza sativa
  Clone ID: PAT_MRT4530_39489C.1.pep
LKVIVIMIIAAVDAWFSYLAVSILTKKNAHHNSTNNASRSSRRNHNPVLPPPKCHHRFRYHSCSLIDVLKHNASVLLSIMESKGLNLRICVATQLILGVEGARRRRPAEGGCDQRPELPGERAQRLSHADGFRLRASRSREGARLGFRSLSSSPFSFSFPFPSLPLPLAVVCPGR

SEQ ID NO: 138067 - protein, 120 aa, Oryza sativa
  Clone ID: PAT_MRT4530_3948C.1.pep
SVSAATATAASPRRSIYAVALRSNATPNRTRMALKHFCGLTVLGDEANRGPPLPMRITRSGLPPSSLASANAAMMAWSCTRVDAQRRHWQDHARDVVVDCLRPPAMSAVEALLQPWKCVP

SEQ ID NO: 138068 - protein, 117 aa, Oryza sativa
  Clone ID: PAT_MRT4530_39490C.1.pep
MEVAEPVRTESAWDPPWGAVANSFDEMEGEFLEYLNVVLRPWPRVAAYRRSAPGDGVGDRQSLRSEIVDCCVQRHKQVQGELDLVQDEATECHKRSEEAEAGKAHAVKDLGGTNAPS

SEQ ID NO: 138069 - protein, 342 aa, Oryza sativa
  Clone ID: PAT_MRT4530_39491C.1.pep
MPPSAAAHNSSANPGAAAMNLSFANLPPADAQLFAILQNGGYPFQVAAHAGGPPAAYRGMAPPGPAVPFFNGHVYPSHMLHPSQQQGASPQNLQKNPMSNMSASSQKHQPQQSQGLLGYAPNANAAAAASNSQSYSSGNQRPVLLPGLAHRQDSEKTVQDGPSGDDKSSHPQKGGYDHNYAVPVHLPNFALMPPTSAAGGGGQSDKKLSDHHPHQLPPASRGQGVRIDLASSPSFVVPFGSVGAPGSAPGGLDFSSLGPNHQLFQSHQEAGRHGYPQLNFATAQSVQAGQHKPQRTIDSASPYELSPQICCTKQYRWIFRPLEHAKFSGYDVPIKCCPSGCS

SEQ ID NO: 138070 - protein, 220 aa, Oryza sativa
  unsure (1)..(220): unsure at all Xaa locations
  Clone ID: PAT_MRT4530_39493C.1.pep
RQVRPSGEVRQPALRRWRPAVGALGGQRNGAAAGRAAARSRRGASLVVVFFRRTVVERRAERRRRAAGGXGESATREEASSSGRPAGEEXQRAPADGREGEERGSTAGGSRRCAGVNSWWRWPEEEEAEEEVASLLARSPSAASLLAQPPHAAXPPRPVVERRLPPCPAAVRRLPARPAAASGPSSRPAAAHRLPPRPAVARRSVHRPQAAHHLGLRRPN

SEQ ID NO: 138071 - protein, 81 aa, Oryza sativa
  Clone ID: PAT_MRT4530_39494C.1.pep
RAFIYMLPLLAVWPSLMMSFSCASVRLCHRSSIQVPRPLVVIDAFQYLANSVRIIHGLSLSARRHTCSAKLDALSTSGGVL

SEQ ID NO: 138072 - protein, 405 aa, Oryza sativa
  Clone ID: PAT_MRT4530_39495C.1.pep
MDRPRQQHEPEHLGGGGIDVEVELDPEDLQPSVPLKKVPAGDLFEAARAGDCARLALLLGGGANVNERDRWDSVALYYACLAGHADAARMLLEAGAVCAERTFDGDRCHYAALNLRLRRLLKAFEARPPPLPPLPAALRATFLACPANRAAFLEMLQWTAGSEAAALAAAAGFGPTDNPSSTSLFPPDITFYVDGKPIEAHRVILCARSSFFRRKFNTDWKDRKEVRFSSQKLSFGALYSLVHFFYSDRLEVDVDDMENLARACKVCKCEGLQKILIKEATLQRYAEHKSPRDLDSSQKRFILHGQSLPEEDRLPSALRHIFEECLANSREQECYNDESNEMSRDSGVDAAADLYIKVILASRSEYFKARLSRNMDFLEVKSGLQSTQSLPFLEEHDMSTEAFEK

SEQ ID NO: 138073 - protein, 36 aa, Oryza sativa
  Clone ID: PAT_MRT4530_39496C.1.pep
IFNFESDKRRDDGWGYFKIPLAYKHKKRVMPDLTNA

SEQ ID NO: 138074 - protein, 116 aa, Oryza sativa
  Clone ID: PAT_MRT4530_39497C.1.pep
SLEFSRLNFSGLPAIQLRNLARYAGMASVKYIARMPQQRKLAVLMARACALLLDDNTDVPDLRQVIFKCVPKNRLAESVSKVNELARPQNNNFHDEMVEQYGRVKRFLPAVLRDLH

SEQ ID NO: 138075 - protein, 169 aa, Oryza sativa
  unsure (1)..(169): unsure at all Xaa locations
  Clone ID: PAT_MRT4530_39498C.1.pep
MASVKYIARMPQQRKLAVLTAFVKAQEITALDDAVDVLDMLILDIIREAKKTGQKKRLRTLKDLDQAALLLARACALLLDDNTDVPDLRQVIFKCVPKNRLAESVSKVNELARPQNNNFHDEMVEQYGRVKRFLPAVLRDLHFRAXPASGHVLAGFIFCKTDWSKNAIL

SEQ ID NO: 138076 - protein, 45 aa, Oryza sativa
  Clone ID: PAT_MRT4530_39499C.1.pep
LVTMLKMLLFWDRGSIFIILVCLDLLNYDVLSSSMRLVLLDGGSS

SEQ ID NO: 138077 - protein, 375 aa, Oryza sativa
  unsure (1)..(375): unsure at all Xaa locations
  Clone ID: PAT_MRT4530_3949C.1.pep
SSSLESCDQVYLEQLSQRNMENRKRYXLEVLKEDFPEPSSSCVKPISLRWMHFKMDKISFPFRYYQXVYCANILGCMXPTKCNALVHAHSLIMLHVDSVDIQDFALTRKEPDYSRYTRARYMKEYSERVILNCGDALFIPEGWYHQVDSDDLTIAINFWWKSRIMNEMLEHMDAYYLRRILSRCPEQLKQKQVNSDSSDKKDSPLQTLEPSTLQALYELISLVHNSAEMVSQNEITEPTSQDAYCKQSNGSKKIAADDSSLLEKDPIAKIILPLKPLELQSMLLAMARTFPRTLEALVLNMLGPIGAEILTRKFDEMDQQATKEQQSEFYKTFYSVFDDQYAAMDALLNGKEMFSFQVFQSVLRQYIGVHADRPK

SEQ ID NO: 138078 - protein, 450 aa, Oryza sativa
  Clone ID: PAT_MRT4530_394C.1.pep
MEAAAKLKRSISRQLSSGAARVWRQLSLEPVYTPRRAGAVGGGGGGGGGGGGGGGGARPTRFGLARQSSLDPTPREGGGAAEDGSGAAAMLAVPENLDATMRLLFAACQGDVAGVEELLRDGVDVDSIDLDGRTAMHIAACEGQGEVVRLLLSWKANMNARDRWGSTPAADAKHYGHFEVYNLLRARGAKTPGHYVARWYGSKVFVKILDKDSFSDANSINEFKHELTLLEKARHPNLVQFVGAVTQNVPMMIVSEYHQKGDLASYLETKGRLQPYKAIRFSLDIARGLNYLHECKPEPIIHGNLSTKSIVRDDEGKLKVAGFGSRSLIKVSEDNPQMDQTTSKFNSVYTAPEMYRNGTFDRSVDVFAFGLILYEMIEGTHAFHPKPPEEAAKMICLEGMRPPFKNKPKYYPDDLRELIQECWDPTPSVRPTFEEIIEGKQIMKYMRNIP

SEQ ID NO: 138079 - protein, 214 aa, Oryza sativa
  Clone ID: PAT_MRT4530_39500C.1.pep
MVKSIVDGSIAEYQATGPVYLPGVIFPNYRPLVPNSQPSTSNMPPAQPTAPPTVDLVQQQPIQQTPLRQQISQPIQQQSSLNASARFRTPDNQPRQHVVTQVLHNVQPDQSVIAQVIPEHLRFAEAKKNFKKINHVYPYMYGSDDDDDSEVAAAEWIRSKKVIPYQWVKSSGKEEMYDFDITKADKIFDPLLREKQIKLPAGHIIPSSEELGKR

SEQ ID NO: 138080 - protein, 258 aa, Oryza sativa
  unsure (1)..(258): unsure at all Xaa locations
  Clone ID: PAT_MRT4530_39501C.1.pep
EFARDLLXPKYFKRNNFSSFVRQLNTYGFGNIVPDRWEFANDXFRRGERRLLCEIHRWKVTPPTPATTTTGAVTVAATIPMALPVTTRDGSQVLSGEEQIISSSSSPEPXSCCRRRHPAPAPAPAASRPAGDENERLRRENAQLAREHSQMXGNNILLLMSKYTSTQKLNAANSSSTAGNNNCFGESAEAATPLSLPAVLDLMPSCPGGAARIKQRRGNDEREKLFGVSIGRKRTRHEGGAGGEDEHQQANHTDANTH

SEQ ID NO: 138081 - protein, 43 aa, Oryza sativa
  Clone ID: PAT_MRT4530_39502C.1.pep
SRTPCPPPCARPTLPKRSRWRRLAPEPAQTRWRWPLLLYVRQT

SEQ ID NO: 138082 - protein, 76 aa, Oryza sativa
  Clone ID: PAT_MRT4530_39503C.1.pep
EQPDRNPGTNLRCRVPRVIMICYSLGMPMKRISNVLSLLSYLAVYSICLPLRQLLKSIVYQVVKLTILYPYGCPLR

SEQ ID NO: 138083 - protein, 123 aa, Oryza sativa
  Clone ID: PAT_MRT4530_39504C.1.pep
SSVSAPSLLLLLFLALLIGLVFLLYPSAPVACMAELHPDLFHVNLSSFPVIDLEVATEEGDASMSIHPRSQPSTSRLWLWWPVRKARGSPGRTFGSQREELVARIYGHHALSAKEEDEAAEGI

SEQ ID NO: 138084 - protein, 137 aa, Oryza sativa
  Clone ID: PAT_MRT4530_39505C.1.pep
MGRNGYKFAIVAVEYFSRWIEVEPLGAITSAAVQKFVWKNIVCYFRVPKEFITDNGAKRVEALEHMHKYATSTLTTYNKKVRPTELMSSHLVLRKKANRVAVGKLESKWEGPYLIKHKSRIGSFRLATLEGEEFDHS

SEQ ID NO: 138085 - protein, 65 aa, Oryza sativa
  Clone ID: PAT_MRT4530_39506C.1.pep
QVGITLWAQDTFHTRPDVTASTSRFSPRTRLHCYRTFTQGCSQDPGRQTTPYSLMSPPDMTDITH

SEQ ID NO: 138086 - protein, 1584 aa, Oryza sativa
  unsure (1)..(1584): unsure at all Xaa locations
  Clone ID: PAT_MRT4530_39507C.1.pep
LVAVESTRPGSFAVESRTAVRLRQRCSGANRSAASTNPRLRGKPSTNPSRHDMVTANLRPIHGGSASTSDRSWAAECYSPTPRTSRDFALRHAIPAARCGKQGGSSSPSTSQRSKRLMGTKIPRQRPGESIREYMRRFSQARCQVQXITEASVINAASAGLLEGELTRKIANKEPQTLEHLLRIIDRFARGEEDSKRRQAIQAEYDKASVAAAQAQAQVQVAEPPPLSVRQSQPTIQGQPPRQGQAPMTWRKFRTDRAGKAVMTVEEVQALRKEFDAQQASNHQQPARKKVRKDLYCTFHGHSSHTTEQCRNIKQRGNAQDPRPQQGATVEAPREVVQEQTPPAEQHQDAQRRVIQVITRADPPGQLSKRQEKMQIRMVHNITSAGEGAPQYLNQLICFGPEDAEGVMFPHQDPLVISAEIAGFEVQRILVDGGSSADVIFAEAYAKLGLPIQALTPAPASLRGFGGEAVQVLGQALLLIAFGSGENRREEHVLFDVVDIPYNYNAIFGRATLNKFEAVSHHNYLKLKMPGPTGVIVVKGLQPSAASKGDLAIINRAVHNVEAELHDRPKHAPKHTPHGKITKVQIDDADPTKLVSLGGDMGKEEVESILEVLKKNIDIFAWSPDEVGGVPADLIMHHLAVKPDTKLRKQKLRKMSANRQEAAKAEVQKLLRARVIQEIDHPEWLANPVLVQKSNGKWRMCIDFTDLNKACPKDDFPLPRIDQLVDSTAGNRFMSFLDAYSGYHQIHMNPLDIPKTSFITTFGTFCHLRMPFGLRNAGATFARLVYKVLCKQLGWNVEAYVDDIVVKSRKTFDHASNLQETFDNLRAVGIKLNPEKCVFGVRAGKLLGFLVSERGIEANPEKIDAIQQVKPPSSVHEVQKLAGRIAALSRFLSKAAERGLPFFKTLRGAGKFNWTPECQAAFDELKQYLQSPPALISPAPGSELLLYLAASPVAVNAALVQETDFGQKPVYFVFEALQGAKTRYIEMEKLAYALVMASRKLKHYFQAHKVIVPSQYPLGEILRGKEVIGRLSKWAAELSPFDLHFVARTAIKSQVLADFIAEWTPFDTTNNAAEYEAILLGLRKAKALGVRRLLIRTDSKLVAGHVDKSFEAKEEGMKRYLEAVRSMEKCFAGVTVEHLPRGLNEEADALAKSVACGGPHSPGIFFEVLHAPSVPMDSSEVMEIDQVKLDEDPCDWRTPFVKHLETGWLPEDEEEAKRLQLRATKYKMVSGQLYCSGVLQPLLRCISFAEGEEMAKEIHQGLCGAHQAARTVASKVFRQGVYWPIVLKVCVEQIKKCESCQRHGRSQTAPQYDLQPIAPIWPFARWELDIIGTFPVARNGYKFAIVAVEYFSRWVEAEPLGAITSAVVQKFVWKNIVCRFGVPKEFITDNGKQFDSDKFREMCEGLNLEIRFSSVAHPQSNGAAERTNGKILEALKKRLKGAAKGKWPEEMLSVLWALRTTPTRPTKFSPFILLYGDEGXEKGREVSLELLEGIRVDALEHMRKYATSTSATYNRXSSTDELMPGHLVLRKKANPVAVGKLESKWEGPYLIKNKSRTGSFCLATLEGEEFDHSWNAASLKCFYV

SEQ ID NO: 138087 - protein, 100 aa, Oryza sativa
  Clone ID: PAT_MRT4530_39508C.1.pep
PPFPKVKAAVPEEFAFYADPRSMQLGFQLVQGNLFENIGGLFGGGAVTLGGLWGFAALPMGFRAFWAFVFFLGGVPFLGGRIDVVTCKIFDDGFCLLWSI

SEQ ID NO: 138088 - protein, 711 aa, Oryza sativa
  unsure (1)..(711): unsure at all Xaa locations
  Clone ID: PAT_MRT4530_39509C.1.pep
MEAYIDDIVVKSRKAFDHAIDLQKTFDSLRTAGIRLNPEKCVFGVRADKLLGFLVFERGIEANPEKIDAIQQMKPPSSVHEAAERGLPFLKTLRGAGKFNWTPECQAAFDELKQHLQSPPALISPPLGSELLLYLAASPVAVSAALVQETKFGQKPVYFVSEALQGAKTRYIEMEKLAYALVMASRKLKHYFQAHKVIVPSQYPLGEILRGKEVTGRLSKWAAELSLFDLHFVARSAIKSQVLVDFVAEWTPVLAPDPEPAEQFWVMCSDGSWSHKGAGIAAVLFSPNGVPIRYVARLQFDTTNNAAEYEAVLLGLRKAKALGVRRLLIRTDSKLVAGHVDKSFEAKEEGMKRYLEAVRSMEKCFTGITVEHLPRDQNEEADALAKSAACGGPHSPGIFFEVLHAPSVPMDSSEVMAIDQEKLGEDPYDWRTLFVKHLETGWLPVDEAEAKRLQLRAMKYKMVSGQLYRSGVFQPLLHCISFAEGEEMAKEIHQGLCGAHQVARTVASKVFRQGVYWPTVLKVYVEQIKKCESCQHHGRSQAAPQYDLQPIAPIWPFARWGLDIIGPFPVARNGYKFTIVAVEYFSRWIEAEPLGAITSAAVQKFVWKNIVCRFRVPKEFITDNGKQFDSDKFREMCEGLNLEIRFASIAHPQSNRAAERTNGKILEALKKRLEGAAKGKWPEELLLVLWXLRTTPTRPTKFSPFMLLYGM

SEQ ID NO: 138089 - protein, 64 aa, Oryza sativa
  Clone ID: PAT_MRT4530_3950C.1.pep
NGCSIPQKFRTVFTLEFDLQLLNYYFKATKLLLLIPIFTYLLLLLIIIIIIIIIIIIIIYYLFK

SEQ ID NO: 138090 - protein, 1539 aa, Oryza sativa
  unsure (1)..(1539): unsure at all Xaa locations
  Clone ID: PAT_MRT4530_39510C.1.pep
MAAEEGAEPSAPVAEDGGGQAPSQPPSAHATSVQVPNAAGVAKAVAAARALQTRAEILSTNQPVVPQAAPSQPAAAPTALAVVQAQVSPDPEAQAETDMEAMRQNMTRLQDMLRQMQEQQQSYEAARRTKATSAPILQYSAGYVPPQVHPQVTTQPFPPQAAQAPVYFAGQQSAAAVHPAPHVQLQAQPVAAQVHHQPPGQAPQTVAEGASALQAQLQTFLQQLNQPHCISSTTPSAHPEGNTSQVRLHQRCSGANRSAASSNSRLRNKPSTNPSCHDVVAANFXPIHGGSASTSSWNRAVECHGPTRRTSCDFAFRHTVPAARCGKQGGRRKGGETXRRTDRAVKAVMAVEEVQALRKEFDAQQASNHQQPARKKVRKDLYCAFHERSSHTTEQCRNIRQCGNAQDPRPQQGTTVEAPHEAVRKQTPPAKQRQDVQRRVIQVITRADPPSQLSKRHKKMQIRMVHSITSAGEGAPQYLNQLISFGPKDAEGVMFPHQDPLVISAEIAGFEVRRILVDGGSSADVIFAEAYAKMGLPTQALTPAPASLRGFGGEAVQVLDQALLLIAFGSGENRREEQILFDVVDIPYNYNAIISRATLNKFEAISHYNYLKLKMSGPTGVIVVKGLQHSAASKGDLAIINRAAHSVETEPHERPKHMPKPTPHGKITKMQIDDADPTKLVSLGADMGEEEVESILEVLKKNIDIFAWSPDEVGGVPADLIMHHLAVKPDIKPRKQKLHKMSADRQEAAKAEVQKLLRAGVIQEIDHLEWLANPVLVRKSNGKWRMCVNFTDLNKACPKDDFPLPRIDQLVDSTAGCELMSFLDAYSGYHQIHMNPLDIPKTSFITPIGTFCHLRMPFGLRNAGATFARLVYKVLGKQLGWNVEAYVDDIVRKSRKAFDHAINLQVRTAGIRLNPEKCVFSVRAGKLLGFLVSERGIEANPEKIDAIQQMKPPSSVREVQKLAGRIVALSRFLSKAAERGLPFFKTLRGAGKFSWTPECQSAFEELKQYLQSPPALISPAPGSELLLYLAASPVAVSAALFQETKSGQKPVYFVSEALQGAKKRYIEMETLAYALVMALRKLKHYFQAHKVTVPSQYPLGESQVLADFVAEWTLAFASEPEPVEQPWVIVAAVLTSPGGLPICYAARLQFDTTNNAAEYDAILLGLKKAKALGVRRLLIRTDSKLVAGHVDKSFEAKEEGMKRYLEAIRSMEKCFADITVQHLPRGQNEEADALAKSAAYGGPHSPGIFFEVLYAPNVPAEGLDVLAIDQAELGEDPVDWRTPFVKYFKSGWFPEDEAEAKCLQLRAAKYKIVSGQLYRSGVLQPLLRCISFAEGEEMAKEIHQGLCGAHQATRTVASKVFRQGVYWPTVLKVCVEQVKKCESCQRHGRSQTAPQYELQPIAPIWPFARWGLDIIGPFPVVRNGYKFAIVAIQYFSRWIEAEPLKAITSAAVQKFVWKNFVCRFGVPKKFITDNGKQFNSSKFKELCEGLNLEIRFTSVAHPQSNGAAERANGKILEALKKRLKGAAKGKWPDEMLSVL

SEQ ID NO: 138091 - protein, 1442 aa, Oryza sativa
  unsure (1)..(1442): unsure at all Xaa locations
  Clone ID: PAT_MRT4530_39511C.1.pep
MAAEEGAEPSASVAEDGEGQAPSQPPSAPAPSQPSSAPATSVQVPNTADVAKAAATARALQTRAENLSTNQLVVPQAAPSQPAAPTAPAVVQAQISLDPEAQAEADMEAMRQNMTRLQDMLRQMQEQQQAYEATRRTKATSAAILQYSAGYAPPQVRPQVVTQPSPPLAAQPPVYFAGQHQPPGQATQTVAEGASALQAQLQAFLQQLNQPHYISSTTPSAHPVGDTSQXVRLIGCHRFSQARDLRHGVKDSSSTSATLLSQSXPIHGGPASTTSWSRAVECRGPTPRTSCDFALRHTVPAASXSIYSWEQLRDVFVLNFRGTYKEPKTQQHLLGIRQRPGESIREYMRRFSQARCQVQDITEASVINAASAGLLEGELTRKITNKEPQTLEHLLRIIDGFARGEEDSKRRXQAQVQIADPPPLFVRQSQPAIQGQPPRRPXPHERPKHTPKPTPHGKITKVQMDDADPTKLVSLGGDMGEEEVESIQEVLKKNIDIFAWSPNEVGGVPADLIMHHLAVKPNIKPRKQKLRKMSADRQEAAKTEVQKLLWAGVIQEIDQPEWLANPVLVRKSNGKWRMCVDFTDLNKIHMNPLDIPKTSFITPFGTFCHLRMPFGLRNAGATFARLVYKVLGKQLGRKVEAYVDDIVVKSRKAFDHAFDLQETFDSLRAAGIKQNPEKCVFSVRVGKLLDFLVSERGIEANPEKINAIQQMKPPSSVHEVQKLTGRIAALSRFLSKAAERGLPFFKTLRGAGKFNWTPECKAAFDELKQYLQSPPALISPSPGSELLLYLVASPVAVSAALVQETESGQKPVYFVSEALQGAKTRYIEMKKLAYALVMASRKLKHYFQAHKVIVPSQYPLGEILRGKEVTGRLSKWAAELSPFDLHFVARSAIKSQVLADFVAEWTLVLAPDPEPNDQFWVMCSDGSWSHKGAGVAAVLFSPNGVPIWYAARLQFDTTNNAAEYEAVLTDSKLVVGHVDKSFEAKEEGMKRYLEAVRSMEKSFTGITVEHLPRDQNVEADALAKSAACGGPHSPGIFFEVLHAPSVPMDSSEVMTIDQEKLGEDLYDWRTPFVKHLETGWLLVDEAEAKRLQLRATKYRMVSGQLYRSGVLQPLLRCISFAEGEEMAKEIHQGLCGAHQAARRVASKVFRQGVYWPTVLKVCVEQIKKCESCQRHGRSHAAPQYDLQPIAPIWPFARWGPDIIGPFPXVEYFSRWIEVEPXLGAITSAAVQKFVWKNIVCRFGVPKEFITDNGKQFDSDKFREMCEGLNLEIRFASVAHPQSNGAAERTNSKILEALKKRLEGAAKGKWPEELLSVLWALRTTPTRPTKFSPFMLLYGDEAMTPAELGANSPRVMFSGGKEGREVSLELLEGVRVEALEHLHKYATSTSATYNKKVRPTELMPGHLVLRKKANPVAVGKLESKWEGPYXIIKHKSRMGSFRL

SEQ ID NO: 138092 - protein, 120 aa, Oryza sativa
  Clone ID: PAT_MRT4530_39512C.1.pep
MSSADSHVSHVAPASGGSGGSTVPGKRSVKHARPICLKRINYGLPRARPSPGPQAHLNPYKSRITQGRGVTGLAKHKGVNQDKYCGLVSGKSGLVEPTTHHVVSTLAKAQLFQTKPGSPG

SEQ ID NO: 138093 - protein, 1048 aa, Oryza sativa
  Clone ID: PAT_MRT4530_39513C.1.pep
MAAQQVPPVGAGQPNAMAQPHAQAAISPFATPYPQQGAVNRAGGEKGLPLSGGIKTRPIQPQFKFPPVPRYSGETKPKEFLSIYESAIEAAHGDENTKAKVIHLALDGIARSWYFNLPANSIYSWEQLRNVFVLNFRGTYEEPKTQQHLLGIRQRPGESIREWLANPVLVRKSNGKWRMCVDFTDLNKACPKDDFPLPRIDQLVDSTAGCELMSFLDAYSGYHQIHMNPLDIPKTSFITPFGTFCHLRMPFGLRNAGTTFARLVYKVFGKQLGRNVEAYIDDIVVKSRKAFDHAIDLQETFDNLRAAGIKLNPKKCVFGVRAGKLLGFHVSERGIEANPEKIDAIQQMKPPSSVHEVQKLAGRIAALSRFLSKAAERGLPFFKTLRGAGKFNWTPECQAAFDELKRYLQSPPALISPPPGSELLLYLAASPVAVSAALVQEIESGQKPVYFVSEALQGAKTRYIEMEKLAYALVMASRKLKHYFQAHKVIVPSQYLLGEILRGKEVTGRLSKWAAELSPFDLHFVARSAIKSQVLADFVAEWTPVLAPDPEPDDQFWVMSSNARLQFDTTNNAAEYEAVLLGLRKAKALGVRRLLIRTDSKLVAGHVDKSFEAKEKGMKRYLEAIQSMEKCFTGITVEHLPRDQNEEVDTLAKSAACGGPYSPGIFFEVLHAPSVPMDSTEVMAIDQEKLGEDPYDWRTPFVKHLETGWLPVDEAEAKRLQLKATKYKMVSGQLYRSGVLQPLLRCISFAEGEQMAKEIHQGLCGAHQAARTVASKVFRQGVYWPTVLKVCVEQIKCENCQRHGRSQAAPQYDLQPIAPVWPFARWGLDIIGPFPVARNGYKFTIVAVEYFSRWIEAEPLGTITLAAVQKFVWKNIVCRFGVPKEFITDNGKQFDSDKFREMCEGLNLQIRPTKFSPFMPLYGDEAMTPTELGANSPRVIFSGGEEGREVSLELLEGVRVEALEHMHKYATSTSAAYNKKVRPRELMPGQLVLRKKANPIEVGKLESKWEGPYLIKRKSRTGSFRLATLEGEEFDHSWNAASLERFYV

SEQ ID NO: 138094 - protein, 1265 aa, Oryza sativa
  Clone ID: PAT_MRT4530_39514C.1.pep
MAAEEGAEHSAPVAEDGGGPSASTSAPSQTPSAPAASVQVPNAADVAKAAAVARALQTRAEILSTSQLVVPQATPSQPAAAPTALAAMQAHVSPDPETQAEADMEAMRQNMTRLQDMLRQMQEQQQAYEAARRTKAQLQAFLQQLNQPHCISSTTPSAHPEGNTSQGAPNWLPPIQPGLGVSLWNQGPQFDFVNAVQAPTVRQQAPTPGFGTNQAPIQAAMTWSQPIFDPSMAAQQVPPVGAGQPNAMAQPRVQAAISPFATPYPQQGAVNRAGGEKGLPLSGGIKTRPIPAQFKFPPVPCYSGETDPKEFLSIYESAIEVAHGDENTKAKEPQTLEHLLRIIDGFARGEEDSKRRQAIQAEYDKASVAAAQAQAQVQVAEQPPLFVRQSQPAIQGQPPRQGQAPITWRKFRTDRAGKAVMAVEEVQALRKEFDAQQVSNHQQPARKKVRKDLYCAFHGRSSHTTEQCRNIRQCGNAQDSRPQQGTTVEAPREAVQEQTPPAEQRQDVQRRAAERGLPFFKTLRGAGKFNWTPECQAAFDELKQYLQSPPALISPPPGSELLLYLAASPVAVSAALVQETKFGQKPVYFVSEALQGAKTRYIEMEKLAYALVMASRKLKHYFQAHKVIVPSQYPLGEILRGKEVTGRLSKWAAELSPFDLHFVARSAIKSQVLADFVAEWTPVLAPDPEPAEQFWVMCSDGSWSHKGPGIAAVLFSPNGVPIRYAARLQFDTTNNAAEYEAVLLGLRKAKALGVRRLLIRTDSKLVAGHVDKSFEAKEKGMKRYLEAVRSMEKCFTGITVEHLPRDQNEEADALTKSAACGGPHSPGIFFEVLHAPSVPMDSSEVMAIDQEKLGEDPCDWRTPFAKHLETSWLPVDEAEAKRLQLRAMKYKMVSGQLYCSGVLQPLFRCISFAEGEEMANEIHQGLCGAHQATRTVASKVFRQGVYWPTVLKVCVKQIKKCESCQHHGRSQAAPQYDLQPIAPIWPFARWGLDIIEPFPVARNGYKFAIVAMEYFSRWIEAEPLGAITSAIVQKFVWKNIVCRFRVPKEFITDNGKQFDSDKSREMCEGLNLEIRFASVAHPQSNGAAERTNGKILEALKKRLEGAAKGKWPEELLSVLWALRTTPTRPTKFSPFMLLYGDEAMTPAELGANSPRVMFSGGEEGREVSLKLLEGVRVEALEHMHKYATSTSATYNKKVRPMELMPGHLVLRKKANPVAVGMLESKWEGPYLIKHKSRTGSFCLTTLKGEEFDHSWNATSLKRFYV

SEQ ID NO: 138095 - protein, 1902 aa, Oryza sativa
  unsure (1)..(1902): unsure at all Xaa locations
  Clone ID: PAT_MRT4530_39515C.1.pep
MSFVISLVGGWHEALRPSLPKPVAKAMDQERREAKSRASALPGQRRLRRRVQGEDYEDDFAMTSSPPRGPKKPFRPIKPRGFRAGDRLTAHQGPMNPYSIMYPCKCPFRKVVVSTTSGADRGDLRAKPLRANATEEGREGEGCQAEGERRRTGHGCRGRSRAFRARGRRWRSTSAITTAFGPCNLSASAECDRHGEGGCGGKGTPDQGGDPFDKSTGGAPSRSIAPHKGQVYFAGQHQPPGQAPQSVAEGALALQAQLQAFLQQLNQPHCISSTTPSARPEGNTSQGTLNWLPPIQPGLGVSPWNQGSQFDFVNAAQAPTVRQQAPTPGFGTNQAPIQAAMTWSQPIFDPAMAAQQVPPVGAGQPNAMAQPHAQAAISPFATPYPQQGAVNRAGGEKGLPLSGGIKTRPIPPQFKFPPVPRYSGETDPKEFLSIYESAIEAAHGDENTKAKVIHLALDGIARSWYFNLPANSIYSWEQLRDVFVLNFRGTYEEPKTQQHLLGIRQRPGESIREYVRRFSQARCQVQDITEASVINAASAGLLEGELTRKIANKEAQTLEHLLRIIDGFARGEEDSKRRQAIQDEYDKASVAAAQAQAQVQVAEPPPLSIRQSQPAIQGQPPRQGQAPMTWRKFRTDRAGKAVMAVEEVQALRKEFDAQQASNHQQPACKKVRKDLYCAFHGRSSHTTEQCRNIRQRGNAQDPRPQQGATIEAPREAVQEQTPPAEQRQDAQRRIIQVITRADPPSQLSKRQKKMQIRMVHSITSAGEGAPQYMNQLISFGPEDAEGVLFPHQDPLVISAEIAGFEVRRILVDGGSSADIIFAEAYAKMGLPTQALTPAPASLRGFGGEPVQVLGQALLLIAFGSGENRREEQILFDVVDIPYNYNAIFGRAILNKFEAISHHNYLKLKMPSPTGVIVFKGLQPSAAPKGDLAIINRAVHSVEPELHERPKHTPKPTPHGKITKMQIDDADPTKLVSLGGDMGEEEVESILQKTKVAQDVCRSPRSGEGRSTKXLLRAGVIQEIDHPEWLANPVLVRKSNVKWRMCVDFTDLNKACPKDDFPLPRIDQLVDSTAGCELMSFLDAYSGYHQIHMKLPDIPKTSFITPFGTFCHLRMPFGLRNAGATFVRLVYKVLGKQLGRNVEAYVDDIVVKSRKAFDHAIDLQETFDSLRAAGIKLNLEKCVFGVRAGNLLGFLVSERGIEANPEKIDAIQQMKPPSSVHEVQKLAGRIAALSRFLSKAAERASPVVVSAALVQETESGQKPVYFVSEALQGAKTRYIEMEKLAYALVMASRKLKHYFQVHKVIVPSQYPLGEILRGKEVTGWLSKWAAELSPFDLHFVARSAIKSQVLADFVAEWTPVLVPDPEPAEQFWVMCSDGSWSHRGAGIAAVLFSPNGVPIRYAARLQFDTTNNVAEYEAVLLGLRKAKALGVRRLLIRTDSKLVAGHVDKSFEAKEEGMKKYLEAVRSMEKCFTGITVEHLPRDQNGEADALAKSAACGGPHSPGIFFEVLHAPNEAEAKRLQLRATKYKMVSGQLYRSGVSQPLLHCISFAKGEEMAKEIHQGLCGAHQAARTVASKVFRQGVYWPTVLKVYVEQIKKCESCQRHGRSQAAPQYDLQPIAPIWPFPRWGLDIIGPFPVARNGYKFAIVAVEYFSRWIEAEPLGAITSAAVQKFVWKNIVCRFGVPKEFITNNGKQFDSDKFREMCEGINLEIRFASVAHPQSNGAAEHTNGKILEALKKRVEGAEGKWPEELLSVLWALRXRPPQDQPSLARLCFFMATRXMTPAELGANSPRVMFSGGQEGREVSLELLEGVRVEALEHMHKYATSTSATYNKKVRPTELMPSHLVLRKRANPVAVGKLESKWKGPYLIKHKSRTGSFRLATLEGEEFDHSWNAASLKRFYA

SEQ ID NO: 138096 - protein, 61 aa, Oryza sativa
  unsure (1)..(61): unsure at all Xaa locations
  Clone ID: PAT_MRT4530_39516C.1.pep
XRSPPRVSFGGFFFPSPQTFVLNNIPLEGPLLDPFQNPGGVLGGKLRRKGPRPFPPLVFKA

SEQ ID NO: 138097 - protein, 1452 aa, Oryza sativa
  unsure (1)..(1452): unsure at all Xaa locations
  Clone ID: PAT_MRT4530_39517C.1.pep
MMWSQPIFDPSMAAQQVPLVGAGQPNAMAQPHAQAAXFATPYPQQGAVNRVGGEKGLPLSGGIKTRPIPPXFKFPPVPRYSGETDSKEFLSIYESAIEAAHGDENTKAKVIHLALDGIARSWYFNLPANSIYSWEQLRDVFVLNFRGTYEEPKTQQHLLGIRQRPGESIREYMRRFSQARCQVQDITEASVINAASAGLLEGELTRKIANKEPQTLEHLLRIIDGFARGEEDSKRRHAIQAEYDKASVAAAQAQAQVQVAEPPPLSVRQSQPAIQGQPPRQSQTPITWRKFRIDRAGKAVMAVEEVQALRKEVDTQQASNYQQPARKKYLNQLISFGPEDAEGVMFPHQDPLVIXAEIAGFEVRRILVDGGSSADVIFAEAYAKMGLPTQALTPAPASLRGFGGEPVQVLGQALLLIAFGSGENRREEQILFDVIDIPYNYNAIFGRATLNKFEAISHHNYLKLKMPGPTGVIIVKEVQFSAASKGDLAIINRAVHSVETELHERPKHTPKPTPHGKITKMQIDDADPTKLVSXGGDMEEEVENILEKTKVAQDVCRSPRSGEGRSTKXLLRAGVIQEIDHPEWLANPVLVQKSNGKWRMCVDFTDLNKACPKDDFPLPRIDQLVDSTAGCELMSFLDAYSGYHQIHMNPLDIPKTSFITPFGTFCHLRMPFGLRNAGATFARLVYKVLSKQLGRNVEAYVDDIVVKSRKAFDHAINLQETFDSLHAAGIKLNPEKCVFGIRXAGKLLGFLAAERGLPFFKTLRGAGKFNWTPECQAAFYELKQYLQSPPALISPPPGSELLLYLAASPVAVIAALVQETESGQKPVYFVSEALQGAKTRYIEMEKLAYALVMASRKLKHYFQAHKVIVPSQYPLGEILRGKEVTGRLSKWAAELSPFDLHFVARSAIKSQVLADXVAEWTLVLAPDPEPAEQFWVMCSDGSWSHRGAGVAAVLFSPNGVPIRYAARLQFDTTNNAAEYEAVLLGLRKAKALGVQRLLIRTDSKLVAGHVDKSFEAKEEGMKRYLEAVRSMEKCFTGITVEHLPRDXNGEADALAKSAACGGPHSPGIFFEVLHAPSVPMDCSEVMAIDQEKLGEDPYDWRTPFVKHLETGWLPVDEAEAKRLQLRATKYKMVSGQLYRSGVLQPLFHCISFAEGKEMAKDIHXGLCGAHXAARTVASKVFRQGVYWPTVLKVCVEQIMKCESCQRHGRSQSAPQYDRQPIAPIWPFARWGLDIMGPFPVARNGYKFAIVAVEYFSRWIEAEPLGAITSAAVQKFVWKNIVCRFRVPKEFITDYGKQFDSDKFRKMCEGLNLEIRFASVAHPQSNGAAERTNGKILKALKKRLEGAAKGKWPEELLSVLWALRXRPPQDQPSLAMTPAELGANSPRVMFSGGEEGREVSLELLKGVRVEALEHMHKYATSTSATYNKKVRPTELMPGHFVLKNKANPVAVGK

SEQ ID NO: 138098 - protein, 1682 aa, Oryza sativa
  Clone ID: PAT_MRT4530_39518C.1.pep
MPPKKVMKEKVARRKESNAAPDMAAEEGAEPSVPVAEDGGGPFASTSAPSQPPSAPATSVQVPNAADVAKAAAVARALQTRAEILSTSQLVVPQAAPSQPAAAPTALAAVQAQVSPDPETQAEADIEAMRQNMARLQDMLRQMQEQQQAYEAARRTKVTSAPILQYSAVAAQVHHQPPGQAPQTMVEGASALQAQLQAFLQQLNQPHCISSTTPSAHPEGNTSQGAPNWLPPIQPGLGVSLWNQGPQFDFVNAAQAPTVQQQAPTPGFGTNQAPIQATMTWSQPIFDPSMAAQQVPPVGAGQPNAMAQPCAQAAISPFATPYPQQGAVNRAGGEKGLPLSGGIKTRPIPPQFKFPPVPRYSGETDPKEFLSIYESAIEAAHGDETTKAKVIHLALDGIGRSWYFNLPANSIYSWEQLRDVFFLNFRGTYEEPKTQQHLLGIRQRQGESIREYMRRFSQARCQVQDITEASVINAASAGLLEGELTRKIANMEPQTLEHLLRIIDGFARGEEDSKRRQAIQAEYDKASVAAVQAQAQVQVAEPPPLFVRQSQPAIQGQPPRQGQAPITWRKFRTGRAGKAVMAVEEVQALRKEFDAQQASNHQQPARKKVRKDLYCAFHGRSSHTTEQCRNIRQRGNAQDPRPQQGTTVEAPREAVQEQTPPAEQRQDVQRRVIQVITRADPPSQLSKRQKKMQIRMVHSITSAGEGAPQYLNQLISFRPEDAEGVMFPHQDPLGENRREEQILFDVVDIPYNYNAIFGRATLNKFEAISHHNYLKLKMPGPTGVIVVKGLQPSAASKGDLAIINRAVNSVETEPHERPKHTPKPTPHGKITKVQIDDADPTKLVSLGGDMGEEEVESILQVLKKNIDIFAWCPDEVGGVPADLIMHHLAFKPDIKPRKQKLRKMSADRQEAAKAEVQKLLRVGVIQEIDHPEWLVNPVLVRKSNGKWRMMPFGLRNAGATFARLVYKVLGKQLGRNVEAYVDDIVVKSRKAFDHAIDLQETFDSLRTAGIRLNLENRFLSKAAERGLPFFKTLRGAGKFNWTPECQVAFDELKQYLQSPPALIRPTPGSKLLLYLAASPVAVSAALVQETEFGQKPVYFVSEALQGAKTRYIEMEKLAYALVMASRKLKHYFQAHKVIVPSQYPLGEILRGKEVTGWLSKWAAELSPFDLHFVACSAIKSQVLADFVAEWTPVLAPDPEPAEQFWVMCSDGSWSHKGAGIAAVLFSPNGVPIRKAKALGVRRLLIRTDSKLVAGHVDKSFEAKEEGMKRYLEAVRSMEKCFTGITVEHLPRDQNKEVDALAKSAACGGPHSPGIFFEVLHAPSVPTDSSEVMAINQEKLGEDPYDWRTPFVKHLETGWLPVDEAEAKRLQLRAMKYKMVSGEEMAKEIHQGLCGAHQATRTVASKVFRQGVYWPIVLKVCVEQINKCKSCQRHGRSQAAPQYDLQPIAPIWPFARWGLDIIGPFLVARNGYKFAIVAVEYFSRWIEAEPLGAITSAAVQKFVWKNIVCRFEVPKEFITDNGKQFDSDKFREMCEGLNLEIRFALVAHPQSNGAAERTNGKILEALKKRLEGAAKGKWPEELLSVLWALRTTPTRPTKFSPFMLLYGDEAMTPAKLGANSPRVMFSGGEEGREVSLELLEGVRVEALEHIHKYATSTSATYNKKVRPTELMPGHLVLRKKVNQ

SEQ ID NO: 138099 - protein, 84 aa, Oryza sativa
  Clone ID: PAT_MRT4530_39519C.1.pep
QAFRNRGVANNFYFLGPRRRIAQPQARPPLALPLAVLFFLACFSGVQAVAVQGFDRFKNNPLGKLKVFVYDLPPKYNKNIVAKD

SEQ ID NO: 138100 - protein, 84 aa, Oryza sativa
  unsure (1)..(84): unsure at all Xaa locations
  Clone ID: PAT_MRT4530_3951C.1.pep
RRNPVPQLGYPGGLWFPWGNWARGSPEPLLVFXPKVFSRGGXPILPFVGFWFQPVFPGEGPIDNPLHPPADPGPCNVFWAFRSP

SEQ ID NO: 138101 - protein, 145 aa, Oryza sativa
  Clone ID: PAT_MRT4530_39520C.1.pep
MASGGGGACGGGGEGHPSLWKEPKKIKKTLANPPCAGRTLPLPLPTARSHGRRSTLSALVVVVARCRPSLPPADASARPSSRLPGLPRSRVADRSAPTCHRNHRASLPLLPLSPTQPLLAGHPSPARHQKPPPLAIAGAEPAASC

SEQ ID NO: 138102 - protein, 79 aa, Oryza sativa
  unsure (1)..(79): unsure at all Xaa locations
  Clone ID: PAT_MRT4530_39521C.1.pep
RPGKAPRLSAPFPHPRRRRTPPXPWRRAVPLPAPSSPPSVAAPPRRRRASARLRSPPPHAAASPPPPSRHLPPRGRCRR

SEQ ID NO: 138103 - protein, 114 aa, Oryza sativa
  Clone ID: PAT_MRT4530_39522C.1.pep
KELHPNRVGTALFKPNYLLAILTSAAEVGTLGELTARPHARRRVPGQPHRHRRRRPHHRRHRPRGGKWREGGGGDAAAWGGGERSRADARRRRGGAATDGGEEGAGSGTARRHG

SEQ ID NO: 138104 - protein, 130 aa, Oryza sativa
  Clone ID: PAT_MRT4530_39523C.1.pep
MWKSNSKTVGLRSTRNKRESSNFPGTHLLEKRKQVSMKYSWLMLLEHEDSYRYIPQLGDEVMYLRQGHEEYLKGSRQLDDCPWNRIKGLKDVELCKIQGLDYTTFRGSGESCCKLTIEFIDDTSRGFGRT

SEQ ID NO: 138105 - protein, 115 aa, Oryza sativa
  Clone ID: PAT_MRT4530_39524C.1.pep
MGGGGPICPRFLSRGANAKLGPFLGPPPALGWVLAGFPWGGTGSFFRGAKLLALGFPALGALVWGWGPRVNQVSVRALNPVCFPPKKKKKKKKKKKKKKKKKKKKKKKKKKKKKK

SEQ ID NO: 138106 - protein, 308 aa, Oryza sativa
  Clone ID: PAT_MRT4530_39525C.1.pep
MAIISDFQEEEAPPRQQQQPASVAAAAGSGDEVLAAELERRGGAIPFLQAAIDVARRRSDLFRDPSAVSRVTSMASAARAVVEAEERKAREAKRKAEEAERKAAEAERKAKAPAEPKPESSAGKDSMEVDKKEEGNVRKPNAGNGLDLEKYSWIQQLPEVTITVPVPQGTKSRFVVCDIKKNHLKVGLKGQPPIIDGELFKPVKVDDCFWSIEDGKSLSILLTKQNQMEWWKSVVKGDPEVDTQKVEPENSKLADLDPETRQTVEKMMFDQRQKQMGLPTSDEMQKQDMLKKFMAQHPEMDFSNAKIA

SEQ ID NO: 138107 - protein, 123 aa, Oryza sativa
  Clone ID: PAT_MRT4530_39526C.1.pep
KIGLVNFIQVHIIVSAPLHACMSLQYAGRKLIQTPTLIIMAHAVLCHHHLISHRTFQFHPSHRISSPATIFFSKFAWQSCRRTWSGLQAGASASPSRRPPFWVLGVNIGEHMYGLDDSRPLGR

SEQ ID NO: 138108 - protein, 282 aa, Oryza sativa
  Clone ID: PAT_MRT4530_39527C.1.pep
HRRRAGVSGQDARPHNPRLAPPPTPPTAARVRPPPPVAALKRLLRYNPPSPSLPPTSAPHHHHRLRLRLRLLLTTVAMASSSPTNAAAAARRVPPPCWTPDETLALARAYTARRLAVGRAHLTSADWAAVADAATPTKTARQCRHKVEKLRRRLRSKRRRPCPLLDAIDLLDGPSPSASPSQSPSPPPPASPPPLPPAPSSPPPKKRRLPDGDADADAEDDGESDVVKALRAIGEGFLRAEQRRMEAARKTQQMRMEMALRHLDSQRRLMEALVDRIIDSLE

SEQ ID NO: 138109 - protein, 282 aa, Oryza sativa
  unsure (1)..(282): unsure at all Xaa locations
  Clone ID: PAT_MRT4530_39528C.1.pep
NLRVQNTALLLKHLVKFYKAADLPWVKLISESYYTSKVPHLIMNKGSYKEDSVKDMCSRQLEDSFLLPLSPEAYAEFLQLEENLDSLKIQSGRGDIWSFIWNSDVYTPKRFYKPNFTALQPPRPLLWLWKTKCVMKIKVFAWLLFCDRLNTCDMLDRRHCAKEDDDLTCVLCDTGQRETRLHLFFTXPFSATCWQHLGIQXTEIWNFFQMVVLARFRFVHRGFLEIFFLAAWHIWKQRNGLIFEYTQPTFQSWRLLFKKVLLHMCKMKDPLKQLVSDWIQTI

SEQ ID NO: 138110 - protein, 111 aa, Oryza sativa
  unsure (1)..(111): unsure at all Xaa locations
  Clone ID: PAT_MRT4530_39529C.1.pep
GANQRERAPRGGPPPPPPVKGPQKGGPPCPSGGAPVWEGEPGGPPCXIKPPGKRGRGPKPKNWGTPGVSPAPPGKNPAQGMKIGAPNKKPSPGQGPHQNMDPPKGPPPIFF

SEQ ID NO: 138111 - protein, 36 aa, Oryza sativa
  Clone ID: PAT_MRT4530_3952C.1.pep
MACRLASSESAVTSFAADRRVNYYAGVSPPPDASHP

SEQ ID NO: 138112 - protein, 91 aa, Oryza sativa
  Clone ID: PAT_MRT4530_39530C.1.pep
MSTLNLSSSPLTKQQLRFGANTLIAEHRAGNRVVAQAGNYKLTAVALGIAFFGGGGVSGGSSSGSTSRRPPSDRRWRPQSPPASRPHRRPH

SEQ ID NO: 138113 - protein, 305 aa, Oryza sativa
  Clone ID: PAT_MRT4530_39531C.1.pep
MEKVDAKEREKIEAVRKTLRKQAPLTAKQAMYCNDACVERFLRARGESVKKAAKHLRTVLSWRDTIGADHIIADEFSAELADGVAYVAGHDDEARPVVGGLFLQVFRIKQDYPKFHSQKSFVRLLVFTLEVAVSCMSRFVDQFVLLFDASFFRSASAFLNLLMGTLKIVADYYPGRLHRAFVIDPPSLFSVLWKGGQKAPAPAQQFPRTPRPSFLQSPSMLFAFKKDGQASRGERERESFLPFLRFYRRPYDEISYRAKMRPPLGGLIAIVDEKSKQHKTVQPPLRRHAGLHHQQLFQLHHHQRI

SEQ ID NO: 138114 - protein, 454 aa, Oryza sativa
  Clone ID: PAT_MRT4530_39532C.1.pep
MALGDLGTVLLPLGVSCPLLWKNSPPTQANLEVFGTVAPLVVGFLMELLSAILGDFVSRSITFMIDRYPKQRPSVDENLQRLHHLLVRIRTVVEEAEQRHVTNHGMIRQLELLREQMFRGHCVLDAFRFRDEEEDEVTPRFALSKFNRAKRIRFSDSSSNTQIQTRSTNDLHQTVTSLERIIGDTKEFVVFLMSYPPVYRQPYSTHLYLDGCMFNRQMERENAISFLLQREPLAVAEEIVQVLPVVGPEFVGKSTLVEHICRDQRVREHFSLILYYSGDDLRYEKAETFSEICQTKHRNESNDAMDGRLLLIIELLGDVDERTLKKIHSSFRKQMTHEIKIMITSRSEKIIRLGAKQALRLNFLPFEAYWYFFKVLAFGATDPEQHPKLASMAMEIATDHPKFGWVIVRPKPENYFVLRDSYQKALVEDDGPKIKLDGLDPKCPGDILDPSTIR

SEQ ID NO: 138115 - protein, 438 aa, Oryza sativa
  Clone ID: PAT_MRT4530_39533C.1.pep
MAMEKVDAKEREKIEAVRKTLRKQAPLTAKQAMYCNDACVERFLRARGESVKKAAKHLRTVLSWRDTIGADHIIADEFSAELADGVAYVAGHDDEARPVVVFRIKQDYPKFHSQKSFVRLLVFTLEVAVSCMSRFVDQFVLLFDASFFRSASAFLNLLMGTLKIVADYYPGRLHRAFVIDPPSLFSVLWKGVRPFVELAPATAVVCSLDFEDSLEDASFTAYPRTASLRFEPAAALLATGTKGIGVGSASSRFSVTVSHDNTLKPWYLSTTTPSSVGPRSVVPTSSPSLIGASPLSARSFSFASPAARSTTTPPVHRGAPLTPFSTKGGQKAPAPAQQFPRTPRPSFLQSPSMLFAFKKDGQASRGERERESFLPFLRFYRRPYDEISYRAKMRPPLGGLIAIVDEKSKQHKTVQPPLRRHAGLHHQQLFQLHHHQRI

SEQ ID NO: 138116 - protein, 69 aa, Oryza sativa
  Clone ID: PAT_MRT4530_39534C.1.pep
RTPAANQTPGGRTYLPTPAAPTNTHQRGQPMFTPTLYYPVLQLGEPHQQIRGGGHAGRPAGPAPDRAGR

SEQ ID NO: 138117 - protein, 97 aa, Oryza sativa
  Clone ID: PAT_MRT4530_39535C.1.pep
WFFNFLGFFFFFFFFFFFFGGTNVQTPTTHITKRKEGSIQAIHGLRPKIHGTSPHKPRYFSTPNKRDIRDTPTPKNWGRTLGLLNKKKLMVFFFCQE

SEQ ID NO: 138118 - protein, 935 aa, Oryza sativa
  Clone ID: PAT_MRT4530_39536C.1.pep
MSSRGGGGGGRRGGRGGGGGREGGGGGGGGGGRGGQGRGDLGVVGERQGGGRGAGERGGRHDAPRGRGGVAVGAGAGRQQQQPFHAPAPPSGGGGRGGVQVQPNAAARRPVGGGRGGVGVPAPAPAVAVGALCGEMKGKMVVSGGAPPAGQGSSLAAAQGTDNVKREPSQVAAPAPAPPPATLPPSSSKAVTFPARPDVGTIGRRCRVRANHFLVQVADKDIYHYDVVITPESTYRERNRSIINKLVALHKQFLDGRLPVYDGRKSIYTAGPLPFKTKDFVVKHINPLRGNQREEEYKVTIKQASKTDLYSLKQFLVGRQRELPQDTIQALDIALRECPTSVCIYLKLKKALKGVQIVATHWKEKSIRYKITGIPSAPMNELMFDLDGNRISVVQYFKKQYNYSLKHVNWPCLQAGSDSRPKYLPMEVCSILEGQRYSKKLNEHQVTNILRMTCERPAQRESSIIEIKTFYLYSQIVNTNSYGNDDCAKEFGIKVANQLAVVDARVLPTPRLKYHDSGREKVCNPSVGQWNMINKQMNTRPCVDIIQGQQRNIEGAIRNIHRQSSEKLDQQDLTGQQLQLLIVILTEISGSYGRIKRICETEVGVITQCCAPKSLQKGGKQYLENLALKMNVKVGGRNTVLEDALHKKIPILTDRPTIVFGADVTHPSPGEDASPSIAAVVASMDWPEVTKYKCLVSTQSHREEIISNLYTEVKDPLKGIIRGGMIRELLRSFYQETGQKPSRIIFYRDGISEGQFSQVLLYEMDAIRKACASLQEGYLPPVTFVVVQKRHHTRLFPENRRDMMDRSGNILPGTVVDTMICHPSEFDFYLCSHSGIKGTSRPTHYHVLLDENGFKADTLQTLTYNLSYTYARCTRAVSIVPPAYYAHLGAFRARYYMEDEHSDQGSSSSVTTRTDRSTKPLPEIKENVKRFMFYC

SEQ ID NO: 138119 - protein, 40 aa, Oryza sativa
  Clone ID: PAT_MRT4530_39537C.1.pep
PLKRGGDHVICDYWTLVKNPVKFVCTPPNFSKFWGGLVPF

SEQ ID NO: 138120 - protein, 143 aa, Oryza sativa
  unsure (1)..(143): unsure at all Xaa locations
  Clone ID: PAT_MRT4530_39538C.1.pep
KRERESVEQYAAVASSAALLPIPGMMKVAAPVSRLVESGMTSTSGRSAAGXGDALVSELCAQSAEIDAVVRMECERMRAGLEQARKRQCQAVVRAASAAAARRLREKEAELDAARRRAAELEERLRQVAXESQAWCGSPQRGR

SEQ ID NO: 138121 - protein, 116 aa, Oryza sativa
  unsure (1)..(116): unsure at all Xaa locations
  Clone ID: PAT_MRT4530_39539C.1.pep
SIDLPPPSNSKKSTDANENETPSLPWVCXEEFEEFAEKAKTLPDTISNEDKLLLYGLYKQATVGPVTTGRPGIFNLKDRYKWDAWKAVEGKSKEEAMADYITKVKQLLEEASASTS

SEQ ID NO: 138122 - protein, 59 aa, Oryza sativa
  Clone ID: PAT_MRT4530_3953C.1.pep
QNSSFYLYLRLSQALTDKGKGVLAAPTVRNGAHTEYMMNYECDDLFPLSNTYVVKLRSD

SEQ ID NO: 138123 - protein, 55 aa, Oryza sativa
  Clone ID: PAT_MRT4530_39540C.1.pep
LHLRRREVAEKPTYHVAQSINGDPLIVSLKTSRTSSPLVAWDLSNLPAYRTAVRP

SEQ ID NO: 138124 - protein, 109 aa, Oryza sativa
  Clone ID: PAT_MRT4530_39541C.1.pep
HIHLEHKESSGHQHDIQSGRHQERTHQEPSPRSATLKGEERCRGKPHGARRRGGGPRLLYGHLPIQAVGATPFGGAGYGLGDDGPRAVGPTKDPLPLYGTVVQKAPLTG

SEQ ID NO: 138125 - protein, 1243 aa, Oryza sativa
  unsure (1)..(1243): unsure at all Xaa locations
  Clone ID: PAT_MRT4530_39542C.1.pep
MCAQRRVIQVITRADPPSQLSKRQKKMQIRTVHSITSAGEGAPQYLNQLISFGPEDAVGFMFPHQDPLVISAEIAGFEVPRILDDGGSSADVIFAEAYTKMGLLTQALTPAPASLRGFGGEAVQVLGQALLLVAFGSGENRHEEQVLFDVVDIPYNYNAIFGRATLNKFDAISHHNYLKLKMPGPTGVILVKGLRXSAASKGDLAIINRAVHSVEAEPHDWPKHTPKPTPYGKIIKVQIDDADPAKLVSLGGDMGEEEAESILEVLKRNIDIFAWSPDEVGGVSTYLIMHHLAVKPNTKPKKQKLRKMSADRQEAAKVEVQKLLRAGVIQEIDHLEWLANLVLVRKSNGNXRMFVDFTDLNKACPKDDFPLPWIDQLVDSIAGCELMSFLDEYSGYHQIHMNPLDIPKTSFITPFGTFCHLRMPSGLRNAGATFARLVYKVLCKQLGRNVEAYVDDIVVKSRKAFDHXAAGIKLNPDKCVFGVHAGNLLGFLVSERGIEANPEKIDAIQQMNHPSSIHEVQKLAGRIAALSQFLSKAAERGLPFFKTLRGTGKFNWTPDCQAAFDELKXYLQSPPALISPTPGSELLLYLEASPVEVSATLVQETEFGQKPVYFVSEALQGARTRYIEMEKLTYALVMASRKLKHYFQAHKVIVPSXYPLGEILRGKEVTGRLSKWAAELSLLDLHFVARTAIKSQVLADFVAEWTPFNTTNNAAEYEDILLGLRKAKALGFRRLLIRTDSKLVEGHVDKSFEAKEKGMKRYLEAVRSMEKCFTGITVEHLPRGQNEEADALAKSAACGGPHSPGIFFEVLHAPSVPTDSLEIMAIDQVKLGEDPYDWRTPFVKHLETGXLPEDEAEAKRLQLRATKYKMVSGQLYRSGVLQPLLRCISFAEGKEMAKEIHQRLCGAHQAARTVASKVFRHGVYWPTVLKVCVEQIKKCESCQRHGRSQTAPQYDLQPNAPVWPFARWGLDIIGPFPVARNGYKFAIVAVEYFSRWIEAEPLGAITSAAVQKFVWKNIVCCFGVPKEFITDNGKQFNSDKFREMCVGLNLEIRFASVVHPQSNGAAERTNGKILEALKKRLEGAAKGKWPEEMLSVLWALRTTPTRPTKFSPFMLLYGDEAMTPAELGANSPRVMFSGGEEGREVSLELLEGVRVEALEHMRKYATSTSATYNKKVRPTELMPGHFVLRKKANPIAVGKLESKWEGPYLIKHKSRTGSFRLATLEGDEFDHSWNTASLKRFYV

SEQ ID NO: 138126 - protein, 272 aa, Oryza sativa
  Clone ID: PAT_MRT4530_39543C.1.pep
MASSRLLLLAALLATAAVLAASQKPKAATPTKATPASPGPAAAAADGPAPTNVTAVLEKSGKYTTFLRLLHESRVDTQINSQLMDSYNGLTMFAPTDAAFAALKPGTLNSLSSQDQIQLMLYCVLPRFYSLAMLTTLGGPVNTQASGADGPYKYKIKPSNNNVNISTGVNWALLSTVVSKDFPLAVYSVDKVPLPYELFGPKPPTPAPAPAPAPSKSKTKKHKKSAGIAEPPVADDASADDTTKKAAAPATAVSRWVVAAAGVLAGAILAAL

SEQ ID NO: 138127 - protein, 214 aa, Oryza sativa
  Clone ID: PAT_MRT4530_39544C.1.pep
MAAQQVPPVGAGQPNAMAQPRAQAAISPFATPYLQQGAVNRAGGEKGLPLSGGIKTRPIPPQFKFPPVPRYSGKTDPKEFLSIYESAIEAAHGTYEEPKTQQHLLGIRQRQGESIREYMRRFLQARCQVQDITEASVINAASAGLLEGELTRKIANKEPQMLEHLLRIIDGFARGEEDSKRRQAIQAEYDKASVAAAEAQAHVQVAEPPPLFVR

SEQ ID NO: 138128 - protein, 139 aa, Oryza sativa
  unsure (1)..(139): unsure at all Xaa locations
  Clone ID: PAT_MRT4530_39545C.1.pep
RERALDMILGIYCIENRNDYERLWKNYGMILKLGCMEYKENHRTMAALLRLYSSQRSEELIILHEYVENMKPEKXDIYYIAVDIMSTAKHAPFLDKLIEKKYQVIFLVDPKNEVSVTNMNSYKDKRSVDTSKEDLDLCD

SEQ ID NO: 138129 - protein, 1415 aa, Oryza sativa
  Clone ID: PAT_MRT4530_39546C.1.pep
MAAQQVPPVGVGQPNAMAQPHVQAAISPFATPYPQQGAVNRAGGEKGLPLSGGIKTRPIPPQFKFPPVPRYSGETDPKEFLSIYESAIEAAHGDENTKAKVIHLALDGIARSWYFNLPDNSIYSWEQLRDVFVLNFRGTYEEPKTQQHLLGIRQRPGESIREYMRRFSQARCQVQDITEASVINAASAGLLEGELTRKIANKEPLTLEHLLCIIDGFARGEEDSKRRQAIQAEYDKASITAAQAQAQVQVAEPPPLSVRQSQPAIQGQPPRQSQAPITWRKFRTDRAGKAVMAVEEVQALRKEFDAQQASNHQQPAHKKKKMQTRMVHSITSAGEGAPQYLNQLISFGPEDAEGVIFPHQDPLVISAEIAGFEVRRILVDGGSSADVIFAEAYAKMGLPTQALTPAPVSLRGFGGEAVQVLGQTLLLIAFGSGENRREEQILFDVVDIPYNYNAIFGRATLNKFEAISHHNYLKLKMPGPTAVIVVKGLQPSATSKGDLAIIHRAVHSVETEPHERLKHMPKPTPHSKMTTVQIDDVDPTKLVSLGGDMGEGELESILEVLKKNIDIFAWSPDEVGGVPANLIMHHLAVKPDIKPRKQKLRKMSADRQEAAKAEVQKLLRAGVIQEINHPEWLANPVLVRKSNGKWRMCVDFTDLNKACPKDDFPLPRIDQLVDSTARCELMSFLDAYSGYHQIHMNPLDIPKTSFITPFGTFCHLRMPFGLRNAGATFATLVYKVLGKQLGRNVEAYIDDIVVKSRKAFDHAIDLQETFDSLRAAGIKLNPENAAERGLPFFKTLRGAGKFNWTPECQAAFDELKQYLQSSPALISPPPGSELLLYLAASPVAVSAALVQETEFGQKPVYFISEVLQGAKTRYIEMEKLAYALVMVSHKLKHYFQAHKVIVPSQYPLGEILRGKEVTGRLSKWAAELSPFDLHFIARFAIKSQVLADFVAEWTPALATDREPTEQRAGIAAALFSPNGVPIRYAARLQFDTTNNATEYEAVLLGLRKAKALGVQRLLIRTDSKLVAGHVDKSFEAKEERMKRYLEAVRSMEKCFTGITVEHLPRDEAEAKRLQLRATKYKMVSGQLYRSGVLQPLLRCISFAEGEEMAKEIHQGLCGAHQAARTVASKPIAPIWPFPRWGLDIIGPFPVARNGYKFAIVSVEYFSGWIEAEPLGAITSAAVQKFVWKNIVCQFGIPKEFITDNGKQFDSARFKEMCEGLNLEIRFASVAHPQSNGAAERANGKILEALKKRLEEATKGKWPDEMLSVLWALRTTPTRPTKISPFMLLYGDKAMTLAELGANSPRVVFSGGEDGRDVSLELLEEVRVEALEHMNKYAVGTSATYNKKVRPTELLPSHLVLRKKANPVAIGKLESKWEGTYLIKHRSRTGSFRLATLEGEEFDHSWNANSLTRFYV

SEQ ID NO: 138130 - protein, 1244 aa, Oryza sativa
  Clone ID: PAT_MRT4530_39547C.1.pep
MAAEEGAEPSAFVAEDGEAQAPSQPPSAPAPPQPSSAPATSVQVPNTADVAKAAAAGRTLQTKVEILSTNQLVVPQAAPSQPAAPIALTVVQAQISLDPEAQAEADMEAMRQNMTWLQDMLRQMQEQQQAYEATRRTKATSAPILQYSPHSRRCTSPGSINHLAKRHNQWRKGLRLCRRNSKLSFSNSTNPTTFQAQPHRLTRWGIQVKVCPIGCHQFSQARDLRRGVKDRSSTSSTLLRAGGEKGLPLSGGVKTRPIPPQFKFPPVPRYSGETDPKEFLSIYKSAIKAAHGDEITKAKVIHLALDGIARSWYFNLPANSIYSWEQLRDVFVLNFRGTYEEPKTQQHLLGIRQRPGESIREYMRRFSQAQCQVQDITEASVINAASASLLEGELIRKIANKEPQTLEHLLRIIDGFVRGEEDSKRRQAIQAEYDKASVAAAQAQAQPAIQGQPPRQGQAPMTWRKFRTDRAGKAVMAVEEVQALRKEFDAQQASNHQQPARKKVRKDLYCTFHGRSSHTTEQCRNIRQRGNAQDPRPQQGTTVEAPREAVQEQTPSAEQRQDTQRRVIQVITRADPPSQLSKRQRKMQIRMVHSITSAGEGAPQYVNQLISFGPEDAEGVLFPHQDPLVISAEIAGFEVRRILVDGGSSADVIFAEAYAKMGLPTQALTPAPTSLRGFIVEAVQVLGQAFLLIAFGSGENRRVEQILFDVVNIPYNYNAIFGRATLNKFEAISHHNYLKLKMPGPTGVIVVKGLQPSAASKRDLAIINRAVHNVETEPHERPKHTPKPTPHGKVTKVQIDDADPTKLVSLGGDMGEEEVESILKVLKKNIDIFAWSPDEVGESSAGTKALGVQRLLIRTDSKLVAGHVDKSFEVKKEGMKRYLEAVRSMEKCFTGITVEHLPRDQNGEADALAKSAACGGPHSPGIFFEVLHAPSVPMDCSEVMAIDREKRGEDPHDWRTPFVKHLETGWLPLWNISIDGLKPNPLGQSLRQQYRNLYGKTLFATSAAVQKFVWKNIVCRFGVPKEFITDNSKQFDSDKFREMCEGLSLEIKFVSVIHPQSNGAAERTNGKILEALKKRLEGAAKGKWPEELLSVLWALRTTPTRPTKFSPFMLLYGDEAMTPAELGANSPRVMFSGGEEGREVSLELLEGVRVKALEHMHKYATSTSATYNKKVRPTELIPGHLVLRKKANPVAVGKLESKWEGPYLIKRKSRTGSFRLATLEGEEFDHSWNAASLKRFYANA

SEQ ID NO: 138131 - protein, 943 aa, Oryza sativa
  unsure (1)..(943): unsure at all Xaa locations
  Clone ID: PAT_MRT4530_39548C.1.pep
MVAGDERRRRGGSVDGGDGSPATGDSGERAAEVPHLRAHLTAARGSGGDGEIEGAARLEITGGDGETRRRRRRFLGRDTIQAAMMWSQPIFDPSIAAQQVPPVGAGQSNAVAQLHAQAAISPFATPYPQQGAVNRAGGEKGLPLSGGIKTRPIPPQLKFPPVPRYSGETDPKEFLSIYESTIEATHGDENTKAKVIHLALDGIARSWYFNLPANSIYSWEQLRDVFVLNFRGTYEEPKTQQHLLGIRQRPGESIREYMRRFSQAWCQVQDITEASVINATSAGLLEGELTRKIANKEPQTLEHXLRIIDGFARGEEDSKRRQAIQVXSQPAIQGQPPRQSQAPMTWRKFRTDRAGKAVMAVEEVQALRKEFDAQQASNHQQPAXQKVRKDLYCAFHGRSSHTTEQCRNIRQRGNAQDPRPQQGTTVETPREAVQEQIPPAEQRQYTQQRIIQVITRADPPSQLSKRQRKMQIRTVHIITSAGEGAPQYVNQLIPFGPEDAEGVLFPHQDPLVISAEIAGFEVRRILVDGGSSADVIFAEAYAKMGLPTQALAPAPTSLRGFGGEAVQVLGQALLLIAFGSGENRREEQIPFDVVDIPYNYNAIFGRATLNKFEAISHHNYLKLKMPGPTGVIVVKGLQPSAASKRDLAIINRAVHNVEAEPHERPKHTPKPTPHGKITIVQIDDADPTKLVSLGGDMGEEEVESILEVLKKNIDIFAWSPDEVGGVPADLIMHHLAVKPNIKPRKQKLRKMSVDRQEAAKTEVQKLLRAGVIQEIDHPEWLANPVLVRKSNGKWRIYHQIHMNPLDIPKTSFITPFGTFCHLRMPFGLRNAGATFARLVYKVLGKQLGRNVEAYVDDIVVKSRKAFDHVFDLQETFDSLRAAGIKLNPEKCVFGVRAGKLLGFLVSERGIEANPEKIDAIQQMKPPSSVHEVQKLTGRIAALS

SEQ ID NO: 138132 - protein, 302 aa, Oryza sativa
  unsure (1)..(302): unsure at all Xaa locations
  Clone ID: PAT_MRT4530_39549C.1.pep
MELMGEYCSNAPCKWLLDLGKGGAHDTNAHNLFDGMPSQSEMSKEDQRTSKPVPINSTMNKEEKWLDKSLDRILEKFEQMEAKRMQEXIRATTAVLKATSPTAPMAPPTPVPTKCLTECPNNSFTWATASSSHIXGDNKDKGHAPXIVTKDSPEVTPTMCSTKCSGPTIEPDLTVAVVVTSATTAAASMELVAAGNAIGATDINNLDHPKVTHAKCSMFGSGVKRGTEQVVLAFPLMASPMEFMTSLXNPWPPAWSGWKKXYMTWTTINHHGMRFYFVPPWPPPSLKMHQFWALIFQWRNGI

SEQ ID NO: 138133 - protein, 53 aa, Oryza sativa
  Clone ID: PAT_MRT4530_3954C.1.pep
MVGMAGVDWEWLHSMAHALALDTWMWPREDVPGLGCKRAWPVGGGMTYESYQM

SEQ ID NO: 138134 - protein, 116 aa, Oryza sativa
  Clone ID: PAT_MRT4530_39550C.1.pep
LHPDLHKISSTQPPMLYIVLVLRFQMSFQIDPAHEVPGHTLVPCQNIPVKIDDQSACQFKHQRASTILLIGKQCKDIPRALADSCMRASMCMITRAELFCSEGAFAQVELPLAKAL

SEQ ID NO: 138135 - protein, 1047 aa, Oryza sativa
  unsure (1)..(1047): unsure at all Xaa locations
  Clone ID: PAT_MRT4530_39551C.1.pep
MGLPTQALTPAPASLRGFGGEAVRVLGQALLLIAFGSGENRREEQILFDVVDIPYNYNAIFGRATLNKFEAISHHNYLKLKMPGPAGVIVVKGLQSSAASKSDLAIINRAVHCVQTEPHERPKNTPKLTPHGKITKVQIDDADPTKLVSLGDDMGEEEVESMLEVLKKNINIFAWSPDEPDIKPRKHKLCKMSADRQEAAKAEVQKLLRAGVIQEIDHPEWLANPVLVRKSNGKWRMCVDFTDLNKACPKDDFPLPRIDQLVDSTAGCELMSFLDAYSGYHQIHMNPLDIPKTSFITPFGTFCHLKMPFGLRNAGTTFARLVYKVLGKQLGRNVEAYVDDIVVKSRKAFDHAIDLQETFDSLRAAGIKLNPEKCVFGVRAGKLLGFLVSERGIEANLEKIDAIQQMKPPLSVHEVQKLVGRIAALSRFLSKAAERALQGAKTRYIEMEKLAYALVMASRNLKHYFQANKVIVPSQYPLGEILRGREVTGRLSKWAAELSPFDLHFVARSAIKSQVLADFVAEWTPVLAADPEPAEQFWVMCSDGSWSHSGAGIAAVLFSPNGVPIRYAARLQFDTTNNAAEYEAVLLGLRKAKALGVRRLLIRTDSKLVAGHVDNSFEAKEEGMKKYLEAVRSMEKYFTGITVEHLPRGQNEEADALAKSAACGGPHSPGIFFEVLHAPSVPMDSSEVMVIDQEKLGEDPYDWRTPFVKHLQTGWLPVDEAEAKRLQLRATKYKMVSGQLYRSGVLQPLLRCISFAEGEEMAKEVHQGLCGSHQAARTVVSKVFRQGVYWPTVLKVCVEQIKKCESCQRHGRSRTAPQYDLQPIAPIWPFARWGLDIIGPFPVARNGXPLGAITSAAVQKFVWKNIXFCRFGVPKEFITDNGKQFDSDKFREMCEGLNLEIRFASVAHPQSNGAAERANGKILEALKKRLEEAAKGKWPEELLSVLWALRTTPTRPTKFSPFMLLYGDEAMTPAELGANLPRVMFSGGEEGREVSLELLEGVRVEALEHMHKYVTSTSATYNKKSLTHGADAWSSCPKKEDEPSSGW

SEQ ID NO: 138136 - protein, 842 aa, Oryza sativa
  Clone ID: PAT_MRT4530_39552C.1.pep
MRPKQTEGSSIQAVASATPGGIERSFGLGGAEAPGGSGDLGGRMELIGEYCSNAPCKWLLDLGKGGAHDTNAHNLFDGMPSQSEIPKEDQRTSKPVPINSTMNKEEKWLDKALDRILEKFEQMEAKRMQEEKINQIFQKLEDIEVLRSKASEEIIEAIRATTAVLKAKSPIAPIAPPTPAPTKCLTECPNNNFTWATTSSSHIGEDTAPTATWELGDNKDKGHAPCIVAKDSPEVTPTMCSTKYSGPTIKPDLTMAVVVTSATTAMASMELVAAGNAIGATDINNLDHPKVTHAKCSMSSSGVKRGTEQVVLAFPLMASPMEFMTSLVEPSPPTGLKLGDAICVGDQVPMKCSMKCTESDNKPLMEHPKRNPWPPAWSGWKKWYMTWTTINHQRMRLYFVPPWPPPSLVSSLAWVHFCIGALIFQRVVLSNEMVELEPWPPPHEASFRILPFQTSSRKCCNYVTALSIIAWDEKRTRSSRIIDTSFEEGTQECWNPYLALPILSYFRTRLQWMPPWLPLVGLLEARVGKGCTTDFAASIIPWNEQKKMITIETSTCFEQKMHQIRALIFHVSLTSLASKESNLVICDPESLSIWLSYVDLWGMLLNYYPTIVEKWNMRIICMVISESESCLESNYIGLNVERDLLYMIAEEKGCKRMKGMEVDTNSIHDEKYTFGLVPTVVLIKRGCHCLQHIKLLGINVGKQFVIVPLSCITQEYFTWSKKLFKLKLLALFFFNDGLLSNTKYLEQPWDPGGVFHRLGDKPNFKKRGLSGSRVGRTRAGQPIAMRPKQTEGSSIQAAPSATPGGIERSFELGGAEAPGGGGDLGSRWAPSSISLPYLSSDL

SEQ ID NO: 138137 - protein, 606 aa, Oryza sativa
  Clone ID: PAT_MRT4530_39553C.1.pep
MAAEEGAEPSAPVAEDGGGQAPSQPPSAPATFVQEPNAADVAKAAAAARALQTRAEILSTGQLVVPQAAPSQPAAAPTALAVVQAQNMTWLQDMLRQMQEQQQAYEAARRAKATSAPILQYSAGYVPPQVHPQVTTQPFPPQATQAPVYFAGQQSAAAVHPAPHVQQQAQPVAAQVHHQPPGQAPQTVAEGASALQAQLQAFLQQLNQPHCISSTIPSAHPEGNTSQGAPNWLPPIQPGLGVSPWNQGPQLDFVNAAQAPTVRQQAPTPGFGTNQAPIQAAMTWSQPIFDPSMAAQQVPPVGAGQSNATAQPHAQAAILPFATPYPQQGAVNRAGGEKGLPLSGGIKTRPIPPQFKFPPVLRYSGEVDPKEFLSIYESAIKAAHGDENTKAKVIHLALDGIARSWYFNLPANSIYSWEQLRDVFVLNFRGTYEEPKTQQHLLGIRQRPGESIREYMHRFSQARCQVQDITEASVINAASAGLLEGELTRKIANKEPQTLEHLLRIIDGFARGEEDSKRRQAIQAEYDKASVAAAQAQAKVQVTEPPPLSVRQPQPAIQGQPPRQGQAPMTWRKFRIDRAGKAVIAVEEVQALRKEFVLFFRDDLFF

SEQ ID NO: 138138 - protein, 227 aa, Oryza sativa
  unsure (1)..(227): unsure at all Xaa locations
  Clone ID: PAT_MRT4530_39554C.1.pep
MAMGNIDVTKARVGEELTMVCGDVMGMGIGRRWRRRWARAGAAMTASKGQDESDGSGRVRARREKGEAASLRSHSPTAAELRECGRGTGGGGVNTLGGGGGNYAAASRAELHSAIFYPRHSSSAASFSLAEAPLPSEAIAEISPAHRHCSGRRPPTTTAALVSDLLDRGHCLGRAAAAPALAHGCRCSLPPAXGDASSPAAAVGASSNPISGVGFGGGGGQVGVQDG

SEQ ID NO: 138139 - protein, 1322 aa, Oryza sativa
  Clone ID: PAT_MRT4530_39555C.1.pep
MTWRKFRTDRAGKAVMAVEEVQALRKEFDAQQASNHQQPARKKVRKDLYCAFHECSSHTTEQCRNIRQRGNAQDPRPQQGTTVEAPREAVQEQIPPAEQRQDTQRRVIQVITRADPPSLLSKRRRKMQIRMVHNITSAGEGAPQYVNQLISFGPEDDEGVLFPHQDPLVISAEIAGFEVRRILVDRGSSADVIFAEAYAKMGLPTQALAPAPTSLRGFGGEAVQVLGQALLLIAFGLGENRREEQILFDVVDIPYNYNAIFGRATLNKFEAISHHNYLKLKMPGPTGVIVVKGLQPSAASKRDLAIINRAVHNVETEPHERPKHTPKPTPHGKITKVQIDDADPTKLPRKKKLRKMFADHQEAAKTEVQKLLWAGVIQEIDHPEWLANPVLVRKSNGKWRMCVDFTDLNKACPKDDFPLPRIDQLVDSTAGHELMSFLDAYSGYHQIHMNPLDIPKTSFITPFGTFCHLRMPFGLRNAGGTFARLVYKVLGKQLGRNVQAYVDNIVVKSRKAFDHAFDLQETFDSLRAAGIKLNPVKCVFGVRAGKLLGFLVSERGIEANPEKIDAIQQMKPPSSVHEVQKLTGRIAALSRFLSKAAERGLPFFKTLRGAGKFNWTPECQAAFDELKQYLQSPPALISPPPGSELLLYLAASPVAVSAALVQETESGQKPVYFVSEALQGAKTSIVPSQYPLGEILRGKEVTGRLSKWAAELSPFDLHFVARSAIKSQVLADFVAEWTPVLAPEPEPDDQFWVMCSDGSWSHKGAGVAAVLFLPNGVPIRYAARLQFNTTNNAAEYEAVLLGLRKAKALGVRRLLIRTDSKLVAGHVDKSFEAKEKGMKRYLEAVRSMEKCFTGITVEHLPRDQNDEADALVKSAACGGPHSLGIFFEVLHAPSVPMDSSEVMTIDQEKLGEDSYDWRTPFVKHLETGWLPVDEAEAKRLQLRATKYKMVSGQLYRSGVLQPLVCCISFAEGEEMAKEIHQGLCGAHQAARTMASKVFRQGLYWPTVMKVCVEQIKKCESCQRHGRSQAAPQYDLQPIAPIWPFARWGLDIIGPFPVARNGYKFVIVAVEYFSRWIEAEPLGAITSAAVQKFVWKNIICHFGVPKEFITDNGKQFDSDKFREMCEALNLEIRFASVAHPQSNGAAERTNGKILEALKKRLEGAAKGKWPEELLSVLWALRTTPIRPTKFSPFMLLYGDDAMIPAELGANSPRVMFSGGEEGREVSLELLEAVRVEALEHMHKYATSTSATYNKKVRPTELMPGHLVLRKKANPLAVGKLESKWEGPYIIKHKSRTGSFRLATLEGEEFDHSWNAASLKRFYV

SEQ ID NO: 138140 - protein, 80 aa, Oryza sativa
  Clone ID: PAT_MRT4530_39556C.1.pep
IKKFIKNQIIFKTTKTKNFYTTLSPPIQHNNPMILLTKIFRTHTPTRENPTRSPPPPTFPNPQKTKTKIQTSTKTLPRIN

SEQ ID NO: 138141 - protein, 1584 aa, Oryza sativa
  unsure (1)..(1584): unsure at all Xaa locations
  Clone ID: PAT_MRT4530_39557C.1.pep
MRIGRRPGRPQGVRVGRFINAAGTTGFPTGNTSQSAPNWLPPIQPGLRVSLWNQGPQFDFIIAAQAPTVRQQAPTPGFGTNQAPIQAAMMWSQPIFDPSMAAQQVPPVGAGQPNAMAQPHAQAAISPFATPYPQXGAVNRAGGEKGLPLCGGIKTRPIPPQFKFPPVPRYSGETDPKEFLSIYESAIEAAHGDKNTKAKVIHLALDGIARSWYFNLPANSIYSWEQLHDVFVLNFRGTNEEPKTQQHLLGIRQRQGESIREYMRRFLQARCQVQDITEASVINATSAGLLEDELTRKITNKEPQTLEHLLRIIDGFARGEENSKRQQAIQAEYDKASIAAAQAQAQVQVVEPPPLFVRQSQPAIQGQPPRQSQAPITWRKFRTDHASKAVMAVEEVQALRKEFDAQQASNHQQPAHKKYLNQLISFGPEDAEGVIFPHQDPLVISAEIAGFEVRRILVDGGSSADVIFAEAYAKMGLPTQALTPAPASLRGFSREAVQVLGQTLLLIAFGSGENRREEQILFDVVDIPYNYNAIFGRATLNKFEAISHHNYLKLKMPGPTGVIVVKGLQPSAASKGDLAIINRAVHSVETEPHERPKHTPKPTPHGKITKVXIDDADPTKLVSLGGDMGEEEVESILEVLKKNIDIFAWSPNEVGGVPVDLIMHHLAVKPDIKPRKQKLRKMSADRQEAAKAEVQKLLRAGVIQEIDHPEWLVNPVLVRKSNGKWRMCVDFTDLNXNDDFPLPRIDQLVDSTAGCELMSFLDAYSGYHQIHMNPLDIPKTSFITPFGTFCHLRMPFGLTNAGATFARLVYKVLGKQLGQNVEAYVDDIIVKSRKAFDHAIDLQETFDSLRTAGTRLNPEKCVFGVRAGKLLGFLAAERGLPFFKTLRGAGKFNWIPECQAAFDVLKQYLQSPPVLISPPPGSELLLYLAASPVAVSAALVQETEFGQKPVXFVSEALQGAKTRYIEMEKLTDALVMASRKLKHYFQAHKVIVPSQYPLGEILRGKEVTGRLSKWATELSPFDLNFVARSAIKSXMLADFVAEWTPVLAPDPEPDEQFWVMCSDGSWSHRGAGIAAVLFLPNGVPIRYVARLQFDTTNNAAEYEAVLLGLRKAKALGVRRLLIRTDSKLVAGHVDKSFEVKKEGMKRYLEAVRSMEKCFTGITVEHLPRDQNEEADALAKSAACGGPHSPGIFFKVLHAPSVPMDSLEVMAIDQEKLGEDPYDWRTSFVKHLETGWLPVDEAEAKHLQLRATKYKMVSGQLYRFGVLQPLLRCISFAEGEEMAKEIHQGLCGVHXAARTMASKVFRQGVYWPTVLKVCVEQIKKCESCQRHGRSQAAPQYDLQPIAPVWPFARWRLDIIGPFPVARNGYKFAIVAVEYFSRWIEAEPLGAITSAAVQKFVWKNIVYRFGVPKEFITDNGKQFDYDKFREMCEGLNLEIRFSSVAHPQSNGAAERTNGKILEALKKRLEGAAKGKWPEELLSVLWALRTTPTRPTKFSPFMLFYGDEAMTPVKLGANSPRVMFSGGEEGCEVSLELLEGVRVEALEHMHKYTTSTSATYNKKFDPXADAWSSRPKEEGEPSSGWQA

SEQ ID NO: 138142 - protein, 1930 aa, Oryza sativa
  unsure (1)..(1930): unsure at all Xaa locations
  Clone ID: PAT_MRT4530_39558C.1.pep
ERREAKSRTSALPGQRRFRRRVQGEDYLPKEDDFAMASSPPRGPRKPFRPIKPKGYRAGDRXTTHQGPMSPCNIMYPYKCPFRKGNHLSFRQQLAPTVGTSERNHXERMPPKRVVKEKVTRRKESDAGPDMAAEEGAEPSAPVAEDGGGQAPSQPPSAPATSMQVPNAVDVVKAAAAARALQTRAEILSTSQPVVPQATPSQPAVAPIALAVVQAQVSPDPEAQAEADMEAMRQNMTRLQDMLRQMQKQQQAYEAARRTKATSAPILQYSAGYVPPQVHPQVTTQPFPPQAAQAPVYFAGQQPAVAVHLAPHVQLQAQLVAAQVHHQPPGQAPQTVVEGASALQAQLQAFLQRLNQPHCISTTTPSAHPEGNTSQGTPNWLPLIQPGLGVSPWNQGPQFDFVNAAQAPTVRQQAPTPGFGTNQAPIQAAMTWSQPIFDPSMAAQQVPPVGAGQPNAMAQPHAQATISPFATPYPQQGAVNRAGGEKGLPLSGGIKTRPIPPQFKFPPVPRYSGETDPKEFLSIYESAIEAAHGDENTKATVIHLALDGIARSWYFNLPANSIYSWEQLRDVFVLNFRGTYEEPKTQQHLLVIRQRPGESIREYMRRFSQARCQVQDITEASVINAASAGLLEGKLTRKIANKEPQTLEHLLRIIDGFARGEEDSKRRQAIQAEYDKASLVAAQAKAQVQVAKPPPLSVRQSQPAIKGXPPRQGQAPITWRKFRTDRAGKAVMVVEEVQALRKEFDAQQASNHQQPARKKYLNQLISFGPEDAEGVMFLHQDPLVISAEIAGFEVRXILVNGGSSANVIFAEAYAKIGLPTQALTPAPASLRGFGGEAVQVLGQALLLIAFGLRENRREEQILFDVVDIPYNYNAIFGRATLNKFEAISHHNYLKLKMPGPTGVIVVKGLQPSAASKGDLAIINRAVHSVETELHERPKHTPKPTPHGKXTKMQIDDADPTKLVSLGGDMGEEEVESILEVLKKNIDIFAWSPDEVGGVPADLMMHHLAVNPDIKLRKQKLRKMSADRQEAAKAEVQKLLRAGVIXEIDHLEWLVNLVLVRKSNDKWRMCVDFTDLNKACPKDDFPLPRIDQLVDSTAGCELMSFLDAYSGYHQIHMNPLDIPKTSFITPFGTFCHLRMPFGLRNAGATFARLVYKVLGKKLGRNVEAYVDDIVVKSRKAFDHAIDLHKTFDSLRAAGIKLNPEKCVFGVRAGKLLGFLAAERGLPFFKTLRGAGKFNWTPECQAAFDELKQYLQSPPVLISPPPGSELLLYLAASPVAVSAALVQETEFGQKPVYFVSEALQGAKTRYTEMEKLAYALVMASRKLKHYFQAHKVIVPSQYPLGEILXGKEVTGRLSKWAAELSPFDLHFVARSAIKSQVLADFVAEWTPVLAPDPEPAEQFWVMCSDGSWSHKGAGIAAVLFSPNGVPIWYAARLQFDTTNNAAEYEAILLGLRKAKALGVRRLLIRTDSKLVAGHVDKSFEAKEEGMKRYLEAVRSMEKCFTGITVEHLPRDQNEEVDALAKSAACGGPHSPGIFFEVLHAPSVPMDSSEVMAIDQEKLGKDPYDWRTPFVKHLETGWLPVDEAEAKRLQLRATKYKMVSGQLYRSGVLQPLLPCISFAEGEEMAKEIHQGLCGTHQAARTVASKVFTQGVYWPTVLKVCVEQVKKCESCQRHGXSQAAPQYDLXPIAPIWPFARWGLDIIGPFPVARNGYKFAIVAVESFSRWIEAEPLGAITSAAVQKFVWKNIVCRFEVPKEFITDNGKQFDSDKFREMCEGLNLEIRFASVAHPQXNGAAERTNGKILEALKKRLEGAAKGKWPEELLSVLWALWTTPTRPTKFSPFMLLYGDEAMTPXAELGANSPRVMFSGGEEGREVSLELLEGVRVEVLEHMHKYATSTSATYNKKVRPTXADARSSRPKEEGEPSSGWQA

SEQ ID NO: 138143 - protein, 78 aa, Oryza sativa
  Clone ID: PAT_MRT4530_39559C.1.pep
RPACVNLLSALNHVLAFIHNHFRRMYLGVRYVNSLQRQVHLPSLSPTSCWTSLSPSSPGWSRKYSTRPFTSSYRPTTT

SEQ ID NO: 138144 - protein, 58 aa, Oryza sativa
  Clone ID: PAT_MRT4530_3955C.1.pep
MIFPQDKINTIPLEYSPVKCYNGIFVRLRMNSVTIIYQEYFCTIAENYISSNVVKKYQ

SEQ ID NO: 138145 - protein, 512 aa, Oryza sativa
  Clone ID: PAT_MRT4530_39560C.1.pep
MGVAPPELGQFDGWESSGEEERERWGWCRRSRSRSGSRSGSGSGSSRRRLPRKGSGGGGGGEDATVATGCCIRLWPMGSCPPPPRSKVDTSTSSASTHGAEKSTENGSRNHPVVSVVSGSTTTSNAESSSSASKAGEEIKVASQLRKFAFNDLKCATRNFRPESILGEGGFGCVFKGWIEENGTAPMKPGTGLTVAVKTLNHDGLQGHKEWVAEVDFLGNLHHPNLVRLIGYCVEDDQRLLVYEFMPRGSLDNHLFRRSLPLPWSIRMKVALGAAKGLAFLHEEAERPVIYRDFKTSNILLDADYNAKLSDFGLAKDGPVGDKTHVSTRVMGTYGYAAPEYVMTGHLTSKSDVYSFGVVLLEMMSGRRSMDKNRPNGEHNLVEWARPLLGERQRFYKLIDPRLEGNFSVKGAQKAAQLARACLNRDPKARPLMSQVVEVLKPLLNLKDMASSSYFYQTMQAERMAHSSSMNGRSHALKVQGSFARNGQQPMRSLSDGPRASPFRYSPKPNVK

SEQ ID NO: 138146 - protein, 77 aa, Oryza sativa
  unsure (1)..(77): unsure at all Xaa locations
  Clone ID: PAT_MRT4530_39561C.1.pep
XDHLTELPTSLPACEGRPKKTPPWLPPRRPRLSGRGGVEIDLGGGEGRPFGSQRAGGARRXERXNGRTERSGXXRRG

SEQ ID NO: 138147 - protein, 45 aa, Oryza sativa
  Clone ID: PAT_MRT4530_39562C.1.pep
RLYPKRHFVLGGHVDHGRVAPTSTSHKNMSAAESPSKLRRTFLSA

SEQ ID NO: 138148 - protein, 72 aa, Oryza sativa
  Clone ID: PAT_MRT4530_39563C.1.pep
AAPSHDSDSPAASLPASSLLRRPTYSLALVREQPSLATGAHQQPRSQSLPKASPRSLALVGTALSLSVHRLT

SEQ ID NO: 138149 - protein, 307 aa, Oryza sativa
  Clone ID: PAT_MRT4530_39565C.1.pep
MATAVLRRPLLAAAAAAAAVSSTSSSFRPSRFHLRRCRYPPPVFAVSSDSPKPVTSSSTGGDNPDEEPVLPLLQELADCLVLPPKFLSQLPRDLRLDLNDAAFDLSNGPVLDECGQEVGDLLLNLAKAWEMADTSTSNNLVKQLPSMEPYLTGSAKSAFGKRLMSAGRRFTSMGQYGKGELKKIAETMSKTGKLLSKRPVVQSEVEAMKVKRKLKFLELEFELTAEKANIGAAVGLVFGFLSWQLARGIQNIPDGSMQYANDNALQMAKSLKVSLLVLGYTSTALSVFTSIGLLLLAQQINSDDKTE

SEQ ID NO: 138150 - protein, 53 aa, Oryza sativa
  Clone ID: PAT_MRT4530_39567C.1.pep
FFFFFFFLDITLRWPILNIALRTIFKPSETKCVQKAKISLQAQLNHITTVVEM

SEQ ID NO: 138151 - protein, 174 aa, Oryza sativa
  Clone ID: PAT_MRT4530_39568C.1.pep
MAAARGQKAVAALPHLVKSLRSEPVSNAPRLRHLPSLRRTFSLYDQINLIDSVPEDQLRFQSYDDTGFNINKVKYEGSLLIVENKIMTWAPKSFAEITAESLSIFKVVHPIPEILILGCGRHIQPISPELRKFIRSTGMKLEAVDSRNAASTYNILNEEGRPVAAALLPCGVTS

SEQ ID NO: 138152 - protein, 282 aa, Oryza sativa
  Clone ID: PAT_MRT4530_39569C.1.pep
MASAETPNPDAEIPNTDAAAAADPAAAAPAAAATDPAAAGSPSPPLPPRKRRLSPTPSPTRRSSRSRSRSPRRGRSRSRSRSRSRGRSASPRYPDGKRRRHNDLNVEVCRDFLRDRCARADIECKYAHPHPTVAVDRDSKVTACADSLRNNCFRGRTCRYYHPPPHIQESLLRSIGVEDPKVKMVCRDFTRGRCSRSANECRFLHHSPLEDCAIVCQDFLRGRCDRKSCRYSHVMAHPMPPPMRDIPMQYPDMPFLVNEVLSVYPILLLFWQAFDRCSSAGY

SEQ ID NO: 138153 - protein, 399 aa, Oryza sativa
  unsure (1)..(399): unsure at all Xaa locations
  Clone ID: PAT_MRT4530_3956C.1.pep
MMPRDMWIRRGGVEEDPLGFLAQYGLGPNLLLVWDPSRRHMILGPTAAALLPCTLRGIFVQIGVPTLSGFFARPSPSAGTKTTRPPIPGALHLDYLDTDEIEKSLLTIIDHCNGLILLDHHVVNPATRQWTRLLPYSPPESSPPGSEIILDGYHALVFDPHRVAAALPVVLDALRPRTTSHAAMHLLPDDVLRHLPRRSLAASRCVCQSWRVIIDDRSLLATAALLPCTLRGIFVQIGVPTLSGFFARPSPAGTRRPPIPGVLDLDYLDTNQIEKSLLTIVDHCNGLILLDHHVVNPATRQWTRLLPYSPPESSPPGSEIILDGYHALVFDPXVSPPHYQLFLMPYVLRRATVSGQWPPSPLLLHVFSSRTEPEGSTWRWEERSFVREGNATMGTIDEV

SEQ ID NO: 138154 - protein, 39 aa, Oryza sativa
  Clone ID: PAT_MRT4530_39570C.1.pep
LQGDSLSGQCLHKYLHLGDARGFDSKTRASLDCVQIFQG

SEQ ID NO: 138155 - protein, 427 aa, Oryza sativa
  Clone ID: PAT_MRT4530_39571C.1.pep
MPSPLKERPAGRLGRLLAALRPARAGPLPVQTGFPTSLADLVVKNHGRLKKPSASASRRKKRGGPEAPPSPSPSPSPSPPPQPSSPPPPPPSPPPAAAVSVSPPTQPRPRPELPPVEAVLRRQPKGRVFGLGLGFVSLVGVVSLALLVIWSKKVVAAVTVASFSLFLLESVRSSALSRRPRRPAANNKLDLDGRGYVSPIREVEPARASFSDSSRRSELSILTIEERSEVGDDSIVAIEERIAAGGDDSSNAKVKTKKRSWRKLIPRKLQKGMKGKEAEDSSGSFRSSEGNRGDATATDSSDSRRGMRTKAADAFVARSMDSSPSFRGNGGDTDADAYSNATRVEIDAPADVLAGDGDAVGGTRSSVALLVVAVVLVGLVAGKLPAVVFTVLCGVFISSVQRLPAGGDGNGDRSFTWWFRIKPKDVN

SEQ ID NO: 138156 - protein, 81 aa, Oryza sativa
  Clone ID: PAT_MRT4530_39572C.1.pep
MAGKLESFWRTVRVTGLSMDGVSNMPEEVRTSRQEKGRAGIKYEHCMEVNGAGAPVTGESKNPLQQLWKLSAHQPNKASQL

SEQ ID NO: 138157 - protein, 118 aa, Oryza sativa
  unsure (1)..(118): unsure at all Xaa locations
  Clone ID: PAT_MRT4530_39573C.1.pep
RPLRGGNRRFEGTVTQEVPASFHGEEGNRRRTSARRPREEIGFRDVLGAGGGDGGATLIXGGTVHRAEGRRRRKWAAAATVAAAKSAGGELGPAAANAMSREGRDECCRLVPNSCSPG

SEQ ID NO: 138158 - protein, 85 aa, Oryza sativa
  unsure (1)..(85): unsure at all Xaa locations
  Clone ID: PAT_MRT4530_39574C.1.pep
LPTLPAQTYHFTLPPQPAATAIEPLSLREXCAAGDGITNKNGGRGGGGGGGGXRGGARAGQRQAAPGNLLGGSXAGIXRMQLELG

SEQ ID NO: 138159 - protein, 1865 aa, Oryza sativa
  unsure (1)..(1865): unsure at all Xaa locations
  Clone ID: PAT_MRT4530_39575C.1.pep
MAAEEGAEPSASVAEDREAQVPSQPPSAPAPPQPSSAPATSVQVLNMADVVMAAAAARALQTRAEILSTNQLVVPQAAPSQPAVPTALTVVQAQISLDPEAQAEADMEAMRQNMTRLQDMLRQMQEQQQAYEATRRTKATSAPILQYPAGYAQPQVRPQVVTQPSPPLAAQPPVYFTGQHQPPGQAPQSVAEGASALQAQLQAFLQQLNQPHYISSTTPSAHPVGNTSQGAPNWLPPIQPGSGPSPWSQGPQFDFVNTAQVPTVRQQVPTPGFGTNQAPIRAAMMWSQPIFDPSMAAQQVPPVGAGQSNATAQLHAQAAISPFATPYPQQGAVNRAGGKKGLPLSGGIKTRPIPPQFKFPPVPRYSGETDPKEFLSIYESAIEAAHGDENTKAKQLRDVFVLNFRGTYEEPKTQQHLLGIRQRLGESIREYMRRFSQARCQVQDITEASVINAASAGLLEGELTRKIANKEPQTLEHLLRIIDGFARGEEDSKQRQAIQAEYDKASVAAAQAQAQVQIAEPPPLSIRQSQPAIQGQPPRQGQAPMTWRKFRTDRAGKAVMAVEEVQALRKEFDAQQASNHQQPARKKVRKDLYCAFHGRSSHTTEQCRNIRQRGNAQDPRPQQGTTVEAPREAVQEQTPPAEQRQDTQRRIRMVRSITSAGEGAPQYVNQLISFGPEDTKGVLFPHQDPLVISAEIAGFEVRRILVDGGSSADVIFAEAYAKMGLPTQALTLAPASLRGFGGEAVQVLGQALLLIAFGSGENRSEEQILFDVVNIPYNYNAIFGRATLNKFEDISHHNYLKLKMPGPTGVIVVKGLQPSAASKCDLAIINRAVHNVETEPHERPKHTPKPTPHGKVTKVQIDDADPTKLVSLGGDMGEEEVESILEVLKKNIDIFPWSPDEVGGIPADLIMHHLAVKPNIRPRKQKLRKMSADRQEAAKTEVQKLLRPGVIQEIDHLEWLANPVLVRKSNGKWRTCVDFTDLNKACPKDDFPLPRIDQLVDSTAGCELMSFLDAYSGYHQIHMNPLDIPKTSFITPFGTFCHLRMPFGLRNAGATFARLVYKVLGKQLGRKAFDHAIDLQETFHNLRAAGIKLNPEKCVFGVRAGKLLGFLVSERGIEANPEKIDAIQQMKPPSSVHEVQKLAGRIAALSRFLSKAAERGLPFFKTLRGAGKFNWTPECQAAFDELKQYLQSPPALISPPPGSELLLYLAASPVAISAALVQETESGQKPVYFVSEALQGAKTRYIEMEKLAYALVMASRKLKHYFQANKVIVPSQYPLGEILRGKEVTGRLSKWAAELSPFDLYFVAHSAIKSQVLADFVAEWTPILAPDPEPAEQFWVMCSDGSWSHKGAGVATVLFSPNGVPIRYAARLQFDTTNNVAEYEAVLLGLRKAKALGVRRLLIRTDSKLVAGHVDKSFEAKEEGMKKYLEAVRSMEKCFTGITVKHLPRDQNEEADALAKSAACGGPHSPGIFFEVLHAPSVPMDCSEVMAIDREKRGEDPHDWRTPFVKHLETGWLPVDEAEAKRLQLRATKYKMVSGQLYRTGVLQPLLRCISFADGEEMAKEIHQGLCGAHQAARTVASKVFRQGVYWPTVLKVCVEQIKKCESSQRHSRSQAAPQYDLQPIAPIWPFARWGLDIIGPFPVARNGYKFAIVAVEYFSRWIEAEPLGAITSAAVQKFVWKNIVCRFGVPKEFITDNGKQFDFVKFREMCEGLNLEINFASVAHPQSNGAAERTNGKILEALKKRLEGAAKGKWPEELLSVLWALRTTPTRPTKFSPFMLLYGDEAMTPAELGAKSPRVMFSGGEEGSELSLELLEGVRVKALEHMHKYATSTSATYNKKVRPTXAHTWSSRPKEEGEPSSWQA

SEQ ID NO: 138160 - protein, 128 aa, Oryza sativa
  Clone ID: PAT_MRT4530_39576C.1.pep
MAHRLLLIVLVASILHTVSSATVYDVLQQNNLPRGLIPQGVTSYVLHPDGHLEVTLPSECNFAVTVGGSPYKFRFDSKFVGLIKSGSISEINGVRVQVDHAGNQLTFKVGTSSISFPISDFTSSPVCG

SEQ ID NO: 138161 - protein, 1547 aa, Oryza sativa
  unsure (1)..(1547): unsure at all Xaa locations
  Clone ID: PAT_MRT4530_39577C.1.pep
MAAEEGAEPSAPVAEDGGGPSASTSAPSQPPSAPAASVQVPNAADVAKADAAARALQTRAEILSTSQLVVPQAAPSQPAAVPTALAAVQAQVSPDPETQAEADMEAMRQNMTRLQDMLRQMQEQQQAYEVARRTKVTSTPILQYSAGYVPPQVHPQVMTQPFSPQVAQAPMYFAGQQSAAAVHPAPHVQLQAQPVATQVHHQPPGQAPQTVAEGASALQAQLQAFLQQLNQPHCISSTTPSAHPEGNTSQGTPNWLPPIQPGLGVSPWNQGPQFDFVNAAQAPTVWQQAPTPGFGTNQAPIQAAMTWSQPIFDPYMAAQQVPPVGAGQSNAMAQHHTQAAISPFATPYPQQANSIYSWEQLRDVFVLNFRGTYEEPKTQQHLLGIRQRPGESIREYMRRFSQARCQVQDITEASVINAALAGLLEGELTRKIANKEPQTLEHLLRIIDGFARGEEDSKRRQAIQAEYDKASVVAAQAQAQVQVAEPPPLSIRQSQPAIQGQPPRQGQAPMTWRKFRTDRAGKAVMAVEEVQALRKEFDAQQASNHQQPARKKLSKRQKKMQTRMVHSITSMGEGAPQYLNQLISFGPEDAEGVMFSHQDPLVISAEIAGFEVRRILVDGGSSADVIFAEAYAKMELPTQTLTPAPASLRGFGGEAVQVLGQALLLIAFGSGENGREEQILFDVVDIPYNYNAIFGRATLNKFEAVSHHNYLKLKMPSPAGVIVVKGLQSSAASKSDLAIINRAVHSVETELHERPKNTPKPTPHGKITKVQIDDADPTKLVSLGATWAKKKLRVGGVPADLIMHDLAVKPDIKPRKQKLRKMSADRQEAAKAEVQKLLRAGVIQEIDHPEWLANPVLVRKSNGKWRMCVDFTDLNKACPKDDFSLPRIDQLVDSTAGCELMSFQDAYSGYHQIHMNPLDIPKTSFITPFGTFCHLRMPFGLRNAGATFARLVYKVLGKQLGRNVEAYVDDIVVKSRKAFDHAIDLQETFDSLRAAGIKLNPEKCVFGVCIGKLLGFLVSERGIEVNPEKINAIQQMKPPSSVHEVQKLAGRIAALSRFLSKAAERALPFFKTLRGTGKFNWTPECQAAFDELKQYLQSPPALISPPLGSELLLYLAASPVAVSVALVQETEFGQKPVYFVSEALQGAKTRYTEMEKLAYALVMASRKLKHYFQAHKEVTGRLSKWAAELSLFDLHFVARSAIKSQVLADFVAEWTPVLAPDTKPAEQFWVMYSDGSWSHRGAGVAAVLFSPNGVPIRYAARLQFDTTNNAAEYEAVLLGLRKAKALGVRRLLIRTDSKLVAGHVDKSFEAKEEGMKRYLEAIRSMEKCFTGITVEHLPSGQNEEADALVKSAACGGPHSPGIFFEVLHAPIPKEFITDNGKQFDSDKFRKMCKGLNLEIRFASVAHPQSNGAAERTNGKILEALKKRLEGAAKGKWPEELLSVLWALRTTPTRPTKFSPFMLLYGDEAMTPAELGANSPRVMFSGGEEGREVSLELLEGIRVEALEHMHKYATSTLATYNKKVRPTXADAWSSRPKEEGEPSGGWQA

SEQ ID NO: 138162 - protein, 1908 aa, Oryza sativa
  unsure (1)..(1908): unsure at all Xaa locations
  Clone ID: PAT_MRT4530_39578C.1.pep
MAKAMEQERRKAKSHTSXPGQRRLRRRVQGEDYLPKEDDFALTSLPPRRPRKPFRPIKPRGNRADDRQTAHQGPVSPYIIMYPCKCPFRKRNHLSFRQQLAPTVGTSERNHXERMPPKRVVKEKVARRRESDAGLDMAAEEGAEPSAPVAEDGGAPAPSHLPSAPATSVEVPNATDVAKATAAARALXTTAEILSTSQPVVPQAAPSQSAAAPTALAIEQAQISLDPEAQAEADMEAMRRNMTRLQDMLRQMQEQQQAYEAARRTKAMSAPILQYSAGYVPPQVHPQVTAQPFPPQAAQAPVYFAGQHQPPGQAPKLVAEGALALQAQLQAFLQQLNQPHCISSTTPSARPEGNTSQGTLNWLPPIQPGLGVSPWNQGPXFDFVNATQAPTVRQXAPTPGFGANQAPIQAAMTWSQLIFDSSMAAQQVPPVGAGQPNAMAQPHAQAAISPFTTPYPQQGAVNRAGGKKGLPLSGGIKTRPIPPQFKFPPVPRYSGETDPKEFLSIYESAIEAAHGDENTKAKVIHLALDGITRSWYFNLPANSIYSWEQLRDVFVLNFRGTYKEQKTQQHLLGIRQRSRESIREYMRRFSQARCQVQDITDAXAASAGLLEDELTRKIANKEPQTLEHLLRIIDGFARGEEDSKRRQAIQAEYDKASVAAAQAQAQVQVTEPPPLSVRQSQPAIQGQPPSQGQAPMTWRKFRTDRAGKAVMAVEEVQALRKEFDAQQASNHQEPARKKYVNQLISFGPEDAEGVLFPHQDPLVISAEIAGFEVRRILVDEGSSADIIFAEAYAKMGLPTQALTPAPASLRGFGGEPVQVLGQALLLIAFGSGDNRREEQILFDVVDIPYNYNAIFGRATLNKFEAISHHNYLKLKMPGPTGVIVVKGLQPSASPKGDLAIINRAVHSVETELHEWSKHTPKPTPHAKITKMQIDDANPTKLVSLGDDMGEEEVESTLQVLKKNIDIFAWSPDEVGGVLADLIMHHLAVKPDIKPRKQKLHKMSADRQEAAKAEVQKLLRVGVIQEIDHPEWLANPILVRKSNGKWRMCVDFTDLNKACPKDDFPLPRIDQLVDSTAGCELMSFLDAYPGYHQIHMNPPDIPKTSFITPFGTFCHLRMPFGLRNAGATFARLVYKVLGKQLGRNVEAYVDDIVVKSRKAFDHAIDLQETFDSLRAAGIKLNPEKCVFGVDAGKLLGFLAAERGLPFFKTLRGARKFNWTPECQAAFDELKQYLQSPPALISPPPGSELLLYLAALPVAVSAALVQETESGXKPVYFVSEALQGAKTRYMEMEKLAYALVMASRKLKHYFQAHKVIGPSQYPLGEILRGKEVTGRLSKWAAELSPFDLHFVARSAIKSQVLADFVAEWTPVLVPNPEPAEQFWVMCSNRLWSHRGAGVAAVLFSPNGVPIRYATRLQFDTTNNAVEYEAVLLGLRKAKALGVRRLLIRTDSKLVAGHVDKSFEAKEEGMKKYLEAVRSMEKCFTGITVKHLPRDQNGETDALAKSTACGGPHSPGIFFEVLHAPSVSMDSSEVMVIDQEKLGEDPCDWXTPFVKHLQTGWLPVDEAEAKHLQLRATKCKMVSGQLYRSGILQPLLRCISFAKGEEMAKEIHQGLCGAHQAARTVASKVFRQGVYWPTVLKVCVEQIKKCESCQRHGRSQAAPQYDLQPIAPIWPFARWGLDIIGPFPVARNGYKFAIVAVEYFSRWIEAEPLGAITSAAVQKFVWENIVCRFGVPKEFITDNGKQFDSDKFREMCVGLNLEIRFALVTHPQSNGAAERTNGKILEALKKRLEGEAKGKWPEELLSVLWALRTTPTRPTKFSPFMLLYGDEAMTPAELGANSPRVMFSGGKEGREVLLELLEGVRVEALEHMHKYTTSTSATYIKKVRPTXAHAWSSRPKEEGEPSSGWQA

SEQ ID NO: 138163 - protein, 93 aa, Oryza sativa
  Clone ID: PAT_MRT4530_39579C.1.pep
MPLSLGSIKRGTGEKMGQPRLPPPRQLVEEFPGDLSGKIVEEALAPVLTGLEFTTFGVKEELPRVIEAWVVLSVGWLPPCPPLDEGGVRWLCG

SEQ ID NO: 138164 - protein, 422 aa, Oryza sativa
  Clone ID: PAT_MRT4530_3957C.1.pep
MASIAMAASLRTFLRPHRCRLLLRQSRSLSASAAPAGAAAASTVIRRSVVEVLRERGLVEATTSESLGSASASPRELKAYCGFDPTAESLHLGNLLGLVVLSWFRRCGHNAVALVGGATGRVGDPSGKSAERPELDLAAVETNSNAIKSLIGQILDRAPEPSQHSQSGKNLNLEQNEQALVNSGEKMGSFQILDNYDWWKDITLLDFLKEVEGAHGLTFPLLLKSDGTKFGKTEDGAIWLSPKMLSPYKFYQYFFSVPDIDVIRFMKILTFMSLDEIQELEESMKKPGYVPNTIQRRLAEEVTRFVHGEEGLEEALKATEALRPGAQTQLDSQTIEGIADDVPSCFLPYGQVLKSPLVDLAVSTGLLASKSAVRRLIKQGGLYLNNIRIDSEDKLVEEGDVVDGKVLLLSAGKKNKMVVRIS

SEQ ID NO: 138165 - protein, 310 aa, Oryza sativa
  Clone ID: PAT_MRT4530_39580C.1.pep
MAAATAEPLAVAVAHTATAGTDHSPAPLPPPPPHCNYKSKLQEYLQQANKQLPIYCTKCKGEHHQLKFKSTVMVDGEEFSSTFCHRRVKDAEQDAAKVAYDTLLERKETETDDTDVFELIDQDVVFSKSILHEYTTKTKTDQPEYSVTKTEGSVTPYVSSVSFAGHTYTGGAARNKKDAEQKAARAAVKSLLATNYTSMAKIVRSKEKLIRAISPSGYNKGIDSNPTNKKLPFAPIKFTPPSIFKLYDGEIDMLSVPQALFAPLVAAEEPKVRPAAEPASNPSEQAVHVSKKHKDNKVRGPEVKEERVAQ

SEQ ID NO: 138166 - protein, 1790 aa, Oryza sativa
  unsure (1)..(1790): unsure at all Xaa locations
  Clone ID: PAT_MRT4530_39581C.1.pep
MASSPPRGPKKPFWPVKPWGYRAGDRQTAHQAPMSPYNIMYPCKCPFRKGNNLSFRQQLAPTVGTSERNHRERMPPKRVVKEKVARRKESDAGPDMAAEEGAEPSAPAAEDGGGQAPSQPPSAPATSVQVPNAADVAKAAAAARALQIKAEILSTSQLVVPQAAPSQPAAAPTALAVVQAQVSPDPKAQAEADMESMRQNMTRLQDMFRQMQEQQQAYEAARRTKAMSAPILQYSAGYVPPQVHPQVTTQPFRHRPHRRRCTSPGSNRPQQCIRPLTCNCKLNQSLPKYTINHLAKRHKQWRKGLRLCRRNSKLSFSNSTNPTAFQVQPHRPTRRGIQVKPIFDPSMAAQQVPPVGAGQSNAMAQPHAQAANLPFATPYSQQSAVNRAGGEKGLPLSGGIKTRPIPPQFKFPPVPCYSGETDPKEFLSIYESAIEAAHGDENTKAKVIHLTLDGIARSWYFNLPANSIYSWEQLRDVFVLNFRGTYEEPKTQQHLLGIRQRPGESIREYMRRFSQARCQVQDITEASVINAASAGLLEGELTRKIANKEPQTLKQLLRIIDGFARGEEDSKRRQAIQAEYDKASVAAAQAHAQVQVAEPSPLSVRQSQPAIQGQPPRQGQAPITWRKFRTDCAGKAVMAVEEVQALRKEFDAQQASNHQQPARKKVRKDLYCAFHGRSSHTTEQCRNIRQRGNAQDPRPQKGTTFEASREAIQEQTSPAEQCQDVQRRVIQVITRADPPSQLSKRQKKMQIRMVHSITSVGEGAPQYLNQLISFGPEDAGVMFPHQDLLVISAEIAGFEVRRILVDGGSSADVIFAEAYAKMGLSTQALTPAPASLRGFGGEAVQVLGQALLLIAFGSGENRREEQILFDVIDIPYNYNAIFGRASLNKLEAISHHNYLKLKMPGPTGVIVVKGLQPSAAAKGDLAIINRAVHSVETEPHERPKHTPKPTPHGKITKVQIDDADPTKLVSLGGDMGEEEEVESILEIHMNPLDIPKTSFITPFGTFCHLRMPFGLRNAGATFARLVYKVLGKQLGRNVEAYIDDIVVKSRKAFDHAIDLQETFDSLRTAGIRLNPEKCVFGVRAGKLLGFLVSERGIEANLEKIDAIQQMKPPSSVHEVQKLAGQIASLSRFLSKAAERVSAALVQETEFGQKPVYFVSKALQGAKTRYIEIEKLAYALVMALRKLKHYFQAHKVIAPSQYPLGEILRDKKVTGRLSKWAAELSPFDLHFVARFAIKSQVLADFVAEWTSVLAPDPEPAEQSWLMCSDGSWSHKGAGIAAVLFSPNGVPIRYAARLQFDTTNNAAEYEAFLLGLRKAKALGVRRLLIRIDSKLVAGHVEKSFEAKEEGMKRYLEAVRSMEKCFTGITVEHLPRDQNEEADALAKSTACGAPHSPGIFFKVLHAPSMPMDSSEVMAIDQEKLGEDPYDWRTPFVKHLETGWLLVDEAEAKRLQLRATKYKMVSGQLYRSGVLQPLLRCISFVEGKEMAKEIHQGLCGAHQAVRTVASKVFRQGVYWPIVLKVCVEQIKKCESCQRHGRSQAAPQYDLQPIAPIWPFARWGPDIIGPFPVARNGYKFAIVAVEYFSRWIEAEPLGAITSAAVQMFVWKNIVCRFGVPKEFITDNGKQFDSDKFREMCEGLNLEIXGKWPEELLSVLWVLRRPPQDQPSLAMTPAELGANSPRVMFSGGEEGREVSLELLEGVRVEALEHLHKYATSTSATYNKKVRPTELMPGHLVLRKKANPVAVGKFESKWEGPYLIKHKSRTGSFHLATLEGEEFDHSWNAASLKRFYV

SEQ ID NO: 138167 - protein, 108 aa, Oryza sativa
  Clone ID: PAT_MRT4530_39582C.1.pep
MVVPLARRLAGGGRDCITMLQRVGAGMATACLATVVAALVEARRLRVARDTRTGQTRRCRWMCGVAKVLSVIVLEEFFYELHIVRLAVSLRSLCPRAISSHQATFQRK

SEQ ID NO: 138168 - protein, 1714 aa, Oryza sativa
  unsure (1)..(1714): unsure at all Xaa locations
  Clone ID: PAT_MRT4530_39583C.1.pep
LAPTVGTSERNHRERMPPKRVVKEKVARRKESDAGPDMAAEEGAEPSAPVAEDGGGQAPSQPPSAPATTVQVPNAADVAKAAAVARALQTRAEILSTSQPVVPQAAPSLAAAAPTALAVVQAQVSPDPEAQAEADMEAMRQNMTRLQDMLRRMQEQQEAYEAAKRTKATSAPILXQSAAAVRPAPHVQLQAQPVTAQVHHQPPGQAPQTVAEGASALQAQLQAFLQQLYQPHCIXQPGLGVSPWNQGPQFDFVNATQVPTVRQQAPTPGFGTNQAPIKAAMMWSQPIFDPSMVAQQVPPVGTGQSNATAQPHAQAAILPFTTPYPQQGAANRAGGEKGLPLSGGIKTRPIPPQFKFPPVPRYSGETDPKEFLSIYESAIEVAHGDENTKAKVIHLALDGIARSWYFNLLANSIYSWEQLRDVFVLNFRGTYEEPKTQQHLLGIRQRPGESIREYMRRFSQARCHVQDITEASVINATSAGLLEGELTRKIANKEPQTLEHLLRIIDGFARGEEDSKRRQAIQAEYDKASIVAAQAQVQVQVAEPPPLSVRQSQPAIQGQSPRQGQAPITWRKFRTDRAGKAVMAVEEVQALRKEFDAQQASNHQQPARKKVRKDLYSKGNPSDYKADPPSQLSKRQKKMQIRMVHSITSAGEGAPQYLNQLISFGPEDAEGVMFPHQDPLVISAEIAGFEVRRILVDGGSSADVIFAEAYATMGLPTQSLTPAPTSLHGFGGEAVQVLGQALLLIAFGSGENRREEQILFDVVDIPYNYNAIFGRATLNKFEAICHHNYLKLKMPGPTWVIVVKGLQPSAASKGDLAIINRAVYSVETEPHERPKHMPKPTRHGKITKMQIDDADPIKLVSLGGDMGEEEVESILEVLKKNIDIFAWSPNEVGGVPVDLIMHHLAVKPDIKPRKQKLRKMSADRQEAAKAEVQKLLRAGVIQEIDHPEWLVNPVLVRKSNGKWRMMPFGLTNAGATFARLVYKVLGKQLGQNVEAYVDDIIVKSRKAFDHAIDLQETFDSLRTAGTRLNPEKCVFGVRAGKLLGFLVSERGIEANPEKIDAIQQMKPPSSVHEVQKLAGRIVALSRFLSKAAERGLPFFKTLRGAGKFNWIPECQAAFDVLKQYLQSPPVLISPPPGSELLLYLAASPVAVSAALVQETEFGQKPVYFVSEALQGAKTRYIEMEKLTDALVMASRKLKHYFQAHKVIVPSQYPLGEILRGKEVTGRLSKWATELSPFDLNFVARSAIKGAGIAAVLFLPNGVPIRYVARLQFDTTNNAAEYEAVLLGLRKAKALGVRRLLIRTDSKLVAGHVDKSFEVKKEGMKRYLEAVRSMEKCFTGITVEHLPRDQNEEADALAKSAACGGPHSPGIFFKVLHAPSVPMDSLEVMAIDQEKLGEDPYDWRTSFVKHLETGWLPVDEAEAKHLQLRATKYKMVSGQLYRFGAARTMASKVFRQGVYWPTVLKVCVEQIKKCESCQRHGRSQAAPQYDLQPIAPVWPFARWRLDIIGPFPVARNGYKFAIVAVEYFSRWIEAEPLGAITSAAVQKFVWKNIVYRFGVPKEFITDNGKQFDYDKFREMCEGLNLEIRFSSVAHPQSNGAAERTNGKILEALKKRLEGAAKGKWPEELLSVLWALRTTPTRPTKFSPFMLFYGDEAMTPVKLGANSPRVMFSGGEEGCEVSLELLEGVRVEALEHMHKYTTSTSATYNKKFDPRS

SEQ ID NO: 138169 - protein, 257 aa, Oryza sativa
  Clone ID: PAT_MRT4530_39584C.1.pep
MAEQMFTVRDVLYMYSDARTAYDRFVGIGSNPEQARNAVALLVWLDQCNVRAIQHLPGLSPTVVSLVAAEANSVLDCLRGPEPVVPAIPLISALCKDGDVDPRFFTFHQDLVVRGVADILDGVGSLIFNNHLNKMLRRYQTGLVGNPPELMAAYSCLSVAVPEDCRSMFITFSRGAPIDREEIFDYFRQKWGDCVVRVLMEKTAGGSQPMYGRIIFRSEAFVQLVLNGERLVKISIRHRQIWLRKYVPRPAATQNQN

SEQ ID NO: 138170 - protein, 395 aa, Oryza sativa
  Clone ID: PAT_MRT4530_39585C.1.pep
MAGQMFTVRDVLYMYTDARTAYDRFVGIGSNPEQARNAVALLVWLDQCNVPAIQHLPGLSPTAVSLVAAEANSVLDCLRRPEPVVPAIPLISALCQDGDVDPRFFAFHQDLVVRGVADILDGVGSLIFDDHLNKMLRRYQTGLVGNPPELMATYSCLPVAVPEDCRSMFITFSRGAPIDREEIFDYFRQKWGDCVVRVLMEKTAGGSQPMYGRIIFRSEAFVQLVLNGERLVKEESSALLVLNLKYPDLPVDLVKWQYVCYRHIVEWVELLLFVVGGEVQQATVCSQFSSAGPSISRVCTQTIGDATAGAAAARRRFSFASQKSIRDSAALVAPRHCHVPTTGAACWHHRPAAADLMEDNINTDNMADCSHVPVPPPNQTNVDMILGAKWPPRKM

SEQ ID NO: 138171 - protein, 64 aa, Oryza sativa
  unsure (1)..(64): unsure at all Xaa locations
  Clone ID: PAT_MRT4530_39586C.1.pep
MWMFEASTFFVPGDXESMLFWTDQWIDGRSVASLAPDLLFAVPQCIXGPYTVASGLTNNSWVSD

SEQ ID NO: 138172 - protein, 1383 aa, Oryza sativa
  Clone ID: PAT_MRT4530_39587C.1.pep
MAATATDDGGCNGGAARLNRRQRRRRLRLRGGGARHDGGLRQRWRRDVTLLEGELTRKIANKEPQTLVHLLRIIDGFARGEEDSKRRQAIQAEYDKASIAAAQAQAQVQVAEPPPLAVRQPQTAIQGQPPRQGQAPMTWRKFRTDRAGKAVMAVEEVQALRKEFDAQQASNHQQPVRKKVRKDLYCAFHGRSSHTTEQCRNIRQRGNAQDTRPQQGATIEAPHEAAQEQTPPVEQRQDAQRRVMQVITRADPPGQLSKRQKKMQIRAVHSITSAGEGAPQYVNQLISFGPEDAEGVMFPHQDPLVFSAEIAGFEVRRILVDGGSSADVIFAEAYAKMGLPTQALTPAPASLRGFGGEAVQVLGQALLLIAFGLGENRREEQVLFDVVDIPYNYNAILGRATLNKFEAISHHNYLKLKMPGPAGVIVVKGLQSSAASKGDLAIINRVVHNVEAELHSRPKHVPKPTPHDKIVKVQIDHADPAKLVSLGDGMGEQEAEGILAVLKKNIDIFAWSPDEVGGVSADLIMHHLAVKPDAKPRKQKLHKMFADRQEAAKAEVQKLLRDGVIQEIDHPEWLANPVLIHMNPPDIPKTAFITPFGTFCHLRMPFGLRNAGATFARLVYKVLCNQLGRNVEAYVDDIVVKSRRAFDHVSDLQETFDNLRAAGIKLNPEKCVFGVRAGKLLGFLVSERGIEANPEKIDAIQQMKPTSSVHEVQKLAGRIAALSRFLSKAAERGLPFFKTLRGAGKFSWTPECQAAFAELKQYLQSPPALLKHYFQAHKVIVPSQYPLGEILRGKEISGRLSKWAAELSPFDLHFVARTTVKSQVLADFVAEWTPVFASEPEPVEQPWVMCSDGSWSHKGAGIVAILTSPNGVPVRYAARLQFNTTNNAAEYEAILLGLRKAKTLGVRRLLIRTDPKLVAGQVDKTFEAKEEGMKKYLEAVRTMEKYFIGITVEHLPRGQNEEADALAKSAACGGPHLPGIFFEVLHTPSLPVDSLTVLAIDQVKLGEDPNDWRTPFVKYLEAGWLPDDEAEAKRLQIRATKYKLVSGQLYRSGTLQPLLRCISFAEGEEMAREIHQGLCGAHQAARTVASKVFREGVYWPTVLKVCAEQIKKCESCQRHGRSQSAPHYNLQPIAPIWPFARWGLDIIGPFSKFVWKNIICRFGVPKEFITDNGKQFDSDKFREMCEGLNLEIRFASVAHPQSNGAAERTNGKILEALKKRLEGAAKGKWPEELLSVLWALRTTPTRPTKFSPFMLLYGDEAMTPAELGANSPRVMFSGGEEGHEVSLELLEGVRVEALEHMHKYATSTSATYNKKVRPTELMPGHLILRKKANLVAVGKLESKWEGQYLIKHKSRTGSFCLATLEGEEFDHSWNAASLKRFYV

SEQ ID NO: 138173 - protein, 182 aa, Oryza sativa
  Clone ID: PAT_MRT4530_39588C.1.pep
MADATAHGMVNAAASTVRLGAAASDEQGRGTSGRDIYYPTCNVFGSLRCRQTPTPRLAPLGRWAASSEPRPSTRGRAPRGCAHRRRPRQVAGSPSMPPPPALPRLRVVCTPPPPRGWASPPVDLVADPRTASARQGPPSICELQPAGLVPAASLAPPASLWLPPTQDQRPCRYLYMATDVAV

SEQ ID NO: 138174 - protein, 598 aa, Oryza sativa
  Clone ID: PAT_MRT4530_39589C.1.pep
MAAHDWSDGGDGGARLHGARALPATRGEGEGGGGGQALWQSSFHRPLGEILRGKEVTGRLSKWAAELSPFDLHFVARSAIKSQMLADFVAEWTPVLAPDPEPDDPFWVMCSDGSWSHKGASVAAVLFSPNGVPIRYTARLQFNTTNNAAEYEAVLLGLRKAKALGVRRLLIRTDSKLVAGHVDKSFEAKEDGMKSSEVMTIDQEKLGEDPYDWRTPFVKHLETGWLPVDKVEAKRLQLSATKYKMVSGEEMAKEIHQGLCGAHQAARTVASKVFRQGVYWPTVLKVCVEQIKKCESCQRYDRSQAAPQYDLQPIAPIWPFARWGLDIIGPFPVARNGYKFTIVAVEYFSRWIEAEPLGAITSAVVQKFVWKNIVCRFGVPKEFITDNGKQFDSGKFREMCEGLNLEIRFASVAHPQSNGVAERANGKILEALKKRLEGAAKGKWPEELLSVLWALRTTPTRPTKFSPFMLLYGDKAMTPAELGANSPRVMFSGGEEGREVSLELLEGVRVEALKHMHKYATSTSATYNKKVRPTELMPGHLVLRKKANPVAVGKLESKWEGPYIIKHKSRTGSFRLATLESEEFDHSWNAASLKRFYA

SEQ ID NO: 138175 - protein, 497 aa, Oryza sativa
  Clone ID: PAT_MRT4530_3958C.1.pep
MASIAMAASLRTFLRPHRCRLLLRQSRSLSASAAPAGAAAASTVIRRSVVEVLRERGLVEATTSESLGSASASPRELKAYCGFDPTAESLHLGNLLGLVVLSWFRRCGHNAVALVGGATGRVGDPSGKSAERPELDLAAVETNSNAIKSLIGQILDRAPEPSQHSQSGKNLNLEQNEQALVNSGEKMGSFQILDNYDWWKDITLLDFLKEVGRFARVGTMIAKESVKKRLMSEDGMSYTEFTYQLLQGYDFLYMFRNMGVNVQIGGSDQWGNITAGTELIRKILQVEGAHGLTFPLLLKSDGTKFGKTEDGAIWLSPKMLSPYKFYQYFFSVPDIDVIRFMKILTFMSLDEIQELEESMKKPGYVPNTIQRRLAEEVTRFVHGEEGLEEALKATEALRPGAQTQLDSQTIEGIADDVPSCFLPYGQVLKSPLVDLAVSTGLLASKSAVRRLIKQGGLYLNNIRIDSEDKLVEEGDVVDGKVLLLSAGKKNKMVVRIS

SEQ ID NO: 138176 - protein, 214 aa, Oryza sativa
  unsure (1)..(214): unsure at all Xaa locations
  Clone ID: PAT_MRT4530_39590C.1.pep
MRPFFVESSLRQAAATSSVVFADGKLRLHDWRRWAASSEPRPSTGGRAPRGCAHRRRPRQVAGSPSTPPPPALPRLRVVCTPPPPRGWASPPVDLVADPRTASTRQGPPSIYTSLFFDNRVLLQQFSLYAVLAPRPSRIGHVFTHHWSTTPSCPSTTTLWRPLRTMWLGYLDISTPDFGYIDHGYSTHGFIDHGSXGSFALATSTMAQRAIIRI

SEQ ID NO: 138177 - protein, 351 aa, Oryza sativa
  Clone ID: PAT_MRT4530_39591C.1.pep
MAKKKKVFIFRKAADVAMAVSAAYAPFAAAVSYHAAAAAPAALAFALGHGALLFMLPFSVYALAFLRAPRGLHQTPYPMLACAVAAPAALLAAVLAVPVLAADDVALAWAANASAAAALWWCLTNGGYTAVAFSRVDQYASFMDAVERTPEIAFPLVFDVPATAKAARRDAVRFAAALSATCAVAGGAAVGVLGGLSSAAAAIAAALCIFALPMCLLYVPENHMDPYPTIDGVLQRNPAAAWCTLLAPVALVLCGLVRASAATNAGDVGTFATVIAGAFWAMDAGAAVLLGRVIAGEITMARETGKHSIYRSSSSEIMSALLMVWVRYFVYLHVFHLIGCGGHLTWFNSSH

SEQ ID NO: 138178 - protein, 1279 aa, Oryza sativa
  unsure (1)..(1279): unsure at all Xaa locations
  Clone ID: PAT_MRT4530_39592C.1.pep
MAKAAAAARALQTRAEILSTSQLVVPQAAPLQPTATPTALAAVQAQVSPDPEAQAEADMEAMRQNMTRLQDMLRQMQEQQQAYEAARWTKVTSAPILQYSAGYVPPQVHPQVTTQPFPPQVAQAPMYFAKQQLAVAAHPAPHVQQPVAAQVHHQPLGQAPQTVAEGVSALQAQLQAFLQQLNQPHCISSTNPSAHPEGNTSQGAPNWLPPIQPSLGVSPWNQGPQFNFVNAAQALTVRRQAPTPGFGTNQVSIQAAMTWSQPIFDPSMAAQQVSPVGAGQSNATAQPHAQAAISPFATPYPQQGAVNRTGGEKGLLLSGGIKTRPIPPQFKFPPVPRYSGETDPKEFLSIYESAIEAAHGDENTKAKVIHLALDGIARSWYFNLPANSIYSWEQLRDVFVLNFRGTYEEPKTQQHLLGIRQRQGESIREYMRRFSQAWCQVQDITEASVINAASAGLLEGELTRKITNKEPQTLEHLLRIIDGFARGEENSKRRQAIQAEYDKASIAAAQAQAQVQVAEPPPPFIRQSQPAIQGQPPRQGQAPLTWRKFRTDRAGKAVMAIEEVQALRKEFDAQQASNHQQPARKKRRVIQVITRADPPSQLSKRQKKMQIRMIHSITLAGEGAPQYLNQLISFGPEDAEGVMFPHQDPLVISAEIAGFEVRRILVDGGSSADVIFAEAYAKMGFPTQALTPAPASLRGFGGEAVQVLGQALLLIAFGSGENRREEQILFDVVDILYNYNAIFSRATLNKFEAISHHNYLKLKMPGPAGVIVVKGLQPSAASKGDLAIINRAVHSVETEPHERPKHTPKPTPHGKITKVQIDDADPTKFVSLGGDIGEEEVESILEVLKKNIDIFAWSPDEVGGVPVDLIMHHLAVKPDIKPRKRKLRTMSADRQEAAKAEVQKLLRAGVIQEIDHPEWLANLVLVRKSNGKWRIMPFGLRNTGETFARLVYKVLGRQLGRNVEAYVDDIVVKSRKAFDHAIDLQETFDNLRAAGIRLNPEKXELLLYLAASPVAVSAALVQEIEFRQKPVYFVSEALQGAKTRXHKVIVPSQYPLGEILRGKEVTGRLSKWAAELSPFDLHFVARSAIKSQVLADFVAEWTAVMCSDGSWSHKGAGVAAVLFSPNGVPIRYAARLQFDTTNNAAEYEAVLLGLRKAKALGIRRLLIRTDSKLVTSHVDKSFEAKEEGMKRYLEAVQSMEKCFTGITVEHLPRDQNEEADALAKSAACGGPHSPGIFFEVLHAPSVSMDSSEVMAIDQKKLGEDPYDWRTPFVKHLETG

SEQ ID NO: 138179 - protein, 307 aa, Oryza sativa
  Clone ID: PAT_MRT4530_39593C.1.pep
MADRLELQGRHGKSRVRVSRVWRRPAAAGGHVIVEWNVAVSVVSDCLPSYTSDDNSAIVATDSIKNTVYVKAKECTEIVSMEEFAVILGRHFTSLYPQVSEATVTIAERPWERVVVDGKPHSHGFKLGVEKHVTEVIVKKSGNLLINSGIQGYSLLKTTQSGFEKFVRDRYTLLPDTRERIVATEVTAWWRYPFEHVSQIPSKSFCFTQRYQDVKKVLADTFFGPPDVGVYSPSVQNTLYLMAKEVLNRFPDIASVQLRMPNLHFIPVNLGNKENPGLVKFADDVYLPTDEPHGTIEATVSRPKSKL

SEQ ID NO: 138180 - protein, 130 aa, Oryza sativa
  Clone ID: PAT_MRT4530_39594C.1.pep
KIFSKRPQKIPPRNGEEEEPGENPPREISYRENHAGRGTPGTPEKGGGAPLRRGGGPWGGERFWPPSFFFCRKGLGRYSTAGWAARFSRFRPQEFGHFSRPQPPQRWGGRRERSSLGLWLRAEFCSPGDP

SEQ ID NO: 138181 - protein, 619 aa, Oryza sativa
  unsure (1)..(619): unsure at all Xaa locations
  Clone ID: PAT_MRT4530_39595C.1.pep
MDEDEVSLEEMEEYNMVASKLFRSEEDGYKFYNEYARCKGFSIRRDKVKRFSGTELVFWRRFYCSCEGYRTLKNFERTNRKREPRALTRCGCKAMLEIELNGETGMWFVSGFEARHSHRLANLDLVAFLRSHREVNDAQKAEAVELGVGGLRTCQIMEVMENNNGGYDKVGFVTRDLYNFFARYKKKRIEGRDADLVVNHLMAQQEQDPDFFFRYSIDEKGRLRNLFWADSQSQLDYEAFSDVVIFDSTYRVNRYNLPFVPFVGANHHRSTVIFGCGILSNESVSSYVWLLQTLLEAMHQKHPKSLITDGDASMAKAIRKVMPNTDHRLCSWHIEENMKRHLRRQKLADFKKFLYDAMDVDDFERCWVEYKAKYGFNENNXMDKHDNVQDITRDSEESKQSESCIPTDKGLQRRNQXCASKEFNIQCSLTDLTSMAEFKCTAEDEETIKSIMSAPESQLVVHIDDVSISQKTMQILTNPVTESSTSYLDDHIFLPMNIKEKHRYLAVIHAKRRIIQVLDSMANSSTQRKELRKVLLEPEEKHIATQWPDHHITSWEVTVIQNLPLQGDLVSCGLFVLKNMEHWQGNRLSKEYTHEDIKYFRRKLAAILGGAQKKDKKIN

SEQ ID NO: 138182 - protein, 152 aa, Oryza sativa
  unsure (1)..(152): unsure at all Xaa locations
  Clone ID: PAT_MRT4530_39596C.1.pep
IPPIVFFTVCLFLLCNGSLTPTHAHPPPPRTHLHIAPPPLLRSPRAHLPTPTTSPRALRXTRXAKRHFWTPHTLRARSCTRSSKSPRPTTPXKLPSPELXPPTLARHTSPHSLPRAPTPRLAPRSPPLIPTPPTTXPSPTLTPPNLTPCGCS

SEQ ID NO: 138183 - protein, 181 aa, Oryza sativa
  unsure (1)..(181): unsure at all Xaa locations
  Clone ID: PAT_MRT4530_39597C.1.pep
PRRRSARRTAASPSXPELGERDQRWRNGIHYISLSRDRSSKSKKRPSTTKTGAKLLITKFGNSTIGGXVKLKRNPRWRSFRKQSKNRLKSESXRSGSAECESDKVSRLSRFRQYDSFEXKSAAKTYGILEFVRDKSRVRHXHILIKSTGTLTNLKAXFWTSTGVKQISHASCFSHQQKQVP

SEQ ID NO: 138184 - protein, 474 aa, Oryza sativa
  Clone ID: PAT_MRT4530_39598C.1.pep
MRLLPYAPSPRPPQRSLATRRTKPGPPCALPFPDALRAAAAATAAAMSISLSLLTGDAVGAERPRGPELCRDGAAAETKEEVRRSEVVTNEQLVEEAWEVVNEGFLPDAGSRPWSPEMWMKKKQDIVQTSIRSRSRAHDIIQKMLANLGDPYTRFLTPSEFSKMSKYDMTGIGLNLREIPDGNGSSKLMVLGLILDGPAHSAGVRQGDELLSVNGIDVMGKSAFDVSSMLQGPKDTFVTIKVKHGNCGPVEPLKVQRQLVARTPVFYRLEKRENEDSAIGYIHIKEFNAVAKKDLVSALKRLQNSGASYFVLDLRDNLGGLVQAGIETAKLFLNKGDTLKVTVHGYYIKMKVIYTAGRDRQVQNTIVAEREPLVTTPLMVLVNNRTASASEIVASALHDNCKAVLVGEKTFGKGLIQSVFELHDGSGIVVTVGKYVTPNHKDINGNGIEPDYRRIPDFNEATEYLSRCRSKELS

SEQ ID NO: 138185 - protein, 91 aa, Oryza sativa
  Clone ID: PAT_MRT4530_39599C.1.pep
MGLQEDFEQYAEKAKTLPESTSNENKLILYGLYKQATVGDVNTARPGIFAQRDRAKWDAWKAVEGKSKEEAMSDYITKVKQLLEEAAAAAS

SEQ ID NO: 138186 - protein, 226 aa, Oryza sativa
  Clone ID: PAT_MRT4530_3959C.1.pep
MFAPLLFPNPPKSKPLLLLSNAINHREGEKKWKREPPQPHAMQQQPMPMPAQAPPTAGITTEQIQKYLDENKQLILAILENQNLGKLAECAQYQAQLQKNLLYLAAIADTQPQTTISRPQMVPHGASPGLGGQYMSQVPMFPPRTPLTPQQMQEQQLQQQQAQLLSFGGQMVMRPGVVNGIPQLLQGEMHRGADHQNAGGATSEPSESHRSTGTENDGGSDFGDQS

SEQ ID NO: 138187 - protein, 296 aa, Oryza sativa
  unsure (1)..(296): unsure at all Xaa locations
  Clone ID: PAT_MRT4530_395C.1.pep
EEAENNTTIIFSPRSSYSSLRATAALSLCVPAEPLPPSIHPPALAPPPPPPKLPPSLSLPPSPSLLISSPCVLPPPPSQVXSLDPPPPPLPQSPLLLSLSPPPPPLPLPPIPPPPLXRRSPPPVPPPASPPVDGSPPSSAGHCHSRWYHHRASPPLLRPPASPQASPPAIIKFHRAAPPCPRPLHIHDTGLHLPALDCRLPLXPPPHCLPTPPSDASLTSIINRLRPPTLLEDHLPPPPLPPQQPPPSRCPRHRLPSRPPXDSQPLPPLFPQRLPPPPHQSPPPQLPHPSHVSLSW

SEQ ID NO: 138188 - protein, 96 aa, Oryza sativa
  unsure (1)..(96): unsure at all Xaa locations
  Clone ID: PAT_MRT4530_39600C.1.pep
MTRSAREVGKPVCTGEGRRGKVDGGRKVRRRTRGCGGGGSGGNRRRRPRRGGRNGRRHCGGRRSRRLPFLRIGHRRPQPPXASAATGHPPSRLLRR

SEQ ID NO: 138189 - protein, 206 aa, Oryza sativa
  Clone ID: PAT_MRT4530_39602C.1.pep
MSKRQFGEMDGGIDTARVLMLLSRRRRQHGDVGHARAARVFECRTCGRRFPTFQALGGHRASHKRPRHGAERAPRPAGDDDVGAGAGAALRLVGAASSLSTDEARAGGGGRRTRGAGAAHGCPVCGLEFAVGQALGGHMRRHRAAAGDVAAPRVKTDDVVVGDECTGGICLDLNLTPSENCDKCRHAQLGVAVNSVQRTILLDRPL

SEQ ID NO: 138190 - protein, 245 aa, Oryza sativa
  Clone ID: PAT_MRT4530_39603C.1.pep
CRFFEYETDEAGRLKRLFWSDPQSRIDYDAFGDVFVFNSTYRVNKYNLPFIPFVGVNHHGSTVIFACAIVAPGLLATYEWILKQFLDCMCQKHPKGLITDGDNAMRRAIASVMPHSEHRLCTWHIEQNIVRHLSPAMLSDFRSLHSTYGPEEFEKKWVEFKVVHKVGEDNQWLMRMYNLRKKWAAAYTKGMFFLGMKSNQCSESLNSKLHRCLDRKFSLVLLVEHFEHCLSCMRHREAELDSKAS

SEQ ID NO: 138191 - protein, 196 aa, Oryza sativa
  unsure (1)..(196): unsure at all Xaa locations
  Clone ID: PAT_MRT4530_39604C.1.pep
MSQGQPRRPPPDGSGARPVMYGDVFDVSGELAGQPVAPRDAAKLQSAEEAVLGEAQKGGPAAAMQSAAAINARAGHVGRAQVTGAIADEGVAVAVAETELPGRRVVTESVAGQVVARLATPPRVVATQPSGSLDKDAVTIGRALEWRPRPPRRRGXRGASCRRTRRRRGRTRRGCRRPRCGTGRTWRRRRAAWRTR

SEQ ID NO: 138192 - protein, 170 aa, Oryza sativa
  Clone ID: PAT_MRT4530_39605C.1.pep
QDYEYTASGSSRYSSLGDYPSSSYRSDPASFPSRNRRYDEYRPDLVRYPDSRSRQEEIVRIERYPEPRFAHEPRQDTGRHLDLGYVQERNSNIERSAQVAFSSREGGYLSASRYNTNIVPEFSSRSSAEYSTARQQVRFDPFTGEPYKFDPYTGEPIRPESNPRRSGSLY

SEQ ID NO: 138193 - protein, 276 aa, Oryza sativa
  Clone ID: PAT_MRT4530_39606C.1.pep
MAAAGDHRGAGAASCRPRRVAAFGHAEWPPRGARPSAARALGANEGYTSCGPVVEMSWHRAGVLLLGAQSCLPVLGVPAVGGVGSMAGSINRRVILTGSPERTSLAVTAGGDSFSAACQNAALLAIGTLHQRYPDELQHSPYRYHPRRGGARDYATFRDASSEDDATIMHLARMVEAYDAARIDFHHMVRRGMVENNMKILELRQENLQLKKDLDAVEAQLHQLKIAQGESLAWTCFVETPRAEPAPVVPQEGEASGVGSTEDALLLTFRPGPSQR

SEQ ID NO: 138194 - protein, 812 aa, Oryza sativa
  unsure (1)..(812): unsure at all Xaa locations
  Clone ID: PAT_MRT4530_39607C.1.pep
MSWHRAGVLLLGAQSCLPVPGVPAVGGIGSVLLSMARMGWKLCHVFRLYTVVMAGSISRRGLDLTGFVLELRGMCVVLGYPHGVDYQGRPLPEQEGDDAEPHAAWERTSLAVTAGGDSFSAACQNAALLAIGTLHQRYPDELQHSPYRYHPRRGGARDYATFRDASSEDDATIMHLARMVEAYDAARIDFHHMVRRGMVENNMKILELRQENLQLKKDLDAVEAQLHQLKIAQGEVCRPKRRRVCRSQKITSRKSTSRPELVRQSLAWTCFVETPRAEPAPVVPQEGEASGVGSTEDALLLTFRPGPSQRRSAATGDGNQPEGSNHNNHGSPPPPPPPPPPPPPDTNAILTQILAQQANMMAAFLHHIQNPPQHNAPPPPRQHSKLAEFLRIRPPTFSSSNNPVDALDWLHAVGKKLDTVQCSDEEKVIFAAHQLQGPASQWWDHFQATQPEGQPITWARFTAAFRRTHVPAGVMALKKREFRELKQGNRSMMEYLHEFNNLARYAPEDVREDEEKKEKFLAGMDPELSVRLVSGDYSDFQRLVDKSIHLEAKHKELESHKRRLANFRNQQGANQRVRYTNPYPGGSSSQQQQPRSAPRPQFVVRVPQPQQXQSQQGTRAPRPPTPAAQSGQGRRDVQGPQRLCFNCFEPGHFADKCPKPRRQQGQAPPRSNNGGKDVIRGRVNHVTAEDVLTTPDVIVGTFLIHSIPATILFDSGASHSFISVPFVGRNQLGVERLRNPLLITTPGGVMTAKYYSPAVPIEIQGIPFPSDLILLDTKNLDVILGMNWLAQFQGVVDCARRTVTLYRGPKQP

SEQ ID NO: 138195 - protein, 58 aa, Oryza sativa
  Clone ID: PAT_MRT4530_39608C.1.pep
MASHDGNGGSLGGFVPGDQANSAPELHQARQGGRSLRYEDDDDLAFNSCTNSRRSGCR

SEQ ID NO: 138196 - protein, 455 aa, Oryza sativa
  Clone ID: PAT_MRT4530_39609C.1.pep
MDISRTNEGYTSCGSVVEMSWHRAGVLLLGAQSCLPVPGVPAVGGIGSMAGSISRRGLDLTGFVLELRGMCVVLGYPHGVDYQGRPLPEQEGDDAEPHAAWEVTAVILTGSPERTSLAVTAGGDSFSAACQNAALLAIGTLHQRYPDELQHLSRPGKLPFPERYRTRGRGRLTAGPHLAAAGRARRRPRRHSRREAAHPRPDGRRRRPTARRSGGRERGGKREAKRRSLAHPGTTRTAETTTGAEESGGAVRDGEDDGAPAVGGRSGGADEVDDDAAKPMEVTPRQEEHSPYRYHPRRGGARDYATFRDASSEDDATIMHLARMVEAYDAARIDFHHMVRRGMVENNMKILELRQENLQLKKDLDAVEAQLHQLKIAQGEVCRPKRRRVCRSQKITSRKSTSRPELVRQSLAWTCFVETPRAEPAPVVPQEGEASGVGSTEDALLLTFRPGPSQR

SEQ ID NO: 138197 - protein, 95 aa, Oryza sativa
  Clone ID: PAT_MRT4530_3960C.1.pep
SPSPPRAASAPPPPTLSLSPSPSPSTSSPPPPPPPSPAGRARPPKAAAAAARPWRRRAPAAATPRGTRTPACTPARCTSPPRRCPPPRHHLVSSP

SEQ ID NO: 138198 - protein, 943 aa, Oryza sativa
  Clone ID: PAT_MRT4530_39610C.1.pep
MSWHRAGVLLLGAQSCLPVPGVPAMAGSVSRRGLDLTGFVLELRGMCVVLGYSHGVDYQGRTLPEQEGDDAEPHAAWEVTVVILTGSPERTSLAVTAGGDSFSAACQSAALLAIGTLHQRYPDELQHSPYRYHPRRGGARDYATFRDASSEDDTTIMHLARMVEAYDTARIDFHQMVRRGMVEDNLKILELRQENLQLKKDLDAVEAQLHQLKIAQEEVCRPKRRCVCRSQKITARKSTSRPELVRQSLAWTCFVETPRAEPAPVVPQEGEASGVSSTEDALLLTFRPGPSQRRNAATSDGNQPEGSNHNNHGSPPPPPPPPPPPPPDTNAILTQILAQQANMMAAFLHHIQNPPQHNAPPPPPQHSKLAEFLRIRPPTFSSSNNPVDALDWLHAVGKKLDTVQCSDEEKVIFAAHQLQGPASLWWDHFQATQPVGQPITWARFTAAFRRTHVPAGVMALKKREFRELKQGNRSVMEYLHEFNNLAQYAPEDVREDEEKQEKFLAGMDPELSVCLVSGDYPDFQRLVDKSIRLEAKHKELESHKRRLANFRNQQGANQRIRYTNPYPGGSSSQQQQPRSAPRPQFVVRVPQPQQQQSQQGTRAPRPPTPAAQSGQGRRDVQGPQPLCFNCFEPGHFADKCPKPRRQQGQVPPRSNNGGKDVIWGRVNHVTAEDVLTTPDVIVGTFLIHSIPATILFDSGASHSFISVPFMGRNQLGVERLRNPLLITTPGGVMTANVSRQSTNDRPDFSNLSKYQNGNGMKLGWISSPDFQKPKVARFIPVKATYGGNKLAELYFARILRSAAVVAPDHLSPRRHLLRLRRIPGDLVHPSVSLADRRSTVDPVHPSRAAAFLRSGRRFRLRRRPGVSRGPPLLFPLPFPSLGRRSAVPMDAAGDHRGAGAPPPAAAPVWPSSGAPCGCRVGPGCQPPAPSGAADAWDPRRRPV

SEQ ID NO: 138199 - protein, 482 aa, Oryza sativa
  Clone ID: PAT_MRT4530_39611C.1.pep
MGEAAAVSGDAGARARVRVLAVSRVAPSPAPVERERVGLSFFDTPWVVLPPIQRVFLYEMSAAAAADGGGGDGFAAAVERLKGSLAATLVLYLPLAGKLVYVEETEDVVVDCAAADDADAGVAFVEAEAEDAAAEDMDVLRLAGDEAHDVAAFLALVPELDTRALPAPVLSVQATRLGGGAGLALGLSVHHAVADGRAVWQFMEAWSSAARVGSPVTKSLGAPHYRREAAIPQPDGGELARHMLKLVAPKLPAVASGDQQDFSQRFRLARRTFHLGADAIRALKRRIDELASAEEAADGGGAAKPVSTFVALAAMGWAAFVRSKALADGDDTYLIFLADLRARLDPAVGEGYLGNCVRMCLARCANAAELRGERGLLRAARAVQAAVAEMEAAPLAGTADGSAIARVMQIPFSRMANVAASPRFGAYGAADFGFGRPARVELVSMNHDGEMVLVGGRRDGEVQLSVSIDPAHVDAFKAQVLG

SEQ ID NO: 138200 - protein, 594 aa, Oryza sativa
  unsure (1)..(594): unsure at all Xaa locations
  Clone ID: PAT_MRT4530_39612C.1.pep
RRRRRRIRRIPPSPRALKWGGLFPAIPSPVSPTFPSLSPSDSLGFIPEILAGVINGAEISAPVSSLSGRSLSLPTLYNCSPCLSPPFPPLAARSPRRIRARAXLYLSLRRRRRAPVRRRRRSGLPPVSASPPSASPRRRRPRPPLHFARRPPEHRRPRRPEPRRRFPPLRPPFPSSPSTRGEPRTASFASLASPLSRPPLRRAVGRRRXPSGRGRAVSRRPCRRGRLRARPAAARWXPAVSRPRPRVRLTRGTHSAGRRQPRAPGPPWTERLTRGPHSRGPGXNEGYTSCGPVVEMSWQRVGALLLGAQSCLPVPGVPAIGGIGSMAGSVTRRGLDMTGFVLELRGMCVVLGYPHGVDYQARPLPDQEGDDAEPHAGWEVTAVILSGSPERTSLAVTAGGDSFPAACQNAALLAIGTLHQRYPDELQHSPYRYHPRRGGACDYATFRDASSEDDATIVHLARMVEAYDAARIDFHQMVRRGMVENNMKILELHQENLQLKKDLDAVEAQLHQLKIAQGEICRPKRRRVCRSQKITARKSTSRPELVRQSLAWTCFVETPRAEPAPVVPQEGEASGVGSTEGALLLTFRPGPSQR

SEQ ID NO: 138201 - protein, 121 aa, Oryza sativa
  Clone ID: PAT_MRT4530_39613C.1.pep
MARLEEKREGSRWGRRRRVRVGMGAGAPVEGSARGPAVGSTGGSREAPVPRVPLLHGRAIVQANLLLCLPICSFARSVIPLLVGLSLDVSTHMHCLLLPLASRSPHISPLADCLGNQQENA

SEQ ID NO: 138202 - protein, 305 aa, Oryza sativa
  Clone ID: PAT_MRT4530_39614C.1.pep
MVMPLSLFGGSVWGFQMVTTRRNAATSDGNQPEGSNHNNHGSPPPPPPPPPPPPPDTNAILTQILAQQANMMAAFLHHIQNPPQHNAPPPPPQHSKLAEFLRIRPPTFSSSNNPVDALDWLHAVGKKLDTVQCSDEEKVIFAAHQLQGPASLWWDHFQATQPVGQPITWARFTAAFRRTHVPAGVMALKKREFRELKQGNRSVMEYLHEFNNLARYAPEDVREDEEKQEKFLAGMDPELSVRLVSGDYPDFQRLVDKSIRLEAKHKELESHKRRLANFRNQQGANQRIRYTNPYPGGSSSQQQQQ

SEQ ID NO: 138203 - protein, 484 aa, Oryza sativa
  unsure (1)..(484): unsure at all Xaa locations
  Clone ID: PAT_MRT4530_39615C.1.pep
RAGPTWQPRGXAPEGGLAGAADGSXRTRAPMVAAGDQRRGGVAPEREEGRGKRRGRSTAHPETAKAAETADGAEEDGGAARDDEGDGAPAVGGRSGAADGVGNHSAKRTEVSPKSIWDATWGPAVSRPRPRVRLTRGTHGAGRRKPRAPGPPWTVRLPRGPHSRGPDAAASEDPLFVEVEADAGLGVHGYTDGDGRSRGSMDISRTNEGYTSCGPMAGSVTRRGLSMTGFVLELRGMCVVLGYPNGVDYQARPLPEQEGDDAEPHAASEVTAVILSGSPEQTSLAVTAGGDSFSAACQNAALLAIGTLHQRYPDELQHSPYRYHPRRGGARDYATFRDASSEDDATIVHLARMVEAYDAARIDFHQMVRRGMVENNMKILELRQENLQLKKDLDAVEAQLHQLKIAQGEVCRPKRRRVCRSQKITARKSTSRPELVRQSLAWTCFVETPRAEPAPVVPQEGEASGVGSTEDALLLTFRPGPSQR

SEQ ID NO: 138204 - protein, 1441 aa, Oryza sativa
  Clone ID: PAT_MRT4530_39616C.1.pep
MFRRNNRCFVAYEFSICIPQCRARQPTLTTRLVDALDTDIVYAIHPNLWTLRYSTFRRNNRCFVAYEFSICIPQCRARLPTLTTRLVDALDTDIVYAIHPNLWTLRYSTFRRNNRCFMAYEFSICIPQCRARQPTLTARLVDGLDTDIVISRKISSVPPLQIQSLKGELWTLRYSMFRRNNRCFVAYEFSICIPQCRARQPTLTTRLVDALDTDIVYAIHSNVLCAVHILTTSLKTSCGPSDIRRFAETTAASWPMCRARQPTLTARLVDALDTDILWTIRYSMFRRTNRYFVAYETTAASWPMTLQLRKIRSSWKLKPAFGKASKARQMKATRAAAGSRDVMAQGRCPAARGSKRSSLKMKALVSSSCLLSSACGRRPSLPLFLMAGSINRRGLDLTGFVLELRGMCVVLGYPHGVDYQGRQLPEQEGDDAELHAAWEVTAVILTGSPERTSLTVTAGGDSFFAACQNAALLAIGTLHQRYPDELQHSPYRYHPRRGGARDYATFRDASSEDDTTIMHLARMVEAYDAARIDFHQMVRRGMVENNMKILELRQENLQLKKDLDAVEAQLHQLKIAQGEVCRPKRRRVCRSQKITTRKSTSRPELVRQSLAWTCFVETPRAEPAPVVPQEGEASGVGSTEDALLLTFRPGPSQRRNANTGDGNQPEGSNHNNHGSPPLPPPPPPPPPPDTNAILTQILAQQANMMAAFLHHIQHPPQHNAPPPPPQHSKLAEFLRIRPPTFSSSNNPVDALDWLHAVGKKLDTVQCSDEEKVIFAAHQLQGPASLWWDHFQATLPEGQPITWARFTAAFRRTHVPAGVMALKKREFRELKQGNRFVMEYLHEFNNLARYAPEDVREDEEKQEKFLAGMDPELSVRLVSGDYPDFQRLVDKSIRLEAKHKELESHKRRLASFRNQQGANQRVRYTNPYPGGSSSQQQQPRSAPRPQFVVRVPQPQQQQSQQGTCAPRPPTPAAQLGQGRRDVQGPQRLCFNCFEPGHFADKYPKPRRQQGQAPPRSNNGGKDVIRGRVNHVTAEDVLTTPDVIVGTFLIHSIPATILFDSGASNSFISVPFVGRNQLGVERLRNPLLITTPGGVMTANRLCRLDRAPAGRAVASSSVAATSSTPACPPFRAVTIGGALPPSPFSFLLAGHLQPHLPPRPCTLRPRRHLSRRRSRLLFPGFASVSRGNHRRRVLAGVQWRRHHFSASGRLCRVPGAPADVAVSSVDVAVPSSLPARPRRRPNFAGTPSSPRRPLLPPRRLATPLHHHLHQHRSGVFHAVPSSAQPLLPAIIVSSSSPIVLVVDVPSVARLVVSRRRLRRRHRSGVFLAVLVPVQPLPAVLVASSPVPVVVVVVVLSSFPVIVAFVPPSSRSRPSSASVKQAAAAPSSSSSSAPRRQASCRPRLAFAQGSPPKPSPRRSSPLCPSVSAAPVRRCRSHASSRGGL

SEQ ID NO: 138205 - protein, 158 aa, Oryza sativa
  Clone ID: PAT_MRT4530_39617C.1.pep
HGGASTTDGVTGVLATQLICRCYAPRQHGTTMTMRLGARSVAASSSAANISALGHRHTIFSSSPYAAASAVTRVRGVAWGHAPTQCVTCPVLRPTPAKFRRKTCSFIWLRGFQSGTTGVCVAMNLQCGCSGQNATSVHCDRLTAAICSSSEDSDWVQL

SEQ ID NO: 138206 - protein, 90 aa, Oryza sativa
  unsure (1)..(90): unsure at all Xaa locations
  Clone ID: PAT_MRT4530_39618C.1.pep
SAAAAAAAAAAASSSPCPPLSSSACRRRGSPSPAAWRRRAPTGGGTSSXPSYPAPCRRRRPSPPTPRRCSPTAAWWTRRSRSHRPRTRRR

SEQ ID NO: 138207 - protein, 152 aa, Oryza sativa
  Clone ID: PAT_MRT4530_39619C.1.pep
MPCCCCGMLPSCCCAMLLCRCHLPPAGFPCRCGRQGGSYFWLRLLACVDVGEETDGQPHAEINFCSADGLRGPICDNISSLHSRASLDLLVKIDFYNRDGRSTDCVNSEGVKIEYADQASQEETKETPQVPDIIPPCSLKILVFKYGIKNSE

SEQ ID NO: 138208 - protein, 109 aa, Oryza sativa
  Clone ID: PAT_MRT4530_3961C.1.pep
APNPPPARATSLTTTGGNAAPLRREYDSVITPHSHGVRSSALHTSSSRGDTLHPASRGGAALQDDTMDTPARLLPALLHGYGRMTVHLGQCTPGLPLWHHIVLVRLNYS

SEQ ID NO: 138209 - protein, 180 aa, Oryza sativa
  Clone ID: PAT_MRT4530_39620C.1.pep
MAIVTVTGGVLGPVFVLLSRIRPVVDFFRRLCDCLRHPQRRPARPAPRWSVLLTVGLLRHLCPHHNRHPGVPFFSSEPLLHTPHWSTIVATPSCLWCLPSRASSSVMLHRIAVSRHPPCRAVGDRARHVALAPRPQCALSASTGGDIALPSFFFSFDRCMEARGLSAMDSIEMTFGEYIF

SEQ ID NO: 138210 - protein, 392 aa, Oryza sativa
  Clone ID: PAT_MRT4530_39621C.1.pep
MGRGGGEGSEEREREREWEEAAEAVAYDSCTWPPPVVAVCGPGNSGKSAFSRLLLNTLVGRYKKVAYLDTDVGQPEFTPPGFVSIHVLEEQAEDFKMLYLRTPKRCFFFGDCSAKKNPKLLLSYIFSLYDYFLKELYRFEDTDNPNKSAIPLVINTSGWVKGTGLHMLTEMLKYASPTHVIRLRTSVEGKNLPAGMFWLDEPEGDPAINLVEIRAAQHSPRHINGYKAFECSLLIKKEARIIRDLRIIAYFRQCLPMEFPVFSYNDLIQGFASIEPFQLPLSKLQVIDLHSQVSDYTVHHFLKGTIVGIATSASVALSNQCSTPCCIGLGFIKAIDVSRDCIHLITPVSRQLLENADIFFCSSFTVPTCLLQVVSDTASDIADRLRELNCHG

SEQ ID NO: 138211 - protein, 55 aa, Oryza sativa
  Clone ID: PAT_MRT4530_39622C.1.pep
MRTRGWWRRRRQVRADPAAAAPSAPSRLPPAADPAAVAVSAARSVGGGDHIHRNT

SEQ ID NO: 138212 - protein, 695 aa, Oryza sativa
  Clone ID: PAT_MRT4530_39623C.1.pep
MAVEEVQALRKEFDAQQASNHQQPAHKKGTTVEASREAIQEQTPPAEQRQDVQRRIIQVITRADPPSQLSKRQKKMQIQGVMFPHQDPLVISAEIAGFEVRRILVDGGSSADVIFAEAYAKMGLPTQALTLAPASLRGFGGEAVQVLGQTLLLIAFGSGENRREEQILFDVVDIPYNYDAIFGRATLNKFEAISHHNYLKLKMPGPTGVIVVKGLHPSAASKGDLAIISKAVHSVETEPHERPKHTPKPIPHGKITKVQIDDADPTKLVSLGGDMGEEEVESILEVLKKNINIFAWSPDEIHMNPLDIPKTFFITPFGTFCHLRMPFGLRNAGATFARLVYKVLGKQLGRNVEAYVDDIVVKSRKAFDHAIDLQKTFDSLRTAGIRLNPEKCIFGVRAGKLLGFLVSERGIEANPEKIDAIQQMKPPSSVHEVQKLVGRIAALNRFLSKAAERGLPFFKTLRGTGKFNWTPECQAAFNELKQYLQSPPALISPPPGSELLLYLAASPVAVSAALVQETEFGQKPVYFVSEALQGAKTRYIEMEKLAYALVMASRKLKHYFQAHKVIVPSQYPLGKILRGKEVTGRLSKWAAELSPFDLHFVARSAIKSQVLADFVAEWTPVLVPDPELAEQFWVMCSDGSWSHKGAGIAAVLFSPKDPSMPQISRFDFASSQKGAECMIFGEPPVQVCKKASSKV

SEQ ID NO: 138213 - protein, 292 aa, Oryza sativa
  unsure (1)..(292): unsure at all Xaa locations
  Clone ID: PAT_MRT4530_39624C.1.pep
FTFATMDRSWMYGTVRRHSKEYRSGISNFINAAEEDMKRRNCDYTCCPCTYCRNEIMLDSGFDVHTHLIRRXFMDDYTCWVKNGSXEQESVDDVAAADRSGAQNXEDEDEHDMFVPSPLGGEMVGADHDLQXDMLRYVEDLAYNERDSIKFTRLVSDSETPLYTGXKSKHTKLSATVDLLKLKISSGWTYKSFTDFLRILKAMLPKENTLSETTYEAQQVLCQLGLEVCRIHTCPNDSIMYHKQXADLDACLVRKVSGHKQIHEADEGGLSSQRASSRGISTLPLLKPMQTI

SEQ ID NO: 138214 - protein, 413 aa, Oryza sativa
  unsure (1)..(413): unsure at all Xaa locations
  Clone ID: PAT_MRT4530_39625C.1.pep
MEAMRRKMTRLQDMLRQMQEQQQAYEAARRTKATSAPILQYXATQAPVYFAGQHQPPGQAPQSVVEGALALQAQLQAFLQQLNQPHCISSTTPSARPEGSTTQGTLNWLSPIQPGLGVSPWNQGPQFDXNAAQAPTARQQAPTPGFGTNQAPIQAAMTWSQPIFDPSMVAQQVPPVGAGQPNAMAQSHAQVAISPFATPYPQQGAVNRAGGEKGLPLSGGIKTRPIPPQFKFPPVQRYSGETDPKEFLSIYESAIEAAHGDENTKAKIIHLALDGIARSWYFNLPTNSIYSWEQLRDVFVLNFRGTYEEPKTQQHLLGIRQRPEESIREYMRRFSQARCQVQDLTEASVINAASAGPLGANVEIHTPEHSFPRPSWGNHRLRVHGGEEYGAEELGAGLKPGSPTRPVKDGDPN

SEQ ID NO: 138215 - protein, 1991 aa, Oryza sativa
  unsure (1)..(1991): unsure at all Xaa locations
  Clone ID: PAT_MRT4530_39626C.1.pep
HYRILKLACLQVDSRGSPKRRKRATIPHTLHGLGRSSNLTLTRKGLVGGWHEALRPNLPKPVAKAMEQERREAKSRTSALPGQRRLRRRVQGEDYLPKEDDFAMASSPPRGPKKPFRPIKPRGYRAGDRQTAHQRPMSPYNIMYPCKCPFRKGNYLSFRQQLAPTVGTSEXKPXERMPPKRVVKEKVARRKESDAGPDMAAEDGAEPSAPVAEDGGGPAPSQPPLAPATSVQVPNAADVAKAAVAARALQTRAEILSTSRLVVPQAAPSQPAAAPTALAVVQAQVSPDPETQAEADMEAMRQKMTRLQDMLRQMQEQQQAYEAARRTKATSAPILQYSVGFVPPQVHPQVTTQPIPPQAAQVPVYFAGQQSAAAVHPAPHVQLQAQPVAAQVHHQPPGQAPQTMAEGASALQAQLQAFLQQLNQPHCISSTTPSAHPEGNTSQGAPNWLPPIQPGLGVSPWNQGPQSDFVNAAQAPTVRQQAPTPGFGTNQAPIQAATTWSQPIFDLSMAAQQVPPVGAGQSNARAQPHAQAAILPFATPYPPQSAVNRAGGEKGQPLSGGIKTRPIPPQFKFPPVPRYSGETDPKEFLSIYESVIEAAHGDENTKAKVIHLALDGIARSWYFNLPANSIYSWEQLRDVFVLNFRGTYEEPKTQQHLLGIRQRPGELIREYMPRFSQARCQVQDITEVSVINAASAGLLEGELTRKIANKEPQTLEHLLRIIDGFARGEEDSKRXQAIQAEYDKASVAAAQAQAQVQVAEPPPLSVRQSQPAIQGQQPRQGQAPMTWRKFRTDRAGKTVMAVKEVQALRKEFDAQQASNHQQPARKKYLNXLISFGPEDAEGVMFPHQDPLVISAEIAGSEVQRILVDGGSSADVIFAEAYAKMGLPTQALTPAPASLHGFDGEAVQVLGQALLLIAFGSGENKREEQILFDVVDIPYNYNAIFGRATLNKFEAISHHNYLKLKMSGPIGVIVVKGLHPSAVSKGDLAIINRAVHSIETEPHERPKHTPKPTPHGKITKVQIDDANPTKLISLGGDMGEEEVESILEVLKKNIDIFAWSPDEVGGVPADLIMHHLAVKPDIKPRKQKLRKMSADRXEAAKAEVQKLLRAGVIQEINHPEWLANPVLVRKSNGKWRMCVDFTDLNKACPKDDFPLLRIDQLVDSIAGCELISFLDAYSGYHQIHMNPLDIPKTSFITPFGTFCHLRMPFGLRNAGATFARLVYKVLGKQLGRNVEAYVDDIVVKSRKAFDHAIDLQETFDSLRTAGIRLNLEKCVFSVRAGKLLGFLAAERGLPFFKTLRGAGKFNWTPECQAAFDELKQYLQSPPALISPPPGSELLLYLAALPVAVSAALVQETEFRQKSVYFVSEALQGVKTRYIEMEKLAYALVMASRKLKHYFXAHKVIMPSQYPLCEILRGKEVTGRLSKWAAELSPFDLHFVARSAIKSQALADFVAEWTPVLAPDPEPAEQFWVMCSDGSWSHRGAGIAAVLFSPNGVPMRYAARLQFDTTNNAAEYEAVLLGLRKGVRRLLIRTDSKLVAGHVEKFFEAKEEGIKRYLEAIRSMXKCFTGITVEHLPRDQNEEVDALAKSVACGGPYSPGIFFEVLHAPSVPMDSSEVMAIDQEKLGEDPYDWRAPFVKHLQTGWLPVDEVEAKRLQLRATKYKMVSGXLYCSGVLXPLLRCISFAEGEEMEKEIHQGLCGVHQAARTVASKVFRQGVYWPTMLKVCVEQIKKCESCQRHGRSQATPQYDLQPIAPIWPFARWGQDIIGPFPVSRNGYKFAIVAVEYFSXWIEAEPLGAITSAAVQKFVWKNIVCRFGVPKEFITDNGKXFDSDKFKEMCEGLNLEIXFASVAHPQSNGAAEHTNGKILEALKKSLEGAAKVKWPEELLLVLWALRTTPTRPTKFSPFMLLYGDEAMTPAELGANSPRVMFSGGEEGRGVSLELLEGVRVEALEHMHKYATSTSATYNKKVQLAXADAWSSCSKEEGEPTSDW

SEQ ID NO: 138216 - protein, 990 aa, Oryza sativa
  unsure (1)..(990): unsure at all Xaa locations
  Clone ID: PAT_MRT4530_39627C.1.pep
MEEEVENILEVLKKNIDIFAWSPDEVGGVPADLIMHHLAVKPDIKPRKQKLRKMSADRQEAAKAEVQKLLRAGVIQEIDHPEWLANPVLVQKSNGKWRMCVDFTDLNKACPKDDFPLPRIDQLVDSTAGCELMSFLDAYSGYHQIHMNPLDIPKTSFITPFGTFCHLRMPFGLRNAGATFARLVYKVLSKQLGRNVEAYVDDIVVKSRKAFDHAINLQETFDSLHAAGIKLNPEKCVFGIRXAGKLLGFLVSVRGIEANPEKIDAIQQMKPPSSVHEVQKLAGRIAALSRFLSKAAERGLPFFKTLRGAGKFNWTPECQAAFYELKQYLQSPPALISPPPGSELLLYLAASPVAVIAALVQETESGQKPVYFVSEALQGAKTRYIEMEKLAYALVMASRKLKHYFQAHKVIVPSQYPLGEILRGKEVTGRLSKWAAELSPFDLHFVARSAIKSQVLADSXAEWTLFDTTNNAAEYEAVLLGLRKAKALGVQRLLIRTDSKLVAGHVDKSFEAKEEGMKRYLEAVRSMEKCFTGITVEHLPRDXNGEADALAKSAACGGPHSPGIFFEVLHAPSVPMDCSEVMAIDQEKLGEDPYDWRTPFVKHLETGWLPVDEAEAKRLQLRATKYKMVSGQLYRSGVLQPLFHCISFAEGKEMAKDIHXGLCGAHXAARTVASKVFRQGVYWPTVLKVCVEQIMKCESCQRHGRSQSAPQYDRQPIAPIWPFARWGLDIMGPFPVARNGYKFAIVAVEYFSRWIEAEPLGAITSAAVQKFVWKNIVCRFRVPKEFITDYGKQFDSDKFRKMCEGLNLEIRFASVAHPQSNGAAERTNGKILKALKKRLEGAAKGKWPEELLSVLWALRTTPTRPTKFSPFMLLYCDEAMTPAELGANSPRVMFSGGEEGREVSLELLKGVRVEALEHMHKYATSTSATYNKKVRPTELMPGHFVLKNKANPVAVGKLESKWEGPYLIKHKSRMGSFCLATLEGVEFDHS

SEQ ID NO: 138217 - protein, 1678 aa, Oryza sativa
  unsure (1)..(1678): unsure at all Xaa locations
  Clone ID: PAT_MRT4530_39628C.1.pep
MAKAMEQERREAKSRTSALPGQRRLRRRVQGEDYLPKEDDFDLASSPPRGPKKPFRPIKPRGNRAGDRQTAHQGPMSPYIIMYPCKCPFHKAGAVRGDLRAKPLRANATEEGREGEGXRRKESNAAPDMAAKEGAEPSAPVAEDGGGPSASTPAPSQTPSAPAVSVQVPNAADVAKAVVVVRALQTRVEILSTSQLVVPQAALSQPAAASTTLAAVQAQNNNKHTRRQGGPRSRRLQSFSIRQVMSRLKSIRNPFRLKSHKHQCTSPGSNRPQSLPKYTINHPAKRHKXWQKGLRLCRRNSKLSFSNSTNPTAFQVQPHRLTRRGIQVKPGLGVSLWNQGPQFDFVNAAQAPTVRQQAPTPGFRTNQAPIQVAMTWSQPIFDPSMAAQQQGAVNRAGGEKGLPLSGGIKTRPIPPQFKFPPVPRYSGETDPKEFLSIYESAIEAAHGDENTKAKVIHLALDGIARSWYFNLPANSIYSWEQLRDVFVLNFRGTYKEPKTQQHLLGIRQKQGESIREYMRRFSQARGEEDSKRRQAIQVEYDKASVAAAQAQAQVQVAEPPPLFVRQSQPAIQGQPPRQGQAPITWRKFRTDRAGKAVMAVVEVQALRKEFDAEKASNHQQPARKRNIRQRGNAQDPRPQQGTTVEAPREAVQEQTPPAEQRQDVXSEGITSAGKGAPQYLNQLISFGPEDAEEVMFPHQDPLVISAEIAGFEVRRILVDGGSSADVIFAEAYAKIGLPTQALTPAPASLRGFGGEAVQVLGQALLLIAFGSGENRREEQILFDVVDIPYNYNAIFGRATLNKFEAIFHHNYLKLKMPGPTGVIVIDDADPTKLVSLGGDMGEEEVESILEVLKKNIDIFAWSPDEVGGVPADLIMHHLAVKPDIKPRKQKLRKMSADRQEAAKAEVQKLLRAGVMQEIDHPEWLANPVLXMPFGLRNAGATFXRLVYKVLGKQLGRNVEAYVDDIVVKSRKAFDHAIDLQETFDSLRTAGIRLNPEKGIEANPEKIDAIQQMKPPSSVHEVQKLAGRIAALSRFLSKAPERGLPFFKTLRGAGKFNWTPECQAAFDELKQYLQSTPALISTPPGSELLLYLAASPVAVSAALVQETEFGQKPVYFVSEALQGAKTRYIEMEKLAYALVMASRKLKHYFQAHKVIVPSQYPLGEILRGKEITGRLSKWAAELSPFNLHFVARSAIKSQVLANFVAEWTPVLAPDPEPAEQFWVMCSDGSWSHKGAGIAAVLFSPNGVPIWYAARLQFDTTNNAAEYEAVLLGLRKAKALGVRRLLIRTDSKLVVGHVNKSFEAKEEGMKRHLEAIRSMEKCFTGITVEHLPRDQNEEADALAKSAACGGPHSPSIFFEVLHAPSVPMDSSEVMAIDQEKLGEDPYDWRTPFVKHLETGWLPVDEAEAKRLQLRAMKYKMVSGQLYRSGVLQPLLRCISFAEXRRNGKGDTPGAMWRAPGCKNSGLQTVQKFVWKXNIVCRFGVPKEFITDNAKQFDSDKFREMCEGLNLEIRFASVAHPQSNGAAEQELLSVLWALRTTPTRPTKFSLFMLLYGDEAMTPAELGANSPRVMFSGGEEGCEVSLELLEGVRVEALEHMHKYTTSTSSTYNKKVRPMELMPGHLVLRKKANPVAVGKLESKWEGPYLIKHKSRTGYFRLSTLKGEEFDHSWNAASLKCFYV

SEQ ID NO: 138218 - protein, 69 aa, Oryza sativa
  Clone ID: PAT_MRT4530_39629C.1.pep
LRKRGYGSAEVSSFMVFIKAQKESINSIESLRRLLIPNEEDSEQMMAYKNLFEGVVHYISQIFCSELDL

SEQ ID NO: 138219 - protein, 236 aa, Oryza sativa
  unsure (1)..(236): unsure at all Xaa locations
  Clone ID: PAT_MRT4530_3962C.1.pep
IASAGREGAQTGSTGVGPTRQPHGPRWTGCTRLTPAGAVGPTRQPHPRARAADGRXPPGSRGARPEAASPARPTGGGAPAPRWSPPATTDAAERRPRERREGGSEXAVHGSPRVDEDGGNDDRSGGRRRRSSGRRGRRRSGGRRAKRRSGRGRRGRGEAEGGGAEVGGGPGXRRRRAGARRRRRRERATSRAQIRRGGRAARGGTGRRRCGEGLNRAGAREGGRGREETGAGGRPP

SEQ ID NO: 138220 - protein, 1898 aa, Oryza sativa
  unsure (1)..(1898): unsure at all Xaa locations
  Clone ID: PAT_MRT4530_39630C.1.pep
AMEQERRKAKSXPGQRRLRRRVQGEDCLPKEDDFALTSSLPRGLRKPLRPIRPXDRQTAHRGPMSPYDIMYPCKCPFHKGNHLSFRQQLEPTVGTXEQNHLERMPPKRVMKEKVARRTESDAGPDMAAEEGAEPSAPVAEAGGAQAPSQPPSAPATSVQEPNEADVAKAAAAARALQTMAEILSTSQPVVPQAAPSQPAATTTALAVVQAQTSLDLEAQAEADMEAMRHNMTRLQDMLRQMQEQQQAYEAARRVKATSAPILQYSAGYVQPQVHPQVTTQPFPPQAAQVPVYFTGQHQSPGQVPQTVAEGASALQTQHQAFLQQLNQPYYISSTTPSAHPVGNTSXGAPTWLPPIQSGSGASPXNQGPQFDCANVAXAPTVRQQAPTPGFGTNQVPIQAAMTWSQPIFDPSIAAQQVPPVGAGQPNAMAQPHVQAAISPFATPYPQQGGXNRAGGEKGLPLSGGIKTRPIPPQFKFPPIPRXSGETDPKEFLSIYESAIEAAHGDENTKAKVIHLALDGIARSWYFNLPANSIYSWEHLRDVFVLNFRGTYEEPKTQQHLLGIRQRPGESIREYMRRFSQARCQVQDITEASVINAASAGLLEGELTRKITNKEPQTLEHLLRIIDGFARGEEDSRRRQAIQAEYDKASVATAQAQVQAQITEPPPLSVRQSQPAIQGXPPRQGQAPMTWRKFRTDRAGKAVMAVEEVQALRKEFDAQQASNYQQPARKKYMNQLISFRPEDVEGVLFPHQDPLVISAEIAGFEVRRILVDGGSSADVIFAEAYAKMGLPTQALTPAPTSLRGFGGEAVQVLGQALLLIAFGSGENRREEQILFDVVNIPYNYNAIFGRATLNKFEAISYHNYLKLKMPGPRGVIVVKGLQPSSASKRDLAIINRAVHNVETEPHERPKHTPKPTPHGKVTKVQIDDADPTKLVSXGGDMGEEEVESILEVLKKNIDIFAWSPDEVGGVPADLIMHHLAVKLNIKPRKQKLSKMSADRQEAAKAEVQKLLRAGVIQEIDHPEWLANPVLVRKSNGKWRMCVDFTDLNKACPKDDFPLPRIDQLVDSTARCELMSFLDAYSGYHQIHMNPLDIPKTSFITPFGTFCHLRMPFGLRNAGATFARPVYKVLGKQLGQNVEAYVDDIVVKSRKAFDHAIDLQEKFDSLRAAGIKLNPEKCVFGVRAGKLLGFLAAERGLPFFKTLXGAGKFNWTPECQAAFDELKXYLQSPPALISPPPGSELLLYLAASPVAVSAALVQERXGQKPVYFVSETLQGVKTRYIEMEKLAYALVMASRKHKHYFQAHKVIVPSQYPLGEILXGKEVTGRLSKWAAELSPFDLHFVARSAIKSQVLADFVAEWTPVLAPDPEPDDQFWVMCSDGSWSHNGAGVATVLFSPNGVPIRYAARLQFDTTNNAAEYEAVLLSLRKAKALGVRRLLIRTDSKLVAGHVDKSFEAKEEGMKGYLEAVRSMEKCFTGITVEHLPRDQNEEADALAKSAACGGPHSPGIFFEVLHAPSVPMDSSEVMTIDQEKLGEDPYDWRTPFVKHLETGWLPVDEAEAKRLQLRATKYKMVSGQLYRSGVLQPLLRCISFAEGEEMAKEIHQGLCGAHQAARTVASKVFRQGVYWPTVLKVCVEQIKKCESCQRHGRSQAAPQYDLQPIAPIWPFARWGLDIIGPFPVARNEYKFAIVAVEYFSRWIEAEPLGAITSAAVPKFAWKNIVCRFGVPKEFITDNGKQFDSDKFREMCEGLNLEIRFASVAHPQSNRAAERTNGKILEALKKRLEGAAKGKWLEELLSVLWALRTTPTRPTKFSPFMLLYGEEAMTPAELGANSPRVMFSGGEEGREVSLELLEGVRVEALEHMHKYATSTSATYNKKSDPRSXAWSSRPKEKGEPSSGWQA

SEQ ID NO: 138221 - protein, 409 aa, Oryza sativa
  Clone ID: PAT_MRT4530_39631C.1.pep
MAGWPAAEAAGALVVAILAAAAGGAAGKTTIEPCAGADTCAALLGYTLYADMKVSEVAALFGADPRAVLAANALDFASPGAANRILPAGLPLRVPTRCACSDGVRKSVAVRYSARPADTLASVADVVFAGLASADQIRTANGLSAEDPDAPLDAGATLVVPLPCACFNSTDNNLPAVYLSYVVRVGDTVQSIAATHATTVTDISNVNAMGSPIVAPGDILAIPLPACASMFPNSASDYGLLVANGTYALTAGNCVQCSCGPGDLKLYCTPASLTASCSSMQCPNSNLMLGNVTAQSTSGGCNVSSCSYAGLVNGTIATSLSSGLQPTCPGPHQFPPLRATPIAVNQGSYLAPSPAPGAGEAGGDIPGFPGSSNVSPANGPSGSVSQAASVNRPHQIVALILSVALYFQM

SEQ ID NO: 138222 - protein, 243 aa, Oryza sativa
  unsure (1)..(243): unsure at all Xaa locations
  Clone ID: PAT_MRT4530_39632C.1.pep
MWQCRPGSLAPPLSFRVSLRRRRLPHPRASSSSAAAAATAASAMAEVELPQQEVKLFSRWSFEDVQVNDISLADYLAVNPTKHATYLPHTXAGRYSAKRFRKAQCPIVERLTNSLMMHGRNNGKKIMAVRIVKHAMEIIHLLTDANPIQVIVDAIINSGPREDATRIGSAGAVRRQAVDISPLRRVNQAIYLLTTGARESAFRNIKTIAECLADELINAAKGSSNSYAIKKKDEIERVAKANR

SEQ ID NO: 138223 - protein, 95 aa, Oryza sativa
  Clone ID: PAT_MRT4530_39633C.1.pep
PPPPVGVPPRENGPPHPGPPLAQGFPPPPKRDIKGAGASPPGVCNVDTPQGGGGVCYWPPGTGTNPSGRNQIKAGPGGELGPKKIGVPLFRDPGL

SEQ ID NO: 138224 - protein, 40 aa, Oryza sativa
  Clone ID: PAT_MRT4530_39634C.1.pep
MDVNWMMRFALEMAGNGWGIDAVDARKISVEFWKADLSES

SEQ ID NO: 138225 - protein, 384 aa, Oryza sativa
  Clone ID: PAT_MRT4530_39635C.1.pep
MQIGINESENSTSLDHKLAPMLLFHYNYDMSLEESDDDQDNEESGDDEDVSDEDEFTEASDDEESMEETDDDETDASSNDNDDDTANDEGKEVNDTLLLYSISSKQLLANSKLDYLKDHFYWITPQGWLLMVHRDSHETFLWNPFTSQRISLPFDQDRFLRTNYTRCLLSCKPTDINCVVLVLSLNDTVIWYCYPGGTQWFKHEYQSRRFHRHRGSVIGYMALLTVVGGKFYTGLGDSVITLDFSPNPKFDIIPIKAVQNPMYNFSRLYLLESSGELFSLFFYPPMTCPKRIAEIEVYKLDIPRRAWVKVYTLGDRAFFVNSTKCFGASVSAKEACLEENCIYFSRTGDKGLYVHSMERGTTAALNPGEDFLDNVAAEILMPAP

SEQ ID NO: 138226 - protein, 54 aa, Oryza sativa
  Clone ID: PAT_MRT4530_39636C.1.pep
MEPNACSFAITLFAGALCPMDYLLQRPKSQVIVQLPGLADVIDAESPGLLLPIG

SEQ ID NO: 138227 - protein, 79 aa, Oryza sativa
  Clone ID: PAT_MRT4530_39637C.1.pep
FVRFYETFAWASSGPHNVVCVTPVYTRCVHIHIYCVGVYVYSRRDVYVCMVPSHARHLAHTRVGGWCLGVTEIGDPLDV

SEQ ID NO: 138228 - protein, 129 aa, Oryza sativa
  Clone ID: PAT_MRT4530_39638C.1.pep
MAAVAAVDGSSVDSAEGLSSSGSSLTPGANAGDVAPKPEATCSGRAMRVSARRPAEEGRGGRARTGRTRVLDRASSSSSSETPQWSSSCSTRRPSVPPAARCRSTHRLPPLSSIAAPLCRPPPLEREGG

SEQ ID NO: 138229 - protein, 835 aa, Oryza sativa
  Clone ID: PAT_MRT4530_39639C.1.pep
MADRDDEQILLDTIAEGSSQYWVDDEGNEDPNQYLNEEGNDEDNVPISIVYWRRTRSRGDEDSFLPDTEKDMLWTTMLETFTIPEADCPRCKEWTLKKMAELFQSYKSDLYKRYILKGLTPDFNTGAQVQAQIEKNKANAAKKKYHHRLGSGGYGKAIPKWDKLEADLIARGIEPAMANWPERSRNWFYAQGGSLNPGDGSLIFSDEIRDVARRLADAIEASTQGTLRPDREKDELTLALQNLEHPGRTRGKGVLPWKYGFKEDIHTYRSRMRSKRDTEAKIVDLEYRVSTYEARMQEERGMETQAPVMVSPSGNRSSCASMGQVGSEGIEAVAAHEATYFPVDDITQRTPCDMHTPFRNLSIKVASGMAIPTDPSSTYHCRPIPHGYAKVEIELVERTYEDLELDILGGDGEKKLGDTAHAIILWHKKSRPYEPAPSRPKKKARSDEPRLPALKKRAYDLTPEELDEAVRAEVMEQLKPRSPEKKIPIAPEVEDHFIMMAEPGKPVEVSDYDRTLRKALKAKPSAVKCGKEVPQLGQQPRQEVEPLIVEPAQLEICNFLKDTGLSMEQLLEDAPIETAPVMYTFKLGELLVTPDKIRELPTQMYRFHQWYMDKSGMGREMFGARVRNSDYYQGEDVIWIRYKEVFDLYHLKALDVSILSAWTLMEIQLCRQHNKFNTGFVDPCKVNTLMIQQYEKQTKDNIVHFLVQQHYKRFILLPYNTSAWIRFRTLVRGIWNEKLTRRFNFLCAKQEKGTNLCGYYVCHYMHCLAHQIRTGQDLEMIYLIDNTTHDDFIRAVQEQIMGFINKHILHPTGEFYYDGSTIHKAGPSSSYVTKS

SEQ ID NO: 138230 - protein, 60 aa, Oryza sativa
  Clone ID: PAT_MRT4530_3963C.1.pep
PRPWASQLRIWCRRKRVGVRIWKKPPNRPLGGPRVWVWPATRARSGVGLWKEEKTERTRG

SEQ ID NO: 138231 - protein, 75 aa, Oryza sativa
  Clone ID: PAT_MRT4530_39640C.1.pep
PKGFCYIYCVQQLTNNYKMLVLQRIWKAQLAIVRRGQEHGDQLRTRKGVIEEMHAEIGEDMLTKILVRLTNNTMT

SEQ ID NO: 138232 - protein, 234 aa, Oryza sativa
  unsure (1)..(234): unsure at all Xaa locations
  Clone ID: PAT_MRT4530_39641C.1.pep
IKESNKDFQSDDITKALVAISNEAASIPVPKLKNVHRLRTEHYVYELPDSHPLMQQLALEQREPDDPSPYLLAIWTPDELKDTREAPKPCCNPQTEGGLCSNEMCHNCVSERENQYRYVRGTVLVPCRTAMRGSFPLNGTYFQVNEVFADHSSSHNPINIPREQLWNLHRRMVYFGTSVPTIFKGLTTEEIQHCFWRGFVCVRGFNMETRAPXPLCPHFHLAASKLRRSSKKAA

SEQ ID NO: 138233 - protein, 679 aa, Oryza sativa
  Clone ID: PAT_MRT4530_39642C.1.pep
MKLEGRHIVTEIAPDGEPVAPTGIGRKFVNHCGWVVRDNVPISIVYWRRTRSRGDEDSFLPDTEKDMLWTTMLETFTIPEADRPRCKEWTLKKMAELFQSYKSDLYKRYILKGLIPNFNVHNKFRDHWDAFVAYKTGAQGQAQIEKNKANAAKKKYHHRLGSGGYAKAIPKWDKLEADLIARGIEPATANWPERSRNWFYAHGGSLNPEKDELTLALQNPEHLGRMRGKGVIPWKYGFKEDIHTYRSWMRSKRDTEAKIVDLEYRVSTYEARMQEEVTRQVDQRLAEQRGMETQAPVMVSPSGNRSSCASTGQVGSEGIEAVAAHEATHFPVGDITQRTPCDMHTPFRNLSIKVTSGMAISTDPSSTYHCRPIPHGYAKVEIELVERTYEDLELDIPGGDGEKKLGDIAHAIILWRKKYIVFPGQERPPAPPSPPQAQSPPPSPPRQSPLAPSPAPPPPPRAPAAKSAPSGSRATTPPRALAAKSTLSRSRPYEPAPSRSKKKARSDEPWLPALKKRAYDLTPEELDEAVRAEVREQLKPRSPEKKIPIAPEVQDHFIKMAEPGKPVEVSDYDRTLRKALKAKPLAVKCGKEVPQLGQQPRQEVEALVVEPAQLEICNFLKDTGLSMEQLLEDAPIETAPVMYTFKLGEPLVMPDKIRELPTQMYRFHQWYMDKSVMGR

SEQ ID NO: 138234 - protein, 340 aa, Oryza sativa
  Clone ID: PAT_MRT4530_39643C.1.pep
MAFRCKGGVAWVALLVAVAALASAAQGFPNPFGHEEFTESYYDETCPNAQSIVRSVMERHAAANPRTAPAILRLFFHDCFVNGCDASILLNATDSMESEKDAEPNATLAGFDVIDGIKSELERSCPATVSCADVLALAARDAVAMLGGPSWGVLLGRKDSLTASIDMANKDLPNPKDSLAELIRMFKENDLDERDLTALSGAHTVGMAHDCKNYDDRIYSRVGQGGDSIDPSFAAQRRQECEQKHGNATAPFDERTPAKFDNAYYVDLLARRGLLTSDQELYTQGCETGDLVKTYAMNGDVFFADFARAMVKMGNIRPKHWWTPAEVRYKCSVANTHYCT

SEQ ID NO: 138235 - protein, 789 aa, Oryza sativa
  Clone ID: PAT_MRT4530_39644C.1.pep
MADRDDEQILLDTIAEGSSQYWVDDEGNEDPNQYLNKEGNDEGNQEANQEGTEEGTDSQPSAGQKRPRRKRGPAKKLEGRHIVTEIAPDGEPVAPAGIGRKFVDHCGWVVRDNVPISIVYWRRTRSRGDEDSFLPDTEKDMLWTTMLETFTIPEVDRPRCKEWTLKKMAELFQREKDELTLALQNLEHPGRTRGKGVLPWKYGFKEDIHTYRSQMRSKRDTEAKVIDLEYRVSTYEARMQEERGMEIQAPVMVSPSGNRSSYASTGQVGSEGIEAVAAHEATHFPVDDITQRTPCDMHTPFRNLSIKVVSGMAIPTDPSSTYHFWPIPHGYAKDLELDIPGGDGEKKLGDTAHAIILWRKKYIVFSGQERPPALRSPPQAQSPSTSPPHQTPPAPSPAPPPPTRAPAAKSAPSGPRATTPPRAPAAKSTPSRSRPYEPAPSRPKKKARSDEPRLPALKKRAYDLTPEELDEAVRAEVREQLKPCSPEKKIPIAPDVQDHFIKMAEPGKPVEVSDYDRTLRKALKAKPSAVKCGKEVPQLGQQPRQEVEPLVVEPAQLEICNFLKDTGLSMEQLLEDGPIETAPVMYTFKLGEPLVTPDKIRELPTQMYRFHQWYMDKSAMGREMFRARVRNSNYYQGEDVIWIRHKEVFDLYHLKALDVSILNAWILMEIQLCRQHNKFNTGFMDPRKVNTLMIQQYEKQTEDNIVHFLVQQHYKRFILLPYNTSFHWVLLLFDLEKSKVHVYDSMDKPEKTFAKIFEVIDRAWIRFRTLVRGIWNEKLTRRFNFPCAK

SEQ ID NO: 138236 - protein, 196 aa, Oryza sativa
  unsure (1)..(196): unsure at all Xaa locations
  Clone ID: PAT_MRT4530_39645C.1.pep
MPLPPQTSPSPPPSSSSCSPCSSALANATDSVASLKMADRDDEQILLDTIAEGSSQYWVDDEGNEDPNQYLNEEGNDEGNQEANQEGTEEGTNNQPSAGQKRPRGKRGPAKKLXGRHIVTEIAPDGEPVXGDEDSFLPDTEKDMLWTTMLETFTIPEADRPRCKEWTLKKMAELFQSYKSDLYKRYILKGLTPDFN

SEQ ID NO: 138237 - protein, 502 aa, Oryza sativa
  unsure (1)..(502): unsure at all Xaa locations
  Clone ID: PAT_MRT4530_39646C.1.pep
MEMAEVVAMDISEANEGYMGGCSVVKMSFELMGMHRHRQHRVDFMEWAPGARYCSVVGDFNQWSTTENCAREGHLGHGKGEKLXLEKYVPAISHKDKYRVYFNTPDGGLERIPAWATFCVDAEGKQSYAVHWDPPPEEIYKWRFERPKVKGSLRIYECHVGISGSEQKISSFQEFTSNVLPHIKDAGYNAIQLIGIVEHKDYSSVGYKVTNYFSVSSRFGSPDDFKKLVDEAHGLGLVVLLDIVHSYASADELVGLSLFDGSNDCYFHSGTRGHHKYWGTRMFKYDDIDVLHFLLSNLNWWVTEYRVDGFQFHSLPSMLYTHNGFSTFTGATEEYYNQYVDEDALIYLIIANEMLHELHPDIITIAEDVSCYPGLCEPTTQGGLGFDYWVNLSIPEMWLWHLENVPEXEWSMNKIMRVLVNNNSNMLSYVENHNQVILFVXILSVATNYIMLLLXNLFLLKETAQILHMVEKTYNIIKLITFTTSGGAYLNFIGNEFAHPKV

SEQ ID NO: 138238 - protein, 124 aa, Oryza sativa
  Clone ID: PAT_MRT4530_39647C.1.pep
MALSLVMGGRGVGSPPSLEVIGAGHPCPGFHRECIGAPLGGILHSLRASFHHRARSSKVKYVMQSLSSLSINVLAIILDAPAPMSANFFGFSDVYPRQHLQQFIVQSPSSIVSSNSKSCCGQRR

SEQ ID NO: 138239 - protein, 160 aa, Oryza sativa
  unsure (1)..(160): unsure at all Xaa locations
  Clone ID: PAT_MRT4530_39648C.1.pep
MAEMLIRPNLGWALLAWPSACGLPLFCLIHFCEFWADSLGRLPKFLIILGVSGLSVFLVWHFXSNRRDTGDQTDDIGSVRPAEQRWSDRRRRQEPGAILRRXDEEVEVALAAPTASTRARAPEGMLPRRRHLPLIATLTPSSTPPLAATRALTPCSCLPR

SEQ ID NO: 138240 - protein, 100 aa, Oryza sativa
  unsure (1)..(100): unsure at all Xaa locations
  Clone ID: PAT_MRT4530_39649C.1.pep
MGGPESSYSSSSLPLPPSPPPPTPPPPPPTPAPSVDAMTRASPTPSARGGXGDAVGDPPGGDVCADPPPPPPXVVVPVPAAAAPASVPARGARRPRQAIH

SEQ ID NO: 138241 - protein, 155 aa, Oryza sativa
  Clone ID: PAT_MRT4530_3964C.1.pep
MTELVAPHRETAQAPLCQFGRGLRVKSQALALSLYVEISSASQKHETPAIYTDNAPNSGLRRVPRGFRLDGTGQGVRQTASRHLTRDLTDFLKGSGCLGPRGRGRSNPTPPSGEIRRRADTSPSGPTSPKVPGRVGDCVCLKPLVTIPPVPYHRQ

SEQ ID NO: 138242 - protein, 157 aa, Oryza sativa
  Clone ID: PAT_MRT4530_39650C.1.pep
MARPRRDGDGDASPGFIADSHLRLPAHPVPTSPPCRPRFLQRPARAAGAQTELEANGMTTACAGGEGSEEAGEGVLAERRRRTTARPWRSSAAAQREKDEQRERKKKNKERLTSGTMRQHHEEEAVAFGRYLCGEHVLHREDDVREFSEWQSHVLVI

SEQ ID NO: 138243 - protein, 35 aa, Oryza sativa
  Clone ID: PAT_MRT4530_39651C.1.pep
NIFIFFNHTPFKKTFFFKYFLNTLPNKLYSTLNLF

SEQ ID NO: 138244 - protein, 300 aa, Oryza sativa
  Clone ID: PAT_MRT4530_39652C.1.pep
MAPRILEKALHSDIADDVIRCNILPRLPFKLTTRLKVISSTPDIVGIPSGFDFLGCCLENGILSLLASTNGLVCILYTRIGLAFDPVDKFQENTVSKFKIVKAVGARTIEDNGTKFCFATLSSNTSCWAMSSTTVYVDTKINCNNKKVAYGSGIMYWDYQEIVLWFDIATDMAGIVKIPWIQLGVEVKGPVHHDIDTSANGMLFIRCGVEVKGPVHHDIDTSANGMLVCTTIDKGGLPMYHLVGVNTDFNWEIKHDRRWIDMMKDSISAFGFCHSMQLHSGLQTNLIDAGSKPALELAPI

SEQ ID NO: 138245 - protein, 78 aa, Oryza sativa
  Clone ID: PAT_MRT4530_39653C.1.pep
MARDLRAAVEVANGLKQITCPSFVGATLSFYMNTIFKMVNGVFLRNILFKIFFKNQINLLLRHLSRNEWDLRVSHKIR

SEQ ID NO: 138246 - protein, 80 aa, Oryza sativa
  Clone ID: PAT_MRT4530_39654C.1.pep
NDPIQSHFSHGSSLPGYARTPLTTRNCVRLECMRMKSSWSGYCQCEVIEKLCRDTSHVLGRGSCVGQSRSVGKVYIHCSV

SEQ ID NO: 138247 - protein, 89 aa, Oryza sativa
  Clone ID: PAT_MRT4530_39655C.1.pep
LHGLTFTWGRIAILDLVCWIDLTLFDNQDIVLLPKLVSHGCPPSNNSVSNILDNNYTWYATHHLLERFTKLPSLDTTAYTQDNLCIFTR

SEQ ID NO: 138248 - protein, 169 aa, Oryza sativa
  Clone ID: PAT_MRT4530_39656C.1.pep
MALVEGNNGVSGGAVSFSEEQEALVLKSWAIMKKDSANIGLRFFLKIFEVAPSASQMFSFLRNSDVPLEKNPKLKTHAMSVFVMTCEAAAQLRKAGKVTVRDTTLKRLGATHFKYGVGDAHFEVTRFALLETIKEAVPVDMWSPAMKSAWSEAYNQLVAAIKQEMKPAE

SEQ ID NO: 138249 - protein, 166 aa, Oryza sativa
  Clone ID: PAT_MRT4530_39657C.1.pep
MALVEDNNAVAVSFSEEQEALVLKSWAILKKDSANIALRFFLKIFEVAPSASQMFSFLRNSDVPLEKNPKLKTHAMSVFVMTCEAAAQLRKAGKVTVRDTTLKRLGATHLKYGVGDAHFEVVKFALLDTIKEEVPADMWSPAMKSAWSEAYDHLVAAIKQEMKPAE

SEQ ID NO: 138250 - protein, 81 aa, Oryza sativa
  Clone ID: PAT_MRT4530_39658C.1.pep
MADVAPSVHVQFSILSCFGHTPVAAFVLAGVQGAGMPTGGGCTGRSQASGAGGRSAGMPSDGGAGNLRTADTRHTRAARLI

SEQ ID NO: 138251 - protein, 111 aa, Oryza sativa
  unsure (1)..(111): unsure at all Xaa locations
  Clone ID: PAT_MRT4530_39659C.1.pep
TRAPENIPVYLYPSLFTLHFSFSYFLHYWGKAGFWDIPIDASLESMSVNAMGCEGQVNPKVNEVHKAHDCLLPMGITSXNVAHRYGVTRQEHDQAAAESHTKASSSTSAWK

SEQ ID NO: 138252 - protein, 221 aa, Oryza sativa
  unsure (1)..(221): unsure at all Xaa locations
  Clone ID: PAT_MRT4530_3965C.1.pep
WRPRSPRPFPPSPAALSPSRRYIIVPRASLFRFRRSPLALAVGFVLAPSSSLSAVAAELRFAAAVAPDFLPTRRHLHRLRRVVVDLVRSFVSPADRRSTVALAVPNRAAAFLRSVRRLRRXSCLGVSRGPXPFRFPLLSALSGAAPPRRWSPAVTIGARARPPPVGRAGEAAFGRALAAAKWAQPSAARARGRVLPVHRGPRGWRVGPTPVDPVRAPSLSA

SEQ ID NO: 138253 - protein, 67 aa, Oryza sativa
  Clone ID: PAT_MRT4530_39660C.1.pep
MPNLLLLHLHLPVLRATSLKRESYSRKEEDDAEKERQKAERYKVAFALDQQWIGLEKEKFELKRMIE

SEQ ID NO: 138254 - protein, 442 aa, Oryza sativa
  Clone ID: PAT_MRT4530_39661C.1.pep
MAPVQVPAELIGSSNGGGSAGGSLTVDPALGRRQATAAAAALPTPRSPPPAFGSIVAVLSIDGGGVRGIIPGTILAFLEEKLQELDGPAARVADYFDVIAGTSTGGLVTAMLAAPGADGRPLFAAKDIVDFYLRHSPKIFPPVIKGPLGLLKSMMGPKYDGRYLRSIVQELLGDTRISQAITNVVIPTFDIKLLQPTIFSRFDAQKDASKNALLSDVCISTSAAPTYLPGHRFETKDKAGQPRVFNLIDGGVAANNPTLVAMTHVSKQILLGNQDFFPIKPADYGKFMVLSLSTGSAKVEGRSFDADESGRWGLLGWLRNDGGSAPPLIDSFAQSSSDLVDIHASVLFQALRCDRHYLRIQDDDLTGDAASVDVATPENLRALAGAGAALLRRQACRVDVETGRNVADAGRGTNEEELARFARMLSMERRARLGKQESTPRV

SEQ ID NO: 138255 - protein, 37 aa, Oryza sativa
  Clone ID: PAT_MRT4530_39662C.1.pep
SGQVQSRSPSPSIYILTYNKSMHIYTSNLFEVQTART

SEQ ID NO: 138256 - protein, 1150 aa, Oryza sativa
  Clone ID: PAT_MRT4530_39663C.1.pep
MAQTTAAFVASSSASLLRAVTVHEWRHRCHLALARGERDGVGGEWWGPRIAKKRDSPSLASERIKSTGTLKNLKARFWTCNEVKQIFQASSQLFPHLVQVLSPHGSATAVVNPDPVPFLPPTLQLQESWDHQLERADLCLQEEPPRRNEDMAVVQNVLGYHILEVSWHPMEFLYIRVASALLRDTLISGGPYDVEHQFMLSFVPQDFAVSCRNSPFTMEGWIMFLDFPLDFKTPAIIDKAVSLFGKVIKAQLDDNVRGRLLVKAVYSSTLQVPRRIVIKRVTAFGGVGRSWTVSVFLCDGDLPDVMPTDEDLPPVNHISVPEPVPQVQPEVELFRDNMQEDAHEDQQQQSHTISALSVVAAGSHQWSLAMGPPQNLQIVSYSLPVVQIEAHHFEDVEMIEPIASVPPNQADLPMAPFQQLGSNRPSLKKSKKGKAKQVAIIDTDRRRSSRINKLTEGYMSPDPNLGIGKPRGKSVKKLKLIAQQSVNVYGPSYGPERDVFVQWMNSLDIEPNENWIIMGDFNFYRFVQNRNRPGGDMNDIFLFNDMISNLGLIEIPLKDRSFTWSNMHDSPLLEQLDWVFISPSWLISYPNTLALSMIKHISDHVPLKVQVQTAIPRANVCRFENFWVQHEGFFQQVLNAWLAVQNIDSSAMAISAELKQVKRNLKCWSKELSKLSLVIDNCNKVINFFDIFEERRLLSVLELVFRSMVRKKVTLLLGYKQEYWRKRFRQNWAQFGGENTKNFHAMASKRFRKNSTQLTTSDGIDISDHEGKAGLVLETYRARLGVSGLPSMAFELSDLFIPRDDLDDLVEPFSTKEIDEIIAQMPTDKAPGPDGKDGTTGSPKSIWFHKIQDNYIDRARRHFLWRGKDLNSTKKSLASWGKVFAHSFPTLFSFAKHKLDTVAQHHSRSVDDQFFLPLSVQAYEEYKVFLEDVTQISLNYMVDKWTYIWASTSVLLNGVPGKFFPCRRGVRQGDPLSPPLFAIGADILQSIINKGHQRGVFHLPILINGDCNFPIVPYADDTLLFMQASRTLLLALKALLNTVASSTGLKVNFSKSCLIPLNLDEDKANNPAQTFGCSFGTLPFTYLGLPLSCSKPKVIDFSPLTDWIERMLVATSAFLSYGDRLTLVNSVLSTMPTYYMCSLQLPVAVI

SEQ ID NO: 138257 - protein, 77 aa, Oryza sativa
  Clone ID: PAT_MRT4530_39664C.1.pep
FLVEVKSGQANSPLNPPMGLPRLNQNFSSWKKGFGSRLRGTKVFPPQLGGGPEFLPPSVKRKWWGGVTPPQFFLAPL

SEQ ID NO: 138258 - protein, 101 aa, Oryza sativa
  Clone ID: PAT_MRT4530_39665C.1.pep
TDKQRTKMPQPKKRGGKKKRGGTNDQKGGIQIAPKKMELKKLHWGGPHLKKGGAKILPTPPAKILGKLLPPPQIFFDKRGDAHGKDITKITPKNGGGKEIC

SEQ ID NO: 138259 - protein, 121 aa, Oryza sativa
  Clone ID: PAT_MRT4530_39666C.1.pep
MSETSHELRSGTPARPFVSSLHLPPSVVLQSQAAELQLCTIMKLPLTASTQAIAVTRTRARQRLRELRPTARVAADHRNKAQEKRRRPVAPGHGANGTGPGGGQGQSNDQVTWQLYQHVLW

SEQ ID NO: 138260 - protein, 65 aa, Oryza sativa
  Clone ID: PAT_MRT4530_39667C.1.pep
FTTYICFRSIGCTYYIGSTHDTPGSCFLVASCGVHSISQALACTSYPNGYPYIAKCPKAHPHAFP

SEQ ID NO: 138261 - protein, 47 aa, Oryza sativa
  unsure (1)..(47): unsure at all Xaa locations
  Clone ID: PAT_MRT4530_39668C.1.pep
LITAIKQPSRRSXHRKIPPPRALGAKSLPPISHHPQRFITPLTEHSH

SEQ ID NO: 138262 - protein, 1413 aa, Oryza sativa
  unsure (1)..(1413): unsure at all Xaa locations
  Clone ID: PAT_MRT4530_39669C.1.pep
MAFFSNSGSRADSGGYNLNEKAEDEAAYESVGDRDVDLNSRQWNLNEKAEDAYHSDEEQYDGGRSGPNSSENKSVQNARKINGPSGPWGTNFLKDCGPTQTAKEEQLTSNRGMEYGSAASSHDDMDASGEDDELNRGHGEVPAEEMLSDDYYEQDGEEQSDSLLRGGMRRPSCSTSGAAAESVSSRQKKKPTKYNAYEDEDDDEYNDENDDEDDDDADEDDPDDVDFEPESDTEKAADKDKFVDSENSDEEEDDELELSDDDEDDFVENKRQCKRLKVGGTKTSKGRKLPVQVQRKRGVSFTDEDSSGKDSDAPSDTDISHRAKKPDKLHQKTVGRKDVFSNVDSHEVRTSGRRRTARNISYAESEESDDSEEKLAKQQKVLKEDPEEEEGETIERILWHQPKGVAEEALRNGQSTQPTVISFTSDVDQSWDDVEFYIKWKGQSFLHCQWKTLSELQNVSGFKKVLNYMKRVTDELRYKRSLSREEVEVHDVGKEMELDLIKQYSQVERIFADRVSKVDGDDLVPEYLVKWQGLPYAESTWEKDTDIEFAQDAIDEYKAREAATSILGKTVDFQRKKSKASLRRLDDQPEWLKGGKLRDYQLEGLNFLVNGWRNDTNVILADEMGLGKTIQSVSMLGFLHNAQEINGPFLVVVPLSTLSNWAKEFRKWLPDMNVVVYVGNRASREICQQHEFFTNKKGGRHVKFHTLITTYEVILKDKAALSKIKWNYLMVDEAHRLKNCEASLYTTLLEFSTKNKLLITGTPLQNSVEELWALLHFLDPSKFNSKDIFVERYKNLSSFNETELANLHKELRPHILRRVIKDVEKSLPPKIERILRVDMSPLQKQYYKWILERNFQNLNKGVRGNQVSLLNIVVELKKCCNHPFLFESADHGYGGDSIGDRNKVERIVMSSGKLVLLDKLLMVRMLDILAEYLSLRGFQFQRLDGSTRADLRHQAMEHFNAPGSDDFCFLLSTRAGGLGINLATADTVIIFDSDWNPQNDLQVLDHLVIQKLNAEGRLEKKESKKGGSMFDKNELSAILRFGAEELFKEDKTDEETKKKLESMDIDEILERAEKVETKGGEGEEGNELLSAFKACSVHYHMTCDSDIMLKFYTSVANFSSGEDDATFWSRLIQPDASDMVEETLAPRAARNKKSYVEDHQLDKNSNRKRRGIDAQEKPRRRSSRTMDTAVSLPLIDGSAHQVREWSFGNLSKKDATRFVRAVKKFGNPSQIGLIVDDVGGAIAKSSVDQQLELFTLLIEGCQDAVKNNMDAKGTVLDFFGVAVKAHELIARVEELQFLARRIARYKDPVRQYRIQAPYKXPQWSASCGWTETDDARLMVGIHWYGYGNWEKIRLDPKLSLTAKIAPATLGERETFLPRAPNLDNRASALLQKEFANLRGKSSKAKGGPRQSIG

SEQ ID NO: 138263 - protein, 32 aa, Oryza sativa
  Clone ID: PAT_MRT4530_3966C.1.pep
GLQEFGTRINKISALDPGFVSLWTWMKISSQD

SEQ ID NO: 138264 - protein, 2168 aa, Oryza sativa
  Clone ID: PAT_MRT4530_39670C.1.pep
MALQDEVAQNLRWSMDSARDTASCPSYPSAMDGWMKTGVPKGGREKISCRGFHSSFRPTDSGLSLNVDVSTTMIVRPGPVIEFLLFNQNIKNPHEIDWGKFYLFQDSIYPSAYFSVARTTATAAAAARAARLAAAELAAARAEAEAAKDAARAAEVEVETLRSSINGSIAGDITADRELEELARARARERAERWAAAHLHGGGGGPRDRAPADGNPDGLGRAGGSPEPARGPRRQHGSLSPDRHHGHHGVQTVVRDFGPGGGWPTLTKTNYIEWAAVMRAVRYGDVDYDEDRRALDALIAAVPPEMQFSLSQKRTAKEAWDAIAAARIGSDRARKSTLQALRKEWENLAFKPGEDVDDFALRLNTLLQKMVQYGDDTYDEERAVEKLFRCVPEKYRQIARSIESLLDLSTMSIEEALSRLKVVDGDEPQPLSGPITIGGKLHLTREQWEASQGDGRKGESSSPIGGRKPRKAQGGVQLRWARRRAEGGARRGAQGVATGNHKPARDDACRNCGKLGHWAKDCRQPRRGQAHVARVEEEPALLLAHASIELPPAAPAAAAFLHLDEPKVLVSLCNGSSNDKADGWYLDTGATHHMTSRREFFTEFDSSVRGSVKFGDASGVEIKGVGSVTFTAKSGEHRLLTGVYYIPALRNSIISLGQLDENGSRVLVEDGLMRIWDRRRRLLAKVTRGTNRLYILSAQVAQPVCLAARRDDEAWQWHERFRHLHFEALKQLSAKEMVRGMPCLDHVEQLCDVCVVTKQRRLPFPQQTSFRAKERLELVHGDLCGPVTPATPGGRRYFLLLVDDLSCYMWVMVLGSKGEAADAIRHAQAAAEAECGRKLHVLRTDNGGEFTAAEFASYCADEGIQRHYTTPYSPQQNDVVERRNQTVVGMARALLKQRGMPAIFWGEAVVTAAYILNRSPTKALDGRTPYEAWHGRKPAVSHLRVFGCLAFAKELGHIGKLDDRSTPGVFIGYAEGSKAYRILDPETQRVRTARDVVFDEGRGWVWDKAVDDGSTPTYDDFTVEYVHFEGAGGVGSSSSPSVSTPAPKSPPTPTPTHPRATTSTTTSSSSTPHAPAPTATPPSTSTPTPARVERSPVEFATPLSHDGERIDVYHDGEQLWYRTMEDLLGDQPVPGLVPRDLEAQLHLACDDGEPRSFAEAEKHAAWRAAMQSEMDAVQENRTWELADLPRGHRAITLKWVFKLKRDEAGAIVKHKARLVARGFVQQEGIDYDDAFAPVARMESVRLLLALAAQEGWGVHHMDVKSAFLNGDLKEEVYVHQPPGFVIPGKEGKVLRLHKALYGLRQASRAWNAKLDSTLKGMGFEQSPHEAAIYRRGNGGNALLVGVYVDDLVITGTKDAEVAAFKEEMKATFQMSDLGPLSFYLGIEVHQDNSGITLRQTAYAKRVVELAGLTDCNPALTPMEERLKLSRDSTAEEVDATQYRRLVGSLRYLTHTRPDLAFSVGYVSRFMQRPTTEHQQAVKRIIRYVAGTLDHGLYYPKCPGKAHFVGYSDSDHAGDIDTSKSTSGILFFLGKCLVSWQSVKQQVVALSSCEAEYMAASAASTQALWLARLLSDLLGRDTGKVELRVDSKSALALAKNPVFHERTKHIRVRYHFIRSYLEEWSINASYINTKDQLADLLTKPLGRIKLGGCSNRLAASYGYIYMYPTSLGQAKCALKNLRIKTTHTGSEFRIIGLSEDTCYSQTFQIKRKNGNGGSDTVEEVTVFEYYRKNWKIDLKGSAHFPCLNVGKPKRPTYIPLELCHLVPLQRYKKALSTLQRSTLVERSRQNPQERMFVLSGVLRDSDYNSVPMLRECGISIAQEFTQVAARVLPAPKLKSGDGEDIFARNGRWNFNKNCNAHHLAQRLIHCGNLKGLINDQYLTNVLLKINAKLGGLNSLLQIERNQAIPLLSKTPTIILGMDVSHGSPGRDDVPSVAAVVSSLEWPLISKYKASVCTQSPRLEMIDSLFKLVGNEDHVIIRDGVSEGQFNQVLNIELAQIIKACEFLANEKNDSEWSPKFTVIVAQKNHHTKFFQTDRSNKVVNVPPGTVVDKGICHPRNCDFYMCAHAGMIGTTRPTHYHVLHDENNFTPDDLQELVHNLSYVYQRSTTAISGVAPICYAHLAAAQVSQFVRLDDAASEGSGDGGAPPRPVPELPRLHPDVRQSMFFC

SEQ ID NO: 138265 - protein, 722 aa, Oryza sativa
  unsure (1)..(722): unsure at all Xaa locations
  Clone ID: PAT_MRT4530_39671C.1.pep
MALPHRTGTMVTTGFRPSSGKSALAVCGLNPTLTKTNYVEWAVVMRIRLQVRHMWEPVRHGDVNYDEDQRAXQKRTAKEAWDAIAAARIGSDRARKSTLQALRKEWENLAFKPXLVSYGDDTYDEERAVKKLFRCIPEKYKQIARSIESLLDLSTMSIEEAIGXLHLTREQWEACQGDGKKRESSSSTGRKRGKGHVLRGRTQGGARGGXKPARDDACRNYGKFGHWAKDCRQPRHGQANVAQVEEEEESALLLAHASIELSPAAPAAAAFLQLDEPKALKRLSAKEMVRGLPCLDHVKQLCDVCVLTKQRRLPFPQQISFRAKERLELVHGDLCGPVTPATPGGRRYFMLLVDDLSRFMWVMVLGSKGEVADAIRRAQAAAEADCGGEFTAAEFASYCADECIQHHYFAPYSPQQYGVVERHNQTVVGMARALLKQRGMPAVFWGEAVVTAVYILNRSTTKXPYEAWHGRKPAPPSLHXTPAATRSRATTSAAMSSSLTPSQPATPRTPAPTATPPGTSTPTPGCVKHSPVEFATPLSHDEERIDAYHDTGGDAFAPVVRSPARRARXLLLALAAQESWCVHHMNVKSAFLNDDLKEEVYVHQPPGFAIPDKEGKVLLLHMALYGLWQAPRAWNTKLDSTLKGMGFEQSPHEVAINRLGNGGNVLLVGVYVDNLVITGTKDAEVAAFKEEMKATFQMSDLGPLFFYLGIEVHQDDSGITFR

SEQ ID NO: 138266 - protein, 292 aa, Oryza sativa
  Clone ID: PAT_MRT4530_39672C.1.pep
MSGELKRDYEIGEEIGRGRFGVVHRCTSRATGEAFAVKSVDRSQLADDLDRELAELEPKLAQLAAAGNPGVVQVHAVYEDDAWTHMVMDLCSGPDLLDWIRLRRGAPVPEPVAAAVVAQLAEALAHCHRRGVAHRDVKPDNILLDVVDDGIDGGGTPRARLADFGSAAWVGESGGSAEGLVGTPHYVAPEVVAGGEYGEKADVWSAGVVLYVLLSGGALPFGGETAAEVLASVLRGSVRFPPRLFAGVSPAAKDLMRRMMCRDTWRRFSAEQVLGHPWIVSGGGARAMEQPT

SEQ ID NO: 138267 - protein, 1583 aa, Oryza sativa
  Clone ID: PAT_MRT4530_39673C.1.pep
MYRNFIKKSYKATIEEGIITGFGMGSVMCVVFGSYGLAFWYGGKLIIEKGYTGGKIMTILFAVLTGASSLGNATPAVAAVVEGQSAAYNLFKTIERKPEIDSDDNNGMVLEDMNGDIELKDVYFRYPARPEQLILDGLSLQVASGTTMAIVGESGSGKSTVISLVERFYDPQSGEVLIDGISIKKLRLDWIRGKIGLVSQEPLLFMASIKDNIIYGKKDATLEEIKRAAELANAANFIDKLPNGYDTLVGQRGTQLSGGQKQRIAIARAILKDPKILLLDEATSALDVESERIVQEALNRMMVERTTLVVAHRLSTVRNVDCITVVRKGKIVEQGPHDALVKDPDGAYSQLIRLQETHRDERHKLPDSRSKSTSLSFRRSRTKDFLSKSNSGALGTRLSVDALNVRRLVGDNLALIVQAVATLITGFAIAFAADWRLALIITCVIPLVGAQGYAQVKFLKGFSEESKTIALVGESGSGKSTIIALLERFYDPDSGNISLDGVEIRSLKVSWLRDQMGLVGQEPVLFNDTIRANITYGKHSEVTEEEITAVAKAANAHEFVSSLPQGYDTVVGEKGVQLSGGQKQRVAIARAILKDPKILLLDEATSALDAESERVVQDALDRVMVNRTTIVVAHRLSTIKGADMIAVLKEGKIAEKGKHEALLRIKDGAYASLDAELAAAEERRRATAQTAAAAARAARLAAAELAAARAEAEAEAAEDAARAAEVEVETLRSSINGSIAGDITADRELEELARGRARERAERWAAAHLHGGGGGPRDRAPADGNPDGRRRAGGSPELARGPRRQHGSLSPDRRHGHHGVQTVVRDFGPGGGWPTLTKTNYIEWAAVMRVRLQVRHMWEAVRYGDVNYDEDRRALDALIAAVPPEMQFSLSQKRTAKEAWDAIAAARIGSDRARKSTLQALRKEWENLAFKPGEDVDDFALRLNTLLQKMVQYGDDTYDEERAVEKLFRCVPEKYRQIARSIESLLDLSTMLIEEALGRLKVVDGDEPQPFSGPITIGGKLHLTREQWEASQGDGRKGESSSPTGGRKPRKARGGVQLRWARRRAEGGARRGAQGVATGNHKPARDDACRNCGKLGHWAKDCRQPRRGQAHVARVEEEEPALLLAHASIELPPAAPAAAAFLHLDEPKVLVSLCNGSSNDKADGWYLDTGATHHMTGRREFFTEFDSSVRGSVKFGDASGVEIKGVGSVTFTAKSGEHRLLTGVYYIPALRNSIISVGQLDENGSRVLVEDGLMRIWDRRRRLLAKWHERFGHLHFEALKQLSAKEMVRGMPCLDHVEQLCDVCVVTKQRRLPFPQQMSFRAKERLELVHGDLCGPVTPATPGGRRYFLLLVDDLSRYMWVTVLGSKGEAADAIRHAQAAAEAECGRKLRVLRTDNGGEFTAAEFASYCADEGIQRHYTTPYSPQQNGVVERRNQTVVGMARALLKQRGMPAIFWGEAVVTATATSTMASDGQGQGRMWLGADAAAWEGREECKRRRRMQPGVEVMVSDVAAQPGEPDEAGRSDAGILAMELVLAAAVVAGDDADCSGGRGGRRCGRGRRRGSRTTAEVAVSDDTDGSDGRGG

SEQ ID NO: 138268 - protein, 197 aa, Oryza sativa
  Clone ID: PAT_MRT4530_39674C.1.pep
MSAAAAEATERGEPSGGGGEIAYVSYGGEHHLPLVMSLVDEELSEPYSIFTYRYFVYLWPQLTFLAFDPKDGKCVGTVVCKMGEHRGAFRGYIAMLVVLKPYRGRGIATELVTRSIRVMMESGCEEVTLEAEVTNKGALALYGRLGFIRAKRLYRYYLNGVDAFRLKLLFPRPDPGMHPMMMLGNERDDQHMDSPYL

SEQ ID NO: 138269 - protein, 246 aa, Oryza sativa
  unsure (1)..(246): unsure at all Xaa locations
  Clone ID: PAT_MRT4530_39675C.1.pep
MSSDEIGTIIVIDNLVYRVHPSLKIRGVPKDVRSCXNEYAIRVIAPNLPTKTDNLSHSTGHGWTTREKVVNGQFFANVVGLITQHDCERTSGYAISWWPSYDYCLVLDQRCSDSPTTSISIKLIAGKFYSTLRKTPCLYGSTPRSTKASTTNVDKASSQTLHLLDRLRTVAGSRQGIRNEEMVYSPRYNFLTSIQILDYSKTGDLVVHSVLSWSTSEIDLDKPFRCPHEADKGSLTLSLNSPRTVT

SEQ ID NO: 138270 - protein, 1513 aa, Oryza sativa
  unsure (1)..(1513): unsure at all Xaa locations
  Clone ID: PAT_MRT4530_39676C.1.pep
MFDVRSRRSVASSTRRQQDAELAAAEERRRATAQTVAAAARAARLAAAELAAARAEAEAEAAEDAARVAEVEVETLRSSINGSIAGNITTDRELEELARGRTRGAGRAVQVRHMWEAVRYGDVDYDEDRRALDALITAVPPEMQFSLSQKRTAKEAWDAIAVAHIGSDRACKSTLQALRKEWENLAFKPGEDVDDFALRLNTLLQKMVQYGDDTYDEERAVEKLFRCVPEKYRQIARSIESLLDLSTMSIEEALGRLKVVDGDEPQPLSGPITIGGKLHLTREQWEASQGDGKKGESSPSRGXRKPRKARGGVQLRWTRRHAEGGARRGAQGGAASNHKPARDDACRNCGKLGHWAKDCRQPRRVHACRSTXGQAHIAQVEEEEPTLLLAHASIELSSAAPAATAFLHLXGAESSVKFGDASGVEIKGVGSVTFTAKSGEHMLLTGVYYIPALRNSIISVGQLDENGSCVLVEHGLMRIWDRRHRLLAKVTRGTNRLYILSAQVAQPVCLTARRDDEAWQWHERFGHLHFEALKRLSAKEMVRGLPCLDHVEQLYDVCVLTNKGEAADAIRRAQATAEAECGRKLRVLRTDNGGEFTAAEFTSYCVDEGIWRHYTAPYSPQQNGVVERRNQTVVGMARALLKQRGMPAIFWGEAVVTAIYILNRSPTKALDGRTLYEAWYGRKPGVSHLRVFGCIPFVKELGHIGKLDDRSTLGVFIGYAEGSKAYHILDPETQRVRTARDVVFDEGRGWVWDKAVDDGSTPTYDDFTVEYVHFEGAGGVGSSSSPSVSTPVPEPPPTPTPTHPRATTSTATSSSPTPPQPATRRAPAPTATPLSTSTPTPARVERSPVEFATPLSHDGERIDAYHDGEQLRYRTMEDLLGDQPVPGLVPRDLEAQLHLACGDGEPRSFAEAEKHAAWRAAMQSEMDAVQENRTWELADLPRGHRTITLKKVGASITWLSTLKGMGFEQSPHEAAIYRRGNGGNALLVGVYVDDLVITGTKDTEVAAFKEEMKATFQMSDLGPLSFYLGIEVHPDVSGNTLRQTAYTKRVVELAGLTDCNPALTPVEERLKLSRDSTTEEVDATQYQRLVGSLRYLTHTRPDLAFSVGYVSWSMQRPTAEHQQAVKRIIRYVAGTLDHGLYYPRCPGKAHFVGYSDSDHAGDIDTSKSTSGILFFLGECLVSWQSVKQQVVALYSCEAEYMAASAASTQALWLTRLLSDLLGKDTGAVELRVDSKSALALAKNPVFHERSKHIRVRYHFIRSYLEEGSIKASYINTKDQLADLLTKPLGRIKTASTPLAYFSVARTAAILIDQRNAYLSAIRDGAGQWFNFSDAETPPDILDAQPILYLKADYGHLLQDWDEVTVGPPSVLDSYYRLLNFNNGLPRDHPLIHVQRKAIARLAVMFCEAARLRSVRALVYHQMDLYVNGTITSLITRKRITSWSLISAFALHCWRREHDGIEGYLQEELDKLHPIDIYDANLVAGEPDGELLLILYREEAFAGLQQHAPEPQLQ

SEQ ID NO: 138271 - protein, 474 aa, Oryza sativa
  Clone ID: PAT_MRT4530_39677C.1.pep
MAKNPKAAKNRRPTTRRPRAAAATATATASASADIEDLASPSGCRAVAGPTTAAAAVRAELLRWYDANRRDLPWRRAAEPPAGSGSGRGEEQRAYAVWVSEVMLQQTRVPVVVDYYSRWMARWPTVDSLAAATQEEVNEMWAGLGYYRRARFLLEGAKQIVEKGEFPCTASTLREVRGIGDYTAGAIASIAFNEVVPVVDGNVVRVISRFYAIPDNPKESSTVKRFWQLTGELVDPSRPGDFNQAMMELGATLCSKTKPGCSQCPVSSHCQALALSSQNASVKVTDFPRVVPKAKPRSDFAAVCVVQISQGFGEGIAEAEGKDNLFLLIKRPEEGLLAGLWEFPSVLVNEGKTDTLNRRKEMDKYLKQLLSIDVTRRSSVILREDVGQHVHIFSHIRLTMFVELMILNLKDDGEELCKEGQDSTKLRLINENAVQSMGLTSGIRKVYNMVKVFKEKRLKEQSQVPTRKRSRRLK

SEQ ID NO: 138272 - protein, 179 aa, Oryza sativa
  Clone ID: PAT_MRT4530_39678C.1.pep
IRHEAFGDKVLSGDFSINGEQTHYGSGTDIVQFPAGGFLHSFQLQDNSKISQDNSRSADTQNTPDKSKLSSILGRMEAGKGRVAVYGDSNCLDSSHMVTNCYWLLRKLVEFTGNRIKDPVLFSESAQLKFPVFESIHQLSRKPDVNFSKYSTVVGNELICHQDSRFEVWGTKGYGTQQT

SEQ ID NO: 138273 - protein, 226 aa, Oryza sativa
  unsure (1)..(226): unsure at all Xaa locations
  Clone ID: PAT_MRT4530_39679C.1.pep
WIPGLQAYTNHSFTIGEVKHLWRKNRCARTYGRNLSMRVDNFEHPTETNVLCSDWNSWKDPIIWFDGTTDAVGIQFFLKNVHARMKTAASSLFGSPGSXRARPNTFGELMQVIISPSQTVEKAVQWALKGSSPDIVLHMRMMTNRPVRARKAAVNCIKRAIEIRHLKGTPRVAVISDTPGFAKDIKQDISEFAEVIYFDHKKFSRSNDLEITGSEKALDFRSRDWG

SEQ ID NO: 138274 - protein, 335 aa, Oryza sativa
  unsure (1)..(335): unsure at all Xaa locations
  Clone ID: PAT_MRT4530_3967C.1.pep
MLVKVVVQRGDXADEEEXXAGAXTTAFRRNSGEEEVMPGKKAMPRCRRXRWRRRSAHRRXTAAGWREYSGTNVTGCRRGHRSGEFPARRRXAGEGDGXCRAEGGDGTAGRCSGEEGEAAGGGRQGGMRRATAGVRLRRSPRETEGRPAKRRRLRCXRRRRRGRPAHGRGGTGGWRSPPAWEREGDAGDGARDHGEARDGVKTVERSAGIPFYMREEGAGHGGGRNGGGKAGRRQWKAAGNGAAASARARARHVREGSGLGAGAXLGRRPAQEERIERRPGPGRPGGEGKREAAREGEGRGRWAEGKGAQEEEGEKRGRRGGLRTGLGPKEEEEGF

SEQ ID NO: 138275 - protein, 1292 aa, Oryza sativa
  Clone ID: PAT_MRT4530_39680C.1.pep
MSDARSRRSVASSTRRQQDAELAAAEERRRATAQTAAAAARAARLAAAELAAARAEAEASEDAARVTEVEVETLRSSINGSIAGDITADRELEELARGRARERAERWAAAHLHGGGGGPRDHAPADGNPDGRGRAGGSPEPARGPRRQRGSLSPDRRHGHHGVQTVVRDFGPGGGWPTLTKTNYIEWAAVMRVRLQVRHMWEAVRDRARKSTLQALRKEWENLAFKPGEDVDDFALRLNTLLQKMVQYGDDTYDEERAVEKLFRCVPEKYRQIARSIESLLDLSTMSIEEALDRFKVVDGDEPQPLSGPITIGGKLHLTREQWEASQGDGRKGESSSPTGGRKPRKARGGVQLRWARRRAEGGARRGAQGVATGNHKPARDDACRNCGKLGHWAKDCRQPRRDQAHVARVEEEEPALLLAHASIELPPAAPAAAAFLHLDEPKVLVSLCNGSSNDKADGWYLDTGATHHMTGRREFFTEFDSSVRGSVKFGDASGVEIKGVGSVTFTAKSGEHRLLTGVYYIPALRNSIISVGQLDENGSRVLVEDGFMRIWDRRRRLLAKVTRGTNRLYILSAQVAQPVCLAARRDDEAWQWHERFGHLHFEALKQLSAKEMVRGMPCLDHVEQLCDVCVGSKAYRILHLETQRVRIVRDVVFDEGRGWVWDKAVDDGSTPTYDDFTVEYVHFEGAGGVGSSSSPSVSTLAPESPPTPTPTHPRATTSTTTSSSSTPPQPVTPHAPAPTATPPSTSTPTPARVERSPVEFATPLSHDGERIDAYHDGEQLRYQAEKHAAWRAAMQSEMDAVQENRTWELADLPRGHRAITLKWVFKLKRDEAGAIVKHKARLVARGFVQQEGIDYDDAFAPVARMESVRLLALAAQEGWGVDHMDVKSAFLNSDLKEEVYVHQPPRFVIPGKEGKVLRLHKALYGLRQAPRAWNAKLDSTLKGMGFEQSPHEAAIYRRGNGGNALLVGVYVDDLVITGTKDAEVAAFKEMKATFQMSDLGPLSFYLGIEVHQDDSGITLRQTAYAKRVVELAGLTDCNPALTPMEERLKLSRDSTAEEVDATQYRRLVGSLRYLTHTRPDLAFSVGYVSRFMQRPTTEHQQAVKRIIRYVAGTLDHGLYYPRCPGKAHFVGYSDSDHAGDIDTSKSTSGILFFLGKCLVSWQSVKQQVVALSSCEAEYMAASAASTQALWLARLLSDLLGRDTGTVELRVDSKSTLALAKNPVFLERSKHIRVRYHFIRSYLEEGSIKASYINTKDQLAYLLTKPLGRIKFLELCSRIGMAQLPHKTTHKT

SEQ ID NO: 138276 - protein, 1505 aa, Oryza sativa
  Clone ID: PAT_MRT4530_39681C.1.pep
ALSQQQQQHRLLLLPLSLSPLHAAAPRRCAMSDARSRSSVASSTRRQQDAELAAAEERRRATAQTAVAVARAARLAAAELAAARAEAEAAEDAARAAEVEVETLRSSINGSIAGDITADRELEELARGRARERAERWAAAHLHGGGGGPRDRAPADGNPDGRGRASGSPEPARAPRRQRGSLSLDLRHGHHGVQTVVRDFGPGGGWPTLTKTNYIEWAAVMRVRLQVRHMWEAVRNDRARKSTLQALRKEWENLAFKPGEDIDDFALRLKTLLQKMVQYGDDTYYEERAVEKLFRCVPEKYRQIARSIESLLDLSTMSLEEALGRLKVVDGNEPQPLSGPITIGGKLHLTREQWEASQGDGRKGESSSSTGGRKPRKVREGVQLRWARKRAEGGARRGAQGVATGNHKPAQDDACRNCGKLGHWAKDCRQPRRGQAHVARVEEKKPALLLAHASIELPPAAPAAAAFLHLDEPKVLVSLCNGSSNDKADGWYLDTGATHHMTGRREFFTEFDSSVRGSVKFGNASGVEIKGVGSVTFTAKSGEHRLLTGVYYIPTLRNSIISVGQLNENGSRVLVEDGLMRIWDRRRRLLAKVTGGTNRLYILSAQVAQPVCLAARRDDEAWQWHERFGHLHFEALKQLSAKEMVRGMPCLDHVEQLCDVCVVTKQRRLPFPQQTSFRAKERLELMHGDLCGPVTPATPGGRCYFLLLVDDLSRYMWVMVLGSKGEAADAIRHAQAAAEVECGRKLRVLRTDNGGEFTAAEFTSYCADEGIQRHYTMPYSPQQNGVVERRNQTVVGMARALLKQRGMPAIFWGETVVTAAYILNRSPTKALDGRTPYEVWHGRKPAVSHLRVFSCLAFAKELGHIGKLDDRSTPRVFIGYAKGSKAFRILDPETQRVRTARDVVFDEGRGWVWDKAVDDGSTPTYDDFTVEYVYFEGAGGVGSSSSPSVSTPAPESPPTPTPTHPRATTSTTTSSSLTPPQPVTPHAPAPTATPPSTSTPTPARVERSPVEFATPLSHDGERIDAYHDGEQLRYRTMEDLLGDQPVPVPRDLEAQLHLACNDGEPRSFAEAEKHAAWRAAMQSEMDAVQENRTWELADLPRGHRAITLKWVFKLKRDEAGAIVKHKARLVARGFVQQEGIDYDDAFAPVARMESEGWGVHHMDVKSAFLNDNLKEEVYVHQPPGFVIPGKEGKDAEVAAFKEEMKATFQMSDLGPLSFYLGIEVHQDDSEITLRQTAYAKRVVELAGLTDCNPALTPMEERLKLSRDSTAEEVDATQYRCLVGSLRYLTHTRPDLAFSVGYVSRFMQRPTMEHQQAVKRIIRYIAGTLDHGLYYPRCPGKAHFVGYSDNDHAGDIDTNKSTSRILFFLGKCLVSWQSDKQQVVALSSYKAEYIAASAASTQALWLARLLSDLPGRDTGTVELRVDSKSALALAKNPVFHERSKHIRVRYHFIRSYLEEGSIKASYINTKDQLADLLTKPLGRIKFLELCSRIGMAQLAHKTTHKT

SEQ ID NO: 138277 - protein, 1722 aa, Oryza sativa
  unsure (1)..(1722): unsure at all Xaa locations
  Clone ID: PAT_MRT4530_39682C.1.pep
MEGMRWHRVVTVVCIPNELHPSSSRSTVSNVFPALESLKFRDMGAWEEWSEFKDEHFPQLKYLSIVRCAKLTVLPNFTSGPKQRIRSCEKLLQPLCQNIRRNLMKYIPPPSELSYACMAEGSTPSFFFLRDILRCMHSKKGKDPMLLNHRYHVKELPNGKIPINPKCVNIVFGIPRTGVTIKPNNPKHEFIKILKHLFRVSSGTQISVQQLQVHLKEIIAPTTSNQPSMQYANVCLDVNNIAKYNWAEDMLSTIRNAVLQLLYLDYIDASGCNVPWGEPRVAFWTDQAAKPLKNADMGSGLYAVYGSCKDSIYSLSIFSVTRTAAVEVETLRSSINGSIAGDITADKELEELARGRARERAERWAAAHLHGGGGGGGPRDRAPADGNPDGRGRAGGIPEPARGPRRQRGSLSPDRRHGHHGVQTVVRDFGPGGGWPTLTKTNYIEWDAVMRVRLQVRHMWEAVWYGDVDYDDDRRALDALIAAVPPEMQFSLFQKRIAKEAWDAIAAARIGSDRARKSTLQALRKEWDNLAFKPGEDKMVQYGDDTYDEERAVEKLFRCVRENYRQIARSIESLLDLSTMSIEEALGRLKVVDSDEPQPLSGPITIGGKLHLTQEQWEASQGDKRKGESSSPTGGRAQGGATGNHKPARDDACRNCGKLGHWAKDRRQPRRGQAHVARVEEEPALLLAHASIELPPAAPAAAAFLHLDEPKVLVSLCNGSSNNKADGWYLNTGATHHMTGRREFFTEFDSSVRGSVKFGDASGVEIKGVGSVTFTAKSGEHRLLTGVYYIPALRNSIISVGQLNENGSHVLVEDGLMRIWNRRRRLLAKVTRGTNRLYILSAQVAQPVCLAARRDDEAWQWHERFGHLHFEALKRLSAKEMVRDMPSLDHVEQLCDVSVVTKQRRLPFPQQTSFRAKERLKLVHGDLCGPVTPATPGGRRYFLLLVDDLSCYMWAECGRKLRVLRTDNGGEFTAAEFASYYADEGIQRHYTTPYSPQRNGVVECRNQTVVGKAQALLKQRGMPAIFWGKAVVTAVYILNRSSTKALDGRTPYEAWHGRKPAVSHLRVFGCLAFAKELGHIGKLDDRSTPGVFIGYAKGSKAYRILDPEXQRVRTARDVVFDEGRGWVWDKVVDDGSTPTYDDFTXQPATPRAPAPTATPPSTSTPTPARVERSSVEFATLLSHDGERIDAYHDGEQLRYRTMKDLLGDQPVPGLVPRDLEAQLHLACDDGEPRSFTEAEKHAAWRAAMQSEIDAVQENRTWELADLPRGHRAITLKWVFKLKRDEAKAIVKHKARLVERGFVQQEGIDYDDAFAPVAQMESVRLLALAAQEGWGVHHMDAKSVFLNDDLKEEVYVHQPPGFVIPGKKGKVLRLHKALYGLRQAPRAWNAKLDSTLKGMGFEQMEEMPCWWDVEVAAFKEEMKATFQMSDLGPLSSYLGIEVHQDDSRITLRQTAYAKRIVELARLTDCNPALTPMEERLKLNRNSMTEEVDATQYQRLVGSLRYLTHTRPDLAFSVGYVSRFMQRPTTEHQQAVKRIIRYVAGTLDHGLYYPRCPGKAHFVGYSDSDHAGDIDTSKSTSGILFFLGECLVSWQSVKQQVVALSSCEAEYMAASAASTQALWLARLLSDLLGRDTGAVELRVDSKSALALAKNPVFHERSKHIRVRYHFIRSYLEEGSIKASYINTKDQLADLLTKPLGRIKFLKRCSRIGMAQLPHKTTHKT

SEQ ID NO: 138278 - protein, 366 aa, Oryza sativa
  Clone ID: PAT_MRT4530_39683C.1.pep
MEKVQASCEGDQGICKRGAKGGHPIDQNLVGGMTMSTGVPTTVPPTPALAALKNLLIRVVAAAAGKGLSSSAEEARCLWAKLPAPEEEEEAGQQPERPPSSYRRPPTSTLMAPVGLPPGFRFHPTDEELVNYYLKRKIHGLKIELDIIPEVDLYKCEPWELAEKSFLPSRDPEWYFFGPRDRKYPNGFRTNRATRAGYWKSTGKDRRVVHQHGGRAIGMKKTLVYYRGRAPQGVRTDWVMHEYRLDDKDCEDTMPIKDTYALCRVFKKNAICTEVEELQGQCSMALLEGACQQLLASGGGGSQEQYETPSPPDVPVGSTFGGADADAEDDPDKDDSWMQFISDDAWCSSTADGGAEESTSCVALAG

SEQ ID NO: 138279 - protein, 2588 aa, Oryza sativa
  Clone ID: PAT_MRT4530_39684C.1.pep
MAAPPNSPIGWWREVRARLWLHTVEVEVNFLAHPFVVYSHFPLFESGSPPSFSLKAALHLISKKKDQGPLLLGVSCSSDLTTSQIATKKLYFAKMKDSAYDADDVMDEFDYLILKANAQQKSKLSSLASSSLAIGKRLVGQDKFRSKLRRVLNSLIRVKECADMLIKVIGAENSNSYMPPQPLQWRVTSSISPGQIIIGRQNEQDDLVHRLLREADGPEPSRGLTISPTPSIITIVGSGGIGKTALAQLIYNDRRIVSGFDLRTWIYVSNIFNKVKITKEILKSIDRNSDITNFSFNMLQEDLKNKLTAKKFLLVLDDVWYDEKIGELTNADRWRELFAPLCYGAKGSKILVTARTNIVSRILGCPAPFHLEGLKGEDSWNLFRICAFGAEDPGNYPELESIGECIVQKLNGSALVIKVVGAHLNANLNVEEWTRVMKSSSSNKEDIMQILRLSYECLPGHLQQCFTFCSLFPKGYSLEPDLLVNMWIAHKFVHGHIGTYESMRETGRSYFNELLSRSFFQELQYGHTIRYVMHDLMNDLASHISRAAPRRCAMSDARSRRLVASSTWRQQDAELAAAEERRRATAQTAAAAAARVAKLAAVELAAARAEAEAEAAEDAARAAEVEVETLRSSINGSIAGDITADRELEELARGRAWERAERWAAAHLHGGGGGPRDRAPADGNPDGRWRAGGSPEPARGPRRQRGSLSPDWRHGHHGVQTVVRDFGPGGGWPTLTKTNYIEWAAVMRSGTGDVDYDEDRRALDALIAAVPPEMQFSLSQKRTAKEAWDAIAAARIGSDRARKSTLQALRKEWENLPFKPGEDVDDFALRLNTLLQKMVQYGDDTYDEERAVEKLFRCVPEKYRQIARSIESLLDLSTMSIEEALGRLKVVDGDEPQPLSGPITIGGKLNLTREQWEASQGDGRKGESSSPTGGRKPRKARGGVQLRWARRRAEGGARRGAQGVATGNHKPARDNACRNCGKLGHWAKDCRQPRRGQAHVARVEEEEPALLLAHASIELPPAAPAAAAFLHLDEPKVLVSLCNGSSNDKADGCVQGSVKFGDASGVEIKGVGSVTFTAKSGEHRLLTGVYYIPALRNSIISVGQLDENGSRVLVEDGLMRIWDRRRRLLAKVTRGTNQLYILSAQVAQPVCLAARRDDEAWQWHERFGHLHFEALKQLSAKEMVRGMPCLDHVEQLCDVCVVTKQRRLPFPQQTSFRAKERLELVHGDLCGPVTAATPGGRRYFLLLVDDLSRYMWVMVLGSKGEAADAIRHAQATAEAECDRKLRRGMPAIFWGEAVVTAAYILNRSPTKALDGRTPYEAWHGRKPAVSHLWVFGCLAFAKELGHIGKLDDRSTPGVFIGYAEGSKAYRILDLETQRVRTARDVVFDEGRGWVWDKAVDDGSTPMYDDFTVEYVHFEGAGGVGSSSSSSVSTPAPESPPTPTPTHPRATTSTTTSSSSTPPQPVTPHAPAPTVTPPSTSTSTPARVERSPVEFATPLSHDGERIAYHDGEQLRYRTMEDLLGDQPVPGLVPRDLEAQLHLACDDGEPRSFAEAEKHAAWRAAMQSEMDAVQENRTWELADLPRGHRAITLKWVFKLKRDEAGAIVKHKARLVARGFVQQEGIDYDDAFAPVARMESVRLLHALAAQEGWGVHHMDVKSAFLNGDLKEEVYVHQPPGFVIPGKEGKVLRLHKALYGLRQAPRAWNAKLDSTLKGMGFEQSPHEAAIYRRGNGGNALLVGVYVDDLVITGTKDAEDDSGITLRQTAYAKRVVELAGLTDCNPALTPMEERLKLSRDSTAEEVDATQYRRLVGSLRYLTHTRPDLAFSVGYVSRFMQRPTTEHQQAVKRIIRYVAGTLDHGLYYPRCPGKAHFVGCEAEYMAASAASTQALWLARLLSDLLGRDTGTVELRVDSKSALALTKNPVFHERSKHIRVRYHFIRSYLEEGSIKASYINTKDQLADLLTKPLGRIKRLVTFPKCLGTLSSILCIDVHRMCTVDLAASSHMPCLRAAGEFCVDKSKVQGLEVLKQMNELQGSLAITSLENVKSRDEATDAQLFRKSQIFKLKLQWGSSNASSKSDKANDVFDALRPHSGLEELIVQGYPGCVSPSWLESEWLSRLRHISISDCKCWKLLPSLGQIQSLRTLRIARLNAVVCIGPEFYGTAGFPSLEILEMIELPELAEWSSVDCFFPALLEVCIRGCPKLKQLPPVVLPPVRMSIYVSTEVCRLRNHNRLETCFTQEVSLSTLLDMLHLRRLEPVKCVNIIFEGANTLEDGLKDVTTNLPSLEELVIRGCSDLQHAFAASKQREEDGNVFSSASIQCLKMIGCNLTVDIFLSVFQNISFLSLWINDCNITYSTPERVLAMPKSVTGVLEKLCILSCDGLTAFMGLETFLRLSTIEIASCPKLTSVPDFRCLPALQNLIIKNCPELKELPENGNLTTLTALVVEHCNALISLRNLRDLSFLSKLVVRNCMKLMALPQMISFSSLRVLIIKNCPEVVSLPEDGLPVSLNCLYLAGCHPVLEEQFDQKNGSEWEKYEVLPFCFFADKSIEDIEEIAKEVLMADDLTRISIQGNRVHATDSAASSSSFP

SEQ ID NO: 138280 - protein, 190 aa, Oryza sativa
  Clone ID: PAT_MRT4530_39685C.1.pep
MWSRRESRNMPPMTGHARCRGRRCTPPLLALPPQPATAVEVVVFSSPLSPHRSSEHEAGSGKLEVHELRGHTSSWPRCLRSHRSSREGALIHADRGDRRRGGGRSISVVERRESSRSSATTWSSPPLILSSSVGRELVAAAGREERPVGAHHSGREGACHRHHRRSGKSAPSPERSKPSSGTSIHAGYDD

SEQ ID NO: 138281 - protein, 155 aa, Oryza sativa
  Clone ID: PAT_MRT4530_39686C.1.pep
MASSVLPRPNLAMAKSTPFGVYSSPYILRLGGLWLGEVWSKGLMPYRQHRKDNVAYNHLLGLKPYDLGADLGIHPRGYGMRVLGLEPLVTIMLPKGWMKPGMMSSLSAHASAPSPLQSYTKIGGSDGTWLGKLAPWAVCGCKAPPTPLAARRALY

SEQ ID NO: 138282 - protein, 143 aa, Oryza sativa
  unsure (1)..(143): unsure at all Xaa locations
  Clone ID: PAT_MRT4530_39687C.1.pep
YIKKCNINISRGSKSVETYQYLLEESDKISSTLKSMISTIQECEHQNINVEDNILQNGKAEVNENSENIDVEEQTMNDEXYLEDPDIENSKGRPRQRNKTINEQIEEKETNHCSHCGRTDHTFPTCPFKHMEFDLPRKKKRKV

SEQ ID NO: 138283 - protein, 48 aa, Oryza sativa
  unsure (1)..(48): unsure at all Xaa locations
  Clone ID: PAT_MRT4530_39688C.1.pep
MACQIGDGTTALFXEDRWLDGSCIRSLAPALYDHVPKRTRRRRTVAEG

SEQ ID NO: 138284 - protein, 52 aa, Oryza sativa
  unsure (1)..(52): unsure at all Xaa locations
  Clone ID: PAT_MRT4530_39689C.1.pep
VDNRQRVEVPSFEFRSLLRGVSVDCHLVRWAGTVSGLKTSPPRVGXRGGTQE

SEQ ID NO: 138285 - protein, 1771 aa, Oryza sativa
  unsure (1)..(1771): unsure at all Xaa locations
  Clone ID: PAT_MRT4530_3968C.1.pep
GIESHSQHIHHSLRNPRTSVPQYPLYPXYPPSTVARHVGGLGAQGSTTISSSFVDNSVNTNLDQGVPASTMLVCTQVGEIVFPIYTTVPISAGPSVTGSENTVATTQDDFMSKDPPAEAENGTSTTSEPEKDPNAAKPCLFNKNHEPTRITSEVIRSWCPIHKTRKHTLQACWVFLNVHAEIRACKERGIQRTSPTRDIYCPIHKTKNHDLSSCKVFLSAMKTAPPKVQQSCISPRDADKEQGATLISDRFVGVIDIDPHKPSVLHLLEDYGSSSTSTPREVLAIDRTSTSARANAEVENQVTTLAQHIRAINAILREAPYDPVLNDDLARWTERLQESVTNLSNAFEEAVATAHPEQPPTGGANGENPEQRESPHRATPPPRGTGDLRDHLNGRREARRTRDNGNRSXHRVSSRRHDNGDNRHNYHDHDDREWRVPGDTGRGRRHNDDDNGDRRWDNNGRRRQDSREPGRRPCNRTPEXDDNAFSNYLPTALKGSARSWLMHLPPYSISSWADLWQQFVVNFQGTYKRHAIKDDLHALTQNPGESLRDYVQRFNECRNTIPEITDASVIRAFKSGARDRYTTQELATRRITTTWRLFEIVDRCAHADDALRRKNDKPKTAGEKKPAKDAPESSKKKNHKSGKKKAQAEVLAAEYADPPKRPDLQGSDAKEAWCAIHKSDRHSLEDCLVFKKSLGKHMASEKSKRVRVVEKDTETATXESDSSYPDSDLHVXTSLEVPRRRYPIVVEPTIRNIKVARVLIDGGSSINLLFASTLDAMGIPRSELTPTDQPFHGITPQSSSEPLGKITLPVTFGQASNFRTEQITFHVTEFDTAYNAIIGRTALAKYMAASHYAYQVLNMPGPKGTITIQGNAKLAVQCDKRSLDMVEHTPSPPATAEPLKKVSKTNKTPKPDGAIRIVPLSSANPDRTELALITFLRDNAGVFAWQPSDMPGVPREVIEHKLMVRPDAKPVKQKLRRFAPDXNKTYXEELDKLLKASFIREVLHPEWLANPVMVRKANGKWRMCVDFTDLNKACPKDHFPLSRIDQRVDSTAGCELLSFLDAYSGYHQISMAKEDEEKTTFITPFGVFYYVKMPFRLITAGNTFQRTVQGALSDQLGNNVEAYVDDIVVKTKTSDSLIDDLRETFDNLRRYRLMLNPEKCTFGVPSGKLLGFLISSRGIEANPEKIKAIDNMKSPTRLKEVQKLSGCMAALSRFVARMGERGQPFFALLKKQNKFIWTXEAEEAFIALKCXLSNPPILVAPQPNEELFLYIVATPYSVSTVIVVEREKVQRPIYYISEALHDAKTRYPQIQKLLYAVIMTSRKLRHYFQTHRGAGAGFILTSPSGDQFKHAIHLNFKATNNTAEYEGLLAGIRAAATLVVKGDSELVANQVHKDYKCSSPELSKYLAEVRKLEKRFDGIEVRHVYRKDNIEPDDLAWRASRREPLEPGTLLDVLTKPSVKEASDEDSPVAPDISLGATEAERAVADIETTDDWRTPLMKFICSEELPEDDEEADKITCKAKIYCMIGNDLYKKAPNGVLLKCVSSDDDRHLLLDIHEGICGSHAAGRTLVGKAFRQGFFWPTALKDACDMXHTKLPAQALQTIPLTWPFSSWGLDILGPFPRGXGGYRFLFVAIDKFTKWIEATPTGKIKADAIKFIKGIFCRYGLPHHIITDNGSQFISADFQDYCIGLGVKICFASVSHPQSNGXVERANGIVLEGMKTLLWAVRTTPTTSNKETPFFLVYSSEAMLPTELRHQSTRVQKYFDENQEEQ

SEQ ID NO: 138286 - protein, 177 aa, Oryza sativa
  Clone ID: PAT_MRT4530_39690C.1.pep
MALPEHMGSSIAVAISGSLDPHKDSCRDSLHDMNQARPRISRGRPLVATTPLPLLLSVVMLPQPDAITSISEKDRIVGSSGPNFFAGGSDWLETRSTSHRGIGQGRWEDGKCGVSNTGYERDPNDNGNSEQIPTMMTMTSRIQMAMVVISGAATVGSGDHGIKLSHSGQIQRETEVV

SEQ ID NO: 138287 - protein, 47 aa, Oryza sativa
  Clone ID: PAT_MRT4530_39691C.1.pep
MVHANPLPWSWFLNSQFLFVQKKKKKKKKKKKKKKKKKKKKKKKKKK

SEQ ID NO: 138288 - protein, 65 aa, Oryza sativa
  unsure (1)..(65): unsure at all Xaa locations
  Clone ID: PAT_MRT4530_39692C.1.pep
AVXTHVSLECIDMPQIHGSHGFTVTDDAAPPGRYVWFFICHPVCFTSSSAWRGATSPTTTSRSRR

SEQ ID NO: 138289 - protein, 57 aa, Oryza sativa
  unsure (1)..(57): unsure at all Xaa locations
  Clone ID: PAT_MRT4530_39693C.1.pep
TPGYCLDWGMELASCIGSHVGVDFCLSMHVHLYIHRKSKFAINLDTLFICLPRMXMD

SEQ ID NO: 138290 - protein, 841 aa, Oryza sativa
  Clone ID: PAT_MRT4530_39694C.1.pep
MSQHSFRLQTTGAAAASNLFFLFFRRLTNHNPPGKEKMSSSYDEGKSFARRDLLLKIQSEVQKCWEENKVFEAKAGDTPPSPGEKFFGNFTYPYMNGMLHLGHAFTLSKLEFAAAYHRLHGSNVLLPFAFHCTGMPIKPSADKLGKEIQQYGNPPVLPPANKNSKFELTNDRIYGQTTASAQDKYRSKRSKSVAKSGSYKSQWEIMRSFGIADGEIVEFQNLHHWLSYFPPLAMEDLEDFGLSCDWRRSFITTDMNPFYDAFVQWQMRKLKKMHRIVKGKQYMIYSPLDRQPCLGHDRASGEEVEPQEYVLIKMKVIPPFPPKLMVLEGRNVYLAAATLRPETIYGQTGGEATARAARNLAYQMLSRVPEKPTCLVELLGTDLIGLPLKSPLASNEVIYVLPMQNILVDKGTGIVTSVPSDTPDDFIALQELVKNQDFRVACGVKDEWVFPFEVIPIIDVPSFGNKSAEKVCFDLKMDSPDEKEKLAKAKEITYLKGFDDGIMIVGEFSNRKVQEVKPLIKEKLLKADMAVLYYEPQEKVISRSGDDCVVALTDQWLITYGEAEWKQKAIECLDKMNTFSVEARNSFEHTLNWLTSRARSCSFGLGTRIPWDEKFLVDSLSDSTLYMAYYTIAHILQNGNIYGSDNSYIRPEQMTDEVWDYVFCNGPAPKTSIPSTVLTKMKQEFEYWYPFDLRISGKDLMQNHLAFCIFNHTTLLPKHHWPRGFRCNRHLLLNSEKMSKSTGNFRTLRQAIEEFSSDATRFALADVGDGMDDENFVSETANSAALRLTKEISWMKEVFDDKSSFRLGPPSTYADRVFANEINFAIKDTEIIMMLPCFEML

SEQ ID NO: 138291 - protein, 67 aa, Oryza sativa
  Clone ID: PAT_MRT4530_39695C.1.pep
PQFPTPPSATVLPAHACPRPLPFLASIRRSASFVVVVQEAIEMIRRRTPPVTVRKPAMVRVPGLQET

SEQ ID NO: 138292 - protein, 67 aa, Oryza sativa
  Clone ID: PAT_MRT4530_39696C.1.pep
YGLLAPMNPVILTNTHALLPEWVDSTSSFIPIHYFVGGFTVLHLSRSMPHICTAPSFANCMLVQHKL

SEQ ID NO: 138293 - protein, 85 aa, Oryza sativa
  Clone ID: PAT_MRT4530_39697C.1.pep
TWAFKEKNIFIKVSPKNLFIFPEKAFWLIRKKAKRLGPRGFGPLVTGRGRLGPFNRGGTGEDHKKRAKGPSLSTTHGGTRHELKG

SEQ ID NO: 138294 - protein, 166 aa, Oryza sativa
  Clone ID: PAT_MRT4530_39698C.1.pep
PTRPKNPRLRWTPELHLSFVRAVDRLGGQDRATPKLVLQLMNVRGLSIGHVKSHLQMYRSKKIDESGQVIGGESWRSDDHLLVGSKPYYPPAAEAEAPFRRSSASEGSNHQEGPLNLDLSLDICPRGEKRKRECSWRKQEEDHDHATVAIGADQEAESCATGLSLS

SEQ ID NO: 138295 - protein, 321 aa, Oryza sativa
  Clone ID: PAT_MRT4530_39699C.1.pep
MGSAGKEEEEEDGGGGAPAAAANNYGSSTTSSTTEEEGSGESRRRTSSSSSVRPYVRSKNPRLRWTPELHLSFVRAVDRLGGQDRATPKLVLQLMNVRGLSIGHVKSHLQMYRSKKIDESGQVIGGESWRSDDHLQMQGGGHGGQAYNLGHLSLPALHHRSITAGSGTIFQSRFGNSWSPWRCHGSYWLPAGHHLLVGSKPYYPPAAEAEAPFRRSSARYVARANTSNHPDFVQGSSSSPDDNIMNHQRPVLKEMICSEGSNHQEGPLNLDLSLDICPRGEKRKRECSWRKQEEDHDHATVAIGADQEAESCATGLSLSLF

SEQ ID NO: 138296 - protein, 309 aa, Oryza sativa
  Clone ID: PAT_MRT4530_3969C.1.pep
MAVDLMGCYAPRRADDQLAIQEAATAGLRSLEMLVSSLSSSSQAAGAHKASPQQQPFGEIADQAVSKFRKVISILDRTGHARFRRGPVESSAPAAPVAAAPPPPPPPPAPVAAALAPTSSQPQTLTLDFTKPNLTMSAATSVTSTSFFSSVTAGEGSVSKGRSLLSSGKPPLSGHKRKPCAGGHSEATANGGRCHCSKRRKNRVKRTIRVPAISSKIADIPPDEYSWRKYGQKPIKGSPYPRGYYKCSTVRGCPARKHVERATDDPAMLVVTYEGEHRHTPGPLPAPPAAAAVAAMPVSVAVSTGNGHV

SEQ ID NO: 138297 - protein, 68 aa, Oryza sativa
  Clone ID: PAT_MRT4530_396C.1.pep
FYSERRYTNLPTRQVFISQPMTLILNMKDVTRPFTLYTQQSEHALSKSVSIRGWPITLRQGNYLAPKI

SEQ ID NO: 138298 - protein, 119 aa, Oryza sativa
  Clone ID: PAT_MRT4530_39700C.1.pep
MGLLFVELLPRHGDGGGPASAVLKCRRCRVDAASADAILSRDFRGRFGRAYLFDHVVNISLGPNEDRYLMTGLHTVKDIYCSCCQQILGWRYEKAYEESEKYKEGKFILEKARMWKEAR

SEQ ID NO: 138299 - protein, 181 aa, Oryza sativa
  Clone ID: PAT_MRT4530_39701C.1.pep
VLQLMNVRGLSIGHVKSHLQMYRSKKIDESGQVIGGESWRSDDHLLVGSKPYYPPAAEAEAPFRRSSARYVARANTSNHPDFVQGSSSSPDDNIMNHQRPVLKEMICSEGSNHQEGPLNLDLSLDICPREKRKRECSWRKQEEDHDHATVAIGADQEAKSCATGLSLSWSDHVPVERCTIT

SEQ ID NO: 138300 - protein, 488 aa, Oryza sativa
  unsure (1)..(488): unsure at all Xaa locations
  Clone ID: PAT_MRT4530_39702C.1.pep
LNGCRPLICLDGCHINTKYGGQLLTAVGMGPNDCIYPIAFAVVEVESLATWKWFLETLKNDLGIENTYPWTIMTDKQKLQFKGEVLKNQLWACARSSSVQEWNKNMDVMRNLNKSAYEWLEKLPPNTWVRAFFSEFPKCDILLNNNCEVFNKYILEARELPILTMLEKIKGQLMTRHFNKQKELADQFQGLICPKIRKKVLKNADAANTCYALPAGQGIFQVHEREYQYIVDINAMYCDCRRWDLTGIPCNHAISCLRHERINAESILPNCYTTDAFSKAYGFNIWPCNDKSKWENVNGPEIKPPVYEKKAGRPKKSRRKAPYEVIGKNGPKLTKHGVMMHYKYCGEENHNSGGCKLKKQGISXRRQRGWLPQQKNHLQWRFNKISLNKNQMLSTSTSSQLLSQLGSTVFSQMADQPNQSSVLSQQQGPLPDPAFIMSNIPSARPAPLTTNTKLGKSVALKKRKTTTGNKKSASAASKKKPAPGIGTN

SEQ ID NO: 138301 - protein, 314 aa, Oryza sativa
  Clone ID: PAT_MRT4530_39703C.1.pep
MEKTSAGKEEGSESKTAAANNDGSSTSSTTEEEESGESQRRTSSSSSVRPYIRSKNPRLRWTPELHLSFVRAVDRLGGQDRATPKLVLQLMNVRGLSIGHVKSHLQMYRSKKIDESGQVIGGGSWRSSDEQQYHHLQMQGGGDGGQAYNLGHLSLPAALHHRHITAGSGTILQSRVANAWSPWRCHGSYWLRAGHHLLVGSKPYYPPPPAEARANTSSNHPDFVQGSSSSPDDHTMNHQRPVVLKEMIYNEGSNHQGGPLNLDLSLDICPRGEKRKRELISWRKHEEDHDHTTIAIGGDQEAESCATGLSLSLF

SEQ ID NO: 138302 - protein, 981 aa, Oryza sativa
  Clone ID: PAT_MRT4530_39704C.1.pep
MVARLRRLGGDAPVYGDGSDEFTVKVHHGGFFVGHGNLRSYLNGKVSWFDNVEIDTWSPLWLDQFVEDLGYLRTPTLKIYWLLPGKDISDGLRVVVSDTYTNVMASMVEKFRTLVVYIDHDDKVAGIDWDDIIDNPGTPLPKVISPNKVNCVEKIIGESSKQQEGNLKEQSSRQQQGSRQQQSNLKEHNNREQQEDDCDEEDSGTKSDDSDEEFYDSDYELDDGDDDLFVDYVDENVIDEGVAKGKKILKGKKARGSRLKGNLAIVPRGDESEDTDEEELNAADSDDEGVRLKFKSFAEEDLNNPNFKVGLVFPSVKKLRQAITEYSVRNRVEIKMPRNDRRRIRAHCEEGCPWNLYTSEDSRAKAFVVKTYDERHTCQKEWILKRCTSKWLAGKYIEAFRADEKMSLTSFAKTVQLQWNLTPSRSKLARARRIAMKTIHGDEVEQYKLLWDYGKKLRRSNPGTSFFLSLMTKYGGQLLTAVGMDPNDCIYPIAFAVVEVESLATWKWFLETLKNDLGIENTYPWTIMTDKQKGLIPAVQQVFPESEHRFCVRHLYSNFQLQFKGEVPKNQLWACARSSSVQEWNKNMDVMRNLNKSAYEWLEKLPPNTWVRAFFSEFPKCDILLNNNCEVFNKYILEARELPILTMLEKIKGQLMTRHFNKQKELADQFQGLICPKIRKKVLKNADAANTCYALPAGQGIFQVHEREYQYIVDINAMHCDCRRWDLTGIPCNHAISCLRHERINAESILPNCYTTDAFSKAYGFNIWPCNDKSKWENINGPEIKPPVYEKKAGRPKKSRRKAPYEVIGKNGPKLTKHGVMMHCKYCGEENHNSGGCKLKKQGISSEEAKRMVATAKESLAMEIQQNITEQEPNVINQDVIDEHIAASQTSSQLLSQLGSTVFSQMADQPNQSSVLSQQLGPLPDPAFIMSNIPSARPAPLTTNTKLGKSVALKKRKTTTGNKKSASAASKKKPAPGIGTN

SEQ ID NO: 138303 - protein, 316 aa, Oryza sativa
  Clone ID: PAT_MRT4530_39705C.1.pep
MVARLRRLGGDAPVYGDGSDEFTVKVHRGGFFVGHGNLRSYLNGKVSWFDNVEIDTWSPLWLDQFVEDLGYLRTPTLKIYWLLPGKDISDGLRVVVSDTDTNVMASMVEKFRTLVVYIDHDDKVAGIDWDDIIDNPGTPLPKVISPNKVICVEKIIRSRSSSQQQGTRQPQSNLKEHNNREQQEDDCDEEDSGTESDDSDEEFYDSDYELDDGDDDLFVDYVDENVIDEGVAKGKKILKGKKARGSRLKGNLAIVPRGDESEDTDEEELNAADSDDEGVRLKFKSFAEEDLNNPNFKVGLVFPSVEKLRQAITEYS

SEQ ID NO: 138304 - protein, 54 aa, Oryza sativa
  Clone ID: PAT_MRT4530_39706C.1.pep
YAHLVQIRYNRRCDIRCYIDLICRKDNVVFSCTYEMQAVYVALGTTPEDLMRIK

SEQ ID NO: 138305 - protein, 993 aa, Oryza sativa
  Clone ID: PAT_MRT4530_39707C.1.pep
MVARLRRLGGDAPVYGDGSDEFTVKVHHGGFFVGHGNLRSYLNGKVSWFDNVEIDTWSPLWLDQFVEDLGYLRTPTLKIYWLLPGKDISDGLRVVVSDTDTNVMASMVEKFRTLVVYIDHDDKVAGIDWDDIIDNPCTPFPLVISPNKSSRQHQGSRQQQSNLKEHTNREQQEDDCDEEDSGTESDDSDEEFYDSDYELDDGDDDLFVDYVDENVIDEGVAKGKKILKGKKARGSRLKGNLAIVPRGDESEDTDEEELNAADSDDEGVRLKFKSFAEEDLNNPNFKVGLVFPSVEKLRQAITEYSVRNRVEIKMPRNDRRRIRAHCAEGCPWNLYASEDSRAKAFVVKTYDERHTCQKEWILKRCTSKWLAGKYIEAFRADEKMSLTSFAKTVQLQWNLTPSRSKLARARRIAMKTMHGDEVEQYKLLWDYGKELRRSNPGTSFFLKLDGSLFSQCYMSMDACKRGFLNGCRPLICLDGCHIKTKYGGQLLTAVGMDPNDCIYPIAFAVVEVESLATWKWFLETLKNDLGIENTYPWTIMTDKQKGLIPAVQQVFPESEHRFCVRHLYSNFQLQFKGEVLKNQLWACARSSSVQEWNKNMDVMRNLNKSAYEWIEKLPPNTWVRAFFSEFPKCDILLNNNCEVFNKYILEARELPILTMLEKIKGQLMTRHFNKQKELVDQFQGLICPKIRKKVLKNADAANTCYALPAGQGIFQVHEREYQYIVDINAMHCDCRRWDLTGIPCNHAISCLRHERINAESILPNCYTTDAFSKAYGFNIWPCNDKSKWENVNGPEIKPPVYEKKAGRPKKFRRKAPYEVIGKNGPKLTKHGVMMHCKYCGEENHNSGGCKLKKQGISSEEAKRMVATAKESLAMEIQQNITEQEPNVINQDVIDEHIAASQTSSQLLSQLGSTVFSQMADQPNQSSVLSQQLGPLPDPAFIMSNIPSARPAPLTTNTKLGKSVALKKRKTTTGNKKSASAASKKKPAPGIGTN

SEQ ID NO: 138306 - protein, 62 aa, Oryza sativa
  unsure (1)..(62): unsure at all Xaa locations
  Clone ID: PAT_MRT4530_39708C.1.pep
PISLYYIIINKNLSCPGYGLCARLLNTAGHQTRTHTKQXTTTNLTMQLASKAWPWLNNGVKG

SEQ ID NO: 138307 - protein, 1030 aa, Oryza sativa
  Clone ID: PAT_MRT4530_39709C.1.pep
MFCRTAKLGFFVCTSLHAVSWIEGFVSSLLGDGSDEFTVKVHHGGFFVGHGNLRSYLNGKVSWFDNVEIDTWSPLWLDQFVEDLGYLRTPTLKIYWLLPGKDISDGLRVVVSDTDTNVMASMVEKFRTLVVYIDHDDKVAGIDWDDIIDNPGTPLPKVISPNKVNCVEKIIGESSKQQEGNLKEQSSRQQQGSRQQQSNLKEHNNREQQEDDCDEEDSGTESDDSDEEFYDSDYELDDGDDDLFVDYVDENVIDEGVAKGKKILKGKKARGSRLKGNLAIVPRGDESEDTDEEELNAADSDDEGVRLKFKSFAEEDLNNPNFKVGLVFPSVEKLRQAITEYSVRNRVEIKMPRNDRRRIRAHCAEGCPWNLYASEDSRAKAFVVKTYDERHTCQKEWILKRCTSKWLAGKYIEAFRADEKMSLTSFAKTVQLQWNLTPSRSKLARARRIAMKTMHGDEVEQYKLLWDYGKELRRSNPGTSFFLKLDGSLFSQCYMSMDACKRGFLNGCRPLICLDGCHIKTKYGGQLLTAVGMDPNDCIYPIAFAVVEVESLATWKWFLETLKNDLGIENTYPWTIMTDKQKGLIPAVQQVFPESEHRFCVRHLYSNFQLQFKGEVLKNQLWACARSSSVQEWNKNMDVMRNLNKSAYEWIEKLPPNTWVRAFFSEFPKCDILLNNNCEVFNKYILEARELPILTMLEKIKGQLMTRHFNKQKELVDQFQGLICPKIRKKVLKNADAANTCYALPAGQGIFQVHEREYQYIVDINAMHCDCRRWDLTGIPCNHAISCLRHERINAESILPNCYTTDAFSKAYGFNIWPCNDKSKWENVNGPEIKPPVYEKKAGRPKKFRRKAPYEVIGKNGPKLTKHGVMMHCKYCGEENHNSGGCKLKKQGISSEEAKRMVATAKESLAMEIQQNITEQEPNVINQDVIDEHIAASQTSSQLLSQLGSTVFSQMADQPNQSSVLSQQLGPLPDPAFIMSNIPSARPAPLTTNTKLGKSVALKKRKTTTGNKKSASAASKKKPAPGIGTN

SEQ ID NO: 138308 - protein, 231 aa, Oryza sativa
  unsure (1)..(231): unsure at all Xaa locations
  Clone ID: PAT_MRT4530_3970C.1.pep
SRTRGHGRLTAGPHAAAARRARRRPRRRXGGRRRARTPMVTGGGHRHGGAAAERGEGKGETRRWSTAHPGAMAATEEAAGAEGGGGAARVNGVGGAPAVGDRNGGVDEVGEDAAKPKEAVPRXEAVRGDDGGGPELGGDGGERERRRELESGEEEGRREAETDGGGAGRVXIGLEGGVAGRRXGRKLARHSRAPSMASAGLGERFSNESKGERRKNWGERERGSRGIFPPV

SEQ ID NO: 138309 - protein, 49 aa, Oryza sativa
  Clone ID: PAT_MRT4530_39710C.1.pep
MCHARITPAEFYLVTSQGLTGGPHGDRGGDHLVASATCQPESEAVTSGR

SEQ ID NO: 138310 - protein, 1786 aa, Oryza sativa
  Clone ID: PAT_MRT4530_39711C.1.pep
MARGVARAASFGGRAATARWCSYRRITVAVCLGNLVAALLVLRSLTSLAPTPPKREEVVEYTEEQIRKAEESIRIRREAEPVELVEAVKNLRKIFRREEKRRKELPLELKQKVSYEIVQLLLDLGDNSSFAQQRARLSSQPAAAPAAPPSPFPPPSPRSSPPEVRHFRRSVASSTRRQQDAELAAAEERRRATAQTAAAAARAARLAAAELAAARAEAEAEVAEDAARAAEVEVETLRSSINGSIAGDITADRELEELARGRARERAERWAAAHLHGGGGGQRDRAPADGNPDGRGRVGGSTEPARCPRRQRDSLSLDRRHGHHGVQTVVRDFGPGGGWPTLTKTNYIEWAAVMRVRLQVRHMWEAVWYGDVDYDEDRRALDALIATVPPEMQFSLSQKRTAKEAWDAIAAARICSDRARKSTLQALRKEWENMAFKPEKYRQIARSIESQLDLSTMSIEEALGRLKVVDGDEPQPLSGPITIGGKLHLTRDQWEASQGDGRKGESSSPTGGRKLRKVRGGVQLRWARRRAEGGARRGAQGGATGNHKPARDDAYRNCGKLGHWAKDCRQPRRGQAHVARVEEEEPALLLAHASIELPPTAPAAAVFLHLDEPKVLVSLCNGSSNDKADGWYLDTGATHHMTGRREFFTEFDSSVRGSVKFGDASGVEIKGVGSVTFTAKSGEHRLLTGVYYIPALRNSIISVGQLDENGSRVLVEDGLMRIWDRRRRLLAKVAQPVCLAARRDDEAWQWHERFGHLHFEALKRLNAKEMVRGMPCLDHVEQLCDVCVVTKQRRLPFPQQTSFRAKERLELVHGDLCGPVTPATPGGRRYFLLLVDDLSRYMWVMVLDSKGEAADAIRRAQAAAEAECGRKLRVLRTDNGGEFTAAEFASYCADEGIQRHYIAPYSPQQNDVVERRNQTVVGMARALLKQRGMPAIFWGEAVVTAVYILNRSPTKTLDGRTPYEAWHGRKPAVSHLRVFGYLAFAKELGHIGKLDDRSTPGVFIGYAEGSKAYRILDPETHRVRTARDVVFDEGRGWVWDKAVDDGSTPTYDDFTIEYVHFEGAGGVGSSSSPSVSTPVPEPPPTPTSTHPRATTSTTTSSSPTPPQPVTPRTPAPTATPPGTYTQTPARVERSPVEFATPLSHDGERIDAYHDGEQLRYRTMEDLLGDQPVPGLVPRDLEAQLHLACDDGEPRSFAEAEKHAAWRAAMQSEMDAVQENRTWELVDLPRGHRTITLKWVFKLKRDEAGAIVKHKARLVARGFVQQEGIDYDDAFAPVARMESVRLLALATQEGWGVHHMDVKSAFLNGDLKEEVYVHQPPGFVIPGKEGKDAEVAAFKEEMKATFQMSDLGPLSFYMGIETAYAKRIVELAGLTDCNPALTPMEERLKLSRDSTTEEVDATQYRHLVGSLRYLTHTRPDLAFSVGYVSRFMQRPTTEHQQAVKRIIRYVAGTLDHGLYYPRCPGKAHFIGCEAEYMAAFAASTQALWLARLLSDLLGRDTGAVELRVDSKSALALAKNPVFHEQSKHIRVRYHFIRSYLEEGSIKASYINTKDQLADLLTKPLGRIKLGGCSNRLAASYGYIYVSNLPREEAVESWRFEKLKDIKSASIQNSTKLDLSNEEARTLKRALQFNWHVLLEDIGLWIPSEVSHTEHDDKPENEPEEEEIIAGPPLPSQCNAELHTDYDGAAVRWGLTHPKESAADCCQACLDQAKNARPGELRCNIWVYCPSEFGCFSPDKYEHKHQECWLKQADHPKLNFKDKYSESYRDSHPTAPVVVPWMSGVISA

SEQ ID NO: 138311 - protein, 1249 aa, Oryza sativa
  unsure (1)..(1249): unsure at all Xaa locations
  Clone ID: PAT_MRT4530_39712C.1.pep
MWEAVRYGDVDYDEDRRALDALIAAVPPEMQFSLSQKRTAKEAWDAIAAARIGSDRARKSTLQALRKEWENLAFKPGEDVDDFALRLNTLLQKIVQYGDDTYDEERAVEKLFRCVPEKYRQIARSIESLLDLSTMSIEEALGRLKVVDGDEPQPLSGSITIGGKLHLTREQWEASQGDGRKGESSSPTGGPAFLHLDEPKVLVSLYNGSSNDKADGWYLDTGATHHMTGRREFFTEFDSSVRGSVKFGDASGVEIKGVGTVTFTAKSSEHRLLTGVYYIPALRNSIISVGQLDENGSRLLVEDGLMRIWDRRRRLLAKVTRGTNRLYILSAQVAQPVCLAARRDDEAWQWHERFGHLHFEALKRLSAKEMVRGMPCLDHMEQLCDVCVVTKQRRLPFPQQTSFRAKERLELMHGDLCGPVTPATPGGRXKGEAADAIRRAQAAAEAECGRKLRVLRTDNGGXEFASYCADEGIQRHYTAPYSPQQNGVVERRNQTVVGMARALLKHRGMPAIFWGEAVVTAVYILNRSPTKALDGKTPYEAWHGHKPAVSHLRVFGCLAFAKELGHIGKLDDRSTPGVFIGYAEGSKAYRILDPETQRVRTVRDVVFDEGRGWVWDKAVDDGSTPTYDDFTIEYVHFEGAGGVGSSSSPSVSTPVPEPPPTPTPTHPRATTSTTTSSSSTPPQPVSPRAPAPTATPPGTSTPTPARVERSPVEFVTPLSHDGERIDAYHDGEQLRYRTMEDLLGDQPVPGLVPRNLEAQLHLACHDGEPRSFAEAEKHAAWRAAMQSEMDAVQENRTWELADLPRGHRAITLKWVFKLKRDEAGAIVKHKARLVARGFVQQEGIDYDDAFAPVARMESVRLLLALAAQEGWGVHHMDVKSAFLNGDLKEEVYVHQPPGFVLPGKEGKVLRLHKALYGLRQAPRAWNAKLDSTLKGMGFKQSPHEAAIYRRGNGGNALLVGVYVDDLVITGTKDAEVATFKKEMKATFQMSDLGPLSFYLGIEVHQDDSGITLRQTAYAKRVVELAGLTDCNPALTPMEERLKLSRDSTAEEQPTTEHQQAVKRIIRYVAGTLDHGLYYPRCPGKAHFVGYSDSDHAGDIDTSKSTSGILFFLGECLVSWQSVKQQVVALSSCEAEYMAASAASTQALRLARLLGDLFGRDTGAVELRVDSKSALALAKNPVFHERSKHIRVRYHFIRNYLEEGSIKASYINTKDQLADLLTKPLGRIKFLELCSRIGMAQLSHKTTHKT

SEQ ID NO: 138312 - protein, 55 aa, Oryza sativa
  Clone ID: PAT_MRT4530_39713C.1.pep
MGPDVDIGGAVDVMDVGGQVRIVDTAREDKACIVENMKHNEGNTITSLLSLKTAP

SEQ ID NO: 138313 - protein, 85 aa, Oryza sativa
  Clone ID: PAT_MRT4530_39714C.1.pep
SNTSKHLCLQLQTIEYSLHSANEANLSGQRWLTPPGSIIPTSSQEMREMTPKGEPSEGGQLHFDFPGAKNGTSSQVNKQAIRVHG

SEQ ID NO: 138314 - protein, 1154 aa, Oryza sativa
  unsure (1)..(1154): unsure at all Xaa locations
  Clone ID: PAT_MRT4530_39715C.1.pep
MSIEEAIGRLRVVDGDEPQPLSGPITIGGKLHLTREQWEASQGDRRKEESSSSTGDRKAAQGARRRAAAARRSQAHVARVEEEEPALLLAHASIELSPAAPATAVFLHLDEPKVHAFLGNSSSNDKADGRYLDTGTTHHMTGRWEFFTELDSSVRGSVKFGDASGVEIKGVGSVTFTAKSGEHRLLTGVYYIPALRNSIISVGKLDENGSRVLVEHGVMRIWDRRRRFLAKVTRGTNRLYILSAQLAQPVCLAARRDDEAWKWHERFGHLLFKALKRLSAKEMVRGLPCLDHVEQLCDVYVVTKQRRLPFPKQTSFRAKERLELVHGDLCGPVTPATPGGRRYFLLLVDDLSRYMWVMVLGSKEEATDAIRCAQAAAEAECGRKLRVLRTDNSGEFTAVEFVSYCADESIQRHYTAPYSPRQNGVVERRNQTRGMLVIFWGEAVVTAVYILNHSPTKALDGRTPYEAWHGRKPAVSHLRVFNCLVFTKDLGHIGKLDDKSTPGVFIGYAEGPKADCILDPETQRVRTARDIVFDEGRGWAWEKAVDDGSTPMYDDFTVEYVHFKGAGGVGNSPSPSVPTPVPEPPPTPTATHFRATTSAAMSYSPTPPQSATQRTPEPAATPLGTSIPTPARDEHSPVEFATPLSHDKERIDAYHDDEPLRYRTMEDLLGGQPLPGXVPRDLEAQLHLACDDGEPXWELADLPRGHRAITLKWVFKLKRDEAGAIVKHKARLVAHGFVQQEGIDFDDAFAPVAQMESVRLLLALAAQEGWCVHHMDVKSAFLNGDLKEEVYVHQPPGFVIPSKEGNVLRLHKALYGLQQAPRAWNAKLDSTLKGMGFEQSPHEVAIYRRGNGGNALLVGVYVDDLVITGTKDAKVAVFKEEMKAAFQMSDLGPLSFYLGIEVHQDDSGITLRQTAYAKRVVELAGLTDCNPALTLMEERLKLSRDSTTENVDATQYRRLVGSLRYLTHTRPDLAFSVSYVSRFMQRPTTEHQQAVKRIIRYVEGTLDHGLYYPRCPGKAHFVGYSDSDHAGDIDTSKSMSGILFFLGECLALWLARLLSDLLGRDTGAVELGVDSKSALALAKNPVFHERSKHIRVRYHFIRGYLEEGSIKASYINIKDQLADLLTKPLGRIKFLEFCSRIGMAQLSHKTAHKT

SEQ ID NO: 138315 - protein, 196 aa, Oryza sativa
  Clone ID: PAT_MRT4530_39716C.1.pep
MAAGGGEAHALGDATAAEEEEVRRQPGGGGGHIVLAELGALVIGVVALARGCAGGGGEGGEAMYSSRRSGGVDGRARWRSGGVGGRARLRRGGVSGRERRRRRASAAADGDASALSSSTAPGECGGRLDCGGTGATPPATLFEVTLGKGGGGGGAGDLDYYDVSLVDGYSLPIVAVPQAGGGCATTGCTADLNRCT

SEQ ID NO: 138316 - protein, 1186 aa, Oryza sativa
  unsure (1)..(1186): unsure at all Xaa locations
  Clone ID: PAT_MRT4530_39717C.1.pep
MGRPRKPAKPAAAASSSASAAAAFSIGNCKVEIHGSSLRCQSTEQEEEELTISGPRGAKIVVSVDGAKSSSVGDGFDFILLSPSDVNERNKALLQVVKLYSFCINHFQCTSKASESGYEEDAELAAAEERRRATAQTAAAAARAARLAAAELAAARAEAEAEVAEDAARAAEVEVETLRSSINGSIASDITADRELEELARGRARERAERWAAVHPHGGGGGPRDRAPADGNPDGRGRAGGSPEPARGPRRQRGSPSPDRCHGHHGVQTVVRDFGPGGGWPTLTKTNYIEWAAVMRVRLQVRHMWEAVWYSDVDYDEDRRALDALIAAVPPEMQFSLSQKRTAKEAWDAIAAARIGSDRACKSTLQALRKEWENLALKPGEDVDDFALRLNTLLQKMVQYGDNTYNEERAVEKLFRCVLEKYRQIARSIESLLDLSMMSIEEALGRLKVVDGDEPQPLSGPTTIGGKLHLTREQWEASQGDRRKGESSPSTGGLKPRKARGGVQLRWARRRAEGGARRGAQGGAAGNHKPARDDTCRNCGKLGYWAKDCRQPRRGQAHVAQVEEEEPALLLAHASIELPPAAPAAVAFLHLDEPKVLVSLCNGSSNDKADGWYLDTGATHHMTGRREFFTEIKGVVSVTFTAKSGEHRLLTGVYYIPALRNSIISVGQLDENGSRVLVEDGLMRIWDRRRRLLAKWHERFGHLHFEALKRLSAKEMVRGMPCLDHVEQLCDVCLVTKQRRLPFPQQTNFRAKERLELVHGDFKGEAADAIRRAQAAAEAECGRKLRVLRTDNGGEFTAAEFASYCADEGIQRHYTAPYNPQQNGVVERLNQMALDGRTPYEAWHGRKPAVSHLRVFGCLAFAKELGHIGKLDDRSTPGVFIGYAEGSKAYRILDPETQRVRTTRDVVFDEGRGXSSSPSVSTPVLEPPPTPTPTHSRATTSTTTSSSSTPPQPXRVERSPVEFATSLSHDGERIDAYHDGEQLRYRTMEDLLGDQPVPGLVPRDMEAQLHLACDDGEPRSFVEVEKHAAWRATMQSKMDAVQENRTWELADLPRGHRAITLKWVFKLKRDEAGAIVKHKTRLVARGFMQQEGIDYDDAFSPVARMESVRLLALAAQEGWGVHHMDVKSAFLNNLKEEVYVHQPPGFVLPGKEGKVLRLHKALYGLRQAPRAWNAKLDSTLKGMGFE

SEQ ID NO: 138317 - protein, 1505 aa, Oryza sativa
  unsure (1)..(1505): unsure at all Xaa locations
  Clone ID: PAT_MRT4530_39718C.1.pep
MIQSAAPRRCAMSDARSRRSVASSTRRQQDAELAAAEERRRATAQTAAAAARAARLAAAELAAARAEAEAEAEAAEDAARAAXRELEELARERARERAERWAAAHLHGGGGGPRDRAPADGNPDGRGRAGGSPEPARGHRRQXALSPDRRHGHHVVQTVVRDFGPVGGWPTLTKTNYIEWAVVMRVRLQVRHMWEAVRYGDVDYDEDRRALDALIATVPPEMQFSLSQKRTAKEAWDAIAAARIGRDRARKSTLQALRKEWENLAFKPGEDVDDFALRLNTLLQKMVQYGDDTYDEERAVEKLFRYVPEKYRQIARSIESLLDLSTMSIEEALGRLKVVDGDEPQPLLGPITIGGKLHLTREQWEASQGNGRKGESSSPTGGRKPRKARGGVQLRWARRHAEGGARRGAQGVATGNHKPARDDACRSCGKLGHWAKDCRQPRRGQVHVARVEEEPALLLAHANIELPPAAPAAAAFLHLDEPKVLVSLCNGSSNDKADGWYLDTGSTHHMTDRREFFTEFDSSVRGSVKFGDASGVEIKGVGSVTFTAKSGEHRLLTGVYYIPALRNSIISVEQLDENGSRVLVEDGLMRIWDRCRRLLAKVTRGTNRLYILSAQVAQPVCLAARRDDEAWQWHERFGHLHFEALKQLSAKEMVRGMPCLDRVEQLCDVCVVTKQRRLPFPQQTSFRAKEQLELVHGDLCGPVTPATPGGRRYFLLLVDDLSRYMWVMVLGSKGEAADAIRHAQAAAEAECGRKLRVLCTDNGGEFTAAEFASYCADEGIQRHYTTPYSPQQNGVVERRNQMVVGMARALLKQRGMPAIFWGEAVVTAAYILNRSPTKALDGRTPYEAWHGRKPAVSHLRVFGCLAFAKELGHIGKLDDRSTPGVFIGYAEGSKAYRILDPEXQRVRTARDVVFDEGRGWVWDKAVDDGXDFTVEYVHFEGAGGLGSSSSPSVSTQAPESPPTPTPTHPRATTSTTTSSSSTPPQPVTPHAPAPTATPSTSTPTPARVERSPVEFATPLSHDGERIDAYHDGEQLRYRTMEDLLGDQPVPGLVPRDLEAQLHLACDDGEPRSFAEAEKHAAWRAAMQSEMDAVQENRTWELADLPRGHRAITLKWVFKLKRDEAGAIVKHKARLVARGFVQQEGIDYDDACAPVAWMESVRLLLALVAHEGWGVHHMDVKSVFLNVDLKEEVYVHQPPGFVIPGKEGKVLRLHKALYGLRQAPRAWNAKLDSTLKGMGYEQSLHEAAIYRRGNGGNALLVGVYINDLVIIGTKDAEVAAFKEEMKATFQMSDLGPLSFYLGIEVHQDDSGITLRQTAYAKRVVELAGLTDCNPALTPMEERLKLSRDSTAEEVDATQYRRLVGSLRYLTHTRPDLAFSVGYVVALSSCEAEYMAASATSTQALWLARLLSDLLGRDTGTVELRVDSKSALALAKNPVFHERSKHIRVRYHFIRSYLEEGSIKASYINTKDQLADLLTKPLGRIKFLELCSRIGMAQLPHKTTHKT

SEQ ID NO: 138318 - protein, 448 aa, Oryza sativa
  Clone ID: PAT_MRT4530_39719C.1.pep
MEKSELLLGSYSYAALCGVTLIIGWLAHWVYKWMNPPCIGRLPPGSMGFPIIGETFQFFRASPSIDMPSYYKQRLERYGPLFKTSLVGRPVIISLDPEVNRFIFQQEGKLFQSWYPETAINIFGKKSLTTYNGTIHKFIRGVAAKLFGLENLKESLLPELENSMRESFASWTGKPSVEVQDGVSDMIFDLVAKKLIGLDVTNSRELRKNFQDFFQGMVSFPIYFPGTSFYRSMQGRRNVRNTLTDIMKERLSAPGKKYGDLVDLIVEELQSEKPMIDENFAIDALAALLFTSFATLSSTLTVAFKYLTDNPKVVEELKEEHGTILKKREGVNSGFTWEEYRSLKFSTQVMNEITRISNVTPGVFRKTLTDVQVKGYTIPSGWLVMISPMAVHLNPKLFEDPLKFDPWRWRTVSKSIIGTKGGKSKASEARAPPLSSIRTLCNYAALGY

SEQ ID NO: 138319 - protein, 415 aa, Oryza sativa
  unsure (1)..(415): unsure at all Xaa locations
  Clone ID: PAT_MRT4530_3971C.1.pep
MVHGSTEADPVCQPRRVADKRTPLDTTRVAHVETTRLPSGHTNTDTTRSPPAHVNDYRHRYTGTGVDDRTTGTGRHRKDEGGEARXRKPYHHATRRGNDNDERARRRQTGTTETNGEGTASAAILGRRRDAAGTRLDDAEPRTNTRTGXAAILTKRGRRTRTAXRRDERHDDRERREDDDDDDDDDRDRRGGDEDSRQRLHGDEDDVEHAATMLVKVVVQRGDEPTRRKERPARRRRRSGEIRATPWPGRERGRHSGAGRGGGDVGRCTGDAAEAAGGGEVVATPLDTGEDASPVISPRNGGEAGKEEAAARPREKTARPGGARARRGRRLEVAGAKERGGRRRERSSGGLLAKRRAGRRGGGGGDAVGGDGAAGRLSGEAGEAAGGXGRQRGRERATVGRWLETTGELGRRPKR

SEQ ID NO: 138320 - protein, 299 aa, Oryza sativa
  unsure (1)..(299): unsure at all Xaa locations
  Clone ID: PAT_MRT4530_39720C.1.pep
MSWRKGGGGDGGVSRRWAVLLCLGSFCLGLLFTNRMWTLPEANEIARPNGNGDEGNTLIAAESCTRXSSSRLQRRRDVEXTHHGVQTLDKTIASLETELSAARSLQESLLNGSPVAEEFKLSESIGRRKYLMVIGVNTAFSSRKRRDSIRYTWMPQGXEKGRELEEEKGIIIRFVIGHSCXSGGIXDRAIEAEDRKHGDFMRIDHVEGYLALSGKTKTYFATAVSLWDADFYVKVDDDVHVNIATLGQILSNHALKPRVYIGCXMKSGPVLTEKGVRYYEPEHWKXFGDPGNKYFSALL

SEQ ID NO: 138321 - protein, 1931 aa, Oryza sativa
  unsure (1)..(1931): unsure at all Xaa locations
  Clone ID: PAT_MRT4530_39721C.1.pep
MATIETHYHCYSLHQSTKRKVEEEDLQGERRPMVKFSKQFEGQLVPEWKDAFVDYWQLKKDIKRLQAAEAEAAGVAATTPLSQCQAPVHRKLASGGGGGGGAVAGEVYETELVDGGAGFADGEAARAFFARLDEQLNKVNRFYERKEAEFVERGESLRRQLQILAELRAAVVAEQQRDGRRRRCGNGGDSSPPDTEDPSVSCSILHGDQSLRGTSEQEQEGQEKLTKDMIARSPDEGDDDQLTIPQELGDSGRLGRPREEAANTRPRTTLPGGRAVTCQGRSVRINIPVTTPTRTVTAIRELLFDDMLSQSRRSGSANGTKCGDKLSINKRKVHQAEKMIRGALIELYKGLGYLKTYRSLNMMAFVKILKKFDKVTAKEAQSIYLKVVESSYFNVSDKVIRLMDDVDELFVRHFAEGDKRKAMKYLKPNQREESHTTTFFIGLFTGGFAALFIGYCIMAHIAGMYTQQSNKVYMATSYPVLSMFSLFFLHLFLYGCNIFMWRKTRINYTFIFEFTPTKELKYRDVFLICTTSMTIVIGVMFAHLTLIVKGYSSCAVQAIPGALLLVFLLILVCPFNILYRSCRYHFLTVIRNIILTPFYKVVMVDFFMADQLCSQVPLLRSLEYLACYYITSSYKTQDYGYCTRVKHFRDLAYAVSFLPYYWRAMQCARRWFDEGDINHIVNLGKYVSAMLAAGTKVAYENDNSAGWLSLVVIVSSLATIYQLYWDFVKDWGLLQFNSKNPWLRNDLILKQKYIYFLSMGLNLILRLAWLQTVIHPNIGSLDSRVTLFILAALEVIRRGHWNFYRLENEHLNNAGKFRAVKYISSHEKVSKLCKRENDYIENNRQHPLALAWLLHASIELPPVAPAAAAFLHLDEPKVLVSLCNSSSNDKADGWYLDTGATHHMTGQREVFTELDSSVRGSVKFGDASGVEIKGVGSVTFTAKSGEHRLLTGVYYIPALRNSIISVGQLDENGSRVLVEHGVMRIWDRRRRLLAKVAQPVCLATRRDDEAWQWHERFGHLHFEALKRLSAKEMQTSFRAKERLELVHGDLCGPVTPATPGGRRYFLLLVDDLSRYMWVMVLGSKGEAADAIRHAQAAAEAECGRKLCVLRTDNGGEFTAAEFASYCADEGIQRHYTAPYSPQQNGVVERRNQTVVGMARALLKQRGMPAIFWGEAVVTAVYVLNRSPTKALDGRTPYEAWHGRKPGASHLRVFGCLAFVKELGHIDKLDDRSTPGVFIGYAEGSKAYRILDPETQRVRTAHDVVFDKGRGWVWDKAVDDGSTPTYDDFTVEYVHFEGAGGVGSSSSPSVSTPVPEPPPTPTPTHSWATTSTTTSSSPTPPQPATPRPPAPTATPPSTSTPTPARVERSLVEFATPLSHDRERIDAYHNGEQLXPVPGLVPCDLEAQLHLACDDSEPRSFTEAEKHVAWCAAMQSEMDAIQENHTWELADLPRGHRAITLXKWVFKLKRDEAGAIVKHKARLVARGFVQQEGIDYDDAFAPVARMESVRLLLALAAQEGWGVHHMDVKLAFLNGDLKKEVYVHQPPGFVIPGKEGKVLRLHKALYGLRQAPRAWNAKLDSTLKGMGFEQSPHEVAIYRRGNGGNALLVGVYVDDLVITGTKDAEVAAFKEEMKATFQMSDLGPLSFYLGIEVHQDDSGITLRQTAYAKRVVELAGLTDCNPTLTPMERLKLSRDSTTEEVDATQYRRLVGSLRYLTHTRPDLAFSVGYVSRFMQRPTTEHQQAVKRIIRYVAGTLNHGLYYPRCPGKAHFIGYSDSDHAGDIDTSKSTSGILFFLGECLVSWQSVKQQVVALSSCEAEYMAASAASTQAHWLARLLSDLLGRDTGAVKLRVDSKSTLALAKNPVFHERSKHIRVRYHFIRSYLEEGSIKASYINTKDQLADLLTKPLGRIKFLELCSRIGMAQLSHKTAHKT

SEQ ID NO: 138322 - protein, 85 aa, Oryza sativa
  Clone ID: PAT_MRT4530_39722C.1.pep
RRLAGAGRRRQARGGGHARGDGGGQKAPRTPEEEGGGRRAAATRGETAADKRPRARRRRKAAGAERRPRVGRRRRTKGPAHAPRS

SEQ ID NO: 138323 - protein, 1496 aa, Oryza sativa
  Clone ID: PAT_MRT4530_39723C.1.pep
MSDARSRRSVASSTQRQQDAELAAAEERRRATAQTAAAAAARAARLAAAELAAARAEAEAEAAEDAARAAEVEVETLRNSINGSIAGDITADRELEELARGRARERAERWAAAHLHGGGGGPRDRAPANGNPDGRGRAGGSPEPARGPRRQHGSLSPDQRHGHHGVQTVVRDFGPGGGWPTLTKTNYIEWAAVMRVRLQVRHMWEAVRYGDVDYDEDRRALDALIAAVPPEMQFSLSQKRTAKEAWDAIAAARIGSDRARKSTLQALRKEWENLAFKPGEDVDDFALRLNTLLQKMVQYGDDTYDEERAVEKLFRCVPEKYRQIARSIESLLDLSTMSIEEALGRLKVVDGDEPQPLSGPITIGGKLHLTREQWEASQGDGRKGESSSPTGGPAFLHLDEPKVLVSLCNGSSNDKADGWYLDTGATHHMIGRREFFTEFDSSVRGSVKFGDASGVEIKGVGSVTFTAKSGEHRLLTGVYYIPALRNSIISVGQLDENGSRVLVEDGLMRIWDRRRRLLAKVTRGTNRLYILSAQVAQPVCLAARRDDEAWQWHERFGHLHFEALKQLSAKEMVRDMPCLDHVEQLCDVCVVTKQRRLPFPQQTSFRAKERLELVHGDLCGPVTPAIPGGRRYFLLLVDDLSRYMWVMVLSSKGEAADAIRHAQAAAEAECGRKLRVLRTDNGGEFTAAEFASYCADEGIQRHYTTPYSPQQNGVVERRNQTVVGMARALLKQRGMPAIFWGEAVVTAAYILNRSPTKALDGRTPYEAWHGRKPAVSHLRVFGCLAFAKDLGHIGKLDDRSTPGVFIGYAEGSKAYRILDPETQRVRTARDVVFDEGRGWVWDKAVDDGSTPTYDDFTVEYVHFEGAGGVGSSSSPSVSTPAPESPPTPTPTHPRATTSTTTSSSSTPPQPVTPHAPAPTATPPSTSTPTPARVERSPVEFATPLSHDGERIDAYHDGEQLRYCTMEDLLGDQPVPGLVPRDLEAQLHLACDDGEPRSFAEAEKHVAWRAAMQSEMDAVQENRTWELADLPRGHRAITLKWVFKLKRDEAGAIVKHKACLVARGFVQQEGIDYDDAFAPVARMESVRLLLALAAQEGWGVHHMDVKSAFLNGDLKEEVYVHQPPGFVIPGKEGKVLRLHKALYGLRQAPRAWNAKLDSTLKGMGFEQSPHEAAIYRRGNGGNALLVGVYVDDLVITGTKDVEVAAFKEEMKATFQMSDLGPLSFYLGLEVHQDNSGITLRQTAYAKRVVELAGLTDCNPALTPMEERLKLSRDSTAEEVDATQYRRLVGSLRYLTHTRPDLAFSVGYAVKRIIRYVAGTLDHGLYYPRCPGKAHFVGYSDSDHAGDIDTSKSTSGILFFLGKCLVSWQSVKQQVVALSSCEAEYMAASAASTQALWLARLLSDLLGRDTGTVELRVDSKSALALAKNPVFHERSKHIRVRYHFIRSYLEEGSIKASYINTKDQLADLLTKPLGRIKFLELCSRIGMAQLPRKTTHKT

SEQ ID NO: 138324 - protein, 162 aa, Oryza sativa
  Clone ID: PAT_MRT4530_39724C.1.pep
MAPVREGRIALPGRAARGLRAAAGTPAPVWVPVGGRAVPWAAAAAVELLKLPVGGDVAGDGAVDAAAQGLNLYLRHTCRIFRRLCFRLRPGCCQLRCCQSGRPRCCCNGLSRCSPALFCCGELGVLLTPSARGDRTPRPNVEHGAPPGGCCVERRKGKGKEE

SEQ ID NO: 138325 - protein, 70 aa, Oryza sativa
  Clone ID: PAT_MRT4530_39725C.1.pep
EAHPRAAQSRATTSAVRLGGRANGDERQAAWTSSAVGAMPSRRFPSSAKDGGGVLQDSARAGNPTRLRGG

SEQ ID NO: 138326 - protein, 1286 aa, Oryza sativa
  Clone ID: PAT_MRT4530_39726C.1.pep
MWEAVWYGDVDYDKDRRALDALITAVPPEMQFSLSQKRTAKEAWDAIAAARIGSDRARKSTLQALRKEWENLAFKPGKDVDDFALRLNNLLQKMVQCDDDTYDEERAVEKLFHCVPEKYRQIARSIESLLDLSTMSIEEALGRLKVVDDDEPQPLSGPITIGGKLHLTREQWEASQSDGRKGESSPSIGGRKPRKACGGVQLRWARRRAEGGARRGAQGGAASNHKPARDDTCRNCGKLGHWAKDCRQPRRGQAHVAQVEEEEPALLLAHASIELPPAAPAAAAFLHLDEPKVLVSLCNSSSNNKADGWYLDTGATHHMTGRREFFTEFDPGVRGSIKFGDASGVEIKGVGSVTFTAKSGEHRLLTGVYYIPALRNSIISVGQLDENGSRVLVEDRLMRIWDRRRRLLAKVTRGTNRLYILGAQVAQPVCLTARRDDEAWQWHERFGHLHFEALKHLSAKEMVRGMPCLDHVEQLCDVFMTSFRAKERLELVHGDLCGPVTPATPGGRCYFLLLVDDLSRYMWVMVLGSKGEAADAIRRAQAAAEVECGRKLRVLRTDNGSEFTAAEFALYCVDEGIQRHYTAPYSPQQNGVVERHNQTVVGMARALLKQRGMPAIFWGEAVVTAVYILNRSPTKALDGRTPYEAWHGRKPAVSHLRVFGCLAFAKELGHIGKLDDKSTPGVLISYAEGSKAYHILDPETQRVRTARDVVFDEGRGWVWDKAVDDGLTPTYDDFTIEYVHFEGAGGSVSPRAPAPTATPPGTSTPTPARVERSPVEFATPLSHDGERIDAYHDGEQLRYRTMEDLLSDQPVPGLVPRDLEAQLHLACDDGEPGSFAEAEKHAAWRATMQSEMDAVQENRTWEFADLPRGHRAITLKWVFKLKRDEAGAIVKHKARLVARGFVQQEGIDYDDAFAPVARMESSAFLNGDLKEEVYVHQPPGFVLPSKEGKVLRLHKALYGLRQAPRAWNAKLDSTLKGMGFEQSPHEAAIYRRGNGGNALLVGVYVDDLVITGTKDAEVAAFKEEMKATFQMSDLGPLFFYLGIEVHQDNFGITLRQTAYAKRVVELAGLTDCNPALTPMEERLKLSHDSTAEEVDATQYRRLVGSLRYLTHTRPDLAFSVGYVSRCPGKAHFLRYSDSDHAGDIDTSKSTSGILFFLGECLVSWQSVKQQVVALSSCEAEYQALWLARLLGDLLGRDTGAVELRVDSKSALALAKTPVFHERSKHIRVRYHFIRSYLEEGSIKASYINTKDQLADLLTKPLGRIKFLELCSRIGMAQLSHKTTHKT

SEQ ID NO: 138327 - protein, 217 aa, Oryza sativa
  unsure (1)..(217): unsure at all Xaa locations
  Clone ID: PAT_MRT4530_39727C.1.pep
GGGGDIGRCGSGGREGVGCEVTAATVXVVVTMTVVGGGMAASDGLPRASQTATSDRRSIVWRRGRRPAXRRVAQPMAVEADSTREARVAEMEVGLAXEARPMEGGRIGARGASGGGGGDLGAWWSYWWVWHGLRRTKVGQRGGGASVQGPHMSAEFEWWWSIGASAVDSQVRRPVTLSSGRSSANLLLXVCVGAAGAWVVVYFFSFSWLRPSRVVIL

SEQ ID NO: 138328 - protein, 1484 aa, Oryza sativa
  unsure (1)..(1484): unsure at all Xaa locations
  Clone ID: PAT_MRT4530_39728C.1.pep
MSDARSRRSVASSTRRQQDAELAAAEERRRATAQTAAAAARAARLAAAELAAARAEAEAEAAEDAARAAEVEVETLRISINGSIAGDITADRELEELARGRARERAERWAAAHLHGGGGGPRDRAPANGNPDGRGRAGGSPEPARGPRRQCGSFSPDRRHGHHGVQTVVRDFGPGGGWPTLTKTNYIEWAAVMRVRLQVRHMWEAVRXPPEMQFSLSQKRTAKEAXDAITAACIGSDRARKSTLQAXRKEWENLAFKPGEDVDDFALRLNTLLQKMVQYGDDTYDEERAVEKLFRCVPEKYRQIARSIESLLDLSTMSIEEALGRLKVVDGDEPQPLSGPITIGGKLHLTREQWEASQGDGRKGESSSPTGGRKPRKARGGVQLRWARRRAEGGARRGAQGVATGNHKPARDDACRNCGKLGHWAKDCRQPRRGQAHVARVEEEPALLLAHASIELPPAAPAAAAFLHLDEPKVLVSLCNGSSNDKADGWYLDTGATHHMTGRREFFTEFDSSVRGSVKFGDASGVEIKGVGSVTFTAKSGEHRLLTGVYYIPALRNSIISVGQLDENGSRVLVEDGLMRIWDRRRRLLAKVTRGTNRLDILNVQVAQPVCLAAHRDDEAWQWHERFGHLHFEALKQLSAKEMVRGMPCLDHVEQLCDVCVVTKQRRLPFPQQTSFRAKERLELVHGDLCGPVTPATPGGRRYFLLLVDDLSRYMWVMVLGSKGEAADAIRHAQAAAKAECGRKLRVLRTDNGGEFTAAEFASYCADEGIQRHYTTPYSPQQNGVVERRNQTVVGMARALLKQRGMPAIFWGQAVVTAAYILNRSPTKALDGRTPYEAWHGRKPAVSHLRVFGCLAFAKELGHIGKLDDRSTPGVFIGYAEGSKAYRILDPETQRVRTARDVVFDEGRGWVWDKAVDDGSTPTYDDFTVEYVHFEGAGGVGSSSSPSVSTPAPESPPTPTPTHPRATTSTTTSSSSTQPQPVTPHAPAPTATPPSTSTPTPARVERSPVEFATPLSHDGERIDAYHDGEQLRYRTMEDLLGDQPVPGLVPRDLEAQLHLACDDGEPRSFVEAEKHAAWRAAMQSEMDAVQENRTWELADLPRGHRAITLKWVFKLKRDEAGAIIKHKARLVARGFVQQEGIDYDDAFAPVARMESVRLLALAAREGWGVHHMDVKSAFLNGDLKEEVYVHQPPGFVIPGKEGKVLRLHKALYGLRQAPRAWNAKLDSTLKGMGFEQSPHEAAIYRRGNGGNALLVGVYVDDLVITGTKDAEDNSGITLRQTAYAKRVVELAGLTDCNPALTPMEERLKLSRDSTAEEVDATQYRRLVGSLRYLTHTRPDLAFSVGYVSRFMQRPTTEHQQAVKRIIRYVAGTLDHGLYYPRCPGKAHFVGYSDSDHAGDIDTSKSTSGILFFLGKCLVSWQSVKQQVVALSSCEAEYMAASAASTQALWLARLLSDLLGRDTRTVELRVDSKSALALAKNPVFH

SEQ ID NO: 138329 - protein, 176 aa, Oryza sativa
  unsure (1)..(176): unsure at all Xaa locations
  Clone ID: PAT_MRT4530_39729C.1.pep
RTDAPPPLKLCRHVGPLHRRPPPASLRAPKTAPHPPAAPPRTEVASSSTGRASCANPASLHRLRLSRQAGLHLRRPHLSRRXLRCHRLRHSATSRSPTPPPNDAAXSDVAVCHALGKPSEAAMPPPTTVTVTITSLSPPSPHTRLLPRLHCXRRRRLLSHGRRKPAAVAAAAVTSH

SEQ ID NO: 138330 - protein, 381 aa, Oryza sativa
  unsure (1)..(381): unsure at all Xaa locations
  Clone ID: PAT_MRT4530_3972C.1.pep
KVYKKKILKEVLFPPFSLLGPARPNPSLSLSLPPRPIGSSPRAPLTGGPARLPSLTGGAHPSSSSSRRARRRARALAPPPPPNPLAPAVPARIKERGITPRDSLSRFPRFSLSLSLGFVRFXPETLAGAINGGRILRDRXPPSPAALSLPRRYLNPPRAPLFRFRRSPLALAVGFVLAPCSALSAIAAEFRSAAVATPGFLPARRHLPRHRRIPVDPVRRSASPADRRSVVVIVIPTRAAAFLRSGRRSRRRRCPGVSRGPPFAFPLPSSVSGAAPPRRWSPAVTIGARARRSRRPCRRGRLRARPRGCQVGPAVSRPRPRVRLTRGTHGADRRQPRAPGPPWTVGLTRGPHFPWTRPARPLPRLTQSRLNKTPTSGPSTH

SEQ ID NO: 138331 - protein, 231 aa, Oryza sativa
  unsure (1)..(231): unsure at all Xaa locations
  Clone ID: PAT_MRT4530_39730C.1.pep
GGGDHDGGGRRHGGLGRLAEGVADGYIGPAQHRLEEGSETSLTQSGATDGSGGRLDARGASSGDGGRLGVRGAADGGRPDWRERRVRWRRLAWREKRGRRWKRRPRCVVELLVGVARSSAYEGWPAGGGGIGAGAPHVGRVXVVVEHWCRAISYVFICWSSGGRSRLAAAGLVLTFXVVCVGAAGAWVVVYFFXFFLVTTLQGCNLVIFXSCSINRISHRLVRVVKEKFKL

SEQ ID NO: 138332 - protein, 260 aa, Oryza sativa
  unsure (1)..(260): unsure at all Xaa locations
  Clone ID: PAT_MRT4530_39731C.1.pep
STTHTLAAPTHTTRRRLAPDRLPLSVTGRRTCESTADAPMLHHHSNSADMWPEVASSTTSRASRAKPVSSTGRASRANSASLHWLRLSCQAGLHLRRPRLSRRAGLRCHRLRHSATRRSPTPPPNDAAXSNVAVCHALGKPSEAAMPPHTRLLPRLHCRRRRRLLSHGRRKPAAVAAAVVTSHXDASSRRXKPSPPPMQPPRRRCHAGGGGQIGLQHARSALRGAKMACSTXIRPPSPVSPPEPPAVVNLAATSIPATIS

SEQ ID NO: 138333 - protein, 87 aa, Oryza sativa
  Clone ID: PAT_MRT4530_39732C.1.pep
MAHLRRRRVNRQPPGEGSSKRTATRDARRDPGARVLGEWMRSLLPRQGTRDWRRRRRGLRRNHIVARLEEEEIGWTGLADTDEAKGQ

SEQ ID NO: 138334 - protein, 111 aa, Oryza sativa
  Clone ID: PAT_MRT4530_39733C.1.pep
MDCQKLSREACAHAAQNDRLPVQTVVQVLYHEQRRLRAPSQPPSAAPSYAGGESPALSYRPTLSFNGAVVEHDECPMVIPMAMPRRRRGVGRCGRAHGYDGGGASWRREGG

SEQ ID NO: 138335 - protein, 299 aa, Oryza sativa
  unsure (1)..(299): unsure at all Xaa locations
  Clone ID: PAT_MRT4530_39734C.1.pep
MELSPATAATTRHLHLILAVAGYPPCHRTALQQPAGFIHDHTSPAYEIKGTNGHSCHHPPCSPHGFSSGGRIDGGKEARQRWICGRLRIAHIEICQGGGRVAGADGGGGGAGGGCGGGGTGGGYGDDVGGPRRVLRHRPGSSRTSPHDLWRDTLVDAPSTTPTTRAARCTSXDPRHPGRIWXGWRRRLAMVAADGGGWRRWRWRWRLATVAPVAVMVGRPSQPKGLTVCXGGGGNMWRWGRRPGVGATSTAGXICGSGLGRIAEGTMCXTDDSPSCADWLWGFGQGIAGESLAEPFGRL

SEQ ID NO: 138336 - protein, 164 aa, Oryza sativa
  Clone ID: PAT_MRT4530_39735C.1.pep
MAAMRGGWRMRGIGSVPWWQMCNAVKTGETIGMRMWDVGWASHVRGGGGGLVAALSPPSDPAGGEVATAPYICQIRKENRLPERMRRRTLPSTPSSGKEGSCLLLSIGRPRRQRLLRQQRRWWCRRRRRRPPPLHPTMMVELEKASMVGEVTASDGKEEAPFRS

SEQ ID NO: 138337 - protein, 97 aa, Oryza sativa
  Clone ID: PAT_MRT4530_39736C.1.pep
MERVVHVHYGGSVLESSNGGSQFDGMSVKMIVFQSKPTFEELLCRTKDILGWSDKVVSIQDRYDMGGEPISHKQMLELNGETEWEAYVEIVKESRFT

SEQ ID NO: 138338 - protein, 67 aa, Oryza sativa
  Clone ID: PAT_MRT4530_39737C.1.pep
ETACSSTKNQKETACSILCMIDRKKLQNQHLAVTQYPQCINNTVLQQDLQGRTRNPTRPPTRPPRVR

SEQ ID NO: 138339 - protein, 93 aa, Oryza sativa
  Clone ID: PAT_MRT4530_39738C.1.pep
MRIPAALRPEAEGCATRGERGQGNMRGEDDGEKWRAVRERRDPKRRERAAWGLGHSGEDKVGRCNEWQGDIAMTSDEMALSGDEWLYGAEEQQ

SEQ ID NO: 138340 - protein, 118 aa, Oryza sativa
  unsure (1)..(118): unsure at all Xaa locations
  Clone ID: PAT_MRT4530_39739C.1.pep
TKGNKSSTAVAAALELVDPPGCRNSARALSVXYEPDKELQERRHAEYSKTVYPQYLEKLSSIITENNGHIALGKLTWGDFVVAGLIDYLKRMMRMXDLIEKYPDLPEQWWTRCMPSLK

SEQ ID NO: 138341 - protein, 207 aa, Oryza sativa
  Clone ID: PAT_MRT4530_3973C.1.pep
MDFTSSYFHAFGNPDFAAVFSGGGSAQAIRPGTTTSSSGGAKAVNVGRGGAARQGAPSVFCVQDAEVEEAHHFLDECTLCRKGLAGDIFMYRGDTPFCSEECRREQIEMDRNRHRRKKQQYSPTAQAAAHHHRSERAPQRQLQPQSMLVQASCSRVWSIYFVLVQTGLSKEAYELFSNHFMEDPGHEAGLAVLQVVDSCQGRKILKI

SEQ ID NO: 138342 - protein, 106 aa, Oryza sativa
  Clone ID: PAT_MRT4530_39740C.1.pep
MGKLQSVWTRGEGDATNRELHLKHLENVDLVGLDYLLGTMKIPKGAAPEGGCALRTAHRGRIWGRMCPKQPKMGILVPVSLIEGAESKSVAYVACHVGGQTQSKDV

SEQ ID NO: 138343 - protein, 976 aa, Oryza sativa
  Clone ID: PAT_MRT4530_39741C.1.pep
MSSNAESPSSKTPPPSTGSLPPTATAHQAAVDEISKVAAEAIRAAFIKPSTSVDIDPVTASNVADSAARIASARSPSPTSIPAGYTYLLRTDRLFSCGRLGFWLCGCPDLYCATRHHRGHLTGSLPTVPQAAPVLDAETTASLHSQAVSVLNVKALVPITLDIAAANYSKWRGLFLVTLGKYALTDHVFSNAFYPNHAHWLQMDCVILGWLYGSISVDLLETVMTPNATARLRNSPSLTGSPALRPPPSLPPQQAAATVLITGDYLVILDDCSHFVWTFPLRLKSDTFPTLLRFFAYIKTHFSTTIRSIQCDNGREFDNSAARDFFLRNGVSIRMSCPHTSPQNGKAERTLRSLNNIVRSLLFQASLPASFWVEALYTATHLINRHPTKTLKHHTPFFALYGTHPSYDHLRVFGCKCYPNLSATAANKLSPRSTLCVFRSYPTDHKGYRCFDPIYNRVYISRHVVFDEHSFPFAEKPFVDSCAANLDFLEDFSLQDQPAAPPGFTTKIQDKAALADPNWRAAMEDEYTALMANNTWDLVPPLPNANVVTGKWIFRHKFQSDGTLDMYKARWVLRGFTQRPGIDYDETFSPVVKPATRQFTAFSLNKSLYGLKQTPRAWYNRFAMFLLSIGFTEAKSDTSLFVYRHGSDTVYLLLYVDDIVLTASSSNILRWTITSLQKEFSMKDLGPLNHFLGINVTPHSGGLLLTQRQYCLEILERAGMSDCKPCLTPVDTSAKFSTEGSPSVSDPTDFRSLAGALQYLTFTRPDISYAVQQVCLHMHDPRESHLTALKRILRYIRGTLEYGLHIQRSSSFDLMAYSDANWAGCPDTRKSTFGYAVFLGDNLISWSSKRQNTVSRSSAEAEYRAVANAVAETSWLRQLLHELYAPPSKATLVYCDNVSAVYLSTNPVQHQRTKHVEIDLHFVHERVDVGAVRVLHVPTTSQYANVFTKGLPSPVFNEFRSSLNVRCSDVATAGGC

SEQ ID NO: 138344 - protein, 1355 aa, Oryza sativa
  Clone ID: PAT_MRT4530_39742C.1.pep
MRVRLQVRHMWEAVRYGDVDYDEDRQALDALIAAVPPEMQFSLSQKRTAKEAWDAITTARIDSDRARKSTLQALRKEWENLAFKPGEDVDDFALRLNTLLQKMVQYGDDTYDEERAVEKLFRCVPEKYRQIARSIESLLDLSTMSIEEALGRLKVVDGDEPQPLSGPITIGGKLHLTREQWEASQGDGRKGESSSSTGGRKPRKVRGGVQLRWARRRAEGGARRGAQGVATGNHKPARDDACRNCGKLGHWAKDCRQPRRGQAHVARVEEEEPALLLAHASIELPPAAPAAAAFLHLDEPKVLVSLCNGSSNDKADGWYLDTGATHHMTGRREFFTEFDSSVRGSVKFGDASGVEIKGVGSVTFTAKSGEHRLLTGVYYIPTLRNSIISVGQLDENGSRVLVEDGLMRIWDRRRQKNAKVTGGTNRLYILSAQVAQPVCLAARRDDEAWQWHERFGHLHFEALKQLSAKEMVRGMPCLDHVEQLCDVCVVTKQRRLPFPQQTSFRAKERLELMHGDLCGPVTPATPGGRCYFLLLVDDLSRYMWVMVLGSKGEAADAIRHAQAAAEVECGRKLRVLRTDNGGEFTAAEFTSYCADEGIQRHYTMPYSPQQNGVVERRNQTVVGMARALLKQRGMPAIFWGETVVTAAYILNRSPTKALDGRTPYEVWHGRKPAVSHLRVFSCLAFAKELGHIGKLDDRSTPRVFIGYAKGSKAFRILDPETQRVRTARDVVFDEGRGWVWDKAVDDGSTPTYDDFTVEYVYFEGAGGVGSSSSPSVSTPAPESPPTPTPTHPRATTSTTTSSSLTPPQPVTPHAPAPTATPPSTSTPTPARVERSPVEFATPLSHDGERIDAYHDGEQLRYRTMEDLLGDQPVPVPRDLEAQLHLACNDGEPRSFAEAEKHAAWRAAMQSEMDAVQENRTWELADLPRGHRAITLKWVFKLKRDEAGAIVKHKARLVARGFVQQEGIDYDDAFAPVARMESEGWGVHHMDVKSAFLNDNLKEEVYVHQPPGFVIPGKEGKRGNGGNALLVGVYVDDLVIAGTKDAEVAAFKEEMKATFQMSDLGPLSFYLGIEVHQDDSEITLRQTAYAKRVVELAGLTDCNPALTPMEERLKLSRDSTAEEVDATQYRCLVGSLRYLTHTRPDLAFSVGYVSRFMQRPTMEHQQAVKRIIRYIAGTLDHGLYYPRCPGKAHFVGYSDNDHAGDIDTNKSTSRILFFLGKCLVSWQSDKQQVVALSSYEAEYIAASAASTQALWLARLLSDLLGRDTGTVELRVDSKSALALAKNPVFHERSKHIRVRYHFIRSYLEEGSIKASYINTKDQLADLLTKPLGRIKFLELCSRIGMAQLAHKTTHKT

SEQ ID NO: 138345 - protein, 62 aa, Oryza sativa
  unsure (1)..(62): unsure at all Xaa locations
  Clone ID: PAT_MRT4530_39743C.1.pep
MTGDEATTWCGADEDGERSAGRGDAASCSRIAAPPCSXSTGRRRGWRVTALGLVGGGAPLPS

SEQ ID NO: 138346 - protein, 115 aa, Oryza sativa
  Clone ID: PAT_MRT4530_39744C.1.pep
AGSGVPGRVGAAAGRAGGQEGGRGGQEGVRGGGRAGGAAVGLSRRAGGRARRRPSWRGAEAGLARQQPGGRSGGRAGAAAAGRARRRPSWRGGLEDGDQEAGGALSSAAGFFFNL

SEQ ID NO: 138347 - protein, 371 aa, Oryza sativa
  Clone ID: PAT_MRT4530_39745C.1.pep
MAIIIQSRKRKRCARRQGVKYGPMDERDRMRFEYLDTKIWRNDTTCIDMLRLRKDSFFRFCKLFRDRGLLEDTIHMRVEEQVAMFLNTVGHNLRNRLVRTNFDRSGETVSRYFNKVLHAIGELRDELIRPPSLDTPNKIAGNPRWDPYFKDCIGAIDGTHIRASVRKNMESSFRGRKSHATQNVMAAVDFDLRFTYVLVGWEGTAHDAVVLRDALERENGLRIPQGKYYLVDAGYGAKQGFLPPFRAVRYHLNEWGNNPVQNEKELFNLRHSSLRITVERAFGSLKRRFKILDDATPFFPFPTQVDIVAACCIIHNWVINDGIDELFIGPNEIIEPNETSIGEANEHALMVQFRQALADQMWEDRQNHRGH

SEQ ID NO: 138348 - protein, 927 aa, Oryza sativa
  unsure (1)..(927): unsure at all Xaa locations
  Clone ID: PAT_MRT4530_39746C.1.pep
ALSQQQQQHRLLLLPLSLPPLHAAAPRRCAMSDARSRRSVASSTRRQQDAELAAAEERRXATAHTAAAAARAARLAAAELAAARAEAEAAEDAARAAEVEVETLRSSINGSIAGDITADRELEELARGRARERAERWAAAHLHGGDGGPRDRAPADGNPDGRGLAGGRGLAGGSPEPARGPRRQHGSLSPDRRHGHHGVQMVVRDFGPGGGWPTLTKTNYIEWAAVMRVRLQVRHMWDAVRYGDVDYDEDRRALDALIAAVPPEMQFSLSQKRTAKEAXDAIAAARIGSDRARKSTLQALRKEWENLAFKPGEDVDDLQKMVQYGDDTYDEERAVEKLFRCVPEKYRQIARSIESLLDLSTMSIEEALGRLKVVDGDEPQPLSGPITIGGKLHLTQEQWEASQGDGRKGESSSPTGGHKPRKARGGVQLWWARRRAEGGARRGAQGVATGNHKPARDDACRNCDKLGHWAKDCRQPRRGQAHVARVEEEPALLLAHASIELPPAAPAAAAFLHLDEPKVLVSLCNGSSNDKADGWYLDTGATHHMTGRREFFTEFDSSVRGSIKFGDASGVEIKGVGFVTFTAKSGEHRLLTRVYYIPALRNSIISVGQLDENGSRVLVEDGLMRIWDRRRRLLAKVTRGTNRLYILSAQVAQPVCLAARRDDEAWQWHERFGHLHFEALKQLSAKEMVXGMLCLDHVEQLCDVCVVTKQRRLPFPQQTSFRANERLELVHGDLCGPVTPATPGGRRYFLLLVDDLSRYMWVMVLGSKGEATDAIRHEQAAAEAECGRKLCVLRTDNGGEFTAAEFASYCADEGIQRHYTTPYSPQXNGVVERRNQTVMGMARALLKQRGMPVIFWGEAVVTAAYILNRSPTKALDGRTPYEAWHGRKPAVSHLRVFGCLAFAKELGHIGNGQYRYRHSFCFAYAMK

SEQ ID NO: 138349 - protein, 191 aa, Oryza sativa
  unsure (1)..(191): unsure at all Xaa locations
  Clone ID: PAT_MRT4530_39747C.1.pep
STASSSPGRRTAGELLPRRADGRRAPPPXRGRPAGSTPARGXPASSSPGARTAGELHTRAPTLASSSPARGRQASSSPTHGPPASSRDSQRAPQPAXDGRRAPLPRADAGELLPLRTDGRRARGTASELLPRARPPTSSSPGRRTAGGLLPRARTPVSSSPCARPAGEILPRAWTAGELLPRASSPPCFYC

SEQ ID NO: 138350 - protein, 1705 aa, Oryza sativa
  Clone ID: PAT_MRT4530_39748C.1.pep
MERVVGRGGPAGAACGEAAAGMQIQVHQDIEGLQTCSNYYVSVLILVLLFFVLSLAENVRALDEGDGRLADKVGAVRDSDGLGALHLAAAREKLPVCHYLVEELRVDVDAVDNKGETALTFAINCGNEDMVRYLLDHGADTEKINNDGLTALHFAAGEGKCKIVEILLSKGAYIDSLTTGGTALHCAAYNGRDAVVKILLDHHADHKKVSWGAYTPLFVAVESGSLKCLKLLIEAGADVKGIGKEIPLITAASKGLTDIIKCLLEAGADPNVRDCLGHMPIEVAARCGERKAIEILFPVTSRIQSVSDWTVDGIINHVKSLPEVKEEDFCEATLDMGKFQGREAVKNKDYLGAMNIYTAAIALNPRDASLFSNRSLCWLHLGEGKKALMDAEACRMMRPDWPKACYRKGTALMLLKDSIYPLAYFSVARTTAVRHMWEAVRYGDVDYDEDRRALDALIVAVPPEMQFSLSQKRTAKEAWDAIAAARIGSDRARKSTLQALRKEWENLAFKPGEDVDDFALHLNTLLQKMERAVEKLFRCVPEKYRQIARSIESLLDLSTISIEEALGRLKVVDGDEPQPLSGPITIGGKLHLTREQWEASQGDGRKGESSSPTGGPAFLHLDEPKVLVSLCNGSSNDKADGWYLDTGATHHMTGRREFFTEFDSSVRGSVKFGDASGVEIKGVGSVTFTAKSGEHRLLTGVYYIPALRNSIISVGQLDENGSRVLVEDGLMRIWDRRRRLLAKVTRGTNRLYILSAQVAQPVCLAARRDDEAWQWHERFGHLHFEALKQLSAKEMLCDICVVTKQRRLPFPQQTSFRAKERLELVHGDLCGPVTPATPGGRRYFLLLVDDLSRYMWVMVLGSKGEAADTIRHAQAAAEAECGRKLRVLRTDNGGEFTAAEFASPQQNGVIERRNQTVVGMARALLKQRGMPAIFWGEAVVTAAYILNRSPTKALDGRTPYEAWHGRKPAVSHLRVFGCLAFAKELGHIGKLDDRSTPGVFIGYVEGSKAYRILDPETQRVRTAGDVVFDEGRGWVWDKAVDDGLTPMYDDFTVEYVHFEGAGGVGSSSSPSVSTPAPESPPTPTPTHPRATTSTTTSSSSIQPQPVTPHAPAPTATPPSTSTPTPARVERSPVEFATPLSHDGERIDAYHDGEQLRYRTMEDLLGDQPVPGLVPRDLEAQLHLACDDGEPRSYVEAEKHAAWRAAMQSEMDPVQENRTWELADLPRGHRAITLKWVFKLKRDEAGAIVKHKARLVARGFVQQEGIDYDDDFAPVARMESVRLLLALAAQEGWGIHHMDVKSAFLNGDLKEEVYVHQPPGFVIPGKEGKVLRLHKALYGLRQAPRAWNAKLDSTLKGMGFEQSPHEAAIYQRGNGGNALLVGVYVDDLVITGTKDAEVAAFKEEMKATFQMSDLGPLSFYLGIEVHQDNSGITLRQTAYAKRVVELAGLTDCNPALTPMEERLKLSRDSMAEEVDATQYRRLVGSLRYLTHTRPDLAFSVGYVSRFMQRPTTEHQQAVKRIIRYVAGTLDHSLYYPRCLGKAHFIGYSDSDHAGDIDTSKSTSGILFFLGKCLVSWQSVKQQVVALSSCEAEYMAASAALTQALWLARLLSDLLGRDTGTVELRVDSKSALALPKNPVFHERSKHIRVRYHFIRSYLEEGSIKASYINTKDQLADLLTKPLGRIKFLELCSRIGMAQLPHKTTHKT

SEQ ID NO: 138351 - protein, 378 aa, Oryza sativa
  Clone ID: PAT_MRT4530_39749C.1.pep
MDVKSTFQNGDLKEKVYVHQPPGFVIPGKEGKVLRLHKALYGLRQAPRVWNAKLDSTLKGMGFEQSPYETAIYRRGNGGKALLVGVYVDDLVITGTKDAEVAAFKEEIKATFQMSDLGPLLLPGDRALTLMEERLKLSRNSTTEEVDATQYRRLVGSLRYLTHTRPDLAFSVGYVSRFMQRPTTEHQQAVKRIIRYVAGTLDHGLYYSRCPGKAHFVGYSDSDHAGDIDTSKSTSGILFFLGECLVSWQSVKQQMVALSSCEAEYMAASAASTQALWLALLLSDLLGRDIGAVELRVDSKSALALVKNPGFHERSKHIRVRYHFIRSYLEEGSIKASYINTKDQLADLLTKPLGRIKFLEVCSRIGMAQLSHKTAHKT

SEQ ID NO: 138352 - protein, 84 aa, Oryza sativa
  unsure (1)..(84): unsure at all Xaa locations
  Clone ID: PAT_MRT4530_3974C.1.pep
PQYPLYPVYGYHPLTVARQVGGLGTQGXTTPISTGPPMTGDKNAVATNQGDSMSKNPPVETKNGTSTTSKLEKDSDTAKPCPSD

SEQ ID NO: 138353 - protein, 34 aa, Oryza sativa
  Clone ID: PAT_MRT4530_39750C.1.pep
MRIIALCKMLFVKYKYWSVYDFKSHSVKYKYWFV

SEQ ID NO: 138354 - protein, 1441 aa, Oryza sativa
  unsure (1)..(1441): unsure at all Xaa locations
  Clone ID: PAT_MRT4530_39751C.1.pep
SSNIWELEELARGRARERAEXGGGGPRDRAPADGNPDGRGRAGGSPEPARGPRRQRGSPSPDRCHGHHGVQTVVRDFGLGGGWPTLTKTNYIERAAVMRVRLQVRHMWEAVRYGDVDYDEDRRALDALIAAVPLEMQFSLSHKWTAKEAWDAIAVARIGSDRARKSTLQALRKEWENLAFKPGEDVDDFALRLNTLLQKMVQYGDDTYDEERAVEKLFRCVPEKYRQIARSIESLLDLSTMSIEEALGRLKVVDGDEPQPLSGPITIGGKLHLTREQWEASQGDGRKGESSPSTGGRKPCKARGGVQLRWARRRAEGGARRGAQGGAAGNHKPARDDACRNCGKLGHWAKDCRQPRRGIELSPAAPAATAFLHLDEPKVHAFLGNSSSNDKADGWYLDTGATHHMTGRREFFTELDSSVRGSIKFGDASGMEIKGVGSVTFTAKSGEHRLLTGVYYIPVLRNSIISVGQLDENGSRVLVEHGVMTIWDRRRRLLAKVTRGTNRLYILSAQVAQPVCLAARRDDEAWQWHERFGHLHFEALKWLSAKEMVRGLPCLDHVEQLCDVCVLTKQRRLPFPQQTSFRAKEQLELVHGDLCGPVTPATPGGRRYFLLLVDDLSRYMWVMVLGSKAEAADAIRRAQAAAEVECGRKLRVLRTDNGGEFTAAEFASYCADEGIQRQYTAPYSPQQNGVKRRNQTVVGMARALLKQRGMPAIFWGEVVVTAVYILNRSPTKALDGRTPYEAWHERKPGVSHLRVFGCLAFVKELGHIGKLDDRSTPGVFIGYAEGSKAYRILNSETQRVRTARDVVFDEGRGWVWDKAVDDGSTPKYDDFTVEYVHFEGAGGVGNSSSPSVSTPVPEPPPTPTPTHSRATTSTTTSSSPTPPQPVTPRAPAPTATPPSTSTPTPASVERNPVEFATPLSHDGERIDAYHDGEQLRYRTMEDLLGDQPVPGLVPPDLEAQLHLACDDGEPRSFAEAEKHVAWRAAMQSEMDAVQENRTWELADLPRGHRAITLKWVFKLKRDEAGAIVKHKARLVARGRLGVHHMDVKSAFLNGDLKEEVYVHQPPGFVIPGKEGKVLRLHKALYGLRQAPRAWNAKLDSTLKGMGFEQSPHEAAIYRRGNGGNALLVGVYVDDLVITGTKDAEVAAFREEMKATFHMSDQGPLSFYLGIEVHQDDSGITLRQTAYAKRVVELARLTDCNPALTPMEERLKLSRDSTTEEVDATQYRRLVGSLRYLTHTAGLGLLRRLRQSAVKRIIRYVAGTLDHGLYYPRCPGKAHFVEYSNSNHAGDIDTSKSTSGILFFLGECLVSWQSVKQQVVALSSCEAEYMAASAASTQALWLARLLSDLLGRDTGAVELRVDSKSALALAKNPVFHEWSKHIWVRYHFIRSYLEEGSIKASYINTKDQLADLLTKPLGRIKFLELCFRIGMAQLPHKTTHKT

SEQ ID NO: 138355 - protein, 1585 aa, Oryza sativa
  Clone ID: PAT_MRT4530_39752C.1.pep
ALSQQQQQHRLLLLPLSLPPLHAAAPRRCAMSDARSRRSVASSTRRQQDAELAAAEERKRATAQTAAAAARAARLAAAELAAAREEAEAEAAEDAAHAAEVEVETLRSSINGSIAGDITADRELEELARGRARERAERWAAAHLHGGGGGPRDRAPANGNPDGRGRAGGSPEPARGPCRQRGSLSPDRRHGHHGVQTVVRDFGPGGGWPTLTKTNYIEWAAVMRVRLQVRHMWEAVRYGDVDYDEDRRALDALIAAVPPEMQFSLSQKRTAKEAWDAIAAARIGSDRARKSTLQALRKEWENLAFKPGEDVDDFALRLNTLLQKMVQYGNDTYDEERAVEKLFRCVPEKYRQIARSIESLLDLSTMSIEEALGRLKVVDGDEPQPLSGPITIGGKLHLTREQWEASQGDGRKGESSSPTGGRKPRKARGGVQLRWARRRAKGGARRGAQGVATGNHKPARDDACRNCGKLGHWAKDCRQPRRGQAHVARVEEEEPALLLAHASIELPPAAPAAAAFLHLDEPKVLVSLCNGSSNDKADGWYLDTGATHHMTGRREFFTEFDSSVRGSVKFGDASGVEIKGVGSVTFTAKSGEHRLLTGVYYIPALRNSIISVRQLDENGSRVLVEDGLMRIWDRRRRLLAKVTRGTNRLYILSAQVAQPVCLAARRDDEAWQWHERFGHLHFEALKRLSAKEMVRGMPCLDHMEQLCDVCVVTKQRRLPFPPQMSFRAKERLELMHGDLCGPVTPATPGGRRYFLLLVDDLSRYMWVMVLGSKGEAADAIRRAQAAAEAECGRKLRVLRTDNGGDEGIQRHYTASYSPQQNGVVERRNQTGEAVVTAVYILNRSPTKALDGRTPYEAWHGHKPAVSHLRVFGCLAFAKELGHIGKLDDRSTPGVFIGYAEGSKAYRILDPETQRVRTVRDVVFDEGRGWVWDKAVDDGSTPTYDDFTIEYVHFEGAGGVGSSSSPSVSTPVPEPPPTPTPTHPRATTSTTTSSSSTPPQPVSPRAPAPTATPPGTSTPTPARVERSPVEFVTPLSHDGERIDAYHDGEQLRYRTMDDLLGDQPVPGLVPRNLEAQLHLACDDGEPRSFAEAEKHAAWRAAMQLEMDAVQENRTWELADLPRGHRAITLKWVFKLKRDEAGAIVKHKARLVARDFVQQEGIDYDDAFAPVARMESVRLLALAAQEGWGVHHMDVKSAFLNGDLKEEVYVHQPPGFVLPGKEGKVLRLHKALYGLRQAPRAWNAKLDSTLKGMGFEQSPHEAAIYRRGNGGKCLADAEVATFKKEMKATFQMSDLGPLSFYLGIEVHQDDSGITLRQTAYAKRVVELAGLTDCNPALTPMEERLKLSRDSTAEEVDATQYRRLVGSLRYLTHTRSDLAFSVGYVSRFMQQPTTEHQQAVKRIIRYVAGTLDHGLYYPRCPGKAHFVGYSDSDHAGDIDTSKSTSGILFFLGECLVSWQSVKQQVVALSSCEAEYMAASAASTQALWLARLLGDLLGRDTGAVELRVDSKSALALAKNPVFHERSKHIRVRYHFIRNYLEEGSIKASYINTKDQLADLLTKPLGRIKFLELCSRIGMAQLSHKTTHKT

SEQ ID NO: 138356 - protein, 407 aa, Oryza sativa
  Clone ID: PAT_MRT4530_39753C.1.pep
KSYCNVAWVEELCCEVQRDLEHLNLGIVEHGFVAALEAQPTLVEQVRIAQASDPEIAELKKNMRVGKARGFVEDEQGTIWMGERFTKMYQDLKEKFWWVSMRREIAEFVALCDMAPFEALYGRKCRTPLFWDQTGERQLFGTEVLNEAEEKVRAVRERLRIAQSRQKSYADNRRRELAFETGDYVYLRVTPLRGVHRFQTKGKLAPRFVGPYRILERRGEVAYQLELPSNMLGIHNVFHVSQLKKCLRVPEEQASPDHIEIQEDLTYVEKPTRILETSERRTRNKVIRFCKVQWSHHSEEEATWEREDELKATHPHLFASSSESRGTGGEGGRDGVGSAGVSGCPAAGFTAAQEGTAHCLLRGGELKIFLVGAVLPKFVSSLPSRRKNVDALLRRESWERGLVAAKG

SEQ ID NO: 138357 - protein, 1573 aa, Oryza sativa
  Clone ID: PAT_MRT4530_39754C.1.pep
ALSQQQQQQHRLPLLPLSLPPLHTAAPRRCAMSDARSRRSVASSTRRQQDAELAAAEERRRATAQTAAAAARAARLAAAELAAARAEAEAEAAEDAARAAEVEVETLRSSINGSIAGDITADRELEELARGRARERAERWAAAHLHGGGGGPRDRAPADGNPDGRGRAGGSPEPARGPRRRHGSLSPDRRYGHHGVQTVVRDFGPGGGWPTLTKTNYIEWAAVMRVRLQVRHMWEAVRYGDVDYDEDRRALDALIVAVPPEMQFSLSQKRTAKEAWDAIAAARIGSDRARKSTLQALRKEWENLAFKPGEDVDDFALRLNTLLQKMVQYGDDTYDEERAVEKLFRCVPEKYRRIARSIESLLDLSTMSIEEALGRLKVVDGDEPQPLSGPITIGGKLHLTREQWEASQGDGRKGESSSPTGGRKPRKARGGVQLRWARRRAEGGARRGAQGVATGNHKPARDDTCRNCGKLGHWAKDCRQPRRGQAHVARVEEEEPALLLAHASIELPPAAPAAAAFLHLDEPKVLVSLCDGSSNDKADGWYLDTGATHHMTGRREFFTEFDSSVRGSVKFGDTSGVEIKGVGSVTFTAKSGEHRLLTRVYYIPALRNSIISVGQLDENGSRVLVEDGLMRIWDRRRRLLAKVTRGTNRLYILSAQVAQPVCLAARRDDEAWQWHERFGHLHFEALKQLSAKEMVRGMPCLDHVEQLCDVCVVTKQRRLPFPQQTSFRAKERLELVHGDLCGPVTPATPGGRRYFLLLVDDLSRYMWVMVLGSKGEAADAIRHAQAAAEAECGRKLRVLRTDNGGEFTAAEFVSYCADEGIQRHYTAPYSPQQNGVVERRNQTVVGMARALLKQRGMLAIFWGEAVDTVRGLAWRKPAVSHLRVFGCLAFAKELGHIGKLDDRSTPGVFIGYAEGSKTYRILDPETQRVRIARDVVFDEGRGWVWDKAVDDGSTPTYDDFTIEYVHFEGAGGPVSPHAPAPTATPPGTSTPTPARVERSPVGFVTPLSHDEERIDAYHDGEQLRYRTMEDLLGDQPVPGLVPRNLEAQLHLACDDGEPRSFAKAEKHAAWRATMQSEMDAVQENRTWELADLPRGHRAITLKWVFKLKRDEAGAIVKHKARLVARGFVQQEGIDYDDAFAPVARMESVRLLLALAAQEGWGVHHMDVKSAFLNGDLKEEVYVHQPPGFVILGKEGKVLRLHKALYGLRQAPRAWNAKLDSTLKGMGFEQSPHEAAIYRRGNGGNALLVGVYVDDLVITGTKDAEVAAFKEEMKATFQMSDLGPLSFYLGIEVHQDNSGITLRQTAYAKRVVELAGLTDCNPALTPMEERLKLSRDSTAEEVDATQYRRLVGSLRYLTHTRPDLAFSVGYVSRFMQRPTTEHQQAVKRIIRYVAGTLDHGLYYPRCPDKAHFVGYSDSDHAGDIDTSKSTSGILFFLGECLVSWQSIKQQVVALSSCEAEYMAASAASTQALWLARLLSDLLGRDTGAVELRVDNKSALALAKNPVFHERSKHIRVRYHFIRSYLEEGSIKASYINTKDQLADLLTKPLGRIKFLELCSRIGMAQLSHKTAHKT

SEQ ID NO: 138358 - protein, 1288 aa, Oryza sativa
  Clone ID: PAT_MRT4530_39755C.1.pep
MVKTRNGSRDSNNASGSKEQISGACANDAPNSSSSPLPENLTIAQVLDNQTQMMTMMMQQMQQYHQVLQQPPTFSSTTNPIEANDWLHAIEKKLNLLQCNDQEKVAFATHQLQGSASVWWDNYVVTRPAGTEVTWAEFCQSFNKAQVPEGIVAQKKREFHSLQQGTRTVIEYLHEFNRLARYAPEDVRTNAERQEKFLSGLDDELTNQLISRDYEDFQKLVDKAIRQEEQEEAQSAPEVILGTFPVNSTPAVILFDSGATHSFISKRFAGAHGLSLVKLKIPMRVHTPGGGMTTTHYCPSVRVEIQGLIFPANLILLESKDLDVILGMDWLTRHRGVIDCTSLTIKLTNAKGEVVTFQSPVPQKPGISLNQAAIEEQEVAVEKTTKKLEDIPIVREYPEVFSDDLTTMPPKRDIEFRIDLVPGTAPIHKRPYRMGANELVEVKKQVDEQLQKGYIRPSTLPWGAPVIFVEKKDKTKRMCVDYCALNEVTIKNKYPLLRIDDLFDQLKGATVFSKIDLRSGYHQLRIREEDIPKTAFITRYGLFECTVMSFGLTNAPAFFMNLMNKVFMEFLNKFVMVFIDDILIYSKFEEEHVQHLRLILEKLKEHQLYAKFSKCDFWLKEVQFLGHIVNAQGVAVDPANVESVTKWTLPRTVTQVRSFLGFAGYYRRFIENFSKIAKPMTQLLKKEEKFIWSAECNRSFEELKRRLVSAPVLILPDQTKDFQVYCDASRQGLGCVLMQDGKVVSYASRQLRPHEGNYPTHDLELAAVVHALKLWRHYLIGNRCEVYTDQQKSKRRWLELIKDYDMGIHYHPGKANVVADALSRKSYCNVAWVEQLCCEVQRDLEHLNLGIVEHGFVATLEAQPTLVEQELKDLIMTEAQQTQYSIHPGSTKMYQDLKEKFWWVSMRREIAEFVALCDVCQRVKAEHQRPAGLLQPLQIPEWKWEEIGMDFITGLPRTSSGHDSIWVVVDRLTKVAHFIPVHTTYSGKKLAELYLARIMCLHGVPKKIVSDRGSQFTSKFWQKLQEELGTRLNFSTAYHPQTDGQTERVNQILEDMLRACALDFGGAWDKSLPYTEFSYNNSYQASLQMAPFEALYGRRCQVLNEAEEKVRAVRERLRIAQSRQRSYADNRRRELVFQAGDYVYLRVTPLRGVHRFQTKGKLAPRFVGPYRILERRGEVAYQLELPSNMLGIHNVFHVSQLKKCLRVPEEQASPDQIEIQEDLTYAEKPTRILETSERRTRNKVIRFCKVQWSHHSEEEATWEREDELKAAHPHLFASSSESRGRDSV

SEQ ID NO: 138359 - protein, 65 aa, Oryza sativa
  Clone ID: PAT_MRT4530_39756C.1.pep
ASKSSLMLALLVEHPSSGTRPRWLSMLPCHVVESTLRYCSTSMANVATGHCRFLYVYHHIYILDK

SEQ ID NO: 138360 - protein, 169 aa, Oryza sativa
  Clone ID: PAT_MRT4530_39757C.1.pep
MAGFSRRHLAVFYVGGVNGSGQDNQHPPPPSTPCPRRPLVAAAEQLSKLEKTPSDRFDEIEAAIHANLVNDIEAYKSSLMADHGFFERMLTSMGIKKSYTRDQTLWLCKLILIFFASGSVGIGFAKIDDRLKQVGPRIVKNMCLYTLHIVILQLSGHPVLQQNLLLTQQ

SEQ ID NO: 138361 - protein, 390 aa, Oryza sativa
  unsure (1)..(390): unsure at all Xaa locations
  Clone ID: PAT_MRT4530_39758C.1.pep
MSDVRSRRSVASSTRRKQDAKLAAAEEHRRATAQTAAAAARAARLAAVELAAARAEAEAEAAEDAARAAEVEVETLRSNINGSIGDITADRELEELARGRARERAERAAHPHGGGGPRDRAPADGNPDGHGCAGGSPERARGGGAPSGGGWFDRERGPRRQRGSPSPDRRHGHHGVQTVVRDFGPGGWWPTLTKTNYIEWAAVMRVRLQVRHMWEAVRYGDVDYDENRRALDAPIAAVPPEMQFSLSQKRTAKEAWXSTLQALRKEWENLAFKPEDGAVRXTTYDEERAVEKLFRCVPEKYGQIARSIESLLDLSTMSIKEAIGRLKLRTENRRLKDTLPKDKVELDELRVDLASLRRGFCAKHFHLYKAVGKEDLYCAPILIRTQIAGI

SEQ ID NO: 138362 - protein, 620 aa, Oryza sativa
  Clone ID: PAT_MRT4530_39759C.1.pep
MEIRNGSRDSNNASGSEEPINGARANSASDNSPSPPPENPTIAQVLDNQTQMMTMMMQPMQQQYHQVLQQVQQQAQQQQQNLQFGSPPPQSKLLEFLRVKPPTFSSTTNPIEAHDWLHAIEKKLNLLQCNEQEKVAFVWWDNYMVTRPTGAEVTWTEFCHSFNKAQVPEGIVAQKKREFRSLQQGTRTVIEYLHEFNRLARYAPEDVRTDDGRQEKFLSGLDDELTNQLISRDYEDFEKLVDKAIRQEEHCNKINRKRKAAQFRTPQGKSQKPRFTMGHHGGPSTMIIRQHRPYHPGSFNKNHHSGSHNNRVAVNPANMESVTKWTPPRTVTQVRSFLGLAGYYRRFIENFSKIAKPMTQLLKKEEKFIWSAGCNRSFEELKRRLVSAPVLILPDQTKDFQLRPHEGNYPTHDLELAAVVHALKIWRHYLIGNRCEVYTDHKSLKYIFTQPDLNLRQRRWLELIKDYDMGIHYHPGKANVVADALSRKSYCNVAWVEQLCCEVQRDLEHLNLGIVEHGFVVALEAQPTLVEQVRIAQASVPEIAELKKNMRVGKARGFVEDEQGTIWMGERLCVPENKELKDLILTEAHQTQYSIHPGSTKMYQDLKEKFWWVSMRREIA

SEQ ID NO: 138363 - protein, 116 aa, Oryza sativa
  Clone ID: PAT_MRT4530_3975C.1.pep
LVAGPFLPDCILTARSLLRMHAHRRSTGVILHIQVQVCTRHFEESMDRSRGTTTTTPSSHVCGLVRTACSSRRPALVFGLFTSYWFRPGCQKKPMSSFLMYIVTPSLFHLVFIFLC

SEQ ID NO: 138364 - protein, 103 aa, Oryza sativa
  Clone ID: PAT_MRT4530_39760C.1.pep
MKPPAPAKNIATLLPPGAKCRRAFLRGLIAAGAGGSLLVAGDGGGIASAASKRRAPPAAAAPEERKDPSVSGVQAKVLASKKRKEAMKEFVAKMREKGKPVSQ

SEQ ID NO: 138365 - protein, 181 aa, Oryza sativa
  Clone ID: PAT_MRT4530_39761C.1.pep
RTRGRGRAEEGEERMASPLRRLRSWRVSRGATSPCSTSAASMAAARTTNTLHRLLPLARAVHSSLPPSRYGDPRSPPQARRPSGEVELSKLEKTPSDRFDEIEAAIHANLVNDIEAYKSSLMADHGFFERMLTSMGIKKSYTRDQTLWLCKLILIFFASGSVGIGFAKIDDRLKQAPSNAL

SEQ ID NO: 138366 - protein, 1523 aa, Oryza sativa
  Clone ID: PAT_MRT4530_39762C.1.pep
MSDVRSRRSVVSSTRRQQDAELAAAEERRRATAQTAAAAARAARLAAAELAAARAEAEAEAAEDAARAAEVEVETLRSSINGSIAGDITADRELEELARGRARERAERWAAAHLHGGGGGPRDRAPADGNPDGRGRAGGSPEPARGPRRQRGSPSPDRHHGHHGVQTVVRDFGPGGGWPTLTKTNYIEWAAVMRVRLQVRHMWEAVRYGDVDYDEDRRALDALIAAVPPEMQFSLSQKRTAKEAWDAIAAARIGSDRAHKSTLQALRKEWENLAFKPGEDVDDFALRLHTLLQKMVQYGDDTYDEERAVEKLFRCVPEKYKQIARSIESLLDLSTMSIEEALGRLKVVDGDEPQPLSGPITIGGKLHLTREQWEASQSNGRKGESPPSTGGRKPRKARGGVQLRWARRRAEGGARRGAQGDAAGNHKPARDDACRNCGKLGHWAKDCRQPRRGQAHVAQVEEKPALLLAHASIELSSAAPAATAFLHLEEPKVHAFLGNSSSNDKADGWYLDTGATHHMTGRREFFTELDSSVRGSVKFGDASGVEIKGVGSVTFTTKSGEHRLLTGVYYIPALRNSIISVGQLDENGSSVLVEHGVMRIWDRRRRLLAKVTRGTNRLYILSAQVAQPVCLAARRDGEAWQWHERFGHLHFEALKRLSAKEMVRGLPCLDHVEQLCDVCVLTKQRRLPFPQQTSFRAKERLELMHGDLCGPVTPATPGGRRYFLLLVDDLSRYMWVMVLGSKGEAADTIRRAQAAAEAECGRKLRVLRTDNGGEFTAAEFASYCADEGIQRHYTAPYSPQQNGVVERRNQTVVGMARALLKQRGMPAIFWGEAVVTAVYILNRSPTKALDGRTPYEAWHGRKPGVSHLRVFGCLAFVKELGPISKLDDRSTPGVFIGYAEGSKAYRILDPETQRTVDDGSTLTYDDFTVEYVHFERAGGVGSSSSPSVSTPVPEPPSTPTPTHPRATASTATSSSPTPPQPATPRAPAPTATPPSTSTPTPARVERSPVEFATPLSHDGERIDAYHDGEQLRYRTMEDLLGDQPVPGMVPRDLEAQLHLACDDGEPRSFAEAEKHAAWRAAMQSEMDAVQENRTWELVDLPRGHRAITLKWVFKLKRDKAGAIVKHKARLVARGFVQQEGIDYDDAFAPVARMESVRLLALAAQEGWGVHHMDVKSAFLNGDLKEEAPRAWNAKLDSTLKGMGFEQSPHEAAIYRRGNGGNALLVGVYVDDLVITGTKDAEVYQDDSGITLRQTAYAKRVVELAGLTDCNPALTPMEERLKLSRDSTAEEVDATQYRRLVGSLRYLTHTRPDLAFSVGYVSRFMQRPTTEHQQAVKRIIRYVAGTLDHGLYYPRCPGKAHFVGYSDSDHAGDIDTSKSTSGILFFLGECLVSWQSIKQQVVALSSCEAEYMVASAASTQALWLARLLSDLLGRDTGAVELRVDSQSALALAKNPVFHERSKHIRVRYHFIRSYLEEGSIKASYINTKDQLADLLTKPLGRIKFLELCSRIGMAQLSHKTTHKT

SEQ ID NO: 138367 - protein, 260 aa, Oryza sativa
  Clone ID: PAT_MRT4530_39763C.1.pep
MSPAAQVEGGKERRERLERAAAGELLALSTAAVLHAQLQQAEATAQARGKAAEDDDYDASATDDSRRSSAASTTPRGHDPSIWDGIHLRRDHVRRQKAPVFIREAVPRREEKDPKTATTHIYATIDAIPALFDGFPLLKGVDKPYCFEDTDDGGGGKVAEGFYKVYASMDSRRKHGDLSAQEQVVSEARRLRLDKGTRGRWALVQAVAAYREELVAAASQLGIGGFMREGDDGSGPAKRWRLARQATGRAQRAGLTGAAS

SEQ ID NO: 138368 - protein, 250 aa, Oryza sativa
  Clone ID: PAT_MRT4530_39764C.1.pep
MVKIRNGLRDSNNVSGSEEQISGARVCYASDSSSSPPPENPTIAQVFDNQTQMMTMMMQHMQQQYHQVLQQVQQQAQPQQQNLRFGPPPPKSKLLEFLHVKPPTFSSTTNPIEANDWLHAIEKKLNLLQCNDQEKVAFATHQLKGAASVWWDNYMVTRPAGTEIPEGIMAQKKREFCSLQQGTKTVIEYLHEFNRLARYAPEDVRTDVERQEKFWSSLDNELINLLMKLVDKAIHQEEQCNKMNRKRKAS

SEQ ID NO: 138369 - protein, 937 aa, Oryza sativa
  unsure (1)..(937): unsure at all Xaa locations
  Clone ID: PAT_MRT4530_39765C.1.pep
MAPARKKRAAAAAAAAAAAAAAAAAAAQWKVGDLVLAKMKGFPAWPAMISEPEQWGQTSVKKKILVYFYGTKQMSSTGYSFPFPFPLSTQQPPGGAPWRAARLAVAELAAARVEAEAEAAEDVARAAEVEVETLRSSINGSIASDITADRELEELARGRARERAERWAAAHPHGGGGGPRDRAPVDGNPDGRGSAGGSPERARGGGAPGGGGWFDGERGHRRQCDSPSPDRRYGYHGVQTVVRDFGPGGGWPTLTKTNYIEWAAVMRVRLQVRHMWEAVRYGDVDYDEDRRALDALITAVPPEMRARARKSTLQALRKEWENLVFKPGEDVDDFALRLNTLLQKMVQYDDDSYDEERTVEKLFRCVPEKYRQIARSIESAGPLHDAAASRARRVEVSSCGGREDAPRVVLAEVHVAQVEEEPALLLAHASIELPPAAPAAEAFLHLDEPKVLVSLCNGSSNDKGDGWYLDTGSTHHMTGRREFFTELDPSVRGSVKFRDASRVEIKGVGSVTFTAKSGEHRLLTGVYYIPVLRNSIISVGQLDENGSRVGTNRLYILSAQVAQPVCLAARRDEAWQRHERFGHLHFEALKRLSAKEMVRGLPCLDHVEQLCDVCVLTKQRRLPFPQQTSFRAKERLELVHGDLCGPVTPATPGGRRYFLLLVDDLSRYMWVMVLGSKGEAADAIRRAQAAAEVECGCKLRVLRTDNGGEFTAAEFALYCADEGIQRHYTVLYSPQQNGVVEWRNQMVVGMARALKQRGMPAIFWGEAVVTAVYILNRLPTKALDGRTLYEAWHGRKLAVSHLRIFGCLVFVKELGHIGKLDDRSTPGVFIGYAEGSKAYRILDPEIALDDGSTPTYDDFTVEYVHFEGARGAGSSSSPSVSTPVPEPPPXTPTLTHPRATTSTTTSSSPTPPQPATPRAPAPTATPPGTSTPTPARV

SEQ ID NO: 138370 - protein, 100 aa, Oryza sativa
  Clone ID: PAT_MRT4530_39766C.1.pep
DDDDNGDSREAVPRREEKDPKTATTHIYATIDAIPALFDGFPLLKGVDKPYCFEDTDDGGGGKVAEGFYKVYASMDSRRKHGDLSAQEQVVSEVTRLVGH

SEQ ID NO: 138371 - protein, 268 aa, Oryza sativa
  unsure (1)..(268): unsure at all Xaa locations
  Clone ID: PAT_MRT4530_39767C.1.pep
MTGYQGGPSTMIIRQHCPYHPDNFNSINNNGSHRNSEQHSLNPTPSPLMIPAQSVQSALPAQPEQPKKFGEXPELYFNCHEPGHMVXFASAHGLSLVKLKIPMRVHTPGGGMTTTHYYPSVTVEIQGLIFPANLILLESKDLDVILGMDWLTRHRGVIDCASRTIKLTSAKGEVPGISLNQATGEEQEVAVEKTTKKLEDIPIARDYPEVFPEDLTSMPPKRDIEFRIDLAPGTAPIRKKPYRMGANELAEVKKQVDEQLQKGYILPS

SEQ ID NO: 138372 - protein, 1185 aa, Oryza sativa
  unsure (1)..(1185): unsure at all Xaa locations
  Clone ID: PAT_MRT4530_39768C.1.pep
MVKTRNGSRESNNTSGSEEHISGARASDTSDNSLSPPPENPTIAQSKLLEFLRVKPPTFSSTTNPIEANDWLHATXKKLNLLQCNDQENVAFTTHQLQGPASVWWDNYMVTRPAGTEVTXQGTRTVIEYLHEFNRLAHYAPEDVRTDAERQEKFLSGLDDELTNQLISKDYEDLEKLVDKAIRQEEQCNKMNRKRKPAQLRTSQGISQKLPFTMGHQGGPSSMIIWQHRPYHPGSYSKNYNSGSHSNKEAQSAPEVILGTFPVNSTPAIILFDYGATHSFISKRFAGAHGLSLVKLKIPMRVHTPGGGMTTTHYCPSVTVEIQGLIFPANLILLESKDLDVILGMDWLTRHRGVIDCASRTIKLTNAKGEVVTFQSPVLQKQGISLNQVAGEEQEWPYRMGANELAEVKKQVDEQLQKGYIRPSTSPWGAPVIFVEKKDKTKRMCTDYRALNEVTIKNKYPLPRIDDLFDQLKGATVFSKIDLRLGYRKLRIHEEDIPKTAFITHYGLFECTVMSFGLTNAPAFFMNLMNKVFMEFLDKFVVVFIDDILIYSKSEEEHEQHLRLVLEKLKEHQLYAKFSKCDFWLKEVQFLGHVVNAQGVAVDPANVESVTKWTPPKTVTQIRSFLGLVGYYRRFIENFSKIAKPMTQLLKKEEKFIWSAECNRSFEELKRRLVSAPILILPDQTKDFQLRPHEGNYPTHDLELAAVVHALKIWRHYLIGNRCERRWLELIKDYDMGIHYHPGKANVVADALSRKSYYNVAWVEKLCCEVQRDFEQLNLGIVEHGFVAALEAQPTLVEQVRIAQASDPGIAELKKNMRVGKARGFTKDEHGTIWMGERLCVPENKELKDLILTEAHQTQYSIHPGSTKMYQDLKEKFWWVSVRREIAEFVALCDVCQRVKAEHQRPAGLLQPLQISECKWEEIAMDFITGLPRTSSGHDSIWVVVDRLTKVAHFIPVHTTYSGKKLAELYLARIMCLHGVPKKIVSDRGSQFTSKFWQKLQEELGTRLNFSTAYHPQTDGQTERDQTGERQLFGTEVLNEAKEKVRAVRERLRIAQSRQKRYVDNRQRELAFEAGDYVYLRVTPHRGVHRFQTKGKLAPCFVRPYRILERRGEVAYQLELPSNMLSIHNVFHVSQLKKCLRVPEEQASPDHIEIQEDLTYVEKPTRILETSERRTKNKVIRFCKV

SEQ ID NO: 138373 - protein, 114 aa, Oryza sativa
  Clone ID: PAT_MRT4530_39769C.1.pep
LRAKGDMTQGEEVKIYASKVTAVLCKAFATATSALVGYHVLGVGAKLLGNPPLPRIPRIGMAAGSAWIVGKFAYYTALQASPIFILEGGEERMKMELANIILTKHNDEKTLVEA

SEQ ID NO: 138374 - protein, 107 aa, Oryza sativa
  unsure (1)..(107): unsure at all Xaa locations
  Clone ID: PAT_MRT4530_3976C.1.pep
SIMLCKTFVGSHCLCVCSYHLSFLXHLDSEYFVVVYRDVDVEDVQQRGRPELPVIVPALALEPYVPLDDVDQNLESALADRDRRIQYWRTKFEVAELERTLELLYNH

SEQ ID NO: 138375 - protein, 1653 aa, Oryza sativa
  Clone ID: PAT_MRT4530_39770C.1.pep
METRNGSRDSNNASGSEEPINGARANGASDNSPSPPPENPTIAQVLDNQTQMMTMMMQQMQQQYHQVLQQVQQQAQLQQQNLQFGPPPPQSKLLEFLRVKPPTFSSTTNPIEAHDWLHAIEKKLNLLQCNEQEKVAFATHQLQGPVSIWWDNYMVTRPAGAEVTWTEFRHSFNKAQVPEGIVGQKKREFRSLQQGTRTVIEYLHEFNRLARYAPEDVRTDAEKQEKFMSGLDDELTNQLISRDYEDFEKLVDKAIRQEEQCNKMNRKRKAAQFRTPQGKCQKPRYTMGRHGGPSTMIIRQHRPYHPGSFNKTHHSDSHNNSGSHSSLNPTPSPLMIPAQSDQPALPEQPKRLARVNHASAEEAQSAPEVILGTFPVNSTPAVILFDSGATHSFISKRFAGAHGLSLVKLKIPMRVHTPGGGMTTTHYCPSVTVEIQGSIFPANLILLESKDLDVILGMDWLTRHRGVIDCASRTIKLTNAKGEVVIFQSPVPQKPGISLNQAAGEEQEVAVEKTTKKLEDIPIVREYLEVFPDDLTTMPPKRDIEFRIDLVPGTAPIHKRPYRMGANELAEVKKQVDEQLQKGYIRPSTSPWGAPVIFVEKKDKTKRMCVDYRALNEVTIKNKYPLPRIDDLFDQLKGATVFSKIDLRSGYHQLRIREEDIPKTAFITRYGLFECTVMSFGLTNAPAFFMNLMNKVFMEFLDKFVVVFIDDILIYSKSEEEHEQHLRLVLEKLKEHQLYAKFSKCDFWLKEVQFLGHIVNAQGVAVDPANVESVTKWTPPRTVTQVRSFLGLAGYYRRFIENFSKIAKPMTQLLKKEEKFIWSAECNRSFEELKRRLVSAPVLILPDQTKDFQVYCDASRQGLGCVLMQDGKVVSYASRQMRPHEGNYPTHDLELAAVVHALKIWRHYLISNRCEVYTDHKSLKYIFTQADLNLRQRRWLELIKDYDMGIHYHPGKANVVADALSRKSYCNVAWVEQLCCEVQRDLEHLNLGIVEHGFVAALEAQPTLVEQMAPFEALYGRRCRTPLFWDQTGERQLFGTEVLNEAEEKVRAVRERLRIAQSRQKSYADNRRRELVFQVGDYVYLRVTPLRGVHRFQTKGKLAPRFVGPYRILERRGEVAYQLELPSNMLGIHNVFHVSQLKKCLRVPEEQASPDQIEIQEDLTYVEKPTRILETSERKTRNKVIRFCKVQWSHHSEEEATWEREDELKATHPHLFASSSESRVAAVALTEPARTSATIRLPPIVAEAPFPSHAACRRRPSAPRHRRSSPPLSSFAPAVVLIGEESPLPLPFSPFPVCAAGLRACAVAFSRCRRLSAVAAASRTAGHRRRWPCLAAASPWPPVGFEAEPSPAGASLSRPVPLPSGAHMPAAPSLSPCAAASGARLAEDLPSWSCFVKLVSSLPSRIACGVEPPAAEVKLPEHDAQMLHGWGAHLQSIHLATVHLEIQQCRTAREIKNPVASPDTLKLQESEVLGDEVFVEDLEGIPGVDEDYEPEHHGMVAESAADPAVATPRFAGGGLVEIEIENAGVQRRAAAAEAEQAVDEAGERVWRSPTPWGPTTRTAGADLQRSRQRLASTQVRTASRDGRRERTWWRRSSGRALMRSSPLAMARGLFLAGRALRRTGGVRRRRAPALRVATPRTDECLDKMGESED

SEQ ID NO: 138376 - protein, 1510 aa, Oryza sativa
  Clone ID: PAT_MRT4530_39771C.1.pep
MAVKDRFTGNPGRLTVLTTSGSGVEVLLSWSRLREVGFVAAVKMEIRNGSRDSNNASGSEELINGARANSASDNSPSPPPENPTIAQVLDNQTQMMTMMMQQMQQQYHQVLQQVQQQAQQQQQNLQFGPPPPQSKLLEFLRVKPPTFSCTTNPIEAHDWLHAIEKKLNLLQCNEQEKVAFATHQLQGPASVWWDNYMVTRLAGAEVTWTEFCHSFNKAQVPEGIVAQKKREFRSLQQGTRTVIEYLHEFNRLARYAPEDVRTDDGRQEKFLSGLDDELTNQLISRDYEDFEKLVDKAIRQEEHCNKINRKRKAAQFRTPQGKSQKPRFTMGRHGGPSTMIIRQHRPYHPGSFNKNHHSGSHNNSEQHSLNPTPSSLKIPTQSVQPALPEQPKRLGEKPELCFNCNKPGHTVGKCPKPRRAGPKFVQARVNHASAEEAQSAPKVILGTFPVNSTPAVILFDSGATHSFISKRFAGAHGLSLVKLKIPMRVHTPGGGMTTTHYCPSVTVEIQGLIFPTNLILLESKDLDVILGMDWLTRHRGVIDCASRTIKLTNAKGEVVTFQSPVPQKPGISLNQAAGEEQEVAVEKTTKKLEDIPIVREYPEVFPDDLTTMPPKRDTEFRIDLVPGTAPIHKRPYRMGANELAEVKKQVDEQLQKGYIRPSTSPWGAPVIFVEKKDKTKRMCVDYRALNEVTIKNKYPLPRIDDLFDQLKGATVFSKIDLRSGYHQLRIREEDIPKTTFITRYGLFECTVMSFGLTNAPVFFMNLMNKVFMEFLDKFVVVFIDDILIYSKSEEEHEQHLWLVLEKLKEHQLYAKFSKCDFWLKEVQFLGHIVNAQGVAVDPANMESVTKWTPPRTVTQVRSFLGLAGYYRRFIENFSKIAKPMTAIEEGRKVYLDGKVVSYASRQLRPHEGNYPTHDLELAAVVHALKIWRHYLIGNRCEDYDMRIHYHPGKANVVADALSRKSYCNVAWVEQLCCEVQRDLEHLNLGIVEHGFVVALEAQPTLVEQMAPFEALYGRRCRTPLFWDQTGERQLFGTEVLNEAEEKVRAIRERLRIAQSRQKSYADNRRRELAFETGDYVYLRVTPLRRVHRFQTKGKLAPRFVGPYRILERRGEVAYQLELPSNMLGIHNVFHVSQLKKCLRVPEEQASPDHIEIQEDLTYVEKPTRILETSERKTRNKVIRFCKVQWSHHSEEEATWEREDELKATHPHLFASSSESRGTGGEGGRDGVGSAEMFGCPAAGFTVAQEGTAHCLLRGLALFSPTPELKFFSVGAVSERLVSSLPSRQPVVNCDVYAICGPFTICNDNKDPFCDCMKGYSIRSPKDWELDDRTGGCMRNTPLSCGAGSYQSRRMLTDFGMAKMLGREFSRAMTTMRGTIGYIAPEWISGTVVTSKVDVYSYGMVLFEIISGRRNRSHEHFMDGDYSFYFPMQVARKLLKGEIGCLVDANLEGDVNLMEVERACKIACWCIQDHEFDRPTMAEVVQSLEGLLELNMPPLPRLLRQRSFGRH

SEQ ID NO: 138377 - protein, 1340 aa, Oryza sativa
  unsure (1)..(1340): unsure at all Xaa locations
  Clone ID: PAT_MRT4530_39772C.1.pep
MAAKSRSMEHVPTVHLTTVRLPPPENPTICSGVGQSDSDDDNDDATDAATVPSGVDSRDYEDFEKLVDKAIRQEEHCNKINRKRKAAQFRTPQXKSQKPRFTMGHHGGPSTMIIXQHRPYHPGRFFKNHHSGSHNNSEQHSLNPTPSSLKIPAQSVQPALPEQPKRLVEKPELCFNCNKPGHTVGKCPKPRRAGPKFVQARVNHASAEEAQSAPEVILGTFPVNSTPAVILFDSGATHSFISKRFAGAHGLSLVKLKIPMRVHTPGGGMTTTHYCPSVTVEIQGSIFPANLILLESKDLDVILGMDWLTRHRGVIDCASRTIKLTNAKGEVVTFQSPVPQKPRISLNQAAGEEQEVAVEKTTKKLEDIPIVREYPEVFPDDLTTMPPKRDIEFRIDLVPGTAPIHKRPYRMGANELAEVKKQVDEQLQKGYIRPSTSPWGAPVIFVEKKDKTKRMCVDYRALNEVTIKNKYPLPRIDDLFDQLKGATVFSKIDLRSGYHQLRIREEDIPKTAFITRYGLFECTVMSFGLTNAPAFFMNLMNKVFMEFLDKFVVVFIDDILIYSKSEEEHEQHLRLVLEKLKEHQLYAKFSKCDFWLKEVQFLGHIVNAQGVAVDPANVESVTKWTPPRTVTQVRSFLGLAGYYRRFIENFSKIAKPMTQLLKKEEKFIWSAECNRSFEELKRRLVSAPVLILPDQTKDFQVYCDASRQGLGCVLMQDGKVVSYASRQLRPHEGNYPTHDLELAAVVHALKIWRHYLIGNRCEVYTDHKSLKYIFTQPDLNLRQRRWLELIKDYDMGIHYHPGKANVVADALSRKSHCNVAWVEELCCEVQRDLGHLNLGIVEHGFVAALEAQPTLVEQVRIAQASDPEIAELKKNMRVGKARGFVEDEQGTIWMGERLCVPENKELKDLILTEAHQTQYSIHPGSTKMYQDLKEKFWWVSMRREIAEFVALCDVCQRVKAEHQRPAGLLQPLQIPEWKWEEIGMDFITGLPRTSSGHDSIWVVVDRLTKMAHFIPVHTTYSGKKLAELYLARIMCLHGVPKKIVSDRGSQFTSKFWQKLQEELGTRLNFSTAYHPQTDGQTERVNQILEDMLRACALDFGGAWDKSLPYAEFSYNNSYQASLQMAPFEALYGRRCRTPLFWDQTGERQLFGTEVLNEAEEKVRAVRERLRIAQSRQKSYADNRRRELAFETGDYVYLRVTPLRGVHRFQTKGKLAPRFVGPYRILERRGEVAYQLELPSNMLGIHNVFHVSQLKKCLRVPEEQASPDHIEIQEDLTYVEKPTRILETSERKTRNKVIRFCKVQWSHHSEEEATWEREDELKATHPHLFASPSESRGRDSV

SEQ ID NO: 138378 - protein, 141 aa, Oryza sativa
  Clone ID: PAT_MRT4530_39773C.1.pep
GPVREYYRGNTNASAAIVSQFTLAGSVSYGSTGSASYGSSVGSLDSFGSSVGSLGSSASYSSGAEFAVGRRRFGSGIVNRLRYGRVPAIAAAPATGLEGGKTITAPVHGSGRMPVVSNRRVPIRDRVKSKVLRRPVVTKYY

SEQ ID NO: 138379 - protein, 64 aa, Oryza sativa
  Clone ID: PAT_MRT4530_39774C.1.pep
KHNYIIYHVRLTKVLYVTASSALCSMSNLQNLKISDAWYLILCCSSVEQLTVHPLCFPELRIVD

SEQ ID NO: 138380 - protein, 84 aa, Oryza sativa
  Clone ID: PAT_MRT4530_39775C.1.pep
HHEQNISLNKTLCHQTKQHLEDQSGNIMLHCQLRCMRNNCSLVYHIYWRLSCLRKPIRDLAYLIDVKELYQYIKKAWSGSRDRL

SEQ ID NO: 138381 - protein, 173 aa, Oryza sativa
  unsure (1)..(173): unsure at all Xaa locations
  Clone ID: PAT_MRT4530_39776C.1.pep
MQSPTLHGFSRNATITQLLKACTASGGARGRTGSRCAGAGDXAVTCWGGRAVGACGPAAEHGEGAAGNRWRRAGQEGVGGDGLRRQVHHPLELHGYGDEATSPRLRRAPSSQAACDESSSGRAWRAARMARRTRWAAPRRHWRRDVRADEVEVLVMKSMTIIHQTVEKISKLK

SEQ ID NO: 138382 - protein, 91 aa, Oryza sativa
  Clone ID: PAT_MRT4530_39777C.1.pep
PPRRPSGHRRCSDARVPARTTRGSEHHAVRAGVSQPARRDRCLVGSGSLSSRRVRCSSGGLTLITWHVSLSFGALFGSWLVVGAGGAERTA

SEQ ID NO: 138383 - protein, 1588 aa, Oryza sativa
  Clone ID: PAT_MRT4530_39778C.1.pep
MLSVRGRQEEGFRVMGHGDVELEEGEAFPDDDGGGGALCLDPEVAFSYIDEKIQHVLGHFQKDFEGGVSADNLVILSGKNFLTGSKYGGYGSFLPTYQRSPPPLPQSRSPPKVANVGTSRSPYQQSAESMGQYPSTVANESISRNNGSTAPSSGDLCKREICSSTNGEKDSVACSDSLDSSFNGSDQKTLKVRIKVGSTNTLARKNASIYSGLGLDISSSSSMEGSPDGHEGQSPVCSNVPYESPRTILQIMTYFSVPGGFLLSPLHGNILKLTNKVTPLVNKWETNLDLKNVPRAVDGHSELSLSSGHVKAHVAKKMKPDGKKKKSIDTKTRKDANNTSAILGKEANVEIPGSRVILSDTHDITCSSGAPTTELKGVSQFTEESTKDARPKQQMGCNDLGTVKSEAVKTEVTKHIEENSSFDSSGNGCLAPRGKVKLKASKVDRTSEDMNISSHKFSPYDRKKESKVKPMRTFEPAMDDFEGNVDKDWGAGSSDDLKTIHGKETFASERTVEDNSRTEVKRMQKEHKANFVAPSSFLEDGNFTHSSVLVNDGATDSHLKSNHFENKSKEKSHKDLSENLPKRSIGNKEGASLESVSVQGQRKEKMMNSDNEKELHITGPAKKEIPSSVKHGTFPGSEEQQLHMPSNGGIIPGPANAASLPAPVLIEDNWVCCDMCHKWRLLPYGTNTSMLPKKWICSMLDWLPGMNKCDISEDETTNALNALYVTQIPAAGVSSGGPHTAHASVAASSTYNISGQLGQSRKRKNALKDENCYEHDQQAPAKMTLTSNQQAPAKNREVVDSEHYTNDRDPVSTHDLVPQSKSASERHKSKHKSRSSHSDGGDLTEKSKKHSKSKNRRGIDRDEHKTSKKTKKEDRHYFNKDWKNEYDLAGNKVRDETKALSAKAKMSKDSCEQDEFSLRKEKASRFDILEKTKRINDDDVAFHEKMKEHRAGIETLDLSGKKKTVKEWEDNRLSSMDHTSKGGDNENLNERLSKIKKSEARPEEVQDANALFSSAGRRQDNELVADNKFVTCKEGPSELWDNQPPRQVLNLAEPTRRDVACLQSSTVATSSSSKVSSSRRNKNSREAKGSPVESVSSSPLKNSNTDKISKARKTGKDGELNADSSILHTPMKYPTHEVGLLHTGQQAVGEAILRGSTNNSGMGRVDNQLYPGDKKILDMHGPTLQPDQQDCFNPRATADSTGHKSKNSAPSRQGRNGSSNLISEGNKQIEMSSRKEKLRPSIDNQDMQKSIGQDNHSHMKEGKSEVHTTRVKPGASKNHTQLRSNVENGDSASPIRRDGNMIAFALKEARDLKHKANHLKEKGLELESMGLYFEAALKFLHVASLWETPNLDNSRSGDVAQSMKMYSETAKLCRRSVYHFIKQGIKVTKDAVVAAIARMENWRRLTVGRNLDHSLATFCAHAYERCNKMASPALAYKCVEVAYLKAAYYKHPSASKDRQELQSVVQIAPGESPSSSASDIDNLNSHGLSKALSTKGGNSPQVAGNHLPLAVRNQAHLLRLLAYTNDVNCAFDATRKSQVAIASAASSQERGKTVDDGLASVRTVLDFNFNNVNELLRLVRLSMELINT

SEQ ID NO: 138384 - protein, 95 aa, Oryza sativa
  unsure (1)..(95): unsure at all Xaa locations
  Clone ID: PAT_MRT4530_39779C.1.pep
MRLEEAVELHLTHPELYEDIVIKTTMGVILYGEPGTRKTLLAXQMLILHEKHFFLLLKGRMTQKYLADGPTLIEQXGREAADTAYSMMVIDAIDA

SEQ ID NO: 138385 - protein, 173 aa, Oryza sativa
  unsure (1)..(173): unsure at all Xaa locations
  Clone ID: PAT_MRT4530_3977C.1.pep
RVHPVSQGLRXRHLHVQRGHAVLQRGVQEGADRDGQEQAPQEEAAVLSHGAGGGAPPPIRARAPASAAAAEVEIKRELSSAPHQAARPLPDWRLTRACMLRMHAHTRSTGVILHIQVQVCTRHFEESMDRSRGTTTTTPSSHVCGRENGEVIIEEFFLCIMLADEHIYIYRFG

SEQ ID NO: 138386 - protein, 88 aa, Oryza sativa
  Clone ID: PAT_MRT4530_39780C.1.pep
PKWLGIKHRKGVPLVDSENLMDSITSAYDNDTAFVGTNEEYAAIHQFGGMAGRGCKVKIEARPFLTLTEQDKSDILEEITDYWQRLLQ

SEQ ID NO: 138387 - protein, 624 aa, Oryza sativa
  Clone ID: PAT_MRT4530_39781C.1.pep
MIQLQVKHLNPSSFVAAVQKVIRNQNTDGKKDPTTEQDRTDIEFVLLDQCGPEKMDSSQSGNNACENQLSEQHKDELGSFDGGYMFAHQPHSDMLRLAPPFESETQLVNETLQTDNVYCETLLTDGPSGSYTQNSAPDPHLYWAGAVEGCATDYTPQMLPGACQSQLVPNDQINNKLNEPSDYMPMDHNVSSQNLRGMRRRCLFNEKSGAANEGAKNSSARHSTNSTTPRRKISSSDNNLKTLRTPPCALPGIGLHLNALATVPKDKMVPHNDIQSSLNQASNVPSAVGSSPPTDDPHTINDDSSQTAVVAYVGESSQGSPKKKRHKFDNGDGTSCKRCSCKKSKCLKLYCECFHAGVFCSEPCSCQGCLNMPSNMETVLSTREQIESRNPLAFAPKVIRTEPGQELAISCICGILCDVHIRYKGKESTRNLRISCMLFCLKMYFLGVALLGIEEAKRGCEEKDGGVKEETTDNDKQLVIYQDSINLTPAESVLATPSVVDYRPLVALPPLSSKKPRSSTKLGGYSSRLEGHLKSDILLSPFESYAEMMLGDGTSNVLKGESSPQTSVKVVSPNKKRVSPPRIGTGLSPICKSGRKLILKSIPSFPSLGVDITNEDPNTSSLAP

SEQ ID NO: 138388 - protein, 123 aa, Oryza sativa
  Clone ID: PAT_MRT4530_39782C.1.pep
RPGTTHLISSLISAFAKKSLISLPILAFDTNTKQRMRTVQLLLVAIALMSLSSVMVARSADISALTPNCSSVILNPGKACSAAKCNADCSRMYKGTGTCFGPVGCDCEYCPSASAPTATGSKN

SEQ ID NO: 138389 - protein, 105 aa, Oryza sativa
  Clone ID: PAT_MRT4530_39783C.1.pep
VRSPTTAAPLSHGGLLLLVACSGRRRLVGSPTTAAAPAAWPTLRRRLLPVAIARPGHRRRRCRHLTFYCLRWGSGRGSSGSRGDTTKHLQNNQEEQRSLHILQNI

SEQ ID NO: 138390 - protein, 93 aa, Oryza sativa
  Clone ID: PAT_MRT4530_39784C.1.pep
MGVRLNPPKSSSATERPDEEGCPRVGGDAERSGSPSVPFLGHLHLLGPLRHRSLHELHLRYGTDGGLLLLLLRLQLGRRRTLVVSTAAAAADL

SEQ ID NO: 138391 - protein, 120 aa, Oryza sativa
  Clone ID: PAT_MRT4530_39785C.1.pep
MVASEYRAQRNQEEIERETTTKIRISTCGRATGLPSLRGAVAKQEVCLRHGTISQARVHGSGSRHARQRSPAGPNPRDVASNFEITKPHRRSVDIKTRDMRDLLNSSVAIFSRVPWYHFF

SEQ ID NO: 138392 - protein, 94 aa, Oryza sativa
  Clone ID: PAT_MRT4530_39786C.1.pep
SGIGFFLPRGRTHAYHSQTIGDSKPQPKVTPILSLTHSYPPSIKLTERKPTNIQSFTPRLSRPRTLVLTPKIISSKQFLKRGCLLFLNQLLALA

SEQ ID NO: 138393 - protein, 1529 aa, Oryza sativa
  unsure (1)..(1529): unsure at all Xaa locations
  Clone ID: PAT_MRT4530_39787C.1.pep
MSDARSRRSVASSTQRQQDAELAAAEERRRATAQTAAAAARAARLAAAELAAARAEAEAEAAEDAARAAEVEVETLRSSINGSIAGDITADRELEELARGRARERAERWAAAHLHGGGGGPRDRAPADGNPDGRGRAGGSPEPTRGPHRQRGSXPDRRHGHHGVQTVVRDFGPGGXHMWEAVRYGDVDYDEDRQALDALIAAVPPEMQFSLSQKRTAKEAWDAITTARIDSDRARKSTLQALRKEWENLAFKPGEDVDDFALRLNTLLQKMVQYGDDTYDEERAVEKLFRCVPEKYRQIARSIESLLDLSTMSIEEALGRLKVVDGDEPQPLSGPITIGGKLHLTREQWEASQGDGRKRESSSPTGGRKPRKARGGVQLRWARRRAEGGARRGAQGVATGNHKQARDDACRNCGKLGHWAKDYRQPRRGQAHVAQVEEEEPALLLAHASIELPPAAPAAAAFLHLDEPKVLVSLCNGSSNDKADEWYLDTGATHHMTSRREFFTEFDSGVRGSVKFGDASGVEIKGVGSVTFTAKSGEHRLLTGIYYIPALRNSIISVGQLDENGSRVLVEDGLMRIWDRRRRLLAKVTRGTNRLYILSAQVAQPVCLAARRDDEAWQWHERFGHLHFEALKQLSAKEMVRGMPCLDHVEQLCDVCVVTKQRRLPFPQQTSFRAKEWLELVHGDLCGPVTPATPGGRRYFLLLVDDLSRYMWVMVLGSKGEAADAIRHAQAAAEAECGRKLRVLRTDNGGEFTAAEFASYCADEGIQRHYTTPYSPQQNGVVERRNQTVVGMARALLKQRGMPAIFWGEAVVTAAYILNRSPTKALDGRTPYEAWHGRKPAVSHLRVFGCLAFAKELGHIGKLDDRSTPGVFIGYAEGSKAYRILDPGDTAWRGWVWDKAVDDGSTPTYDDFTVEYIHFEGAGGVGSSSSPSVSTPALESPPTPTPTHPRATTSTTTSSSSTPPQPVTPHAPAPTATPPSTSTPTPARVERSPVEFATPLSHDRERIDAYHDGEQLRYRTMEDLLGDQPVPGLVPRDLEAQLHLACDDGEPRSFAEAEKHAAWRAAMQSEMDAVQENRTWELADLPRGHRAITLKWVFKLKRDEAGAIVKHKARLVARGFVQQEGIDYDDAFAPVARMESVRLLLALAAQEGWGVHHMDVKSAFLNGDLKEEVYVHQPPGFVIPGKEGKVLRLHKALYGLRQAPRAWNAKLDSTLKGXGFEQSPHEAAIYWRGNGGNALLDAEVAAFKXEEMKATFQMSDLGPLSFYLGIEVHQDDSGITLRQTAYAKRVVELPGLTDCNPALTPMEERLKLSRDSTAEEVDATQYRRLVGSLRYLTHTRPDLAFSVGYVNRFMQRPTTEHQQAVKRIIRYVAGTLDHGLYYPRCPGKAHFVGYSDSDHAGDIDTSKSTSGILFFLGKCLVSWQSVKQQVVALSSCEAEDTGTVELRVDSKSALALAKNPVFHERSKHIRVRYHFIQSYLEEGSIKASYINTKDQLADLLTKPLGRIKFLELYSRIGMAQLPHKTTHKT

SEQ ID NO: 138394 - protein, 128 aa, Oryza sativa
  Clone ID: PAT_MRT4530_39788C.1.pep
SPEEAGKGKWYIATAATNHMTNDKSLISDLKPVADGRNIIADGNGAGLKVQGRGAVNTETVVLPAEVWYVPEIDENLVSVDQLNELGLSISIGRGVCTVTRVSDGSVVGKARRSGGVYEVEFLKVPLN

SEQ ID NO: 138395 - protein, 547 aa, Oryza sativa
  Clone ID: PAT_MRT4530_39789C.1.pep
MWPLSPHRRHLQQHGHSGAMGRRLLLLFLMLAQAPNSNGDSKIKNVVVLALENRSFDHMLGWMQRLLGLPIDGLTGAECNPAPGPGPADSLLHCVSPDADLVVPDDPAHAFEDVLEQLLGFRPNDSTGAAASPSDMSGFVRSAVSVSALLTDAVMRGFTPSRLPAFSALASSFAVFDRWFSSIPGPTQPNRLFLYSATSHGAVAHDKWNLLRGYPQRTIFDSLAADALDYRVYFKTIPTTLFYRRLRTVANAARGTFRRYDAAFRDHARRGLLPALSVIEPRYFDLTGTPADDDHPAHDVANGQRLVKDVYEALRAGPQWNHTLLIITYDEHGGFYDHVPPPNVGVPSPDAIRGPLPFFFRFDRLGVRVPTIMVSPWIRKGTVVGRPPGGPTPTSEYEHSSIPATIKKIFNLSSDFLTRRDAWAGTFEHLFTDLDEPRTDCPETLPEIPPPSSSSSSTKKEDGGWLSDFQRELVQLAAFLNGDYMLSSFAQEYESRMTMTVKQADAYVRRAVKSFLEASKRAKRLGANDSAIVTMRPSLTTATTCCP

SEQ ID NO: 138396 - protein, 215 aa, Oryza sativa
  Clone ID: PAT_MRT4530_3978C.1.pep
MELQRTRSTSSSPRGVMAIIFQSGGKLSLIENRRSAGGDSSLPFSVSTSSHTFLFSVAATPHWWRRSGGLREVSNLLTLRSDSIAHQFTQLLKLATNYFIWTAGGSPLLPQWPAVSRSQTKEGQAPMCVLLCASSLGTWGQTRTARLVPTHVVRREVEEEDEIALGLVLTRVTLGNEVFPISVGPPSYQIFFPHEVHVTQCVIFNEVVCLYGIAF

SEQ ID NO: 138397 - protein, 466 aa, Oryza sativa
  unsure (1)..(466): unsure at all Xaa locations
  Clone ID: PAT_MRT4530_39790C.1.pep
MPPKLLTYLILALLAAPAAAARRHPSPPSSAAAGEPVYLWPLPGTFASGSRTLLVDPDLALDGHLRPGPGDVAAGSLDPXRSTLTLPSGARRAQRLXGYDVGKLTVVVASADDKLELGVDESYTIYVAAAGGVNSIVGGATIEANTIYGAIRGLETFSQLCVFNYDTKNVEVRHAPWYIEDEPRFAFRGLLLDTSRHFLPVDVIKQVIDSMSFSKLFFQFTYKRCSLISRLKLPDSKAMLGKENVIALQGMCSDYYLHLLGIHVMAEIDVPGHAESWGKGYPKLWPSPKCREPLDVTSNFTFEVISGILSDMRKIFPFGLFHLGGDEVYTGCWNATPHVKQWEETFNSFKENLNPLTVVHNWLGPGVCPKVVEKGFRCIMSNQGVWYLDHLDVPWQDFYTSEPLAGINNTAQQKLVLGGEVCMWGETADTSDVQQTIWPRAAAAAAPVTNSYARRPPIGPGSCFIQ

SEQ ID NO: 138398 - protein, 1468 aa, Oryza sativa
  unsure (1)..(1468): unsure at all Xaa locations
  Clone ID: PAT_MRT4530_39791C.1.pep
MSDVRSWRSVASSTRRQQDAELAAAEERRRATAQTAAAAARAARLAAAELAAARAEAESEXRAAEVEVETLRSSINGSIADDITADRELEELARGRVRERAERWAAAHPHGGGGPRDRALADGNPDGRGRAGSSPERARGPRRQRGSPSPDRRHGHHGVQMVVRDFGPGGGWPTLSKTNYIEWVAVMRVRLQVRHMWEVVRYXDVDYDEDRRALDALIAAVPPEMQFSFSQKXTAKEAWDGIAAARIGSDRARKSTLQALHEEWENLAFKPGKDADDFAFHLNTLLQKMVXYGDDTYDKERAVEKLFRCVPEKYRXIARLIESLLDLSTMSIEEAIGRLRVVDGDEPQPLSGPITIGGKLHLTREQWEASQGDRRKEESSSSTGDPVFLHLDEPKVHAFLGNSSSNDKADGRYLDTGTTHHMTGRWEFFTELDSSVRGSVKFGDASGVEIKGVGSVTFTAKSGEHRLLTGVYYIPALRNSIISVGKLDENGSRVLVEHGVMRIWDRRRRFLAKVTRGTNRLYILSAQLAQPVCLAARRDDEAWKWHERFGHLLFKALKRLSAKEMVRGLPCLDHVEQLCDVYVVTKQRRLPFPKQTSFRAKERLELVHGDLCGPVTPATPGGRRYFLLLVDDLSRYMWVMVLGSKEEATDAIRCAQAAAEAECGRKLRVLRTDNSGEFTAVEFVSYCADESIQRHYTAPYSPRQNGVVERRNQTVLGMARXLLKQRGMLVIFWGEAVVTAVYILNHSPTKALDGRTPYEAWHGRKPAVSHLRVFNCLVFTKDLGHIGKLDDKSTPGVFIGYAEGPKADCILDPETQRVRTARDIVFDEGRGWAWEKAVDDGSTPMYDDFTVEYVHFKGAGGVGNSPSPSVPTPVPEPPPTPTATHFRATTSAAMSYSPTPPQSATQRTPEPAATPLGTSIPTPARDEHSPVEFATPLSHDKERIDAYHDDEPLRYRTMEDLLGGQPLPGXVPRDLEAQLHLACDDGEPRSFAEAEGHAAWRAAMQXEMDVVEENRTWELADLPRGHRAITLKWVFKLKRDEAGAIVKHKARLVAHGFVQQEGIDFDDAFAPVAQMESVRLLLALAAQEGWCVHHMDVKSAFLNGDLKEEVYVHQPPGFVIPSKEGNVLRLHKALYGLQQAPRAWNAKLDSTLKGMGFEQSPHEVAIYRRGNGGNALLVGVYVDDLVITGTKDAKVAVFKEEMKAAFQMSDLGPLSFYLGIEVHQDDSGITLRQTAYAKRVVELAGLTDCNPALTLMEERLKLSRDSTTENRPTTEHQQAVKRIIRYVEGTLDHGLYYPRCPGKAHFVGYSDSDHAGDIDTSKSMSGILFFLGECLVSWQSVKQQVVALSSCEAEYIAAPTASTXALWLARLLSDLLGRDTGAVELGVDSKSALALAKNPVFHERSKHIRVRYHFIRGYLEEGSIKASYINIKDQLADLLTKPLGRIKFLEFCSRIGMAQLSHKTAHKT

SEQ ID NO: 138399 - protein, 280 aa, Oryza sativa
  Clone ID: PAT_MRT4530_39792C.1.pep
ARKRGIHVMAEIDVPGHAESWGKGYPKLWPSPKCREPLDVTSNFTFEVISGILSDMRKIFPFGLFHLGGDEVYTGCWNATPHVKQWLHERNMTTKDAYKYFVLKAQEIAINLNWIPVNWEETFNSFKENLNPLTGVHNWLGPGVCPKVVEKGFRCIMSNQGVWYLDHLDVPWQDFYTSEPLAGINNTAQQKLVLGGEVCMWGETADTSDVQQTIWPRAAAAAERMWSQLEAISAQDLETTVLARLHYFRCLLNHRGIAAAPVTNSYARRAPIGPGSCFIQ

SEQ ID NO: 138400 - protein, 160 aa, Oryza sativa
  Clone ID: PAT_MRT4530_39793C.1.pep
MEERLKLSRDSTTEEVDATQYRRLVGSLRYLTHTRPDLAFSVGYVSRFMQRPTTKHQQAVKRIIRYVAGTLDHSLYYLRCPGKAHFIGYSDNDHAGDIDTSKSTSGILLPCFYKKIDRKCPNSPSAILSNESKDLANMVFDGWEKSMLLGAHCCIRSYMN

SEQ ID NO: 138401 - protein, 136 aa, Oryza sativa
  unsure (1)..(136): unsure at all Xaa locations
  Clone ID: PAT_MRT4530_39794C.1.pep
QTAAAAARAARLAAAELAAARAEAESEXRAAEVEVETLRSSINGSIADDITADRELEELARGRVRERAERWAAAHPHGGGGPRDRALADGNPDGRGRAGSSPERARGGGAPGGGGWFDGERGPRRQRGSPSPDRRH

SEQ ID NO: 138402 - protein, 190 aa, Oryza sativa
  unsure (1)..(190): unsure at all Xaa locations
  Clone ID: PAT_MRT4530_39795C.1.pep
MDVKSTFQNGDLKEKVYVHQPPGFVIPGKEGKVLRLHKALYGLRQAPRVWNAKLDSTLKGMGFEQSPYETAIYRRGNGGKALLVGVYVDDLVITGTKDAEVAAFKEEIKATFQMSDLGPLXFYLGIEVHQDDFGITLXTDRYAKRVVELAGLTDCNPILLCWREIELDPIIPTEEVVLHKTDFFGEAFFP

SEQ ID NO: 138403 - protein, 917 aa, Oryza sativa
  Clone ID: PAT_MRT4530_39796C.1.pep
FHLHFLRVIYKNYNFGLGGKLRGVTLDHVEQLCDVCVVTKQRRLPFPQQTSFRAKERLELVHGDLCGPVTPATPGGRRYFLLLVDDLSRYMWVMVLGSKGEAADAIRHAQAAAEAECGRKLRVLRTDNGGEFTAAEFASYCADEGIQRHYTAPYSPQQNGVVERRNQTVVGMARALLKQRGMPAIFWGEAVVTAVYILNRSPTKALDGRTPYEAWHGHKPAVSHVRVFGCLAFAKELGHIGKLDDRSTPGVFIGYAEGSKAYRILDPETQRVRTVRDVVFDEGRGWVWDKAVDDGSTPTYDDFTIEYVHFEGAGGVGSSSSPSVSTPVPEPPPTPTPTHPRATTSTTTSSSSTPPQPVSPRAPAPIATPPGTSTPTPARVERSPVEFSTPLSHDGERIDAYHDGEQLRYRTMEDLLGDQPVPGLVPRDLEAQLHLACDDGEPRFFAEAEKHAAWRAAMQSEMDAVQENRTWELADLPRGHRAVTLKWVFKLKRDEAGAIVKHKARLVARGFVQQEGIDYDDAFAPVARMESVRLLLALAAQEGRGIHHMDVKSAFLNSDLKEEVYVHQPPGFVIPGKEGKVLRLHKALYGLRQAPRAWNAKLDSTLKGMGFEQSPHEAAIYRRGNGGNALLVGVYVDDLVITGTKDAEVAAFKEEMKATFQMSDLGPLSFYLGIETAYAKRVVELAGLTDCNPALTPMEERLKLSRDSTTEEVDATQYRRLVGSLRYLTHTRPDLAFSVGYVSRFMQRPTTEHQQAMKRIIRYVAGTLDHGLYYPRCPGKAHFVGYSDSDHAGDIDTSKSTSGILFFLGECLVSWQSVKQQVVALSSCEAEYMAASAASTQALWLARLLGDLLGRDTGAVELRVDSILSVLLLASFGFAFSIPRTASSISFMLYLVWMLSRTALRPNFRLVCCSMME

SEQ ID NO: 138404 - protein, 391 aa, Oryza sativa
  Clone ID: PAT_MRT4530_39797C.1.pep
MAPPPYAAAVVVATVAVLVLVSQVSVAAGADCRFPAVFNFGDSNSDTGGLSATFGAAPPPNGRTFFGMPVGRYCDGRLVIDFIAESLGLPYLSAYLNSIGSNFTQGANFATAGSSIRRQNTSLFLSGFSPISLDVQSWEFEQFINRSQFVYNNKGGIYRELLPKAEYFSQALYTFDIGQNDITTGFFINMTSEQVIAYIPDLMERLTNIIQNVYGLGGRYFWIHNTGPIGCLPYAMVHRPELAVVKDGSGCSVAYNEVAQLFNQRLKETVGHLRKTHADAAFTYVDVYSAKYKLISDAKKLGMDDPMLTCCGYGGGRYNFDDRVGCGGKVKVNGTWVVAGKSCDDPLKRVSWDGVHFTEAANKFVFDQIAGGKLSDPPVPLRQACQISRGQ

SEQ ID NO: 138405 - protein, 342 aa, Oryza sativa
  unsure (1)..(342): unsure at all Xaa locations
  Clone ID: PAT_MRT4530_39798C.1.pep
TGGVPGGSARGGGSPDELGRVSGPPSRGAHDGGALGGNGWVDGDRGRYRRRVSPSPDRYRGHHGFQAVIREVGPGGGWPTLTKTTYVEWAAVMRVRLQVRHMWEAVRYGDVDYDEDRRARDALIAAVPPEMQFSLSQKRTAKEAXDAIAAACIGSDRARKSTLQALRKEWENMAFKPGEDVDDFALRLNTLLQKMVQYGDDTYDKERAVEKLLRCVPEKYRQIARSIESLLDLSTMSIEEAIGRLKVVEGDEPXPLSGPITIGGKLHLTREQWEASQGDGRKWESSSSTSGCKQRKARGGVQLRCARRRAEGGARRGTXGGAAGNHKPAQDDARRNCGKLGH

SEQ ID NO: 138406 - protein, 1057 aa, Oryza sativa
  unsure (1)..(1057): unsure at all Xaa locations
  Clone ID: PAT_MRT4530_39799C.1.pep
MTTTTNTGGVRSKGRRGRGRPCRCDAGGGDGYVGRRTGTAEGAAVVGADETEGEAARVTAFRRNTGDAVDWPGKRMAFRCRDRQRRRKPTLRQSGTGGWSGGKRAEHGRSGERRRKTRLAAMEGGRSWRVRSRRLGARFKGEFGGIEEESMGIKTPQLILESMDVTVFLHLDEPKVHAFLGNSSGNDKADGRYLDTGATHHMTGRWEFFTELDSVRGSVKFGDASGVEIKGVGSVTFTAKSGEHRLLTGVYYIPALRNSIISMGQLDENGSRVLVEHGVMRIWDRRRRLLAKITRGTNRLYILSAQVAQPVCLAARRDDEAWQWHERFGHLHFEALMRLSAKEMVRGLPCLDHVEQLCDVCVVTKQRRLPFPQQTSFRAKERFELVHGDLCGPVTPTTLGGRRYFLLLVDDLSCYMWVMVLGSEGEAADAIRRAQAAADAECGRKLRVLRTDNGGEFTAAEFTLYYADEGIQHHYTASYNPQQNGVVERHNQTVVGMARALLKQRGMPAIFWGEAVVTAVYILNRSPTNALDGRTPYEAWHGCKPAVSHLRVFSCLVFTKELGHIGKLDDRXFIGYAEGSKTYRILDPETQHVRMARDIVFDEGRGWAWHKAVDDVPELPPTSAATHPQAMTSTMTSSLPTPPQRATXRTPAPTATTPGTSIPIPARVEHSPMEFATPLSHDEERIDSYHDGELLRYEAERHAEWRAAMQSEMDAVQENRTWELADLPRGHRAITLKWVFKLKRDEAGAIAKHKAHLVARGFVQQEGIDXVARMESVRLLALAAQEGWXEVYVHQPPGFAIPGKEDKVLRLHKALYGLRQAPRAWNAKLDSTLKGMCFEQSPHEAAIYQRGNGRNALLVGVYVDDLVITGTKDAEVHQDEFGITLRQTAYAKRVVELARLTDCNPALTPMEERLKLSRDSTTEEVDATQYRRLVGSLRYLTHTRSDLAFSVGYVSRFMQRPTMDHQHAVKRIIRYVAWTLDHGLYYPRCPGKANFIGYSDSDHAGDIDTIKSTSGILFFLGECLVSWQSVKQQVVALSSCEAKYIAASTASTQALWL

SEQ ID NO: 138407 - protein, 84 aa, Oryza sativa
  Clone ID: PAT_MRT4530_3979C.1.pep
PKRQKSAINRVNALGSGPLTNVTTLLHHHYKVANPNQTMKIPNRTLLKPPSCPFMLPPSLLPDNPAPFSLPEPLSSFINHAACL

SEQ ID NO: 138408 - protein, 396 aa, Oryza sativa
  Clone ID: PAT_MRT4530_397C.1.pep
MGAADKWLLPLVSVSFVSLLLFLSALSGFSASSSLFARLPPPSYVRRGAAAPPSFAYVLSGGRGEGRKLLRLLLAVYHPRNRYLLHLSADAPESERVELAAAVSRAAPAVRAFGNVDVVGRPTAGTPMGSSGLAATLRAAAALLRLDSEWDWFVTLNAADYPLVTQDDLIHVFSSVPRHLNFIDHTSDIGWKETQRVQPIIVDAGIYLAGRNQFFQATEKRDTPDGSPWVILNRRFIEYCIFGWENLPRTLLMYFTNVMLPQEGYFHSVVCNSDFRNSTVNSDMRYMEWDDPPQMEPHFLNTTHYDEIVESGVPFARKFRENEPLLDKIDERVLHRWRHRPVPGAWCTGRKRWFNDPCSQWSNVNIVRPGPQAEKFRKHMNQIIEESASGNNSCKQ

SEQ ID NO: 138409 - protein, 40 aa, Oryza sativa
  Clone ID: PAT_MRT4530_39800C.1.pep
IYQVVGEAITGVHLILLNLESMDRAKKIYSPGSRYFGIKI

SEQ ID NO: 138410 - protein, 500 aa, Oryza sativa
  Clone ID: PAT_MRT4530_39801C.1.pep
FQIKRKNGNGGSDTVEEVTVFEYYRKNWKIDLKGSAHFPCLNVGKPKRPTYIPLELCHLVPLQRYKKALSTLQRSTLVERSRQNPQERMFVLSGVLRDSDYNSVPMLRECGISIAQEFTQVAARVLPAPKLKSGDGEDIFARNGRWNFNKNCNAHHLAQRLIHCGNLKGLVSSSSTQSCAFSADSGPWKRMCLVKYGIVTQCLAPTKINDQYLTNVLLKINAKLGGLNSLLQIERNQAIPLLSKTPTIILGMDVSHGSPGRDDVPSVAAVVSSLEWPLISKYKASVCTQSPRLEMIDSLFKLVGNEDHVIIRDGVSEGQFNQVLNIELAQIIKACEFLANEKNDSEWSPKFTVIVAQKNHHTKFFQTDRSNKVVNVPPGTVVDKGICHPRNCDFYMCAHAGMIGTTRPTHYHVLHDENNFTPDDLQELVHNLSYVYQRSTTAISGVAPICYAHLAAAQVSQFVRLDDAASEGSGDGGAPPRPVPELPRLHPDVRQSMFFC

SEQ ID NO: 138411 - protein, 66 aa, Oryza sativa
  unsure (1)..(66): unsure at all Xaa locations
  Clone ID: PAT_MRT4530_39802C.1.pep
KIPDSFRPFSDSVGYHPYCIRFRIREKKSEFVSESEKFRIFPTEFFRIXKLVKVTDGKYPNHFHPY

SEQ ID NO: 138412 - protein, 80 aa, Oryza sativa
  Clone ID: PAT_MRT4530_39803C.1.pep
MPHAQSHAATRDPASPSLQLRLRRMLLQASKRLFSVKDEQQLTIWFTRDKICIIDVDRVKLVKLFLKISFNTIMLPSPAV

SEQ ID NO: 138413 - protein, 247 aa, Oryza sativa
  Clone ID: PAT_MRT4530_39804C.1.pep
MGGLRRTEAVPRFGSANKSPSSSSSGALDGDAAEAEARRRLTSSLREALGLYRDILRVTWLFEWPDDRGDYDGIVTEYDVECGVLVWERDEHEGRRVWATARHRPVLFALTLATAAVALPFSPRAPAAVAPPPPSSLPSRLPTSRRRFASPRNRLEREKWKRREVMMWLPSILASGAKFRQNDFEADADSKPMTTLGLPNFTVNRGLQAKLRGTVEISRTSSCRPDSHVGTEMGSNSNRAYKLCHQI

SEQ ID NO: 138414 - protein, 82 aa, Oryza sativa
  Clone ID: PAT_MRT4530_39805C.1.pep
PPEFDVPWKQPLKSLNCDSSKFTLAVVDGSISSGQVAELLQEDSMKNSWFRLKIPGAAGAHTIFLMEESFPQRLELYLIARA

SEQ ID NO: 138415 - protein, 300 aa, Oryza sativa
  Clone ID: PAT_MRT4530_39806C.1.pep
MWRAQQRRLNLGHRLDLLDLEAEARVERHGAHMLVTLSLLEQVYVASLTLALGRIISLNRKTGWGQVLSRQVTNRERGRGRQERSKVVVAPLYRAMRATTSCCTEVEGSRVTLGHSYPCSPVSSPRLLGVCIMVTSSSRSIAVAVLSSLVMPLARLRSISVEEHELPCRSLLSHRIDPRYRLDDPRCRLNDLPPFYLDSSSRCEAAIALGRRRELAGSCRRARAERRQAAAPPRVGRGQGGRLAGRRGARPPRRREWGGELHGLADDPDADPVFKNVALDMDILYRSSEMHQPEKAMSCS

SEQ ID NO: 138416 - protein, 115 aa, Oryza sativa
  unsure (1)..(115): unsure at all Xaa locations
  Clone ID: PAT_MRT4530_39807C.1.pep
MVRLPVKADELTQRRLAKAERHPGTDTNEDFESVKSTLLSLASLQVATDNFHESNKIGEGGFGAVYKGILHGQEVAVKRMAKGSNQGLEELKNELVLVAKLHHRNLXVRLVGFCL

SEQ ID NO: 138417 - protein, 170 aa, Oryza sativa
  Clone ID: PAT_MRT4530_39808C.1.pep
MGTLLKSATMPRYETWEPPKKKRPSQAEAQADEIKRLQNELRDATDRVEIRDGALRRMMEESIQKARQVVLRLGLDIPLIPNAATSFADTVGHYVLKFSHLADVLSRLPPSKRRERKRAQFVAKRIVCPALPTRYPQLAGLKSNKEPAGNSLAPAVEMTGFGQGGAGFTI

SEQ ID NO: 138418 - protein, 114 aa, Oryza sativa
  Clone ID: PAT_MRT4530_39809C.1.pep
KAPTGKKKKFFQKTNPNVFFRGKPQKSGKTKGKRGIPGRGKQKKGFFGKKPKGGPEKTWGEILTKNWKPLGVGGVKKPGGLERAPPPPKVKEKIKDPLKGPLSEDPDLKGPHRF

SEQ ID NO: 138419 - protein, 582 aa, Oryza sativa
  Clone ID: PAT_MRT4530_3980C.1.pep
PQKPPTLPLHRFHRRKTLERRAAHGLRHRRRRRLRRGVLDGVPALLLRPLLPAPLRRAPPPLPDRRLPPRLLRRRAPRRAAHRPGHRHVLLHLGLLPARPPRRRRRRVGPLHPLQLRPDPLPSPRHRRRPRPRPRSRRWPHPLRPFHLLAATPPPLSPLLPLHSTRRTRLRLPPRSAGARARSVLPRARRRHRRESGLLLLLPSFPRGLGLRLPRLQEAHTPYDPDKIQAADQLVIEELTKLSELKHAYREKNPKPVAATPQDARLLSEIQEQQNLLKTYEVMVKKFQSQIQTRDTEITHLQQQIDEAKLRKSKLEKKLKQRGLLNKESEESDDEDNYFSIELTPSLFTSAVDNAYQSIHDFSKPLINMMKAAGWDLDAAANAIEPAVVYTRRAHKKYAFESYICQRMFGGFQEESFSVKAANITVSNEAFFHQFLAVRAMDPLDVLSQNPDSVFGKFCRSKYLLLVHPKMEGSFFGNMDQRNYVMSGGHPRTPFYQAFLKLAKSIWLLHRLAYSFDPKVKVFQVKKGSDFSEIHMESVVKNIILDEGAERPKVGLMVMPGFLIGTSVIQSRVYLSGVKSAD

SEQ ID NO: 138420 - protein, 89 aa, Oryza sativa
  Clone ID: PAT_MRT4530_39810C.1.pep
MHGTEATLALGRRARVACAWASGRSARSGVRAVEDGDKADHRLQLGLPSLRTMLAGDVDVASCDRREIDRWRGVMLLMKMIRKLHLLLS

SEQ ID NO: 138421 - protein, 85 aa, Oryza sativa
  Clone ID: PAT_MRT4530_39811C.1.pep
WGRAQPDSPRGDGNSCANPRLRVDDGVAALQSSRGEVGVPRDRLQETGQDQIRGYGVQGWVPRDKMVEHKCEQAKGTAMWVQVVV

SEQ ID NO: 138422 - protein, 242 aa, Oryza sativa
  Clone ID: PAT_MRT4530_39812C.1.pep
MEKVNSELVLQNCYIMEQNQRLKKAAELLHKERQRLLSELKAQLLSNQHRQPPANGHGHGDDDKPAAGGEPIQAQPSRLDWPEEAMGDEARKAVENALGWKKTGLPKLGMRIERRQQRLPPSAGGGGWSGGGGWFRWFSSGGFWDAAKQTLLTIVGIIAAFFLIANFNVLVAAIVNSLLAVLRQIRRALSFVAQCILQGVQSSAPRRSSPSLDTGNQAAVVVKDRVGKSAKERVVRKWGNGV

SEQ ID NO: 138423 - protein, 391 aa, Oryza sativa
  Clone ID: PAT_MRT4530_39813C.1.pep
MGTWCERCRRRDEQDYRNLDDCQKHFLLLMMGDFQHEIRGEQIVEQLTIPKEFVQRLKGDIPEEIQLETHNRNSYTVRVDKSQEKVIFAAGWAQFVKTFDLHMGDSMMFRFKGNSQFDVIIFDQVGREKVCSVAVDDYLDPNVQEGRTDATETLNSSRAHSQDDYLDPNVQEGRTNATETLNSSRAHSQPMPMQTPATETLNSSRAHSQDMPMQSPATETLNSSRAHPQPMPMQLPTETVNHFHAPHYPMQMPIENMALSRTQAMPTQMQSPPTYRWTQVQRDNLRYSLPSEDQGCRVGVIPDPIIGRRTKLNPVQEKVVNFKIQHIHSEIPIFVAVIKRSNVSGVLSTLSVAKRYVDEYLGGERFISLSRLGGKWGIRLLLVGVGVAQGW

SEQ ID NO: 138424 - protein, 229 aa, Oryza sativa
  Clone ID: PAT_MRT4530_39814C.1.pep
MEKGGASVSMDAAASMDMWDWEVLPDQLSSSSHGGGGHGRRVLGAQETEESNLDAAAADMAVDDECKDIGVDVAVPAETKTSQEETMAAKVTEEEEEEAFQGSDAKVVDGDDDGGGEEEEEEEEEGKKAGAECVVFRVGKLRVNGIGALCSFGVAAAATVCVFLVGGRLQHHHRQQQQHKIQLQLYGDDKRMQQVVQQTSRLNQAMSSVMGGGGSTRANISFGGYYEGF

SEQ ID NO: 138425 - protein, 139 aa, Oryza sativa
  unsure (1)..(139): unsure at all Xaa locations
  Clone ID: PAT_MRT4530_39815C.1.pep
MPCVLGMASFALRLRWLWLQRSRHPXGPDLKAPLERSVSGMFVASTFLVPWDVPPHLRATRTVASALADNSLVRDIRGALTVPVISQFLLVWDAVWWSSARACPPEHLCKGFDFGPPGILEDRLWSLVSAASFGDLLGG

SEQ ID NO: 138426 - protein, 192 aa, Oryza sativa
  unsure (1)..(192): unsure at all Xaa locations
  Clone ID: PAT_MRT4530_39816C.1.pep
FFFFFFNQGLIILFPHKPRTXRSTSXVTINNQGTTAQVTHHQHTCTSTSASIISSKPHIPDMGSSSLAAQFHLPFSIGHALWATQSWSFHPPCQHQATQQPSVMPATIHVPHAGKRHSRHRCIRXXIHQGFGNSTHPSHTPCVHPHSPSPHRGQLYPIVSLLFAXPRAHQQHHPPTHNRXAHCTFRDPTPTG

SEQ ID NO: 138427 - protein, 113 aa, Oryza sativa
  Clone ID: PAT_MRT4530_39817C.1.pep
APLKYICFVTYVVAIYSTVLLIIYMACMLILVSSDKQNKGLWGSNRSLDAPYTNKLNRQLFLSAKGTCQILIQSNELSSKSTRSLPGCYTKPRADLDISFIHSSIFSSGLLQD

SEQ ID NO: 138428 - protein, 120 aa, Oryza sativa
  Clone ID: PAT_MRT4530_39818C.1.pep
MAFKDKYPSLYAIVRRKNSLIATVMSSVLLNVILGEHIGSGFGHSYKGGSSEVVSGNPNDELLTETDKMGEEGNSLQVASAKATTITSHQPRGVYMEQKQMIDKHKWPTSHTGNRIKYFN

SEQ ID NO: 138429 - protein, 207 aa, Oryza sativa
  Clone ID: PAT_MRT4530_39819C.1.pep
LDFPPPPPPVNVPAAAPAGAASPESKQQAAAGAIVPLRRPRGRPLGSKNKPKPPVIITRDSPDALHSHIIEVAPGADVAACVAEYARRRGRGVCLMGASGAVADVAVRGAAAPLPGRFELLSVTGTVLPPPAPPGASGLSVLLSAGQGQVVGGCVVGPLVAAGPVTLFAATFANAVYERLPLQAEEAGEPHAEAEQQAQPEAAAASS

SEQ ID NO: 138430 - protein, 421 aa, Oryza sativa
  Clone ID: PAT_MRT4530_3981C.1.pep
RPSTLPPAPPPPPAPPPPPRPRSASARSSCSTSATTRRKKAGHTSSSTRPRWQTALSVAAKNAVLLAVLLYVGDLAWRAARPAPPRPVDQAAMAGYDARVADVEASLARAFRMLQVQLEAVDRKIDGEVGAVRGELAALLEEKRLELEGQLKRLDARADDLSDALGALKRMEFLRKDEFDKFWNEVKESLGSGPGTEVDLDQVRALAREITMGEIEKHAADGIGRVDYAVASAGGKVVRHSDAYDAGKRGGFFSSLLSGDTAASPKKILQPSFGEPGQCFPLQGSSGFVEIKLRKGIVPDAITLEHVSKDVAYDMSTAPKDCRVSGWYQEAHNEAYSGHAASAKMYVLTEFTYDLDKKNVQTFDITAPDVGIINMVRLDFTSNHGSSALTCIYRIRVHGHEPVKQPKISCNSTWNSCPLSN

SEQ ID NO: 138431 - protein, 52 aa, Oryza sativa
  Clone ID: PAT_MRT4530_39820C.1.pep
LFKDTRAATRATYLSRGRWIMSSKVLTSYHCMVSPFYHEYEVEKDHILVVTV

SEQ ID NO: 138432 - protein, 64 aa, Oryza sativa
  Clone ID: PAT_MRT4530_39821C.1.pep
FVVMWPSKVQMIDVPCFDVFFFLVFCCNAFPSYKLQPVISFIYLLVIKNVELNSFKKKKKKKKK

SEQ ID NO: 138433 - protein, 327 aa, Oryza sativa
  Clone ID: PAT_MRT4530_39822C.1.pep
MRMLPMCRQQQSEKLHDYTVSSHINSDLLGPSNSENEASEHIDQQSYQAVDHANPILGMAPTAHHRPLNSSAQVTAAVHHELDQGASATLDQSNDDNLAVVTCQRQPEHCETQMTKEVACPRPACMSPFSMPILHEWPNAKLARRLYRWLELKSRDEDITGVWFKHDKPTPIEISAMKLKMQVTHGGNLCMDLCSAFIRLYQQLDAKMNTNPSGQRWRHFFPPQFALIAPVELAGGTWSCYIWDMEKRQMHILDPVLQQRETYNVSAKHRNSGFYTLYYSREFHDGKLQRSLDSGSITALRKDLLYQLLTMEGNYAELPSHIARYLE

SEQ ID NO: 138434 - protein, 1346 aa, Oryza sativa
  unsure (1)..(1346): unsure at all Xaa locations
  Clone ID: PAT_MRT4530_39823C.1.pep
MSDVRSRRSVASSPRRQQDVELAAAEERRRATAQTAAAAARAAILAAAELAAARAEAEAEEAEDAARAAEPGARARRRCSQWXGWFDGERGPRRQRGSPSPNRRHDHHGVQTVVRDLGPGGGWPTLYKTNYIEWAAVMRVRLQVRYMWEAVQYGNSDYDEDQRPLDALIAAVLPELQFSLSQKRTTKEAWDAIAAARIGSDRARKSTLQALRKEWENLAFKPGEDVDDFALRLNTLLQKMVQYGDDTYDEERAVEMSHSLSQGLSPLGGAPSHSRAVGGQPGRREEGGVISPDRRPQAAQGAGRCPATPRRGQAHVAQAEEEEPVLLLAHASIELPPAAPAAIAFLHLDEPKVLLSLCNGSSDDKADGWYLDTGATHHMTGRQEFFTELDSSVQGSVKFGDASDVEIKGVGSVTFTAKSGEHRLLTRIYYIPALRNSVISVGQLDENGSRVLVEHGVMRIWDRRRHLLAKVTRGTNRLYILSVQVAQPVCLAARRDDEAWQWHERYGHLHFEALRWLSAKEMVRGLLCLDHVEQLCDVCVVTKQRRLPFPQQTSFRAKERLELVHEDLCGPVTPATPGGRRYFLLLVDDLSRYMWVMVLGSKGEAADAIRRAQAAAEAECGRKLRVLRTDNGGEFTATEFASYYADEGIQRHYTAPYSPQQNGVVERRNQTVVGMAWALVKQRGMPAIFWGEAVVTAVYILNRSPTKALDGRTPYEAWHGRKSAVSHLWVFGCLAFAKELGHIGKLDDRSTSGVFISYTEGSKAYRILDPETQRVRTACDVVFDEGRGWAWDKAVDDGSTPTYEDFTVEYVHFEGAGRVGSSSSPSVSTPVPEPPPTPTPTHPRATTSTTTSSSLTPPQPATPCTPAPTATLPGTSTPTPARVEHSPVEFATPLSHNEERIDAYHDGELLRYRTMKDLLGDQLVPGLVPRDLEAQLHLACDDSEPRSFVEAEGHAAWRAAMQSEMDAQEGIDIDDAFAPVARMESVRLLLALAAQEGWCIHHMDVKSALLNAXGFAIPGKEGKVLRLHKALYGLRQAPRXTLKGMGFEQSPHEATIYRQGNRGNALLVGVYVDDLVITSTKDAEVATFKEEMKATFQMSDLGPLSFYLGIEVHQDDSGITLRQTAYAKRLSLRWRLKLCRDSTTEEVHATLYRRLVGSCRYLTHTRPDLAFSVGYVSRFMQRPMTEHQQAVKRIIRYVAGTLDHGLYYPRCPGKAHFVGYSDSDHAGNIDTSRSTSRILFFLGECLVSWQSVKQXRDTGAVELRVDNKXALALAKNPVFHERSKHIRVRYHFIRGYLEEGSIRASYINTKDHLADLLTKPHGRIKFFKLCSRIGMTQLSHETTHKT

SEQ ID NO: 138435 - protein, 1497 aa, Oryza sativa
  unsure (1)..(1497): unsure at all Xaa locations
  Clone ID: PAT_MRT4530_39824C.1.pep
MSDVRSRRSVASSTRRQQDAELAAAEERRRATAQTAAAAARAARLAAAELAAARAEAEAEAAEDAARAAEVEVETLRSSINGSIAGDITADRELEELARGRARERAERWAAAHLHGGGGGPRDRAPADGNPDGRGRAGGSPEPARGPRRRHGSLSPDRRHGHHGVQTVVRDFGPGGGWPTLTKTNYIEWAAVMRVRLQVRHMWEAVRYGDVDYDEDRRALDALIAAVPPEMQFSLSQKRTAKEAWDAIAAARIGSDRARKSTLQALRKEWENLAFKPGEDVDDFALRLNTLLQKMVQYGDDTYDEERAVEKFFRCVPEKYRQIARSIESLLDLSTMSIEEALGRLKVVDGDEPQPLSGPITIGGKLHLTREQWEASQGDGRKGESSSPTGGPAFLHLDEPKVLVSLCDGSSNDKADGWYLDTGATHHMTGRREFFTEFDSSVRGSVKFGDASGVEIKGVGSVTFTAKSGEHRLLTGVYYIPALRNSIISVGQLDENGSRVLVEDGLMRIWDRRRRLLAKXQVAQPVCLAARRDDEAWQWHERFGHLHFEALRQLSAKEMVRGMPCLDHMEQLCDVCVVTKQRRLPFPQQTSFRAKERLXLVHGDLCGPVTPATPGGRRYFLLLVDDLSRYMWVMVLGIKGEAADAIRHAQAAAEAECGRKLRVLRTDNGGEFTAAEFASYCADEGIQRHYTAPYSPQQNGVAERRNQTVVGMARALLKQRGMPAIFWGEAVVTAAYILNRSPTKALDGRTPYEAWHGRKPAVSHLRVFGCLAFAKELGHIGKLDDRSTPGVFIGYAEGSKAYRILDPETQRVRIARDVVFDEGRGWVWDKAVDDGSTPTYDDFTIEYVHFKGAGGVGSSSSPSVSTPVPEPPPTPTPTHPRATTSTTTSSSSTPPQPVSPHAPASTATPPGTSTPTPARVERSPVGFVTPLSHDGERIDAYHDGEQLRYRTMEDLLGDQPVPGLVPRNLEAQLHLACDDGEPRSFAEAEKHAAWRAAMQSEMDAVQENRTWELADLPRGHRAITLKWVFKLKRDEAGAIVKHKARLVARGFVQQEGIDYDDAFAPVARMESVRLLLALAAQEGWGVHHMDVKSAFLNGDLKEEVYVHQPPGFVIPGKEGKVLRLHKALYGLRQAPRAWNAKLDSTLKGMGFEQSPHEAAIYRRGNGGNALLVGVYVDDLVITGTKDAEVAAFKEEMKATFQMSDLGPLSFYLGIEVHQDNSGITLRQTAYAKRVVELAGLTDCNPALTPMEERLKLSRDSTAEEVDATQYRRLVGSLRYLTHTRPDLAFSVSYVSRFMQRPTTEHQQAVKRIIRYVAGTLDHGLYYPRCPDKAHFVGYSDSDHAGDIDTSKSTSGILFFLGECLVSWQSIKQQVVALSRCEAEYMAASAASTQALWLARLLSDLLGRDTGAVELRVDSKSALALAKNPVFHERSKHIRVRYHFIRSYLEEGSIKASYINTKDQLADLLTKPLGRIKFLELCSRIGMAQLSHKTAHKT

SEQ ID NO: 138436 - protein, 70 aa, Oryza sativa
  Clone ID: PAT_MRT4530_39825C.1.pep
QKLRKGGLSFLREYGQGTNFKFRGTGCYQIQKNQGVFNWGSPPLRKQFRVFSKKFSRPPPIKFHFPKKNF

SEQ ID NO: 138437 - protein, 1589 aa, Oryza sativa
  unsure (1)..(1589): unsure at all Xaa locations
  Clone ID: PAT_MRT4530_39826C.1.pep
MSDARSQRSVASSTRRQQDAKLAAAEERRRATAQTAAAAAKAARLAAAELAAARAEAEAEAEAAEDAARAAEVEVETLRSSINGSIAGDITADRELEELARGRARERAERWAAAHLHGGGGGPRDRAPADGNPDGRGRAGGSPEPARGPRRRHGSLSPDRRHGHHGVQTVVRDFGPGGGWXPTLTKTNYIEWAAVMRVRLQVRHMWEAVRYGDVDYDEDRRALDALIAAVPPEMQFSLSQKRTAKEAWDAIAAARIGSDRARKSTLQALRKEWENLAFKPGEDVDDFALRLNTLLQKMVQYGDDTYDEERAVEKLFRCVPEKYRQIARSIESLLDLSTMSIEEALGRLKVVDGDEPRPLSGPITIGGKLHLTREQWEASQGDGRKGESSSPTGGRKPRKARGGVQLRWARRRAEGGARRGAQGVATGNHKPARDDTCRNCGKLGHWAKDCRQPRRGQAHVARVEEEEPALLLAHASIELPPAAPAAAAFLHLDEPKVLVSLCDGSSNDKADGWYLDTGATHHMTGRREFFTEFDSSVRGTVKFGDASGVEIKGVGSVTFTAKSGEHRLLTGVYYIPALRNSIISVGQLDENGSRVLVEDGLMRIWDRRRRLLAKVTRGTNRLYILSAQVAHPVCLAARRDDEAWQWHERFGHLHFEALKQLSAKEMVRGMPCLDHVEQLCDVCVVTKQRRLPFPQQTSFRAKERLGLVHGDLCGPVTPATPGGRRYFLLLVDDLSRYMWVMVLGSKGEAADAIRHAQAAAEAECGRKLRVLRTDNGGEFTAAEFASYCADEGIQRHYTAPYSPQQNGVVERRNQTVVGMARALLKQRGMPAIFWGEAVVTAAYILNRSPTKALDGRTPYEAWHGRKPAVSHLRVFGCLAFAKELGHIGKLDDRSTPGVFIGYAEGSKAYRILDPETQRVRITRDVVFDEGRGWVWDKAVDDGSTPTYDDFTIEYVHFEGAGGVGSSSSPSVSTPVPEPPPTPTPTHPRATTSTTTSSSSTPPQPVSPHAPAPTATPPGTSTPTPARVERSPVEFVTPLSHDGERIDAYHDGEQLRYRTMEDLLGDQPVPGLVPRNLEAQLHLACDDGEPRSFAEAEKHAAWRAAMQSEMDAVQENRTWELADLPRGHRAITLKWVFKLKRDEAGAIVKHKARLVARGFVQQEGIDYDDAFAPVARMESVRLLALAAQEGWGVHHMDVKSAFLNGDLKEEVYVHQPPGFVIPGKEGKVLRLHKALYGLRQAPRAWNAKLDSTLKGMGFEQSPHEAAIYRRGNGGNALLVGVYVDDLVITGTKDAEVAAFKEEMKATFQMSDLGPLSFYLGIEVHQDNSGITLRQTAYAKRVVELAGLTDCNPALTPMEERLKLSRDSTAEEVDATQYRRLVGSLRYLTHTRPDLAFSVGYAVKRIIRYVAGTLDHGLYYPRCPGKAHFVGYSDSDHAGDIDTSKSTSGILFFLGECLVSWQSIKQQVVALSSCEAEYMAASAASTQALWLARLLSDLLGRDTGAVELRVDSKSALALAKNPVFHERSKHIRVRYHFIRSYLEEGSIKASYINTKDQLADLLTKPLRRIKFLELCSRIGMAQLSHKTAHKT

SEQ ID NO: 138438 - protein, 598 aa, Oryza sativa
  Clone ID: PAT_MRT4530_39827C.1.pep
MSPHRGAAVASICAAFYDSIWLLVLLLSTALAAETLDGAQAASSQCQNATKCGGVDIVYPFGLSSSGCAMSPSFEVDCNNTGNGVQKPFLGYVELLSIDVQLSQARVRTRISSSCYNISTREMNFDDLWYVDLKDTPYRFSDSANKFTIIGCRTLAYIADQDDVGKYMSGCVSVCRRGELTSLINGTCSGKGCCQTAIPKGLDYYQVWFEQSMNTSGIYNRTPCSYAVLMEASNFSFSTTYLTSPFEFNNTYGGEAPVVLDWAINTANTCEEAMGNLTSYACKSDNAKCINSSDTTGYICRCQEGYQGNPYLKGPNGCQGVVASVLAVLFGFLGWEVIRHKQKIKRQALLRQTDEFFQQHGGQILLEMMKADGNDGFTLYKRGEIETATNNFSKAHVIGEGGQGTVYKAVIDGVAVAIKKCKEIDESRKMEFVQELVILCRVSHPNIVKLLGCCLQFEAPMLVYEFVQNKTLQELLDLQRSRRFHVTLGTRLRIAAESADALSHLHSLPHPILHGDVKTANILLANGLVAKVSDFGCSTIDKRTQAVPKGTPGYIDPDYLVEYQLTTRNDVYSFGVILLELLTGRRPLSKERKSLSIL

SEQ ID NO: 138439 - protein, 1756 aa, Oryza sativa
  Clone ID: PAT_MRT4530_39828C.1.pep
MDNLSEPLLAEIIKRIAKTSDRNSLSLVSKQLYTIDAEQRDAIHVGCGLHPATEALASLCSRFPNLWKVVIDYSGWISIHGKQLDNQGLLVLSSHCSSLTDLTLNFCSYIDDSGIGYLAYCKKLRSFRLNFAPAISSRGLLSVAVGCKSLCTFHLVDCMKVGSVEWLEYLGRAGSLEELVVKDSAPRRCAMSDARSRRSVASSTRRQQDAELAAAEERRRATAQTAAAAARAARLAAAELAAARAEAEAEAAEDAARAAEVEVETLRSSINGSIAGDITADRELEELARGRARERAERWAAAHLHGGGGGPRDRAPADGNPDGRGRAGGSPEPARGPRRRHGSLSPDRRHGHHGVQTVVRDFGPGGGWPTLTKTNYIEWAAVMRVRLQVRHMWEAVRYGDVDYDEDRRALDALIAAVPPEMQFSLSQKRTAKEAWDAIAAARIGSDRARKSTLQALRKEWENLAFKPGEDVDDFALRLNTLLQKMVQYGDDTYDEERAVEKLFRCVPEKYRQIARSIESLLDLSTMSIEEALGRLKVVDGDEPRPLSGPITIGGKLHLTREQWEASQGDRRKGESSSPTGGHKPRKARGGVQLRWARRRAEGGARRGAQGVATGNHKPARDDTCRNCGKLGHWAKDCRQPRRGQAHVARVEEEEPALLLAHASIELPPAAPAAAAFLHLDEPKVLVSLCDGSSNDKADGWYLDTGATHHMTGRREFFTEFDSSVRGTVKFGDASGVEIKGVGSVTFTAKSGEHRLLTGVYYIPALRNSIISVGQLDENGSRVLVEDGLMRIWDRRRRLLAKVTRGTNRLYILSAQVAHPVCLAARRDDEAWQWHERFGHLHFEALKQLSAKEMVRGMPCLDHVEQLCDVCVVTKQRRLPFPQQTSFRAKERLGLVHGDLCGPVTPATPGGRRYFLLLVDDLSRYMWVMVLGSKGEAADAIRHAQAAAEAECGRKLRVLRTDNGGEFTAAEFASYCADEGIQRHYTAPYSPQQNGVVERRNQTVVGMARALLKQRGMPAIFWGEAVVTAAYILNRSPTKALDGRTPYEAWHGRKPAVSHLRVFGCLAFAKELGHIGKLDDRSTPGVFIGYAEGSKAYRILDPETQRVRITRDVVFDEGRGWVWDKAVDDGSTPTYDDFTIEYVHFEGAGGVGSSSSPSVSTPVPEPPPTPTPTHPRATTSTTTSSSSTPPQPVSPHAPAPTATPPGTSTPTPARVERSPVEFVTPLSHDGERIDAYHDGEQLRYRTMEDLLGDQPVPGLVPRNLEAQLHLACDDGEPRSFAEAEKHAAWRAAMQSEMDAVQENRTWELADLPRGHRAITLKWVFKLKRDEAGAIVKHKARLVARGFVQQEGIDYDDAFAPVARMESVRLLLALAAQEGWGVHHMDVKSAFLNGDLKEEVYVHQPPGFVIPGKEGKVLRLHKALYGLRQAPRAWNAKLDSTLKGMGFEQSPHEAAIYRRGNGGNALLVGVYVDDLVITGTKDAEVAAFKEEMKATFQMSDLGPLSFYLGIEVHQDNSGITLRQTAYAKRVVELAGLTDCNPALTPMEERLKLSRDSTAEEVDATQYRRLVGSLRYLTHTRPDLAFSVGYVSRFMQRPTTEHQQAVKRIIRYVAGTLDHGLYYPRCPGKAHFVGYSDSDHAGDIDTSKSTSGILFFLGECLVSWQSIKQQVVALSSCEAEYMAASAASTQALWLARLLSDLLGRDTGAVELRVDSKSALALAKNPVFHERSKHIRVRLMSLHTVHSSMDIAWQVRWMKQ

SEQ ID NO: 138440 - protein, 628 aa, Oryza sativa
  unsure (1)..(628): unsure at all Xaa locations
  Clone ID: PAT_MRT4530_39829C.1.pep
MERLKVQIDRHKMTKYSGHLEAIILWINNGTPMESGTLNNVLVGELNEGVAHHVALPFGGGVSVGAGADGCIIHLREAVYWGKQSESAILAALGYGGDAAAGDDSAEGRERSHCLHHTPLHDGRTAYHFQPAKFWQNGPLYHNGLYHFFYQYNPHGPLWDTGKLSWGHSVSGDLVNWAFLGTAIDPTDPFDVNGCWSGSATVLLGGRPAFLYTGRDAGGVQVQNVSFAKNPLEPLLREWEKPRCKPIIGFPADVINNNFRDPTTAWLGRDGLWRMVVAAEVAGAGSARVYRSADFLRWERNAAPMHSSAAVPVLECPDFFPVAEHGIDGLDTSANGGGTGVKHVLKLSEFDTHQDFYMVGRYDNXGDTFPPEDPDRGDNCRXWRCLDYAQAKADDVAKGWAGVQAFPRKVWLDGDGKQLLQWPVDEIETLRTKRVGLQGTEVKAGGLHARPGVASSQADVEVVFEIPNLEDEAESFDPDWLDPHKLCKDKGAASAHGGVGPFGLIVMASGDLQEQTAVFFRVFKHHGKYKVFMCTDLTRSSTKADVYKDAYGGFVDVDIQKDKSISLRTLIDHSMIESFGGGGRACITTRVYPEHAATSSSHLYVFNNGSGTVNVSKLEAWEMATATS

SEQ ID NO: 138441 - protein, 624 aa, Oryza sativa
  Clone ID: PAT_MRT4530_3982C.1.pep
MIKGDSKQLASMYMKEEMIKGERQLGTHEDRLKDEVIKDGDKISDGNFFKSLQNISSTKEEVCSPGPIERSCMDSSLLNMKAQNKGQDDKLESTRAEMGEVREENERLKTLLSRISHDYRSLQTHFYDVLQQGRAKKLPDSPATDIEEPELVSLRLGTSTSKCKKEDKSTTSSEVKGSTEDFLKIKGGLSLGLSDCRVDANNSEKVQPDVMTLSPEGSFEDARDDTAETTEQWPPSKMLKNLRSVGAEAEDDIAPQPQVKKARVSVRARCDAPTMNDGCQWRKYGQKIAKGNPCPRAYYRCTVAAGCPVRKQVQRCADDMSILITTYEGTHNHPLSVSATAMASTTSAAASMLISGSSSTSLAAYPAAAASPALAFDASSKPPLIGGRPFFLPTAAAAAITSTPSYPTITLDLTSPAAAATSSHAAFSLSNRFSHTRYPSTGFTFSGSGPSSAPWPGYLSYGASLSAHPYNAGGGKSSSSFEAALSSINGSRQQGGGGGGGSAPPLYQMQQKAAAAAPPPPSVITDTIAKAITADPSFHTALAAAITSYVGKKGSPPASGGEDSKVGLKWGEHLGLGLTHSSLSTAAAAAASSSSQMFLQPSLGLSGSTTSASTSPVANREQAH

SEQ ID NO: 138442 - protein, 1489 aa, Oryza sativa
  unsure (1)..(1489): unsure at all Xaa locations
  Clone ID: PAT_MRT4530_39830C.1.pep
ALSQQQQQHRLLLLPLSLPPLHAAAPRRCAMSDARSRRSVASSTRRQQDAELAAAEERRRATAQTAAAAARAARLAAAELAAARAEAEAEAAEDAARAAEVEVETLRSNINGSIAGDITADRELEELARGRARERAERXAAAHVHGGGGGPRDRAPADGNPDGRRRAGGSPEPARGPCRQHGSLSPDRRHGHHGVQTVVRDFGPGGGWPTLNKTNYIEWAAVMRVRLQVRHMWEAVRXRTAKEAWDAIAAARIGSDRASKSTLQALRKEXENLAFKPXMVQYGDDTYDEERAVEKLFRCVPEKYRQIARSIESLLDLSTMSIEEALGRLKVVDGDELQPLSGPITIGGKLHLTRKQWEASQGDGRKGESSSPTGGRKPRKARGGVQLRWVRRRAEGGACKGAQGVATGNHKPARDDACRNCGKLGHWAKDCRQPRRGQAHVARVEEEEPALLLAHASIELPPAAPAAAAFLHLDEPKVLVSLCNGSSNDKADGWYLDTGATHHMTGRREFFTEFNSSVRGSVKFGDASGVEIKGVGSVTFTAKSGEHRLLTGVYYIPALRNSIISVGQLDENGSRVLVEDGLMRIWDRRRRLLAKVAQPVCLAARRDDEAWQWHERFGHLHFEALKQLSAKEMVRGMPCLDHVEQLCDVCVVTKQRRLPFPQQTSFRAKERLELVHGDLCGPMTPATPGGRRYFLLLVDDLSRYMWVMVLGSKGEAADAIRHAQAAVEAECGRKLRVLRTNNGGEFTAAEFASYCADEGIQRHYTPYSPQQNDVVEWRNQTVVGMAQALLKQRGMPAIFWGEAVVTAAYILNRSPTKALDGRTPYEAWHGRKPAVSHLRVFGCLAFAKELGHIGKLDDRSTPGVFIGYAEGSKAYRILDPETQRVRTARDVVFDEGRGWVWDKAVDDGSTPTYDDFTVEYVHFEGAGGVGSSSSPSVSTAAPESPPTLTPTHPWATTSTTTSSSSTTPQPVTPHAPAPTATPPSTSTPTPARVERSPVEFATPLSHDGERIDAYHDGEQLQYQAEKHAAWRAAMQSEMDAVQENRTWELADLPRGHRAITLKWVFKLKRDEAGAIVKHKTHLVARGFVQQEGIDYDDAFAPVARMESVRLLALAAQEGWGVHHMDVKLAFLNGDLKEEVYVHQPPGFVIPGKEGKVLRLHKALYGLRQALRAWNAKLDSTLKGMGFEQSPHEAAIYRRGNGGNALLVGVYVDDLVITGTKDAEVAAFKEEMKATFQMSDLGPLSFYLGIKVHQDDSGITLRQTAYAKRVVELAGLTDCNPTLTPMEERLKLSRDSMAEEAVKRIIRYVAGTLDHGLYYPRCPGKAHFIGYSDSDHAGDIDTSKSTSGILFFLGKCLVSWQSVKQQVVALSSCEAEYMAASAASTQALWLARLLSDLLGRDTGTVELRVDSKSALALAKNPVFHERSKHIWVRYHFIRSYLEEGSIKASYINTKDQLADLLTKPLGRIKFLELCSRIGMAQLPHKTTHKT

SEQ ID NO: 138443 - protein, 555 aa, Oryza sativa
  Clone ID: PAT_MRT4530_39831C.1.pep
MCPVNGKLQLHDGRTAYHFQPAKFWQNGPLYHNGLYHFFYQYNPHGPLWDTGKLSWGHSVSGDLVNWAFLGTAIDPTDPFDVNGCWSGSATVLLGGRPAFLYTGRDAGGVQVQNVSFAKNPLDPLLREWEKPSCNPIIAFPADVINNNFRDPTTAWLGRDGLWRMVVAAEVAGAGSALVYRSADFLRWERNAAPMHSSAAVPVLECPDFFPVAEHGIDGLDTSANGGGTGVKHVLKLSEFDTHQDFYMVGRYDDEGDTFSPEEPDRGDNCRRWRCLDYGQAYAAKSFFDARRNRRVQWLWVNEYDSKADDVAKGWAGVQAFPRKVWLDGDGKQLLQWPVDEIETLRTKRVGLQGTEVKAGGLHEIVGVASSQADVEVVFEIPNLEDEAESFDPDWLDPHKLCKDKGAASAHGGVGPFGLIVMASGDLQEQTAVFFRVFKHHGKYKVFMCTDLTRSSTKADVYKDAYGGFVDVDIQKDKSISLRTLIDHSMIESFGGGGRACITTRVYPEHAATSSSHLYVFNNGSGTVNVSKLEAWEMATATVNSADALDAITRS

SEQ ID NO: 138444 - protein, 1351 aa, Oryza sativa
  unsure (1)..(1351): unsure at all Xaa locations
  Clone ID: PAT_MRT4530_39832C.1.pep
MRVRLQVRHMWEAVRYGDVDYDEDRRALDALIAAIPPEMQFSLSQKRTAKEAWDAIAAARIGSDRARKSTLQALRKEWENLAFKPGEDVDDFALRLNTLLQKMVQYGDDTYDEERAVEKLFRCVPEKYRQIARSIESLLDLSTMTIEEALGRLKVVDSDEPQPLSGPITIGGKLHLTREQWEASQGDGRKGESSSPTGGCKPRKARGGVQLRWVRRRAEGGARRGAQGVATGNHKPARDDACRNCGKLGHWAKDCRQPRRGQAHVARVEEEPALLLAHASIELPPAAPAATAFLHLDEPKVLVSLCNGSSNDKADGWYLDTGATHHMTGRREFFIEFDSSVRGSVKFGDASGVEIKGVGSVTFTAKSXVGQLDENGSRVLVEDGXNRLYILSAQVAQPVCLTARRDDEAWQWHERFGHLHFEALKQLGAKEMVRGMPCLDHMEQLCDVCVVTKQWRLPFPQQTSFRAKERLELVHGDLCGPVTPATPGGRRYFLLLVDDLSRYMWVMVLGSKGEAADAIRHAQAAAEAECGRKLHVLRTDNSGEFTAAEFASYCADEGIQRHYTTPYSPQQNGVVERRNQTVVGMARALLKQRGMPAIFWGEAVVTAAYILNRSPTKALDGRTPYEAWHGRKPAVSHLRVFGCLAFAKELGHIGKLDDRSTPGVFIGYAEGSKAYRILDPETQRAVDDGSTPTYDDFTVEYVHFEGAGGVGSSSSPSVSTPAPESPPTPTPTHPRATTSTTTSSSSTPPQPVTPHAPAPTATPPSTSTPMPARVERSPVEFATPLSHDGERIDAYHDGEQLRYRTMEDLLGDQPVPGLVPRDLEAQLHLACDDGEPRSFVEAEKHAAWRAAMQSEMDAVQENRTWELADLPHGHRAITLKWVFKLKRDEAEAIVKHKARLVARGFVQQEGIDYDDAFAPVARMESVRLLLALAAQEGWGVHHIDVKSAFLNGDLKEEVYVHQPPGFVIPGKEGKVLRLHKALYGLRQAPRAWNAKLDSTLKGMGFEQSPHEAAIYRRGNGGNALLVGVYVDDLVITGTKDAEVAAFKEEMKATFQMSDLGPLSFYLGIEVHQDNSGIMLQQTAYAKRVVELAGLTDCNPALTPMEERLKLSRDSTAEEVDATQYRRLVGSLRYLTHTRPDLAFSVGYVSRFMQRPTTEHQQAVKRIIRYVAGTLDHGLYYPRCPGKAHFVGYSDSDHAGDIDTSKSTSGILFFLGKCLVSWQSVKQQVVALSSCEAEYMAASAASTQALWLARLLSDLLGRDTGTVELRVDSKSALALAMNPVFHERSKHIRVRYHFIRSYLEEGSIKASYINTKDQLADLLTKPLGRIKFLELCSRIGMAQLPHKTTHKT

SEQ ID NO: 138445 - protein, 119 aa, Oryza sativa
  Clone ID: PAT_MRT4530_39833C.1.pep
MVPQSGVGTKAVDYEVEQRDGGRVVKRKEAGLTRGSHGGVPVATSSVGRDMLAVSDIQAETPYAQLNAASVPGEAGRQGRWGSLPTARTLCRPCLLAADLSDELALTPIHQLRRLTSCT

SEQ ID NO: 138446 - protein, 2333 aa, Oryza sativa
  unsure (1)..(2333): unsure at all Xaa locations
  Clone ID: PAT_MRT4530_39834C.1.pep
MGNGVFKKTEVLAAVKHKKSGISGSTNSYNAVVRENAQLRHEVTEQRGMIREQRGMIQEHRGMLKAVYEKLGMDIPEEVLSRWESQREDSELDVDCSEGSEEYEIEEEDEGQSPKFRSLVVDGPPPSGRHNLATLVGGAGAGAASAGKECNSNAASRGQYQNFHEIPPDDADFNNLTIYLKSASPPAAELPSLTDHVNEEVAKLDRTVRRITAVLVDADEREIADETMKLWISELKQVTWEAEGILEDYSYELLRSTTVQEEKEGLCRKESRISRCTSSLLDPLEVYGREDEKKLIISSLLDGCLTFKKRRLKEHEYETCKAGAVRLISIVAMGGMGKTTLARLVYNDARVQNHFDIQAWVWVSEVFDEVRLTKAAIESVTAKPCDLTELEPLQRQLHEEVKGSHMIITTRNENVSTIVQAKKLAGSREKFVIVHDLIHDLAKSIGGKEILVKKCCGSSVGGCNTSANNHLRYLAVLVGTTPFYSDNKLVLVQSQWWYNLEGCLLHSPHLKYLRILDVSSSDQIKLVANSGSGAATLDEIKDINTLQGQLCIMDLQNITHDRIWEPRSANLSKKKLTRLELVWNPLPSYKSVPHDEVVLESLQPHNYIRQLVISGFRGLNFCSWLGDRSLFSLQELELCKCYYTDHLPPLGQLPNLKQLKLTSLWKLRSIGPEFYGDCEAPFQCLETLVVQNLVAWEEWWLPENHPHCVFPLLRTIDIRGSHKLVRLPLSNLHALAGITVSSCSKLETIVGLKERCEVTAGNGGLQAGQTNVLPSLRRVKITACPSLEEPLISMLRRQTEIGFSYWEQSPSTSPTDIADFGKTPWKDSGKDAELAAAEERRRATAQTAAAAARAARLAAAELAAARAEAEAEAAEDAARAAEVEVETLRSSINGSIAGDITADRELEELARGRARERAERWAAAHLHGGGGGPRDRAPADGNPDGRGRAGGSPEPARGPRRRHGSLSPDRRHGHHGVQTVVRDFGPGGGWPTLTKTNYIEWAAVMRVRLQVRHMWEAVRYGDVDYDEDRRALDALIAAVPPEMQFSLSQKRTAKEAWDAIAAARIGSDRARKSTLQALRKEWENLAFKPGEDVDDFALRLNTLLQKMVQYGDDTYDEERAVEKLFRCVPEKYRQIARSIESLLDLSTMSIEEALGRLKVVDGDEPRPLSGPITIGGKLHLTREQWEASQGDGRKGESSSPTGGRKPRKARGGVQLRWARRRAEGGARRGAQGVATGNHKPARDDTCRNCGKLGHWAKDCRQPRRGQAHVARVEEEEPALLLAHASIELPPAAPAAAAFLHLDEPKVLVSLCDGSSNDKADGWYLDTGATHHMTGRREFFTEFDSSVRGTVKFGDASGVEIKGVGSVTFTAKSGEHRLLTGVYYIPALRNSIISVGQLDENGSRVLVEDGLMRIWDRRRRLLAKWHERFGHLHFEALKQLSAKEMVRGMPCLDHVEQLCDVCVVTKQRRLPFPQQTSFRAKERLGLVHGDLCGPVTPATPGGRRYFLLLVDDLSRYMWVMVLGSKGEAADAIRHAQAAAEAECGRKLRVLRTDNGGEFTAAEFASYCADEGIQRHYTAPYSPQQNGVVERRNQTVVGMARALLKQRGMPAIFWGEAVVTAAYILNRSPTKALDGRTPYEAWHGRKPAVSHLRVFGCLAFAKELGHIGKLDDRSTPGVFIGYAEGSKAYRILDPETQRVRITRDVVFDEGRGWVWDKAVDDGSTPTYDDFTIXPEPPPTPTPTHPRATTSTTTSSSSTPPQPXEFVTPLSHDGERIDAYHDGEQLRYRTMEDLLGDQPVPGLVPRNLEAQLHLACDDGEPRSFAEAEKHAAWRAAMQSEMDAVQENRTWELADLPRGHRAITLKWVFKLKRDEAGAIVKHKARLVARGFVQQEGIDYDNAFAPVARMESVRLLLALAAQEGWGVHHMDVKSAFLNGDLKEEVYVHQPPGFVIPGKEGKVLRLHKALYGLRQAPRAWNAKLDSTLKGMGFEQSPHEAAIYRRGNGGNALLVGVYVDDLVITGTKDAEVAAFKEEMKATFQMSDLGPLSFYLGIEVHQDNSGITLRQTAYAKRVVELAGLTDCNPALTPMEERLKLSRDSTAEEVDATQYRRLVGSLRYLTHTRPDLAFSVGYVSRFMQRPTTEHQQAVKRIIRYVAGTLDHGLYYPRCPGKAHFVGYSDSDHAGDIDTSKSTSGILFFLGECLVSWQSIKQQVVALSSCEAEYMAASAASTQALWLARLLSDLLGRDTGAVELRVDSKSALALAKNPVFHERSKHIRVRYHFIRSYLEEGSIKASYINTKDQLADLLTKPLGRIKFLELCSRIGMAQLSHKTAHKT

SEQ ID NO: 138447 - protein, 287 aa, Oryza sativa
  Clone ID: PAT_MRT4530_39835C.1.pep
MLQKKGQSAPTWRRFGDIVHLDTSGGRGGYSSSSSPLLVTGQWSPLAGEEDKLVVVVGRLAIIRQRRPMLVQPPNADAQHTDIPDGRSFLGVPRYYRHSLTVLQRAVRSWNAHNHKHPMTAAVAPSLLAVQAVVAEFDRFLDAYDFNAVGWSRDHPMAAAAGRFLDKRNPNTDKNNPSGLAGVARRFVMFNGAVCEAQLRWLDGVLRGLMWNYEGVMRVVHRWTRGPTCHRLPPTVSSSLLSPEAPPVGSFPHLPPIPVSPSLVRTSASPVFAASLVFLRRPLPPLR

SEQ ID NO: 138448 - protein, 1291 aa, Oryza sativa
  unsure (1)..(1291): unsure at all Xaa locations
  Clone ID: PAT_MRT4530_39836C.1.pep
SSSKGERMEVWLAALPSTLTNQEISKDYADFERLVDRTIRXEDQRNKIDRKRKAMQFRFQQGGQQKHRCGYGQHSGSTIMIVRXHRPYQLGNFSRGNSGNQNNHNPVPRPPXSQALQPHQPKKKSEQKPLMCFNYGDTGHFANKCPKTMRNGPKVVQARVYHVSTKEAQAASEVVLGTFPVNSIPSTVLFDSGATHSFISKRFVWVHGLRKVXLSTPMKVNTPSNSLTLVSFCSSLMIEIQGSPFLANLILLECKDLDVILGMDWLTRHKGVIDCASRTITLVNXNGEVVVIQSPFIQKKEVSLNXVESEQQDEVMKDVPKLEDIPVVCEYSEVFLEESTAMLPKKDIEFRINLVLGTAPIYKRPYRMAAEEMAEVKKQVDEQLQKGYIRPSTSPWGALVIFVEKKDKTKRMSTDYRALNDVTIKNKYPLLRIDDMFHQLKGATVLSKIYLXSGYHQFRIREEDIPKTTFTTRYELFECIVMSFGLTNAPTFFMNLMNNVFMEYLDXFVVVFIDDILVYSKSKEEHGNHLHVVLEKMKEHXLYPKFSKCDFWLKEVKFXHVITTKRVAVDSXNVEAVTKWIPPKTVMQVRSFLGLTGYYCRFIENFSRIAKPMTQLLKKEEKFVRTSQCQESFEELKRRLVSALILILPNQRKDFEVYCDASRQGLGWVLIQEGRVVAYASRQLRTHEDNYPTHDLELAVVVHALKIWRHYLIGNRSEXIYTDHKSMKYIFTQPDLNLRQCRLLELIKDYDVCIDYHPGKANVVADALSRKNYCNATCLEEVSTQLIQDLERLNLGIVEHGFVAALEAQPTLVAHAKYPEIAELKKNMRVDKARDFTEDEHGTIWMGERLCVPDNKELKELTLSEAHQIQYSIHPGSTKMYQYFKEKFWSVSMKREIAEFVALRDVCQRVKAEHXRPAGLQSIQIPEWKWEEIGMXFITGLPRTSSGHDSIWVIVDRLMKVAHFLPVHTTYIGKRLAELYLSRIVCLHGVPKKIVSDRGSQFTSKFWHKLQEELGTRLNFSTAYHLQTDGQTEQVNQILEDMLRVCALDFGGSWDKNLLYAEFSYNNSYQASLYMAPFEALXGRKCRMPLFWDQTRERQLFGTEVLSXAEVKVRAIRERLTIAQSRQKSNADNHRRELSFEVVDQVYLTVMSLRGVHRFQTKGKXVQRYIGSYRILERRGEVAYQFEIPPNMASIHDVFQVSQLKKCLSVLEEPASPDNVEIQEDLTYVEKPTCILETSERRTRNKVIRFCRLXWSHHSXDEATWEREDELKATHPHLFTSSSESRGQDSV

SEQ ID NO: 138449 - protein, 2605 aa, Oryza sativa
  Clone ID: PAT_MRT4530_39837C.1.pep
MALERRLAYAALIPFLLLALPILPSDSPSGGGGGGAGGGGGGGETLDPPAAKYVVRFVEYRPADEHREYLEDGLRGAARPPPAASWRWVERRNPAAAFPTDFAVLEIRDACRAAVVDAVSALGRVRDVHADASYSRGVLSADRPRQQGKLFTAMSFEGEEGGGDREVGCSTDSNNSSSAGWRRKLLVQRSQVTSLFGAERLWGRGFTGRKVKMAIFDTGIRADHPHFRNIKERTNWTNEDTLNDNLGHGTFVAGVIAGQDAECPGFAPDTEIYAFRVFTDAQISYTSWFLDAFNYAIATGMDVLNLSIGGPDYLDLPFVEKDAELAAAEERRRATAQTAAAAARAARLAAAELAAARAEAEAEAAKDAARAAEVEVETLRSSINGSIAGDITADRELEELARGRARERAERWAAAHLHGGGGGPRDRGPANGNPDGRGRAGGSPEPARGPRRQRGSFSPDRRHGHHGVQTVVRDFGPGGGWPTLTKTNYIEWAAVMRVRLQVRQMWEAVRYGDVDYDEDRRALDALIAAVPPEMQFSLSQKRTAKEAWDAIAAARIGSDRARKSTLQALRKEWENLAFKPGEDVDDFALRLNTLLQKMVQYGDDTYDEERAVEKLFRCVPEKYRQIARSIESLLDLSTMSIEEALGRLKVVDGDEPQPLSGPITIGGKLHLTREQWEASQGDGRKGESSSPTGGRKPRKARGGVQLRWARRRAEGGARRGAQGIATGNHKPARDDACRNCGKLGHWAKDCRQPRRGQAHVARVEEEEPALLLAHASIELPPAAPAAAAFLHLDEPKVLVSLCDGSSNDKADGWYLDTGATHHMTCRREFFTEFDSSVRGSVKFGDASGVEIKGVGSVTFTAKSGEHRLLTGVYYIPALRNSIISVGQLDENGSRVLVEDGLMRIWDRRRRLLAKVTRGTNRLYILSAQVAQPVCLAARRDDEAWQWHERFGHLHFEALKRLSAKEMVRGMPCLDHVEQLCDVCVVTKQRRLPFPQQTSFRAKERLKLVHGDLCGPVTPATPGGRRYFLLLVDDLSRYMWVMVLGSKGEAADAIRRAQAAAEAECGRKLRVLRTDNGGEFTAAEFASYCADEGIQRHYTAPYSPQQNGVVERRNQTVVGMARALLKQRGMPAIFWGEAVVTAVYILNRSPTKALDGRTPYEAWHGHKPAVSHLRVFGCLAFAKELGHIGKLDDRSTPGVFIGYAEGSKAYRILDPETQRVRTARDVVFDEGRGWVWDKAVDDGSTPTYDDFTIEYVHFEGAGGVGSSSSSVSTPAPESPPTPTPTHPRATTSTTTSSSSTPPQPVTPHAPAPTATPPSTSTPTPARVERSPVEFATPLSHDGERIDAYHDGEQLRYRTMEDLLGDQLVPGLVPRDLEAQLHLACDDGEPRSFAEAEKHAAWRAAMQSEMDAVQENRTWELADLPRGHRAITLKWVFKLKRDEAGAIVKHKARLVARGFVQQEGIDYDDAFAPVARMESVRLLFALAAQEGWGVHHMDVKSAFLNGDLKEEVYVHQPPGFVIPGKEGKVLRLHKALYGLRQAPRAWNAKLDSTLKGMGFEQSPHEAAIYRRGIGGNALLVGVYVDDLVITGTKDAEVAAFKEEMKATFQMSDLGPLSFYLGIEVHQDNSGITLRQTAYAKRVVELAGLTDCNPALTPMEERLKLSRDSTAEEVDATQYRRLVGSLRYLTHTRPDLAFSVGYVSRFMQRPTTEHQQAVKRIIRYVAGTLDHGLYYPRCPGKAHFVGYSDSDHAGDIDTSKSTSGILFFLGECLVSWQSIKQQVVALSSCEAEYMAASAASTQALWLARLLSDLLGRDTGAVELRVDSKSALALAKNPVFHERSKHIRVWELTANNIIMVSAIGNDGPLYGTLNNPADQSDVIGVGGIDYNNHIASFSSRGMTTWELPHGYGRVKPDVVAYSRDIMGSKISTGCKTLSGTSVASPVVAGVVCLLVSVIPEEHRKSILNPATMKQALVEGASRLSGPNMYEQGAGKIDLWQSYEILKSYQPRASIFPNTLDFTDCPYFWPFCRQPLYAGAMPVVFNATILNGMGVIGYVKDPPVWQPSEDVGNILSVHFTYSDVIWPWTGYLALHLQVKDEGSQFSGIISGKVTLSIYSPAAHGESSPRSSSCVLYLKVKVVPTPVRSRRILWDQFHNIKYPSGFVPRDSLNVHNDILDWHGDHLHTNFHILFNMLRDAGYYIETLGSPLTCFDASNYGTLLMVDLEDEYFSEEIQKLKDDVVHKGLGVVVFAEWYHVDTMVKMTFFDENTRSWWTPITGGANVPALNELLAPFGIAFGDKVLSGDFSINGEQTHYASGTDIVQFPAGGFLHSFQLQDNSKISQDNSRSADTQNTPDKSKCLLVCGSVHMLSSILGMMEAGKGRVAVYGDSNCLDSSHMVTNCYWLLRKLVEFTGNRIKDPVLFSESAQLKFPVFESIHQLSRRPDVNFSTYSTVVGNELICHQDSRFEVWGTKGYGTQQTGTTRKLPEYQKSEAYNISTPIASDSTPDEAGLQRNISTPIASKFDKRMDYFGFLGHEENSGSLYAVQFVHTLSNSKIDIGMLVASQWMVPCFAATACLMLYLSCRVQQKRRRRKKGSTAARLSSMDRMV

SEQ ID NO: 138450 - protein, 450 aa, Oryza sativa
  Clone ID: PAT_MRT4530_39838C.1.pep
MEQPHAAAAAAGGGEGEGGASPDTGLEGPMWRMGLGGGGGGGGGGGGGDGDAAGRLPERPGEEDCVYYLRTGACGFGDRCRYNHPRDRGGTEFGGGARNAAALDYPERAGQPICEYYMKTGTCKFGTNCKYHHPKQDGAVLPVMLNNSGFPIRLGEKECSYYMKTGQCKFGTTCKFHHPEFGGVPMTPGIYPPLQSPSIASPHPYASLANWQMGRPPVVPGSYIPGSYTPMMLSSGMIPLQGWSPYPASVNPVVSGGAQQNVQAGPVYGMGHHGSSSTIAYGGPYVPYASSTGQSSNNQQEHGFPERPGQPDCQYYMRTGDCKFGATCKYHHPRELSAPKSGYMVNSLCLPLRPGAQPCAYYAQNGYCRYGVACKYDHPMGTLGYSPSALPLSDMPIAPYPIGFSIATLAPSSPSPDLRPEYISTKDQSVNQVTSPVAASEPVDQYCRRG

SEQ ID NO: 138451 - protein, 1579 aa, Oryza sativa
  unsure (1)..(1579): unsure at all Xaa locations
  Clone ID: PAT_MRT4530_39839C.1.pep
SQQQQQQHRLLLLPLSLPPLHTAAPRRCAMSDARSRRSVASSTRRQQDAELAAAEERRRATAQTAAAAARAARLAAAELAAARAEAEAEAAEDAARAAEVEVETLRSSINGSIAGDITADRELEELARGRARERAERWAAAHLHGGGGGPRDRAPADGNPDGRRRAGGSPELARGPRRQHGSLSPDRRHGHHGVQTVVRDFGPGGGWPTLTKTNYIEWAAVMRVRLQVRHMWEAVRYGDVDYDEDRRALDALIAAVPPEMQFSLSQKRTAKEAWDAIAAARIGSDRARKSTLQALRKEWENLAFKPGEDVDDFALRLNTLLQKMVQYGDDTYDEERAVEKLFRCVPEKYRQIARSIESLLDLSTMSIEEALGRLKVVDGDEPQPLSGPITIGGKLHLTREQWEASQGDGRKGESSSPTGGRKPRKARGGVQLRWARRRAEGGARRGAQGVATGNHKPARDDACRNYGKLGHWAKDCRQPRRGQAHVARVEEEEPALLLAHASIELPPAAPAAAAFLHLDEPKVLVSLCNGSSNDKADGWYLDTGATHHMTGRREFFTEFDSSVRGSVKFGDASGVEIKGVGSVTFTAKSGEHRLLTGVYYIPALRNSIISVGQLDENGSRVLVEDGLMRIWDRRRHLLAKVTRGTNRLYILSAQVAQPVCLAARRDDEAWQWHERFGHLHFEALKQLSAKEMVRGMPCLDHVEQLCDVCVVTKQRRLPFPQQTSFRAKERLELVHGDLCGPVTPATPGGRPREAADAIRHAQAAAEAECGRKLRVLRTDNGGEFTAAEFASYCADEGIQRHYTAPYSPQQNGVVERRNQTVVGMARALLKQRGMPAIFWGEAVVTAVYILNRSPTKALDGRTPYEAWHGHKPAVSHLRVFGCLAFAKELGHIGKLDDRSTPGVFIGYAEGSKAYRILDPETQRVRTVRDVVFDEGRGWVWDKAVDDGSTPTYDDFTIEYVHFEGAGGVGSSSSPSVSTPIPEPPPTPTPTHPRATTSTTTSSSSTPPQPVSPRAPAPIATPPGTSTPTPARVERSPVEFATPLSHDGERIDAYHDGEQLRYRTMEDLLGDQPVPGLVPRDLEAQLHLACDDGEPRFFAEAEKHAAWRAAMQSEMDAVQENRTWELADLPRGHRAITLKWVFKLKRDEAGAIVKHKTRLVARGFVQQEGIDYDDAFAPVARMESVRLLLALAAQEGWGVHHMDVKSAFLNGDLKEEVYVHQPPGFVIPGKEGKVLRLHKALYGLRQAPRAWNAKLDSTLKGMGFEQSPHEAAIYRRGNGGNALLVGVYVDDLVITGTKDAEVAAFKEEMKATFQMSDLGPLSFYLGIEVHQDNSGITLRQTAYAKRVVELAGLTDCNPAXTPMEERLKLSRDSTTEEVDATXRPTTEHQQAVKRIIRYVAGTLDHGLYYPRCPGKAHFVGYSDSDHAGDIDTSKSTSGILFFLGECLVSWQSVKQQVVALSSCEAEYMAASAASTQALWLARLLGDLLGRDTGAVELRVDSKSALALAKNPVFHERSKHIWVRYHFIQSYLEEGSIKASYINTKDQLADLLTKPLGRIKFLELCSRIGMAQLSHKTTHKT

SEQ ID NO: 138452 - protein, 103 aa, Oryza sativa
  Clone ID: PAT_MRT4530_3983C.1.pep
LPPPPASTARPPPPASTARPPAPPSTAPRPSAPPSTAPRPPPPSFNARPPPPSSTTPRPPPPSTAPATPPSIFLFQTFLTSLRDLLISSAGPNLGEMRVWQSV

SEQ ID NO: 138453 - protein, 510 aa, Oryza sativa
  Clone ID: PAT_MRT4530_39840C.1.pep
ALSQQQQHRLLLLPLLLPLLHAAASRRRAMSDVRSRRSVASSTRRQQDAELAAAEERRRATAQTATAAARAARLAAAELAAVRAEVEAEAAEDAARAAEVEVETLRSSINGSIAGDITADRELEELARGGARERAERWAAAHLHGGGGDPRDRALADGNPDGRGRAGGSPEPARGPRRQRGSPSPDRRHGHHGVQTVVRDFGPGGGWPTLTKTNYIEWAAVMRVRLQVWHMWEAVRYGDVDYNEDGKEPRLPRTEQAHPGEFHLFRTASTPLAYFSVARTAAFGCPLGQHPIQISNFRLGGCSNRLAASYGYIYMYPTSLGYEYYFALLRDFPDVQFTLNGGITTIDQVTASIRQGAHRVMVGRAAYNNPWNMLGHVDSEVYGMPTRRSSRRQILESYQVYGDSIMGQYGPSRPNVRQLVKPLLNLFHSEPGNGLWKRKADSTLRHCKTLESFLEETLDAIPNSVLDAPIGKEAYIEEGHFADMDSLLPPRYSSLTNGSCEIPALVTAST

SEQ ID NO: 138454 - protein, 91 aa, Oryza sativa
  Clone ID: PAT_MRT4530_39841C.1.pep
KGSAFHEKRIWGKRPTLKGRTGINILRKWPGRREKQLLAIAPVLKNPWLLPFFFSPIKTLNHLACLVIKMGPKGWVIKKKKKGRAVLKNPA

SEQ ID NO: 138455 - protein, 990 aa, Oryza sativa
  Clone ID: PAT_MRT4530_39842C.1.pep
MVAARRSAASSSFFLLLLVLAVRVRASSDRVQERDRSALLELRGAAGLLGRWPTGSAVADHCSWPGVTCDASRRVVAVAVAAPPASGSSELAGELSPAVGLLTELRELSLPSRGLRGEIPAEIWRLEKLEVVNLAGNSLHGALPLAFPPRMRVLDLASNRLHGEIQGTLSDCKSLMRLNLSGNRLTGSVPGVLGSLPKLKLLDLSRNLLTGRIPSELGDCRELRSLQLFSNLLEGSIPPEIGRLRRLQVLDISSNRLNGPVPMELGNCMDLSVLVLTSQFDAVNLSEFNMFIGGIPESVTALPKLRMLWAPRAGFEGNIPSNWGRCHSLEMVNLAENLLSGVIPRELGQCSNLKFLNLSSNKLSGSIDNGLCPHCIAVFDVSRNELSGTIPACANKGCTPQLLDDMPSRYPSFFMSKALAQPSSGYCKSGNCSVVYHNFANNNLGGHLTSLPFSADRFGNKILYAFHVDYNNFTGSLHEILLAQCNNVEGLIVSFRDNKISGGLTEEMSTKCSAIRALDLAGNRITGVMPGNIGLLSALVKMDISRNLLEGQIPSSFKELKSLKFLSLAENNLSGTIPSCLGKLRSLEVLDLSSNSLSGKIPRNLVTLTYLTSLLLNNNKLSGNIPDIAPSASLSIFNISFNNLSGPLPLNMHSLACNSIQGNPSLQPCGLSTLANTVMKARSLAEGDVPPSDSATVDSGGGFSKIEIASITSASAIVAVLLALIILYIYTRKCASRQSRRSIRRREVTVFVDIGAPLTYETVVRATGSFNASNCIGSGGFGATYKAEIAPGVLVAIKRLAIGRFQGIQQFQAEVKTLGRCRHPNLVTLIGYHLSDSEMFLIYNFLPGGNLERFIQERAKRPIDWRMLHKIALDIARALGFLHDSCVPRILHRDVKPSNILLDNEYNAYLSDFGLARLLGNSETHATTGVADVYSYGVVLLELISDKKALDPSFSPYGNGFNIVAWACMLLQKGRAREFFIEGSNGTSEG

SEQ ID NO: 138456 - protein, 100 aa, Oryza sativa
  unsure (1)..(100): unsure at all Xaa locations
  Clone ID: PAT_MRT4530_39843C.1.pep
CFIGVLADKLSGRCIGLXGLHPIGFYWIILLYXYYHQSIAFISLYTFDIXADNSKPYRYRLIITDWHALISSTFRPAQELSRPPRPINVCFSGQQLYRIM

SEQ ID NO: 138457 - protein, 198 aa, Oryza sativa
  Clone ID: PAT_MRT4530_39844C.1.pep
MGGEEADGGRRSSRALLRVSDGGSAAVDQATAGGQPARGWLTAGARAMAKPPDLPGEPSSEILLHDCVFHCSMRNAEPIIATGTSPGFACLDPPLSCPAPQGRERENGKKASDRRRPHRLPPKSSTGTVASRSVPPPGSLSTLPPVCTANLHLHRSIRPWPTNGGEMQGLVGKIREEKGEPQPSTELASTAALHPLSA

SEQ ID NO: 138458 - protein, 398 aa, Oryza sativa
  Clone ID: PAT_MRT4530_39845C.1.pep
MRQFGPDFGGVTKKSFLHLKKIELVGLPELVEWVGGDHCHMFSKLLSIRCEDCPNLTVLLLPSFECSISDTKDINTIWFPNLCSLKIRNCPRLSLPPLPHTSMLTCVTVKEDDTDLMYFDGKSLRLNRYGSALAFHNLNKVEDMEIVDMPLVSWTGLQKLNSPRSMQSMGLLSNLSSLTHLELVNCDNLRVDGFDPLTTCNLKEMAVYNSKNHHPSIAADLFSVVAMMEVIPAGSFQQLEQLSVDSISAVLVAPICNLLASTLCKMEFPYDMWMESFTETQEEALQLLTSLQCLGFYVCPRLQSLPEGLHRLSSLRELIIHKCPEIRALPKEGFPASLRYVFAYEGISVDLKDQLKKLKASTPGLRDRCSRSIPLFIEISKGKTARGCSIVYRINSRK

SEQ ID NO: 138459 - protein, 50 aa, Oryza sativa
  Clone ID: PAT_MRT4530_39846C.1.pep
LDATLKGRKEYWLNGSSHMGLLIMRVFIDDYPTSIFIGKEHKYCFQDPTD

SEQ ID NO: 138460 - protein, 59 aa, Oryza sativa
  unsure (1)..(59): unsure at all Xaa locations
  Clone ID: PAT_MRT4530_39847C.1.pep
IYRVGHFLSSLIMSASKSAPKKSGVSWFANNFISAHVEXFFWIVKGLWTVKLVMLGVCC

SEQ ID NO: 138461 - protein, 887 aa, Oryza sativa
  unsure (1)..(887): unsure at all Xaa locations
  Clone ID: PAT_MRT4530_39848C.1.pep
MARRGRRSLASPAVAIALFVFLAYGGGGGGGGVCEAAPASAVVKSVPGFDGALPSKHYAGYVTVEEQHGRNLFYYLVESERDPAKDPLVLWLNGGPGCSSFDGFVYEHGPFNFESGGSAKSLPKLHLNPYSWSKVSSVIYLDSPAGVGLSYSKNTSDYNTGDLKTAADSHTFLLKXLYPEFLSNPFYIAGESYAGVYVPTLSHEVVKGLHDGVKPTINFKGYMVGNGVCDTVFDGNALVPFAHGMALISDDIYQEAQTACHGNYWNTTTDKCENALYKVDTSINDLNIYDILEPCYHSKTIKKVTPANTKLPKSFQHLGTTTKPLAVRTRMHGRAWPLRAPVRAGRVPSWQEFARGSRPSGVPCMSDEVATAWLNNDDVRAAIHAQPVSSIGSWLICTNVLDFIHDAGSMISYHKNLTGQGYRAFIYRYTQGYEHGLTFATIKGAGHTVPEYKPQESLAFYSRWLAGSKFPLPLLLMPPRAPAASAARLHAHVLELHGCGGGGGGLALRRAHAASLVSGALATSLPLAGALLLSYAALSDLASARLVLRHHPLRLRSAFLWNSLSRALSSASLPSEALRVYNLMLRSAVRPDDRTFPCALDALSLPFLSARLNFPTTTAGSTAPRCCRPPAPSMARRGRRSPASPAVAIALFVFLAYGGGGGVCKAAPASAVVKSVPGFDGALPSKHYAGYVTVEEQHGRNLFYYLVESERDPAKDPLVLWLNGGPGCSSFDGFVYEHGPFNFESGGSAKSLPKLHLNPYSWSKVSSVIYLDSPAGVGLSYSKNTSDYNTGDLKIAADSHTFLLKWFQLYPLGREVHGYSIKRAMDLDIFVANSLVDMYAKFGSLEKASTIFEQMKDRNVVSWNAMIANLVQNGAETEAFRLVTDMQ

SEQ ID NO: 138462 - protein, 147 aa, Oryza sativa
  Clone ID: PAT_MRT4530_39849C.1.pep
VPCMSDEVATAWLNNDDVRAAVHAQPVSSIGSWLICTNVLDFIHDAGSMISYHKNLTGQGYRAFIYSGDHDMCVPYTGTEAWTRSLGYGVIDSWRPWHLNGQVSGYTQGYEHGLTFATIKGAGHTVPEYKPQESLAFYSRWLAGSKL

SEQ ID NO: 138463 - protein, 46 aa, Oryza sativa
  unsure (1)..(46): unsure at all Xaa locations
  Clone ID: PAT_MRT4530_3984C.1.pep
MPPXXGPKSXDXLXGXXEXVNAEXFTLTYGXXXRQXXTDXEEVEEV

SEQ ID NO: 138464 - protein, 133 aa, Oryza sativa
  Clone ID: PAT_MRT4530_39850C.1.pep
VSSVIYLDSPAGVGLSYSKNTSDYNTGDLKTAADSHTFLLKWFQLYPEFLSNPFYIAGESYAEVYVPTLSHEVVKGSHDGVKPTINFKGYMVGNGVCDTVYDGNALVPFAHGMALISDDIYQEAQTACHGNYW

SEQ ID NO: 138465 - protein, 194 aa, Oryza sativa
  unsure (1)..(194): unsure at all Xaa locations
  Clone ID: PAT_MRT4530_39851C.1.pep
MAESLLLPVVCGVIGKATDVLVQKVTRMYGVDGDRPKLERQLLADAELKSETNPAIKRWMKDLNAAADEADDMLNEFQYEALRREAMSLESLGHKVRSCMTPLEFRFTMSRKLAKVLKNINELVEEMNMFGLLLQDEPVHQLPYWQTYSVLPSNELDDIFGRDDDKEAVVIKLLLXSARSAQVGEPPIVGMGGL

SEQ ID NO: 138466 - protein, 105 aa, Oryza sativa
  Clone ID: PAT_MRT4530_39852C.1.pep
CCGSSAGGGAQATCSTECIALERRRAAAAEARMTSSAPSRTRCCTTSWSSPSSPTASCSSGRCPRRWTLSECCPAPCATTMGNERITPLGMSRRGSVPPSSGEPG

SEQ ID NO: 138467 - protein, 609 aa, Oryza sativa
  unsure (1)..(609): unsure at all Xaa locations
  Clone ID: PAT_MRT4530_39853C.1.pep
ATKAKEMDTAAAVGNTRQLFRLIKETGIKKSIVSETISEKDGTLICSQPRRXERWAEHFKEQFSWPSASAQLPTIPRKPEWNIEVGPPTLAEVQKAITNLKQGRATSPDELAPEVFKYGSPILATRLTIILAKIWELDVISSDWSHSLIVPIYKKGSKSSRDNHRGISLTNIVSKILASIIIRRLTKTRELQTRENQSGFRPGRGCIDHIFTIRQVLEHRHVYRRXTMIVFLNLKSAFDSVGRDALWQCLSLKGVPXEYINLVKALYSNTTSRVRAYGELSSDFTTSSGVRQGCPLSPFLFNFIIDLLLEITLSSTEFSGIDLLPGGSLIDLEYADDIVLFCEDAGKMQSLLLVVSNNARMFGMRFSPSKCKLLLQDWDELRIGSEVVERVDNFTYLGSLISPNGLVSDEISARIQKAHLAFANLRHLWXRRDIRLSISGRVYCAALRSVLLYDCETXPSRVEDTRKLLVFDHRYLKNIACICWDHRVSNSEVRHRVLGNDGKSVDEVINLHRLRWLGHVLRMPEHRLPRRAMLTTIRDGXKKGRGGXTKTWHQCLKSPNSSVSHIGRCRLPGWCPRDYRNQWLETLCDMAQNLSQWRRCIHTLSSLKP

SEQ ID NO: 138468 - protein, 199 aa, Oryza sativa
  unsure (1)..(199): unsure at all Xaa locations
  Clone ID: PAT_MRT4530_39854C.1.pep
MTSLRANSSVPVLEDIVKKIPAPEGDPEAPLLSLFIDSWFDNYLSVVSLVRVKNGSIKKGDKIKVMTTGQSYNVDRLGIFTPKQVDTTEFKTGEVGWVVCAIKDILSAPVGHTLTHQHHSATEVLPVFKKVVPQVYAGYSGSXHDIELFXDCLGQISPNDAFLFYAPRNFTPLGFWFPWGFLRLLHMEIIXQERLEREY

SEQ ID NO: 138469 - protein, 970 aa, Oryza sativa
  Clone ID: PAT_MRT4530_39855C.1.pep
MVPYASLDAELAAAEERRRATAQTAAAAARAARLAAAELAAARAEAEAEAAEDAARAAEVEVETLRSSINGSIAGDITADRELEELARGRARERAERWAAAHLHGGGGGPRDRAPADGNPDGRRRAGGSPELARGPRRQHGSLSPDRRHGHHGVQTVVRDFGPGGGWPTLTKTNYIEWAAVMRVRLQVRHMWEAVRYGDVNYDEDRRALDALIAAVPPEMQFSLSQKRTAKEAWDAIAAARIGSDRARKSTLQALRKEWENLAFKPGEDVDDFALRLNTLLQKMVQYGDDTYDEERAVEKLFRCVPEKYRQIARSIESLLDLSTMLIEEALGRLKVVDGDEPQPFSGPITIGGKLHLTREQWEASQGDGRKGESSSPTGGRKPRKARGGVQLRWARRRAEGGARRGAQGVATGNHKPARDDACRNCGKLGHWAKDCRQPRRGQAHVARVEEEEPALLLAHASIELPPAAPAAAAFLHLDEPKVLVSLCNGSSNDKADGWYLDTGATHHMTGRREFFTEFDSSVRGSVKFGDASGVEIKGVGSVTFTAKSGEHRLLTGVYYIPALRNSIISVGQLDENGSRVLVEDGLMRIWDRRRRLLAKWHERFGHLHFEALKQLSAKEMVRGMPCLDHVEQLCDVCVVTKQRRLPFPQQMSFRAKERLELVHGDLCGPVTPATPGGRRYFLLLVDDLSRYMWVTVLGSKGEAADAIRHAQAAAEAECGRKLRVLRTDNGGEFTAAEFASYCADEGIQRHYTTPYSPQQNGVVERRNQTVVGMARALLKQRGMPAIFWGEAVVTATATSTMASDGQGQGRMWLGADAAAWEGREECKRRRRMQPGVEVMVSDVAAQPGEPDEAGRSDAGILAMGFGQRDSLVSPLERLLEDIFFHVVAIIWFGDALTIGLYHGRYYKFLALNIELKELVLAAAVVAGDDADCSGGRGGRRCGRGRRRGSRTTAEVAVSDDTDGSDGRGG

SEQ ID NO: 138470 - protein, 77 aa, Oryza sativa
  Clone ID: PAT_MRT4530_39856C.1.pep
MVMVPFPRLDPVSFLKLIVPPVCASSCAAVLCHGRHIDASWKGVEGLSHSDNGRQGGANGDCDDRDGDSSVSTGHQP

SEQ ID NO: 138471 - protein, 120 aa, Oryza sativa
  Clone ID: PAT_MRT4530_39857C.1.pep
QKLVVGNIHVLFNPKRGDVKLGQIRMLLEKANALAEKWGGIPIVLAGDFNSTPDSAIYKFLSTMKLDISLHDRRQLSGLDSSEFALYDLCSSLKYQWSGEEVRNATGSSNVMVAKHPLNI

SEQ ID NO: 138472 - protein, 224 aa, Oryza sativa
  Clone ID: PAT_MRT4530_39858C.1.pep
MVGTSSWSSSSSSSLGSLDDDIIVACVVKAADAAVEGACVKFLCSYGGRILPRHADGGLRYVGGDNRVVSVDRSLPFHELQRKLREMCGWEAVCLRCQLPTEDLDALVSVTGDDDLANLLEEYDAASRDRLQPLKIRAFLFPRTTATTTAPLSRSPSPTAASRTAPRAHYQHQTGSAPSCASRWAARQMSLPPARVPHQQQHYNRHGGDARPQRYLVQSASSRW

SEQ ID NO: 138473 - protein, 202 aa, Oryza sativa
  Clone ID: PAT_MRT4530_39859C.1.pep
MVGTSSWSSSSTCTSSLGSLDDDVVVACVVKAADAAAEGTFVKFLCSYGGRILPRHADGALRYVGGDNRVVSVDRSLPFHELQRKLREMCGWEAVCLRCQLPTEDLDALVSVTGDDDLANLLEEYDAASRDRLQPLKIRAFLFPRTTTTTPPPPSRTVPHALYHRQTGSAPSCASRWAAHQMSSPPARVLHQQQHHNRHSGE

SEQ ID NO: 138474 - protein, 61 aa, Oryza sativa
  Clone ID: PAT_MRT4530_3985C.1.pep
ASGKPTVVSSRGLVPVQEEPKTQTAQPVLERKSDLPVYQTRKEKEAQALKEAQAQKEKKKA

SEQ ID NO: 138475 - protein, 106 aa, Oryza sativa
  unsure (1)..(106): unsure at all Xaa locations
  Clone ID: PAT_MRT4530_39860C.1.pep
QPMAPASAPAPTVPPSAPGQLVNPRLXPLRQQVVQPIQQQGSMNSSAGFATPGGQPVQHAGGNLNYQYQPPSPHVQYQQAGSAQPQFVLQYNQFEPMPQQPQGTPQ

SEQ ID NO: 138476 - protein, 594 aa, Oryza sativa
  unsure (1)..(594): unsure at all Xaa locations
  Clone ID: PAT_MRT4530_39861C.1.pep
MAGPRRAAPLARPRLSAGRVALAGPMAALLGILLVAFLAAAVPFALRLLHSFLWVPRRLERRFRRQGIRGPPRRPLSGNAAGYRDLLAAAQSAPLASFHHAVVARVAPHYREWPERYGRPFVFWLGPRPRLVVSDPEVVKAVLTDPTGTFDKAGSGGGNPLARQLFGEGLVGLTGEKWARHRRVIAPAFNMERIKIMLGTSRSQNKRLEIIVTLKHMYFLDGWISEITAITSSMLDKWEVQDEARAEFEIDVHKEFHTLIADVISSVAFGSSYEEGKRVFELQEEQLKLAILAMTTVYIPGFRFVPTKKNRRRHMLNQEVRNSLRKLIEINGRKCEDSNNLLGMMLSASKLGSEFRMGIEEIIDECKTFYFTGKETTANLLTWATLLLALHQEWQNKARDEVLQACGKSEHPNAENLSNLKIVSPSFVYFGFHLFYNFIEYRHTASDTFLMFECNQVNMVLKETLRLYPPAMFLNRMVNRDVKLGKLDIPAGTQLHFPILDIHHDVNIWGTNADEFDPSRFAEGKSYHLGAYFPFGIGPTICVGQNLTMVEEKVALAMILQRFALVVSXSYVHAPMHGVTLQPQYGAQVLAHKI

SEQ ID NO: 138477 - protein, 697 aa, Oryza sativa
  Clone ID: PAT_MRT4530_39862C.1.pep
MSLGAKSPVEISEMDDNDFLDLFMHYALDGVRVLDSQKLQKLHSIGRGIANKLRRLPVAARRVGDRLCKNLDASSWQKIRDNEVPCTDIIQEQWRSYQKLNEQVRRCFAYCSMFPRNYRFKRNALVKLWMAEGFIKTSNGQKMEDIGEKYFEDLKSWSFIKSEGKLADSDDEWFTIPDMLHELAEMVAGNDCLRVLGDEVEVFRSDVRHLFITSSNAMKYKHDIYKMKKLRTLIISADGSRGITEQVLERMLKELKKLRVVQTYLDQDRVIVPESACGLKHLRFLSILGSHIRQVKLPTEFGKLYHLQNLEFPLSYYLDLNCSNVKRMSSQLINLRSISSPYVDLGIPYVEDLKQLQELSHFKLTRIYSLQVEILDGLQPPEQLTCLNICHYLGRTTPSWLSREHGGVSNLQFLELRECYNLETLPEIAKLFTDLRKLRLNVLPNLTRLPRLPGMLKSLEISGCRRLEVTSMDDQRLFPASLECLHLTGCTVEDTVLRDSLRGCTVLGSLKLSQIDSFTEIPSETMRSLVRLRDLYIGGCKQLVRLEGLNHLDSLEHLTIIKCPSLMDLKVAGKAHAVPRLTVDDMSLVPKLLSRGAYPSLKWLALEHSVELRGEWILEHLTSLAYLGFTSCHWNSLPNNLENLTALKELYFDFCGSIRSLPKLPKSLLYFRSIGCKFLFLGSNWDDIARIPYRRIL

SEQ ID NO: 138478 - protein, 318 aa, Oryza sativa
  Clone ID: PAT_MRT4530_39863C.1.pep
MMESQALQDPVAEPHGAEPAAAGAPPAVVPGKEFTRTCKGLVVVLVGGYVLLQLLPSSLDYLAIIPAKTIPFVWTVFTAGYIEQVLPGAIGSSLGLLFCGKDIEPVWGRKEFLKFIILVNSICGVLAFCFAVALYYVTGKESFLVTPLSGFHGALAGFLVGLKQLLPNLELPMCFFWKIKAKWMPFFVLCFSTIMAFIVPDSINFLPTLLSGMYVSWIYLRYFQRNPLTGLKGDSSDDFSFPSLFPDAMRPVTDPVANLFDRMLCARSRPSELALPVSDPAKASRRRERGERVLEERLAADHAADTEAPALGHSTAED

SEQ ID NO: 138479 - protein, 206 aa, Oryza sativa
  unsure (1)..(206): unsure at all Xaa locations
  Clone ID: PAT_MRT4530_39864C.1.pep
ELEPIHHQIKPPRQPLPPGTSPAARPATATARAGNRGCRRRREEIRRWPPGTPPASILLPRPLPPHRASRSRWGRLLPPGQPPPPPPRESATTAVGARGRRSGAGHRGRRPLPPXLPGPLPPRRASHHRRGRLPPARQPPPPGTPSRRGFPSASHRGRRWSGGVVLDSRMERRSSTRCHRGEEVRAGTKSRGNKFSWGPPAWALGS

SEQ ID NO: 138480 - protein, 143 aa, Oryza sativa
  unsure (1)..(143): unsure at all Xaa locations
  Clone ID: PAT_MRT4530_39865C.1.pep
EFLHIYSTILYAAGAXDNVLVNYLSTTLKGPACSWLMHLPKSSIGSWAKLYQFVANFANFTNFQGTYKRHXIEDDHHATRQRNGEALRDFIQRFNECHSTIPKITKAFINTEELSSLKYGVQDRYTIQENMEENFSNEVVQNH

SEQ ID NO: 138481 - protein, 625 aa, Oryza sativa
  Clone ID: PAT_MRT4530_39866C.1.pep
MAATMNKTPATTFLLIPAAASLVLLLAAAASVEASAFDYAGAFDKCLLFFEAQRSGKLPDDRLVRWRGDSALTDGFSQGVDLVGGYYDSGDHVKFGLPMAYAVTMLSWGVVEFEKEMVDGNKLHRVLDAIRWGTNYFVKAHTQHNALWVQVGDGDSDHLCWERAEDMSTPRTAFKIDINNPGSEVAGETAAALAAAAKAFKPYDRMYSDLLLLHSKQLFTFADTFRGKYDDSLQSAKKFYPSASGYQDELLWAAAWLYEATGDEQYLRYVSQNAEAFGGTGWAVTEFSWDNKYAGLQVLLSKVLFEQGGSAAGYADTLKQYQAKAEFFLCACLQKNNGHNVKMTPGGLMYVSDWSNMQYVSSSAFLLTVYADYLAESRGTLRCPDGEVKPAEILLFARSQVDYVLGKNPKGMSYMVGYGSYYPTHVHHRGASIPSIYAMNATVGCMEGFDKYYNSKNADPNVLHGALVGGPDANDAYDDDRCNYQHAEPTLAGNAPMSGVFARLAASPADNTPEYTPAPNAPSPSNGGSPLEFVHTVTNTWKANGVDYYRHVVTAKNTCGHAITYLKLQIKELSGEIYGVSRTNAKDMYEFPSWMTRLDAGAQLTIVYIQGGPAAKIAVVEYKTA

SEQ ID NO: 138482 - protein, 68 aa, Oryza sativa
  Clone ID: PAT_MRT4530_39867C.1.pep
NKQFNNEGHRLNQIFVKSGKGKCRTFPGLYSGWGSKMKLRGGHARDMGSMDCYFFNSVVEWQNGFFNL

SEQ ID NO: 138483 - protein, 336 aa, Oryza sativa
  unsure (1)..(336): unsure at all Xaa locations
  Clone ID: PAT_MRT4530_39868C.1.pep
MAAALMRRAARAPPAACGLRRFMQEQTAFRPAAVPVVPPERRGFIPLADRIRDLGAAFPRINLDGLVPPAPPQTHPTVAREERASASAVAGLTVEEARKVLRATQMEAARARLRASGAGTVPYAEFLRLCCDAAGAESGASVARALDESGSVIVLGMTVFLKPVTAFVGSIICTIYCLFCSMQVRLVRQFGSLPHGSGGGGHGIDVFGKIFFXLWQARAYLVVQTPGFMRLTFWELSWDVMEPICFYVTSMYFMAGYTFFLRTKKEPSFEGFFESRFAAKQKRLMHARDFDLRRYDELRRACGLPVVRTPTSPCRPSSSSSSSTQESHCHSYCHCQ

SEQ ID NO: 138484 - protein, 259 aa, Oryza sativa
  Clone ID: PAT_MRT4530_39869C.1.pep
MSTAPTGDPPVRVAVASGGGGMGLGKELREPPSDGVSSLRFSKHSDRLLVSSWDKTVRLYDAEANVPRGVFMHAASVLGCCFHDDSSGFSASADNTVRRSLMLAFSSGGNYFLVRHDAAVSCVEYSYSTVSGYNLVVATAGRHVNVYDLRSMSRPEQQRESPLRHGTFATGGCDRFVNLWDGANRRKLFQFPRYPSSIAALSFSRDGRLLAVASSYTYEEGDIPHPPDAIFIRDVNEVQVKPRPKITFTDPPSVASPSV

SEQ ID NO: 138485 - protein, 181 aa, Oryza sativa
  Clone ID: PAT_MRT4530_3986C.1.pep
MAPAASSKSNPRVFLDIAIGGEWVGRVVIELLADKVPDTAENFRRLCTGERAGRSGKSRLHYKGSAFHRVVPGFMCQGGDITAGNGTGGESALDGAARHFPDEGFAVKHDGPGVVSMANAGPNTNGSQFFITVDKAPWLDGRHVAFGRVVAGMDAVRAIDRTGTWSGKTVKPVVITDCGVL

SEQ ID NO: 138486 - protein, 197 aa, Oryza sativa
  Clone ID: PAT_MRT4530_39870C.1.pep
MAMEASMSRTVSMLFSARRCIVASAAKDIEIAQGGRRRRSNDVKQQRGSHGQLAVAAATTAAAMTGQCHAAAAAAAPERQWQEVAEWVCRAVAVVGELDPATAKAAIGVAGPALSAFGFLFIARIVMSWYPRLPVREFPYVVAYAPTEPLLAVTRKVIPPLGGVDVTPVVWFGLVSFASEILVGPQGLLVLLSQQKP

SEQ ID NO: 138487 - protein, 106 aa, Oryza sativa
  Clone ID: PAT_MRT4530_39871C.1.pep
ARGRKKITNKSRISQRRRSSRGFPNPKPPAVSAAAAAAAAARRVGGVSGQLPFRDSPAAAPRGLTPVSGFPHRIDEVTVSQDRIGFVADRGEIASPSSRGRGAGWT

SEQ ID NO: 138488 - protein, 318 aa, Oryza sativa
  unsure (1)..(318): unsure at all Xaa locations
  Clone ID: PAT_MRT4530_39872C.1.pep
MVLDHATGDAICTGCAFDLGNGANACPEPPRWRAAAGHGDSDGDRSSSSSSVGGDVSPAAADPLLQGGEGVACSVGAPPVQPRVRGAVVPPKQMRAGGAVPPKVRCGVPDTSKALAEGFDAIVGMASRLGLADKVSDRAKEVLRKLEEARACPKGRSRDALYAACLHAACRVEGAPRTLKELIAATSDAAATKRDLGKFINAIKRHLGMEERGQDQAADMKASGGGVGVVVRAGDYLHRYGSAVGMSGQEASAARRAAGRLDSLDVRRNPQSIAAAIVYMAAQGSSGVRXASAATGVSESTIKDAYKDLCPHAALLFA

SEQ ID NO: 138489 - protein, 408 aa, Oryza sativa
  Clone ID: PAT_MRT4530_39873C.1.pep
MEAACHRDGLDKDEVVARVRVGSREPIANTGIATSNVDRADKAPEPDGFTGAFFKVCWEIIKEDIPLVFNSIFNLRCAHLNLINSANIVLIPKKDGAESVSNYRPISLIHSIAKIFSKLLALRLRPHMHALISVNQSAFIKGRSIHDNFLFVRNMARRYHRLRRAMLLFKLDITKAFDSVVAIRCDSIDLTEVLQGIPVMRANFPLKYLRLPLVLGRMRKTDLQPVFDKISRRVASWRGKNMGAAGSTTLVKSVLSAQPIYLLTALKVTKESLEQLDKQRRRFLWAGTGDITRGKCKVNWIKTCLPTSQGGLGVLNLDKFTRALRLRWLWHEWKDPTKPWVGLDTPCDGLDKDLFAAATKVTVGDGNTARFWDAAWIDGQRPKDLMPLFYAISKNRRKSLRQGKEGDA

SEQ ID NO: 138490 - protein, 114 aa, Oryza sativa
  Clone ID: PAT_MRT4530_39874C.1.pep
MWWLSQRGTHVGPTCQDATSAGRPPLRPTVFAAVIDHLSAASRPDAAVIVFRVVRAFCSHSAATFHSLLNALVSNGRADAAKDMLPFAPKLGVRLNAVSYNIILNLLPTAGRPA

SEQ ID NO: 138491 - protein, 102 aa, Oryza sativa
  Clone ID: PAT_MRT4530_39875C.1.pep
MNWWQTDTVTVTYYVACQLTSLWFHAKIIRPFFVPDGGINTPKISTSRRAKRSPIDRLIYIINLMVILFLKHMTYVCTRINVYTHTRWMAPTIEVVLRLESP

SEQ ID NO: 138492 - protein, 1009 aa, Oryza sativa
  Clone ID: PAT_MRT4530_39876C.1.pep
MALRMSLQGSPPAQQPEPKRSKPPPPPAEEGVAAADAEAEARRKQRELRAAAAEKRLRAVAPSPAAAAPRPPAPEVVAREVEVEVKADPGPSGVSMEEAKAEEVEEEKGERLPTDVAEKLWLMVFGNKLEKEVLAQWSNQGIRALVHAMLEILFLCGTGNRAVVATIGSVNEAEVVNLLLCGEAVSNVFDGKVDFGGGMFLNGIPNDVEVGFLTLLESLNFCKVGQYLKCPKWPIWVVGSESHYSVLFALNPNVQEENELEERESKIRRAFDAQDQSGGGGFISVEGFQQVLRDTDINFPSDKLEDLCNAGIIVWSEFWQALLQLDKRAGGMKDPTGLMGKKQFTIYHFNGIAKSVLNGNANIGGSTIQRPRLCKLNVSVPPRWTQDEYLADVVSASTSGSKDDSCLSFKAMREGSRESDSCSWTPGNEAAAPPKPNPPITPAPARNASAAPPSGSPATAAAAAPVPSRKESGSTSAAAPAAATRKASGVAAATTGVLPRKPPGTTAPVAARNIPATTAASRTATRATTTTTATSVSRRPAAAAAAVASRIPLRATDATTTHAASRNPLTGAAAATATVAAVGRGGFRAAPTRPEEYTPRMGMEFESEHEAYEFYRYYGWKVGFNVRKEYANKSKKTGEITSRKFACSREGYRANVKRGNHMVPMPDSRTGCNAHLVIRRKKPGAKLEVYAFQPRHNHPLFATSCMPNPLQPNVVHWTTLPDAVTPPDLLMDGGEVGGQNSTEENSTASAGEGRRQPLRTRRQWEMKYGEAGALLNYFQDQSLANPSFYHSVQLDVEDKVANVFWADPRMITDYNTTHVICAWHLKHAATRNINQLKSDSDFMKEFKACINLYEEETEFLTSWDAMINKHNLHDNVWLKKVFEEKEKWARPYMRGVFSAGMKGTRLNDRFQSDVRDHLRPEAFEGPPNMSPLGTQTPTYKTYRGIDLSSPMGPISYDEMPSGLDPTFTTHLGFATYHTSQVSSSSPHNQQPDENFCTKTSELNNLHSSL

SEQ ID NO: 138493 - protein, 897 aa, Oryza sativa
  Clone ID: PAT_MRT4530_39877C.1.pep
MSSPAEPPPPEHPPTPAPAPAPASPPPHPAASGNEAAAPPKPNPPITPAPARNASAAPPSGSPATAAAAAPVPSRKESGSTSAAAPAAATRKASGVAAATTGVLPRKPPGTTAPVAARNIPATTAASRTATRATTTTTATSVSRRPAAAAAAVASRIPLRATDATTTHAASRNPLTGAAAATATVAAVGRGGFRAAPTRPEEYTPRMGMEFESEHEAYEFYRYYGWKVGFNVRKEYANKSKKTGEITSRKFACSREGYRANVKRGNHMVPMPDSRTGCNAHLVIRRKKPGAKLEVYAFQPRHNHPLFATSCMPNPLQPNVVHWTTLPDAVTPPDLLMDGGEVGGQNSTEENSTASAGEGRRQPLRTRRQWEMKYGEAGALLNYFQDQSLANPSFYHSVQLDVEDKVANVFWADPRMITDYSQFGDVIAFDVVSRNSISLRHFASFVGCNNFGEPIVFGLALMYDETAESFQWLFETFLHAMSGRAPKTFFSHQDAVVAKAVSIVMPDTTHVICAWHLKHAATRNINQLKSDSDFMKEFKACINLYEEETEFLTSWDAMINKHNLHDNVWLKKVFEEKEKWARPYMRGVFSAGMKGTRLNDRFQSDVRDHLRPEVNILLLLRHLETVINDRRRKELEVEYSSRLKLLYFKIKAPILTQAFEAYTNTIFPLFQEEYEEFQSAYIVNRDESGPCREYVVSVVEKEKRYTVYGNPTEQTVSCSCKKFERNGFLCSHALKILDAMDIKYLPDRYIMKRWTKYARTLMSGDVQGQAIQADKLSESSSRYQYMCPKYVRLVARASECEESYRVLDQCWVDLSNKVEEILQKQTCVDATLTQTDVQNLKVSLPSITNGTQAENIMDKSSGTTAKESKKKGQKNKIQSRNCIEKGLPKKRKVDARA

SEQ ID NO: 138494 - protein, 119 aa, Oryza sativa
  Clone ID: PAT_MRT4530_39878C.1.pep
LFFFFFFFFFFFFFFFFFFFFFLENLEGNHFKEKPKLKNNQNTGFFLGPLTRDIDKIWKKPEHMGAKITRGNPTGGQKELTAFGKEETRIHKKGRLETLCPPLIEETRPQMGETSRRTG

SEQ ID NO: 138495 - protein, 621 aa, Oryza sativa
  Clone ID: PAT_MRT4530_39879C.1.pep
MGDRGEEEEEELQMALRMSLQGSPPAQQPEPKRSKPPPPPAEEGVAAADAEAEARRKQRELRAAAAEKRLRAVAPSPAAAAPRPPAPEVVAREVEVEVKADPGPSGVSMEEAKAEEVEEEKGERLPTDVAEKLWLMVFGNKLEKEVLAQWSNQGIRFSSDPETTMGLVQHEGGPCGVLATVQAYVLKYLLFFSDELGNPEVSDPFYALGQRRFYQSSFAARDDFSSLTDDRKMRALVHAMLEILFLCGTGNRAVVATIGSVNEAKTAAVLEGLSVDSAMDLQKVLRISTFTSRKDAFNSLIANISLFESRLGAMLFLISALLSRGLERIQADRDDPSLPLVTAPFGHASQEVVNLLLCGEAVSNVFDGKVDFGGGMFLNGIPNDVEVGFLTLLESLNFCKVGQYLKCPKWPIWVVGSESHYSVLFALNPNVQEENELEERESKIRRAFDAQDQSGGGGFISVEGFQQVLRDTDINFPSDKLEDLCNAGIIVWSEFWQALLQLDKRAGGMKDPTGLMGKKQFTIYHFNGIAKSVLNGNANIGGSTIQRPRLCKLNVSVPPRWTQDEYLADVVSASTSGSKDDSVLSLAPPVQTSQHAPLVDCIRTRWPRAVCSWVGDMPSIV

SEQ ID NO: 138496 - protein, 51 aa, Oryza sativa
  Clone ID: PAT_MRT4530_3987C.1.pep
TCGVCFGRKKLFAIEMKEPGLFYPGKIKKPTKKKKEGGQQRRKQAEGGVHA

SEQ ID NO: 138497 - protein, 948 aa, Oryza sativa
  Clone ID: PAT_MRT4530_39880C.1.pep
MSCRSSGAVTEVTNHLPPIAKWFDNMHVDVRVNYIRNQDEHSQKRARIFENIIEKMIHAFARTVGILSDFRHKRCESAAVAMASDLPGGLYGDVSKNMLKPAAAVSVEQAEASAHLPKGDMWSVHKFGGTCMGTSQRIQNVADIILRDPSERKLVVVSAMSKVTDMMYNLVNKAQSRDDSYITALDEVFEKHMAAAKDLLGGEDLARFLSQLHADVSNLKAMLRAICIAGHATESFSDFVVGHGEIWSAQLLSFAIKKSGTPCSWMDTREVLVVNPTGSNQVDPDYLESEKRLEKWFARQPAETIIATGFIASTPENIPTTLKRDGSDFSAAIIGSLVKAGQVTIWTDVDGVFSADPRKVSEAVILSTLSYQEAWEMSYFGANVLHPRTIIPVMKYNIPIVIRNMFNISAPGTMICQQPANESGDLEACVKAFATIDKLSLVNVEGTGMAGVPGTASAIFGAVKDVGANVIMISQASSEHSVCFAVPEKEVAAVSAALHVRFREALSAGRLSKVEVIHNCSILAAVGLKMASTPGVSATLFDALAKANINVRAIAQGCSEYNITVVLKQEDCVRALRAAHSRFFLSKTTLAVGIIGPGLIGRTLLNQLKDQAAVLKENMNIDLRVMGITGSRTMVLSDTGIDLAHWKEQLQTEAEPANLDKFVDHLSENQLFPNRVLVDCTADTSVASHYYDWLKKGIHVITPNKKANSGPLDKYLKLRTLQRASYTHYFYEATVGAGLPIISTLRGLLETGDKILRIEGIFSGTLSYIFNNFEGTRAFSDVVSEAKEAGYTEPDPRDDLSGTDVARKVIILARESGLKLELSDIPVRSLVPEALRSCSTADEYMQKLPSFDQDWARESKDAEAAGEVLRYVGVVDLVNKEGQVELRRYKKDHPFAQLSGSDNIIAFTTSRYKEQPLIVRGPGAGAEVTAGGVFSDILRLASYLGAPS

SEQ ID NO: 138498 - protein, 70 aa, Oryza sativa
  Clone ID: PAT_MRT4530_39881C.1.pep
MRMPRQEQAIEANSSSCNGEDNRGSGNDDDRRRRRRQWQCGGSGGEEIKEDKRVAVAHVPHLRVGTSTGE

SEQ ID NO: 138499 - protein, 140 aa, Oryza sativa
  unsure (1)..(140): unsure at all Xaa locations
  Clone ID: PAT_MRT4530_39882C.1.pep
FARQYFGIADSPLLHSAAFQLTNTQVWRQLALGAQQSHYQDINIVQAIAQXLQLQQLGDLYSDRNRSQAQALLAFNAPYTYGIYPRYYGAXSTITTLGGVLSRVLTLSRFESQEYAQISSYVTCETVADIKRTKVDSHIE

SEQ ID NO: 138500 - protein, 119 aa, Oryza sativa
  Clone ID: PAT_MRT4530_39883C.1.pep
TSTASLTTLSDTGTHTSASAIPSSSFSPFFSFLGTFRMQRRGKTERSDADDGRAAGGRVGCGRAWGHGQAWRRPRRMRPGAGAAALDAAGLQLFLLGFWLLESVQARKNSMAVLGASWA

SEQ ID NO: 138501 - protein, 1224 aa, Oryza sativa
  Clone ID: PAT_MRT4530_39884C.1.pep
MPMGSRLGASPEMIERNMSLMLLLIVEKTGPFDIYAKEVEKEKASFSHYNILPLNISGQRQPVMEIPEIKAAVDLLRKIDGLPMPRLDPVSAEKETDVPTVRDLFDWLWLTFGFQKGNVENQKEHLILLLANIDMRKGANAYQSDRHNHVMHSDTVRSLMRKIFENYISWCRYLHLESNIKIPNDASTQQPEILYIGLYLLIWGEASNVRFMPECICYIFHHSHQYKNTIIPMCLFMEHVRQDFDPPFRREGSDDAFLQLVIQPIYSVMKQEAAMNKRGRTSHSKWRNYDDLNEYFWSKRCFKQLKWPMDSAADFFAVPLKIKTEEHHDRVITRRRIPKTNFVEVRTFLHLFRSFDRMWAFFILAFQAMVIVAWSPSGLPSAIFDPTVFRNVLTIFITAAFLNFLQATLEIILNWKAWRSLECSQMIRYILKFVVAVAWLIILPTTYMSSIQNSTGLIKFFSSWIGNLQSESIYNFAVALYMLPNIFSALFFIFLPFRRVLERSNSRIIRFFLWWTQPKLYVARGMYEDTCSLLKYTLFWILLLICKLAFSFYVEIYPLVGPTRTIMFLGRGQYAWHEFFPYLQHNLGVVITVWAPIVMVYFMDTQIWYAIFSTICGGVNGAFSRLGEIRTLGMLRSRFEAIPIAFGKHLVPGHDSQPKRHEHEEDKINKFSDIWNAFIHSLREEDLISNRERNLLIVPSSMGDTTVFQWPPFLLASKIPIALDMANSVKKRDEELRKRINQDPYTYYAVVECYQTLFSILDSLIVEQSDKKVVDRIHDRIEDSIRRQSLVKEFRLDELPQLSAKFDKLLNLLLRTDEDIEPIKTQIANLLQDIMEIITQDIMKNGQGILKDENRNNQLFANINLDSVKDKTWKEKCVRLQLLLTTKESAIYVPTNLDARRRITFFANSLFMKMPKAPQPFCFCISVLTPYFKEEVLFSAEDLYKKNEDGISILFYLRKIYPDEWKNFLERIEFQPTDEESLKTKMDEIRPWASYRGQTLTRTVKLEHRRTVESSQQGWASFDMARAIADIKFTYVVSCQVYGMQKTSKDPKDKACYLNILNLMLMYPSLRVAYIDEVEAPAGNGTTEKTYYSVLVKGGEKYDEEIYRIKLPGKPTDIGEGKPENQNHAIVFTRGEALQAIDMNQDNYLEEAFKMRNVLEEFESEKYGKRKPTILGLREHIFTGSVSSLAWFMSNQETSFVTIGQRVLANPLNFYGPSFIDRHH

SEQ ID NO: 138502 - protein, 710 aa, Oryza sativa
  Clone ID: PAT_MRT4530_39885C.1.pep
MASSSSSIAATNPLVGIQVSEKLTKQNYALWSAQVLTALRGARLEGFISGKTTPPPAEIEKKEGDKKEGEKTIKIANPAVDEWFATDQQVLGFLFSSLSREILSQVAGATTAAQAWQAISDMFASKSRAGLINMRLALTSTQKGTMSVTEYVAKMRAIADELAAAGKPIDQDDLIAYIINGLDANFDPVVEALVARVEPITVQEMYSHLLNFENKIRLRQAFLTASTNAANRNNVTRGGRGGMPRGRGGRGGGGRGGNGGRGNNGGGRGDNRPTCQVCNKRGHVASDCWHRFDETYVPDEKIGGAATHAYGIDTNWYVDTGATDHITSQLDKLTTKEKYQGTDQIHTASGEEVFEKFHEFQNMVERQFNRKIVTMQTDWGGRVYVSRDVTFDEHEFPFSHLHSNAGARLRAEISLLPEHLLSHAYDQGGEKHSTDHMHEYILPVSTNSQDLSPVFTEIGTGGIIPGTSDGLHPENDDQAGKTASDQPSTSAVLPLQPQQSLEQQPDGTTSSHHPASPAHASPPRQPAVDVSAGTHHDASGSSASDEPVATTAPPEVTLRPKTRLQSGIRKEKIYTDGTVKYSCFTSSGEPQNLNEALGDKNWKETMDAEYMALMKNKTWHLVPTKKGINIINCKWVYKIKRKTDGSLDRYKARLVAKSFKQRYGIDYEDTFRPVVKAATIRTILSIAVSRGWSLRQLDVQNAFLHGVLEE

SEQ ID NO: 138503 - protein, 64 aa, Oryza sativa
  Clone ID: PAT_MRT4530_39886C.1.pep
MAGTSPKLPSNPPVSSTTRPAYSVTTVRRKLVAPRRGNGGGFRLDRLVSGHKTHDLRARRSSVP

SEQ ID NO: 138504 - protein, 759 aa, Oryza sativa
  Clone ID: PAT_MRT4530_39887C.1.pep
MALLMGAKPTAPLYSSLLQCCISSCAFRQGKSVHGRVAAASASPPDLHLSTKLVIFYARFGDVAAARKVFDGMPHRSVVSWTAMVSGYARNGRPREALELFALMRASGARPNQFTYGSAASACAGAGCARSGEQVHACAAKGRFAGDMFVQSALMDMHLRCGSVEDARQLFAEMGKKDVVSWNALIRGFVERGHDGDALGLFSSMLKEAMIPDHYTLGSALKACGIVGVAVNVELIHSCIIKLGYWDEKVVIGSLINSYAKCRSMSSARVIYDSISEPDLVSSTALISGYTMDRNYSEDAMELFCKIHRKGLWIDGVLLSSVLCLCASVASARFGTQIHAYMCKKQPMGDIALDNALVDMYAKAGEFSDAKRAFDEMPYRNVISWTSLITACGRNGSGEDAVTLFNRMVEDGVRPNDVTFLSLLSACGHCGLTNKGMEYFTSMMSRYGIDPRAEHYSSAIDLLARGGQLEDAWKLVQKTNLKPNSSMLGAMLGACKLHGNMLLGETAAKNLFSIDPGSSVNYAVLANILRGFGTIDRVKAKLEQACPGVVSCADILALVARDVVFLTKGPHWEVPTGRRDGTRSVKDDAVNNLPPPFFDATRNLYQFFIPKGLDAKDQVVLLGGHTLGTSHCSSFASRLYNFSGMMMADPTLDKYYVPRLKSKCQPGDKTTLVEMDPGSFRTFDTSYYRHIARGRALFTSDETLMLDPFTRGYILRQAGVAGYPAEFFADFAASMVKMGNMQVLTGAQGEIRKHCAFVN

SEQ ID NO: 138505 - protein, 96 aa, Oryza sativa
  unsure (1)..(96): unsure at all Xaa locations
  Clone ID: PAT_MRT4530_39888C.1.pep
QVGTVQLVLVEGPNKRXAPETEMIGKTDRGHRVSFASVPVPHTFEGDELRKPVVGDFIEVKITKSSTASLSGDVIARTSLSKFYKNHSSEAHAVAA

SEQ ID NO: 138506 - protein, 268 aa, Oryza sativa
  unsure (1)..(268): unsure at all Xaa locations
  Clone ID: PAT_MRT4530_39889C.1.pep
MADEEHAEKREEVSELTPFDPTKKKKKKKVVIQDPSDEVDKLAEKTENLTVTEPGELNFTGMKKKKKKPVDLDLSINDIGDGEDILDDQVVEEEEGEGIVLGGAPRYPWEGTDRDYNYDELLGRVFNILRENNPDLAGDRRRTVMRPPQVLREGTKKTVFVNFMDLCKTMHRQPEHVMMFLLAEMGTSGSLDGQQRLVIKGRFAPKNFEAILRRYIMLVDLRFQGLYATYCVFKPFRXFFLRCEQCGSSRSVAPIKAGFVAQVGRRKA

SEQ ID NO: 138507 - protein, 117 aa, Oryza sativa
  Clone ID: PAT_MRT4530_3988C.1.pep
LSRPQILEVPTLQISIAFDFIPLHPHLLNLIIPNILLSQQFSNLSYKNPLMLFIFKDAYCTNQLPEHTHFKVDESRLRYKRNAWGYMPAKVHLMPSKTGGYLNEGNSSSKKTPFVLP

SEQ ID NO: 138508 - protein, 99 aa, Oryza sativa
  Clone ID: PAT_MRT4530_39890C.1.pep
MKSTIAPPRSGPGEARSAARGGGSTSSVAGSAASTTYPPLSSSLDVPAAKLPRGGESRRRRPYGRPALPPSSWRRGGGGRGRRKEDGALSRAPGGDADH

SEQ ID NO: 138509 - protein, 92 aa, Oryza sativa
  Clone ID: PAT_MRT4530_39891C.1.pep
MTQASALGFVAEEERLTGLKVLEEPHGVYRRWVAAPPDLDMRRGCWDRGSDSATAVRPREKPLAGRHGAGWVGLGCGSARPEIPFADKPSKS

SEQ ID NO: 138510 - protein, 227 aa, Oryza sativa
  unsure (1)..(227): unsure at all Xaa locations
  Clone ID: PAT_MRT4530_39892C.1.pep
ARGDHSLHLTCQADLLTRPTPGEGNQTSSGPSSYLEGFTPVKSIGSMSASYLLVPSPSMRYLSPATLQLPTCLTSESPPLAHLLHSKGTAIPLAMGYVVSKAVPPVRKDSARLANEDRPSVLSVSIIDHYGGSIPAVQEKDXPEVLASRRGTLLQEAAGRDHETEMHNVLEAVAAELHSLSWMTVSPVYMERRSALPSHCDMVLRLRRLLHYADRHLSQSTEKGDVA

SEQ ID NO: 138511 - protein, 684 aa, Oryza sativa
  Clone ID: PAT_MRT4530_39893C.1.pep
MAGARPFFSPHEAFARASTASSPAAAATVAVAAPAPDPSPATGHADAAEVAVFRLLLPQAFSDADAMRLYAAIAPLRRLFPTLQVRVETLGVGASSDDADGDGDGGGGGGGGRVAVVLGPASPARRVEASSSSGEPLELSPAQEALVALLDSGWVVHLNGEAWGAERMTCLVLVEAGRLEAASGKGILWTIANESGAEVRVTPWGGEGGAAYAAQPPEEVVEITGDGTTVRRALVSVSSCLQGDGPLGSSTSAHSVNPILTQTFPKVPEPEMGSLYSDMSTERANTSIPHIDCPQGATGIEQTECVMQFSFRLLCPVTLAGGLIGKNGMVIKAIEVNSGASVDVGGPVHRCMERAITVSALEKPGQKFSMVENAVLRIFDRMQVVESNMHSRPNNPLHCSARVLILKGQFGYLVGPGGSLIKHMNNTTRTKMKILEETAVPACASQYELVLQASTFLITGEPMNVRDALSLVCEKLRNHCFSSEKTTYGNGHVPSSAIDELTTSSQVNISSTGQYSAGNLSRVDHRLSQNEIDSVQNSISAFDLGCLGSPQIQKPTIGCGTEINNPINEVEKPANGNGTGINNLNTGMQNENGIDVSNHGATSLEEKKLLRGIKTATITRITYEVAVCGDNGNDFTMIREMSGADVTAHYPLPETSDGMIVISGTPDEAQSALAMFLDLVKEGQ

SEQ ID NO: 138512 - protein, 62 aa, Oryza sativa
  Clone ID: PAT_MRT4530_39894C.1.pep
KAPSLSCEHNITRSSTLSDVYAHASVNWNITLGGVPPRALFPPAFTLLRAPILKGDLLALNL

SEQ ID NO: 138513 - protein, 99 aa, Oryza sativa
  Clone ID: PAT_MRT4530_39895C.1.pep
VYITRYISHELFPRESQLHVQAVFAKRPLEQPVQLPLLDFAVRICVSLQFKSSFSCCVLVRMLDSGGFQLLCTGWFLMVYVNYITIYLFKNLQPGDPLV

SEQ ID NO: 138514 - protein, 147 aa, Oryza sativa
  Clone ID: PAT_MRT4530_39896C.1.pep
MAEEREIPLELWSTLNVEKKTLWEMVEDGMLPAKEIIGWRLACGNEYPTPHKMKTQAQFEVFASRVKRAEAIRNDIANAAAPILNAIFQNGLGSSFDDAVELFDKLQCALDKYYKNIAEAATKWASQALAMTKTLNQLKFCSNGPGY

SEQ ID NO: 138515 - protein, 55 aa, Oryza sativa
  Clone ID: PAT_MRT4530_39897C.1.pep
LVYQMKMGIQMGPYRRRRENSNSGLPFRPPPEAIHHCIGGEASPPVCDVLPSHDT

SEQ ID NO: 138516 - protein, 150 aa, Oryza sativa
  Clone ID: PAT_MRT4530_39898C.1.pep
MADMGRHGMAMAMAPAAAGGAGRRKRYMHMTFYWGKNSEILFTGWPGASGGMYALALAAVFALAVLLEFLGSPRVQESSSLGSRRRRATAAAVHAVRVGLAYLLMLALMSFNVGVLLAAVAGHAAGFLAFRAGLCGGGYKKGELAPAACC

SEQ ID NO: 138517 - protein, 126 aa, Oryza sativa
  Clone ID: PAT_MRT4530_39899C.1.pep
MRSLGGRAGAGSGDWRCAGWLRRADWAASRAGWAALTAVDTGGGRKWRGLGGGGAELVLRTLGIGDMVLFLVLVGPDRVVVLTDNELSTVHMWADDSGGSDLFGFGPAWPNGIIVLIDEIALAAAA

SEQ ID NO: 138518 - protein, 907 aa, Oryza sativa
  Clone ID: PAT_MRT4530_3989C.1.pep
LSRSKSQVCLNLSKMAEVLASGATGLITSLLGKLASLLDDEYTLLREVRGDVEFLQAELSGMDDLLVRLVEMEKNGHGTKKWRVKLRELAYEVEDGIDSFTHRLGSARDRAGFVRGFMKQLNLMVRHQVARQIQELRDQIEVECARQMRYTQLGGGGSSSIDAAVADQIDCRVKALYVDPDHQLVGMDGPVASIVELLTMEEDESSARQLRIVSIFGPGGLGKTTLANQVHRKIKGQFDYAALVSVSQRPIRDILTKIAPSVIPTDSSSSLDTCQLIEIVKDFLQDKSRVITTTRMSNVASSRSPRSNGHIYEMESLNDADSKELFSKIIFDHKGKCPKALDEIADEILKKCGGIPLAIITLASLLAKKPKTRKEWKRVKSSIGNACELEGMRQTLSLSFYDLSYDLRNCFLSFSSFPEDYEIDRERLVLRWIAEGFISGKEQQELMEEEGNNYFNELVNRSLIQPIDIQYNGSARACRVHDLMLELIVSLSKEENFITTLNGPECLPMPSKIRWLSLHSNENEVMQVVTNNRRHVRSVSFFPPVAQLPPFVEFQAMRVFDVKGCQFGEHKKMKNMESLIQLKYLNLAYTNVTELPKEIGEVHFLETLDVRNCQIQSLPPSLCQLQKLVRLFVSLGVTLPDKIGKMQALEELSHVAILCNSLNFVKALGELTKLRVFRVDCRYSWLNGKKQAPRQSVSTHEDVLLSSLQNLLKKKNLRSLEIDLTNGSSLVFSLMNPYCPLPQLEELVISNSISRVPRSMRSLKDVIHLEIKLDRMEEEDLHIIRDMSHSLLFLKIHLEITPEERLIIDSEGFECLKQFEFCCVGMGLKFVQGAMPDLEKLDLDIGVRKTMSKYGGFDFGIKNLEALKHVGVKLDCQYAENREIQSAEATIRSGVLPRRIMPQIQRI

SEQ ID NO: 138519 - protein, 117 aa, Oryza sativa
  unsure (1)..(117): unsure at all Xaa locations
  Clone ID: PAT_MRT4530_398C.1.pep
HCARIPHRXSERAXXXRKSPLXPPGWKPRGPRSLSRRXAFWLXSRVRSHXPVCNRCRXWCQQXXRRHKNRYRFGMLILTFTIVLAVMSTVATSGALKKMMRISSLVSHFMIHVSMPL

SEQ ID NO: 138520 - protein, 831 aa, Oryza sativa
  unsure (1)..(831): unsure at all Xaa locations
  Clone ID: PAT_MRT4530_39900C.1.pep
MAAAAARLLERATRTAASCSSALLRSPLDSFSGRFPSFRSPLLRPAPAPSTVFPRGLSDTAFDAQALDTRVPATVITGFLGSGKTTLLNHILTSQHGKRIAVIENEVHDFSMPDRVNAINPGLAKPGPVIETFCSDELVSRYVKLDGVVTMVDCKHAMKHLNEVKARWVVNEAVEQVAYADRIILNKTDLVDNAELEVLINKIKLINGMAQMRKTKFGDVDMDFVLGIGGYDLDRIESEVQLHERKETGHCHAGEEHGHQHHHGHVHDSAVSSVSIVSEGVLDLDEVNDWLERLVEEKGEDLYRLKGVISVNESTGRFVFQGVHSMLEGCPAKPWEPDEKRFNKLVFIGRNLDEAALRKAFKGCLLFALDLIGEEQPGDRFIPDRSAMDMDMAHYLLTEPRKDKENAAASPAKEAYRKLLAEKILNNRTRILSFRNKPPEPESILTELRADAASIHQAKPAKQRRYIPQSAERTLDAPDXDDYYLNLLDWGSSNVLSIALGNSVYLWDATNSSTSELVTVDEDNGPVTSVSWAPDGRHIAVGLNSSDVQLWDTSSNRLLRTMRGVHDSRVGSLAWNNNILTTGGMDGKIVNNDVRIRNHVVQTYQGHQQEVCGLKWSGSGQQLASGGNDNLLHIWDVSMASSMPSAGRTQWLHRLEDHLAAVKALAWCPFQSNLLASGGGGSDRCIKFWNTHTGACLNSIDTGSQVCSLVWNKNERELLSSHGFAQNQLTLWKYRQFWNKNERELLSSHGFTQNQLTLWKYPSMVKMAELTGHTSRVLFMAQSPDGLTVASAAADETLRFWNVFGAPEAPKTATKGSHTGMFNNSNHIHIR

SEQ ID NO: 138521 - protein, 56 aa, Oryza sativa
  Clone ID: PAT_MRT4530_39901C.1.pep
CCTSPRWPSWAYLWRYPPHVSSYACAYHVRCFVITFLLPAYPLWCLLIVVHQLSLS

SEQ ID NO: 138522 - protein, 125 aa, Oryza sativa
  Clone ID: PAT_MRT4530_39902C.1.pep
MALSSSPCTKAATYTLANHARSQDTESPKAHANPNLFPNSKPMILHLPLFACYMWFGFAKLLDCFSSEILENDLFFGGKIEVVQSSGPKLTCMIVVIEIQQRNICKIILATIMPCLGVKDESFHA

SEQ ID NO: 138523 - protein, 68 aa, Oryza sativa
  Clone ID: PAT_MRT4530_39903C.1.pep
NSVLVELLDSHYTELAELVEKALLIQTLEDAAGKHNETIFEPGNEALERDLDPELKRLLLEPRNLKMV

SEQ ID NO: 138524 - protein, 96 aa, Oryza sativa
  Clone ID: PAT_MRT4530_39904C.1.pep
QNPQDLKLKNGNKKNPGGPTPQTKKGGGGPKKKKTRRPAPKLKITPQKKGPGPEGGFFFKKEGVPWGKGNKGGAANPGPEKKEKRSGPGTEKGGPP

SEQ ID NO: 138525 - protein, 1260 aa, Oryza sativa
  Clone ID: PAT_MRT4530_39905C.1.pep
MAASSWATASAVFSTCCGALCGGASPATKSASSRRSAPSRMSAMSRPARPSRSIACATCFGGASPLAPSCWCPVAPAAAAAAAATGAATTADACACCIFLFSPSRFRLETPHLNKPISKQAQNQYKPISIQAQIQTSSYPNSAHAIGFQRFERLRFASHAAAAPPPPPSAMPLAGGEPRPPPPLPSLVKLGRAVTPRRVDILLAALLRRRRHRLVGALASQAVANSVRPTARTHLLVASALLDSSRPRDAAARLALAGPATSSARRLWDALLRRACAVRGDARRALEVLSAGVEECGLVFSPSTYRVALTMLCARGDMETALKVFDVMAAAGCQVDDRVCSVIISGFSKVGKAGDGLEFYRRVRREFNGFEPGLITLTAFVDVLGRVGRTTEAAQLVREMEGKGLVGDAVLYGSLVHGYMSSGLLMKGLREHRVMLDKGIAADVVSYTTVIDGLCRERSVEKVMGFLDEMNRRDAKPNLITYTSLIGGFCKRNRLDDAFSIVRKLEQTGVVVDEYVYSILIDNLCKKGYLDRAFSLLEEMDKKGIKIGIVTYNSVINGLCKVGHTKKAVEIYEGIAADNFTYSTLLHGHIKVEDATGVMAIKGRLESSGVTIDVVTCNVLIKALFMIKKVDDACSLFLRMPEMRLRPNIVTYHTVIDMMCKLGETDRALQLFDDYKEDILFSSTIVHNCLIIALCNGGKVNMAEQIFNDLIQRNLRPDSCTYKKLIHTHFKEGGEHGVLNFILKVDGSEIDLFSSLCNYASAFLSTRDCYQGALDVYKLLRMKSFTVTSKTCYRLLKCLLRNGHEQTIQPLLSQFIKIHGLDEPRMINMLSCHLSKNSVGEAIGFSNYMNNGRVPVSVLREAVYTLKREGRILDACNFLKEAEQNGYSVDLAMYSILVEGLCKSGYLEKALDLCESMKEEGIQPNIVIHNSVLNGLCQQGCLTEAFRLFDYLESSEVLPTLVTYSILIAALCREGFLDDAHELFQKMSTKGIKPTTRVYNLLISGYCNYGLTEKALELISHFEEIFLFPDAITIGAIINGHCLKGDIESALGFFSEYYHKEMVPDFVGFMSLVKGLYAKGRMEESRSILREMFQCKEVAEFINSVGDKIQAESFVGLLFSACEQGRIDEVVTILNEVALMSVSSSDSNNCSTLSHLKNVETPVAYDRNMDNPGQVLCSTTYGVSSNCLHGISEGTVQPTIDGAENLCTPSDDTDIYYDNLLRNSFHDDFDTYYPAIASLCLKGELIKANKAIEAMIQNSS

SEQ ID NO: 138526 - protein, 770 aa, Oryza sativa
  Clone ID: PAT_MRT4530_39906C.1.pep
MASPMEAVARSSLVLAPRRRRALGLLPAAAAAAPFVLDCRRRHNGGMRRPHVSFACSAELDTGRRQLPSTGTRAVMSSCPGYVEGRMVGENTSQINMGWEARILRHLENPEFLPSSYDIAWVAMVPLPGTDHLQAPCFPECVEWILQNQHSNGSWGVNEFDSSASKDILLSTLACIIALEKWNVGSEQIRRGLHFIAKNFSIVIDDQIAAPIGFNLTFPAMVNLAIKMGLEFPASEISIDQILHLRDMELKRLAGDESLGKEAYFAYIAEGLEESMVDWSEVMKFQGKNGSLFNSPAATAAALVHRYDDKALGYLYSVVNKFGGEVPTVYPLNIFSQLSMVDTLVNIGISRHFSSDIKRILDKTYILWSQRDEEVMLDLPTCAMAFRLLRMNGYGVSSDDLSHVAEASTFHNSVEGYLDDTKSLLELYKASKVSLSENEPILEKMGCWSGSLLKEKLCSDDIRGTPILREVEYALKFPFYATLEPLDHKWNIENFDARAYQKIKTKNMPCHVNEDLLALAAEDFSFCQSTYQNEIQHLERWDQYHKVEFYSENVKAVFFALYSTVNQLGAMASAVQNRDVTKYNVESWLDYLRSLATDAEWQRSKYVPTMEEYMKNSIVTFALGPTILIALYFMGQNLWEDIVKNAEYDELFRLMNTCGRLQNDIQSFERECKDGKLNSVSLLVLDSKDVMSVEEAKEAINESISSCRRELLRLVVREDGVIPKSCKEMFWNLYKTSHVFYSQADGFSSPKEMMGAMNGVIFEPLKTRGN

SEQ ID NO: 138527 - protein, 46 aa, Oryza sativa
  Clone ID: PAT_MRT4530_39907C.1.pep
MVIKMVVRMMLVTGSARPKQHPASPRQSASSGMSSRGSRRAASSYH

SEQ ID NO: 138528 - protein, 54 aa, Oryza sativa
  unsure (1)..(54): unsure at all Xaa locations
  Clone ID: PAT_MRT4530_39908C.1.pep
TRPGVVDTTQALXQVRTQRTNCVNVDSPLQNNLMEYYCMVDFVREGYLGSXPXF

SEQ ID NO: 138529 - protein, 53 aa, Oryza sativa
  Clone ID: PAT_MRT4530_39909C.1.pep
NFLRIVCSLNSSSPRSRYSVFSTCPLVINKERALYRVSALACVHMTCHISYSV

SEQ ID NO: 138530 - protein, 525 aa, Oryza sativa
  Clone ID: PAT_MRT4530_3990C.1.pep
MSSSSSSRRWASASVTDLSSAGRSPLPAAALSPVRPSARRSPAVSRPDPAPSIARTIWPSSSSSNSGNTSTRKASPSPSSPAPAASTPSSSSSVATTLADHLAEDSLDAPPAALSRQRSCTELPRFADADAEARKVVVARSGGHASAIGRSMRLLPSTRPAGVTLTPGRVAPSDLRRLDAGADVASSGSECSDASRGGGGSTPRTTTKLPKPPPSPLIARTNSTRLLGSSNTQWALSPGRRSGSPLKTTLATVPELKGKTKSLIGLGWGHLFSRRKAAAAETATGAQATATLSSPASRRSGGGGNREIGHQMKMMHCRLLQWRFANAKAEAVSKNKLSIFEVEFMGAWARISELQGKVARRRVQLEKEKLKIKLNSVLSSQMRGLESWGQLESKHAVALDSTVVCTQAAICKLPLTNGAKISLPSMGIILQQALDLTMTTKTIVRSFTPMAHDTTLLITELVAVAREEHALLQECLELLGRVSALQTIVALEINELVNDIIVSYRRGHSALALPPPPDLTYRRRR

SEQ ID NO: 138531 - protein, 666 aa, Oryza sativa
  Clone ID: PAT_MRT4530_39910C.1.pep
CFGTPLRPPLSISTSTALPVPPRTSTTTYTSAVRTPPASQSQPRRGGGPNSSPTPPSNLRAPPPRFEDWRSKQSVMSLRRHNALSSLKERTAGIFAFLGNLVHSETLERSVLHEMKLTTGTLHPMGPFLQSWNKIFVLSCIFAVSVDPLFFYIPVINENNTCWYLDKKLEITASVLRFFTDIFYILHIIFQFRTGYIASSPTTFDRGVLVEDRYAIAKRYLSTYFLIDVFAVLPLPQVVILVVLPNLRSSEVAKAKNILMFIVLCQYVPRLIRIRPLYLQITRSAGVITETPWPGAVLILLIYLLASHVLGALWYLLSIERKDACWRDVCRNNSTGCNQAYLYCGDKENIFLQTACLPINSNNIDPNFGIYVPALNNVSQSTDFLAKLFYCVCWGLQNLSSRGQNLKTSTYAWENLFALFVSISGLVLFALLIANVQTYLKSAHLREEEMRVKSRDTDQWMSYRLLPENLKERIRRHEKYRWHQTSGVDEELLLMNLPKDLRRAIKRHLCLSLLMRVPMFENMDDPLLDALCDHLKPVLYTEGSCIIREEDPVYEMLFIMRGNLMSMTTDGGITGFFKSDVLKGGDFCGEELLTWALDPTSVSRLPSSTRTVETMSEVEAFALTAEDLKFVATQFRRLYRKQLRHTFRAPLNCSSEIVEEQENTLF

SEQ ID NO: 138532 - protein, 130 aa, Oryza sativa
  Clone ID: PAT_MRT4530_39911C.1.pep
GKGDKKALLMVRAFTPDQQNKTMLLKGEQSKKRITTRKTNQTRQGASRYTTLHMYHHHGSRLYGLQHTSRDACSDAGMPPVAAPPERTCSNQLHVHFEMRACPDSSGWSAVQASLGTGAGSHSTRRLAGY

SEQ ID NO: 138533 - protein, 738 aa, Oryza sativa
  Clone ID: PAT_MRT4530_39912C.1.pep
MMMGREDKYVRFEDWRSEQSVMSPRRHNALSSLKERTAGVFAFLGNLVHSETLKRLVLHERKLTTRTLHPQGPFLQSWNKIFVLSCIFAVSVDPLFFYIPVINDNNTCWYLDKKLEITASVLRFFTDIFYILHIIFQFRTGYIASSLTTFGRGVLVEDRYAIAKRYLSTYFLIDVFAVLPLPQVVILVVLPNLGGSEVTKAKNILMFIVICQYVPRLIRIRPLYLQITRSAGVITETPWAGAVLNLLIYLLASHEVITVKIYKIKVVILVLGALWYLLSIERKDACWRDMCSNNSTVCNQAYLYCGDKENSILRTACLPIDSNDIDPNFGIYVPALNNVSQSTNFLAKLFYCVWWGLQNLSSLGQNLKTSTYAWENLFAVFVSISGLVLFALLIGNVQGYETKDMEPCARFRVFIPIPFGDKTSIILTYLQSAHLREEEMRVKSRDTDQWMSYRLLPENLKERIRRHEKYRWHQTSGVDEELLLMNLPKDLRRAIKRHLCLSLLMRVPMFENMDDQLLNALCDRLKPVLYTEGSCIIREEDPVNEMLFIMRGNLMSMTTNGGRTGFFNSDVLKGGDFCGEELLTWALDPTSVSSLPSSTRTVKTMSEVEAFALRAEDLKFVATQFRRLHSKQLQHTFKFYSQHWRTWAACFIQAAWHRYCRKKIEDSLREKEKRLQFAIVNDGATTLSFRAAIYASRFAGNMMRILRRNATRKARLKESVPARLLQKPAEPNFAAEEQ

SEQ ID NO: 138534 - protein, 78 aa, Oryza sativa
  Clone ID: PAT_MRT4530_39913C.1.pep
EKKELLQSPHPPGAKETCITLIKKGIIKRIPKGLLSDFGVGHIKDGRVAPLIPKTQVKKHLAAQKGPWFSNGLFPPES

SEQ ID NO: 138535 - protein, 196 aa, Oryza sativa
  Clone ID: PAT_MRT4530_39914C.1.pep
MGRRGGAAVAAACGRWCLVILAVASALGVSGPAFYWRYKKGFASSSSSSSVSASAAAVVSPSCPPCSCDCPPPLSLQSIAPGLVNFSTSGCGKNDPELSKEMEKQFVDLLNEELKLQQIVAEEHSHHMNATLVEAKRQATQYQREAEKCNAATETCEEARERSEAAISKEKKLTALWEQRARQLGWQDSRPRVTTI

SEQ ID NO: 138536 - protein, 63 aa, Oryza sativa
  unsure (1)..(63): unsure at all Xaa locations
  Clone ID: PAT_MRT4530_39915C.1.pep
XXXXXXKYERQLFFYLYHPKFHMSHMMISELIFIFRTTILLKLITRHRRWYGLVHHILGDXIR

SEQ ID NO: 138537 - protein, 243 aa, Oryza sativa
  Clone ID: PAT_MRT4530_39916C.1.pep
RKRDLLRQRLGFAVDRAHGGGSRERTAEIDPSETDGRDRSVHDRLTANSHDDVSGDVIDDVSTGGGSAARARKLAGERRRCGANGEHPRVADGAANSPVTKEAAEDQRTATASKLKLRRRSGRRRRRCSGGQQRLRRGGRGRRRDGDHDDVLPERRRRLERRRRTAGAAATTAALGHTALGRFRRRETKARVATGRGDTGDPFKGARGRRRRPTATGDAKETSGSGEREESDSISNPSISKPK

SEQ ID NO: 138538 - protein, 263 aa, Oryza sativa
  Clone ID: PAT_MRT4530_39917C.1.pep
MDAVAGASVSSSSARLRPCPRPRRIGNVAPATVRRRSRRRAVTCAAAADADVVGLFDAAKLTVDRFVESGMVVGLGSGPASGLAIQYLGTRLRRGSLTGILGIPSSTISASEAVKAGIQVSSYEEGPQIDLAFTDTDIAGEDTIAAVIGRRNTESGELSCMVEKAICRLSSHRQLQLFHREGLRRLSPAGYQSFCSSAWGQINTTIKDQYRFDRFSYPQVAHEDRQFIEFLDRMLDASRNPQGLARIQREMLPKDLKIWDEDI

SEQ ID NO: 138539 - protein, 75 aa, Oryza sativa
  Clone ID: PAT_MRT4530_39918C.1.pep
MTTVGNEENQNNENVANNDVDPIERETAKASSSGEHDREERKTEKNQLTLFIVFPNGEADVLHEDAPGRREESQG

SEQ ID NO: 138540 - protein, 1007 aa, Oryza sativa
  Clone ID: PAT_MRT4530_39919C.1.pep
MECNKEEALKARDIAAKKMESKDFVGAKRIALKAQRIFPELENISQMLTVCEVHCAAEAKMNGLLDFYGVLQVDVMADEATIKKQFRKLAFSLHPDKNGFAGAEAAFKLVAEAQSTLSDRTKRRAYDIKWRIASKQATQPKQGAQPAQAAQPKQCTQPPLATKRNQSAQPTHNTQQSAQPKQSTQPMQATQPKHATEPMEKTDANRASNAKEGYGSSVRPPSAGEAFWTMCVNCKTKYQYYSNVLNHKLRCQNCKKDFRAVMLNEQDVPSVFSSSAAKSAGQHCDVPKQEDCSTKFSSAANRDAKPMVNGGQHDEQMKNSASVRAGGEGTVNHTESIRKGGLEFSTLHVSSAANVGSKAGGKMTSCPTPDVAGRQNPGNRVNTSAETGVMNIPNPRRSARRKENADASIIQDTPSKKRRTILDWFSNPDSSRKKVADDNVVRADGQACEPHVSSEAHNHQKGTTSNEGNQEKRKDVAHDTNAQKKSGIPGNFSYPDPEFFDFDRCRDVSMFAVDQIWALYDDRDGMPRYYARIRRIDTTNFRVQFTWLEHDAKNEEEDKWTDEELPVACGNFFLGKTVVSQDALMFSHIVSWVKGRKRSSYEIYPRKGEVWALYKGWSMQWSSDADKHRAYEYEAVEILSNFTVEAGAAVGPLVKIKGFVSLFAKVKEKPSFVIPPSEMLRFSHSIPFFRTKGDEKVGVAGGFLELDTASLPSNLDVAFPSVTLDSCMPVCKTMNSGFNDFTGYEQGALKENLMNEGKRKDHSLERTPVHQQSAAYSSPSTFDYPNSEFHNFEEYRSYSKFERGQIWALYSDLDQFPKYYGWVTKVDTDPFRVHLTWLEVCPQLEQENMWLEQNIPVSCGTFKIRNWRIKLDTNDAFSHLVETSQVGWKRYFEIHPQVGEIWAIYNNWAPGWVPSSKDTFEYTIGEITDCTEASTKVLLLTRVDGYRAVFKPDSVRGTLEIPTNENIRFSHLIPSFRLTKENGGKLCGFYELDPASVPDTFLFRSGR

SEQ ID NO: 138541 - protein, 385 aa, Oryza sativa
  Clone ID: PAT_MRT4530_3991C.1.pep
MASASSVSLMLLVAAAMASAASAQLSATFYDTSCPNALSTIKSAVTAAVNSEPRMGASLGCDASVLLSGQEQNAGPNAGSLRGFNVVDNIKTQVEAICSQTVSCADILAVAARDSVVALGGPSWTVLLGRRDSTTANESQANTDLPAPSSSLAELIGNFSRKGLDVTDMVALSGAHTIGQAQCQNFRDRLYNETNIDSSFATALKANCPRPTGSGDSNLAPLDTTTPNAFDSAYYTNLLSNKGLLHSDQVLFNGGSTDNTVRNFSSNTAAFNSAFTAAMVKMGNISPLTGTQGQIRLNCSKLAVAISSLSWFNGFISNAAAAVAADDVDVDLGILGGGMNVSRRPADTRAHPRRWLSTKLFVHGLGWGTRADDLRSAFICLIIQR

SEQ ID NO: 138542 - protein, 60 aa, Oryza sativa
  unsure (1)..(60): unsure at all Xaa locations
  Clone ID: PAT_MRT4530_39920C.1.pep
NVSAVSXVHGSTXGRHVCVISQVVSSESGTRSMSRPVTVHRVQNPGRTGCRTSYPCECLS

SEQ ID NO: 138543 - protein, 54 aa, Oryza sativa
  Clone ID: PAT_MRT4530_39921C.1.pep
CQLFYLIYSQWRFENKQIYQIQIAGLGAGETGKFCTNLKSGTDLSIFIQVSTLG

SEQ ID NO: 138544 - protein, 140 aa, Oryza sativa
  Clone ID: PAT_MRT4530_39922C.1.pep
MARGPMDLWNQWATQILVLLSLTLQVVLHIFAGVRRREATPVERFILWLAYQLADSTAIYAVGNLSLSSTAREHNLVAFWAPFLLLHLGGPDNITAYSLEDNKLWKRHLVTLVVQVLGVGYVLYKNIAGNGMMIVVAAIL

SEQ ID NO: 138545 - protein, 95 aa, Oryza sativa
  Clone ID: PAT_MRT4530_39923C.1.pep
WTKCSSPPTRTVLHPSSSAASSSRAEPRATGIHNREKIMIRHRHHRYIHVFTSTISLSHYPRSCSSTQLSGTMERIQRREDWRRRDSDCRTVPTS

SEQ ID NO: 138546 - protein, 712 aa, Oryza sativa
  unsure (1)..(712): unsure at all Xaa locations
  Clone ID: PAT_MRT4530_39924C.1.pep
MSSSASPSATPSASTLSLSHENYYFLGPVGNPDPTEFFIGETNRIPFRLANPDLGHWKNTFKSWPSLEKTRPEKSWITWFKSMSASKRVHWDEIGIGQALDLTIANSAKDEPLMATASYFWSNTINAFLFNQGPMTPTLIDIIMITGLDVTLSANSMSLNTKNQYDFKTKSIGGWSGYVAAYMGQGSVTPREHVAFLLMWLEKFLFCGSSCGPTTNWQFVAEALEAKKQFPLRKILLGYLYQMLNNASAKLAVGSVVGAEAEFPRLEPIVDNDGEERTHRRCTSYGEYASIPTDAEAKLSAELLKDWFCNFYEGFQKHTQVWFLYEDSTLLENPLDFIFEDINNERYQKPREISSAAISPYLFPDVVPQTTEFSPPRQSNSGRNIEYASGLIPNGGGPSPPVIGYDAPKTSALLQGLIREPADAGKKRKTRSSAVDTSAPAPKKKTKTKITKPSDDLPALDPSIEQALDEEEIEEDVDQAAAKSPPPSPVQQSSSDQTPSAVGIHHVEEEVQPTAPAILKILEDISHRLEASSLDSLVVDCGSIRTRLHEIQALIPDELADVLTPAVYLEQHQFKLEKAKLRLVERRERKDIEATIXANRQLVHEEKAKLDQLSEGPIKSNIDRLEARKIELLAQLQECSANLDMEHKKLADLPKSVEKQKARLKSAIKNVADLTKSLKVIPGTDAQDAQAIEEVEQIRQRAISAIQRYLSR

SEQ ID NO: 138547 - protein, 93 aa, Oryza sativa
  unsure (1)..(93): unsure at all Xaa locations
  Clone ID: PAT_MRT4530_39925C.1.pep
LFLKIPLLHVEVYKTATTTEDMSWWCCIPKSKKGENPYSHGVSGIPPEKNIRXFSYSELRSAXENFHRSNKIGPSGFWTVYKGTIRNGRDVAG

SEQ ID NO: 138548 - protein, 79 aa, Oryza sativa
  Clone ID: PAT_MRT4530_39926C.1.pep
SISILLKLCIRQQKQCPCCFWTICVPPSSTLRTCSSAQLESMERRFTVHIGYQASDLSCFFLVTENTLVVLMAKKKKKK

SEQ ID NO: 138549 - protein, 374 aa, Oryza sativa
  Clone ID: PAT_MRT4530_39927C.1.pep
MSWWCCIPKSKKGENPYSHGVSGIPPEKNIRLFSYSELRSATENFNRSNKIGRGGFGTVYKGTIRNGRDVAVKVLSAESRQGVREFLTEIDVITNVKHPNLVELIGCCVEGNNRILVYEYLENSSLDRALLGSNSEPANFTWSIRSAICIGIAKGLAYLHEEIASPIVHRDIKASNILLDKLYNPKIGDFGLAKLFPDNITHISTRVAGTTGYLAPEYAWHGQLTKRADIYSFGVLVLEIVSGKSSSRSLLADDKILLEKAWELHEVGKLKELVDSEMGDYPEEEVLRYIKTALFCTQAAAARRPSMPQVVTMLSKPIRINERELTAPGYIHDYNGTVSKATNSSNSRFKHSASDTSDMFSTVVPPTVSEISPR

SEQ ID NO: 138550 - protein, 83 aa, Oryza sativa
  Clone ID: PAT_MRT4530_39928C.1.pep
MAAMKKPSCVWALRSDRGTGGDAEFVITRRADSKLAPVVGEGTVGAGDDDGVKLIISVSHEANTGGRRCASTSPVVTAGVKTP

SEQ ID NO: 138551 - protein, 168 aa, Oryza sativa
  Clone ID: PAT_MRT4530_39929C.1.pep
MEAAWSISYRQKLETLTAFCELKFNFKVFFLGGFKLFLKFPDRLDWKRISLSYLRILNLNYGNGGSPHSTFEDSKIGTIAGDARLFGHALAWPPRWAPGVSKRTARVPQRPVGHATEHHGVGVGAWRSCWHPRRVDVLRDRRDDLRACELHRLVGFLTSMTGARMSIV

SEQ ID NO: 138552 - protein, 153 aa, Oryza sativa
  Clone ID: PAT_MRT4530_3992C.1.pep
MVSREQKRASLHEKLQILRTLTHSHAVNKMSIISDASTYIKDLKQKIAALNKELGCAKNMNICEEPSPVVRVQVLDKGFLINVFMDKSSPGLLSSILQAFDELGLTVIEARASCSNSFRLEAVGGEHEEADGGIDANAVELAVMQAIKSTPGK

SEQ ID NO: 138553 - protein, 53 aa, Oryza sativa
  Clone ID: PAT_MRT4530_39930C.1.pep
FQHSVSSTQTNNGNVNHSQNQTSNQLVATRFIQKNYINLVILVKPKYKIPPVE

SEQ ID NO: 138554 - protein, 610 aa, Oryza sativa
  unsure (1)..(610): unsure at all Xaa locations
  Clone ID: PAT_MRT4530_39931C.1.pep
MDLASQGVVTQQQKPSGRRPVGSSQIWTTLNFPQRYGVLLPSQQTRKLKEWVLTDEQQQLVNASGLGHLALTTGFTIDRSLLTAFCERWNNETNTAHFMGFEMAPSLRDVSYILGIPVTGHVVTAEPIGDEAVRRMCLHFLGESPGNGEQLCGLIRLTWLYRKFHQLPENPTINEIAYSTRAYLLYLVGSTLFPDTXGDLGYVSPKYLPLLSDFDKVQEYAWGAAALAHLYKALSIAVAHSARKRLFGSAALLMGWIYEYIPALRPDMYDPPEHIFPRVLKWTGSTISQPAKNVSDIRKAFGLLQVSDVNWEPYKGVDPASIPKHCAAPDNLCFSRTWLVSFNLKEIYAPDRFARQFGQEQHRPLNDVPAFQRQLWNPAVDWSLMYASEIERFQQLINAADGGDHGHTADAAAAAAADVFTPATMARASLGLSLISVVEGVREELPTVARFLEQHRLPAELATSLSRIRGLIEASPPAPPLKRGDAAPQPQPQVIAVIPPLAVMPPREQEAPHGTGDAEAPGIVRGDADDDDAVPPKERSDEQQQQDEEEEEEEEQKWRRRRRREEEDGAAKGSGGGGGAVRRSSRSCVQAKRFRRVGGKGSQSSDPIVL

SEQ ID NO: 138555 - protein, 319 aa, Oryza sativa
  Clone ID: PAT_MRT4530_39932C.1.pep
MGKAKGKGKVETEGSSRERSISWDDEQTKFMLDWYIEYKKDQHANFIWKSQHHMKCADALNKEFAMGVTSAQVTRHYRHYKENWKIVETALNKSGNGFDAIKCKLTISESEKATLKDRDRRLLSKPIKYFHEMQELFSGSNADGSLAMDQQTCCDVDNKSDSSDDEGLNDISSYARPIDIAAEDSDTLPSPTCADNGSSGTSRAGKKRPRGSKSPSKKQQPKPKNRFTDATEKISNTMDHLVDQLGNPPPPPPVPQFCDPYASLWKRIDALPISTNDKVVVGNYLGRQENEGVRGFLASSADTTVETWVYQFMCDRDGA

SEQ ID NO: 138556 - protein, 382 aa, Oryza sativa
  Clone ID: PAT_MRT4530_39933C.1.pep
MARLQEERAAEEMQMREAAKGWWVILVSVPHVAHDEFHFPPGTELRLNFGAPPFASRITVPRRIAPDRKAIDNYPYLAAADERHGRLLLYATQGPDPEPRPALDAFYLRPLGVHHGFAKAYFICDTTTREASRLPDPDHPFAILYPGNVGLLCYSISFYVAELQPAPASGTATLLLYRSDSDAWVDEELSYPPHDRPWGGNGMVSHQDRLWWVDLSYGLLTCDVVYGDDPPDLHYVPLPQDSELPAGTPDLEKRRCVGVSAGRLRYVQIDDEPDGDPIVRMWTLLDEDAGEWGFDCAASFVAIWDDEAYKATKLPRQVPAVALIHPTGPGDVVYFFLRSRIFAVDVRARRLLEWRFFEMLHPPMRYHSSQFVRAWNLPTLFQ

SEQ ID NO: 138557 - protein, 106 aa, Oryza sativa
  unsure (1)..(106): unsure at all Xaa locations
  Clone ID: PAT_MRT4530_39934C.1.pep
LTVDCGTASKKKLRNLVLEATRKQMFERVTRDLKVTRVFSTLVEEMKAIGVPTAAMNGDCEEEPHCTDVMAPVAHDERSPVLLLMGGGMGAGKSTVLKEIXQDPLW

SEQ ID NO: 138558 - protein, 164 aa, Oryza sativa
  Clone ID: PAT_MRT4530_39935C.1.pep
VRGVERERERERERERERERERERERERERERERERERESARVLVGAVASPARSGGVVSSRGGVWPWYRLSSSFYLSPAPYYSVVGASVLICLLCFLGPAGSVFLSTSLPGCICMTALLSVYVSGGFVALSHEFSPGTAVSMLLCLWPFLPRFLGFFRATGLGY

SEQ ID NO: 138559 - protein, 94 aa, Oryza sativa
  Clone ID: PAT_MRT4530_39936C.1.pep
GIISVLHVGTILLLYRHATPMKALHGRIHNTFVSVILVSGDIGRCMDNACWDITHLKETTVLENTFSGDMHFTLIQFQKGSTFNTIYMCKEYHS

SEQ ID NO: 138560 - protein, 132 aa, Oryza sativa
  unsure (1)..(132): unsure at all Xaa locations
  Clone ID: PAT_MRT4530_39937C.1.pep
MGPRSAPVAAVDLSAGAGGWGRGQNRPRRLRLQGRSSGSGGGDAAAVHTXEESEAPAAAVHAGRISSEDAAAQRQNIRGGGGASEEEEKRSLRVWSDVFASGGGVKYSAWRGWMDHAVVKSSAQMDGRDRFE

SEQ ID NO: 138561 - protein, 860 aa, Oryza sativa
  Clone ID: PAT_MRT4530_39938C.1.pep
MDLSYVIFPGDCVEVNSIYGLFESAKESADARWRPGMQGRGGKGGWGNSSRQLSNSSDITGRNAPAEKEIGVNPNMDKCNSSVPVNPNTDTKTSTSISSLSVGQSNGSSEPVASMEKSSLAIGQLQISDSKGISDLEGNPEKLVNGLGPDVRLSLIQSAPSISGECIPALDPVLTPAPEVHGHGETVSTKHAYASQLAAGEKVVSNDVSTASQGTSRSSGLSSTVVPSGSRPSSSCSSRAQQLSSVQKVVPNKEWKPKSTNKPAHAENVICDKVPVSVETVPQSILVSDSIHKEDTTSGVETRPSDMRLSDKQHVIIPDHLQVAESEKYGLSFGSFGACFEQSASFSKDTESEKCSTPQCESSQEADEVLDEPAASHQGVSSTVEMAAESDLQQLPAETADNILPQKVDSSSSIPEVAESDQSNDTIASHVPQDSVETTTPYPPQQSHGDQIPSLETSESQARLVQQVNDSSAGYYTQFYRPPADFDGRISPFTASGAAIKYGNLSVMPTQTGHAQEARLQQLNLPHAMEILIAVSFLSLFLVIWSTGPRTLTTVGAVSTFSINSVGGFLLCTFLFTTMVRFYPDKVSLPSTCAMAAVDHLPQGINSFVLPSVGSTPLATPTPGAVPNSVGIPQQPLQLFRQHLGVLPQYPPNYFPYSQYPLYVPPQPLHFMVPQPPSTGGMYPPVSAAVAPPGKYPTNTYKPGANNGTQTHVGNHGAYGTYDSSPSIYTNNTMVASGTSVESDDISGSQFKETNVYIAGQQSEGSGVWIPAPGRDISGLQPSNYYGLPLQGQHLAFAPAQAGHGTFGGIYHPAQTMAGAAVHPLLQPPQAIAGVGGEMVGPPANGYQQPQRAQMNWPNY

SEQ ID NO: 138562 - protein, 85 aa, Oryza sativa
  Clone ID: PAT_MRT4530_39939C.1.pep
QLGAAFFSPREAILWCNFLGGLRWPGRASPSCGAFAVWFGWNGYPVTLVHSSLLLVPRYHFFSSSFSHFISPFGPKSFREHQNIS

SEQ ID NO: 138563 - protein, 89 aa, Oryza sativa
  Clone ID: PAT_MRT4530_3993C.1.pep
MGLGLGGERVREVLDEMVGLVRAAAAVAADDVDVDLGILGGGMNVSRRPADTRAHPRRRPSTKLFVHGLGWGTKADDLRSAFMCLIIQR

SEQ ID NO: 138564 - protein, 77 aa, Oryza sativa
  Clone ID: PAT_MRT4530_39940C.1.pep
VKLSMKRPSYNRTSRMGIDLAEYVAERRQYPCIVVILGVWESGPTMGQPLVGPRGASAYSGAAIGRTAMCKFNLTKT

SEQ ID NO: 138565 - protein, 243 aa, Oryza sativa
  Clone ID: PAT_MRT4530_39941C.1.pep
TGQLWNSPLYDWKAMEAGGFEWWIKRINRALDLYDEFRIDHFRGLAGFWAVPSESKVALVGSWRAGPRNAFFDALFKAVGRINIIAEDLGVITEDVVDLRKSIEAPGMAVLQFAFGGGSDNPHLPHNHEFDQVVYTGTHDNDTVIGWWQTLPEEEKQTVFKYLPEANRTEISWALITAALSSVARTSMVTMQDILGLDSSARMNTPATQKGNWRWRMPSSVSFDSLSPEAAKLKELLGLYNRL

SEQ ID NO: 138566 - protein, 566 aa, Oryza sativa
  Clone ID: PAT_MRT4530_39943C.1.pep
MASPCEHHVPYTLLGALLSGGGPHAAACGGAAFLRDYAERGTNALLWAALLAVTWLLVLRLAALLRLWALGARLPGPPAFPADPGLAAGDITGYLSKLHGSYGPVVRLWLGPSQLLVSVKDSRVIKELLTKAEDKLPLTGKTYNLPCGKLVLFISSFEKVKSRRESLKSFLDEKLSVGTGGSSFKIIQIVLDRVDSIMARDFLDCRYFSQHMAFNIVGSALFGDAFFDWSDASAYEELMMTVAKDACFWASYAVPPFWKPDYRRYRTLCARLKLLTQGIVAKSRNQNGVLSLIDLSSCQRSERMIKDPCRGFSLLDGVISSRCLNEAAEGPLSSEEEICGNIMGLMLHGISTCANLIGNILTRLALYPNLQCQLHSEIVSGHSESSELKIDDVLRMKFLLATVCESARLLPAGPLLQRCSLQQDVNLNSSITIPAGAILVIPLHLVQMEASTWGNDACQFNPNRFLKKEINFEEILAAAHKGSNGINLFTDECDKTESFLPFGSGSRACVGQKFAVLGIAMLIASLLRSYEVQPHPALSQEMESLVDSNSLHHIPNPKIILKKRSI

SEQ ID NO: 138567 - protein, 448 aa, Oryza sativa
  Clone ID: PAT_MRT4530_39944C.1.pep
MTPRASNLTGVEIYSPVEMKWKERSGTAKTAKMAKRRGGWENDATRMAAGEQERQASQVLGSIQARMSSDGASGSIGMKHDDGDHRPSTGASSRRCPSCGHDPDCNKPFDMVGMPAGVRFDPTDQELIEHLEAKVKDGGSTSHPLIDEFIHTIQGEDGICYTHPENLPGVTRDGLSKHFFHRSAKAYPTGTRKRRKVLADQQPDDHPQASKGRNVAAAETRWHKTGKTREITVRGQPKGCKKILVLYTSFGKKRKAEKTSWVMHQYHLGELDDEKEGELILSKVFYQTQTRSAAAAEAPVSSGAAMEVQGQQQQVLKLQADDGHFSSAPTKKRLHQDVVAQVKVDRGHHCMPAQRQVNFNLKVTPVPTTSSFPVVVDKQLYSPVALFRSEHLHVVQHYDTSILQIKPFDLFTFYREELQFISPKKQIGLTSAGLLTTKINMDNFLDSQ

SEQ ID NO: 138568 - protein, 163 aa, Oryza sativa
  Clone ID: PAT_MRT4530_39945C.1.pep
CPRRRRPFSCPFHSFPPSPRVPFCIIILASQTVSKRKTKKSKKGQGLFCKSPSLRRRRRRRRRRREEGCLSSEFCASCWVFPEEKLNPHLARQSTLRISDQMVYVCVLLREFKRVEFEKFGIGFVVLVWLHLLLFLRLPFLSKLLSEALHECCTVEKKDGNLT

SEQ ID NO: 138569 - protein, 588 aa, Oryza sativa
  Clone ID: PAT_MRT4530_39946C.1.pep
MTPRASNLTGVEIYSPVEMKWKERSGTAKTAKMAKRRGGWENDATRMAAGEQERQASQVLGEGARRHPGLDPDLRLRGSEDVVQEDCRRRRRHRRDARSSGLPRLAATAKPTSSPPPRASAGCACGSSSAAAVARRSSSSASTERRLTPPPCSSLASTERRLTPPPCSPRRPPPPPCSSSSASTKRRLTPPPPSSPPVSRRRRPARCPREKKREREKRKGEKRGKKEEADLDRLTWSIQARMSSDGASGSIGMKHDDGDHRPSTGASSRRCPSCGHDPDCNKPFDMVGMPAGVRFDPTDQELIEHLEAKVKDGGSTSHPLIDEFIHTIQGEDGICYTHPENLPGVTRDGLSKHFFHRSAKAYPTGTRKRRKVLADQQPDDHPQASKGRNVAAAETRWHKTGKTREITVRGQPKGCKKILVLYTSFGKKRKAEKTSWVMHQYHLGELDDEKEGELILSKVFYQTQTRSAAAAEAPVSSGAAMEVQGQQQQVLKLQADDGHFSSAPTKKRLHQDVVAQVKVDRGHHCMPAQRQVNFNLKVTPVPTTSSFPVVVDKQLEELQFISPKKQIGLTSAGLLTTKINMDNFLDSQ

SEQ ID NO: 138570 - protein, 98 aa, Oryza sativa
  Clone ID: PAT_MRT4530_39947C.1.pep
RVGRKAAAASASSSCSPTRRSKAAAAGGGGSKVAASASSPCSPTRSKAAASASSPCSPMRRSGGRPRRRSWSHTRSRRRRGEAASSSAWRWRRGEAAR

SEQ ID NO: 138571 - protein, 209 aa, Oryza sativa
  Clone ID: PAT_MRT4530_39948C.1.pep
MRGLGDSERKPSPFRADSGMLLSIVTPLGGTVMVSLLSIVESSGECLPTSYIKIPHHLQHLHSLSLSLSLPTKLFQPGDWDKVEEIKVATPAGAECRRCILPPIVCSSCYAPPAPSSCSSHGCSCSPSNSSPPAAEACNGSRQQAHGTAAAPPHPEEKKPVKSNLKKAPPAAVAAQEEKNRVSLVVSRKVTWPDAQGKDLAHVLEFHPR

SEQ ID NO: 138572 - protein, 329 aa, Oryza sativa
  unsure (1)..(329): unsure at all Xaa locations
  Clone ID: PAT_MRT4530_3994C.1.pep
MASASSLGLLLMLAALVSTATAHLSPTFYDTSCPRAMSIIKSTVTAAVNNEPRMGASLLRLHFHDCFVQARRKVANRFACLSDYGCDASILLAGNERNAAPNFSVRGYDVIDSIKTQIEAVCKQTVSCADILTVAARDSVVALGGPSWSVPLGRRDSTGAATAAQVISSLAPSTDSLAQLISAYASKGLSATDLVALSGAHTIGMARCRGFRTRLYNETNIDAAFAAALKANCPATPGSGDGNLAPLDTTTPTAFDNAYYRNLLSNKGLLHXSDQVLFNNGSTDNTVRNFSSNTAAFNSAFTAAMVKMGNISPLTGTQGQIRLNCSKVN

SEQ ID NO: 138573 - protein, 106 aa, Oryza sativa
  unsure (1)..(106): unsure at all Xaa locations
  Clone ID: PAT_MRT4530_39950C.1.pep
AHAYNNASVHASTSLKHYTWLILQWSYRFQQGQPTGVLRVPSMTDHTITQXATEAEADMSRIGPIAADWTDSQMTIIGEMDTGATAKMLNLLGKIEMVSGGPAKEE

SEQ ID NO: 138574 - protein, 782 aa, Oryza sativa
  Clone ID: PAT_MRT4530_39951C.1.pep
MAEERESFEGQWAPSDVTEENLKEMVAHGVLPAKEIIGWRPAHGEAFPSPDTHEIVVFSHFFYGGFALPTSKFFRGILNFYGISLHHLNPNSIVHIANFVHACEAFLGIKPHFALFRRIFFLKPQPNKNKPCVVGGAGFQLRGTLSQKYFSMPFKTSNKGWHANWFYVQNPEPALPGYSCLPPVYQDTWNSLPIGDEAVQALELLDRMLNLKEQGLQGEQITRHFIKCRLAPIKERSRTAFEFDGKHDPNREEPDSLDFKIMKERMYKIFSNAIVVSYSHQLPVVPYNAFNLPPQEYALMKSDPPVSQRRSPRQHTAQGGGGPTIRPDPQPQTSKLAGQTGPRKRKLVLDDDEGDDDKSGDNGSPNKPPKRTMPRKKLAGRAIPKIRTSSRKPSDIDPSGKDPDPAMTEQNISKDPEPTTENQPTAESQPTGAHASGGKANPSDLPPTGNQSATTETATTQEPPTGNQSDAGPDPEIPEVEAQTTTSQGPEVGNDSIAGSSGPSDDDGEEIPRIKATDDSRPPILIKWWDENSQAAGIVINRQKEDEEVCQLKKALGEATRIVNRIHLRNEAKTTTLEKLVPHLGTLEAVRDQLHEAKAQAARMEQMARQIEALERDKTELAAQRDSALKEVEDRKIKSQAQFDVLVGKIKRLEGARDGVANAAAPIIQAMFLNNGGPSALDATEIFDKLSVAPEVYFKNIKKAGSMGAGMALAMTKSLYPRIEVDTIDGFADGTSEEAALDLISSAQNAADKIASDVVEQFRNNDLQPSNEDSDDERTDSD

SEQ ID NO: 138575 - protein, 202 aa, Oryza sativa
  Clone ID: PAT_MRT4530_39952C.1.pep
IVAISHHDDDETRDPQTSRGPEDEVVGIGAEPPTTIIPHCLRLHQEAILAVHENVVHILLWIPYKWSRYHYDWSSIDNVAILVPQLPLVEVRLRLVFSQQRSNPRTTTSNGRGRSDLSYLHFKWSSYDYNWSSASDVAILPLPMRFVVHNYTVGLCPVWWSSDHLRQIYRSITTITPIDPLRRLDKASEEPKGSSAGDAQSR

SEQ ID NO: 138576 - protein, 811 aa, Oryza sativa
  Clone ID: PAT_MRT4530_39953C.1.pep
MAEERESFEGQWAPSDVTEENLKEMVAHGVLPAKEIIGWRPAHGEAFPSPDTHEIVVFSHFFYGGFALPTSKFFRGILNFYGISLHHLNPNSIVHIANFVHACEAFLGIKPHFALFRRIFFLKPQPNKNKPCVVGGAGFQLRGTLSQKYFSMPFKTSNKGWHANWFYVQNPEPALPGYSCLPPVYQDTWNSLPIGDEAVQALELLDRMLNLKEQGLQGEQITRHFIKCRLAPIKERSRTAFEFDGKHDPNREEPDSLDFKIMKERMYKIFSNAIVVSYSHQLPVVPYNAFNLPPQEYALMKSDPPVSQRRSPRQHTAQGGGGPTIRPDPQPQTSKLAGQTGPRKRKLVLDDDEGDDDKSGDNGSPNKPPKRTMPRKKLAGRAIPKIRTSSRKPSDIDPSGKDPDPAMTEQNISKDPEPTTENQPTAESQPTGAHASGGKANPSDLPPTGNQSATTETATTQEPPTGNQSDAGPDPEIPEVEAQTTTSQGPEVGNDSIAGSSGPSDDDGEEIPRIKATDDSRPPILIKWWDENSQAAGIVINRQKEDEEVCQLKKALGEATRIVNRIHLRNEAKTTTLEKLVPHLGTLEAVRDQLHEAKECAKKTEKELRDRIAQLQDANFELSGSSKAQAARMEQMARQIEALERDKTELAAQRDSALKEVEDRKIKSQAQFDVLVGKIKRLEGARDGVANAAAPIIQAMFLNNGGPSALDATEIFDKLSVAPEVYFKNIKKAGSMGAGMALAMTKSLYPRIEVDTIDGFADGTSEEAALDLISSAQNAADKIASDVVEQFRNNDLQPSNEDSDDERTDSD

SEQ ID NO: 138577 - protein, 42 aa, Oryza sativa
  Clone ID: PAT_MRT4530_39954C.1.pep
FFFFFFFFFFFFFFFFFFFFFFFFFFFFFWTAKNASVDTMNE

SEQ ID NO: 138578 - protein, 618 aa, Oryza sativa
  Clone ID: PAT_MRT4530_39955C.1.pep
MASPTHAAYLAPTAPPRHLHLLLRLRLRGRPAVSTCVRATARGGDGGSSYLDMWKKAVERERRSAEIAHRLQQSSSAAAAAVKEEEGEGKAAAAAGDVERRTARFEEMLRVPREERDRVQRRQVIDRAAAALAAARAVLKDPPPPPPPSPPSTPPQEREQQQKPAATAIQAGSESGLVSRTAPGESDRASPPPPVTETATEAAKVSVPDSGDSSPFKKSSSKLGTPGPDFWSWLPPVENSTKLGEIDTGLKPSEKLDSFAGQPDLLMEKEQSEDILSLPFETSFFKKEDRSLPPFQSFAEPENVESEPSITADAEETFEDQFSKNAAEAARALSASDEKSSHGVRPDGSLWWKETGVEQRPDGVTCKWTVIRGVSADGAVEWEDKYWEASDRFDHKELGSEKSGRDATGNVWREYWKESMWQDFTCGVMHMEKTADKWGQNGKGEQWQEQWWEHYDSSGKAEKWADKWCSLDPNTPLDVGHAHVWHERWGEKYDGCGGSAKYTDKWAERSEGDGWSKWGDKWDEHFDPNGHGVKQGETWWAGKYGDRWNRTWGEHHNCTGWVHKYGRSSSGEHWDTHVPQDTWYERFPHFGFEHCFNNSVQLRSVKRQTPKNTKPEKD

SEQ ID NO: 138579 - protein, 811 aa, Oryza sativa
  Clone ID: PAT_MRT4530_39956C.1.pep
MAEERESFEGQWASSDVTEENLKEMVAHGVLPAKEIIGWRPAHGEAFPSPDTHEIVVFSHFFYGGFALPTSKFFRGILNFYGISLHHLNPNSVVHIANFVHACEAFLGIKPHFALFRRIFFLKPQPNKNKPCVVGGAGFQLRGTLSQKYFSMPFKTSNKGWHANWFYVQNPEPALPGYSCLPPVYQDTWNSLPIGDEAVQALELLDRMLNLKEQGLQGEQITRHFIKCRLAPIKERSRTAFEFDGKHDPNREEPDSLDFKIMKERMYKIFSNAIVVSYSHQLPVVPYNAFNPPPQEYALMKSDPPVSQRRSPRQHTVQGGGGPTIRPDPQPQTSKLAGQTGPRKRKLVLDDDEGDDDKSGDKGSPNKPPKRTMPRKKLAGRAMPKIRTSSRKPSDIDPSGKDPDPAMTEQNISKDPEPTAENQPTAESQPTGAHASGDRANPSDLPPTGNQSATTEAATTQEPPTGNQSDAGPDQEIPEVEAQTTTSQGPEAGNDSIAGSSGPSGDDGEEIPRIKATDDSRPPILIKWWDENSQAAGIVINRQKEDEEVCQLKKALGEATRIVNRIHLRNEAKTTTLEKLVPHLGTLEAVRDQLHEAKECAKKTEKELRDRIAQLQDANFELSGSSKAQATRMAQMEKQIEALKKDKAGLAAERDSALKEIEDRKIKSQAQFDVLVGKIKRLEGARDEVANVATPLIQAMFLNNSGPSALDATEIFDKLSVAPDVYFKNIKKAGSMGASMALAMTKSLYPRIEVDTIDGFADGTSEEAALDLINNAQSAADKIASDVVEQFRNNDLQPSDNNSDDERTDSD

SEQ ID NO: 138580 - protein, 257 aa, Oryza sativa
  unsure (1)..(257): unsure at all Xaa locations
  Clone ID: PAT_MRT4530_39957C.1.pep
RPVATGQDHVASLPPSPLLSPPAPPISASSLPEPLFALCFPLSPTPTHPTAPSPSPPPTRRKLPSPKPWTSXRKRLRVPPFYCQFAGPAMTIPPCPPSPRPTVSNPSPRRAGPTCHPLPSVPTDSPVPIRXPGRSLASRAPRERNEIPNXKPLNPIXSPRLPSPPPPSSLSPLLSPPXPPPALINHATRRDPPSPSSSHRPPPPPPPPPPPPPPRPPLSSPRHPGQPPPRPLVLFISLFASCRMLVSACARSVGAPI

SEQ ID NO: 138581 - protein, 822 aa, Oryza sativa
  Clone ID: PAT_MRT4530_39958C.1.pep
MAEEGESFESQWATSDVTEENLKEMVAHGVLPAKEIIGWRPAHGEAFPSPDTHEIVVFSHFFYGGFALPTSKFFRGILNFYGISLHHLNPNSIVHIANFVHACEAFLGIKPHFALFRRIFFLKPQPNKNKPCVVGGAGFQLRGTLSQKYFSMPFKTSNKGWHANWFYVQNPEPALPGYSCLPPMYQDTWNSLPIGDEAVQALELLDRMLNLKEQGLQGEQITRHFIKCRLAPIKERSRTAFEFDGKHDPNREEPDSLDFKIMKERMYKIFSNAIVVSYSHQLPVVPFNAFNPPPQEYALMKSDPPVSQRRSPRQHTAQGGGGPTIRPDPQPQTSKLAGQTGPRKRKLVLDDDEGDDDKTGDKGSPNKPPKRTMPRKKLAGRAMPKIRTSSRKPSDIDPSGKDPDPAKTEQNISKDSEPTTENQPTAESQPTGAHASGDRANPSDLPPTGNQSATTETATTQEPPTGNQSDAGPDQEIPEVETQTTTSQGPEAGNDSTIGSPGKEQRSLHAQPGPSGDDGEEIPRIKATDDSRPPILIKWWDENSQAAGIVINRQKEDEEVCQLKKALGEATRIVNRIHLRNEAKTTTLEKLVPHLGTLEAVRDQLHEAKEHAKKTEKELRDRIAQLQDSNYELSGSSKAQATRIAQMEKQIEALKKDKTELAAERDSAVKEVEDRKIKSQAQFDVLVGKIKRLEGARDDVANAAAPIIQAMFLNNGGPSALDATEIFDKLSVAPEVYFKNIKKAGSMGAGMALAMTKSLYPRIEVDTIDGFADGTSEEAALDLISSAQNAADKIASDVVEQFRNNDLQPSNEDSDDERTDSD

SEQ ID NO: 138582 - protein, 811 aa, Oryza sativa
  Clone ID: PAT_MRT4530_39959C.1.pep
MAEERESFESQWAPSDVTEENLKEMVAHGVLPAKEIIGWRPACGEAFPTPDTHEIVVFSHFFYGGFALPTSKFFRGILNFYGISLHHLNPNSIVHIANFVHVCEAFLGIKPHFALFRRIFFLKPQPNKNKPCVVGGAGFQLRGTLSQKYFSMPFKTSNKGWHANWFYAQNPEPALPGYTCLPPVYQDTWNSLPIGDEAAQALELLDRMLNLKQQGLQGEQITRHFIKCRLAPLKERSRTAFEFDGKHDPNREEPDSLDFKIMKERMHKIFSNAIVVSYSHQLPVVPYNAFNPPPQEYALMKSDPPVSQRRSPRQHTAQGGGGPTIRQDPQPQSSKLTGQTGPRKRKLVLDDDEGDDDKSGDKGSPSKPPKRTMPRKKLAGRAMPKIRTSSRKPSDIDPSGKDPDPAMTEQNISKDPEPTTENQPTAESQPTGAHASGDRANPSDLPPTGNQSATTETATTQEPPTGNQSDAGPDQEIPEVEAQTTTSQGPEAGNDSIAGSSGPSGDDGEEIPRIKATDDSRPPILIKWWDENSQAAGIVINRQKEDEEVCQLKKALGEATRIVNRIHLRNEAKTTTLEKLVPHLGTLEAVRDQLHEAKECAKKTEKELRDRIAQLQDSNYELSGSSKAQAARMEQMAKQIEALERDKTELAAQRDSALKEVEDRKIKSQAQFDVLVGKIKRLEGARDNVANAAAPIIQAMFLNNGGPSALDATEIFDKLSVAPEVYFKNIKKAGSMGAGMALAMTKSLYPRIEIDTIDGFADGTSEEAALDLISSAQTAADKIASDVVEQFRNNDLQPSNDDSDDERTDSD

SEQ ID NO: 138583 - protein, 314 aa, Oryza sativa
  Clone ID: PAT_MRT4530_3995C.1.pep
MASASSVSLMLLVAAAMASAASAQLSATFYDTSCPNALSTIKSAVTAAVNSEPRMGASLVRLHFHDCFVQGCDASVLLSGQEQNAGPNAGSLRGFNVVDNIKTQVEAICSQTVSCADILAVAARDSVVALGGPSWTVLLGRRDSTTANESQANTDLPAPSSSLAELIGNFSRKGLDVTDMVALSGAHTIGQAQCQNFRDRLYNETNIDSSFATALKANCPRPTGSGDSNLAPLDTTTPNAFDSAYYTNLLSNKGLLHSDQVLFNGGSTDNTVRNFSSNTAAFNSAFTAAMVKMGNISPLTGTQGQIRLNCSKVN

SEQ ID NO: 138584 - protein, 56 aa, Oryza sativa
  unsure (1)..(56): unsure at all Xaa locations
  Clone ID: PAT_MRT4530_39960C.1.pep
HEVACTSMIYCNIFHICKLSKCNWCSHQISDHFQQHPASGLMXPSRQYIRETCRHP

SEQ ID NO: 138585 - protein, 811 aa, Oryza sativa
  Clone ID: PAT_MRT4530_39961C.1.pep
MAEERESFEGQWAASDATEENLKEMVAHGVLPAKEIIGWRPAYGEAFPSPDTHEIVVFSHFFYGGFALPTSRFFRGILNFYGISLHHLNPNSIVHIANFVHACEAFLGIKPHFALFRRIFFLKPQPNKNKPCVVGGAGFQLRGTLSQKYFSMPFKTSNKGWHANWFYVQNPEPALPGYSCLPPVYQDTWNSLPIGDEAVQALELLDRMLKLKEQGLQGEQITRHFIKCRLAPIKERSRTAFEFDGRYDPNREESDSLDFRIMKERMYKIFSNAIVVSYSHQLPVVPYNAFNPPPQEYALMKSDPPVTQRRSPRQHTAQGGGGPTIRPDPQPQTSKSTGQTGPRKRKLVLDDDEGDDDKSGDKGSPNKPPKRTMPRKKLAGRAMPKIRTSSRKPSDIDPSGKDPDPAMTEQNISKDPELTTENQPTAESQPTGAHASGDRANPSDLPPTGNQSATTETATTQEPPTGNQSDAGPDQEIPEVGAQTTASQGPEAGNDSIAGSSGPSGDDGEEIPRIKATDDSRPPILIKWWDENSQAAGIVINRQKEDEEVCQLKKALGEATRIVNRIHLRNEAKTTTLEKLVPHLGTLEAVRDQLHETKELAKKTEKELRDRIAQLQESNYELSGSSKAQAARMEQMAKQIEALERDKTELAAQRDSALKEVEDRKIKSQAQFDVLVGKIKRLEGARDDVANAAAPIIQAMFLNNGGPSALDATEIFDKLSVAPEVYFKNIKKAGSMGAGMALAMTKSLYPRIEVDTIDGFADGTSEEAALDLISSAQTAADKIASDVVEQFRNNDLQPSNDDSDDERTDSD

SEQ ID NO: 138586 - protein, 80 aa, Oryza sativa
  Clone ID: PAT_MRT4530_39962C.1.pep
SYNQFCHRRSSPDTENEGKKNADTTTYKSYVWNFDGWLRTDAQIRLFVHAGSKVSSGSKITLDKILSFGEVPSIQERLHV

SEQ ID NO: 138587 - protein, 811 aa, Oryza sativa
  Clone ID: PAT_MRT4530_39963C.1.pep
MAEERESFEGQWASSDVTEENLKEMVAHGVLPAKEIIGWRPAHGEAFPSPDTHEIVVFSHFFYGGFALPTSKFFRGILNFYGISLHHLNPNSIVHIANFVHACEAFLGIKPHFALFRRIFFLKPQPNKNKPCVVGGAGFQLRGTLSQKYFSMPFKTSNKGWHANWFYVQNPEPALPGYSCLPPMYQDTWNSLPIGDEAVQALELLDRMLNLKEQGLQGEQITRHFIKCRLAPIKERSRTAFEFDGKHDPNREEPDSLDFKIMKERMYKIFSNAIVVSYSHQLPVVPYNAFNPPPQEYALMKSDPPVSQRRSPRQHTAQGGGGPTIRPDPQPQTSKLAGQTGPRKRKLILDDDEGDDDKSGDKGSPNKPPKRTMPRKKLAGRAMPKIRTSSRKPSDIDPSGKDPDPAMTEQDISKDPEPTAENQPTAESQPTGAHASGDRANPSDLPPTGNQSATTETATTQEPPTGNQSDAGPDQEIPEAEAQTTTSQGPEAGNDSIAGSSGPSGDDEEEIPRIKATDDSRPPILIKWWDENSQAAGIVINRQKEDEEVCQLKKALGEATRIVNRIHLRNEAKTTTLEKLVPHLGTLEAVRDQLHEAKECAKKTEKELRDRIAQLQDSNFELSGSSKAQAARMEQMAKQIEALERDKTELAAQRDSALKEVEDRKIKSQAQFDVLVGKIKRLEGARDNVANAAAPIIQAMFLNNGGPSALDATEIFDKLSVAPEVYFKNIKKAGSMGAGMALAMTKSLYPRIEVDTIDGFADGTSEEAALDLISNAQSAADKIASDVVEQFRNSDLQPSDNNSDDERTDSD

SEQ ID NO: 138588 - protein, 826 aa, Oryza sativa
  Clone ID: PAT_MRT4530_39964C.1.pep
MAEERESFEGQWASSDVTEENLKEMVAHGVLPAKEIIGWRPAHGEAFPSPDTHEIVVFSHFFYGGFALPTSKFFRGILNFYGISLHHLNPNSIVHIANFVHACEAFLGIKPHFALFRRIFFLKPQPNKNKPCVVGGAGFQLRGTLSQKYFSMPFKTSNKGWHANWFYVQNPEPALPGYSCLPPVYQDTWNSLPIGDEAVQALELLDRMLNLKEQGLQGEQITRHFIKCRLAPIKERSRTAFEFDGKYDPNREESDSLDFRIMKERMYKIFSNAIVVSYSHQLPVVPYNAFNPPPQEYALMKSDPPVTQRRSPRQHTAQGGGGPTIRPDPQPQTSKSTGQTGPRKRKLVLDDDEGDDDKSGDKGSPNKPPKRTMPRKKLAGRAMLKIRTSSRKPSDIDPSGKDPDPAMAEQNISKDPEPTAESQPTAKSQPTGAHASGDQANPSDQPPTGNQSATTEAATTQEPPTGNQSDAGPDQEIPEVEAQTTASQGPEAGNDSIAGSPGKEQRSPHAQLGTSSGPSGDDGEEIPRIKATDDSRPPILIKWWDENSQAAGIVINRQKEDEEVCQLKKALGEATRIVNRIHLRNEAKTTTLEKLVPHLGTLEAVRDQLHEAKECAKKTEKELRDRIAQLQDSNYELSGSSKAQAARMEQMAKQIEALERDKTELAAQRDSALKEVEDRKIKSQAQFDVLVGKIKRLEGARDDVANAAAPIIQAMFLNNGGPSTLDATEIFDKLSVAPEVYFKNIKKAGSMGAGMALAMTKSLYPRIEVDTIDGFADGTSEEAALDLISSAQNAADKIASDVVEQFRNNDLQPSNEDSDDERTDSD

SEQ ID NO: 138589 - protein, 64 aa, Oryza sativa
  Clone ID: PAT_MRT4530_39965C.1.pep
HEASTGCNEQRARRNLIGIRRWLRRGHVFAVVAVRQLRAARRRLDEGGGVRWLSGWSKGTCHLL

SEQ ID NO: 138590 - protein, 95 aa, Oryza sativa
  Clone ID: PAT_MRT4530_39966C.1.pep
FSPLVAFDPKGKGPFFWGKTAEGFVPFSKDIDLFKGSWGKSLAPFPKGCFYSNAFGGLKCFKNPKNKVAAVPANKKKICGAPFRVEGAAILTALP

SEQ ID NO: 138591 - protein, 811 aa, Oryza sativa
  Clone ID: PAT_MRT4530_39967C.1.pep
MAEERESFEGQWAPSDVTEENLKEMVAHGVLPAKEIIGWRPAHGEVFPSPDTHEIVVFSHFFYGGFALPTSKFFRGILNFYGISLHHLNPNSIVHIANFIHACEAFLGIKPHFALFRRIFFLKPQPNKNKPCVVGGAGFQLRGTLSQKYFSMPFKTSNKGWHANWFYVQNPEPALPGYSCLPPVYQDTWNSLPIGDEAVQALELLDRMLNLKEQGLQGEQITRHFIKCRLAPIKERSRTAFEFDGKHDPNREEPDSLDFKIMKERMYKIFSNAIVVSYSHQLPVVPYNAFNPPPQEYALMKSDPPVTQRRSPRQHTAQGGGGPTIRPDPQPQTSKLTGQTGPRKRKLVLDDDEGDDDKSGDKGSPNKPPKRTMPRKKLAGRAMPKIRTSSRKPSDIDPSGKDPDPAMTEQNIPKDPEPTAENQPTAESQPTGAHASGDRADPSDLPPTGNQSATTETATTQEPPTGNQSDAGPDQEIPEVEAQTTTSQGPEAGNDSIAGSSGPSGDDGEEIPRIKATDDSRPPILIKWWDENSQAAGIVINRQKEDEEVCQLKKALGEATRIVNRIHLRNEAKTTTLEKLVPHLGTLEAVRDQLHEAKECAKKTEKELRDRIAQLQDANFELSGSSKAQAARMEQMVKQIEALERDKTELAAQRDSALKEVEDRKIKSQAQFDVLVGKIKRLEGARDNVANAAAPIIQAMFLNNGGPSALDATEIFDKLSVAPEVYFKNIKKAGSMGAGMALAMTKSLYPRIEVDTIDGFADGTSEEAALDLISSAQNAADKIASDVVEQFRNNDLQPSNEDSDDERTDSD

SEQ ID NO: 138592 - protein, 128 aa, Oryza sativa
  Clone ID: PAT_MRT4530_39968C.1.pep
MFLQVTTSFQMLQATCTKQERLSRTELRRCGHAAAVSRRAASSWPPPRRWPPPASWPPSCPPPPPPPRSSPSPSSPGQGTRPRRAAATRARRFPPPPPPSAPSPPPSSPSSRRRPPSSSRDPTSSAPA

SEQ ID NO: 138593 - protein, 704 aa, Oryza sativa
  Clone ID: PAT_MRT4530_39969C.1.pep
MAPTPPVPLPNPAGSAAAAVLPRPAWNTNRNLVVTHPLLSLLESCASFRRLLQLHALLTVTGLAAHRFPASRLLAFCALSTPPRLAHAAAILARASPGPNAYMLGTMMRGFLRARLPARALGLFRRVVRDRLPADARTFVFAVKAAAAAAESEHGGTPSGGEAIHCAALKCGFVGESVLVGNALVHFYANHKSLDDAGKVFDEMPERDVVSWTTLVDGYARAGLADEAWRLFCRMVVVGGMRPNAVTLVAAVSAIGQMGLLAFGIMLHKYVTEGGVARSVNLDNALVDMFGKCGCVRYAREVFDGMEVKDVYSWTSMVNAYAKCGDLESAEQLFKDMPRRNVVSWSCMIAAYSQLNQPEEAVWLFREMIAASVDPIDATLVSVLSACAQLGCLDLGRWIYENYIVSNKIGLTVNLGNALIDMFAKCGDVGEASKLFDEMAERNVVSWNTMIMAHAVHGQSEEAIRLFEQLKGENIVPDQITFLGLLASCSHSGLVSEGRRYFKEMEMFYRIEPRVEHYACMIDLLGKVGLLEEAFEVARGMPMEADEAGWGALLNACRMHGNVEIGACVADKLVELDPSDSGIYVLMSQIYASKNKWDQVKMLRMTMRDRGVKKNPGCSSIEVEGKFHDFLVADVSHACSEEIYSALKNIYFHLKQEDMSWQGTIGNLIEPRFLSFPFSYKQTTVLDGIATELLLGEPDPLQSP

SEQ ID NO: 138594 - protein, 714 aa, Oryza sativa
  unsure (1)..(714): unsure at all Xaa locations
  Clone ID: PAT_MRT4530_3996C.1.pep
MECENGRVSANGMSGLCVAAPRADPLNWGKATEEMTGSHLDEVKRMVAEYRQPLVKIEGASLRIAQVAAVAAAGEARVELDESARERVKASSDWVMNSMMNGTDSYGVTTGFGATSHRRTKEGGALQRELIRFLNAGAFGTGTDGHVLPAEATRAAMLVRINTLLQGYSGIRFEILEAIAKLLNANVTPCLPLRGTITASGDLVPLSYIAGLVTGRENAVAVAPDGSKVNAAEAFKIAGIQGGFFELQPKEGLAMVNGTAVGSGLASTVLFEANILAILAEVLSAVFCEVMNGKPEYTDHLTHKLKHHPGQIEAAAIMEHILEGSSYMKHAKKLGELDPLMKPKQDRYALRTSPQWLGPQIEVIRAATKSIEREINSVNDNPLIDVSRGKALHGGNFQGTPIGVSMDNTRLAIAAIGKLMFAQFSELVNDFYNNGLPSNLSGGRNPSLDYGFKGAEIAMASYCSELQFLGNPVTNHVQSAEQHNQDVNSLGLISSRKTDEAIDILKLMSSTFLIALCQAVDLRHIEENVKSAVKSCVMTVAKKTLSTNSTGDLHVARFCEKDLLKEIDREAVFAYADDPCSHNYPLMKKLRNVLVERALANXRGRVQRRHLGVRQGRAVRGGXLRATLPGAIEAARAAVENGTAAIPSRITECRSYPLYRFVREELGTKYLTGEKTRSPGEELNKVLVAINEGKHIDPLLECLKEWNGEPLPIC

SEQ ID NO: 138595 - protein, 65 aa, Oryza sativa
  unsure (1)..(65): unsure at all Xaa locations
  Clone ID: PAT_MRT4530_39970C.1.pep
ILTRMNFNKYINAALYVLYVKSQVKVFATLMXTFTKTYVYILNEGTETFIVQSQIRKKKKGAHVL

SEQ ID NO: 138596 - protein, 94 aa, Oryza sativa
  Clone ID: PAT_MRT4530_39971C.1.pep
MRARWVAAAEAVLLLTAAVAAARVDLDDDGHHSEVLDELLAEDEEEERGELGGGGEAARKPFVRGDRHGVRRALGRHGRYQHAGLPSLAGASLH

SEQ ID NO: 138597 - protein, 1448 aa, Oryza sativa
  Clone ID: PAT_MRT4530_39972C.1.pep
MAEGFISLTQGTEIDRVAENYFYELVNRGMIQPVDVDYNDEVISCTVHHMVLDVITNKSMEENFVTVIDCSETSIGFPHKVRRLSLRFSSTKYATNLANITLAQVRSWYFVGLTNFVPSIMEFKLLRVVILQLWGCHDGQSSFNLTNIGRLFQLRYMKISCNISVDLPLKMQGLQYLETLEINARISAIPSDIVHLPRLFHLHLPCITDLSNGIGSMRSLRSLGYFDLCNNSEDNIRNLGELTNLQDLRLTCSTVPFDRLERNMEVVSSFLWRLGNLKSLSLVPSHSASSKCISCDGLRIVSTPPRLLQKLELLMPIGVFSRLPKWIGQLDKLCVLKIVVREVLRYDIDNLIGLPSLSILSLNVRTVPSSKIIFHKTAFPALKYLKFKCRLLCLSFEEGAMPNLKRLKLGFNAHGAEEYCSTSVGIEFLLSLTEINGVIGVFGASKSDRIAAERVLINVSKVHPGCPSINIHQVDCIFDGNEAMSSKAEEKAYMSLQETQCQILEKVLTDQHGILELNTQKNKEGRVVRRASPLCILAGTSFSRFPDTSGPLAASPPQLPYIEHERDKGRKREREMASVSVSTGVMNSLLEKLNSLPCEENYNLKGVRNELVLLKSQLSELNILLEVLAEMDEPAPLAEKWMSQVKELTYDVEDYIDDLSCQGHYYAGLVGIEGPKNKLIKLLMNVHAEQGLKVLSIVGFGGLGKTALANEVYHELGEQFEYRVFVSVTQRPQIAVLLRNMLSQLGEQKSAESNDVQYLISKLREHLNNKRYFIILDDLWDESVWNILSCAFPTNSHGSRVITTTRIETVGRACCAYQADFIYKMQCLNAKDSETLFFSRIFGSKDQCPENLEEGLVEIVRKCDGVPLAIVTVAQHLASRQTTFKEQLESLRSSLCTILGTCSTFQGIRHTLNLSYINLPNYLKTCLLYLGIYPTGYTIRKDDLVKQWVAEGFASSMHGQDAEHVAKGYFNELVNRSVVQPVDTDYNDEVLSFRVHSSMLEFIRYKSAEENFLTVVDQLGATRGRPDKIRRLCLHVNESSAFRIPASFDLSQVRSLLFFGASVMDVSEYRFLRVLILQSFDSGLLQEIDLTGIQALFQLRYLKVSAYITLLPRRIGMLQYLQTLCIEGSRLLYMPPDIVCLPNLSHLIVPSQTSLPDGICNLKSLRTLKCFDLDMNSSKNIKGIGELTSLIELDYFFDGRKLKTEKQDALCCSLGKLAYGKLKYLYISAPGSGYNASRLSNVSPSPQHLEKLVLSGCWFLHVPKWIKELRELYSLVLSVEDLDMSDVRALGGMPTLVHLFLETRRGPMENSITITDKSFPALKHFEFSCRAPCLIFQAGAMPQVERLSLNFAADGWNKCNSEAIGIERLTELKEICVQVLGSGANRLNTESRILAEVYYYFEQFHAHGKNVRYSYNNDVDHSYFNDDGDDDYNGDSDTWRVRRLKILP

SEQ ID NO: 138598 - protein, 111 aa, Oryza sativa
  unsure (1)..(111): unsure at all Xaa locations
  Clone ID: PAT_MRT4530_39973C.1.pep
AQRKKALRRQRNPRDVARVDVEEVVDRTRSTFSFPCILLAVVPRRSAPQCSGASTGSMTRAFKARRTPIQTPIRSSCILGCNPKILFRSTCQQRPLAECTDXLGIHKDHIG

SEQ ID NO: 138599 - protein, 523 aa, Oryza sativa
  Clone ID: PAT_MRT4530_39974C.1.pep
MAARQRPQAQLARINAMRHSYTAAGDDGSGDDVCGELDDGGGEYASQTSFRIRGGRGAAEVTAIFRKLGLSGPEDFTIPPAVYAAAMSHLSSSARRRASLEVASPPELLEASPAEAAVPMNREAVEKGEEAGPAPKLVQSEVTEVSTRAYANATPAAESSIRVVAPSATKFVQAEAIEVSTRSYARPAASVRSVASKRALLKQDSADEDKEKGKLVRLDKSREEIRGEVVVEATRETTGASALVVEATRESTSRDIEHLISPSPHRRFRRTITSWLKGEHLGSGSFGSVYEAISDDGFFFAVKEVSLIDQGINAKQRIVQLEHEISLLSRLEHENIVQYFGTDKEDGKLYIFLELVTQGSLAALYQKYRLQDSQVSAYTRQILIGLNYLHQRNVLHRDIKCANILVDSNGLVKLADFGLAKEMSILSQARSSKGTVYWMAPEVAKAKPHGPPADIWSLGCTVLEMLTGKVPYPDMEWTHALLKIGRGIPPEIPATLSEDARDFIIKKAVDAEDDPKSLAMIQR

SEQ ID NO: 138600 - protein, 106 aa, Oryza sativa
  Clone ID: PAT_MRT4530_39975C.1.pep
ANILVDSNGLVKLADFGLAKEMSILSQARSSKGTVYWMAPEVSLTAKPHGPPADIWSLGCTVLEMLTGKVPYPDMEWVSISLVLLSSNSIPFLNTKCTDIRGLHAI

SEQ ID NO: 138601 - protein, 83 aa, Oryza sativa
  unsure (1)..(83): unsure at all Xaa locations
  Clone ID: PAT_MRT4530_39976C.1.pep
IWSLGCTVLEMLTGKVPYPDMEWVTHALLKIGRGIPPEIPATLSEDARDFIIKCVKVNPNDRPSAAQLLXHPFVQRSLQHKGA

SEQ ID NO: 138602 - protein, 169 aa, Oryza sativa
  Clone ID: PAT_MRT4530_39977C.1.pep
TRLIALVPAYEACFVPAMRRATGVDTGITPLQRIGVGLFAVTFSMVAAALVEAHRRRHAGLLSIFWIAPEFLVFGVSEMFTAVGLIEFFYKQSLSGMQAFLTSMTYCSYSFGFYLSSLLVSLVNKVTSGDVAGGGGWLSDNDLNKDRLDLFYWLLAGLSLLNFFNYLFW

SEQ ID NO: 138603 - protein, 82 aa, Oryza sativa
  Clone ID: PAT_MRT4530_39978C.1.pep
PTKGLFRRPQGPGFFFKTRGGGEGPGPKKREGVWPKFFKTKGEKETPHPKKRAFRIKNILRQRNLGGGFPNKNGKIVVGWIH

SEQ ID NO: 138604 - protein, 145 aa, Oryza sativa
  unsure (1)..(145): unsure at all Xaa locations
  Clone ID: PAT_MRT4530_39979C.1.pep
MGHVFQQRCXAADHLHKHGIDRRSTCPFCAQKHEIASHIMLDCVFARXVWHYIRSPFGLPRLARPLRSDSLQVWWPVDRACLPXHLRKAFDSLVLLVSXQLWKERNARVFDSXLSPVSMVFQYIHXEVRLWSLAGPVSFGSLLGD

SEQ ID NO: 138605 - protein, 132 aa, Oryza sativa
  unsure (1)..(132): unsure at all Xaa locations
  Clone ID: PAT_MRT4530_3997C.1.pep
KYHKYLGLPTLVGRSKEGAFKNIKXKMWEKISTLKWQGLSKSGKENLIKFVLLTIPTSTLSVFQISKGLCSQIXDLHSMISDFWWGAKKGQRKTHWIEWQRTCRTKRNGGSGFRDLHDFNQALLARQGWRLL

SEQ ID NO: 138606 - protein, 378 aa, Oryza sativa
  unsure (1)..(378): unsure at all Xaa locations
  Clone ID: PAT_MRT4530_39980C.1.pep
MSARDRETAVALARLAAALDGAVLGLGTAALAVASWVKWLAASGQLRRIASAPAAAIPDLRSLLAEYGGRRRXGDQPILAEVRGHVRAAPRGKYLVPPGSGEHCVVAKHTQLCLFNEWRGIFGWTFDLHALFFKSIKEQIITSFRWVPFVYVDPENLTGMVHVKLDLAMQPLPLTTVYHKLTPVDSTPYTLFQTIIGNGYPIALLDEEKILPVGKEITAIGYIRPHKASVEISSCSEIPFFLSDLTKDEMEAELSSRAKTLFWASVVLGTMSVCLLGFATYRSWKKIKERREARQAQEVFRQTTDEVTDDQSSDEEAGEMGDGQLCVICLRKRRKAAFIPCGHLVCCCKCALIVERQFDPLCPMCRQDIRYMIRIYDN

SEQ ID NO: 138607 - protein, 346 aa, Oryza sativa
  Clone ID: PAT_MRT4530_39981C.1.pep
MQQQQQEMPQSRIFGQPPPPTQQQQQQQRGFGFGGAVPSPRGMPMAAGAAGPHLAVQQKQHTTTLAPPPPPQQQNQGSSSSARGMAAAAEQIAYEDAWKACNPDITTPFASVEDAISRLLPYHVFAEYEEDEIYAEDQPPAKDTSSVQEWDDDREAEAIRIAEEFEKQVLTFNVAVRKSAAGAARAEERLMVENLLLADEQRQSEHVRALVRQQQLVALQKQQQQQEKEAAALQRQLMLEQQQQQQAALQQMMAMEQRQQQQQMMSALQHQRQPAIVMPQQGHSSAAALDAFLDAYAEVGPPRQQHRHGVQAPQQPESSSTSGPAYWAPAHAVPPPPENGAGALRE

SEQ ID NO: 138608 - protein, 372 aa, Oryza sativa
  unsure (1)..(372): unsure at all Xaa locations
  Clone ID: PAT_MRT4530_39982C.1.pep
MALNEEYTYVELEKEPYWPFEKLRISITGAGGFIASHIARRLKSEGHYIIASDWKKNEHMTEDMFCHEFHLVDLRVMDNCLKVTTGVDHVFNLAADMGGMGFIQSNHSVIMYNNTMISFNMLEAARINGVKRFFYASSACIYPEFKQLDTVVSLKESDAWPAEPQDAYGLEKLATEELCKHYTKDFGIECRVGRFHNIYGPFGTWKGGREKAPAAFCRKALTSTDRFEMWGDGLQTRSFTFIDECVEGVLRLTKSDFREPVNIGSDEMVSMNEMAEIVLSFENKQLPIHHIXPGPEGVRGRNSDNTLIKEKLGWAPTMRLKDGLRITYFWIKEQLEKEKAEGVDLSAYGSSKVVQTQAPVQLGSLRAADGKE

SEQ ID NO: 138609 - protein, 56 aa, Oryza sativa
  Clone ID: PAT_MRT4530_39983C.1.pep
NMIPVSVGLEMLHFHDISVEECRYQEIGTVGNITKSTGRYRDSFHTNPRLIMPWYD

SEQ ID NO: 138610 - protein, 674 aa, Oryza sativa
  Clone ID: PAT_MRT4530_39984C.1.pep
MNPKLLFFPLLATLLLLCHHAHAVCEPATCGDLTIKYPFWLSGPDLNRSSLAIAACGHPSFELWCSRDGVASLRGSQILVLGIDYTNSSFVAGHKRVADGGDGVCRTDFNISSSLALSPFTISSSNRAICFLYSCNGTEPPEIDGLVNATISNCSKPIYAYLGGSYDRDKPPAIKAGNCTYSYLPVLWPESPVNLTAGTNYSPLFKKGFVLEWQKNGFGDCDACNASGGQCRYNNDSAAAFACLCSDGELRGTICAGSKKTGRRTILIVLTAAAAGLLLPCIYVLIWHGKGKQLRYFLYTKTSSTSERNIEALIISYGSIAPTRYKYSEVTKITSFLNYKLGEGGYGVVFKGRLQDGRLVAVKFLHDSKGNGEEFVNEVMSIGRTSHINIVSLFGFCLEGSKRALLYEYMPNGSLDDYIYSENPKEILGWEKLYGIAIGIARGLEYLHHSCNTRIIHFDIKPQNILLDQDFCPKIADFGLAKLCRTKESKLSMTGARGTIGFIAPEVIYRSFGIVSTKSDVYSYGMMLLEMVGGRKNAKSMVENSSEKYFPDWIYDHFALDDGLQACEVTSEVEQIAKKMTLIGLWCVQVLPMHRPTITQVLDMFERSLDELEMPPKQNFSELLEHPAQEINTESTSSTINTKAAQALSEVLRVEETSLVNSKDPTVTTNYAKR

SEQ ID NO: 138611 - protein, 390 aa, Oryza sativa
  Clone ID: PAT_MRT4530_39985C.1.pep
MDDRQAVKQTSNAIAGTTRKNQENWQEDHTNRKGKKLRHLLCTKTSSTSERNIEALIESYGSIAPTRYKYSEVTKITSFLNYKLGEGGYGVVFKGRLQDGRMVAVKFLHDSKGNGEEFVNEVMSIGRTSHINIVSLFGFCLEGSKRALVYEYMPNGSLDNYIYSENPKEILGWEKLYGIAIRVGRGLEYLHHSCNTRIIHFDIKPQNILLDQDFCPKIADFGLAKLCRTKESKLSMTGARGTIGFIAPEGIYRTFGVVSTKSDVYSYGMMLLEMVGGRKNAKQMVENSSEKYFPDWIYDHFALDDGLQACQVTSEVEQIAKKMTLIGLWCVQVLPMHRPTITQVLDMFERGLDELEMPPKQNFSELLDHSVHELNTESKSSTGNTKAAQA

SEQ ID NO: 138612 - protein, 134 aa, Oryza sativa
  unsure (1)..(134): unsure at all Xaa locations
  Clone ID: PAT_MRT4530_39986C.1.pep
MMKHLVETEKAAENAGPTYRNELAKDAGRLRPSTGVYSCWYLXRRSVDKYPDSPVLERQRVRYDGKAGEYKRMTYTEEYHIEKKLAAYISKLGIIKGDRCYKYGANCPEWIISMEAWDALSAIGKPLYDSHGAG

SEQ ID NO: 138613 - protein, 69 aa, Oryza sativa
  Clone ID: PAT_MRT4530_39987C.1.pep
MAFSLPRPSLWRGVTRGGSGEPSSAKTRAAKTWKEGLEAGGREEGVLSQRDLAILEAKAERFNRYVCSN

SEQ ID NO: 138614 - protein, 77 aa, Oryza sativa
  unsure (1)..(77): unsure at all Xaa locations
  Clone ID: PAT_MRT4530_39988C.1.pep
RKKQNKXKNPGRKNLQHHRKEFRKXYPXTGSQKSXTKXXNRPAVWQKELLKKALFNYPPPTVKXSXFXSRPFHSEPS

SEQ ID NO: 138615 - protein, 68 aa, Oryza sativa
  Clone ID: PAT_MRT4530_39989C.1.pep
PGRHTLVDLTPSQNHFSTWQTQMAELTTAADVTGDPPAAPGPTAPPEPVSRSRSLPSRRTLLLLLRSM

SEQ ID NO: 138616 - protein, 121 aa, Oryza sativa
  Clone ID: PAT_MRT4530_3998C.1.pep
MDNMPLHKIAKDKIPLNILSSLYFATLSRFKTKIPPNVKRGRERGATAAVLVACGQRACGDGWREGKEDGAAQGGRTAPPGGRGEGQRRRPREEGANRGEEDGTADRVRALTGGRSAAPRR

SEQ ID NO: 138617 - protein, 58 aa, Oryza sativa
  Clone ID: PAT_MRT4530_39990C.1.pep
FIIDLYDPKFQKSHMMMYDFYFSTITQLIIIGSPIPVPDTHQPGANGVRGQPLIVVSG

SEQ ID NO: 138618 - protein, 88 aa, Oryza sativa
  Clone ID: PAT_MRT4530_39991C.1.pep
FFLARNTSINFIRKGTPETRIHRSVRSYLRDATRPHTNLSFPRGGIAKYTSSHTSKTNKIKPPRSSNSAPETRVLDLTYVAGVGEIEI

SEQ ID NO: 138619 - protein, 221 aa, Oryza sativa
  unsure (1)..(221): unsure at all Xaa locations
  Clone ID: PAT_MRT4530_39992C.1.pep
STHRSHTLQGTSHCHSPLPSSTSSNSRPHHTHCLHTQQHRNFEATHWFVAGWHSLSLSSIGISLGXITAATRSDTEGLSGVLXAQPPLHTMHRGIPISTQRXSVSTARHRFIHPLASRCAHIIFRHPQFQVTSTPCVFVTVLPNETSIIADMAHCTSHRNLLHSVNSGPSQPQSSVAHAYSGSRHVPTARQPDRQSCCESSKHSSLQGPIKHQPSTQAATG

SEQ ID NO: 138620 - protein, 223 aa, Oryza sativa
  Clone ID: PAT_MRT4530_39993C.1.pep
MGKRWLPLEANPEVMNQFMRGLGVPAEAGFCDVYGLDDEMLAMVPQPVLAVILLYPQDRKKESVASPSSTVESKKLSKNVYFTKQTIGNACGTVGIIHAIGNALSRIKLVEGSYFDRFYKQTADMDPAQRASFLEEDEEMEKAHSVAVSAGDTEAKDGVIEHYVCFSCVDDEIFELDGGNSQPISHGPSSPDSLLQDAAKVIKARIAQYPGSLNFNVMALSKQ

SEQ ID NO: 138621 - protein, 206 aa, Oryza sativa
  Clone ID: PAT_MRT4530_39994C.1.pep
PGIQGAVGFAALAVETMGQAGRIRPAGGPKSDARERRPSQARNGGQKANTPFSFQSGPAMPAVRTISLGKLPPVIKRTCRDSGLYMCSGDCLHRPLLCQTGPGRRHHCVLALGFDLTPGSGVACGLIKGAMEEASRQASASSRQRIDRSRKMRRRKQEENSKGIALIDHARRRRSMRRSIEIASQINAIPLESSTSFLRPIYMSAG

SEQ ID NO: 138622 - protein, 137 aa, Oryza sativa
  Clone ID: PAT_MRT4530_39995C.1.pep
HQLVRHGIPSSLPSTWLSKSLVLCLGGQNTGRLSSKLCSVTSYICGEINSSARYGGQPLWEQSFTHLRISLDNGEHTQFDIVTILGAKSLHKAERRSVGYGFILVAIIMMRLVRRVIFWLSSLEHRFEHVGSRHEYY

SEQ ID NO: 138623 - protein, 114 aa, Oryza sativa
  unsure (1)..(114): unsure at all Xaa locations
  Clone ID: PAT_MRT4530_39996C.1.pep
YGGSPASLELKGRGQNICAESLRTGDALDTRRTCPAPPALAKRAKKQPWRYFGQVGSRQAHHAPCXEHTGESPTVSDXPEVIRIARLEGFLKYCDXEPASNDKIADKTRQRVDL

SEQ ID NO: 138624 - protein, 162 aa, Oryza sativa
  unsure (1)..(162): unsure at all Xaa locations
  Clone ID: PAT_MRT4530_39997C.1.pep
FYAWVALHEARELLLRDMINMLLRHGASANERTVGQGGTEDLLPRXIAADNTSVLKYLEDNICATQIDEDYVYKLIHLMSLPEMKILLDTTRLFAEKTDNCWEELWNYMKDGMLEQXAGILLTGQKQIEKVKPEGSDDIVQRLCWAAIHSXKGDTGKAQKQL

SEQ ID NO: 138625 - protein, 787 aa, Oryza sativa
  Clone ID: PAT_MRT4530_39998C.1.pep
MGKSGAKKKKPAAAASASAAATKSSPAATEPKAPTQSQPPAANGAAPHLVDPAVLLRRAHELKEEGNRLFQSRDYGGALRQYELALRLAPRGHPDRAVFHSNRAACLLQLRPVDHKAVAEECSLALQAEPLFPRALLRRARALEALGRHELALTDALALLALDPDHQDAVDLVHRLRSRILSPSSSASGSATSTPEPTSRPSPAALGASAVVAGLGPSLPARPFPKKPSPPPPPAQQQQSVPPMSKFNPSPPSPKLVPFSNSPPSSANASAAESSQKVTPTPLVPSSLSLKDKALMDKKVVTRSRPLKLVYDHDIRLAQMPEKCSFRTLREVVASRFPSSKAVLIKYKDADGDLVTITCSAELRLAESCVDIAGSEVIEDGARHGQKLPMLRLHIVEVSPDQEPPMPTEEEKLEQDNELLVKGEDNSPHASAAVVTDAEVTKQDVENVVAEAEQNTLTGKKDCGHAECKEAEIDDWLLQFADLFRNQVGVDADAHLDLHELGMELCSEALEETVTSEEAQALFEMAAAKFQEVAALALFNWGNVHMCAARKRIPLDESAPKKVMSAQLCTAYDWVRDRYALAGSKYEEALKIKPDFYEGLLALGQQHFETAKLHWSFALADKVDLSAWDSSQTFKLFDSAEHKMRAATEMWEKVEEQRMAELKEPSSEALKKRKKQHNADGQGELTPEEAAEQAAVMRQQIHLFWGNMLFERSQVEFKLDIADWKKNLDASIERFKLAGASESDISAVLKNHFSNTVSECEDKKIMTLDTGISQISNNIEDKCILES

SEQ ID NO: 138626 - protein, 72 aa, Oryza sativa
  unsure (1)..(72): unsure at all Xaa locations
  Clone ID: PAT_MRT4530_39999C.1.pep
RTRGRTRGRTRGPYTGSMSSLSLEPSNTATPSSGXSRMMVSSSSVVGNDDHHLCNMSSSYVSGRHLHSGVVP

SEQ ID NO: 138627 - protein, 43 aa, Oryza sativa
  Clone ID: PAT_MRT4530_3999C.1.pep
HAITADSLGPASRRVEYGAGRRPPSSTDYGGASFVTGQRRHCV

SEQ ID NO: 138628 - protein, 103 aa, Oryza sativa
  Clone ID: PAT_MRT4530_399C.1.pep
MRVMHEWYLKVSRKALSFISVKVPRDDFMSKTNEIFIINFRDLHALFKLDKMDINLVVAFCVTTIFYSRARKFYVKHHRPVKDVQRKKLHVKTDWPIPQIILM

SEQ ID NO: 138629 - protein, 80 aa, Oryza sativa
  unsure (1)..(80): unsure at all Xaa locations
  Clone ID: PAT_MRT4530_39C.1.pep
RRSDGXPHGLPHXNRXSXGGKLMVCXATAAADRLIPTVGXIPSARTGAGXLRGRGLVRWPTRNLHRRDRVVATPXDARRR

SEQ ID NO: 138630 - protein, 59 aa, Oryza sativa
  Clone ID: PAT_MRT4530_3C.1.pep
TPCIDAVNTLNLQIPLKHPAEVTHSSQLKASIFHIKNIQKMLSLKTTHNLHKHPIPSSI

SEQ ID NO: 138631 - protein, 96 aa, Oryza sativa
  Clone ID: PAT_MRT4530_40000C.1.pep
KSSPTYVITSSMGIYLHHHHSSVSLATWQVEEASRGKAYILSRSGSIDQAIQYFRVPSPFAEQTICKSKGTSLAGIIKLAHEPWERDDQEVQECKG

SEQ ID NO: 138632 - protein, 61 aa, Oryza sativa
  Clone ID: PAT_MRT4530_40001C.1.pep
GARAGLGNSRLPVHPALSVLITNKWPIRMIPIQWRGSPDQAAPVLPIHTFENSVRRQWRPR

SEQ ID NO: 138633 - protein, 30 aa, Oryza sativa
  Clone ID: PAT_MRT4530_40002C.1.pep
LCLTERSTPKEKPQKRERSEGKKQKGGSSG

SEQ ID NO: 138634 - protein, 144 aa, Oryza sativa
  Clone ID: PAT_MRT4530_40003C.1.pep
MVVLRILCLFFCAAAFRMAFLATNKAPIWLTPIATMIVAVAFQMCWSTLRLCFQVASLWLGLAAPHPGRNTLAVLTVEWILMLVTFGTGWSTVAMVVFLKRDTNLCSELPMFSAEQQQRNIYKSLSIKSLLCSNIQINRSTNLK

SEQ ID NO: 138635 - protein, 74 aa, Oryza sativa
  Clone ID: PAT_MRT4530_40004C.1.pep
SNHHLFNPLKTHYSPLFTQLHIFILGRKFKLHSYTYFKRKKHGLSNPTHISSFFPSSWNGSYFYRQQLCPNHHQ

SEQ ID NO: 138636 - protein, 47 aa, Oryza sativa
  Clone ID: PAT_MRT4530_40005C.1.pep
TGRTKLMHNGLIAVTKEGLHYITQVNSSIRALWARRPVFELIDYTRC

SEQ ID NO: 138637 - protein, 40 aa, Oryza sativa
  Clone ID: PAT_MRT4530_40006C.1.pep
MVEQDWKKVTKRPVGWFEQDVRHIEADRMTCPCAPVSAAP

SEQ ID NO: 138638 - protein, 406 aa, Oryza sativa
  Clone ID: PAT_MRT4530_40007C.1.pep
MSRPLLVGDTATAAGPEAESIAAPAPPCSSRTKTILFPLLRRHWTASLLLLAKDLRPRPPPLPLLIHGKIVAPAARRGVGEWRRRATVARADAALPLRPDLGGRGGSAAFATIAPSSSRIWELGREERHLRRMRWLPPPSLPSYSLIQERGEIGSGRKGVDGALPSLGEGEGAPPLGSGEGETEAPQPETASLQNRVRPRSCASPRRSPSSGWEARRREWGGTSVAAATRPRSRASPRRSASSGWEARHREWGGTRRVEEAAVLLPAVGNTLRPRRTSNFGGLDSLMEFSVRARTGWPPTSSPARGDTAAWLRTMENAALFPVPARCLWKCPRGCVVLYCEMPCPCSVVLYCGKCPSPALLPGMMQTPNWNMDGAASMEQHGLLHDVLSSTRRARVGRPSACTTAP

SEQ ID NO: 138639 - protein, 624 aa, Oryza sativa
  Clone ID: PAT_MRT4530_40008C.1.pep
MSPAACRRPSANRAPSPMPPAVNLAANRAPTAHQPAARRPPRAARRAPAAVDPAARRAPAAVDLATNRAPAAVELVGVESEGDGLMGGREGSANSAPKNRGSGLFDIAPAPAVPRLAVAGSASQLRGSPPPRLRQAAVVAASGRSPNPSPSRGGEDVMEEAVLLHACCSIHAAPSSYIVPRLLMLDEQLAGLGHFPQYRTTEQGQGISQYRTTQPRGHFHKHLAGTGNSAAFSIVRSHAAVSPLAGDEVGGQPVRALTLNSINESRPPKLEVRRGRSVFPTAGKSTAASSTRRVPPHSRWRASQPDEADRRGEARLRGRVAAATLIWPKGEGSIGSSDGGAPSPLSDSSASSRCDDLTMDEQRERRSDAVQWRRSSGNSIVFVLDEQGGAGAAIDSASGPAAVAVSPTSSGLDIWRAQHSVIELTAQLASEFVPSVRVQAQQQSPGPACSTRNKPTSMAAANDGADAGDSKILLISSDGQHFQVTEAEASMSKLVSNMIEDDCTENGVPLPNVASNVLAKVLDYCKKHAAAAAAAAEDVAVKDQELKSFDASFIDVDNTMLFGLILAANYLNVPSLLDLACQHTADLIKGKTVQEIRDTFGIVNDFTPEEEEEIRKENEWAFEN

SEQ ID NO: 138640 - protein, 167 aa, Oryza sativa
  Clone ID: PAT_MRT4530_40009C.1.pep
MAAANDGADAGDSKILLISSDGQHFQVTEAEASMSKLVSNMIEDDCTENGVPLPNVASNVLAKVLDYCKKHAAAAAAAAEDVAVKDQELKSFDASFIDVDNTMLFGLILAANYLNVPSLLDLACQHTADLIKGKTVQEIRDTFGIVNDFTPEEEEEIRKENEWAFEN

SEQ ID NO: 138641 - protein, 300 aa, Oryza sativa
  Clone ID: PAT_MRT4530_4000C.1.pep
MNEHLRFEDGWKILEQGIVKCSKLLEDCPGGRPTVNEYMNYYDCAYRMAVQKDQYCQEMYNSYKATHESCVCAMVLPHLMHKQGDLFWRELVKMWSNYCAMIRFTTGFLAYLDRCFVTHKKLPSLEDAAATSFFSPVFSYFNNEISDVLLTLIRQERDGCNVDMDLLMGIMRGICRSEVKTKLKSAVIQDTYLYYSRKSYEWIVQYPLQDYLAKVQETVQKEMKRLIHYLCISEEEGSGLCLKAVSAPLMQAYENYTKEKHIGGQVLLQTYKTVEDDLLDRCSRLTIDNGLDNNSFSHME

SEQ ID NO: 138642 - protein, 153 aa, Oryza sativa
  Clone ID: PAT_MRT4530_40010C.1.pep
TRLRLYRLSFATPQRRRAFSLSQRRQRAIHSLPPRSDWMRGGQRRGGGAPLPLLSPQLLESGCTEGSDGGGSHRMRRRWRSSLPSSQIRLEEGAIVAKAALPPLPPRSGRRGRAASALATVARLLHSPTPRRAAGATILPWMSSGSGGGLGLN

SEQ ID NO: 138643 - protein, 155 aa, Oryza sativa
  Clone ID: PAT_MRT4530_40011C.1.pep
MERPRLKAVGASGGEDEGVDAEEAAQGRGPLLRRRHRGSPPPPPPPERLVAGAADLELGSESEETRAVNVNYQYYSIEEIVILSKLFLWLGRQATEATSFYRKQSFVEASRGMKVQNFAFRFVSVPVDLILQSTRKKDKRNTVKSINDSRSASCR

SEQ ID NO: 138644 - protein, 123 aa, Oryza sativa
  unsure (1)..(123): unsure at all Xaa locations
  Clone ID: PAT_MRT4530_40012C.1.pep
EEPSTFESEHIPSTSQDSTFEPSPEPRELEEEEIQPSEIPFXFEDDLFEDYGNTSDYLCQKRPPIPSSPSNPLEESFLKETDQISWHAVSTRVSNDGCRGRCTHNRYQGPTRSCHVEGGGERG

SEQ ID NO: 138645 - protein, 84 aa, Oryza sativa
  Clone ID: PAT_MRT4530_40013C.1.pep
CRPPPAAVRPPTARRPRCRPPSTSPPTARRPRTNPPHAAHHVLLAVRRPPSTPPPDVRRPPSTSPPTARRPPSSSSEWRVRVTA

SEQ ID NO: 138646 - protein, 264 aa, Oryza sativa
  Clone ID: PAT_MRT4530_40014C.1.pep
MDGHSCGDLGRVSEVISDGTSSGSADGGKSLPEKHSALADATSGVAAENADNLSQAGKYMDFSSTTSLGVKKGFQKCMTFPPSSGEAQQQQGSCCDADKNPKDVPTYERSVSLPPTLKIISAMKGSRQKNGMASSTESRHVKWAPDVYDPPVTSVCHSVNNSYQRRSKSRKKDKNKQKQKQKQKGRSKKNHQNAIQSSAVLQAPGEFDRLKDAETTSSNSAPDDLNKHETDILDYGISSQDAKCGSSFLRESAAKMHFSTAEAS

SEQ ID NO: 138647 - protein, 137 aa, Oryza sativa
  Clone ID: PAT_MRT4530_40015C.1.pep
DALFKCAFHGAILDLPGKHVVIIRAGLRPWFVWSYKFSSVSTVFAASPGWLVNPKVSSVLPLNYSFHWQSRIACCCMPVLLECKIEQKRSVSRGVILFSFPCASAVLFASDIFGSECNVHCCICSFCLHPTCPELPS

SEQ ID NO: 138648 - protein, 222 aa, Oryza sativa
  Clone ID: PAT_MRT4530_40016C.1.pep
TRPEDRTTLKDSRFRFVYSRKRSCRRKNGFLNTSEQDSDLKYRKVTGALFASVAGWGSVTENVTSRRHGILVLSQPLKSIYKIMSEACHVWLLNALVLLHRGAMVSLWPAVHLEILLVDDTLGLKHLLLETSLRSAVSLFCLLVGCFNSYSKASTRNESKMLCTSVRVRISGLHGRSQVVFLMFSFVGVKYPKWKHLQGQLQHLAPLFSLFFFIICPYVDFS

SEQ ID NO: 138649 - protein, 182 aa, Oryza sativa
  unsure (1)..(182): unsure at all Xaa locations
  Clone ID: PAT_MRT4530_40017C.1.pep
GXXGLXXGTNRXXLDXXWRXFXCDWKXTWXRMPMXIIGXISXXTXSXNVLAXXXCRXXIXXXSRYXQXWXWXXGASXILXXGXHXLRXXXQSEXXDFXPWGIXFPXVXAXEXIEXQFIFXXEXXPFXFXDXRWIXXXXXXREXCXTIRXLNXGGKVLXKKKKKKTRGGARYPIRPIVSRITI

SEQ ID NO: 138650 - protein, 120 aa, Oryza sativa
  Clone ID: PAT_MRT4530_40018C.1.pep
MAQGPAAPNDSPRKRFSGVAPPAALIFFVLVFAGGAIVTLDHKENLSILQLRPREMVVSETETRAPTSEVQETETRAPTSEVQEAGTGAAAGGVQRAELAGSSICENQCRPSGSEPLPKS

SEQ ID NO: 138651 - protein, 213 aa, Oryza sativa
  Clone ID: PAT_MRT4530_40019C.1.pep
MACGSGRGTAFTKMKNTVGAHRREGSGVGGVEGVTARRGGFVGGAKAATVWMCWAGKAVDRAAEIEPWKREDQRGLARGELALGVHGASCHAVETGRQSGKGKKKKGEEGKGALPMPSWEKGGGKERLCLRDLDARGLERPSMGGCGAQARRGQRGDDWVATGTPVGDANGRHHLRTPLHVIVTTPIEPSRRRCCPNKLSHVGVITAPNELSL

SEQ ID NO: 138652 - protein, 90 aa, Oryza sativa
  unsure (1)..(90): unsure at all Xaa locations
  Clone ID: PAT_MRT4530_4001C.1.pep
ERGAGDAHLCSATRLPPRLILLSVCGCPQLGFGTLWLDVTKTVDMPHWAECIAXHVDTDSSAWLGTVALVTNMRNFPISRRTVAGLIKVI

SEQ ID NO: 138653 - protein, 532 aa, Oryza sativa
  unsure (1)..(532): unsure at all Xaa locations
  Clone ID: PAT_MRT4530_40020C.1.pep
MNELVEPSSTICGHIFCKQCIKASIQAQKKCPTCRRKLTMNNFHRVYLPSADPKQGASTTRAAAATTQCIIHPTAPFNTHVSIPLTPTTITRGQAGEQEARKKKKTWWCRGGHTDVDAEGPAAPSATPRKRFSGVAPPAALIFFVLVFAGGAIVTLDHKELRPREMVVSETETRAPTSEVQETETRAPTSEVQEAGTGAAAGGVQRAELAGSSICENQCRPSGSEPLPKGIVQDKSNFEMEPLGGNPERRAAVARPAKSLLAIPVGIKQKAVVDKLVSKFPGDRFTVMLFHYDGEMDGWRELGWSDRAIHVAAKDQTKWWFGKRFLHPDMVAEYEYIFLWDEDIEVDGFDPIRYLRVVRRERLEISQPALDHRSQIHHRLTLRARKGQVHRRFYKTRGGGRCDDNSTGPPCTGWVEMMVPVFSRAAWRCAWHMIQNDLIYAWGLDFKLGYCAGGDRRLAVGIVDSEYVLHRGIPTLGDGGGKPAAKRXSSTATKAATDRLAVRQRSYTELQIFNRRWKAAAEGDVCWTDPYP

SEQ ID NO: 138654 - protein, 48 aa, Oryza sativa
  unsure (1)..(48): unsure at all Xaa locations
  Clone ID: PAT_MRT4530_40021C.1.pep
MGNDDHDVSGDVTIGGGSGVHARRRTTARQXERREPTRRGRRGELTGI

SEQ ID NO: 138655 - protein, 422 aa, Oryza sativa
  Clone ID: PAT_MRT4530_40022C.1.pep
MSDLAAERRYKEEHRKLMAYGMADGWAYGMADGWARDLMDKATEARWRVDLGSSVWVILLCVAACLALGVGFPLVDFLVLPSSENAGRIMLLVWALIGALIMAYYAWSHYRKRAAAQDVLAKAQDVFNQAGTPAATAFAMPAAAAAAAPPNPNVLQLAPRLRGLVSFPSSYSSSSPFSNRLRLRLPRAASMSAEARVPVAPPAHPTYDLKAVINLALSEDAGDRVLIFQYESDTLGIIFTPSGDVSCLATIPSDVKAEATFIAKEDGVVAGISLADMIFKQVDPSLKVEWFESDGNYVHKGLQFGRVYGCARNIIVAERVVLNFMQRMSGIATMTKAMADAAHPACILETWNTAQGLRLHDKWAVETRTLQEVKDLLEYAAENNTSLTRIMLDNIVAPLGNGDIDVSMLKDAVELIKCRWYS

SEQ ID NO: 138656 - protein, 177 aa, Oryza sativa
  Clone ID: PAT_MRT4530_40023C.1.pep
MPAAAAAAAPPNPNVLQLAPRLRGLVSFPSSYSSSSPFSNRLRLRLPRAASMSAEARVPVAPPAHPTYDLKAVINLALSEDAGDRGDVSCLATIPSDVKAEATFIAKEDGVVAGISLADMIFKQVDPSLKVEWFESDGNYVHKGLQFGRVYGCARNIIVAERVVLNFMQRMSGIATM

SEQ ID NO: 138657 - protein, 103 aa, Oryza sativa
  Clone ID: PAT_MRT4530_40024C.1.pep
DLLEYAAENNTSLTRVMSRVRVVPLGNGDIDVSMLKDAVELINGRFETEASGNVTIDTVKKIGETGVTYISSGALTHSVKALDISLKIDTELALQVGRRTNRA

SEQ ID NO: 138658 - protein, 61 aa, Oryza sativa
  unsure (1)..(61): unsure at all Xaa locations
  Clone ID: PAT_MRT4530_40025C.1.pep
TPPPTSRTTSXXKCGSRTTRATTAAAVARENAIGRSLASLDRPVGINKHDIELYTYTKIFT

SEQ ID NO: 138659 - protein, 64 aa, Oryza sativa
  Clone ID: PAT_MRT4530_40026C.1.pep
SGMAAPKPSELTQQEVEFDGLNAKLLQPTIDRWRRVRAKLGLVERLHLMPHPFSWPSAVGSLNW

SEQ ID NO: 138660 - protein, 140 aa, Oryza sativa
  Clone ID: PAT_MRT4530_40027C.1.pep
MRESDDHAWRIGGGLLEASVRSGKTKQHKPPPLPRPRPFMGRRGLLLSSVEASSRETGDEAAKEVAVMEEELQGWETPRREECRIPVMPQCPAPPRKRPVVLPELGKERREPPKGRYFQPPDLELLFVLVPPRRQASSCV

SEQ ID NO: 138661 - protein, 320 aa, Oryza sativa
  Clone ID: PAT_MRT4530_40028C.1.pep
MPCPWGGVADRGHVCGGGIGELSASGAGTSLTAAAGPLRTGGLPLPILLLLPVDDAIAAAGLPAPSPASPGTDRWAPPVSGRRERKDAKWREKGIRREKKRKKGVKKLYVIVHVACHVGKATWLLRDGCDDGDSHVWIRRWLLLRVDPAVAVSLLLSHPTTAEAQTLLLPSLPLRRRGVHALDGSDSCGFDESINGNLDVPGRRQRLSGCSQTVGGEVVAAPSPTFHPTATAVVEKAQRGGSGSLAAQRLRWWPGGPAAAAGLSAAQEGRWCHNGPEGRPSNGCGWRRHAAAEGRGMRRWKGGDMRQQKGRGMRRREGGG

SEQ ID NO: 138662 - protein, 124 aa, Oryza sativa
  Clone ID: PAT_MRT4530_40029C.1.pep
MHEAKKAGIPYSQVKHFVHCRSNCRAKYYATKVHLLSLLKLIVATLQFHFIRIRFSAVLASVYCSETSGESSNHAPTTSAQTGEGLIDDKLTTRKSIRKQFSERKPPRTGSQKPSVVMSLLDQT

SEQ ID NO: 138663 - protein, 124 aa, Oryza sativa
  unsure (1)..(124): unsure at all Xaa locations
  Clone ID: PAT_MRT4530_4002C.1.pep
IWLTAHNRGHGYSNSFILIKGVQLYPQDTAPRHVTVCWHATTTYQKXGRDRTLRITPSNQTHHTSGFTPTPRKAAGSHLGESXKRQRLSQGPSRSITPTLAWMCQLEESYTTSPAVAHAGLWQV

SEQ ID NO: 138664 - protein, 102 aa, Oryza sativa
  unsure (1)..(102): unsure at all Xaa locations
  Clone ID: PAT_MRT4530_40030C.1.pep
NLVWVTSIGRKPVPTSRQXTPGGTRSTSVPGTRNVSPEEVVPDAXGELHIRQTKRPGWDLHVRVPQXERPKHEPPLASHRHXERSYHHDPIXHTXGNRRTST

SEQ ID NO: 138665 - protein, 69 aa, Oryza sativa
  unsure (1)..(69): unsure at all Xaa locations
  Clone ID: PAT_MRT4530_40031C.1.pep
SGPRKAQNEDKFHSFHPVATILSYLTKAPLVPPGTPXVNPLSKQRAMLENIMRACVGLAPENNMILEYK

SEQ ID NO: 138666 - protein, 138 aa, Oryza sativa
  Clone ID: PAT_MRT4530_40032C.1.pep
MAAGYSFSSLCPSEKKEALYPARRESHRPEGNWHHHHQATVIPEESTYHTPPHIPPPSAAAGDTVSHRRRTRRVQGHGGVPCSRRDASYYNCRPGASANPYHCGCSRISHCPRLISSSAAAESTGEDGIVIVVAGVVN

SEQ ID NO: 138667 - protein, 89 aa, Oryza sativa
  Clone ID: PAT_MRT4530_40033C.1.pep
MDEASIEAVREGREREGRAETPPSGKPYPHRGASRVMSSPTADATAYAFFARFGIELTFPPYLMQIDIEDELDSAGEGTMKGEFVGGDT

SEQ ID NO: 138668 - protein, 183 aa, Oryza sativa
  Clone ID: PAT_MRT4530_40034C.1.pep
VLEEVRRLMELYKDEVTSITVVGHSLGASLATLNAPPCPVTAIVFASPRVGDGFFKAAFASFPDLRALHVKNAGDVVPMYPPLGYVDVAVKLRISTSRSPYLRSPGTIETLHNLECYLHGVAGEQGSAGGFKLEVDRDVALANKGVDALKDKYPVPPRWWVSKNRCMVKDADGHWALHDFEQI

SEQ ID NO: 138669 - protein, 93 aa, Oryza sativa
  Clone ID: PAT_MRT4530_40035C.1.pep
GGATCNAQQVGKISTIVACEGLPSVYYRTHCEHAYQDYTLRPNHLILSNHSLTSELLIIPATNNVIHTLFLRLITQGQLAHIIYQRQPNPNHH

SEQ ID NO: 138670 - protein, 407 aa, Oryza sativa
  Clone ID: PAT_MRT4530_40036C.1.pep
MSSSPMLGGIADRWRELHGQDSWNGLLDPLDLDLRSSILSYGELVQATYDSFNRERRSPHAGACVYGHGDLLAAAGASAAGSYAVTKFVYATSGLPVPEAFLLLPLPSLLPPAWSRESNWMGYVAVATDEGVAALGRRDIVVAWRGTVESLEWVNDFDFTPVPAAPVLGAAAAANPRAIVHRGFLSVYTSSNKDSKYNKASARDQVLEEVRRLMELYKDEVTSITVVGHSLGASLATLNAVDIVANGANCPPASSSSSQPPCPVTAIVFASPRVGDGFFKAAFASFPDLRALHVKNAGDVVPMYPPLGYVDVAVKLRISTSRSPYLRSPGTIETLHNLECYLHGVAGEQGSAGGFKLEVDRDVALANKGVDALKDKYPVPPRWWVSKNRCMVKDADGHWALHDFEQI

SEQ ID NO: 138671 - protein, 169 aa, Oryza sativa
  Clone ID: PAT_MRT4530_40037C.1.pep
SGSPGCRISPSLSLISLHYLITSSDGALVLDDGGLSLSSSMVASHAHLNDSLLSLLKGGTVGLGFLNGDAAQHQQPPVLNGDGMSLALASQFNGPRRAQHDCSELVPSLAMAGHRRGGSSSDYFFSHFSMFKPICFKCSFVLDQNVAVSFCVVSYSLPFMGEICGCLNN

SEQ ID NO: 138672 - protein, 76 aa, Oryza sativa
  Clone ID: PAT_MRT4530_40038C.1.pep
LVSELQTRYYNTMCMQCLIFMEEKTIPPTCVLKHKQTHSSNTLHALLNPPGPQRSWKPNHVSVLVNMLIKGHQCFV

SEQ ID NO: 138673 - protein, 79 aa, Oryza sativa
  Clone ID: PAT_MRT4530_40039C.1.pep
RRLDTRWQRGGGGGQEMLHRPHAHARRRDPRVVAGVLPRRPQLHRRWRGWQGGQRPDRRRQGGIGAAICNFLTFTGWVG

SEQ ID NO: 138674 - protein, 1079 aa, Oryza sativa
  Clone ID: PAT_MRT4530_4003C.1.pep
MSSSFVDNNVSTSLNQVLPASTMLIWTQVGEIVFPVYTTTPISTGSPMTGDENAVVTNQGDSMSKNPPIETENGISTTSKLKKDSDTAKPCPSDMNHEPTKMTSEATRSWCPIHKTKKHTLQDCWVFLNVRAEIRACKERGIQRTSPTRDVYCPIHKTKNHDLSSYKVFLGAMKAQSPKSYIPIRDNGKEQGATPTSDRFVGVIDIDPHEPSVLHLLEDYGLSTTSAPREVLAIDDVDLWQQFIANFQGTYKCHAIEDDLHALTQNSGESLREYVRRFNECRNTIPEITDASVIHAFKSGVRDRYTTQELATRCIRTTRRLFEIVERCAHADDVLRRKNNRPKTGGEKKPATDTSESSKKKNHKNGKRKAQAEVLAAEYANPPKRPYPQSSDTKKSWCPIHKTDRHSLEDCLVFKKSLEKHMAFEKGKRVRVVETNEETVPHEPDSAYPDSDLHVSHIFGGSTTYSSKREYKKVEREVCSTWQGAAPKMKWSEQKIEFSEEDHPKIAVIPDDIRSWSNPPFGTSSTLDAMGISQNELTPTDQPFHGITPQSSSRPLGKITLPVTFGQANNFLTEQITFDVAEFDTAYNAIIGRTALAKFMAASHYAYQVLKMPGPKGTITIQGNAKLAVQCDKRSLDMVEQTPSPPATTEPPKKVTKTNKTPKPDGAIKIVPLSSANPDKTPSDMPGVPREVIEHKLMVRPDAKPVKQRLWRFAPDRKQAIREELDKLLKAGFIREVLYLEWLANPVMVWKANGKWRMCVDFTDLNKACPKDHFPLPRIDQLVDSTAGCELLSFLDAYSGYHQISMAKEDKEKTAFITPFGVFCYVKMPFGLITAGNTFQRTVQGALSNQLGNNVEAYVNNIVVKTKTDDSLIDDLQETFDNLRQYRLMLNPEKCTFGVPSGKLLGFLVSGRGIEANPEKIKAIENMKSPTGLKEIQKLLYAVIMTSRKLRHYFQAHRVTVVSSFPLGEVVRNKDVVGRIAKWVVELSQFDAHFVPRTAIKSQVLADFVADWTMPDNKSDNQGDNATWTMAFDGTLNSQGAGAGFILTSPSGDQFNHVIHLNFRATNNTAEYEGLLAGI

SEQ ID NO: 138675 - protein, 314 aa, Oryza sativa
  Clone ID: PAT_MRT4530_40040C.1.pep
MPPAAASPGGGLRRGTAGEAPRSEKRPRESQGLESESGSDGGSGSDSDGDFVRNTFLGYELLGEFCFLIEVLPGGLDCSDLREIVCLLRLIKGGADREGQKMCEQIIASVAADIQTMLEDTKLKFEKQRQNLLKVLSNTSKEQCDSSLSKEFIKFQESYEIFCKEKDVHVQAFRDLFSKVEVEKKALLEQFENHRKEETATLSELDNTFSEKITRAEQSLRKTEVDNTFSAKITHAEQYLRRTQFNNMFSGKKTHEEQSLRRKEFDKTFSEKVTHAEQPLRRMKQDDKSFIILRKSVGSFLEFGSDDDFDLDDD

SEQ ID NO: 138676 - protein, 38 aa, Oryza sativa
  Clone ID: PAT_MRT4530_40041C.1.pep
IRHRQLTPPSIMLVCLICLFCKCHYCNHHYAVIQHMSM

SEQ ID NO: 138677 - protein, 53 aa, Oryza sativa
  Clone ID: PAT_MRT4530_40042C.1.pep
LLCEHLMPCIEHGRLPQKLDSLKTIFRASVLMAHKSIFAHVIMCYACSLDPET

SEQ ID NO: 138678 - protein, 79 aa, Oryza sativa
  Clone ID: PAT_MRT4530_40044C.1.pep
AVSLGSKVVGISYPRFCMWKVSIGCKKVCCHFALGMLWLTLIIVRYENAYGPFSLCFQPTGYRLKCMAHGSYKLLAFDS

SEQ ID NO: 138679 - protein, 33 aa, Oryza sativa
  unsure (1)..(33): unsure at all Xaa locations
  Clone ID: PAT_MRT4530_40045C.1.pep
WIILVTKCHDRKSPNRRSXRACIIPCPRRQGTS

SEQ ID NO: 138680 - protein, 40 aa, Oryza sativa
  unsure (1)..(40): unsure at all Xaa locations
  Clone ID: PAT_MRT4530_40046C.1.pep
AYRISREEAQRLKHNREHEFGAXSPMLSKSYQDVYNAAES

SEQ ID NO: 138681 - protein, 75 aa, Oryza sativa
  Clone ID: PAT_MRT4530_40047C.1.pep
FSLKTKGPRKPRAPPPPQPGEKSYAPQGKTRAGGPAGAKLPQFPPRPAGGGAGAPPREGANKTRGPSPRGAFEGY

SEQ ID NO: 138682 - protein, 187 aa, Oryza sativa
  Clone ID: PAT_MRT4530_40048C.1.pep
MAAGALLLANPAAPTARHQHRLLQQRRQPRLLASSRPPRWRLSAVQETKEGEAQTAEEITEKYGLEFGLWKVFSSKEGEEEEGKTRKSRTEQAKELLAKYGGAYLATSITLSLISFTLCYLLVSAGVDVQDLLGKVGIATGETGGKVGTFALAYAAHKAASPIRFPPTVALTPVVASWIGRIKKGGD

SEQ ID NO: 138683 - protein, 900 aa, Oryza sativa
  unsure (1)..(900): unsure at all Xaa locations
  Clone ID: PAT_MRT4530_40049C.1.pep
RKPLMRSVTVLVGKKEEERWCPIXYEFLHDFYYICGIIWHTEKFCDVVLGKDEKQPYGKDLRIIPQKRRNDALSGGKFSESRGSGQWRSNFSAGRGPDGPSWRKLSIGSAGEKEKEKMAGEEAEVQSPLKLKASEALTHNSKKALFREAVIEEVRKIAREEEDATMQSDHVDANASGKGVVLSGKGGHVPNPNTGXRRGRLMMFNAXGGSVEEGEGSDGGXEKNRMPTNLAGLADQSCIYGEPRSDKKDLTWKALRTLNATKGELWLCVGDFNEVLFSWEKERGHAKAQSCMDRFRQTLDCCSLSNLGFTGDPFTWRNNWCVRDGYIRERLDRAVADSDWCCRFPSFRVRKGDPRHSDHHPVIVTTSNEVIWNGGRSKPGFRFEAGWAREEHCAPIVENAWKLSVGPRGGKVMDAIREVAANLWDWSKNFLGDLEKRIKKAKQALEAHRRSPISSSTASREAVLKYRLDKLEEQRLLQNVPKRVTSTMNDELMKGVTTEEIKKALDSIGDLKAPPGSDGMPALFYKQFWECVGDDIVHEVKDFLGGGEMPDSWNDTVVVLIPKVLANRLKPLLSEIISPIQIAFVPQRMITDNILLAYELTHFLKTKRRGSVGFAAVKQGMSKAYDRVEWGFLEXMMLKLGFDRNWVFIVMKCVTSVNYRIKVNGEFTEQINPTGGLRQGDPISPYLFFICAEGFSTLLNAAEERGDLSVIKVCQNAPSINHLLFADDSLLLLKTDEGSAACLQNVLSLYERCSGETINKEKSSIMFSRNIKEVNKQIFMGALDIGVGAWNEKYLGLPVYMGRSKAKTSSYLKERVWKKIQGWKEKLLSRAGKDVLIKAVAQAIPAFAMSCFNLTKGLCDEITSLICRFFWAQQERENKMHWIAWEHLCSRKEKGGFFFR

SEQ ID NO: 138684 - protein, 66 aa, Oryza sativa
  Clone ID: PAT_MRT4530_4004C.1.pep
YKSRREQENLVDFELCGANHRVLRFWSFDLLHNFLWTMGIIELSLTTALGWFWPEILMNNVILFEF

SEQ ID NO: 138685 - protein, 363 aa, Oryza sativa
  unsure (1)..(363): unsure at all Xaa locations
  Clone ID: PAT_MRT4530_40050C.1.pep
KPNLGLGPCNRLGPSRKCLPPPPPTSKPQXPSIPLSLSLSPSPDDLGMPHPLPPPPPTTTTMPLPLPPPPLPLPSPSSPSSSTTXPSSPPPPPPXPPPPRPRLPPPPPYSPRRRRLPAVVRRPAPPXRATSPRPPPSSSCPSRXAPPGHPQERPRRPRPPPPPGAGAPAPAADPRVPTTSPAAPAPPSPPLGRRPGAXPAPATPSPRPLPSAPGRRIAPTICPDAAAPTPPPPPPHPSIGGGGSPAAAGSSDSSTSTAARAPWPSPTPPSXSPPASPEPGPSPPPPRASSSPPGAPPVTHLAVAALPRPDLGGQPPPPRVASSSPLRRPCAAPPPPSPGLPPAGSGRGGEGSRGGRTGGRRRR

SEQ ID NO: 138686 - protein, 120 aa, Oryza sativa
  unsure (1)..(120): unsure at all Xaa locations
  Clone ID: PAT_MRT4530_40051C.1.pep
MQLCNQNVAANVRTAAPQRAAKASRTAVRPVAAAQVEAVAADASTSQQAPLMIRALRGDAVERPPVWMMRQAGRYMKVYQDLCKKHTTFRERSENVDLAVEISLQPLHAFXPDGVILFSD

SEQ ID NO: 138687 - protein, 54 aa, Oryza sativa
  Clone ID: PAT_MRT4530_40052C.1.pep
VCSSISIPWSALPLAITRLLGMDQSAKCSSVRQSSKHVECNTIVLSPIYEQLHA

SEQ ID NO: 138688 - protein, 189 aa, Oryza sativa
  unsure (1)..(189): unsure at all Xaa locations
  Clone ID: PAT_MRT4530_40053C.1.pep
GDLPERRRRPERRRSTAGATATTAERGXTALGLFRRRXVTADRGELGGPFKGARARRRKPTATGIGRKDWGNTNPNQTRIRLFPKEISRRFQKRKGRGDPGDHFPSKDFTGEGKARPNLEGDGSAARLGFXAAAAERGRRXLTGGTHLSAAEREEEGARRTGPXWAGEERGRRKERLGLTFGPKPKGGF

SEQ ID NO: 138689 - protein, 96 aa, Oryza sativa
  Clone ID: PAT_MRT4530_40054C.1.pep
HGHHRHVGFGPAVTFASASGPSQLSPGEREHHHGRGQNASAYCHHAFGKSSASSSRTRASGRRTTSAGKAPPPPPPPAAERRRREEKMTIGETVAG

SEQ ID NO: 138690 - protein, 174 aa, Oryza sativa
  Clone ID: PAT_MRT4530_40055C.1.pep
RSYHRVEKIKMDTLFISNTENGVRVKTFQGGCGTARKMKFGDILMKNVKNPIVIDQQNSSSNEIPCGSKNGSAVTVGEISYTDITGTSASERAVTFACSEAAPCSKLSLENVNITMAGGQNASAYCHHAFGKSVGVVVPDSCLGKEDYLRRQVPASAAAAGGGTQEKGGEDDDR

SEQ ID NO: 138691 - protein, 419 aa, Oryza sativa
  unsure (1)..(419): unsure at all Xaa locations
  Clone ID: PAT_MRT4530_40056C.1.pep
MEEHGKAAVGWAARDDSGVLSPYNFSRRAQKDDDVTIKVLYCGICHTDLHVVKNDWGNAMYPVVPGHEIVGVVTGVGAGVTKFKAGDTVGXVGFFVGSRRXCDGCGNGYENYCPTMQPPATAVDHDHGGGAATQGGFSDAIVVNEHYVLRVPAGLPLDSAAPLSPMVIHGLNAPGKHVGVVGLGGLGHVAVKFAKAFGMRVTVISTSPGKRQEALEHLGADEFLVSRDAGCXPDGGGDAAATMDGILNTVSAWHPIAPLFSLMKXPMAQMVFVGGPTRPLELPAYGHRCPGGKGINPATASAGIRDXQAMLDFAGEHGITAEVEVIKMDYVNHRRXAAGEERCPLPLRXHRRCRQQPRRLRRRQDIKLAGLLACLCRRRRRRLACLLCVSGLECLVMCKLLRNGVRNKWSICLHHLVIN

SEQ ID NO: 138692 - protein, 132 aa, Oryza sativa
  Clone ID: PAT_MRT4530_40057C.1.pep
QFPGRGGFQPMFPPPGALGLGKQCFPQLQDVNPGCPCPPPPRVVGGSQESIPMPLDQGWFFFFSEYSPPRGFFSDPGFSPQGFSEEGFFGEPPPPPGITPVGLPRGGQYPGPLPFMCRVEPPPGSFFPPGPD

SEQ ID NO: 138693 - protein, 365 aa, Oryza sativa
  unsure (1)..(365): unsure at all Xaa locations
  Clone ID: PAT_MRT4530_40058C.1.pep
MEEHGKAAVGWAARDDSGVLSPYNFSRRAQKDDDVTIKVLYCGICHTDLHVVKNDWGNAMYPVVPGHEIVGVVTGVGAGVTKFKAGDTVGVGFFVGSCRTCDSCGKGYENYCAKMVTTCNGVDHDHGGGAATQGGFSDAIVVNEHYVLRVPAGLPLDKAAPLLCAGVTVYNPMVIHGLNAPGKHVGVVGLGGLGHVAVKFAKAFGMRVTVISTSPGKRREALEHLGADEFLVSRDAGQMAAAAGTMDGILNTVSAWHPVAPLFALMKPMAQMVFVGAPTRPLELPAYAIVPGGKGITGNCVGGIRDCQAMLDFAGEHGITAEVEVIKMDYXQHRDGAAGEERRPLPLRHRRRRQQPRRLRRRQDI

SEQ ID NO: 138694 - protein, 107 aa, Oryza sativa
  Clone ID: PAT_MRT4530_40059C.1.pep
KDGTIVHRKPSSVSPDGRIWSAILSWQRMKDLAQYLLEQQPSNNWCFVETICSLNQRDTDPIPWTCFDSSNQENISSWPAYNNLLLASSLSIAFLSHDEERASCYIY

SEQ ID NO: 138695 - protein, 169 aa, Oryza sativa
  Clone ID: PAT_MRT4530_4005C.1.pep
MSSANSLVLGRVIGDVVDLFSPEVTLRVMYNGVRVVNGEDLRPSAVSARPSVEVMVDPDAPNPSNPTLREYLHWLVTDIPGTTDANYGREVVCYESPRPAAGIHRVAVVLFRQMARGGVDQPPLLRHNFSTRGFADDHALGAPVAAAFFTCKPEGGTGGRRFRPPSRHS

SEQ ID NO: 138696 - protein, 111 aa, Oryza sativa
  Clone ID: PAT_MRT4530_40060C.1.pep
MWRRKHEVGITHQQEIVSCDDEIDGDNEDVAEAMTLLAIRPAMAERDRKTGPGVAKGDRRDRRGSVMDGTPDARGGRGSAAARRLAAKGQNRRAWRSAADVQGRWRQGRGQ

SEQ ID NO: 138697 - protein, 273 aa, Oryza sativa
  Clone ID: PAT_MRT4530_40061C.1.pep
MAETLDMTLDDIIKNNKKANPSSGRGRRGSAAGGGGGGGGGVGGGGGGGVGPTRRPFKRSGNRAGPYQPPKAPESAWQHDMYSDVAAGGGGGSGGGGRVSAIETGTKLYISNLDFGVSTEDIKELFSELGDLKKYVIHYDRSGRSKGTAEVVFARRGDAVAAVKKYNNVQLDGKPMKIEILGTNTPTAAAALPANNGGYVRNVAKSAPRGGPAGLPQGRPRPRGGGRRRGGGGGSGGPGGSGGRRGKERSQPKSAEELDADLEKYHADAMQTN

SEQ ID NO: 138698 - protein, 96 aa, Oryza sativa
  Clone ID: PAT_MRT4530_40062C.1.pep
VFFSQFRFPQFFKVSFVKSPGQTPTFLALKKPPICGFFPMSNTPPLRFSPPGGFWFLIFPVYSPRKKKKNPPPFFFAILNPRGYPISKKISAPFFP

SEQ ID NO: 138699 - protein, 148 aa, Oryza sativa
  Clone ID: PAT_MRT4530_40063C.1.pep
KKGEGGGLFKRGALAPQRKLGKRPLFGPIFSFKGPFFPPFFKKPFFFCFRPPPPFFKKGFFQKKGFFGQALEGKTKLPVFLQKSPFKRGGFPQQKQTFGRLSQTQSGQKILQGCLTPPPLKVFPNQNYIWPQTPFFLERVSILKKPFF

SEQ ID NO: 138700 - protein, 163 aa, Oryza sativa
  Clone ID: PAT_MRT4530_40064C.1.pep
MAITQHIGEGYNPVAKRGLYVRDVLQRFGLTHKRNCSSSAYSAQYSKIRHDPSLELGLRRKGEIWEHIKTASIILGSCSAIAAAYFVVGSFMMQELDAKMKHRFDHAKTHIDAKMDEQGFREAIGMLFLLFILMLFLFALVDADDCKGKSIRKRKKKPSLLHN

SEQ ID NO: 138701 - protein, 613 aa, Oryza sativa
  Clone ID: PAT_MRT4530_40065C.1.pep
MILCRCPFLASARSHTCSLSTVAVAAAVRRGDLTGAEEAFASTPRKTTATYNCLLAGYARALGRLADARHLFDRIPTPDAVSYNTLLSCHFASGDADGARRLFASMPVRDVVSWNTMVSGLSKSGAVEEAKAVFLAMPVRNSVSWNAMVSGFACSRDMSAAEEWFRNAPEKGDAVLWTAMVSGYMDIGNVVKAIEYFEAMPVRNLVSWNAVVAGYVKNSHADDALRLFRTMVREANVQPNASTLSSVLLGCSNLSALGFGKQIHQWCMKLPLSRNLTVGTSLVSMYCKCGDLSSACKLFGEMHTRDVVAWNAMISGYAQHGDGKEAINLFERMKDEGVEPNWITFVAVLTACIHTGLCDFGIRCFEGMQELYGIEPRVDHYSCMVDLLCRAGKLERAVDLIRSMPFEPHPSAYGTLLAACRVYKNLEFAELAAGKLIEKDPQSAGAYVQLANIYAGANQWDDVSRVRRWMKDNAVVKTPGYSWIEIKGVMHEFRSNDRLHPQLYLIHEKLGQLAERMKAMGYVPDLDFVLHDVDETLKVQMLMRHSEKLAISFGLISTAPGMTLRIFKNLRVCGDCHNAAKVISKIEDREIILRDTTRFHHFRGGHCSCGDYW

SEQ ID NO: 138702 - protein, 175 aa, Oryza sativa
  Clone ID: PAT_MRT4530_40066C.1.pep
MWWAPHVNFLFSFSTSPLSLLAFFSIAEDELVPALTKAVHGMVTSISRSDRLALAPLPLGRARMRTPGEHLRDHVHDKSRLIDATLEHVRELVTECVHLLARASRPAKVKNPAKSMLARSDLSHLAIPSVEPVLAQSSWTGNRAARARDGAVDGGLLAVKRLEPIVSDVEYFFVV

SEQ ID NO: 138703 - protein, 79 aa, Oryza sativa
  Clone ID: PAT_MRT4530_40067C.1.pep
MGEFDDYWARAYRGDSGVPHSDPQRLVTTWTGAFALGAAACVHHHASALASNIKFYCGREQPVVLGLLPLRFVSSLFGH

SEQ ID NO: 138704 - protein, 48 aa, Oryza sativa
  Clone ID: PAT_MRT4530_40068C.1.pep
EFRPGSSVLGTSLVALCIVHQTGLIACTTLDTSVVNAAIYVCLLMWDD

SEQ ID NO: 138705 - protein, 105 aa, Oryza sativa
  Clone ID: PAT_MRT4530_40069C.1.pep
MRAAGGELAGCGRSGWQASAAAECGGRAAVGECGSEVAAGRGWSGRQASSAAGASGCYSTTTLFGALAASFALSFFLITIFICPQALYVARRRRDRPLVMEQEQQ

SEQ ID NO: 138706 - protein, 604 aa, Oryza sativa
  unsure (1)..(604): unsure at all Xaa locations
  Clone ID: PAT_MRT4530_4006C.1.pep
IVCLHGVPKKIVSDRGSQFTSKCWKKLXEEMGSKLNFSTAYHPQTDGQTERVNQILEDMLRACALDFGGSWDKNLPYAEFSYNNSYQASLQMAPYEALYGRKCRTPLSWDQTGERQVFGTDILREAEEKVKIIQERLCIAQSRHKNYADNRRRDLSFEEGDHVYLRVTPLRGVHRFHTKGKLAPHFVGPNKIVSRRGEVAYQLELPQSLADVHNVFHMSQLKRCLRVPTEEANLEXIEIQEDLTYVEKPIRILETDERRTRNRVIRFCKVQWSNHSEEEATWKREDELNVEFELDSNSFFPPNPRSSIAVAGGRGPPSLLLAPIXGPPGPPLFVATLASARRRXSTASAPCAAAAPVVVVAQEGCRQVRQVVAVLIPSSVSTEDRRSTAVVVDPNASAASTSSPSPSVAVRRCPSSRRTSRHDRAPSGYAVTTLGHWCCRHCTVSGRLLFVAGAPIDVAISSVGVAALSSPPAAPLFHQNAVTRAGLSILLIVDVASGSPSRRARALADVAVSSSSVAAARSPLASPPHRRNTAGVRRRLHRSSSPAHRLAAPPPSSASQRRVPCRPCLRAAAAGCPRRLLAGSGRRPPVVLGRRCVCPSVKPC

SEQ ID NO: 138707 - protein, 145 aa, Oryza sativa
  unsure (1)..(145): unsure at all Xaa locations
  Clone ID: PAT_MRT4530_40070C.1.pep
MSTPPAAADDSPDTDQGKTKSKKKSKKHQEDTCCSLAVAGASADEAEDAKADGYLSKPQSVAPSLDTSERPLLLKNYDRLNVRTGHYTPFPVGHSPIKRPIGEYLRCCVINLDKPXNPCSHEDRGWIKRLLRVEKTGHSGTLDPK

SEQ ID NO: 138708 - protein, 293 aa, Oryza sativa
  Clone ID: PAT_MRT4530_40071C.1.pep
MESQVLVALALSLVGGLSTSIGALFVILNPTPNLKMLGLLQGFAAGLMLSISFLDLAHNALNSIGFLKGNLWFFAGVLFFGLVVKFIPEPTVVPTADAGKKQGLRVGLNLAIAIALHNIPEGDAEALPLYFATNSKWQAFKVATLSGFAEPLGVIIVAYLFPSSLNPEVLEGLLGSVGGVMAFLTLHEMLPLAFDYAGQKQAVKAVFVGMAFMSARVRLPRDNQMHRPVEERQSDHDGVTEGILVVGPMASSQEETTIGDQADDREAVRLVTGGIPSVKPTVSGGQNDAQRAV

SEQ ID NO: 138709 - protein, 177 aa, Oryza sativa
  Clone ID: PAT_MRT4530_40072C.1.pep
MESQVLVALALSLVGGLSTSIGALFVILNPTPNLKMLGLLQGFAAGLMLSISFLDLAHNALNSIGFLKGNLWFFAGVLFFGLVVKFIPEPTVVPTADAGKKQTDDDGSGKDMMKKHRRQVLFSGIITAVGISLHNFPEGMAVFLGSMKGLRVGLNLAIAIALHNIPEGVAVALPLYF

SEQ ID NO: 138710 - protein, 120 aa, Oryza sativa
  unsure (1)..(120): unsure at all Xaa locations
  Clone ID: PAT_MRT4530_40073C.1.pep
NVLFMAMTQFPKLLXKPSWNFISPPQDQNAFLFGVDDLWGPLAHLPVFSQRAPGVAFSFMAEVHTPPYYCTXLGSFWAPGCVAILIQPSFCLEIHFLLVAPLVRTQVYFILQRKIVRIIK

SEQ ID NO: 138711 - protein, 96 aa, Oryza sativa
  Clone ID: PAT_MRT4530_40074C.1.pep
PPLCLPPRCRPPDVLLSHVGPATSSPPAGRLCHLPLDKDDYVEERKGREKGKDDYVARLHVGPMWVSLKLGLKPKDLGCPFSFANFPFPGLHMKRR

SEQ ID NO: 138712 - protein, 805 aa, Oryza sativa
  unsure (1)..(805): unsure at all Xaa locations
  Clone ID: PAT_MRT4530_40075C.1.pep
MADDGKSSNQILQELDALSHTLYQAHTNRRTASLALPRSASEVNGGGADVVRAESRPRSRRLSLSPFRSRPKQDKNAISQSFAAVTTPGGEAAAVAGEKKGIWGWKPIRALSHIGMNRLGCLFSVEVVAAQGLPPSMNGLRLAVAVRKKETRDGAMQTMPSRVQQGAADFEETLFVRCHLYCSGGAGTGKPLRFEPRPFLLSAVAVEAPELDFGRSAVDLSLLVKESTDKSQQGERVRQWDMALPLAGKAKGGELVVKLSFQIMDDGGVGLFNQTGAATKINSSSSSSSLFARKQSKLSFSITSPKVSRSEPKLTPTKGSPSPDLRGIDDFKLDEPSLPSLAEAKQEQKEPEPPEPEEKVDDSEFPEFDVVDKGVEGQEENVVEAKGAAEEEAKEEKAAAEEAPTSAAGDEVVKEVVHDSAHAWRINELEAITNQIKALESCEYVKPRGNSTKNSSXFLELTHPFLILILPPRLCMLEAYLGISCNXYSQTFTCDLYRKKSIVPNSTRRILGPSQPSLASPLEAYDQLLLLAPILWLQDYXFLAGGCEALFEKLAALVGTDEVVGKTAEQIAFEGMATAIISARSAALGASSSAAQTVSLLRTMSSAMSDGRQERIDTGIWNAHETPVTVDEILAFSLQKIEAMAIKALKVQADMADEQSPFDVSPASDKRGGGHLLATAVPPEDWXRRRRYEPVGAPAIVIIQAVRIAGNDDDDEPKFKVANMHVGGLRLKSADRRNVWDGEKQRLTAXTWLVAYGLGKAGRKGRTAAAAGKSGHDVLWSMSSRVMADMWLKPLRNPDVKIPLK

SEQ ID NO: 138713 - protein, 116 aa, Oryza sativa
  Clone ID: PAT_MRT4530_40076C.1.pep
GSSPRTPTCRRVRRWAPTTGTAAAPPSRGWLEICGIARSGRRPARRNSSGACCPTSGCPQICGSPSRSWTPIWTRRPPPLSRRGVEGRRRPLRRRRRGRFAARPPLWRRRRRRVNK

SEQ ID NO: 138714 - protein, 79 aa, Oryza sativa
  Clone ID: PAT_MRT4530_40077C.1.pep
VCLLSILFFAFKLKLHLTIIKDCPWRRPTLKFFPLTVPLSGMNQSCQHLICSLLVLSPSNNGSFWLCNFFFSSLNLCGL

SEQ ID NO: 138715 - protein, 82 aa, Oryza sativa
  Clone ID: PAT_MRT4530_40078C.1.pep
AEGAAAAASRRGCGRRGYGGGEGRACAARGKAVEEVAEGAVDERVVVLAVDAEVPERRLNRRRPVKKTLPGHHLVHGRKEIA

SEQ ID NO: 138716 - protein, 55 aa, Oryza sativa
  Clone ID: PAT_MRT4530_40079C.1.pep
FLVCCSLARSNPACCVATMLACFALNVCVSDVYPFVVVCHPLGHQNQEFRNDIRG

SEQ ID NO: 138717 - protein, 144 aa, Oryza sativa
  Clone ID: PAT_MRT4530_4007C.1.pep
MAMTRWRPVGLEVARRGGARGEAGVEDTVDRVEEERDVQRILAISEIYSGDACMTIIEIAGEEIARLEARGVGVSAGCEAGGGGSTDIRARAWAGDRLSWAATGPKQDTILFVAEISEQDVALRKVYLGSLNYVPQSAKDNGLS

SEQ ID NO: 138718 - protein, 208 aa, Oryza sativa
  Clone ID: PAT_MRT4530_40080C.1.pep
MGRLRIIGWGNLSHVQDANEAQLMNKKHIQFLELNFSEMECHHSMPLQLDVNITPEEVRYENLQYQDSQQPENVTVPHNQILESLRPHEGLRGLRISAYNCQSYPRWLGDASFSKLTYIEINGTNKVMQQCVPTLGELPFLEYLRIGWMSHVEHIGREFCTRIPSNKGFPSLIRLEFSDMPQWSEWSGLDDGDFPSLCTLSISDCNQL

SEQ ID NO: 138719 - protein, 96 aa, Oryza sativa
  Clone ID: PAT_MRT4530_40081C.1.pep
MTRRLGGNGGAGADATGAGLEARCKGVVAVQRELAAVFLWPKLVRRPAGGGTEESWASSRGGGKVLQHVWKSVGGGVPVQWGGGLMLSLPVRWFLS

SEQ ID NO: 138720 - protein, 51 aa, Oryza sativa
  Clone ID: PAT_MRT4530_40082C.1.pep
HLLDQVPPRSQKKLCMDDRLTPCLDIWVHKLGMDRVRFREFAAQLAAIPGS

SEQ ID NO: 138721 - protein, 388 aa, Oryza sativa
  Clone ID: PAT_MRT4530_40083C.1.pep
MGNSSSSGSHRPPRPASSESALPPAAAAAEELSSYEAACRSDPELRTFDTTLQRRTSRAISTLAVGVEVRSLSLESLREVTGCLLDMNQEVVRVILDCKKDIWKSPELFDLVEDYFESSLHTLDFCTALDKCLKRARDSQLLLHVALQRFDDEEDNDAAAAGQEDAAPSARYARTLHELRQFKAAGDPFTEEFFSAFQAVYRQQLTMLEKLQQRKHRLDKKVRAIKAWRRVSSIIFATTFAAVLICSVVAAAIAAPPVAAALAAAASIPVGSMGKWIDSLLKGYQDALRGQKEVVSAMQVGTFIAIKDLDSIRVLINRVELEISSMIDCVEFAERDEEAVKFGVEEIKKKLEVFMKSVEDLGEQADRCSRDIRRARTVVLQRIIRHPS

SEQ ID NO: 138722 - protein, 98 aa, Oryza sativa
  Clone ID: PAT_MRT4530_40084C.1.pep
FVPQKLRFCRDGAHRRMCLPRKRLNPSHSGKPLCRKECHLPVSPMMCVSECTARLQGRGSRVQALLGVSVRLLFPPSDARACLLGYNVGHASLCGLAR

SEQ ID NO: 138723 - protein, 272 aa, Oryza sativa
  Clone ID: PAT_MRT4530_40085C.1.pep
MEGGGGGGGGGGGGGGGGGGGGAPYATRTAEEVFRDLRGRRAGMIKALTTDVEKFYKLCDPEKENLCLYGYPNETWEVTLPAEEVPPEIPEPALGINFARDGMNEKDWLALVAVHSDSWLLSVAFYFGARFGFDREARRRLFNMINNLPTIFEVVTGAAKKQAKEKTPNSSSKSNKPSSKVQSKAESRSKSKLSAPKDEEGSGDDEGEEEEDDHDNTLCGTCGTNDGKDEFWICCDNCEKWYHGKCVKITPARAEHIKQYKCPDCTNKRARA

SEQ ID NO: 138724 - protein, 104 aa, Oryza sativa
  Clone ID: PAT_MRT4530_40086C.1.pep
MENKGVGGVEGDRQRSRAHKARHHGPTVLYEAPSLSLKRRVIPSPVSRAESAIPRAHYAPPRLVALAHAASPVSCAQSAIPRAVLYHVTLGLALSDYETDLGFA

SEQ ID NO: 138725 - protein, 773 aa, Oryza sativa
  Clone ID: PAT_MRT4530_40087C.1.pep
MAGGVLATVRWATACAAVLNAAAASTGGAVAALALRGGGGCGGALGPAAAAASAASAARLVASAVAGFAQGAAAAAIAAGAIGAHVDSDRDLRHLSRLRYKRWLWWTRFGVVITVLQFVLALCLLCIIVKDFSAGRSSKQCLSGHDQDNSNWKHTLLISFIVIMWVATIVQCSTGSDVLRWRSVLEEDDICVVAKLLGDLMAYRASGTGHLELIAGFSLLQKFKSSAVVSKEQAEAPQDLIKEAVLFHPFAEAAYTGPLLDFGRNPFMFPCVWLNRQGVMTPWTRARRPVLEGDNWWRGHAAAFLKYVSVPPEVLIKGRVSQARREAAYFVVVLHDLKTLVIAIRGTETPEDVITDGLCRECSLTVDDLDGLINSDQLPLQVKDAVISSFPHHGHAGMVESARELYAKLEGLPIHQDKPDAVPAGFLSSLLGAGCECHGYNIEIVGHSLGGSVAALLGIRLYGRFPKLHVYAYGAAPCVDYVIAEACSQFVTSIVHNDEFSARLSMNSIIRLRAAAVRALSKDALPNSAKVGKLVAGIVRTKGYNRNVADHRQSTGALQIVNEAKLRNDQIHGNNLMHTIRGGVFLLGKAISCLVNTPKYRVSSTAAINYELGSRSRMNILGDRGNCMAASCSVLDVPHFGEPSNACGNGKSSEDDLNECSREYRLPHSNDGTKLSIDPNDLRTISLPEGQSPEVYLPGLVIHLVPVKNHTSPFQKTPVTRHKSRKNKSYKAFIANRQDFMDLVVTPRMFLDHLPWRCHYAMQRVIETRKRAC

SEQ ID NO: 138726 - protein, 1000 aa, Oryza sativa
  unsure (1)..(1000): unsure at all Xaa locations
  Clone ID: PAT_MRT4530_40088C.1.pep
MTYLGHALVLLLFLASPTSSCTEQERNSLIQFLTGLSKDGGLGMSWKNGTDCCAWEGITCNPNRMVTDVFLASRGLEGVISPSLGNLTGLMRLNLSHNLLSGGLPLELVSSSSIVVLDVSFNYMTGGMSDLPSSTPDRPLQVLNISSNLFTGIFPSTTWQVMKSLVAINASTNSFTGNIPTSFCVSAPSFALLELSNNQFSGGIPPGLGNCSKLTFLSTGRNNLSGTLPYELFNITSLKHLSFPNNQLEGSIEGIMKLINLVTLDLGGNKLIGSIPDSIGQLKRLEKLHLDNNNMSGELPWTLSDCTNLVTIDLKSNSFSGKLTNVNFSTLPNLKTLDVVWNNFSGTVPESIYSCRNLTALRLSYNGFHGQLSERIGNLQYLSFLSIVNISLTNITRTIQVLQSCRNLTSLLIGRNFKQETMPEGDIIDGFENLQXFPWPIIPDWISSLNFLFYLDXSSNSLSGEIPKALMEMPMFKTDNVEPRVFELPVFTAPLLQYRRTSALPKVLNLGINNFTGVIPKEIGQLKALLLLNLSSNKFSGGIPESICNITNLQVLDISSNDLTGPIPAALNKLNFLSAFNVSNNDLEGSVPTVGQLSTFPNSSFDGNPKLCGPMLVHHCGSDKTSYVSKKRHNKTAILALAFGVFFGGITILFLLARLILFLRGKNFVTENRRCRNDGTEETLSNIKSEQTLVMLSQGKGEQTKLTFTDLKATKNFDKENIIGCGGYGLVYKAELSDGSMVAIKKLNSDMCLMEREFSAEVDALSTAQHDNLVPLWGYCIQGNSMLLIYSYMENGSLDDWLHNRNDDASSFLNWPMRLKIAQGASQGISYIHDVCKPQIVHRDIKCSNVLLDKEFKAHIADFGLSRLILPNRTHVTTELVGTFGYIPPEYGQGWVATLRGDMYSFGVVLLELLTGRRPVPILSSSKQLVEWVQEMISEGKYIEVLDPTLRGTGYEKQMVKVLEVACQCVNHNPGMRPTIQEVVSCLDIIGTELQTTKLN

SEQ ID NO: 138727 - protein, 50 aa, Oryza sativa
  Clone ID: PAT_MRT4530_40089C.1.pep
MFFIHSFSWVCFVYLLRLLFRAGYYFSTGPFGKFWIRRGYDPRKDPDSRM

SEQ ID NO: 138728 - protein, 174 aa, Oryza sativa
  unsure (1)..(174): unsure at all Xaa locations
  Clone ID: PAT_MRT4530_4008C.1.pep
GQGLPRPPLLRRFPPPKPTPHRAPIGAVGSAAAWPPRGAPVFPGPWTRSAVDRPPESLSGGARMSAPPSLSSGFNYCAIIQLSSLIACLHCLPCMSLDSGFSDAPVYFEIVAEVPPAAKQGKSCLSLDHVNPILQMSXCKGGHDGAGRALRRPLSLSDPPRHERGLPVARWGRG

SEQ ID NO: 138729 - protein, 98 aa, Oryza sativa
  Clone ID: PAT_MRT4530_40090C.1.pep
MVSSEISSVTTTHAQGPKLFRGKILLPMGPPDVVPSENVEFDFSDVFGPTAVQTPTDLSILTPDSPAPLTESSEGIYNDPLVIVKRSHSLVGPSSLVS

SEQ ID NO: 138730 - protein, 677 aa, Oryza sativa
  Clone ID: PAT_MRT4530_40091C.1.pep
MGTEPSQTPTPPPPPPPASPRRRAPQPATILSPSFSRNPLRATAASASASAGPVPSPSSSSDCEEHPCVELFDWWLKRVEGDDRKVRIAGHTERNHKPHLFTSAPIVKRHKACMLEAEDSIIVLIDGPLDLSQMENNGYSLEVCEKFMTGFPCLWESYNLGSQQSCSYTSISRDGRTKFYLERFQIGNFIDKVGSSFLANLLNNSRSSSGNDADSFEKGSYLSNKKPRFEEYTCDLDISAKEKTTAFNEGSTGSLAVCNKVGNQQIDLVVKSFSKERGHGNIDLSASLTSIEETTRDKTSEDAGNQNEFIHSDAEYQEAGSHLVNSDSIYGMSTESGNQNEFIHADAEHQEVGSHVVNSDSNFDMSTDNMICEMGDGSANAGSAVSQGSKEVLATVLPERANLSPDSCLDNILPISTCNSNNCLENQGFPEIAQHMTLNEEVVPNEDISTSVHSDVESLGNRNIILPSYIHDAEFIFSMFLPLILVVLLMMHIYNRLDNFYLEKQPVGPAEVQRSECDILQGAPRSPKQNVGSAQEQRPEQSMSQGAARSPMIRTPIPDGAPSLRNQHLGSAQEQRSEHFMLKGATRSPMIRTPIPYGHYSPLTRGKAKSSSVSTPESLKLRRTRSGRVVVPTLDPGCQRIVYDRDGLVSGVAGLEFESPPLKGNESRTPESKRRVR

SEQ ID NO: 138731 - protein, 331 aa, Oryza sativa
  Clone ID: PAT_MRT4530_40092C.1.pep
MEELVLPLKLMPLHTNGRLYDMRLSSPTATCVINSSSGSFDPIYRAWTKKYPSALNAFDHIVAYGKGKKIALFLDYDGTLSPIVDEPDNAIMSDQMREVVRNAALHLPTAIISGRSRDKVFDFVKLTELYYAGSHGMDIMGPVGEHDSVTNHRSSINSNRKQGKGVKIFQAGTEFLPMINEVFRLLIDKTKAIDGVKIENNKFCVSVHYRNVEEKVLEIRPVIDWNKGKAVEFLLDSLDLASCKNVLPIYIGDDCTDEDAFKVRNSAFIQKVLRDDKRGFGILVSSVPKDSHALYSLIDPSEGRFLNSDKENKQKGNRINLDIVDSCTSYS

SEQ ID NO: 138732 - protein, 54 aa, Oryza sativa
  Clone ID: PAT_MRT4530_40093C.1.pep
KYVKKKKKKKKKKKKKKKKKKKKKEGKKKKKKKKKKKKKKKKKKIKKKKKGGPF

SEQ ID NO: 138733 - protein, 85 aa, Oryza sativa
  Clone ID: PAT_MRT4530_40094C.1.pep
GGRFPKEWRFQFPVDGFVYRTKKAADFIARRYCCLSEQIYSLGKCKHSELPSLPHSRRYDGSLLYELFRISSQMWGIGTKKKKKR

SEQ ID NO: 138734 - protein, 97 aa, Oryza sativa
  Clone ID: PAT_MRT4530_40095C.1.pep
MEPGGSGARLEAGIPPRLLDESENWCVASRPARETTTTNKKKKKKKKARGATEAGRHDGTKLRGGFRFPMMIVTLAVLPTDKSDSGDSHKDRSRYII

SEQ ID NO: 138735 - protein, 41 aa, Oryza sativa
  Clone ID: PAT_MRT4530_40096C.1.pep
MTSLPPLFSVGDDHRDSPIPHGEPKMLLVDFMGIIDEEELD

SEQ ID NO: 138736 - protein, 75 aa, Oryza sativa
  Clone ID: PAT_MRT4530_40097C.1.pep
IRRNDAAKLNSMLSDRGGKKEPVPLVDGYQREDTCYALSRVGALNTKTLHGALSPILVLQSETPLQSQGREPCTG

SEQ ID NO: 138737 - protein, 143 aa, Oryza sativa
  unsure (1)..(143): unsure at all Xaa locations
  Clone ID: PAT_MRT4530_40098C.1.pep
SPLSSPRGGNGVSSSCGPDSAFLSPLPQIHRWRWHIRWVDPVKAVAVASVAPASGSCGVGGGGVSDGQIRRRRXWWRFRRLNLAVLYPLLLILRAQASTVAAAVASVLPWAYPAEEAATAFPASRSSDLPLRPNLLPQIWRWR

SEQ ID NO: 138738 - protein, 189 aa, Oryza sativa
  unsure (1)..(189): unsure at all Xaa locations
  Clone ID: PAT_MRT4530_40099C.1.pep
VDVWSSCCEASPQRSKVVSKKEREFREREREREFRCLGGGGGPALPPSNHCLCCPPPRALHPLPFFLRPPLRPLPLXLPPPTRPGRSRSLPPVLPTPLXPPPPXXPPPPGPPLPPPLFPPPPXPPPLPSPSLSSPSPPPPPPPPPPPPPPPPPPPPPPSSPXPPSPPXPPXXPLPPLPPPPPPPPPPPS

SEQ ID NO: 138739 - protein, 256 aa, Oryza sativa
  Clone ID: PAT_MRT4530_4009C.1.pep
FKIGFIASAEGRGARTGSTGVGPTRQPHGPRWTGCTRLAPAGAVGPTRQPHPRARAADGRAPHGSHGARPKAASPARPMGGGAPAPRWSPPATTGAAERRPREGREGGSETAVHGSPRVDGDDGNGDRSGKRRRRGSGRRGRRRSGGRRPKRRGGRGRQGRGEAEGGGAEAGEGPGRRRRRTGARRRRRRERATARARFRRRERAASGGNGGERHGERLYSVGSERGRPEGKETGAAISGSINGADEVCGSISKRI

SEQ ID NO: 138740 - protein, 47 aa, Oryza sativa
  unsure (1)..(47): unsure at all Xaa locations
  Clone ID: PAT_MRT4530_400C.1.pep
FAGVYXDQTQAQAQAYVGPKLRRPYGGIYPSYNSAPCSIPTVGGIWY

SEQ ID NO: 138741 - protein, 38 aa, Oryza sativa
  Clone ID: PAT_MRT4530_40100C.1.pep
IRLRRIKKNIRRKSVDSSHRANHRGERRGRIQLGAVCS

SEQ ID NO: 138742 - protein, 215 aa, Oryza sativa
  Clone ID: PAT_MRT4530_40101C.1.pep
PTRPPGRPKPNLPASPRHRTPLLPQDATVCRPPRGACSTTAPRPPTAHRRLVDAAPARSTMMQLSPTAPLARGSSSRPSSRIGEAGSRREGARSGRGARSSIAASPSPPQSTVTPTPLLLFNIGGQAVAPSLLLASACRRCGCRRLGAGRGRWRRPCAHGGEREALPPPSLQPCGCRRPARVAARRREGVGVVAPRRRSPPVSPLPLERHGGKKK

SEQ ID NO: 138743 - protein, 73 aa, Oryza sativa
  Clone ID: PAT_MRT4530_40102C.1.pep
PPILSPPFIINFNKKTKLVKKLEKKSNTLIHVHRLYTVNFARINFMYRNILYKKYLNPDLNLNRVYKFLTYKN

SEQ ID NO: 138744 - protein, 69 aa, Oryza sativa
  unsure (1)..(69): unsure at all Xaa locations
  Clone ID: PAT_MRT4530_40103C.1.pep
ATSACKLVELPFVHRSXPPRDGYNHILYTSSFTHAGHRNPDISADHVRTETAPCSHRLTVLESHAYAPS

SEQ ID NO: 138745 - protein, 302 aa, Oryza sativa
  Clone ID: PAT_MRT4530_40104C.1.pep
MSQPTQQQRGFGFSGVGAAAAAAAPSPRGMPMAAGAAGPRRLAVQQKQKQPALVPPPPTQQQTQGFGGVGGAGAAALVVGSSSSARGMAAAAAAEWMAHEDAWRACNRDFATPFASVEDAISRLLPYHVFAEYEEDEIYVEDQPPAKDKSSVQEWDDDHEAEAIRMAEEFEKQVVTFNVAVLKSAAGAARAEERLMVENLLLAYERRQSEHVRALVRQQQLVALQKQQQMMAEQRQQQQQMMAALQQRQQPATIMPAQGHPDAMDLFLDAYAAGEQSAYSWMTAAHAVPQPQSQPRQQQPDA

SEQ ID NO: 138746 - protein, 70 aa, Oryza sativa
  Clone ID: PAT_MRT4530_40105C.1.pep
KNMRQHLHNGCATVLYCGCTTIAAAAAINIDLLYIFTVSVGCKLAILNISINYKEERKGGSGYVEKKCIK

SEQ ID NO: 138747 - protein, 128 aa, Oryza sativa
  Clone ID: PAT_MRT4530_40106C.1.pep
SINPPGGNGANRRRRGACRGRTRRARGTPRERGMGPFLDARGPPPPRRAPPTWAQASQREAPALPQWWETGPTPGVARDASRYARDPGAGAWGPRPGRRSDPSGGARKRVVNLAAADGARRGDQQQPK

SEQ ID NO: 138748 - protein, 54 aa, Oryza sativa
  Clone ID: PAT_MRT4530_40107C.1.pep
LPTIHNHSHGIWLWLRLTSSTLPIGLLICQFRYQVGTAKQQRLMCQQITPHMQA

SEQ ID NO: 138749 - protein, 62 aa, Oryza sativa
  Clone ID: PAT_MRT4530_40108C.1.pep
FGFYGWTNDQSVLLTSSFYLFNVQQSDKYFLTSPFYLFNGQQSDKYLRLGRFLFRPKSVYEP

SEQ ID NO: 138750 - protein, 91 aa, Oryza sativa
  Clone ID: PAT_MRT4530_40109C.1.pep
MSTVATPRGRSSQRRTRCKCAGGGGGDRAAACCFNPLRSLFRCPGRGRGRRSRSRSRHTTPSKVRDASVAGGVEQQSEEPSFFVYAMPNQG

SEQ ID NO: 138751 - protein, 105 aa, Oryza sativa
  unsure (1)..(105): unsure at all Xaa locations
  Clone ID: PAT_MRT4530_4010C.1.pep
AAVVTTSLSSPISAVVANFHCHLRRRXDPPARPPAASLVGVSSRSPRHRLRXPPTDGTGESMRDVHVAASHPCRRLPPGSACRHRARQPPTVACSPMLSWSVGDR

SEQ ID NO: 138752 - protein, 208 aa, Oryza sativa
  Clone ID: PAT_MRT4530_40110C.1.pep
MATCCASNSEGRWETGSSDSQRNGDPSDGWIHPPCDGGRRPRRRWDLSPIQSGRRQKWRIDTSDLARASPLETNPHRTATSTPQNRRIQYVFGRSCLRSRLAATAGRWRAHPSLHVLVGWARRMIGFRVSTPVGGCDDEEDGRRQPQPGPATVWRNMDENQSFRQQIDALNERIRILERYIEEKKREFDNLQQQYDTLRHAEHGFCWS

SEQ ID NO: 138753 - protein, 133 aa, Oryza sativa
  Clone ID: PAT_MRT4530_40111C.1.pep
MALTASLRCYPLLGSAAAASSSVSLPASTRAPVLHRTTGVPRRRLQRCLCSQQYAEKQSSGSQQQQQNQQLERLFSNLNQATMKHGPGSVTSSIFLVAGTTVGAGILAIPAVTQEAGILWPQQLHASSAWIWL

SEQ ID NO: 138754 - protein, 162 aa, Oryza sativa
  Clone ID: PAT_MRT4530_40112C.1.pep
TALPSATLSTGTARAAASLHPTHRPACAADPLPPAAARRRSSLALPPAADLNAPPLLSLPPADCYASSLLSRRRCARRPWRGRRQPLRSASGLPPPPLCHEDEGEPRGIRGRSESGEGEERGAGELELAILPARPRRPLSADSCSALLPLPRRRSPSSSCQE

SEQ ID NO: 138755 - protein, 195 aa, Oryza sativa
  Clone ID: PAT_MRT4530_40113C.1.pep
GSAPPLPRGFMARLVSTALMRGLVRSSRAPRVAAVSQPAIQQFRNYSPGLGGDSRGSGDSSSTRVAADPDTHQDFQPTSKSSNMSFDDIVAQDIKENPVLIYMKGFPESPMCGFSALAVKVLKLYDVPISARDILGDLKLKECVKAHTNWPTFPQIFIKGEFVGGSDIILDMHQKGQLKDVLGDIAQKHEQKESS

SEQ ID NO: 138756 - protein, 68 aa, Oryza sativa
  Clone ID: PAT_MRT4530_40114C.1.pep
MAAAAARAEPDRRVDDDLEELKGCVDLRFGFSCDVIPEFCGTAPVLKLCYSMTQRCRSGAPAAAQSKF

SEQ ID NO: 138757 - protein, 282 aa, Oryza sativa
  unsure (1)..(282): unsure at all Xaa locations
  Clone ID: PAT_MRT4530_40115C.1.pep
LAAPSPLSPAAPPTTAGLRPAASQGSHGEIDVVRPHQGSREIELRADRSXVAQPTIHQFRNYSSGLGGDSTATGDSSSTRVAADPDTHQDFQPTTKSSNMSFDDIVSQDIKENPVLIYMKGYPDAPXCGFSALAVRVLKQYDVPISARDILGDLKLKESVKAHTNWPTFPQIFIKGEFVGGSDIILDMHQKGQLKDVLGDDVPISARDILGELKLKECVKAHTNWPTFPQIFIKGEFVGGSDIILDMHQASELIVPRFYYQKGQLKDVLGDIAQKHEQKESS

SEQ ID NO: 138758 - protein, 76 aa, Oryza sativa
  Clone ID: PAT_MRT4530_40116C.1.pep
MRIRIPISFFGLSDKNKSENAGLKFSTCLLAFYLAGTGVRGRLTCLCRRETIFLSSGLYHHYILALPLELDLLFNT

SEQ ID NO: 138759 - protein, 72 aa, Oryza sativa
  Clone ID: PAT_MRT4530_40117C.1.pep
IFGSVLASRWYGVSLIKLHGNRAIYNNSTTQKARLITCDQLQNCLIHYVNSSHRASQDKRMHFYATNKPKHY

SEQ ID NO: 138760 - protein, 75 aa, Oryza sativa
  unsure (1)..(75): unsure at all Xaa locations
  Clone ID: PAT_MRT4530_40118C.1.pep
GIRPXKRETKNKPEELTARETDLEPGLTDVXQXALPQGGGKXXXXDERQKKGERGEEEEKRGGAERGEYEDALLC

SEQ ID NO: 138761 - protein, 52 aa, Oryza sativa
  Clone ID: PAT_MRT4530_40119C.1.pep
EVKGGEGTKERGEGERPILLLLRRSSPRGYYLRRAPAGVEENHEEERSEWGF

SEQ ID NO: 138762 - protein, 287 aa, Oryza sativa
  unsure (1)..(287): unsure at all Xaa locations
  Clone ID: PAT_MRT4530_4011C.1.pep
TSAMTSLPAVAARRLGRCTLAGERRRFGTNGGHQRVERDAANSPVTKGAAEDQRTATATRLKRRRRSGRRRRWCSGGLRWRRRDGRGRRRLGDHDGGLPERRRRRERRRRTAGAAATTAALSYSALGRYRRREAKARVATGRGELGGPFKGARRRRRRPTATGDEKERSGSEREKPIRFDLESNTFQADLADVSKGEKVEEIEKIISPLSIRPETERIDRIXEGNSGGAALXGFGRRPMRGRRRPDRRDPPVSDSEGARAGGGLGRTGPRRERRVLGRLSAQSQKKT

SEQ ID NO: 138763 - protein, 100 aa, Oryza sativa
  unsure (1)..(100): unsure at all Xaa locations
  Clone ID: PAT_MRT4530_40120C.1.pep
KQETHSFAWCLPPESPTPPLLLFPSPRRDEIFPLRQYFDPDGFAPTTLLRSYTLHSALFXRILMNQYVNKKLSNQNNMYHMTRICSPRRFILSIGSSLYK

SEQ ID NO: 138764 - protein, 81 aa, Oryza sativa
  Clone ID: PAT_MRT4530_40121C.1.pep
MAQHEGKHAEHGTAMGRAGTARSWAVPGPSAGEPEVAASARRSGDRRSAERVRASGDAMCMVASPVAVPHAACPELSAWSD

SEQ ID NO: 138765 - protein, 90 aa, Oryza sativa
  unsure (1)..(90): unsure at all Xaa locations
  Clone ID: PAT_MRT4530_40122C.1.pep
MARVLKPSNWEKPWVTQIKCLXKKSPFPKWGKYKKAPNKSPFQKFAHLKWKRDPPFNGPLNPGGCGVTPKGTLSFCNALTPPPFSFFPFF

SEQ ID NO: 138766 - protein, 70 aa, Oryza sativa
  Clone ID: PAT_MRT4530_40123C.1.pep
MGRGIPAPTPSGTGWNVGARPPVRSDVTGDMPLGEGLGARQCEGPRGVTWHPEAPWLPLRLPRCGGRARL

SEQ ID NO: 138767 - protein, 62 aa, Oryza sativa
  Clone ID: PAT_MRT4530_40124C.1.pep
MRSAGELPSRPATWPYSLALPPHLGRRRGSHGASGCHVTPLGPSHCLAPRPSPSCHVERGAS

SEQ ID NO: 138768 - protein, 93 aa, Oryza sativa
  Clone ID: PAT_MRT4530_40125C.1.pep
EWLMNHSIQNQNKFWEFYNRNRARLMKTGSHSISGINKQKFLLFCSSSFFIHSKCKRETKLDSSDKIIYCIFIASIISPLIFFWSTLIHHTNK

SEQ ID NO: 138769 - protein, 89 aa, Oryza sativa
  Clone ID: PAT_MRT4530_40126C.1.pep
TYNYSSNYFGSFPREAKITFEGLVMEALPNGMFRVRLENDTIILGYISGKIRSSSIRILMGDRVKIEVSRYDSRHYHLLIRSPGKDGPG

SEQ ID NO: 138770 - protein, 61 aa, Oryza sativa
  Clone ID: PAT_MRT4530_40127C.1.pep
ALHQIFLHSFSGSNLPRTITLLFFWSPSSLSMQNSSSRQPRPFQLVASQRQHRRSPKITNI

SEQ ID NO: 138771 - protein, 49 aa, Oryza sativa
  Clone ID: PAT_MRT4530_40128C.1.pep
GSSRPRSPRGSFKIRDRLSHGTRYSDNRINSRANTCNKPRLPVRGPFIT

SEQ ID NO: 138772 - protein, 520 aa, Oryza sativa
  Clone ID: PAT_MRT4530_40129C.1.pep
MVDEELFDKSSNDHSISSEEEDMLVRSYSNLNVSFGYHCNSYQCFSLDTDEYDISPNKRLETNTMMTSQNGSFTCLSGAAISANFTLANTNICKGLIGEEILPELDSPNSFRKIVSSPSMSRLDLLSTSQGSPVSTESSIFEISKNIWRSSAPTTVSSNFLTSTEIKMAGGAAGEDRVQAVCSEKNGWLICGIYDGFNGRDAADFLAVTLYDNIVYYLYLLECRIKQENGLYGSPEGSLNGVKSELTLAMRFAENEDVKFSETFRAGVLKCLTTAVEQAENDFLCMVEQEMDDRPDLVSVGSCVLVVLLHGTDLCILNLGDSRAVLASVPSSGMDKLKAVQLTEIHSLENPLEYQKLLADHPNEPSVVMGNKIKGKLKVTRAFGVGYLKQKKLNDALMGILRVRNLCSPPYVYTNPHTVSHKVTEDDLFVVLGSDGLFDFFSNDEVVQLVYQFMHDNPIGDPAKYLIEQLLLKAAKEAALTAEELMRIPVGSRRKYHDDVTIIVIILGNAQRTMTASTSL

SEQ ID NO: 138773 - protein, 131 aa, Oryza sativa
  Clone ID: PAT_MRT4530_4012C.1.pep
HDRQPPHLLHLNSPRLLLEAAVIDVGAPSVLVTDSSHHRVGRISPPLHPPLPPLHRRLPLPPSVAAPARLLERINKRREEKKKKKGEMHPVSQASGFWVKLSAAKAKFHPIYFTETNRGENRDTGHTHLKL

SEQ ID NO: 138774 - protein, 149 aa, Oryza sativa
  Clone ID: PAT_MRT4530_40130C.1.pep
MPRWSPPPCCGARTHGGTRLGRTAQPRRLAGQPSTPAACRPAAVVATASTSNSNSRRRACSRRRAACLRKKAATGTARRRRHGRARRRSQPRRPLSHGGARRRSQPRRPPPPAPSPAAPPPPSPAVPVAAVRRPRRPLPSRESFPSPTL

SEQ ID NO: 138775 - protein, 77 aa, Oryza sativa
  unsure (1)..(77): unsure at all Xaa locations
  Clone ID: PAT_MRT4530_40131C.1.pep
EVPVVAIYVTDLPNGCLINLTPRQRDFLLAGNKRNPQAYRREVEESXTNIFSGFRLELLRCQALARVTWSKELTLTV

SEQ ID NO: 138776 - protein, 79 aa, Oryza sativa
  unsure (1)..(79): unsure at all Xaa locations
  Clone ID: PAT_MRT4530_40132C.1.pep
QVRYAFVGVRKVRLSPNRRLRGVQSLRKKHHLLVRPFGLMLNTLHTEPRRVXPSRRISTSWLQQPDFFYKSTYLSLIAP

SEQ ID NO: 138777 - protein, 40 aa, Oryza sativa
  Clone ID: PAT_MRT4530_40133C.1.pep
IDSCRLCLISKRTRGMKCDLRYDEYRCYNLWPNLHLFCFF

SEQ ID NO: 138778 - protein, 64 aa, Oryza sativa
  Clone ID: PAT_MRT4530_40134C.1.pep
MQTAKGRLLPWSTSAWAVGPLHPSSEYWIFSKGKYIGISQKLTFGVALVPALDYATAAAAAKPA

SEQ ID NO: 138779 - protein, 88 aa, Oryza sativa
  unsure (1)..(88): unsure at all Xaa locations
  Clone ID: PAT_MRT4530_40135C.1.pep
EGXXXHPSASXLHLLSFNSAPXRPLHPHPTPRASLPSLCWNNDRFACCSGEVFXGRSIGWAGSSEGGFXRAPPGCRRVEXCVEXEKRA

SEQ ID NO: 138780 - protein, 71 aa, Oryza sativa
  unsure (1)..(71): unsure at all Xaa locations
  Clone ID: PAT_MRT4530_40137C.1.pep
XGXXXVVXPKVRVGSXLGIXGXRXSDXWWWWWWWTLXRXXRXXDVIXXGXARXGXLXFSAGPXVRPXXXXL

SEQ ID NO: 138781 - protein, 155 aa, Oryza sativa
  unsure (1)..(155): unsure at all Xaa locations
  Clone ID: PAT_MRT4530_40138C.1.pep
MGQMVSDENFEEQAARNGGIIKHGREILFQVKICLGTPFAFMLWMEYAGADLAESGFHHMWLPPPTQSLSIETYLFQNXTCLNSCYGSLHDLQALLRKMKEHNVRAMADVVINHRVGATQGSNGMYNRYDXGIPVSWXDHAXTSCSGWKGNXRPV

SEQ ID NO: 138782 - protein, 258 aa, Oryza sativa
  unsure (1)..(258): unsure at all Xaa locations
  Clone ID: PAT_MRT4530_40139C.1.pep
PRPPRVRASSNEXPLPTPISAAAGGSGGNAPPGRPTTVDSMLLDKGAAMLQALRPVKHIKQHVCTFALYAHDPRRQVETHHFVSRLNQDVLQCAVYDADDKHARLIGVEYIVSRKIFDSLPAEEQRLWHSHAHEIKAGLWVSPHVPGMLEKAELEKMAGTFGKFWCTWQVDRGDRLPLGAPALMVSPQDDPAADVRPDLVRNRDDKYRYSTTELRAARADVAVPAEPRPGQADYWLRHRKGFAVDVVPHEMKCHAPFP

SEQ ID NO: 138783 - protein, 231 aa, Oryza sativa
  unsure (1)..(231): unsure at all Xaa locations
  Clone ID: PAT_MRT4530_4013C.1.pep
MWKYSSALQQRPEDRSLYGRAGGEGARTGSTGVGPTRQPHGPRWTGCTRLTLAGAVGPTRQPPPXAWAADGRAPPGSRXGAPEGGLAGTADGRXAHPRPDGRRRRPPARRSGARERGEKGEVKRRSSAHPGSTVTTETAAEAEEGGGAARVDEDSGVPAVGGRNGGVDEVDENAAKPKEAMPKREEVRGDDGGGPELGGDGGERGRRRGLESDGERVRRVAETEEGGTGNV

SEQ ID NO: 138784 - protein, 106 aa, Oryza sativa
  Clone ID: PAT_MRT4530_40140C.1.pep
GRVGGRVGGRVGFPAVIFTCIALSTVLFAGAAIMGYIMFGESTESQFTLNLPSNLVASKIAVWTTVTNPITKYPYCVILSFLHLFSHATLSLLNNMLAVHYKLIDS

SEQ ID NO: 138785 - protein, 309 aa, Oryza sativa
  Clone ID: PAT_MRT4530_40141C.1.pep
MGLSRFSDWIWPGSRTTRRARDAPASSVALAVAGALFPDSPSGFREPTVGTLRGPASSGGGARRARKGTSRRRSREVVDREHDMVVVPLGGGGDGYSSDSGSDDSDWSIGWLEPQGPELHSDGDSDGSFAVLVPCYRHGRCRVEEPGRGRLADGNVSDRVAMDGHPAIKHTQKTDAIAARAAARRPEFHRRQRRRRSGHGVEARDLDLADGGFPPTADEEVGRGGCGSFLDSPSPEEEGRHSARPHRRCRSARCRLPLSLVPAVSYSPPRPPLEPPLHPTSVTSVSARLCGQANRTIDLGGSHGNRFGW

SEQ ID NO: 138786 - protein, 83 aa, Oryza sativa
  unsure (1)..(83): unsure at all Xaa locations
  Clone ID: PAT_MRT4530_40142C.1.pep
XKYLKRRATIVLLYEQIIRQNQCSSTSSFVHLYCSQPQTNHRLCWIVHSTITYANRGSNLRPQFIXSGCAYNPRNLSLASRNP

SEQ ID NO: 138787 - protein, 195 aa, Oryza sativa
  Clone ID: PAT_MRT4530_40143C.1.pep
MVSSKIHCAMAALLLAILLPVSHASGRYVAPAPAPVPVPPPPRTSPPSRIQPVVVVQGTIYCKSCNLSGYNRYMDASPLPNATAQLVCYGDKVLNMTSTATDKNGYFLVMVYRLDVFRRSRCRVYLGSSPSPLCAAPFIPSNKWLGLTLERERVASLPKGVRGVYRPKSTLMFGPGTGGKCPAAAAADAAGVPMM

SEQ ID NO: 138788 - protein, 37 aa, Oryza sativa
  Clone ID: PAT_MRT4530_40144C.1.pep
MKKATLSTAPSFPSVADNGSHIQYSTEGEDSEYQISP

SEQ ID NO: 138789 - protein, 231 aa, Oryza sativa
  unsure (1)..(231): unsure at all Xaa locations
  Clone ID: PAT_MRT4530_40145C.1.pep
AAANSQKKKAAEKKKPAATILKPAPPPPPPPSPSVQQSSSDRTPSAVGSHHIEEEIQPTAPAIPXRLHEIQALIPDELADILTLAIYLEQHQFKLEKAKLRLAERREREDIEATIQTNRQLVHEEKAKLDQLSEGPIRSNIDRLEARKIELLAQLEECDAELDMEHKKLADLPKSIEEQKVRLKSAIKNVADLTKSLKIILGTDAQDTKAIEEVEQIRQRAISAIQRYLSQ

SEQ ID NO: 138790 - protein, 268 aa, Oryza sativa
  Clone ID: PAT_MRT4530_40146C.1.pep
IKSTGTLTHPKSQKKKAAEKKKPAATILKPAPPPPPPPSPSVQQSSSDRTPSAVGSHHIEEEIQPTAPAIPALVNLFSFNIKDYLDEEIEEDTTSKPLVPLTRLHEIQALIPDELADILTLAIYLEQHQFKLEKAKLRLAERREREDIEATIQTNRQLVHEEKAKLDQLSEGPIRSNIDRLEARKIELLAQLEECDAELDMEHKKLADLPKSIEEQKVRLKSAIKNVADLTKSLKIILGTDAQDTKAIEEVEQIRQRAISAIQRYLSQ

SEQ ID NO: 138791 - protein, 312 aa, Oryza sativa
  Clone ID: PAT_MRT4530_40147C.1.pep
MASQRRRSSAATIAVFFFLLSLLAVFFQPAAAYYHPQGKRQTVAVFWGRNKAEGSLRQTCDTGDYNIVIISFLSVFGHGKYWLDLSGHDLRDVGADIRHCQSKGVYMLLSIGGDGDGYSLPSSKSAADVAYNLYHSFLGRPRAGIFRPFGDDTIVNGVNFFIDHGPGDHYDDLANRINDYNQNIHDPIGIMLTATVRCSYPDPRMKKALDTKLFTQIHVRFYDDPRCSYNHAGLAGVMAQWNRWSARYPNSRIFLGLAAANVTGKNDMVGVGELSRKLLPAVQKTESYAGVTLWNSYYDSKTHYGRYVKHWA

SEQ ID NO: 138792 - protein, 367 aa, Oryza sativa
  unsure (1)..(367): unsure at all Xaa locations
  Clone ID: PAT_MRT4530_40148C.1.pep
RTDDGGGDGGTMTATARRHEGGGAAAPGRRNGGARRGGTKAAARRGGGEGGKXGGKEGGVVWDGRATGGGIYRARGGVAGFXTTTERRGDVGLGATATRGDGTAQRDGDTARGSGRGGGSWLGXRQRRRATATGWRVTQRRRATGDAMTTAERRRDGDAATGRRGAARGLGARRWRQGSAGLETTATRRTRRAGAGRRXRRRAARGNDGDGARRGSGDATGRRRCAGREVVCARREAPGHGCEADATAMATARGAAMMSMRRRRRRHARRTDGGSGVARAGAARGARGSTAEEGWWLGNQIKHRRLLGCVAVPVRGVVLRPPAAIPRRRLLPPVAACRRRALARPDRLRATPVPLAAAPLGRPIGSG

SEQ ID NO: 138793 - protein, 280 aa, Oryza sativa
  unsure (1)..(280): unsure at all Xaa locations
  Clone ID: PAT_MRT4530_40149C.1.pep
STRPQPVPHPTAHSSHRPTHSTPPPHHTTQXHPPPHAQHATRNRAPTSPPRNSHRPTPRPPPHNAQRSAPHPPPPPLATHTRAHPHPTPHPPLAHPTSPPATLAPRPPHAHATRTPRAPPRPAPKRTPHHPTTPSPPPPPERTHATPTPTLRPPPPPPRNPPPPPTPTPTRKPHTRATHAPRTPPSHANSHGYTAATQEPPXSLPPSTHPPTGRAGGAXPIGPRPPTPPRKRTWPKPPTRRSRHPHAPRACHTAPAPLDGTCASIPADKTILPPGVHSLH

SEQ ID NO: 138794 - protein, 494 aa, Oryza sativa
  unsure (1)..(494): unsure at all Xaa locations
  Clone ID: PAT_MRT4530_4014C.1.pep
IFTQPDLNMRQRRWLELIKDYDMGIHYHPGKANVVADALSRKDYCNATEGRQLPLELCKEFERLNLGIVSRGFVAALEAKPTLIDQVREAQIXDPDIQEIKKNMRRGKAIGFLEDEQGTVWLGERICVPDNKDLKDAILKKAHDTLYSIHPGSTKMYQDLKERFWWASMKREIAEYVAVCDVCQRVKAEHQKPAGLLQPLKIPEWKWEEIGMDFITGLPRTSSXGHDSIWVIVDRLTKVAHFIPVKTTYSGSRLAELYMARIVCLHGVPKKIVSDRGSQFTSNFWKKLXEEMGSKLNFSTAYHPQTDGQTERVNQILEDMLRACALDFGGSWDKNLPYAEFSYNNSYQASLQMAPYEALYGRKCRTPYEVAYQLELPQSLAGVHNVFHVSQLKKCLRVPTEEANLEQIEVQEDLTYVEKPIRILETNERRTRNRVIRFCKVQWSNHSEEESTWEREDELNRGFEFDSDRSLSRTLIFPSRRRSLWAFAAAFQPL

SEQ ID NO: 138795 - protein, 79 aa, Oryza sativa
  Clone ID: PAT_MRT4530_40150C.1.pep
CTNGTPTPPKLSGSIPQINKSINLLTPHEPPNNQILRHSPLHAHAFYITFFCFFQATFTLHKTHTNTFLFITKPKSTCN

SEQ ID NO: 138796 - protein, 109 aa, Oryza sativa
  unsure (1)..(109): unsure at all Xaa locations
  Clone ID: PAT_MRT4530_40151C.1.pep
MQLNPKARTRRNKTKVKGWRCAEIVLNVTQSMHGNILMKHINXNPTTCTTSHCRYRLNRPTXSDSNSADPXIADSDFSRSSLCFRNNFHLEFCFDPIFISDTWITKFGR

SEQ ID NO: 138797 - protein, 69 aa, Oryza sativa
  Clone ID: PAT_MRT4530_40152C.1.pep
KISLPETETYIFGKLTHFGCKATVQSASSHPILLNRSGPARGGTLLFCRKPRHDAPVKRGLAETIQGGP

SEQ ID NO: 138798 - protein, 103 aa, Oryza sativa
  Clone ID: PAT_MRT4530_40153C.1.pep
ASNGSAGSIQEGALEPYLAPMRPRSLIGLTVQSELVRIDHVHDLSSLPEHSTKRAIAENCSCALADTKSTDVASGTGLPGNILAGAVAHHYAGDCTGPSHEAL

SEQ ID NO: 138799 - protein, 687 aa, Oryza sativa
  Clone ID: PAT_MRT4530_40154C.1.pep
MDHVAGVQFAEQIEQALRKADELGDDDLRAALRRARNSPADTAFQLPLLQLPVEDPVHAGAAATQPEQQNAGRRLMCPELYRAAFSGSVDKLQELLVSPSGTAAEEQGRRHDGQCVLDETTAGLNTVLHLAASQGKIGLVRKLCDGDDTAAAAVAALLPKETTKSETALHHAARAGRRDMVSLLIRLAQMHGSGAPGLLVTKNSAGDTALHVAARHGRVAVVKVLMVAAPALSCGVNNFGMSPLYLAVVGRSIGAVKAIVQWKHASASGPKRQNALHAAVLQSVEITRELLSWNSNLAKEPDESESTPLHYAASDGVREIISMLIQSMPSAMYIPDKEGLTPLHVAAKMGHLDVIQDMLKECPDSAELVDNEGRNILHLAIERGHEPVVSYILGDPSLAELFNEQDKKGNTPMHYAVKAGNPRLAILESRNIKLNIVNNEGQTPFDLASNTTGFLHMIGFLLRLSANGARFGAQRQDCISQWSSKNVKEWNEKTTKNLGIVAVLIATIALTAMFNVPGGYNSDGVANLRATTPYNAFLVLDTVAMASSVIATMLLTYGRGAARSSTAWICMSLIFLWMALMSMILAFMAAVVSGLDSTTTKYILWSIFVLPFAFLVALSFVWAVPAPTFTTLLLLPRALAGEDSGWTRRRIGRRFRSVGVYLLVLYLFWFLNAVAFFLTVYVVVNAI

SEQ ID NO: 138800 - protein, 41 aa, Oryza sativa
  Clone ID: PAT_MRT4530_40155C.1.pep
CLGVPPQASVLGAYPHVRAGGPALRAGPSSQRGASLMKPPA

SEQ ID NO: 138801 - protein, 101 aa, Oryza sativa
  Clone ID: PAT_MRT4530_40156C.1.pep
IGPQDRCNRPGNCINCHNRYKDQPISDPAEAGGLLGQPRFGRTLAAPNQPGPPHVHSGCTLNDGCGVEWSFRLFYNRHTDPIKGGAHFTSQHTQASSNISS

SEQ ID NO: 138802 - protein, 56 aa, Oryza sativa
  Clone ID: PAT_MRT4530_40157C.1.pep
SCHTAESHAARWFHGNCCLMVEIQDEMVLTFAYPCVVWMYLTRDVKFFLCLDTTLF

SEQ ID NO: 138803 - protein, 104 aa, Oryza sativa
  Clone ID: PAT_MRT4530_40158C.1.pep
AERAKKPRASRPPLLATTLTVIGARNHRGEFVPRSTQILHSTWRNVDMLSTTVQDHGSFDRFCFLQEFGEDDLWLEEDTNDAVDSSSQVSLPCCRTFPKGSLEK

SEQ ID NO: 138804 - protein, 895 aa, Oryza sativa
  Clone ID: PAT_MRT4530_40159C.1.pep
MSSEPPPPQPQPQEAAGREASSSLSPAKESAAGGGGVGGSGAPETNTLWVGNLPAQAAEDDVMASFSPHGALDCVMARAGPRSYAFVLFRSVPEARAALDALQGSKVKGSVVRLEFARPARAVKNLWVGGISSSISKEELEEEFKKFGKVDGIAFSRDQTSAYIDFDKLEDAISAHRALNGRVLGGQELCVDFQRSRGRAEWLETGSFNGRTGPAKGYGVRNRESNPTNVLWVGFPNTAKINEEALRQAMAVHGAVTNTKVFPTRQYAFVEFATVGEASNAKKNLDGRLFNDQRIQILFSNSELAPNKLDNPTAVSGFPKSEMYYDDGQYGASDYFDPRRGRSRYFEYSGVPVSGGILPSPESGNPLLTGRSAQSTFDPREAKRLRLDAAADPYDTRAGSEGLYSAGYSQRESARSERSSSPAIRIHGTVHRTSYLEHFWRGSIAKGGSPPLDLTHIPLFCRPDVVNCSARTGLDMLAKHYRDASGFDIVFFLPDSEDDFVSYTEFLRYLGSKSRAGVVKVDGGTTLFLVPPSDFLRNVLQVDGPERLYGVVLHIPQMSAAAPASAPTPAVQRPQLTAPESQPYYDEREIPLQRRYSMITPSNNHHRDADHRGSLREDSLHQLGQILARPRVDEGQVVQPNLAGIPTNAGLQVQPSLQPDMIATLAKLLPSGQSSALVTGQLPLSSTDQPALTQMNDASTLAKVWRPENQAMASTSSLEQIGNFQHSGQQFSKQAGAVHLPNYGNLAGAQEHPTQHSAYNPEMTLNLPPPPPPPTLPPSSAILSSQVGHSLPTQMSQQQYQPEQYYMTQSNYGQLATVSSSNLQAHHQQIVATPAAQAPVAAQFPPAMQAPAAAQAPVAAQASADEAERNRKYQATLQLAQRLLGQLQQKPGNQP

SEQ ID NO: 138805 - protein, 1150 aa, Oryza sativa
  Clone ID: PAT_MRT4530_4015C.1.pep
LWQQFVANFQGTYKRHAIEDDLHALTQNSGESLREYVRRFNKCRNTIPEITDASVIRAFKSGVRDRYTTQELATRHITTTRRLFEIVERCAHVDDALRRKNDKPKTGGEKKSAADTSESSKKKNRKNGKRKAQAEVLAAEYANPSKRPDPQSSDTKKSWCPIHKTDRHSLEDCLLFKKSLEKHMAFEKGKRVRVVEKNEESPPHESNSAYPDSDLHVSHIFGGSTTYSSKREYKKVEREVCSTWQGAAPKMKWSEQKMEFSEVDHPKTAVIPGRYPIVVEPTIRNIKVARVLIDGGSSINLLFASTLDAMGIPKSELTPTDQPFHGITPQSSSRPLGKITLPVTFGQANNFRIEQITFDVTEFDTAYNAIIGRTALAKFMAASHYAYQVLKMPGPKGTITIQGNAKLAVQCDKRSLDMVEQTSTPPATSKPPKKELALIAFLRDNADVFAWQPSDMPGVTREVIEHKLMVRPDAKPVKQRLRRFATDRKQAIREELDKLLKASFIREVLHPEWLANPVMVWKANGKWRMCVDFTDLNKACPKDHFPLPQIDQLVDSTAGCELLSFLDAYSGYHQISMAKEDEEKTTFITPFGVFCYVKMPFGLITAGNTFQRMVQGTLSNQLGNNVEAYVDDIVVITKTSDSLIDDLRETFDNLRRYRLMLNPEKCAFGVPSGKLLGFLVSGRGIEADPEKIKAIENMKSPTRLKEEAEEAFIALKCYLSNPPVLVAPQPNEELFLYIAATPYSVSTVIVVEREKVQQPVYYVIEALHDAKTRYPQIQKLLYAVIMTSRKLRHYFQAHRVTIVSSFPLGEVVLADFVADWTMPDNKPDNQSDNETWTMVFDGALNNQGAGAGFILTSPSGDQFKHAIHLNFRATNNTAEYEGLLAGIRAAAALGAKRLIVKGDSELVANQVHKDYKCSNPELSKYLAEVRKLEKSEELPEDYTEAEKITRKAKIYCMIGNDLYKKAPNRILLKCVSTDNGRQLLLDIHEGICGSHAAGRTLVGKAFRQGFFWPTALKDACNMVQRCEACQFHSKHTKLPAQALQTIPLTWPFSCWGLDILGPFPRGQGGYKFLFVAIDKFTKWIEASPTKEIKADNAIKFIRGIFCRYGLPHRIITDNGSQFISADFQDYCIGLGVKICFASVSHPQSNG

SEQ ID NO: 138806 - protein, 1109 aa, Oryza sativa
  Clone ID: PAT_MRT4530_40160C.1.pep
MGVAEGDAESMATKVADLTASLNNILVSLQGMEKWIPCVDNGIRELNKSMEGIEVHVTALEASTPMNMKTPVGPRVEEQHQGAAVESLAAQERTLGRGKRQFPHSPIPFELGESSERGNGVNGSFRYGGTRLPKTDCPRFDGDNPKLWKTNCEKYFHMYQVPFESWAAFATLHFTGNAALWLQTYEELHSVESWAEFYVAVHSKFGRDKYQEHLKELDGLVQMGSVEEYHSRFEELMHRVLVYNKGYDETYFVTKFVGGLKTEIKIAIKLHKPRTVDAALSLAKTQEELLNEVGKKGYSKTVFKEPYKPQGKPSYKGKGILGPTPEEPKKVEEKPKWEDRFESLKSARRARGECFKCGEKWGPGHKCPKSVQLHILEELLEVFQIRDANEGEAEEGDSGSEEELVISECAMTGSSGRKTIRLEGLIQKHHLLILVDSGSTSNFLAERVAEKLNLPIRGTTLSQITIADGGKMTCAKVAPGVEWWCQGQSFVTDLKLLPLGSYDMILGMDWLEEFSPMWIDWKRKKMRYSPIQKNEIEKQVSQMLNQGIIQPSVSPFASPVLLVKKKDGTWRFCVDYRGLNGITIKNKYPMPVVEELLDELAGAQWFTKLDLRSGYHQIWLKEEDEHKTAFRTHQGHYEFKVMPFGLTNAPATFQGLMNTIFNHLIRKGVLVFVDDILIYSKSLQEHVQMLKEVLTVLHKHKLFVKMSKCSFAQQHLEYLGHIIGIQGVPEWLQTQPRQTEVEDCQAISISVPRWLEVIQEWYEKDAQAKELLAQLSIDPKGVGDFALVDGVIQHQGRIWLGNHQEAKQAVLLALHSSGLGGHSGVAATYQRVKQLFSWPAMKKEVHDYVQGCQAWHTISMDFIEGLPRLGGFDTIMVVIDKFTKFARFIPLTHPFTALSVAQLFMRHVYEVFGMPRIIISDRDRVFTSALWQELFRLADVKLNMSSSYHPQTNGQTERLNQCLETYLRAQQRMKHQANKHRSERHFEVGDMVFLKLQPYVQLSVARRSCHKLNFRYFGPYKVLDKVGKVAYRLELPKESQIHPVVYVSLLKKAVAPGTQVCSDLPVQCLEEADGSRPEKILRQQLIKRGCAAVRFGLVQWSGLPEELAT

SEQ ID NO: 138807 - protein, 43 aa, Oryza sativa
  Clone ID: PAT_MRT4530_40161C.1.pep
LSGRPGGGVFCPIFSAWPFAYANLLFYIKHTAYSWRRRTPRGR

SEQ ID NO: 138808 - protein, 255 aa, Oryza sativa
  unsure (1)..(255): unsure at all Xaa locations
  Clone ID: PAT_MRT4530_40162C.1.pep
MAAVAMSGSMEASPAAAVVPCRRDMKRRLQEEIDAVRGLLGKAEALVAVASEDVNGSAAASASAVAKRSPRRVRSPPRRGRSNREELDRARDRRHGGRSDREVFDRGRDRRHGGRSDRDREVFDRGRDRRHGGRSDREELDRERDRRRSRSRRSHCEELDRERDRRRRRSSDREVFDRARKIPRRRXRTRRSPNRARSRPQRARRRNARPKTARSRRRWTRRRRSASGRRARSPTIMARHWTSTSTSPAAAPSLL

SEQ ID NO: 138809 - protein, 55 aa, Oryza sativa
  Clone ID: PAT_MRT4530_40163C.1.pep
SFFWFSLFDSFLFSVIRLLFVFFFLRPRSVLYVVNNVLPLLIKLISYEIILVCKN

SEQ ID NO: 138810 - protein, 169 aa, Oryza sativa
  Clone ID: PAT_MRT4530_40164C.1.pep
DFCWPSLSPSTHQWRLLSTSPSPPPPPPPPAPPPTSLPPPPLATVPVDNPAANPTVTSTTNPAAMPGTQTTPSLANPVAAGGGGGGGGGSWCVASPSASTAALQVALDYACGQGGVDCSAIQSGGGCFNPNTVRDHASFAFNSYYQKNPVQTSCDFAGTAILTSTDPSK

SEQ ID NO: 138811 - protein, 55 aa, Oryza sativa
  Clone ID: PAT_MRT4530_40165C.1.pep
YSRFMAITYVWLMSNRIMFKFSSAVACMFECGLQNDGLECSMCSLCSLCYVWWVS

SEQ ID NO: 138812 - protein, 42 aa, Oryza sativa
  unsure (1)..(42): unsure at all Xaa locations
  Clone ID: PAT_MRT4530_40166C.1.pep
YFEQSQAQAQAMLALNMPGICGIXPSYHTAPCSISTGGGIWY

SEQ ID NO: 138813 - protein, 423 aa, Oryza sativa
  Clone ID: PAT_MRT4530_40167C.1.pep
MAATTTRPLPLLLLLLLPPLLLLLLSFHAAAAAAAEEFPRDGRVIELDESSFEAALGAIDYLFVDFYAPWCGHCKRLAPELDEAAPVLAGLSEPIIVAKVNADKYRKLGSKYGVDGFPTLMLFIHGVPIEYTGSRKADLLVRNLNKFVAPDVSILESDSAIKSFVENAGTSFPMFIGFGVNESLIAGYGGKYKKRAWFAVAKDFSEDFMVTYDFDKVPALVSLHPKYKEQSVFYGPFEGSFLEDFIRQSLLPLTVPINTETLKMLDDDDRKVVLAILEDDSDETSSQLVKVLRSAANANRDLVFGYVGIKQWDEFVETFDISKSSQLPKLIVWDRNEEYEVVEGSEKLEEGDQASQISQFLEGYRAGRTTKKKVSGPSFMGFLNSLVSLNSLYILICVFALLGVMIYFTGQDDTPQVRRAHEE

SEQ ID NO: 138814 - protein, 75 aa, Oryza sativa
  Clone ID: PAT_MRT4530_40168C.1.pep
SNAADPAGSQVIALPNRGATPDSIALRVTSISNISDVPLIVSDNISVATGGSVVTASCQTPHERCRYSHNQHRRF

SEQ ID NO: 138815 - protein, 88 aa, Oryza sativa
  Clone ID: PAT_MRT4530_40169C.1.pep
STPTTIYRIIYQDRRSTYKPTYAKTRRQISTSEIGTASPLRCLRILSGETKALSLISPDTNSRRKTTLLSTTSQTFRPPCRQQLYMLP

SEQ ID NO: 138816 - protein, 1448 aa, Oryza sativa
  unsure (1)..(1448): unsure at all Xaa locations
  Clone ID: PAT_MRT4530_4016C.1.pep
MVNHLSSGHHLDKTPLHLAAPAIFVTILMAAEKYDTRETMKTIPDIASHHDVARTRSEEDTQAKTETVITATAATNMMIANSGCQAILVEDAAITMMTMEIVAGTSTGGDDRILENPDVILVIVHRNQVTHRHRHHPHHPHCQTEIHGGHTIIDNPPPPAADVKLSTVLYVIVLYTAGADDNALANYLPVALKGSARSWLVHLRPYSISSWADLWQQFVANFQGTYKRHAIEDDLHALTQNPGKSLRDYVRRFNECRNTIPEITNASVIYAFKTGVRDRYTTQELATRRIRTARKLFEIVDXCAHADDALRRKNNKPKTGGEKKPAKDAPESSKKKSHKSGKTKAQTEVLAAEYVDPPKHPDPQGNDTKKIWCPIHKSDRHSLEDCFVFKKSLAKQLALEKGKRRAATKMKWLEQKIEFSDEDHPKTAVTPGRYPIVVEPTIXNTKVARVLIDGGSSINLLFACTLDTMGIPRTYNAIIGRTALAKFMAASHYTYQVLLMPGPKGTITVQGNAKLAVQCDKQSLDMVEHTPSPPATAEPPRKLVDSTAGCELLSFLDAYSGYHQISMAKEDEEKTAFITPFGVFCYVKMPFGLITAGNTFQRTVQGALNDQLGNNVEAYVDDIVVKTKTSDSLIDDLRETFDNRRXYRLVLNPEKCTFGVPSGKLLRFLVFGRGTEENPEKIKAIKNVKSPTRLKEVQKLTGCMAALSWFVARMGERGQPFFALLKKQDKFVWTQEAEEAFIALKRYLSNPPVLVTPHPNEELFLYIAATPYSMSTVIVVEREKVQRPVYYIQKLLYAVIMTSRKLRHYFQAHRVTVVSSFPLGEVVRNKDVVGLIAKWVVELSXFDVHFVPRTAIKSQVLADFVADWTMLENRSDSQTDNETWTMAFDGALNSQGAGAGFILTSPSGDQFKHAIHLNFRATNNTTEYXGLLTGIRAAAALGVKRLIVKGDSELVANQVHKDYKWSSPEVELSKYLAEVLRKLEKRFDGIEVRHVYRKDNIEPDDLARRASRREPLKPGTSLDVLTKPSVKEANDEDSTVAPDISSGATEAECAIADIETTDGXRIPLIKFISSDKLPEDDAEAEKITRQAKIYSPNGVLLKCVSFDDGKHLLLDIHEGICGSHAADRTLVGKAFRQGFFWPTALKDICDMVQRCEACQFHSKHTKLPAQAFQTIPLTWPISCWGLDILGPFPRGQGXATSTGEIKADSAIKFIKEIFYRYGLPHRIITDNGSQFISANFQDYCIRLGVKICFASVSHPQSNGQVKRANGIVLQGIKTRVYDRLMSHDKKWVEELPSVLWAVRTTPTTSNKETPFFLMYGSEAMLPTELQHQSTXVHKYSDEDQEEQRTDDVNLLEEHRERVAVRAASYQQALRRYHEKRIRARTLSISDYVLXRVQSQAGRNKLSPKWEGPYTITQVLRPGAFKIADGDGRELANSXNIDQLRKFYV

SEQ ID NO: 138817 - protein, 76 aa, Oryza sativa
  unsure (1)..(76): unsure at all Xaa locations
  Clone ID: PAT_MRT4530_40170C.1.pep
WRNRCGPGGTPVMIIGGDGYCAXGTALNLSGRNYEACIVDNLCTRKFDLTLGLDTMTPXTTMHERVTVWGEQLGKH

SEQ ID NO: 138818 - protein, 203 aa, Oryza sativa
  Clone ID: PAT_MRT4530_40171C.1.pep
MSGSATSAALRFANCGSQASTRPPPPPSKSPSYINPSVPDIFIELCIGRRSPAPRLSTTLPLACCHRVSSVYRSRWHCRLGLEYQSYSSSGCHRPHVLALPRPPLLLLEFAVKMQIFVKTLTGKSITLEVESSDTIDNVKAKIQDKEGIPPDQQRLIFAGKQLEEGRTLADYNIQKESTLHLVLRLRGGLWACSIGSPFYLLL

SEQ ID NO: 138819 - protein, 69 aa, Oryza sativa
  Clone ID: PAT_MRT4530_40172C.1.pep
MGGSKDLEETSVADHGAATNHEVVGLGAALRDAILGEGKELDEVTAACCSLDLGHLIACQEKQGNKRES

SEQ ID NO: 138820 - protein, 105 aa, Oryza sativa
  unsure (1)..(105): unsure at all Xaa locations
  Clone ID: PAT_MRT4530_40173C.1.pep
NISIGHPAVTNDTYLNRARERQEPPPPPVGRQAPDPALPTNTAAGSAAPSPVPPPPPXSRLREPPPPSLASPPSPPVGRQAPDPALPTNTAAGSAAPFPAPPPPP

SEQ ID NO: 138821 - protein, 113 aa, Oryza sativa
  unsure (1)..(113): unsure at all Xaa locations
  Clone ID: PAT_MRT4530_40174C.1.pep
RFYRPCPPSPSSPRLASPLRFTASLLHTRRHSPRPKYSLAFAFPPPRPRSHHLASASNGVLPVQAGGGGSPPXQRRRRAPPPTNPQIPXRRRQRGGSSSFWFPLSEGLIARLX

SEQ ID NO: 138822 - protein, 135 aa, Oryza sativa
  Clone ID: PAT_MRT4530_40175C.1.pep
TRVFNKVMRAEWEKYLLGKAELDGLHRKNKKTSQQLKGFGVLDGEVPMRSGESAGPVSISKVEANALLAAASEISTVTKEANLADDSNVSCKKRSFGKGKGTGKFKKTMAKREASKLRNRNTTEHTDLEVEGQSG

SEQ ID NO: 138823 - protein, 585 aa, Oryza sativa
  Clone ID: PAT_MRT4530_40176C.1.pep
MEQYEVLEQIGKGSFGSALLVRHKVEKKRYVLKKIRLARQTDRCRRSAHQEMELIAKVRNPYIVEYKDSWVEKGCYVCIVIGYCEGGDMSEAIKKANSNYFSEERLCMWLVQLLMALDYLHVNHILHRDVKCSNIFLTKDQNIRLGDFGLAKVLTSDDLTSSVVGTPSYMCPELLADIPYGSKSDIWALGCCLYEMTALKPAFKAFDMQTLINKISKSVLAPLPTIYSGAFRGLIKSMLRKSPDHRPSAAELLKHPHLQPFVLELQLKSSPARNLFPDTNKASCSDDENNWKAKYSKSHSFKVDRIVKVDKVAANNGHPSSTGTAKDYQELLKQPMDELLGQLTEKVVDEVIHGNHSRVTKSPAPTPRRASSTPRIRLEPSKTFHARAAETPPSKCSLERASQPTRRASTPVNMLQTPEKRQGADILTRLKSPDVSVNSPRIDRIAEFPIPSFDDEQLHPTTKLKLYPPSITDQSITKDKCTFQVLRSDSSKNHTGDSSDPSILGTDSNPLITSSSDWMKQRRFDTTSYRQRAEALEGLLEFSAQLLQQERFEELGILLKPFGPGKASPRETAIWLSKSFKGTGL

SEQ ID NO: 138824 - protein, 521 aa, Oryza sativa
  Clone ID: PAT_MRT4530_40177C.1.pep
MAEQTERAFLKQPKVFLCPKKSGKGKKPGKGGNRFWKNIGLGFKTPREAIEGTYIDKKCPFTGTVSIRGRIIAGTCHSAKMNRTIIVRRNYLHFVKKYQRYEKRHSNIPAHISPCFRVKEGDHVIIGQCRPLSKTVRFNVIKVIPAGSTAPSLPFYLLTSGTTNSTGNHRYRDEYNPLCDDFPPEFPPPDTAAISIFCVDPNGCCNFTTVQAAVNAVPSFSKKRNVVWINKGIYYEKVTVPATKPNITFQGQGFDLTAISWNDTANSSHGTFYSGSVSVFATGFVAKNISFINVAPIPRPGDVGAQAVALRIGGDQAAFWGCGFFGAQDTLHDDRGRHYFKECFIQGSIDFIFGDARSLYENCRVISIADPVPAGVRTITGSVTAHARESVDDNTGYSFVNCSIGGTGRIWLGRAWRPYSTVVFAYTSMSDIIASEGWNDWNDPSRDQYASSLYSVSIVTCMTKRTVFYGEYRCTGDGANLSDRVPYAQKLSDVQVLPYLNTSFIDGDRWLKPYCDSLISA

SEQ ID NO: 138825 - protein, 1439 aa, Oryza sativa
  Clone ID: PAT_MRT4530_40178C.1.pep
MAQDSKLDLLLKSMAENEKKREEAEARMRADFAELKKSLEIRLPAVEKKVDDLGIDLVALSNKVEQLEHNPNQPPSGDEFAGKVTTVALPKKEPIYKATPPTKGTRELDPTSPVHHSNEGWGSQFENTGFSARMIGNVPPMSCPQFNGDNPHMWKSNCEVYFDVYGIHPQNWVKVATLNFCGNTAFWLQSVRAQLMGVTWFELCDRVCARFSRDRQQALIRQWIHVSQTSSVADYVDRFDSIMHQLLAYGGANEPIYFVTKFVDGLKDNIRVGVMGHRPQDLDTACTLALLQKEALEGVQAINVKKNDSGTFVKSKSTSNFSQSVLPSKSTALINTEEKRSAEFSRPKDDKISALRAYRRSKGLCFVCGERWSKDHKCATSVQLHIVEELIHALQSGGEENSCSDGTPEIDDDSLMAISFHALHGTDSPKSIRLRGWVQGTELLMLVDSGSTHSFIDTKIGSKLHGVQKLLQTIKVQVADGGQIACDMFLPKCNWWTQGHNFTSDFRLLPLGNYDVILGMDWLEQFSPMQIDWIHKWLEFQHQHQLVKLQGIVPQTDCCPTITGAQLQGMSKNGSIMCMVQLNAVEVPEHAVIPTIVQPLLQEFQELFSEPTELPPKRTCDHHIPLIEGAKPVNLRPYRYKPALKDEIEKQVTEMLKTGVIQPSHSPFSSPALLVKKKDGSWRLCIDYRQLNNITVKSKYPVPVIEELLDELSGAQWFSKLDLRAGYHQIRMAEGDEYKTAFQTHSGHYEYKVMSFGLTGAPATFLNAMNDTLSPVLRKFVLVFFDDILIYSPTLESHLLHIRTVLQLLSASQWKVKLSKCSFAQQEISYLGHVIGVQRVSTDPRKIQDVVNWTQPTTIKKLRGFLGLAGYYRKFVKNFGVISRPLTQLLKKGIPFKWTEETETAFQQLKQALCSAPVLALPDFSKSFTVETDASELGIGAVLSQDKHPIAFLSRALGPKTKRLSTYEKEYMAILLAVEHWRPYLQHGEFTILTDHHSLMHLTDQRLHTPWQQKAFTKLLGLQYKICYRKGSSNAAADALSRREPFTSEIHAVSECVPLWMQDLIQGYDQDPHTKQIISELIVNGSSRPHYQLCNGVLKYKGRIWVGDNPALQHRIITEVHSTPFGDHSGFPVTYRKAKGMFAWTGMKKMIKTHLQSCQVCLQAKPDRAKYPGLLQPLPVPAGAWQVISLDFIEGLPRSSHYNCVLVEWHNERKLMQQLLQQHLHRAQQQMKHQADKKCSFRQFKVGDWVYLKLQPYVQTSVAQRACHKLAFRYFGPFQILDRVGSVAYRLQLPAGSSIHPVFHVSQLRAAVGFSKPVQEELPSSLGAFQIPLQFLDKRLTKKEDSTWEDMEDLCNRFPRALAWGQANFQEWGIVRPSLGRTQAPGGRADDKSEESEELKMDGKADDALQGDREEAPILGRGRRHKKPSVRVVGPEWAK

SEQ ID NO: 138826 - protein, 73 aa, Oryza sativa
  Clone ID: PAT_MRT4530_40179C.1.pep
RRRRLSPQRCGGGGGGGGGGEDDELETTARYGGVGAGICPRQWQRRREAERDRSAENVKCWWRRRGRASGIYI

SEQ ID NO: 138827 - protein, 57 aa, Oryza sativa
  Clone ID: PAT_MRT4530_4017C.1.pep
LNAAEGGFVLVDEFSSKSVNDLYKVSMCFYVFSVRSLQGLGLGYKFTFDLHIILVFK

SEQ ID NO: 138828 - protein, 62 aa, Oryza sativa
  Clone ID: PAT_MRT4530_40180C.1.pep
PYFSLLKESTWKKPSCVFLSSFYEISVFASKQFHCVVKETQNYFFILNWFFFFFFGGGGQAS

SEQ ID NO: 138829 - protein, 118 aa, Oryza sativa
  Clone ID: PAT_MRT4530_40181C.1.pep
LTSNFCRHQHLQCALLQVDAHLDGMVETRKEHEKIMPVVMVPLEWHPRHVLRQRSSPAANTKGQPRTTTPQLMTGFGGRRCDALWIVLFFWVPGVYVFVTMMARSIVKTKSIIKKKMQ

SEQ ID NO: 138830 - protein, 39 aa, Oryza sativa
  Clone ID: PAT_MRT4530_40182C.1.pep
MATRRALTSVLRSAFRLSSFFPYPCPRRALLHPHRRPFP

SEQ ID NO: 138831 - protein, 97 aa, Oryza sativa
  Clone ID: PAT_MRT4530_40183C.1.pep
QSPRRLPRLCATPSPTGVPSPLDGALTAPVRLCFVASSADLRESRRGILERTGLGRLEGRGEGDRCRRDPEKCAVCSCALAPSAASALALVGSGPRR

SEQ ID NO: 138832 - protein, 97 aa, Oryza sativa
  unsure (1)..(97): unsure at all Xaa locations
  Clone ID: PAT_MRT4530_40184C.1.pep
ARRRRPWAAAAATASPPTGSSRGPPAAAASPPVTACCEPFAENVHKMKEKRHQNRXSINWTMSRIKLINEWTIGPKFTSPEVLSQAVVRVVPSTPPP

SEQ ID NO: 138833 - protein, 70 aa, Oryza sativa
  Clone ID: PAT_MRT4530_40185C.1.pep
MEEGLDVLDFCKMGCTSSVCSTMNTCAGNEEGNHVVDRCNDASLVEKPFVVPVRNPPLVPVSKPGVPNRD

SEQ ID NO: 138834 - protein, 123 aa, Oryza sativa
  Clone ID: PAT_MRT4530_40186C.1.pep
HASDINRVSTVLSISKSEACVLLRNYNWSVSKVHDEWFADEEHVRKVVGFPEKLIEMPNDRELTCGICFENCPRTSMSAAACGHPFCSACWRGYISTSINDGPGCLMLRCPDPSCTAAVGQDM

SEQ ID NO: 138835 - protein, 121 aa, Oryza sativa
  unsure (1)..(121): unsure at all Xaa locations
  Clone ID: PAT_MRT4530_40187C.1.pep
TQSILSVRVCVGYMYKVGYNLELXVVIGIRTKWYQSMREIHGRGTSEVLHAATTTQGVKKRTWTLGGTWWRSTEFDRWNRILQTAVXQFDGCFQQGGDPLESTCREAILIHRALNTGNHTR

SEQ ID NO: 138836 - protein, 400 aa, Oryza sativa
  Clone ID: PAT_MRT4530_40188C.1.pep
MSVQLTPLLPPLSPSPLSSSLYPLLSPGYREAAPQRHAAAHWIRHSVVAAPSSSSSPSPNRRFARVRVFYHAVLDRGYFLADAADHLFTPTKRLRYLARFLLVALLLTRRADTVPRLATHICTLLDGSKKTLQEAEYKEWKHVVQEMEKMRPATTTAAEMEKSGHRPSISCVRSPVGQGTRLALLPDGRRSPPFSPMAAGGRRGSGARWRRRERRERRAAASAGEEGATRGGAGREKLLSVAWREERRGERDEEREDGGRGGRRGIRGIAEQEWLSHPTKNFITAFFRNLMLVTTSKTIFMDSSDIISANSLLRPPSMRVRDYRSEQQQGAARSTSCCAMNRTFISNNGRNGLQLQIYIYIYHNAKAKLEFFSTFQNSKPTHNDSKPRTAGVNQAGRGNI

SEQ ID NO: 138837 - protein, 238 aa, Oryza sativa
  unsure (1)..(238): unsure at all Xaa locations
  Clone ID: PAT_MRT4530_40189C.1.pep
FPNPPRPEREMYDPSPPGAFMLSPPPPPWXPPDLPAPPPPPACPPLYPPPYLPEPPSPPPFPPPPPPPPPLLPPPPLPPPPPLPPPPPPPPPLPPPPPPPPLPPMSPPGAPAAPPSSPAAPPGSPPRSWGGTPGWSAPTRAPPPSRRTSSPPTPPPGCGRPAPPPPPRTRPPPPPPRSRPAAASCSCPPPPSGSRAPAAAPPVAFTPPPPPEMEARLGATRNTSDVRPRMRMAPSISH

SEQ ID NO: 138838 - protein, 248 aa, Oryza sativa
  Clone ID: PAT_MRT4530_4018C.1.pep
MGRIRREKISKDGCGVRVIVPGSGGVQVIVPGGGGVHPGGDWRRTTKSRRNRFRFSARPEIKVAALEEEHGSGEEEEHGGGRGGEKHGGSTEEDVKCEKIGSVRLFLPSIAREVTFLPFHVSAMRVFRGVYSIIAHGFQIGLAHLIVRPQRRAAARLLLLPLVAARQCRSPPPSSSSRRHSRRLLPIPTYRSRIRAAEVANAPEGIHKCWEGVEKTTGVGQGGTRLYATVDLGKARLGWSRQHFLPSS

SEQ ID NO: 138839 - protein, 393 aa, Oryza sativa
  Clone ID: PAT_MRT4530_40190C.1.pep
MDSSSCLVDDTNSGGSSTDKLRALAAAAAETAPLERMGSGASAVVDAAEPGAEADSGSGGRVCGGGGGGAGGAGGKLPSSKFKGVVPQPNGRWGAQIYERHQRVWLGTFAGEDDAARAYDVAAQRFRGRDAVTNFRPLAEADPDAAAELRFLATRSKAEVVDMLRKHTYFDELAQSKRTFAASTPSAATTTASLSNGHLSSPRSPFAPAAARDHLFDKTVTPSDVGKLNRLVIPKQHAEKHFPLQLPSAGGESKGVLLNFEDAAGKVWRFRYSYWNSSQSYVLTKGWSRFVKEKGLHAGDVVGFYRSAASAGDDGKLFIDCKLVRSTGAALASPADQPAPSPVKAVRLFGVDLLTAPAPVEQMAGCKRARDLAATTPPQAAAFKKQCIELALV

SEQ ID NO: 138840 - protein, 465 aa, Oryza sativa
  Clone ID: PAT_MRT4530_40191C.1.pep
MKAAVRSKKSKGSFCHPPLLLLIVAIQFLVIYSPTLDQYMVMLTTGKPGFPSMLIDGRRSFKQVDEFIPEPHLRCDFRDNRSDVCEMEGAIRILGRTSEVFLVAPSLASISGGGGGVNATGVDANATRWKIQPYTRKGESRVMPGITEVTVRLVTADEAPPCDEWHDVPAIVYSNGGYCGNYYHDFNDNIIPLFITSRHLAGEVQLLVTQKQRWWFGKYREIVEGLTKYEPVDLDAEQRVRCYRRATVGLHSHKDLSIDPRRAPNNYSMVDFKRFLMWRYALPREHAIRMEEEDKSKKPRLLVINRRSRRRFVNLDEIVAAAEGVGFEVAAAELDAHIPAAASAVNSYDAMVAVHGSGLTNLVFLPMNAVVIQVVPLGRMEGLAMDEYGVPPRDMNMRYLQYNITAEESTLSEVYPRAHPVFLDPLPIHKQSWSLVKDIYLGQQDVRLDVRRFRPVLLKALHLLR

SEQ ID NO: 138841 - protein, 80 aa, Oryza sativa
  Clone ID: PAT_MRT4530_40192C.1.pep
LEKTDGVIVGERRCSNPSGKKQQEVVFGAHRPSRWHQSGPNLLGHLKGVTMGLQAWSGLDAGEAFEQRKSSRLSDGMMEP

SEQ ID NO: 138842 - protein, 109 aa, Oryza sativa
  unsure (1)..(109): unsure at all Xaa locations
  Clone ID: PAT_MRT4530_40193C.1.pep
MYDPSPPGAFMLSPPPPPWXPPDLPAPPPPPACPPLYPPPYLPEPPSPPPFPPPPPPPPPLLPPPPLPPPPPLPPPPPPPPPLPPPPPPPPLPPMSLPCLISRRISLQK

SEQ ID NO: 138843 - protein, 246 aa, Oryza sativa
  Clone ID: PAT_MRT4530_40194C.1.pep
MVRKLVASLFLGGGGGGGGGNDACSLSSSSSTASSWQWPSCTQARTLSFARHDAPASADDDDSKRRRQQEEEEDDYCVYKTSVMNPAFFLDDHSTCRSYSSAASAVNDVVDDDDEVIIRGLRSSNRRLFFEPESTSSIVVKGRAVDADAAAFDGATAMSIDSADPYGDFRRSMEEMVMSHMSGGGHDWGWLEEMLGWYLRANGKKTHGFIVGAFVDLVVALASSPSSATASSSAFQLPLQKGSQIN

SEQ ID NO: 138844 - protein, 120 aa, Oryza sativa
  Clone ID: PAT_MRT4530_40195C.1.pep
MASIPLLRLLLLLLPLPLQEHLWPSHHRPNDAGVGAGELHPIFVVPGASCSNLEAWLTDAYQPSGWFGLWENSSDLSAHHYNECFKEQMSLVYDPVANDYRNFPGIETRVANFGIVRGFR

SEQ ID NO: 138845 - protein, 79 aa, Oryza sativa
  Clone ID: PAT_MRT4530_40196C.1.pep
MAIARVNLAILCLSLIALLVLTTVPEAAGGQPGGYINYGAMSKNRSHGSPQYNHQGSSANHYTRGCEKQLHCRGKRRGF

SEQ ID NO: 138846 - protein, 116 aa, Oryza sativa
  unsure (1)..(116): unsure at all Xaa locations
  Clone ID: PAT_MRT4530_40197C.1.pep
IPKSXAPTHGSPPPPPAAAAAAXADGELRXLQAAHXXVHPVVAPRRRXVXPRXLRGAXPLXVLLRXHVGXXDGXQRPXHXQXRRXQXXGXXXXXXGVXIXRMTXXADXXEXRXXXX

SEQ ID NO: 138847 - protein, 54 aa, Oryza sativa
  Clone ID: PAT_MRT4530_40198C.1.pep
MGGDDAGSSESRKKEATSIAEVVRRNGWHGTAGLTGTGYYTIEEDGRKKNLLYY

SEQ ID NO: 138848 - protein, 445 aa, Oryza sativa
  Clone ID: PAT_MRT4530_40199C.1.pep
MGEKVSEAAAGVEDQDGGVAAAGMDGIQYCSEHPYRPGAAAAAVAGGGICAFCLQEKLGRLVSSSKSSPFFPLGGHPPPSASPSSPPSFRRAAAVVAEPPPPLRSSSGASRKLIPFGRRKASSSSSSSSSSASVALAGGGLKRSKSVAPRPEEHYSSSASSVTAESPRKKSFWSFLYLSSSPYTHQAVTSTSYGANGGAAAAARRKSVSVASAAWASRGGSAAGAHEQQQPRAAATSSVSGRRLEAIGEPESPSQVSSSSSFGRKVARSRSVGCGSRSFSGDFLERISNGFGDCTLRRVESQREPKPNKMRALGHLGGGGGGGADDDDDDDDVYQHQHRIKCAGFFGGMGPTPSYWLSAAEGAATAGGVGGARKLGGRSHRSWAWTALASPMRALRPTSSTTTTTTKTITAVHSSHVVAHSNGSTPAAALSISSPVPASSTAATD

SEQ ID NO: 138849 - protein, 428 aa, Oryza sativa
  Clone ID: PAT_MRT4530_4019C.1.pep
MPTDKASEPDGFTGIFFKVCWEIIKEDILLVFDSIYNLRCAHLNLLNSANIVLIPKKEGAEGVTDYRPISLIHRIAKIFSKMLALRLRPHMHLLISVNQSAFIKRRSIHDNFLFVRNMARRYHRLRRAMLLFKLDITKAFDSVRWDYLLALLQRRGFPTRWTYWLGAILSTSTSQAIELGAISKLRGRTTHLRISMYADDAVIFINPTRGDVTAFADILHRFGTATGLVTNLQKSQVAAIRCDGIELAEVLEGVPTVRANFPIKYLGLPLVLGRLRKVDLQPVFDKISGRITNWTGKNMAAAGRTTLIKSMLTAQPIYLLTALKTTKESLEQLDKQRRRFLWAGTGDITGGKCKVNWTKTCLPTSQGGLGVLNLEKFTRALRLRWLWHEWKDPTKPWVGLETPCDEIDRSLFAASTKIAIGDGNTTRF

SEQ ID NO: 138850 - protein, 121 aa, Oryza sativa
  Clone ID: PAT_MRT4530_401C.1.pep
MGGQAGELALRLASKAATGGDAGERGKTEERGKGGRERGLAPLPNREKEEGAGRRGRGKGELGLRLLAACARSGGGRGMTTAMTVGWFGVARRHGRQARAGAAEGDGGGDQAEVPHMILSY

SEQ ID NO: 138851 - protein, 292 aa, Oryza sativa
  Clone ID: PAT_MRT4530_40200C.1.pep
MDSDEKEKKKNKQIITEKMEINRLNSTKTNLPGLVSERESLKNTNWQNKETMKKEQSGIKSDGQNKKDMNLQNLENIKRRTKMAQSGIKSDGQNKKDMNLQNLENIKRRTKMAQSRLVSDSESLKNANLQNNETMKKEQSGTTVTQGADRTKSQVTGNRTEELRRKKTVEGSHYLQDFEKCKKSGTIGSEMCENKAQLLYDQYTFLNENERLGGQMSYTNLMQQIIQSPRVSLQANENSMILATSRFSPQESHQHDRLYEEQISTEHWSYEEFDRLYNNSNMVTWTEVIFSN

SEQ ID NO: 138852 - protein, 66 aa, Oryza sativa
  Clone ID: PAT_MRT4530_40201C.1.pep
TASRGGRFPGVVSFGSSFQVGVPGPLLDFFWASRAPPLNGPFSKVVFGVFPFRLFWALLFFVPSPP

SEQ ID NO: 138853 - protein, 136 aa, Oryza sativa
  Clone ID: PAT_MRT4530_40202C.1.pep
SERSGHLARKEKHPSQAARRQRPTAWRWCNGAREEEKRKREEVTVLTEQTRRREVGGVAGGEEETARSFGSSLSSSFPRSSCSTEGRTGKRRKRRSRWWRRWAPMRFRPPARGGRSCDGGGTRRERRGERRGRGRR

SEQ ID NO: 138854 - protein, 178 aa, Oryza sativa
  Clone ID: PAT_MRT4530_40203C.1.pep
MDSDEKEKKKNKQIITEKMEINRLNSTKTNLPAQYLEHLNIQPHVFELIAQYLENIKRRTKMAQSGLVSERESLKNTNWQNKETMKKEQSGIKSDGQTKKDMNLQNLENIKRRTKMAQSGLVSESESLKNTNWQNKEAMKKEQSGIKSDGQTKKDMNLQNLENIKRRTKMAQSSIHAF

SEQ ID NO: 138855 - protein, 226 aa, Oryza sativa
  Clone ID: PAT_MRT4530_40204C.1.pep
MRPSRRSAATAVAMGMSRLSATAFGGRRQTNQTEDDMWDPLFHFILRVRTNRTCCHVNTTAILRLQLLMLRRNVSKRRSSKTDKKYFLYLIKQEMEDEAEIIPGTDCIHRSKEKETNHRPRNVPVRRLENKHYNQQQHNPLWQMSKANGSGFYILHKARCSEIREAHQRGFSCPCKGEEETLEELTTVAAAPASSQIPPTICKSNRVGVRWGLMLIWQSPLSQTER

SEQ ID NO: 138856 - protein, 575 aa, Oryza sativa
  Clone ID: PAT_MRT4530_40205C.1.pep
MTYFPEEVVEHIFSFLPAQRDRNTVSLVCKVWYEIERLSRRGVFVGNCYAVRAGRVAARFPNVRALTVKGKPHFADFNLVPPDWGGYAGPWIEAAARGCHGLEELRMKRMVVSDESLELLARSFPRFRALVLISCEGFSTDGLAAVASHCKLLRELDLQENEVEDRGPRWLSCFPDSCTSLVSLNFACIKGEVNAGSLERLVSRSPNLRSLRLNRSVSVDTLAKILLRTPNLEDLGTGNLTDDFQTESYFKLTSALEKCKMLRSLSGFWDASPVCLSFIYPLCAQLTGLNLSYAPTLDASDLTKMISRCVKLQRLWVLDCISDKGLQVVASSCKDLQELRVFPSDFYVAGYSAVTEEGLVAVSLGCPKLNSLLYFCHQMTNAALVTVAKNCPNFTRFRLCILEPGKPDVVTSQPLDEGFGAIVRECKGLQRLSISGLLTDKVFMYIGKYAKQLEMLSIAFAGDSDKGMMHVMNGCKNLRKLEIRDSPFGDAALLGNFARYETMRSLWMSSCNVTLKGCQVLASKMPMLNVEVINERDGSNEMEENHGDLPKVEKLYVYRTTAGARDDAPNFVKIL

SEQ ID NO: 138857 - protein, 203 aa, Oryza sativa
  unsure (1)..(203): unsure at all Xaa locations
  Clone ID: PAT_MRT4530_40206C.1.pep
MKKIKKFLKNTQGAVLIEFXLFFFMYFVILIFLIDVAILQATVGKLQRTFYSLTNVIKERHIERAGDEDIKEEELKQITKLAANLMGEKKDQIAVTIYKYGFKDINSSKLDENKNYQPRPDITLDTSKEKIYPTNAQNCQSIKIDDIKKASPLPENLRGTNRYATLYQVTVCKKMDNLFKGLTLNRKDYSNNWLRASSLGVAR

SEQ ID NO: 138858 - protein, 131 aa, Oryza sativa
  Clone ID: PAT_MRT4530_40207C.1.pep
KISAPTETVLFLSVMKVVDIIRPPKKRMPVEFFPFPKEETEQAPFQKTFNYGSIYVPHWSKLGFPQVDYGFGPPKFPGPLVNKDFFPPVVTPKGPLPLDGPGMFPNWVPKEPSEEFVPGIKEAPPLTEQIG

SEQ ID NO: 138859 - protein, 100 aa, Oryza sativa
  Clone ID: PAT_MRT4530_40208C.1.pep
MGNSVTRGREFRMPLSHTRREPEPQPQPPTRSPAPTTHGPAPHASLVRGVDTALPASAWCSRPFPRAARGRARYTSIFGQPRLHGHLLASALHILNGIRC

SEQ ID NO: 138860 - protein, 194 aa, Oryza sativa
  Clone ID: PAT_MRT4530_40209C.1.pep
MTTPSRGEWHSNATVVGPAKVGLPPTRRTGQSASRYHHQPRLLAPYWLPLSPTTPPRAVPTSTASVPASFLQHTPVSTTSCMRRASPVAPRLHTHAGLLRSIARPCREPLASAAPSPPAVKSGRGGVGSSRGGPDTAAGDARDMTPSRAAARPAPRASPPPRAEMGHSRGGCGPAATIPACRAVSGGSGGGKRG

SEQ ID NO: 138861 - protein, 50 aa, Oryza sativa
  unsure (1)..(50): unsure at all Xaa locations
  Clone ID: PAT_MRT4530_4020C.1.pep
YPKARVMVLGQFENLEXLLSHNHMETGGSSMVTYLGMNALNFPCQVNFIL

SEQ ID NO: 138862 - protein, 420 aa, Oryza sativa
  Clone ID: PAT_MRT4530_40210C.1.pep
MVRDFATDESHGERGMSVLKLRLDGVRSAYDAAAAELETAKRAREDAEQELGGNQVQVAIAVVSIHGLEATISHLQEEISQVRSDLDALKGKGDIERDEFISQMDQLNTKIRKFQQMVSVELNGKKCSELSSGEGQQVTDWSEVIELEGSFEELNGNVSNADSERSLFEEQYEKDDHDKVTGKECHRKGFTFLRSTGKFESSDEGSTFSDDETILELLPLGPSTSRILVASTSVNNGQNIYASDQPLSTLPPLPDLEIPQRKGPLCIDGDANESDNDDTATTSSQGSYIELHTIQDEYVIGGPSWEAMIAPITGLALEEEEELMIEGQILLANDQKANRLITLFDEEERAMVRMLAALGQPLLTMGTFPTSRSFLLNLPLIFVCKEKDTECSICKSTLATKYRCHVHASLVNTYSICNAY

SEQ ID NO: 138863 - protein, 54 aa, Oryza sativa
  Clone ID: PAT_MRT4530_40211C.1.pep
PPAFRARVFFYMLAPWPLCFYLVRRGRALPPHSSVCMVLGAFWHLSPLSWFLPV

SEQ ID NO: 138864 - protein, 131 aa, Oryza sativa
  Clone ID: PAT_MRT4530_40212C.1.pep
WWGTGPPGVFFSGRRGLPNPLFIFGLRLTGGIWPFSPNSFFRTLLVFSKPSSFLNSLGPPRPFWGFFNLWVVPGRNLGFCPCLSGGLVFRRLLRAGLGPFGVVLFGPGLAPRRLWGGCLFAPGALVGVHFW

SEQ ID NO: 138865 - protein, 62 aa, Oryza sativa
  Clone ID: PAT_MRT4530_40213C.1.pep
SPQINGKWHALKEHFSGDKDWFTLPEWSPIQVLDEEALAKKRAREEKLFAQRALSKLSKEEP

SEQ ID NO: 138866 - protein, 70 aa, Oryza sativa
  unsure (1)..(70): unsure at all Xaa locations
  Clone ID: PAT_MRT4530_40214C.1.pep
EELDSKKKKKKKKKKKKKKKKKKKKKKKKKKKKGKKNYKKKKKKKXXAPPLKKPNLTTPSFKIKIFFPPK

SEQ ID NO: 138867 - protein, 88 aa, Oryza sativa
  Clone ID: PAT_MRT4530_40215C.1.pep
MVPSNQSSSSNRQRRHLVRLAIDDGTASTANLSCAMIWEPTPRRRQAERAGKAVAHETRGTERGGAPADDDDDGGDRFEEEEDARSSS

SEQ ID NO: 138868 - protein, 232 aa, Oryza sativa
  Clone ID: PAT_MRT4530_40216C.1.pep
MVGTTEVEGIEALVRRLRLYQPPPSPYDGASTTAAGGGGELFRPRRAAVLVCLFRRRGGDGELRVILTKRSSSLSTHSGEVALPGGKAEEGDADDAATALREAKEEIGLDPSLVTVVASLEHFLSKHLLVVVPIVGILSDIEAFKPVLNVDEVDDIFDVPLEMFLKDENRTSEEREKMGQTFTIHYFNYEKENQKYLIWGLTARILIHAASVVYQRPPDFPERRVHFNLPKF

SEQ ID NO: 138869 - protein, 41 aa, Oryza sativa
  Clone ID: PAT_MRT4530_40217C.1.pep
LHVTYYFSDVAMTTSRVICTITLALSYKDLLYLFMTRRPSH

SEQ ID NO: 138870 - protein, 120 aa, Oryza sativa
  unsure (1)..(120): unsure at all Xaa locations
  Clone ID: PAT_MRT4530_40218C.1.pep
XXXIVYVNMXXIWSXLFXVXKXXXRXRXHPTTPXPXXRPAKNSSKTXKXXXXXXXNXSPVLXXTXGAXXALWLXXXKXRAVXXVPXLPKFXPAXRXRXHKXXCVSFLLFKEXPKRXGRPL

SEQ ID NO: 138871 - protein, 78 aa, Oryza sativa
  Clone ID: PAT_MRT4530_40219C.1.pep
TAIYYFLKVFILSQATAIYNKSLTSLVSGFSNLQTKLSKISNLPTNYFGHMNFKYSAPLYAMLQHFKVLIIWPNQLDQ

SEQ ID NO: 138872 - protein, 438 aa, Oryza sativa
  Clone ID: PAT_MRT4530_4021C.1.pep
MDLLKRELEKKRKAATADFGGKSFVRRSELEQKQLQKRRHEEHRQLLSKAPPATSSASAAGSDPSNPNADPAQSSAANPNPNSSSSAAAASVPPGLAGKKTAQDEALLSEERRIDELDLPRHEVVRRLRILREPVTLFGEDDADRLARLKFVLKSGVIDDIDDLDMTEGQTNDFLRDMVELRKRQRAGRDTYVKGKGKRAGGGDGGEGGAGGDNADDGDGDGRRSGDDADADKDSKRMKTKFEELCDEDKILVFFKKLLIEWNQELDEMPELEKRTAKGKSMVATFKQCARYLSPLFEFCRKQVLPDDIRQALLVIVECCMKRDYLAAMDQYIKLAIGNAPWPIGVTMVGIHERSAREKIYTNSVAHIMNDETTRKYLQSIKRLMTLCQRRYPALPSKSVEFNSLANGSDLQALLSEEKDPGNPPSEDRLRLMPASKE

SEQ ID NO: 138873 - protein, 54 aa, Oryza sativa
  Clone ID: PAT_MRT4530_40220C.1.pep
MAAAMVEVTHDSAAAIHAVWLKPPEAERRRIRTPKARRWRIGPPEANDGGYSSP

SEQ ID NO: 138874 - protein, 201 aa, Oryza sativa
  Clone ID: PAT_MRT4530_40221C.1.pep
HVDQFGLSNESQRKKERNFKQRIYRANLEAKKKCSTSPMQTTHVSEYEECDSAEVNVAEIATSTKREKNNSYLREWRARNRAKSSVVNSTVTSVNPTQATTTSEINQSEGGVVGTSELSAKKKREDTNKYLREWRARKKAKSTDGCNTVSSGTPMQSTIMTPEEHNEDGAVQRSSIYPIVKQILSLILSFITQRPDYPQEI

SEQ ID NO: 138875 - protein, 126 aa, Oryza sativa
  Clone ID: PAT_MRT4530_40222C.1.pep
MADHFALMAGRLLTESTLQSAVQEALAVASVKIVHDQPDLPVHEDVQDGKAKSGVMVECRICQEEGDESYMETPCCCKGSLKARTFGFVTVCSTHTTHASKGGAMRRETQYARYAYSNSRQTTLPL

SEQ ID NO: 138876 - protein, 617 aa, Oryza sativa
  Clone ID: PAT_MRT4530_40223C.1.pep
MAAAATAAAAATSTFTAAVPRARGRRHPTRVAAAAAATASSPEAAMAAAAPPLPMMRVAPETLQRQSGYLVRGRGEEGIGEGEAEAVGGDAAGGLGAMEYLTSVLSSKVYDVAIESPLQLATKLSERLGVNLWIKREDLQPVFSFKLRGAYNMMAKLSREQLERGVICSSAGNHAQGVALSAQRLGCDAVIVMPVTTPEIKWRSVERLGATVVLKGDSYDEAQSYAKQRCEQEGRTFIPPFDHPDVISGQGTIGMEIVRQLQGPLHAIFVPVGGGGLIAGIAAYVKRVRPEVGMECSVYFTAALLQVKIIGVEPSDANAMALSLCHGQRVMLEQVGGFADGVAVKVVGEETFRLCRELVDGIVLVSRDAICASIKDMFEEKRSILEPAGALALAGAEAYCKYYGLKGENVVAITSGANMNFDRLRLVTELADVGRKREAVLATFLPEEQGSFKKFAELVGRMNITEFKYRYDCNAKDALVLYSVGIYTDDELKAMVERMESSKLRTVDLTDNDLAKDHLRYFIGGRSEVTDELVYRFIFPERPGALMKFLDAFSPRWNISLFHYRAQGETGANVLVGIQVPPEEFDEFKSRADNLGYEYMSEQNNEIYRLLLRDPKI

SEQ ID NO: 138877 - protein, 462 aa, Oryza sativa
  unsure (1)..(462): unsure at all Xaa locations
  Clone ID: PAT_MRT4530_40224C.1.pep
KSTPPPEEKSPPSHTPESSSPPSXESEPPPSSPPRPTRPLNEEYVPPSPAKSTPPPEKPLPPHTPTINSSPPSEEEYMPPSPVKSSPPPAEKSQPPPSPVESVLPPVKSSPPHAPVISEPPPTKSSPPQVPVTSEPPPAKSSPPHEPISPPETPEKSYPPSTPEESSPPSVPKASSPPTEKSLPPPATVSLPPPTVKPLPPPVPVSSPPPPEKSPPPPAPVILPPPPIKSPPPPAPVISPPPPVKSPPPPAPVILPPPPVKSPPPPAPVISPPPPVKSPPPPAPVILPPPPVKSPPPPAPVISPPPPEKSPPPAAPVILSPPAVKSLPPPAPVSLPPPPVKSLPPPAPVSLPPPVVKSLPPPAPVSLPPPAVKPLPPPAPVSLPPPAVKPLPPPVPQVSLPPPKQESLPPPAKEAEAPPAKESKPPPAMEAEAPPAFDTTVLLPPVMAHQYASPPPPQFQGY

SEQ ID NO: 138878 - protein, 198 aa, Oryza sativa
  Clone ID: PAT_MRT4530_40225C.1.pep
MAASSSVLVVVAACLAAALVCLAANVAPASCARATAALPHASIAETCSFVDDHKLCEESLSSLPLTARAAADARVLARAAVLLARQNATATAAYLSHLHAAAAAAADDGDDADHRCVGDCTVRYDRAVAYLGDAAAALDAGEFDEAELLVGAGRTEAELCQKGCEHARLPALLAARNGAVERLCNVAMDITRLLHQQH

SEQ ID NO: 138879 - protein, 127 aa, Oryza sativa
  unsure (1)..(127): unsure at all Xaa locations
  Clone ID: PAT_MRT4530_40226C.1.pep
EGGGVYAPRLRXRRRERPRRRXRRRGCPRARSRSQRPWRRRRPLTAGSECPGLSRASHCRSRRQRRRRRRHGRPRRRGRRRGRPRLRSRWRGRPGAHSRSQRPWRRRRPLPAPLRRPRHLHGEREKE

SEQ ID NO: 138880 - protein, 222 aa, Oryza sativa
  Clone ID: PAT_MRT4530_40227C.1.pep
MAMAAAGDEAEMVEVTLRAVGPSRPTTLRLPPFISVADLRRHIAHDRHLPQDRLRLVLRGRNLPCQDDAHVNLRHGDSLIVAVAPKPPANHLRDGDGDDDDDEEEELKFKIPETTTWWKRKFFIFLRDKLRLPDILLMVLFSLGIKAWVLIAMWFLFAPIAQMYDVGPLFILGTGFLVILCNLGRRQQGDVSAYSIFNEDFRELPGTLNAERIDRDIRAGQF

SEQ ID NO: 138881 - protein, 71 aa, Oryza sativa
  unsure (1)..(71): unsure at all Xaa locations
  Clone ID: PAT_MRT4530_40228C.1.pep
DEXXLLAILVLLLETLKLLLKLIWNSSLWMRWALSASKLLGSWFASCYSRILLSSSACDSFALIFSFSGTK

SEQ ID NO: 138882 - protein, 199 aa, Oryza sativa
  unsure (1)..(199): unsure at all Xaa locations
  Clone ID: PAT_MRT4530_40229C.1.pep
MAMAAAGDEAEMVEVTLRAVGPSRPTTLRLPPFISVADLRRHIAHDRHLPQDRLRLVLRGRNLPCQDDAHVNLRHGDSLIVAVAPKPPANHLRDGDGDDDDDEEEELKFKIPETTTWWKRKFFIFLRDKLRLPDILLMVLFSLGIKAWVLIAMWFLFAPIAQMYDVGPLFXILGTGFLVILCNLGRRQQGDVSAYSIFN

SEQ ID NO: 138883 - protein, 83 aa, Oryza sativa
  unsure (1)..(83): unsure at all Xaa locations
  Clone ID: PAT_MRT4530_4022C.1.pep
KIGDVAAPVSPTLGELTEPRFPPARSLSRFRSALVTTLPTVARARSVAPPLDLCAWGGAPARSAXEEGGGGGGGDAALLARQL

SEQ ID NO: 138884 - protein, 57 aa, Oryza sativa
  Clone ID: PAT_MRT4530_40230C.1.pep
FWRQFTNSIEGLDTIATLRINLIHFYCVSRLAEQFSMTFLYTNLYLKVQKNIELCIP

SEQ ID NO: 138885 - protein, 52 aa, Oryza sativa
  Clone ID: PAT_MRT4530_40231C.1.pep
AYGNTTETRLRKRCHHGGHDIQDAVIAYPSTMPQEGYDARRRSRCWPGAPPD

SEQ ID NO: 138886 - protein, 123 aa, Oryza sativa
  Clone ID: PAT_MRT4530_40232C.1.pep
MARLSGRASTGTTQSGCAVLGSGCGPRAIWPSIPPFGLLLFDPTIFNFPNMTIIFNLPKIISCPCPYVCRSKYPHQIQPNLSRLAKIGRGFLIDIPSMYSFRFPQNQSVKLEIKMTGEDCRHH

SEQ ID NO: 138887 - protein, 124 aa, Oryza sativa
  unsure (1)..(124): unsure at all Xaa locations
  Clone ID: PAT_MRT4530_40233C.1.pep
QQVIRSYSEFVRLQHMIVATPVCXPATFQLIDILVMQQQCYKQLRLVAHESLXQSISSVQXIVQNLQLXQVGVVCFDHNQDQDRSLLALSLPSICGIYHNYYIALRSIPTVGGVWGRIVIVEWF

SEQ ID NO: 138888 - protein, 93 aa, Oryza sativa
  Clone ID: PAT_MRT4530_40234C.1.pep
MGTATEPSLVAVPTTDGFGRTTDSAAAVFGMSGSGVSQSTRCADQAEGAKAWGLDMAAPGSDGTDVAVSHKRSDVRLHIALRRVLIRAIHAAT

SEQ ID NO: 138889 - protein, 115 aa, Oryza sativa
  unsure (1)..(115): unsure at all Xaa locations
  Clone ID: PAT_MRT4530_40235C.1.pep
MAKHFLNQHLIILIPRADVSEGGGGADRWAPLVSAQGEGEGARASGPHWQRHKVAGLPWTGTTRVVHRRSTGLTVRIGLKDDRTARGRRLGTARLGFKADRXAMAAGGDTRGHRR

SEQ ID NO: 138890 - protein, 63 aa, Oryza sativa
  unsure (1)..(63): unsure at all Xaa locations
  Clone ID: PAT_MRT4530_40236C.1.pep
GYSAYTATNGAVEAMTXIIGKGVXXKGGTANXFAPGPVRTDLFMAGXDQAFVKXVEEMXMGRI

SEQ ID NO: 138891 - protein, 120 aa, Oryza sativa
  unsure (1)..(120): unsure at all Xaa locations
  Clone ID: PAT_MRT4530_40237C.1.pep
SRVRSRSYHPWRSTSTASPSWPAPASAPRSPASAATATAAAPCAAAAAAVAATTTTTTTSWSTATATARXRGRARHXRRARGRRRRRIRRPRKAATRRRRQLLVLLGRRRMTMMNRINLS

SEQ ID NO: 138892 - protein, 83 aa, Oryza sativa
  Clone ID: PAT_MRT4530_40238C.1.pep
RFGFFGLCQILGWLGHFHPHHGLRLPARWQVPGCALEQVICSPGSREGYWPQCQGGPLCYVFVWLSAPSRPPRCFRVWYIVGP

SEQ ID NO: 138893 - protein, 201 aa, Oryza sativa
  Clone ID: PAT_MRT4530_40239C.1.pep
MHLAGERSREGGEVDLRLHGDGWTVMQRRRGRAGKWPTATPRSPASDVGSASTRGGRTKGRASGEEGENGSALLSYTTWSFLRLPISHDGWDDNNLYGAVAVDDSSSSHSVLLHFISTPRAYPGYCSAWPRVTTATPFPLRGGHLRACSPSSASPAVAVAAASASLSCHLKRPLAAVVELESSCGTGPTISTSLGFEVHRG

SEQ ID NO: 138894 - protein, 147 aa, Oryza sativa
  unsure (1)..(147): unsure at all Xaa locations
  Clone ID: PAT_MRT4530_4023C.1.pep
MASANAISTXSLLRSFSSQGKXRRANNGRAQXXMVQXDAKDIXFFFLSRAALQAGVKKLANAVGVXLXXXRXNLMLDEYXFPKXYXXGXTIAPAIXLYXXXXNXGAPFIRXVXXKTKHSXGDGLPPSPKSSKFGFLPFFTDLLPVPS

SEQ ID NO: 138895 - protein, 1042 aa, Oryza sativa
  Clone ID: PAT_MRT4530_40240C.1.pep
MRLYLYVIEARGLPEHGGDGGGGPYYARAKVGKQRARTREVEARGGGASGAAAEWNEELVLEVDGGEAVEVGVARRREGGGRGGREVVGRVKLPVPAAAVPAGRRRRTTVPPTWFTLQPKHHRRWKKGAAEAADCGKILLTFSLHGENSDNTVIHSSPCSSSRSDTDIEFERSTYWEHSSSNSGTVDSPRSFAIERSSLENSDRSAQANSNSNSEDDDLTEPSAATAKGTSDIEPMVPDASFEEAMEIMKSKSIPDMPEDLNGGVMFDHTYLVDSKNLNSLIFGPDSQFSKELRELQGTMDYEEQPWTWNNNNPPSLTRTCQYTKGATKFMKAVKTIEEQTYLKADGKSYVIMTRVRTPEVPFGNCFEVVMLYKIIHYPELSSSEGMSHLTVSYNVEFLQSTMMKSMIEGSVRDGLKENFESYAEILSRHVKIADSAGMDKERLLAPLQTDHQSDIRLAYKYFCNFTVISTVIMALYVLVHIFLSRPGPLMGLEFKGLDLPDTFGELIISGILVLQLERLLSMISRFVEVRVQRGSDHGIKANGDGWLLTVALLEATSLPPVSSGSVDPYVVFSCNGITRTSSVQLQTHDPHRTEIMEFDAMEEPPATLDVEVFNFDGPFDLAVSLGHAEINFLKHTSAELADIWVPLEGKLAQTCQSRLHLRIFLENTKGPETSMREYLSKMEKEVGKKLHVQSPHRNATFQKLFGLPHEEFLIAVYACSLKRKLPLQGRLFLSARIVGFYANLFGHKTKFFFLWEDVEEIEELTPSFTTVGTPSLLFVLKSGRGLDAKNGAKSQDKEGRTIIGLWKTKSSAIEQRAKLEEDQEDENYVDLNDVQSVLSIGDVPLSKEYTLELPIDWKRLDKLYSTCVNMDVNFHPSRADLLMGVFDGGPLEAKAMSRAGCLDYAATPWQDARPGVLERHASYKFNRYMSIFGGEVVSTQLRLPSDDGDGWTVYDVITLRNVPFGDFFRLHLRHNIWSVEAASSEAAASSGSRCEILVGIEWVKRSKFQKRIARNICEKLAHRAKEVLEAAAREIAPALSG

SEQ ID NO: 138896 - protein, 60 aa, Oryza sativa
  Clone ID: PAT_MRT4530_40241C.1.pep
YSIPPHCFQFVSTTTVVVTSSQGGYNGPIQSDQQTTDTLISLAYYHAFNILSFCFFLVNA

SEQ ID NO: 138897 - protein, 350 aa, Oryza sativa
  unsure (1)..(350): unsure at all Xaa locations
  Clone ID: PAT_MRT4530_40242C.1.pep
RPASGYLSKMEXEVGKKLHVQSPHXNATFQKLFGLPHEEFLIAVYACSLKRKLPLQGRLFLSARIVGFYANLFGHKTKFFFLWEDVEEIEELTPSFTTVGTPSLLFVLKSGRGLDAKNGAKSQDKEGRLKFQFHSFASFSKASRTIIGLWKTKSSAIEQRAKLEEDQEDENYVDLNDVQSVLSIGDVPLSKEYTLELPIDADLLMGVFDGGPLEAKAMSRAGCLDYAATPWQDARPGVLERHASYKFNRYMSIFGGEVVSTQLRLPSDDGDGWTVYDVITLRNVPFGDFFRLHLRHNIWSVEAASSEAAASSGSRCEILVGIEWVKRSKFQKRIARNICEKLAHRAKEVL

SEQ ID NO: 138898 - protein, 112 aa, Oryza sativa
  Clone ID: PAT_MRT4530_40243C.1.pep
MAAKIRIVMKSFMSQANKVEGVIPYAQKVGLPESRSLYTVLRSPHIDKKSREQFSMHVKKQFLVQKAETHELQKKLFWLKRLRLLGAQYELQISFKTRLDKKLLQAALSSGC

SEQ ID NO: 138899 - protein, 260 aa, Oryza sativa
  Clone ID: PAT_MRT4530_40244C.1.pep
RGSARRQRRPISDLSSRSEARPSVEGERSTARVMQGARVNLKGWQQAAVAFGSAFGALLDPRRADLIAALGETTGKPAFQRVLQRMRNSAEGRDVLLERPRVISTQVSHAWDMPQNTFGAAYAQFMGSRNFSPDDRPPVRFMDTDELAYVATRAREVHDFWHVLFGLPTNLIGETALKVIEFEQMFLPMCMLSVVGGSARFNEKQRTLFFQHYFPWASKAGLKCTDLMSVYYEKHFHEDLDEVRRNWGIIPCPDPKRSSV

SEQ ID NO: 138900 - protein, 187 aa, Oryza sativa
  Clone ID: PAT_MRT4530_40245C.1.pep
MNWISSIFTPPEAPDPINLISHRCCSPGSIAFIKGWPTSSAIDASFATGCGWPQLVVTNSEIVRDKASIEDEAMDNGARALIELSQGTPGSFCKVPKIILCDGCDEGYHLYCLIPPLTLVPEGEWHCSSCIVQEEKETKRRLHGKDIATNVSMLETDGFAELEAANVLMLLKNSSTDGEIVVSPVSQ

SEQ ID NO: 138901 - protein, 138 aa, Oryza sativa
  Clone ID: PAT_MRT4530_40246C.1.pep
PILIPDARIGWSDSRGSSAAGARWRWQSRSSGSGVVAWCNSFVAARRRPGDASSDSRRQWCHVQEAPSGRSSSSEPRTVHLNSIVEPTIEVRYIFFYSSAFNQKEAWNISEIILDCWHVLLYLIIFLCSQVCEYCQII

SEQ ID NO: 138902 - protein, 634 aa, Oryza sativa
  Clone ID: PAT_MRT4530_40247C.1.pep
MSHSINVHPRASFSSLDVEGVQEVEHTRMSVKCSITIIIQLLFCYMLCQPCYGTLSDIQCLKRLKESVDPNNKLEWTFTNTTEGSICGFNGVECWHPNENKILSLHLGSMGLKGHFPDGLENCSSMTSLDLSSNSLSGPIPADISKQLPFITNLDLSYNSFSGEIPESLANCTYLNIVNLQNNKLTGAIPGQLGILSRLSQFNVANNQLSGPIPSSFGKFASSNFANQDLCGRPLSNDCTATSSSRTGVIIGSAVGGAVIMFIIVGVILFIFLRKMPAKKKEKDLEENKWAKNIKSAKGAKVSMFEKSVAKMKLNDLMKATGDFTKDNIIGSGRSGTMYKATLPDGSFLAIKRLQDTQHSESQFASEMSTLGSVRQRNLLPLLGYCIAKKERLLVYKYMPKGSLYDQLHQQTSEKKALEWPLRLKIAIGSAKGLAWLHHSCNPRILHRNISSKCILLDDDYDPKISDFGLARLMNPIDTHLSTFVNGEFGDLGYVAPEYARTLVATPKGDVYSFGVVLLELVTGEEPTQVKNAPENFKGSLVDWITYLSNNSILQDAVDKSLIGKDHDAELLQFMKVACSCVLSAPKERPTMFEVYQLMRAIGEKYHFSAADDELTMQPQNAEAEKLDELIVAN

SEQ ID NO: 138903 - protein, 115 aa, Oryza sativa
  Clone ID: PAT_MRT4530_40248C.1.pep
MNGKSNWPPALPIKKAKIPNRGRESRARGGRGKIYYLEKGFQTSPNRSCLACPRVGGVGDGMGCCRDDASSSSSSAPPGCYVGVAVGLGRGKWSRVSLAWIGLAWLGLGDLTSRA

SEQ ID NO: 138904 - protein, 287 aa, Oryza sativa
  Clone ID: PAT_MRT4530_40249C.1.pep
GKGRRRRAKMLDIQKRRVQLLLFIVGVLALSMTAEKFRELVGKEEASKSGQFTFMNCFDMGSGSLACAVKEGIKLYVYNLQTAHTERVRHRAIEKALADAVTEGLSAAEAAKQAQKVGAKAAKVAARQAKRILGPIISSGWDFFEAMYFGGSMTEGFLRGTGTLFGTYVGGFHGEERLGRDLKIMSSLTILLQRACLRFALLPVPPLRAPLRPPRRPLGLPRRSAMSSSAASRLSHIVAAAGGAAGESSEPPAAAAAASVSGIAGRLWVERILSGFDGDEIGALVFG

SEQ ID NO: 138905 - protein, 65 aa, Oryza sativa
  Clone ID: PAT_MRT4530_4024C.1.pep
FLFFGKEGLNFHVAIGMILAVIGMIWYGNASSKPGGKERQVYSAPSEKTQKPNILSSQSELDQKV

SEQ ID NO: 138906 - protein, 298 aa, Oryza sativa
  Clone ID: PAT_MRT4530_40250C.1.pep
MAVASASALFSAKNLPHKPWEDPSFFRWRKREAHVPLRSHDTPEGALKYWHERRNVNYLNSDSAVWNDDAVRGALESAAFWSKGLPYVQTLSGYWKFLLASSPESVPEKFYDAYFNDSDWEALPVPSNWQMHGFDRPIYTNVTYPFTMNPPFVPNDNPTGCYRTVFRIPKEWKGRRILLHFEAVDSAFFAWVNGVPVGYSQDSRLPAEFEITDFCHPCDSEKENVLAVQVMRWSDGSYLEDQDHWWLSGIHRDVLLVSKPQIFITDYFFKATLDEGFRVADIEVIVLAMRAGLCTSAA

SEQ ID NO: 138907 - protein, 222 aa, Oryza sativa
  unsure (1)..(222): unsure at all Xaa locations
  Clone ID: PAT_MRT4530_40251C.1.pep
MAVIFQLGTGYRIEIEYLHEDSVMPPGAAPVPPETVSSEPIMSPGAAVPPEKVELDEIEFAKGVGPRRYNYRELAAATGNFAEEKKLGRGGFGHVYHGCLKIDDQERLVAIKKFSPDSSAQGRKEFEAEIKIIRLLINCLYFQQEWEQCVVHGDIKPSNIILGSSYNTKALGDFGLASXRLVDNGAKSRTTKVVLGTAGYIDPELVNTRRPSTESDVPCCAE

SEQ ID NO: 138908 - protein, 181 aa, Oryza sativa
  Clone ID: PAT_MRT4530_40252C.1.pep
KQLCGAWVSILGMSKSIALKKLELQLLRQNCKVMNTLKGQIYLPVQMMAYLEEWSLLENKYANSLSGTVEALNATVLRLPVSDGAVADFQSVKNAVGSAVDVMQTMRNSMSYLLPKLARTNVLVSQLSIITRQEQVLMAQCRELLSTLALMHVKYSSLQGQMIQLSDLKRAKSVSSSEYPY

SEQ ID NO: 138909 - protein, 688 aa, Oryza sativa
  Clone ID: PAT_MRT4530_40253C.1.pep
MAAMSSHRLLFTQLHLCNSLLLIHVHHATSLNFRFDFSEPGSYCTPGSEIACAGDAYPYAHTIELTKTDISDRNLRSIGRVWYARPVPLWNNTTGEVASFRTTFSFQIKPANLDVSADGMAFFLGHYPSGIPHRSYGGNLGLFNGSNNKNATGTARIVAVEFDTYMNKEWEKDGNHVGIDVNSIVSVAATSPDKNLASGTTMTADISYDSSAEILAVTFWINGTSYHVSASVDMRRCLPEVVAVGFSASTGSSIEVHRVLSWSFNSTLTWMNSSVMPPGAAPVPPETISSEPIMSPGAAPVRTETLSSQSQGKLHGIIAISVAVSFVLELDEIKFAKGVGPKRYHYSELAAATGNFAEEKKLGRGGFGHVYQGFLKTDDQERLVAIKKFSPDSSAQGRKEFEAEIKIISRLRHRNLVQLIGWCDSCMGLLIVYELVSEGSLDKHIYKNARLLTWAERYKIIIGLGSALHYLHQEWEQCVVHGDIKPSNIMLDSSYNTKLGDFGLARLVDHGAKSRTTKVVLGTAGYIDPELVNTRRPSTESDVYSFGIVLLEIVSGRRPVEEPDDSDELFVLSRWVWDLYSKNAVVEAVDERLRCSDDGDDELQMERVLAVGLWCAHPDRSERPSMAQAMHALQSEEARLPALRPQMYKGVPFLAMGEHRYSDLSIGTTTSSSASGTGCTAHSEPTKL

SEQ ID NO: 138910 - protein, 265 aa, Oryza sativa
  Clone ID: PAT_MRT4530_40254C.1.pep
MAGGVREGREIEMAPRRATILLGRIGMEEPSLEVKMPEADLKAVKFSLMTSSDMEKLSSASIIEMCDVTNAKLGLPNGAPQCATCGSQSVRDCDGHFGVIKLAATVHNPCFIEEVVQLLNQICPGCLTLKQNGDTKKTDGTTIQTTCKYCSKDGAKLYPSVIFKMLTSPRVTLSRSKLHRNTSVMDKISIIAEVAGGVTHNSKNKAPHETLPQDFWDFVPDDNQPPQSNVAKKILSPYQVFHMLKNLDPELINQRCNMDIQMAPG

SEQ ID NO: 138911 - protein, 207 aa, Oryza sativa
  Clone ID: PAT_MRT4530_40255C.1.pep
MRRCLPEVVAVGFSASTGSSIEVHRVLSWSFNSTLTWMDFSVMPPGAAPVPPETVSSEPIMSPGAAVPPEKVSSPRSQVSFVLVCPFMGFLLRRRLAWKRSNGISDGNCQVELDEIEFAKGVGPRRYNYRELAAATGNFAEEKKLGRGGFGHVYHGCLKIDDQERLVAIKKFSPDSSAQGRKEFEAEIKIISRLRHRNLVQLIGWCD

SEQ ID NO: 138912 - protein, 91 aa, Oryza sativa
  unsure (1)..(91): unsure at all Xaa locations
  Clone ID: PAT_MRT4530_40256C.1.pep
FVMSRISDPKTMSPXACCFPSKDQNFPKLALDVKQSYLRPGTRPKILLINSLWIINALLLQQTRFFGWCALHQFRHIFLQHRNHGSLIQSL

SEQ ID NO: 138913 - protein, 100 aa, Oryza sativa
  Clone ID: PAT_MRT4530_40257C.1.pep
SPGGVGPRLVVIIDGVFALGSPFFSPLTKNLLLQVVLLYEVKSHRGGHMRFSSACSSFDKCVIALLGSYMRFISFFFSCLDVLAAYINYYNKRVVIRQCI

SEQ ID NO: 138914 - protein, 508 aa, Oryza sativa
  unsure (1)..(508): unsure at all Xaa locations
  Clone ID: PAT_MRT4530_40258C.1.pep
MENGKCNGSSTTKCNGAAAAAMHVAMLVTPGMGHLIPLAELAKRLAARHGVTSTLLTFASTASATQPGSSWRRCRASSGVLPPVDLSDLPAAPAIESVSLPPVDLSDLPADAXIETLMSEECVRLVPALTAILSGIRERRRLLPFVADLFGADXFDAARDAGVPRRYLFFPTNLHALTLLLHLPDLDVSIPGEFRDLDEPVRLPGCVPIPGKDILMPLQDKSRACYGWMVHHGTRYRDADAILVNSFDAVEPDAARVLRHPKPGVPPVFPIGPLIQTHCAGDDDAAAPPSPRAACLDWLDRQPDRSVIFVSFGSGGALPTEHMRELALGLELSGQRFLWVVRSPSDEGEVSANYYDAETKKNPFGYLPEGFVERTKEVGLLVPSWAPQTKVLAHRATGGFLTHCGWNSVLESLVHGVPMVAWPLFAEQRQNAVMLTEGAGAAIRVPESKGKEKIAAVVREMMVGEGRGAAVRAKVAELQKMATDGLRDGGAATSALDEVVDKWTGGEK

SEQ ID NO: 138915 - protein, 83 aa, Oryza sativa
  Clone ID: PAT_MRT4530_40259C.1.pep
MGVGCDGPAVRGGTGEWEADVAMMKPHVCSRWWPSIGNGGKAKQLVRRRSSVVADLELEINRDREDGRNGAPYHRCLEREERG

SEQ ID NO: 138916 - protein, 373 aa, Oryza sativa
  Clone ID: PAT_MRT4530_4025C.1.pep
MAPGSKAERKAALDAGAWMFNIVTSVGIIMVNKALMATHGFSFATTLTGLHFATTTLMTLVMKWLGYIQPSYLPVPELIKFVFFANLSIVGMNVSLMWNSVGFYQIAKLCIIPVLCFLEILFDKVRYSRDTKFSIMVVLVGVAVCTVTDVSVNSQGLIAAIIAVWSTALQQHYVHHLQRKYSLGSFNLLGHTAPAQAASLLVLGPFVDFWLTNKRVDTFNYTAIVTFFIILSCIIAVGTNLSQFICIGRFTAVSFQVLGHMKTVLVLTLGFLFFGKEGLNFHVAIGMILAVIGMIWYGNASSKPGGKERQVYSAPSEKTQKHNILSSQSELDQKTLLSIQRQAVCTSAAHHHLTPFNWSAFLAAFNVTLIDTK

SEQ ID NO: 138917 - protein, 127 aa, Oryza sativa
  Clone ID: PAT_MRT4530_40260C.1.pep
WQWWRKMVSSSRRSRAWPAVSTRSPRPASPGSGGSILKLHEDVQTCGYKDVQVMFEILKSELEESRAPTKQRKPPAWSPPSAWSSRSSSIPPARGSRRPPARGRPHCQTPANNKKLRTPTLVLRDSY

SEQ ID NO: 138918 - protein, 281 aa, Oryza sativa
  unsure (1)..(281): unsure at all Xaa locations
  Clone ID: PAT_MRT4530_40261C.1.pep
AQQQHQILSCRFPLLLLLLLFSLLPTARASCRNSASKCTPGALSTSTTSASSAVAASAAAAAAVSFLPSSSGDPCRRRRRRRSSGHSAAAGSYADDPXPSSAPLPPPGSSAAADPCRLAVPRWSAPPPAWVQRRRAMAFPETAARRGSYQAALQPWPPAPAPTTASAACGSSSWRGPRSSSSSWPACSSPRPPRKPRLVVCPPPCSAPSRSTASASPAAAAAAAPPPARSPSSSSRAAAPPRAVGRVRSASALVLPPPRPNLAYPPSSPEPSPSTYCIGRR

SEQ ID NO: 138919 - protein, 84 aa, Oryza sativa
  unsure (1)..(84): unsure at all Xaa locations
  Clone ID: PAT_MRT4530_40262C.1.pep
GCRIXHXGXSXXGPVGXAKXILVPXPGKGAQXPSIXSPQDXPCSXSHTWFQLKSQSTXKSLXKKPVXIPIXIXIXKKXXXSXXS

SEQ ID NO: 138920 - protein, 111 aa, Oryza sativa
  unsure (1)..(111): unsure at all Xaa locations
  Clone ID: PAT_MRT4530_40263C.1.pep
KQKVFSPNNDFVRKQYGIWASPFLQXNGFQLKKNQFWQQLALVGQHFPYQAINIVQAIGQKLKLHQFGDFYFDRNLAQAQTLLAFNVPFKYGIYPRYYGAPSTITPLGGVL

SEQ ID NO: 138921 - protein, 172 aa, Oryza sativa
  unsure (1)..(172): unsure at all Xaa locations
  Clone ID: PAT_MRT4530_40264C.1.pep
GGGGGSRRGGGSSGGGGGGSSXGGGSCGGGGASRRSSGGSSAQRRIKAVAAAHRVARRRSDGSRRCPLDRAAAAVDRARDSRSRPRGGGGGGGKSRRGRRIEAAAVADRGGGGRSSHGGAGIHLLLCLPPRLLAIFAREVIAATARGDGLGRGISPTQLLARASPKSCPNHV

SEQ ID NO: 138922 - protein, 131 aa, Oryza sativa
  Clone ID: PAT_MRT4530_40265C.1.pep
MDSDHWISRLMAAKRQYALQRAQNHHHATATATATAASHSHLDRYGYDDVEPEDEVRPDFPCPYCYEDHDITSLCAHLEDEHPFESKVVVSISAFYSLSVFSYMLLLSEVSQMCEKSYPLLLFLSFWIAID

SEQ ID NO: 138923 - protein, 68 aa, Oryza sativa
  Clone ID: PAT_MRT4530_40266C.1.pep
FVLNQPAYRVCSKDRSSSVGPHLPFSYKGFGRITTFWEVLFNPIAPKINPQGSFLYIISKKKKKKKNK

SEQ ID NO: 138924 - protein, 86 aa, Oryza sativa
  Clone ID: PAT_MRT4530_40267C.1.pep
MVRWQRPSLHQIRRKGRRQAPHLTVTVSVVPSSPPDPAEGEARAPQAETAVLSPPTDPMGGEVADFPSSSGGGYDALLDIGPFLCS

SEQ ID NO: 138925 - protein, 143 aa, Oryza sativa
  Clone ID: PAT_MRT4530_40268C.1.pep
MAGLGTGYHAPVARAAVTDAETSVPVSEDVGRVMRCCLDGQQRLRCKAHANAARKTGTFAGGGWGRKNLRRRGRHTGRGQVGHHEAQNQHGEQVSSRSSNSLLVHGVSVGVMRALVRRYAGGRPTNAEGRDPIDGARGLTGDA

SEQ ID NO: 138926 - protein, 39 aa, Oryza sativa
  Clone ID: PAT_MRT4530_40269C.1.pep
FFFFFHEINLYSIQRLRFSHNLMKSRLEKLSHPIIFHSN

SEQ ID NO: 138927 - protein, 564 aa, Oryza sativa
  Clone ID: PAT_MRT4530_4026C.1.pep
MTERFLTGNYISKNVPLLPLLHGYVDSTKAVTEMSSMHSVEEKLTDLLALSCCLSKAVRKGALIGWDPTYTRRSFLPYWRSALGPRGPSQEAVEVKSIVESGQYWGSSMIPGYNRKIWLMDKIPQIQSRRRSRRLEEEPALSLEPEIDHAVESVFVVAPDGVVEPVPAGGFAPASSDIDWDSLEILARDDDEGRLDIVGDETFYELLGLRAEDQAAEEARQAATQGGAPEGGADAGGVAPGAAAAGGVAAARATDDIAGAAIPVHDEVPRERVMAYDPNKPSMKAGTVYPNMKEFRLAMRQYAINAEFELKLVKTDPERYIGGCKVEDCPWHIVGHKLPNQKTVMVTVLTDLHTCTSSSRRRTTTATAKWVASKAVPLLRKNPGREKAMVELYGTCEESFHMLYRWRAEVLRTSPGSVIEIDTVERECFWHLMKNFVKRFGGDVHSHMYPAARAYRVEIWQRHMKEVIQACSDVLPWLETYHPLKWMRSGFNPAIKCDYITNNLAESFNNWIKDYKASKVGRGSQGGTLPNMGILQKFLVPKDQLCRQYWKKAQEESQEADYQH

SEQ ID NO: 138928 - protein, 144 aa, Oryza sativa
  Clone ID: PAT_MRT4530_40270C.1.pep
MLHHHYHGEVASLHCLSPASLPFSSHYHSNMITMAPSPFHFPAATCEPIQELLPVVAGNRPAGSGSTDDAYQMAAEEERRRRRMISNRESARRSRMRKQRQLIELRGQVVHLRDANRRLLDELNQAMRGCSDVHCENTLLMKER

SEQ ID NO: 138929 - protein, 44 aa, Oryza sativa
  unsure (1)..(44): unsure at all Xaa locations
  Clone ID: PAT_MRT4530_40271C.1.pep
AXXIMXMSHLHFQXXXPAHXSXXXXFDHXGXNSXGXXXVXEAVA

SEQ ID NO: 138930 - protein, 39 aa, Oryza sativa
  Clone ID: PAT_MRT4530_40272C.1.pep
NSLCDFFPFVEAVFLTSSRCLNFFIVYDDVEPGSSFCCL

SEQ ID NO: 138931 - protein, 212 aa, Oryza sativa
  Clone ID: PAT_MRT4530_40273C.1.pep
AKLAACVRPSYITDSISAADVRRTRNMSYFRRVNSNGIPKITYLHLYEGEAFSIGIFCLPPRGVIPLHNHPNMTVFSKLLFGELRVKSYDWADASQDSTDAQLQGARLAKVKVDGTLNAPCATSVLYPEDGGNLHCFTAHTACAVLDVLGPPYDDGSGRHCQHYNVSSSAPSAGDSKPLPGDDGYAWLEECEPPDNFHLVGSTYMGPRIVDN

SEQ ID NO: 138932 - protein, 140 aa, Oryza sativa
  Clone ID: PAT_MRT4530_40274C.1.pep
MEIVASVMESLLLGDPSMERLRLFMLGATHSQRHTSMSSRRGGESDGGDSPRRREEAKSTTPRLQPGAAGGRSVAPSAEMSSRGWGESGGDDSLRLQGDSSSRKMAKSRPDNIAAARLSQRACCGVLRRRRGDRLGVQQG

SEQ ID NO: 138933 - protein, 1170 aa, Oryza sativa
  unsure (1)..(1170): unsure at all Xaa locations
  Clone ID: PAT_MRT4530_40275C.1.pep
MEHPVVADALPGGAAAAGAEARPEEAPAAGGPASGARVAQGELRPPHQWRLHAAEARPDAAAGVGVRVPQAHRPDPGVARRHHPLRLDERRRPWPEPPPRQRRRREQGRGDEAVELLRLPGRVRAGDAAGPELQRGADVRHGGAAGEGPPGRLQDGERRAPEAAGDRGRGAARRRAREGGQRHRHREGGAARRAAEGGRGRGAAVAGAGRVLGGVHPVPRAVGQRGHPRRGARRRRRVHDAAVGAALPRRRPGTAGRRRDAVATDDSEDEEFSIEMHHGGFFXMGNGVNRAYVDGRVSWFDHCESDSWSLLWVDDFIEELGYEKSDNTKIYWLLPGKQLSDGLRRVKCDADTNSIVALVPRVRSFVLYADHQDIVDAIDLDDVAIIGSDPLRTAVKPSKIIRAKNDGGELIVDKCATDAKIDDEEESRTEDPDFVDSDYEIDHGDDDLFDNCVEGQIELAHNKEEGSDYGSSEDERLMMPNISEEEEEEEIKFSFKSFRADVDMETPEFKVSMMFADAVELRKAIDQYTIKNQVAIKKTRNTKTRIEAKCAEGCPWMLSASMDNRVKCLVVREYIEKHTCSKQWEIKAVTAKYLAKRYIEEFRDNDKMTLMSFAKKIQKELHLTPSRHKLGRARRMAMRAIYGDEISQYNQLWDYGQELRTSNPGSSFYLNIHFGCFHTLYMSFDACKRGFMSRCRPIICLDGCHIKTKFGGHILTAVGMDPNDCIFSIAIAVVEVESLKSWSWFLDTLKKDLGIENTSAWTVITDRQKGLVLAVRREFSDAEQRFCVRHLYQNFQVLHKGETLKNQLWAIARSSTVPEWNANMEKMKALSSEAYKYLEEIPPNQWCRAFFSDFPKCDILLNNNSEVFNKYILDAREMPILSMLERIRNQIMNRLYTKQKELERNWPCGICPKIKRKVEKNTEMANTCYALPAGMGAFQVSDRGSQYIVELNIKRCDCRRWQLTGIPCNHAISCLRHERIKPEDVVSFCYSTRCYEQAYSYNIMPLRDSIHWEKMQGIEVKPPVYEKKVGRPKKTRRKQPQELEDGTKISKHGVEMHCSYCKNGGHNKTSCKQRKADLKLQKQPMQQMATSSIVDSEELVITREPVITQAASNHQERVHPGAVPESAFIATNRREGVQPPLTTSTKQGRATLRKRSAAPKKKNSPKKKKQ

SEQ ID NO: 138934 - protein, 33 aa, Oryza sativa
  Clone ID: PAT_MRT4530_40276C.1.pep
APPPPATSASKAPPPPSSTAPTSPPARNNGSSC

SEQ ID NO: 138935 - protein, 898 aa, Oryza sativa
  Clone ID: PAT_MRT4530_40277C.1.pep
MTSSPILLSWLVIRMPHWRIHTLWGPHDDAHARDQFHDSLLPIELATKGDKSGDSVNRAYVDGRVSWFDHCESDSWSLLWVDDFIEELGYEKSDNTKIYWLLPGKQLNDGLRRVKCDADTNSMVALVPRVRSFVLYADHQDIVDASDLDDVAIIGSDPLRTAVKPSKIIRAKSDGGELIVDKRATDAKIDDEEESRTEDPYFVDSDYEINHEDDDLFDNCVEGQIELAHNKEEGSDYGSSEDERLMMPDISEEEEEEIKFSFKSFRADVDMETPEFKVSMMFADAVELRKAIDQYTIKNRVAIKKTRNTKTRIEAKCAEGCPWMLSASMDNRVKCLVVREYIEKHTCSKQWEIKAVTAKYLAKRYIEEFRDNDKMTPMSFAKKIQKELHLTPSRHKLGRARRMAMRAIYGDEISQYNQLWDYGQELRTSNLGSSFYLNLHFGCFHTLYMSFDACKRGFMSGCRPIICLDGCHIKTKFGGHILTAVGMDPNDCIFPIAIAVVVVESLKSWSWFLDTLKKDLGIENTSAWTVMTDRQKGLVPAVRREFSHAEQRFCMKALSSEAYKYLEEIPPNQWCRAFFSDFPKCDILLNNNLEVFNKYILDAREMPILSMLERIRNQIMNRLYTKQKELERNWPCGLCPKIKRKVEKNTEIANTCYVLPAGMGAFQVSDRGSQYIVELNVKRCDCRRWQLTGIPCNHAISCLRHERIKPEDVVSFCYSTRCYEQAYSYNIMPLRDSIHWEKMQGIEVKPPVYEKKVGRPKKTRRKQPQELEGGTKISKHGVEMHCSYCKNGGHNKTSCKQRKADLKLQKQPMQQMATSSIVDSEELVITREPVITQAASNHQERVNPGAVPESAFIATNRREGVQLPLTTSTKQGRATLRKRSAAPKKKNSPKKKKQ

SEQ ID NO: 138936 - protein, 341 aa, Oryza sativa
  Clone ID: PAT_MRT4530_40278C.1.pep
MAGAHGRRRRVALPWPVRLRLCVFEAAIDATQRRDGSVNRFLFSLFDRRAPADPRPDAAGVSSTDITVDASRGLWARVFSSAVESPPLPVVVYFHGGGFALLTAASSQYDALCRRLCRELRAVVVSVNYRLAPEHRYPAAYDDGVDVLRHLATVGLPADVVAAVPVDLTRCFLVGDSAGGNIAHHVAHRWAAATTSSSRRVRLAGVVLLQPFFGGEERTEAELRLDGVGPVVSMARADWCWRAFLPEGADRDHPAAHVTGENAELAEEFPPAMVVVGGYDTLQDWQRRYAGMLRRNGKAVQVVEYPAAIHSFYVFPELADSGELVKEMKAFMERNAPPKSN

SEQ ID NO: 138937 - protein, 894 aa, Oryza sativa
  Clone ID: PAT_MRT4530_40279C.1.pep
MDTLDMQTGEIQYNLMEHVAQTQEWQQSADAQFASINDMMQQQHDDLQAYFMSKDHFTATTTNDCIEDVMYCTEDEVTLAQIEMVHNNEQTGYAQMLQFPLDRDIYPFAVVISLWDYKSGVRCPLIGVSGPFEDFSLIGSRLCWLPTMMPMLEISFTIAYRQLSLQQKEINQEIDIWIKVEGRELDPGDSEDEEFSIEMHHGGFFMGNGVNRAYVDGRVSWFDHCESDSWSLLWVDDFIEELGYEKSDNTKIYWLLPGKQLNDGLRRVKCDADTNSMVALVPRVRSFVLYADHQDIVDAIDLEDVAIIGSDPLRTAVKPSKIIRAKSDGGELTVDKRATDAKIDDKEESRTEDPDFVDSDYEIDHGDDDLFDNCVEGQIELAHNKVEGSDYGSFEDERLMMPDISEEEEEEIKFSFKSFRADVDMETPEFKVSMMFVDAVELRKAIDQYTIKNRVAIKKTRNTKTTIEAKYAEGCPWMLSASMDNRVKCLVVREYIEKHTCTKQWEIKAVTAKYLAKRYIEEFRDNDKMTLMSFAKKIQKELHLTPSRHKLGRARRMAMRAIYGDEISQYNQLCDYGQELRTSNPGSSFYLNLHFGCFHTLYMSFDACKRGFMSGCRPIICLDGCHIKTKFGGHILTAVDLGIENTSAWTVMTDRQKGLVPAVRREFSHAEQRFCVRHLYQNFQVLYKGETLKNQLWAIARSSTVPEWNANMEKMKALSSEAYKYLEEIPPNQWCRAFFSDFPKCDILLNNNSEVFNKYILDAREMPILSMLERIRNQIMNRLYTKQKELERNWPCGLCPKIKRKVEKNTEMANTCYVLPTGMGAFQEPVITQAASNHQERVNPGAVPETAFIATNRREGVQPPLTTSTKQGRATLRKRSAAPKKKNSPKKKKQ

SEQ ID NO: 138938 - protein, 85 aa, Oryza sativa
  Clone ID: PAT_MRT4530_4027C.1.pep
MHMVVVRYSTAIRSRIICTLSDFVVEGFCSWHGTKDQLIRQSGVRQSGRGEKEETKKNVIGPPEAWTENPSTVMENAAHWVYQNP

SEQ ID NO: 138939 - protein, 285 aa, Oryza sativa
  Clone ID: PAT_MRT4530_40280C.1.pep
MVRATRDDMVRQSDGKSVVTIDRVYRWIDDEPGYSGVEKDMARDFCLAFALFKLLKRRFYGFVPAKAGSPRARDLVCGGLIRPAVTGPDAAFRVVEAELAFLYDEFYTRNVVLVGARTYVCIAAAVAGITMWTAFFGTLGPGYHRLRIGVRGLDRSVTVLIVVITAGLELCQAVAGFSSNWKYVKTVYPCVRDDQPWTDKRPGHLLWKESITPPTTRYWYDKPRRQGHKRGRRKRLPQEVRRPVLVSLKASYGHFTNGVSTLRRHGLTPQLEWACAFPKLTDQIL

SEQ ID NO: 138940 - protein, 939 aa, Oryza sativa
  Clone ID: PAT_MRT4530_40281C.1.pep
MVPGLRSEGARSHVYNYEDEEFSIEMHHGGFFMGNGVNRAYVDGRVNWFDHCESDSWSLLWVDDFIEELGYEKSDNTKIYWLLPGKQLSDGLRRVKCDADTNSMVALVPRVRSFVLYADHQDIVDAIDLYDVAIIGSDSLRTVVKPSKIIRAKSDGGELIVDKRATDAKIDDEEESRTEDPNFVDSDYEIDHGDDDLFDNCVEGKIELAHNKEEGSDYVSSEDERLMMPDISEEEEEKIKFSFKSFRANVDMETPEFKVSIMFADVVELRKAIDQYTIKNQVAIKKTRNTKTRIEAKCAEGCPWMLSASMDNRVKCLVVREYIEKHTCSKQWEIKAVTAKYLAKRYIEEFRDNDKMTLMSFAKKIQKELHLTPSRHKLGRARRMAMRAIYGDEISQYNQLWDYGQELRTSNPGSSFYLNLHFGCFHTLYMSFDACKRGFMFGCRPIICLDGCHIKTKFGGHILTAVGMDPNDCIFPIAIAVVEVESLKSWSWFLDTLKKDLGIENTSAWTVMTDRQKGLVPAVRREFSDAEQRFCVRHLYQNFQVLHKGETLKNQLWAIARSSTVPEWNANMEKMKALSSEAYKYLEEIPPNQWCRAFFSDFPKCDILLNNNSEVFNKYILDAREMPILSMLERIRNQIMNRLYTKQKELERNWPCGICPKIKRKVEKNTEMANTCYVFPAGMGAFQVSDIGSQYIVELNVKRCDCRRWQLTGIPCNHAISCLRHERIKPEDVVSFCYSTRCYEQAYSYNIMPLRDSIHWEKMQGIEVKPPVYEKKVGRPKKTRRKQPQELEGGTKISKHGVEMHCSYCKNGGHNKTSCKKRKADLKLQKQPIQQMATSSIVDEEELVITWEPVITQEMHLLSIPQKNSNYLSSSVVEAFIKEAASKHQERVPESAFIATNRREGVQPPLTTSTKQGRATLRKRSAAPKKKNSPKKKKQ

SEQ ID NO: 138941 - protein, 812 aa, Oryza sativa
  Clone ID: PAT_MRT4530_40282C.1.pep
MVPGLRSEGARSPVYNSEDEEFSIEMHHRGFFMGNGVNRAYVDGRVSWFDHCESDSWSLLWIDDFIEELGYDKSENTKIYWLLPGKELSDGLRRVKCDADTNSMVALVPRVRSFVLYADHQDIVDGIDLDDVAIIGSDTLRAAVQPIKIIRAKSDGGEKIVDKCATYSKIDEEEESRIEDPDFVDSDYEIDHGDDDLFDNCVEGQIELAHNKEEGSDYGSSEDERLMMPDISEEEEEEEEIKFSFKSFRADVDMETPEFKVSMMFADAVELRKAIDQYTIKNRVAIKKTRNTKTRIEAKCAEGCPWMLSASMDNRVKCLVVREYIEKHTRSKQWEIKAVTAKYLTKRYIEEFRDNDKMTLMSFAKKIQKELHLTPSRHKLGRARRMAMRAIYGDEISQYNQLWDYGQELRTSNPRSSFYLNLLFGCFHTLYMSFDACKRGFLSGCRPIICLDGCHIKTKFGGHILTAVGMDPNDCIFPIAIVVVEVESLKSWSWFLDTLKKDLGIENTSAWTVMTDRQKGLVPAVRREFSHAEQRFCVRHLYQNFQVLHKGETLKNQLWAIARSSTVPEWNANMEKMKALSSEAYKYLEEIPPNQWCRAFFSDFPKCDILLNNNSEVFNKYILDAREMPILSMLERIRNQIMNRLYTKQKELERNWPCGLCPKIKRKVEKNTEMANTCYVLPAGMGAFQRKADLKLQKQPMQQMATSSIVDSEELVITREPVITQEMHLLSIPQQNSNYLSSSVVEAFIKEAASNHQERVNPGAVLESAFIATNRREGVQPPLTTSTKQGRATLRKRSAAPKKKNSPKKKKQ

SEQ ID NO: 138942 - protein, 33 aa, Oryza sativa
  Clone ID: PAT_MRT4530_40283C.1.pep
IGTRFPWNSHGSTHTCPPSPRLTLYSKYTRGSV

SEQ ID NO: 138943 - protein, 58 aa, Oryza sativa
  Clone ID: PAT_MRT4530_40284C.1.pep
GEERRARAPATTDQQPQETGPATALWAPLFSHRRPAALSTPRPPPPWTGRMHRSHGDL

SEQ ID NO: 138944 - protein, 1621 aa, Oryza sativa
  unsure (1)..(1621): unsure at all Xaa locations
  Clone ID: PAT_MRT4530_40285C.1.pep
MGGGGYVQMVAPSGLRLGDRKGNNGVGTVAIDGSAELIPTSMHTLDEWKARCHHEGVEFDPTSGDSKLRRGAGKDEKEETCDGGKRRKSPIDMWGQQLFFYYCNNISLEGKLSKGESSNCHERDANMSVDQFPKRSILMASSSSMAATNPFQGHPISEKLGKANHALWKVQVSAAVRGARLQGHLTGATKRPPAEIAVTKDGATKKEPNLAHEDWEATDQQVLGYLLSSLTREMYSTHTRARAINTRFALTNTKKGNMSTPEYFAKMKSLGDEMATAGGRPIDEEELIQYIITGLGEGYSEVVSAVCARVEPISVSDLYSQVLNFEARQAIYRGAQEVTVNVANRGGFSHGGRGNSNGGQGGSRGGGGGHGRRNGGGVRGRGRTPGGVDKRPICQVCFKRGHTAADCWYRYDEDYVPDAKHVAAAAVNSYGVDTNWYIDTGATDHVTGELDKLTMKEKYNGGEQIHTASGAGMDISHIGHAIVHNPNSRNIHLRNVLYVPQAKKNLVSVHRLVNDNSAFLELHRDYFFLKDQITRKTLLKGRSWRRLYPLPHSSLKQAYSAIKLSLDRWHHRLGHPSITTHKSQVFDKFQEFQVMVERQFDRKILAMQTDWGGEYQSLNSFFSKIGIVHHVSCPHTHQQNGSAERKHRHIVEIGLSLLSHASMPLKFWDEAFQAATYLINRVPSRVIHNISPLEKLFKQKPDYSSLRIFGCACWPNLRPYNNHKLQFRSKRCVFLGFSTMHKGFKCLEVSTGRIYISRDVVFDENIFPFTELHANAGARLRSEIDILTPELLGPIRSVGNEQCMHPVTNPLSADVSAALSNRANEPHRDGAVHPADAEDSPATPPLDASSGPEPDRVVHHSPAAMSSGHHPGPTPGSVPRGAASSLAEDTAEDSVSQAVQEQESQVVQEQEQSSPAFRGXAGPRTRLQSGVRKXKGEPTNDLEALKDKNWKLAMDSEYDALVKNKTWHLVPPQRGRNIIGCKLVYKIKRKADGTLDRYKARLVAKGFKQRYGIDYEDTFSPVVKAATIRIILSLAVSKGWSLRQLDVQNAFLHGYLDEEVYMLQPPGFEDPTKPHHVCKLDKALYGLKQAPRAWFSRLSKKLMDLGFKGSKADTSLFFLNKGDITMFVLVYVDDIIVASSSERATAALLQDLKGEFALKDLGELHYFLGIEVSKVQNGIVLNQDKYANDLLKKVGMIDCKPANTPLSVSEKLSLHEGSLLGPEDASHYRSVVGALQYLTLTRPDIAFSVNKVCQFLHAPTTVHWIAVKRILRYLKQCTRLGLEIHKSGSTLVSGFSDADWAGCLDDRRSTGGFAIFLGSNLVSWNTRKQATVSRSSTESEYKAIANATAEIMWVQTLLAELEIKSPKAAKIWCDNLGAKYLSANPVFHARTKHIEVDYHFVRERVTQKLLEIDFVSTNDQVADGFTKPLSVGNCENSRIRNLLPRAALTLAAQGRNPSRPHRHPQSPQPPRHRRSPPSKIAQPAGKVAAGKTRRRRSLSSTWEEKRCSLGRRRRLERPAEWIHRRQIRPLGGGSAPLPSPGQIRRAHGSATRRQRATGGSDGGWPADSGSAPAEAQPVTAEAGEARPVVEEVAAVRGGIAEVPVRHDEAGQRGGGGWRSRR

SEQ ID NO: 138945 - protein, 1202 aa, Oryza sativa
  Clone ID: PAT_MRT4530_40286C.1.pep
MGGGGYVQMVAPSGLRLGDRKGNNGVGTVAIDGSAELIPTSMHTLDEWKARCHHEGVEFDPTSGDSKLRRGAGKDEKEETCDGGKRRKSPIDMWGQQLFFYYCNNISLEGKLSKGESSNCHERDANMSVDQFPKRSILMASSSSMAATNPFQGHPISEKLGKANHALWKVQVSAAVRGARLQGHLTGATKRPPAEIAVTKDGATKKEPNLAHEDWEATDQQVATCDTAAEVWSAIEQMYSTHTRARAINTRFALTNTKKGNMSTPEYFAKMKSLGDEMATAGGRPIDEEELIQYIITGLGEGYSEVVSAVCARVEPISVSDLYSQVLNFEARQAIYRGAQEVTVNVANRGGFSHGGRGNSNGGQGGSRGGGGGHGRRNGGGVRGRGRTPGGVDKRPICQVCFKRGHTAADCWYRYDEDYVPDAKHVAAAAVNSYGVDTNWYIDTGATDHVTGELDKLTMKEKYNGGEQIHTASGAGRIYISRDVVFDENIFPFTELHANAGARLRSEIDILTPELLGPIRSVGNEQCMHPVTNPLSADVSAALSNRANEPHRDGAVHPADAEDSPATPPLDASSGPEPDRVVHHSPAAMSSGHHPGPTPGSVPRGAASSLAEDTAEDSVSQAVQEQESQVVQEQEQSSPAFRGTGRTAHQVAKWSSQRKGEPTNDLEALKDKNWKLAMDSEYDALVKNKTWHLVPPQRGRNIIGCKWVYKIKRKADGTLDRYKARLVAKGFKQRYGIDYEDTFSPVVKAATIRIILSLAVSKGWSLRQLDVQNAFLHGYLEEEVYMLQPPGFEDPTKPHHVCKLDKALYGLKQAPRAWFSRLSKKLMDLGFKGSKADTSLFFLNKGDITMFVLVYVDDIIVASSSERATAALLQDLKGEFALKDLGELHYFLGIEVSKVQNGIVLNQDKYANDLLKKVGMIDCKPANTPLSVSEKLSLHEGSLLGPEDASHYRSVVGALQYLTLTRPDIAFSVNKVCQFLHAPTTVHWIAVKRILRYLKQCTRLGLEIHKSGSTLVSGFSDADWAGCLDDRRSTGGFAIFLGSNLVSWNARKQATVSRSSIESEYKAIANATAEIMWVQTLLAELEIKSPKAAKIWCDNLGAKYLSANPVFHARTKHIEVDYHFVREREGLGTMLNKTHFCWRWDASGPYSSRSAYKRFFIGRAKFEGDRQMWKTFAPLRCKYNTLHKKERNSRVFNREIKN

SEQ ID NO: 138946 - protein, 82 aa, Oryza sativa
  Clone ID: PAT_MRT4530_40287C.1.pep
MARCRCRCSVAAPRVDKVTGDGACRGSQVARGGGGWRPGGDLSGGEPLFRLFLCFCRGLVGVASWARGLPALNKDNTNPQYL

SEQ ID NO: 138947 - protein, 1441 aa, Oryza sativa
  unsure (1)..(1441): unsure at all Xaa locations
  Clone ID: PAT_MRT4530_40288C.1.pep
MALSSSTAATNPFQGHPISEKLGRANHALWKVQVSAAVRGARLQGHLTGATKRPPAEIAVTKDGATKKEPNPAHEDWEATDQQVLGYLLSSLTREVLMQVATCDTAAEVWSAIEQMYSTHTRARAINTRFALTNTKKGNMSTPEYFAKMKSLGDEMATAGGRPIDEEELIQYIITGLGEGYSEVVSAVYARVEPISVSDLYSQVLNFEARQAIYRGAQEVTVNVVNRGGFSHGGRGNSNGGQGGSRGGGDGGGHGRGNGGGGRGRGRTPGGVDKRPICQVCFKRGHTAADCWYRYDEDYVPDAKHVAAAAVNSYGVDTNWYIDTGATDHVTRELDKLTMKEKYNGGEQIHTASGAGMDISHIGHAIVHNPNSRNIHLRNVLYVPQAKKNLVSVHRLVNDNSAFLELHRDYFFLKDQITRKTLLKGRSWRRLYPLPHSSLKQAYSAIKLSLDRWHHRLGHPSITTVKQVVNKFSLPCSDLSSESVCNACQQAKSHQLPFPISSSVSKHPLELVFSDVWGPAPESVGRKKYYVSFIDDFSKFTWIYLIQHKSQVFDKFQEFQVMVERQFDRKILAMQTDWGGEYQSLNSFFSKIGIVHHVSCPHTHQQNGSAERKHRHIVEIGLSLLSHASMPLKFWDEAFQAATYLINRVPSRVIHNISPLEKLFKQKPDYSSLRIFGCACWPNLRPYNNHKLQFRSKCCVFLGFSTMHKGFKCLEVSTGRIYISRDVVFDENIFPFTELHANAGARLRSEIDILTPELLGPIRSVGNEQCMHPVTNPLSADVSAALSNRANEPHRDGAVHPADAEDPPATPPLDASSGPEPDRVVHHSPTATSSGRHPGPTPGSVPRGAASSLXGDSRRLSVAGGAGAGVAGDETNTLQHADVTDTVSEAPAGPRTRLQSGVRKEKVYTDGTIKYKHSWFTASGEPTNDLEALKDKNWKLAMDSEYDALVKNKTWHLVPPQRGRNIIGCKWVYKIKRKADGTLDRYKARLVAKGFKQRYGIDYEDTFSPVVKAATIRIILSLAVSKGWSLRQLDVQNAFLHGYLEEEVYMLQPPGFEDPTKPHHVCKLDKALYELKQAPRAWFSRLSKKLMDLGFKGSKADTSLFFLNKGDITMFVLVYVDDIIVAGSSERATAALLQDLKGEFALKDLGELHYFLGIEVSKVQNGIVLNQDKYANDLLKKVGMIDCKPANTPLSVSEKLSLHEGSLLGPEDASHYRSVVGALQYLTLTRPDIAFSVNKVCQFLHAPTTVHWIAVKRILRYLKQCTRLGLEIHKSGSTLVSGFSDADWAGCLDDRRSTGGFAIFLGSNLVSWNARKQATVSRSSTESEYKAIANATAEIMWVQTLLAELEIKSPKAAKIWCDNLGAKYLSANPVFHARTKHIEVDYHFVRERVSQKLLEIDFVSTNDQVADGFTKPLSVRLLENFKSNLNLVRSGLREGVS

SEQ ID NO: 138948 - protein, 528 aa, Oryza sativa
  Clone ID: PAT_MRT4530_40289C.1.pep
MVVVDGLHDGGGGDLQALLDDAGVDDVAARGGGEVEEEVERPSNEDAFPAVEKMATAAAAKGLQCRHCGTTETPQWRHGPEGHRTLCNACSMRYRSGKLVPEYRPLRSPTFSPELHSNRHHRVLQLRRRPGPQSAAPSPAAVARYGGEAKEEEEELAWVSNKDAFATVETTMAPSPRVVETPPEHDHRPANTPTTSPEPHSDRPRRVVQLPRRLQEPSASANLAHAVAATARAGRECAHCGTTKTPAWRLGPDSRRKLCNACGNKYRSGQLNSTTFSQNSQEQKKKSKSSACSRERKRSAVAATVVVGGGLRDDAAAIADEHLDGGDLQALLDDVALDDVAARGGGDAGEAKEEEEELEWLSNKDAFPTVETMSPAPPENRTKAPVPPAGWQCRHCGSTETPLWRERDGPAEAEHVRKEETPPNITPATKHRRIVDLLRCSTALNTAAKAVERRCTHCGTTKTPAWLSGPDSRGKLCNACGKQYRKGRLVPEYRPLNCPTFSPELHSNAHAHRRRRESPVAIAIAGEK

SEQ ID NO: 138949 - protein, 126 aa, Oryza sativa
  unsure (1)..(126): unsure at all Xaa locations
  Clone ID: PAT_MRT4530_4028C.1.pep
YVPPPPHHALHPFATLTPPXQPLHSTPSALPPKPSTPPPPXTPXPPSTPHSSTPDASPARWPPPXPPPNRXPPPLLSPXPSSAQPTPSPPPSTAAAPPLLHPSSRRHRSQSRDFLFLSRNRATLSP

SEQ ID NO: 138950 - protein, 1391 aa, Oryza sativa
  Clone ID: PAT_MRT4530_40290C.1.pep
MSIFSALWKVQVSAAVRGARLQGHLTGATKRPPAEIAVTKDGATKKEPNPAHEDWEATDQQVLGYLLSSLTREVLMQVATGDTAAEVWSAIEQMYSAHTRARAINTRFALTNTKKGNMSTPEYFAKMKSLGDEMATAGGRPIDEEELIQYIITGLGEGYSEVVSAVCARVEPISVSDLYSQVLNFEARQAIYRGAQEVTVNVANRGGFSHGGRGNSNGGQGGSRGGGDGGGHGRGNGEGGRGRGRTPGGVDKRPICQVCFKRGHTAADCWYRYDEDYVPDAKHVAAAAVNSYGVDTNWYIDTGATDHVTGELDKLTMKEKYNGGEQIHTASGAGMDISHIGHAIVHNPNSRNIHLRNVLYVPQAKKNLVSVHRLVNDNSAFLELHRDYFFLKDQITRKTLLKGRSWRRLYPLPHSSLKQAYSAIKLSLDRWHHRLGHPSITTVKQVVNKFSLPCSDLSSESVCNACQQAKSHQLPFPISSSVSKHPLELVFSDVWGPAPESVGRKKYYVSFIDDFSKFTWIYLIQHKSQVFDKFQEFQVMVERQFDRKILAMQTDWGGEYQSLNSFFSKIGIVHHVSCPHTHQQNGSAERKHRHIVEIGLSLLSHASMPLKFWDEAFQAATYLINRVPSRVIHNISPLEKLFKQKPDYSSLRIFGCACWPNLRPYNNHKLQFRSKRCVFLGFSTMHKGFKCLEVSTGRIYISRDVVFDENICPFTELHANAGARLRSEIDILTPELLGPIRSVGNEQCMHPVTNPLSADVSAALSNRANEPHRDGAVHPADAEDPPATPPLDASSGPEPDRVVHHSPAATSSGRHPGPTPGSVPRGAASSLAEETAEDSVSQAVQEQESQVVQEQEQSSPAQEHAQAVTDETNTLQHADVTDTGSEAPAGPRTRLQSGVHKEKVYTDGTIKYKHSWFTASGEPTNDLEALKDKNWKLAMDSAYDALVKNKTWHLVPPQRGRNIIGCKWVYKIKRKADGTLDRYKARLVAKGFKQRYGIDYEDTFSPVVKAATIRIILSLAVSKGWSLRQLDVQNAFLHGYLEEVYMLQPPGFEDPTKPHHVCKLDKALYELKQAPRAWFSRLSKKLMDLGFKGSKADTSLFFLNKGDITMFVLVYVDDIIVAGSSERATAALLQDLKGEFALKDLVSEKLSLHEGSLLGPEDASHYRSVVGALQYLTLTRPDIAFSVNKVCQFLHAPTTVHWIAVKRILRYLKQCTRLGLEIHKSGSTLVSGFSDADWAGCLDDRRSTGGFAIFLGSNLVSWNARKQATVSRSSTESEYKAIANATAEIMWVQTLLAELEIKSPKAAKIWCDNLGAKYLSANPVFHARTKHIEVDYHFVRERVSQKLLEIDFVSTNDQVADGFTKPLSVRLLENFKSNLNLVRSGLREGVS

SEQ ID NO: 138951 - protein, 1778 aa, Oryza sativa
  Clone ID: PAT_MRT4530_40291C.1.pep
MHTPSMDQPAASNGDEAPRMEMCPSLYRAARSGRAEEVMALLLQQRPGDGAAAHRQVAGIIQHRQCNVLEVTAERNTILHVAAEKGHGELIQELYHRFIRDNSLLSRRNSAMDTPLHCAARAGHAGTVTILVNLAQDCEENILGCQNAAGDTALHMAARHGHGATVEALVVARAKATVLVSMKVVESVDQFPKRSILMASSSSTAATNPFQGHPISEKLGKANHALWKVQVSAAVRGARLQGHLTGATKRPPAEIAVTKDGATKKEPNPAHEDWEATDQQVLGYLLSSLTREVLMQVATCDTAAEVWSAIEQMYSTHTRARAINTRFALTNTKKGNMSTPEYFAKMKSLGDEMATAGGRPIDEEELIQYIITGLGEGYSEVVSAVCARVEPISVSDLYSQVLNFEARQAIYRGAQEVTVNVANRGGFSHGGRGNSNGGQGGSRGGGGGGHGRGNGGGGRGRGRTPGGVDKRPICQVCFKRGHTAADCWYRYDEDYVPDAKHVAAAAVNSYGVDTNWYIDTGATDHVTGELDKLTMKEKYNGGEQIHTASGAGHIYISRDVVFDENIFPFTELHANASARLRSEIDILTPELLGPIRSVGNEQCMHPVTNPLSADVSAALSNRANEPHRDGAVHPADAEDPPATPPLDASFGPEPDRVVHHSPAATSSGRHPGPTPGSVPRGVASSLAEETAEDSVSQAVQEQESQVVQEQEQSSPAQEHAQAVTDETNTLQHADVTDTGSEAPAGPRTRLQSGVRKEKVYTDGTIKYKHSWFTASGEPTNDLEALKDKNWKLAMDSEYDALVKNKTWHLVPPQRGRNIIGCKWVYKIKRKADGTLDRYKARLVAKGFKQRYGIDYEDTFSPVVKAATIRIILSLAVSKGWSLRQLDVQNAFLHGYLEEEVYMLQPPGFEDPTKPHHVCKLDKALYGLKQAPRAWFSRLSKKLMDLGFKGSKADTSLFFLNKGDITMFVLVYVDDIIVASSSEKATAALLQNLKGEFALKDLGELHYFLGIEVSKVQNGIVLNQDKYANDLLKKVGMIDCKPANTPLSVSEKLSLHEGSLLGPEDASHYRSVVGALQYLTLTRPDIAFSVNKVCQFLHAPTTVHWIAVKRILRYLKQCTRLGLEIHKSGSTLVSGFSDADWAGCLDDRRSTGGFAIFLGSNLVSWNARKQATVSRSSTESEYKAIANATAEIMWVQTLLAELEIKSPKAAKIWCDNLGAKYLSANPVFHARTKHIEVDYHFVRERLLSRFINLGFGCSQLRRTLYRHDGGCSHHIYINTKATHRISAIVSTQTNSQTELNKAGVSPLYLAVMSRSQAQNKNVFVNSIDKFVSLAEMVHLLLQWKPELASQVDCNGSTPLHFAASDGNRKIVHAILAIVPTGTVYMKDSDGLSALHVAARLGHANVVKQLIGICPDAVELRDGHGETFLHTAVREKQSSIVSLAIKKHKQVGGLLDAQDGVGNTPLHIAVVAGSPDIVNALLHKGKVQSDVLNDDGHSPLDLASTSTNLFNMVSFVVILVAFGAQGRPQRNDHLKPWSGRDIGKGIERTTDSLAVVAVLIATVAFAAGFNMPGSYGDDGTANLKGRFSFKWFMVLDTVAVAASVVAVILLVYGKASRSAGSWKSFVAALHFIWVSLVSLILAFFAAFRATMRTSRAVSIVFMVIYVCLIVLVVNVGTWVEPVTTMRIFWRFVWRSHRTNAVKRQYPLAVASIYNWLLFFHITYIMFAGLGVVHNHSNSDRGGLSSTLEPEPYLTCPCTYVIRALPQYFSYILRVLFLLCY

SEQ ID NO: 138952 - protein, 109 aa, Oryza sativa
  Clone ID: PAT_MRT4530_40292C.1.pep
MAVLGSRACGGDDKENVPPMPAVAAAVAASSWHGIAVVKNQRMKRPGGGGGKLRRRVPLRDITNLMYVAARPPAPPAASSVTAAARSREEPVAAAAALPARRSLRKEFR

SEQ ID NO: 138953 - protein, 468 aa, Oryza sativa
  Clone ID: PAT_MRT4530_40293C.1.pep
MGWGAVVYEGGVVGASLVGLGWAGLWFLNRRLYKEYEERRALVQILFGLVFAFSCNLFQLVLFEILPVLSKHARFLNWHLDLFCLILLLVFVLPYYHCYLLLRNSGVRRERALLVAALFLLVFLYGFWRMGIHFPMPSPEKGFFTMPQLVSRIGVIGVSVMAVLSGFGAVNLPYSYLSLFIREIDEKDIKTLERQLMQSMETCIAKKKKIVLSKMEMERIQGSEEKLKARSFLKRIVGTVVRSVQEDQTEQDIKSLDAEVQALEELSKQLFLEIYELRQAKIAAAFSRTWRGHAQNLLGYALSVYCVYKMLKSLQSVVFKEAGSVDPVTMTITIFLRHFDIGIDVTLLSQYISLIFIGMLVVISVRGFLANVMKFFFAVSRVGSGSTTNVVLFLSEIMGMYFISSILLIRKSLANEYRVIITDVLGGDIQFDFYHRWFDAIFVASAFLSLLLISAQYTSRQTDKHPID

SEQ ID NO: 138954 - protein, 249 aa, Oryza sativa
  unsure (1)..(249): unsure at all Xaa locations
  Clone ID: PAT_MRT4530_40294C.1.pep
MHTNKETEILAAKLDLLMKRLDDQEKNKPQGTIKTLDSHIMCEVYGNTGHSGTDCPETHEEAMFMNNGYRPQGAKTTDALNKKLATNDNILENINVKLDGFASTFQNQPSFNKMLQTQLVPTYARYLKDILDNKRPLPTTKVVKLTEECSNAILHWLQEKKKDPGCPTITCSIGRQHFDQALYDLGASVSVTPKEVFDKXFTVLAPTLMRLQLADSLFRYLAGIAGDVLVKIXDFFIPVDFVVLDMDSD

SEQ ID NO: 138955 - protein, 1063 aa, Oryza sativa
  unsure (1)..(1063): unsure at all Xaa locations
  Clone ID: PAT_MRT4530_40295C.1.pep
MASSISSATSNPLSRQAILDKLTHSNFLTVIRGARMEGYLTGATKSPSQMVMVPTEKEGGRATETMNLAYEAWLAADQQILGYLFSSLSKEILTQVVTMDTAAQAWRAITEMVSSQSRSRALNTRLALSTTRKDDLSVSNYISKMKTLADEMASAGKPLVDEELMGYVLVGLGDDYEPVVSSLVGKHEPVSIFEVYSQLLSFESRGKLRQIAANHGYSCANSAKRGGGGKGGSIGGFAFNHGGSNGAARGNFSNNGGRGDRGGRGRGYNGGGRYNNSKPCPTFDDSFVPDAKYIDTGTTDHITGELEKLTTHEKYNGKDQIYTASGEDVWGPAPDSFGGRKYYKKSEVFQKFLDFQQLVERVFDHKIIAIQTDWGGDAGVNVNDHMFDSPEHSNVSIEHAAENSDENSAQNSEENEAADHLEIAAEDPDGADSQGDSPAPPGPDSMLGSPPQQSVQPDTTSGGDVAHSSGDMSAASASRHRYKARLVAKRFKQRYGIDYEDTFSPVVKPATIRTILSIVVSRGWSLRQLDVQNAFLHGLLEEEVYMKQPRGYEDKSKPNHICKLDKALYGLKQAPRVWYARLSSKLCDLGFKASKADISLFFQSKGGVNMFVLIYVDDIIVASSTQKATDALLSDLKKDFALKDLGDLHYFLGIEKVNEDWAGSVDDRRSTGGFVVYLGSNLVSWSATKQATVSRSSTEAEYKAVANATAXRLWCDNMGATYLLVNPVFHARTKHIEVDYHFVRERVAILQNTAIKKRVIKCKRHPHMEGGKGMHAFSSCTHQAREEAQALICVAQERLKKKEVEDRLPSAIEIDGCVSPPKNARGKELCANGGDKQQQYSCIMMNILFSNVRGLGNPGRREQLTEILRKNKVEVVCLQETIRVSFAANELDRFCGGRDFHWLTKPAEGHSGSLLMGVNLEMVDVVEVDLGEFFISMLVESKREKKRWRIVNVYGPVQTDKKDRFLHELTEMVLVEQEAVMIGGDYNLVRSAEEKSNSIINKRWAAKFNAFISTAELRELHRGGGKYTRTNKQTNPVREVLDRVLVSASWDNLDPFTVVGGMA

SEQ ID NO: 138956 - protein, 1560 aa, Oryza sativa
  unsure (1)..(1560): unsure at all Xaa locations
  Clone ID: PAT_MRT4530_40296C.1.pep
MKMAAKVLDQDSKLDLLLKKMEDVDRKQEASEKRREQSEEKSRADFLALKVAVESRFPEVEKRVDLLQESVLDLQEQVDKLQSLVKSFPAASGDGKLNSSSFSPTTPKDHSVSLSGILAGSARISGNVPPMCCPQFDGDNPQMWKSNCEEYFEIYGVHPRNWVRVAGLNFSGNAAFWLQSMRPKLVGVTWQEFTNQVCLRFTKDRKEVLIRQWFHIAQDSSVSEYVEKFDGIMHQLLAYSSSLPLNYFVTKFVEGLKPAIRSGVLMQKPQDLDSACSLALLQEEILEGSQPIQYKKTDYSVVSKYTSRHSSPTLSNPPATVPAIDDKRTSVVFSKPRDDKLSALKAYRRSKSLCFTCGERWGKDHKCSTSVQLHVVQELLEVLQSDELISEISEEEPSXPDTILMAISQQALSGTESPISFRLRGWVQGVEVLMLVDSGSSHSFIDNSLSQQLQGVQQLPKSVSVKVADGGLLCCSKFIPYCDWCSQGHVFQSEFKFLPLGTYDVILGMDWLMQLGPMNVDWTAKWRMFQKAGKRVKLLGIQAQTNSCLSITGEQLQGMLKLGSLMHIVQLQESVSVPAVQISPAIQLLLQEFQSIFEDSKXIPLVPNSKHVFIRPYRTNPAQKDEIEKQVKEMLLFGVIQPSTSAYSSPALLVKKKDGTWRLCIDYRQLNAVTLKRKFPMPVIDELLDELSGSKFFSKLDLRAGYHQIRLVEGEEYKTAFQTHTGHYEYRVMSFGLTGAPATFQGAMNATLASVLRRFALVFFDDILIYSPDLTSHLNHLRQVFSLLSEHQWKVKLSKCTFAQNQLSYLGHIISDKGVTTDPAKVEEVVNWQVPTSLKKLRGFLGLAGYYRKFVRNFGLLSKPLTQLLKKDVPFIWSPAADQTFQSLKMALVSAPVLALPDFSQPFTVETDACDVGIGAVLSQQGHPIAYISKALGVKTRGLSTYEKEYLAILLAVDHWRSYLQQGEFIILTDHHSLMHLNEQRIHTPWQHKAFTKLLGLQFKICYRKGSSNAAADALSRKYSEDTCELHAVSSCTPVWLQEVSDGYLTDAFSTQLLADLVLCSTSRPMFSLSNGIIKYKGRIWLGNNIELQQKVITALHASPMGGHSGFPVTYKRIKALFAWPKMKQVIKNAISGCSVCLQSKPDRSKYPGLLQPLPVPEGAWQVLTMDFIEGLPKSGKFNSIFVVVDKFSKYSHFIPLSHPFSAIDVAQAFMCNIYKLHGLPRFIISDRDRIFTSQFWEQLFPRSGTQLQLTTAYHPQTDGQTERVNQCLEIYLRCFVHAMPSKWSSWLYLAEFWFNTSYHSTLFKSPFEVLYGYPPGHFGIREDSCSIPDLHAWLSERKLMTQLLKQHLIRAQQQMKVYADKKRSFREFVVGDWVYLKLQPYIQSSVARRANHKLCFKYFGPFQILHKVGKVAYQLQLPANSAVHPVFHVSQLKHAVGFKHQVQPRLPTLSTFQVPVSVLDSRQIRKGNTSLTQVLVRWSDDGYGEETWEDLVELQQRFPNALAWGQAKSQEEGIVSVPGVLQPADEPREVAQTCRTRPVRARKSNLFVSGPDWAK

SEQ ID NO: 138957 - protein, 87 aa, Oryza sativa
  Clone ID: PAT_MRT4530_40297C.1.pep
PAGGLRKTYLTTEELHSWNPKATHYPLLLRAPANSMAHMAKSTCASKTTSTKEGLFNKNNESSAAPVPYKKCTCSGCSSRLHLLLYC

SEQ ID NO: 138958 - protein, 438 aa, Oryza sativa
  Clone ID: PAT_MRT4530_40298C.1.pep
MPVAASAIYFLNLRGDVLINRLYRDDVGGNMVDAFRMHIMQTKELGTCPVRQIGGCSFLYMRISNVYIVIVVSSNANVACAFKFVVEAVALFKSYFGGAFDEDAIRNNFVLIYELLDEIMDFGYPQNLSPEILKLYITQEGVRSPFSSKPSDKPVPNATLQVTGAVGWRREGLMYKKNEVFLDIVESVNLLMSSKGSVLRCDVTGKILMKCFLSGMPDLKLGLNDKIGLEKEAQLKSRPAKSGKTIELDDVTFHQCVNLTRFNSEKTVSFVPPDGEFELMKYRITEGVNLPFRVLPTIKELGRTRMEINVKVKSVFGAKMFALGVVVKVPVPKQTAKTSFQTTSGKAKYNASIDSLVWKIRKFPGQTEATMSAEVELISTMGEKKSWNRPPIQMEFQVPMFTASGLRVRFLKVWEKSGYNTVEWVRYITRAGSYEIRC

SEQ ID NO: 138959 - protein, 215 aa, Oryza sativa
  Clone ID: PAT_MRT4530_40299C.1.pep
MDMLLEILRLLECPDVMRCAAVCTAWRAAYRDLRRRGIAASRQTPCLIYRSAAAGLNAIGMYSLSDQRPYTIPIPDPISEQHWFGSSNGWLITADCRSDIILLNPITGRRIALPPATTMQHVTLVLNEEGFLTNPSSDDDCIAMLIHQPYDQLSFAKVGGNSWNWLAVDYTFVDCIYHDGWFYAVHDNHMSMSWDHIKASQLAGFDVVVNTFTAL

SEQ ID NO: 138960 - protein, 120 aa, Oryza sativa
  Clone ID: PAT_MRT4530_4029C.1.pep
HARVQVVSSLGKTEFKAVLRPGQLMNNPQRYVFLKKAQQEGGQNISFKTKANSMGSHHAGKNSIFRARPVEVIANANRKTREQAPSLKNKRGEELGAFTPKKQQQTYPGFSNEAENEALE

SEQ ID NO: 138961 - protein, 60 aa, Oryza sativa
  Clone ID: PAT_MRT4530_402C.1.pep
MSTTSSLLVIYADEQHARRDGDERFSTMCHLPLGMLHARLPLAVSSCRHSEVETLQFGVR

SEQ ID NO: 138962 - protein, 639 aa, Oryza sativa
  Clone ID: PAT_MRT4530_40300C.1.pep
MEIRARSDPILPPRTDSEMVMEIPSSKRDMARGAEDDGEEEEEEEYDRVFYEDIEAPKFVDLTAPDAARPSDDPSWFCLRIGCDQNHEHVDPEALHRSFFMRVMAARSPNVRLQKAIRRRNQSSMLKCPHSAPPKPPRSRIARLSTATEAAAKPRLKTHRICTLRASPTRTKAAKVEASGARKKALTTPRSKPVRPRQDPFLSVKHQKQEPVAAAARKGTVAKALFMATPKKDASKTPAKAQAAPPLSEVCSKMRKLNLACREVPSRYLCQSSNPKSSKKCDQTAVKSVKAAQNSRPDERKKKKILGCSLQHASSEAGRENRNGRENTAADENACPEAASSSEEPKEVMQESRIEVETSQADNCDDDKENLSYVDQPTEQMVIISHSDGENLQQLENNENVPRKVAKMQSKLNAEQGGKLKKTTNPKPFRLRTDERGVLKEANPERHQTLTENNSTAAVQQIGRCRDGKGRDKPTCGEKQKKQIRNVATGQVDEAKRVLNSIRCNKVKPAMTNGKTVGKSQGASRVASSTRSTKITSSKHENMYLPRRIRSIVFLNYSLVCTLTHTNKDVSCSLVLSVPLHFWKLDRQILEINEVTTDSETDVVGSGVPAAGNGAEITAAAGDARRVLYLIWHARGHVV

SEQ ID NO: 138963 - protein, 137 aa, Oryza sativa
  Clone ID: PAT_MRT4530_40301C.1.pep
MTTSCIACTPSLTGCLTAADWCFCLFGLMVTSPFMGIHVFTDRLAFAAADWCFCGLMVTSPFMGIHVFTDQLAFAAVDWCFRLHGWPIMPGWLVTPPFMGVHIFTDRLAFAAADWCFRGWLVTPPFMGVHVFTDQLA

SEQ ID NO: 138964 - protein, 268 aa, Oryza sativa
  Clone ID: PAT_MRT4530_40302C.1.pep
GRPRWTRRLEAEETGSLESWASSDSEMVMEIPSSKRDMARGAEDDGEEEEEEEEHVDPEALHRSFFMRVRAASSWYARDFVVGEVVILVVFNGGRSWQRGAPTCGCRRRSGGGTRGRISDGDGGRGEAQAEDPPDLHPAGVSDPDQGGEGGGLRREEESPDDAEEQARPAEAGSVPQREAPEAGARRGGGEEGDRRESSVHGHAEEGRQQDAGEGPGGAAAVRGLLQDEEAEFGVPGGGRGGGRGEGGGEEGGGGIGIEGWGEVEVQE

SEQ ID NO: 138965 - protein, 95 aa, Oryza sativa
  Clone ID: PAT_MRT4530_40303C.1.pep
KGTRKPTCGEKQKKQIRNVAPGQVDEAKRVLNSIRCNKVKPAMTNGKTVGKSQGASRVASSTRSTKITSGSMAPSKVGKEKSTSVKLSRLQAAAA

SEQ ID NO: 138966 - protein, 63 aa, Oryza sativa
  Clone ID: PAT_MRT4530_40304C.1.pep
HEPKISSYVIGCDPIIPDHNVTVWAAGSPSIVYVVQGRSNLQPQESQMLALDRLLLEAHRKAL

SEQ ID NO: 138967 - protein, 700 aa, Oryza sativa
  Clone ID: PAT_MRT4530_40305C.1.pep
MAPWSGLWGGKLAAGGGGGGGDHYRGTPVVVKMENPNWSISEISSPDDDDDEDFLVGGRRKGGRGKNAKQITWVLLLKAHRAAGCLASLASAAVALGAAARRRVAAGRTDADASAAAAAGESPVLRSRFYAFIRAFVVLSVLLLIVELGAYINGWDDLAASALALPVIGVESLYASWLRFRATYVAPFIQFLTDACVVLFLIQSADRLIQCLGCFYIHLKRIKPNPKSPALPDAEDPDAAYYPMVLVQIPMCNEKEVYQQSIAAVCNLDWPRSNFLVQVLDDSDDPTTQTLIREEVLKWQQNGARIVYRHRVLRDGYKAGNLKSAMSCSYVKDYEFVAIFDADFQPNPDFLKRTVPHFKDNDELGLVQARWSFVNKDENLLTRLQNINLCFHFEVEQQVNGIFLNFFGFNGTAGVWRIKALDDSGGWMERTTVEDMDIAVRAHLRGWKFIFLNDVECQCELPESYEAYRKQQHRWHSGPMQLFRLCLPDIIKCKIVFWKKANLIFLFFLLRKLILPFYSFTLFCIILPMTMFVPEAELPDWVVCYIPALMSLLNILPSPKSFPFIIPYLLFENTMSVTKFNAMISGLFQLGNAYEWVVTKKSGRSSEGDLISLAPKELKHQKTESAPNLDAIAKEQSAPRKDVKKKHNRIYKKELALSLLLLTAAARSLLSKQGIHFYFLLFQGISFLLVGLDLIGEQIE

SEQ ID NO: 138968 - protein, 66 aa, Oryza sativa
  Clone ID: PAT_MRT4530_40306C.1.pep
NAYNGVVGLPGIDIGAELSVPPFGLRESYVLFCLLPSAKCYKAACNSLLCAVIFYPMYVYMPLFSW

SEQ ID NO: 138969 - protein, 57 aa, Oryza sativa
  Clone ID: PAT_MRT4530_40307C.1.pep
NGKPGGPFWPSVEPKPQLALDQTQYSRQLIKGPGIGASLTTSLLETLIGEGGYPSPL

SEQ ID NO: 138970 - protein, 61 aa, Oryza sativa
  Clone ID: PAT_MRT4530_40308C.1.pep
PLSLSNTGGQQLTDTQPNHSYPSSTSLLKQLVGWRFSLRDCRTRRVELDAVTGVGEIDRVA

SEQ ID NO: 138971 - protein, 204 aa, Oryza sativa
  Clone ID: PAT_MRT4530_40309C.1.pep
MPAAATLSDLAVPATPAPAPVPAACPSKCGNVEIPYPFGIGVDCAWPGFTIKCNHSFSPPRPYTGTIEIKDISLEAGEMRVYTHVAHQCYDSSHHEEHVSTRLKLHGKSRLSRKRNEFTAIGCNTVAFLIGRKKGSYSTGCISTCASLDKAAHDGDPCTGLGCCQVPSIPPNLSVLNISWGDGFDDDLVRADSPCSYAFVAEKG

SEQ ID NO: 138972 - protein, 48 aa, Oryza sativa
  Clone ID: PAT_MRT4530_4030C.1.pep
VYAFGFVIVCIGTMLKGWNRWFCISDVPIFCRLLTLLSPLIQISVSCC

SEQ ID NO: 138973 - protein, 856 aa, Oryza sativa
  unsure (1)..(856): unsure at all Xaa locations
  Clone ID: PAT_MRT4530_40310C.1.pep
MTSTAFTAPQANTSLKAQAESDMGAMNQNMAKLQDTLRQMQEQQQAYEAARQAKAHTQQFYAQPQVVPPYAAQAPVYFAKPAQVVAVRLTPQVTSEXTSPLALAEGSPSQGAPVGQLLGQFAEPSQAQGASPQGQPPQFDPSTPAQAPMTXRTSRTPTVWCSPTTKSSLESSHVRPNSGNASYFDRSAKPSNEVRHGASIDTHSPTSCTSCGFTVRAPIPIVELALSARGHGTYEEPKTQQDLLGIRQRPGESTREYIRRFSQARCQVQDITEASVINVASAGLLVGELTGKLARKEPRTIEHLFRTIDGYARGEEDTKRRQEIQAEYDKATSAAAATAQDNAQAQVQAQVVRSAPVLVHPTTPANQGQHPSPNQASMTWKKFRTDRAGKAMMAVEEVXPTSLRGSGGEAVQVLRQDLXVAFGTQENKREEEILFDIVDIPYNYNAIFGKGTLTKFEAVSHHNYLELKIPGLAGVIVVKVVQLQIDDSDPTKVISLGGDQSEQEVNSILVALKKNMDIFAWGPNEVGGISPDLIMHHIAVKPDGKPKKQKLRKISADRQEATKAKVNKLRKAGVIQEIDHPKWLANPVLVKKSNDKWRMCVXDLNKMCPKDDFPLPRIDXASRFDRRVMPFGLRNAGATFARLVYKVFGSQLGRNVEAYVDDIVVKSHKVFDHASDLQETFDNLRAAGMKLNPEKCVFGVRAANTKKIDAIQQMKPPSSIRQLQKLAGRIAALSRFLSKMAERGLPFFKTLRGAGKFSWTPECQVAFDELKQYLQSPPALVSPAAGNELWLYLAASLVAVSAALVQETEAGQKPVYFISEALQGAKIRYIEMEKLAYALVMASRKLKHYLQAHRIV

SEQ ID NO: 138974 - protein, 375 aa, Oryza sativa
  Clone ID: PAT_MRT4530_40311C.1.pep
MAAGGTQAMRQFVYLVVKGCYDRRLRCCRDSYMADTFHMRRINVSRFFFYPEPPPPPPLAMVVDARLPRPCITFCAPWVMHFMLLGRNSDKVLAVDHKGRTTMYDPAANTIRAAPTLAHPKRLPAISLPIGDDLYILDPTSSDHRCFEALVYKPGGPAHDWVTTRGPIDRYNDWHCQSLPPPPYHPYSCSFVGANGAIGGYAVVGGGGDSAEIWVSTNDGSGSGTFSFDTARRAWTKHGDWTLPFRGLAEYVPEYNLWFALSSGSNNNHLCAFDLAGAAEPPATRDFCQELKPPKDWKLVSSHLVHLGSGRFCIARFFEKPVKIPVCCVCDMDTQTYGVFTGVEVKKPGRGLRLRMVKHRSECYRFDDHIKEWVL

SEQ ID NO: 138975 - protein, 594 aa, Oryza sativa
  Clone ID: PAT_MRT4530_40312C.1.pep
MYPPLVLVLAIFFAVATAIAALSSPLPHPLDPLSPTELTAVRSAVLAFSLVASRPISFHYVGLDEPEKPDVLSHTNAAAAAILPRRAFVIARAGGLSHEFYVDVTNTSAPRVVSHGIHDGPGFPMFTTEEQVAAGQLSREYPPFRESLQRRGLALTNVGCGVFSMGWFGKNEARRLAKVQCFIVAGGTANYYARPLEGVTLLVDVEKLVIVAYRDRAAYSVPKAEGTDYRAGKARPPFNGAVPAPGVVVQPEGKGFHIDDHIVRWANWEFHVGFDMRAGTVISMASVHDADADLWRRVLYRGFASEIFVPYMDPEEEWYFHTFMDAGEYGLGVSAVPLQPEADYPANAAYMDGYYVDADGKPVKSENIICVFERYAGDIAWRHTGVAGPIAPITEVRPDVTLVVRMVVTVGNYDYTLDWEFKTVGSIKTVVSLSGILEMKATNYTHVDQIRDDIHGTLIAENTVGVYHDHFITYHLDLDIDGTKNSFIKNTIIPKRNTGVRATGGAPTPRSYWTVLYEVAETEAEGQVNINGAPADLLFVNPSKKTKVGNEVGYRLIPAGATATSLLANNDYPQRRASYTKKQVWVTPYNKSEK

SEQ ID NO: 138976 - protein, 654 aa, Oryza sativa
  Clone ID: PAT_MRT4530_40313C.1.pep
MVVQQGSWHRVRSRGRVHRARQNARQIKWVLLLKAHRAAGRLTGAASAALAVASAARRRVASGRTDADAAPGESTALRARSYGCIRVSLVLSLLLLAVEVAAYLQGWHLEEVASLLAVDGLFAASYAGWMRLRLDYLAPPLQFLTNACVALFMVQSIDRLVLCLGCFWIRFKGIKPVPQAAAAGKPDVEAGAGDYPMVLVQMPMCNEREVYQQSIGAVCNLDWPKSNFLVQVLDDSDDATTSALIKEEVEKWQREGVRIIYRHRVIRDGYKAGNLKSAMNCSYVKDYEFVVIFDADFQPQADFLKRTVPHFKGKDDVGLVQARWSFVNKDENLLTRLQNVNLCFHFEVEQQVNGAFLNFFGFNGTAGVWRIKALEDSGGWMERTTVEDMDIAVRAHLKGWKFVFLNDVECQCELPESYEAYRKQQHRWHSGPMQLFRLCFVDIIKSKIGFWKKFNLIFLFFLLRKLILPFYSFTLFCVILPMTMFVPEAELPAWVVCYIPATMSILNILPAPKSFPFIVPYLLFENTMSVTKFNAMISGLFQLGSAYEWVVTKKSGRSSEGDLVGLVEKHSKQQRVGSAPNLDALTKEESNPKKDSKKKKHNRIYRKELALSFLLLTAAARSLLSAQGIHFYFLLFQGVSFLVVGLDLIGEQVE

SEQ ID NO: 138977 - protein, 91 aa, Oryza sativa
  Clone ID: PAT_MRT4530_40314C.1.pep
MAEALLLAREELYKWGLARAKGILALVPNTEYSPVCSRKTIEFDINIQISNNTTFSIAHRNEYLRGLVDCSPSKSLTFSEVGVLDAEAQRS

SEQ ID NO: 138978 - protein, 138 aa, Oryza sativa
  Clone ID: PAT_MRT4530_40315C.1.pep
MQGGGGVSCAVAGDAPSSTRGGGGGGMLGLTLFDPPGGEQPAERIGRLVRESPVVIFARRGCCMCHVMRRLLAAVGAHATVIELDEAAEEAAASAAAAAAVPALFVGGAPVGGLDGLMGLHLSGRLVPRLREVGALCG

SEQ ID NO: 138979 - protein, 123 aa, Oryza sativa
  Clone ID: PAT_MRT4530_40316C.1.pep
GIMFGTVSPRYQPIFYHVSNDTFELSSRIFFVQTYDWCSYSIFLNIVVNISLIRNVNGDNIQFLGKKNGGNGYLFFFLRLDFTIICFFFIARGFTVPIVIFLRFKLFLVYIFACANGVLNRYI

SEQ ID NO: 138980 - protein, 553 aa, Oryza sativa
  Clone ID: PAT_MRT4530_40317C.1.pep
MDTGCLSSMNITGTSQARSFAGQLPTHRCFASSSIQALKSSQHVVCQDFPRPPLENTINFLEAGQLSSFFRNSEQPTKPLQVVIAGAGLAGLSTAKYLADAGHKPILLEARDVLGGKIAAWKDEDGDWYETGLHIFFGAYPNIQNLFGELGINDRLQWKEHSMIFAMPNKPGEFSRFDFPETLPAPLNGIWAILRNNEMLTWPEKVKFALGLLPAMVGGQAYVEAQDGFTVSEWMKKQGVPDRVNDEVFIAMSKALNFINPDELSMQCILIALNRFLQEKHGSKMAFLDGNPPERLCMPIVDHVRSLGGEVRLNSRIQKIELNPDGTVKHFALTDGTQITGDAYVFATPVDILKLLVPQEWKEISYFKKLEKLVGVPVINVHIWFDRKLKNTYDHLLFSRSSLLSVYADMSVTCKEYYDPNRSMLELVFAPAEEWVGRSDTEIIEATMQELAKLFPDEIAADQSKAKILKYHVVKTPRSVYKTIPDCEPCRPLQRSPIEGFYLAGDYTKQKYLASMEGAVLSGKLCAQSVVEDYKMLSRRSLKSLQSEVPVAS

SEQ ID NO: 138981 - protein, 93 aa, Oryza sativa
  unsure (1)..(93): unsure at all Xaa locations
  Clone ID: PAT_MRT4530_40318C.1.pep
VVCQAFPSPPLENXITFLEAGQLSSFFRNSEQPTKPLQVVIAGAGLAGLSTAKYLADAGHKPILLEARDVLGGKIAAWKDEDGDWYETGLHIF

SEQ ID NO: 138982 - protein, 579 aa, Oryza sativa
  unsure (1)..(579): unsure at all Xaa locations
  Clone ID: PAT_MRT4530_40319C.1.pep
MDTGCLSSMNITGTASARSFAGQLPTHRCFASSSIQALKSSQHVSFGVKSLVLRNKGKRFRRRLGALQVVCQDFPRPPLENTINFLEAGQLSSFFRNSEQPTKPLQVVIAGAGLAGLSTAKYLADAGHKPILLEARDVLGGKIAAWKDEDGDWYETGLHIFFGAYPNIQNLFGELGINDRLQWKEHSMIFAMPNKPGEFSRFDFPETLPAPLNGIWAILRNNEMLTWPEKVKFALGLLPAMVGGQAYVEAQDGFTVSEWMKKQGVPDRVNDEVFIAMSKALNFINPDELSMQCILIALNRFLQEKHGSKMAFLDGNPPERLCMPIVDHVRSLGGEVRLNSRIQKIELNPDGTVKHFALTDGTQITGDAYVFATPVDILKLLVPQEWKEISYFKKLEKLVGVPVINVHIWFDRKLKNTYDHLLFSRSSLLSVYADMSVTCKEYYDPNRSMLELVFAPAEEWVGRSDTEIIEATMQELAKLFPDEIAADQSKAKILKYHVVKTPRSVYKTIPDCEPCRPLQRSXPIEGFYLAGDYTKQKYLASMEGAVLSGKLCAQSVVEDYKMLSRRSLKSLQSEVPVAS

SEQ ID NO: 138983 - protein, 135 aa, Oryza sativa
  Clone ID: PAT_MRT4530_4031C.1.pep
MEVEWLRDGVEEEEVIEALAHAQAAHTGDGSAMALRPFMASGSTVEVLQLLHCLSVASKKLTNGYHGACFHLCAHHCGAGLRPTRRRPPFPASPLQLTHTRGAGRPASSCRSEPVCRHLGKLRSPGATVASRTTL

SEQ ID NO: 138984 - protein, 162 aa, Oryza sativa
  Clone ID: PAT_MRT4530_40320C.1.pep
MSFPLVCFCRQIPRPIVALFKLLQAVALAFVLILCFLGLYEFPYTVEDHAPLIHGRRRDPLGDDGLQPEAVKRGLPLVEYMQLADLSADCHDGESGYPATCRVCLERLEATDEVRRLGNCTHAFHIGCIDRWIDLGEVTCPLCRSHLLPRQRRGLLGSRRFG

SEQ ID NO: 138985 - protein, 383 aa, Oryza sativa
  unsure (1)..(383): unsure at all Xaa locations
  Clone ID: PAT_MRT4530_40321C.1.pep
MASSGSSTVVGEMESSLERVRRQLSSTSSRHLLQGPLLKRSDTLRKWNERWVILDPATGKMEYKIRRSDAAVRGIIVFDSTSTVTLSPMNFHGLPKYDGCCFCIHTDXLFLTLHSFAWVIFILGPSILFYSMTNVLDIGTPQKKEYFLCAETPSAARAWVSSLHXRLKQDQEKQIEFSLLRLRESEDRAKLLSEEREHLLKERDSALQEAQMWRSELGKARGNAVILEAAVVRAEEKARVSAADADMRINDAASRLDSATKEKEELVALVDALQLQIRSQDTSTKQVCEERSELCSTSSKHVDMEDDNVDKACLSDTDPIPITENIVDLDDDGVDIPTIGVTEWNNPHSSEVSDVREVTTEPEDNSLDIPVDSQPVSENAFHG

SEQ ID NO: 138986 - protein, 83 aa, Oryza sativa
  unsure (1)..(83): unsure at all Xaa locations
  Clone ID: PAT_MRT4530_40322C.1.pep
MIXXSIXXNNXIXXVVNMXXVGXLVXXLFXXVXVXSSNLXCSXQXILHXKLXIYXRXRSXVQISYVAXXLYCXKNCXFVGSXV

SEQ ID NO: 138987 - protein, 196 aa, Oryza sativa
  Clone ID: PAT_MRT4530_40323C.1.pep
MNKTLGSTLLVSGTMIGGGMLAMPLTSAGIGFCLTLVLLVVLWILLTYSALLFVEVYQTAEHDVGIGTLAARYFGKTGRVIATLVLMVFLYALLSAYVTGGGNILASMFPAAPDHLMTEKEKIAIVMFTIIFGAFIVFGTRSVDGINRFLFFIMLAGLALVLFALMPFIQIDNLLAMPVDNLLLVSASPIFFTAFG

SEQ ID NO: 138988 - protein, 79 aa, Oryza sativa
  Clone ID: PAT_MRT4530_40324C.1.pep
KKNKGACVFLLRCETSPILTHTDPPLNSPFIFIKDNNTLNKTKTIRQLLYLQLEAAAPAPAILAMASSITLSTSGMAAL

SEQ ID NO: 138989 - protein, 289 aa, Oryza sativa
  Clone ID: PAT_MRT4530_40325C.1.pep
MSLCCFSSSTAAAAAARRFLLPHLFLGRRRHRHRHDQVRYTILHHPRTHTTAAPPAAAASTTRLSPSQQRQVSLYVDALLDWNQRMNLTAVTDEGEVMTRHVADSLAVLPPLERAYRGDLGGMRLVDVGSGAGLPGLILAVARPSWKFTLLESMQKRCLFLEHAVEVMGLSNVDVVCDRAENVGQSPDFREAFDVAVARAVAELKVLAEYCLPLVRIDGLFIAAKGHNPHEEIKNAKSAVHKLGASMLEICDVESMGPHGQRTAVVYIKECITPKKYPRHPGTPSKMPL

SEQ ID NO: 138990 - protein, 58 aa, Oryza sativa
  Clone ID: PAT_MRT4530_40326C.1.pep
MSHAPASEKLRAKVSQVAIEDLAQVGKWYAAAQLHGGTRVQDALMTEDMQALRGRATE

SEQ ID NO: 138991 - protein, 106 aa, Oryza sativa
  Clone ID: PAT_MRT4530_40327C.1.pep
FPSLFGGACPHRSPSPQDVLSLILQFFFFPHLELHLGMELFPLPVSLLGASPLTNRWSILLVCWFMLFVVWLGSTLSPNFLWPSLPFCLSVYLFFLNQLVYFSHST

SEQ ID NO: 138992 - protein, 112 aa, Oryza sativa
  Clone ID: PAT_MRT4530_40328C.1.pep
GLCGIHGRGAGEVWARAGGSVGIGVGGSDGCRQRRRRRRRQAESEACDGRWAARGGGGRRHRRRHVAAGGGAHGRRRGMARAAVGRRTAGGVGGGVRRRAKLNDGARRSTDL

SEQ ID NO: 138993 - protein, 93 aa, Oryza sativa
  Clone ID: PAT_MRT4530_40329C.1.pep
MVQLFGLMQAKCLTSAKMYSDYNDDHSDNIASTTTRRENTIAAMVEMHSCTAKYWGVHHTSVPSKKVSRSWILTPMTTTTRMRTGGDGGGGGG

SEQ ID NO: 138994 - protein, 42 aa, Oryza sativa
  Clone ID: PAT_MRT4530_4032C.1.pep
CWKVLPACFCLTTSLSKSKSPFGLAHIRLSICARGSRQGFWG

SEQ ID NO: 138995 - protein, 65 aa, Oryza sativa
  unsure (1)..(65): unsure at all Xaa locations
  Clone ID: PAT_MRT4530_40330C.1.pep
MALSDVPRVAPPSSLTPRGGPSHGATRFPSPXSPGSPAPGASGGAPISIRLPGRNEMYSPAFYAA

SEQ ID NO: 138996 - protein, 57 aa, Oryza sativa
  Clone ID: PAT_MRT4530_40331C.1.pep
MVLVSGFDHLRLLVGINKGLQRTSEGHTEHHRINHGGDKSQQQQIKMGIEDRTINRL

SEQ ID NO: 138997 - protein, 66 aa, Oryza sativa
  Clone ID: PAT_MRT4530_40332C.1.pep
LKHACVLHCHRQHMFRNFSELAKMLAGTKVVMLIVEVLKMVFSTWSGVPSSSQDNICFERFMLIMP

SEQ ID NO: 138998 - protein, 309 aa, Oryza sativa
  Clone ID: PAT_MRT4530_40333C.1.pep
PKLVMSLDLLVPSFTDSTYLPLFPPCVEILVMCSALSISDRIQLLRLATVRNVLDLLLPHDTSSADYRHNLLEMLLPRRRAPFPVGLLLSPTFIALMPSKLHAAVIAACEKARWRGVSANAFGVDSRIPVNYIRKEKNKELKKRNKLPIGISMISIGISPKPTGFRELVSKLKDLYSNFIQILVYKICSKFTGFPPDFVKFRISPVPETEGSCFSALVIDVFMNVRWWIRHKRLHRYGFPSRLPGRYFVLYIIRSSLFTSSLHVRQGDIPCSLYPLKAIKPLLTKHASDDGLMLSFDGGSPRTACGAYP

SEQ ID NO: 138999 - protein, 242 aa, Oryza sativa
  Clone ID: PAT_MRT4530_40334C.1.pep
MLAKGRKVAGRGGDMSAHYAFGPQEDDAIIKHRLLTRTTTTRGEPPLKKLQKKFMSFATEVEKDADNISDCERLYKAFLQEINAFELPLLKSKAVVDANLREKESFNELQDEIQRQILQAQTDIEELKKQLEQSKIERQHKEECEAIRKMISLQPPRSETEKLIADLEKEIANLEAENTACIRTLELRKKQFALLLHVVEELQISIDDEQRSIADELRAATEEQKMSIEEVSGGASDAMAVD

SEQ ID NO: 139000 - protein, 353 aa, Oryza sativa
  Clone ID: PAT_MRT4530_40335C.1.pep
QPKPPSVAASAAEAQNPNAFTCELPHSIYALAFSPSAPVLAAGSFLEDLHNRVSLLSFDPVHPTAASFRALPALSFDHPYPPTKLQFHPRAASAPHLLASSSDALRLWLAPLDDLAATATAAAPELRSVLDNRKTSASEFCAPLTSFDWNEAEPRRIGTASIDTTCTIWDIERGVVETQLIAHDKAVHDIAWGENGIFASVSADGSVRVFDLRDKEHSTIFYESPRPDTPLLRLAWNRYDFHYMATLLMDSSAVVVLDMRAPGVPVAELHRHRACANAVAWAPQATRHLCSAGDDGQALIWELPATPGAVPAEGIDPVMVYDAGAEINQLQWAAAYPEWISIAFENKVQLLRV

SEQ ID NO: 139001 - protein, 748 aa, Oryza sativa
  Clone ID: PAT_MRT4530_40336C.1.pep
MAEIDVIPKLRRKNIIELIGFCVQGKEYETKRILLNWSKRLKIIEGISDGLLYLHNHSPKCIVHRDIKASNILLDYEMNAKISDFGLAIKLAPKATTEVLVRGTWGYADPEYVATGVISEKTDVYSFGIVLLEIISGKLCVSGYNVKSRSRRTIFPEFVSPSCASLLQPGLLTSLKFDQLEDVIAMLESSLCSSPVRSVTAGPLVPMEVSENAVTSSVASPLPDVRNALVCVQDSSISVAALVPVLACAVNDLETVSTEVVPATVSLVSVMPTRAAAVAEVAHATVESVVVPSSVSEDLSPAVNLSSMPPRLRCKNKGFLAWYGACPSSRQPSSVPPQEPRDIFVCSEQLSANPILSPPQDPDSTRSPPPTLSGPSAAEQIRRALAGLSPEGSIHSASLSPGRVPVITSNDTTAAQDFAFGEPDPVNISGDSDDDILDIFIPFVDMRVTAHYATAYVTPPCECPGRVIRKAMQDAHPRFQFTLISACRGAMTLRFIHSQDRDFAVDHQENLTAEGHLVRLERPEDSAARFIQHNTMLSELDCIDFPPEMLFPNKIRNAFENYGELMEVDDQCLYGDEQSSLRLVVLHYPGKRMSPRFRLRYNLGIVCTVYVRVLRTWELAMNVDEDGNYIKHYEQFLFPHQLDPPRSGPTVGPEAELDNLNQAPSNQISNNQGLQNRGRLLAILPAASTVFIEEISDTPEIFVPPSIHSAPSSIHDCLQDLVPSDTENEHELSARKRRRQKKRTIDSD

SEQ ID NO: 139002 - protein, 2742 aa, Oryza sativa
  unsure (1)..(2742): unsure at all Xaa locations
  Clone ID: PAT_MRT4530_40337C.1.pep
MALWNGLGQVANIAQLAGVDAYGLIKMIVEAAQTAKRNRETCQKLARHVKMIGDLLQRLQSTELMQHQETRNPVEQLEETLRHTYMLILSCQDSSYLHSCFMGGKQAHQLREVQSDITFYLQLFPLVSFVDTTRTWERLLRRAQPSCTEDTADELQKVHHSDHRIRNHVQDYAHKYIKLIELHWQFIFRFNTEILNATEFGDQSVTQCPEVFEEKRSEQASIRSLNLDQLVVNDIGKGAVLTFSQILAATNNFSGRSLIGQGGFGPVYKGKLPNGLEIAVKRHDTSSHQGEEEFMAEIDVIPKLRRKNIIELIGFCVQGKEYETKRILLNWSKRLKIIEGISDGLLYLHNHSPKCIVHRDIKASNILLDYEMNAKISDFGLAIKLAPKATTEVLVRGTWGYADPEYVATGVISEKTDVYSFGIVLLEIISGKLETWRGGMRGRGERGDLAGDGPTTAAVTSGGRSSALTIDLPPLLPSPAGISKLRLPSPARALNLSQVRPGEAFQNLILHLFHCPVTPIATTLGPSKIIPTPIWLCAAPSKPLNSLYVKNALNFWFSSSFSSFSVSSLGFGLFLSHVANKDVATSLFLAGSSVLKSAGLSIHLTKDSAAKDIQENVTRFLVQFEGSSSVPSLVGEKVVPALQTVKPAFTATSRHIGCSQQSSKTSTPSVPTGPALKSVYCPVTNSFRDALLSQPKPKPPARSATSRLPSRGRKNLTMLNRCFRCLGSDHQVKDCRDPLICASCRRAGHRQDSCRSSMASNISPRRSSSSFHPSTANSTSRFTTRWVRRALNTPAPPPPRLPTAPYPRSNHSSPPPDNLAIVPYVPPLTHVDAQLEDVIAMLESSLCSSPVRSVTAGPLVPMEVSENAVTSSVASPLPDVRNALVCVQDSSISVAALVPVLACAVNDLETVSTEVVPATVSLVSVMPTRAAAVAEVAHATVESVVVPSSVSEDLSPAVNLSSMPPRLRCKNKGFLAWYGACPSSRQPSSVPPQEPRDIFVCSEQLSANPILSPPQDPDSTRSPPPTLSGPSAAEQIRRALAGLSPEGSIHSASLSPGRVPVITSNDTTAAQDFAFGEPDPVNISGDSDDDILDIFIPFVDMRVTAHYATAYVTPPCECPGRVIRKAMQDAHPRFQFTLISACRGAMTLRFIHSQDRDFAVDHQENLTAEGHLVRLERPEDSAARFIQHNTMLSELDCIDFPPEMLFPNKIRNAFENYGELMEVDDQCLYGDEQSSLRLVVLHYPGKRMSPRFRLRYNLGIVCTVYVRVLRTWELAMNVDEDGNYIKHYEQFLFPHQLDPPRSGPTVGPEAELDNLNQAPSNQISNNQGLQNRGRLLAILPAASTVFIEEISDTPEIFVPPSIHSAPSSIHDCLQDLVPSDTENEHELSARKRRRQKKRTIDSDVKRRYSERLAAKEGHLYISMESKAARAKKLKEQLAKCSSKLNDAVHKHNLLDLNFKTTPKALEDLAIACSLNDHDIAQLRKLFFSSLVSSLPSLCSLSVYLLHETKLQNIPPEKAKTILPPNLANYDFVGSYGSTAGLPTAWNADFTKTSFISRHFSLTISFTSTFTDLSFSLTNIYGPAELDQKQDFLHELLEIDPLIQGPRLLIGDFNLTRSPSDKNSQNFSTGLAAAFNQTINSLSLFELPLPDRLYTWSNKREVPVLARLDRAFFNNAXGTTPSQTPPXSSCTRTTSDHVPLLLTASTSIPKSKTFRFENHLLLDRDFLPSVMHRWPQQLNMNDPAACLAAKLKQTRSIIKVWMKEHRKRSSLNEDCKFTIDLLDYIEELRPLNDGERCLRNLVQEKLFQAIQSKVAYWKQRGKVKRLKIGIDNSAFFKAHASKNYRNSRIRSIKHNGSEIADHNGKALLLHSFFQHFLGSDCQPLWDFDLSTLYSEDERDYNLLASQGLQFSTEEIITSIKGMNSNSAPGPDGFGPSFYNSAWNSIKEDIIKLAASFCSNSVQLERINRAHIVLIPKPGKENTVDGYRPISLQNCSVKILSKVLANRLQKVLTRMIHLDQTGFLKGRCISENLIYATELIQACHARKCKTLIIKLDFAKAFDSVLWTSLFQILAVRGFPNNWISWIKSLLQTSKSAVLLNGIPGKWINCKKGLRQGDPLSPYLFILVADVLQRLLEKNFQIRHPIYQDRPCATIQYADDTLVICRAEEDDVLALRSTLLQFSKATGLQINFAKSTMISLHIDRSKESSLSELLQCKLESLPMSYLGLPLSLHKLTNNDLQPIVVKVDSFLTGWEASLLSQAERLILVNAVLSSVPVYAMSAFKLPPKVIEAIDKRRRAFFWTGDDTCSGAKCLVAWDEVCTAKEKGGLGIKSLKTQNEALLLKRLFNLFSDNSSWTNWIWKEFDGRSLLKSLPLGQHWSVFQKLLPELFKITTVHIGDGSRTSFWHDRWTGNMTLAAQFESLFSHSTDDLATVEQILSFGIYDILTPRLSSAAQNDLQELQTILQNFSLTNESDTRLNNRLGNLTTKTIYDLRSPPGFPSPNWKFIWDCRMPLKIKLFAWLLVRDRLSTKLNLLKKKIVQTATCDICSTTDETADHLSFNCPFAISFWQALHIQPIINETKYLAQLKAPATIPTRHFQSFFMLCSWVLWNHRHDVVFRGRPPSIASCLQRGISESSLWAETFTPDDRFVIDVWKDISSSINAMTIQVGNLSPPALKNRKKLHKLIDPSLGAKKHERAQIMQCLRVAMLCVRDRAEHRPTMSEVVTMLPSIKTPKDRKAVVNVRF

SEQ ID NO: 139003 - protein, 159 aa, Oryza sativa
  Clone ID: PAT_MRT4530_40338C.1.pep
TYAFDLVENYKRTYFRMEVVVVCLNEKRIHDSHTHTLLHFLNTKNNLTNHAWFYQYQHSILLVVSWICTASFLMSLHLLVLTVPLFVSPANLVQSDNGPYSELQRQQVLYVSYRMSDHFVGAEFRDLCQGRRPDFLFPVLQYAQARSFFLFFLENLATR

SEQ ID NO: 139004 - protein, 161 aa, Oryza sativa
  unsure (1)..(161): unsure at all Xaa locations
  Clone ID: PAT_MRT4530_40339C.1.pep
MYMTTSKCQRNEYRDGVLSFMNAAEENRRRRNNKYICCPRMDCKNETXLKHEXDVHAHLIRRGLMKGYICWVKHGEXELGSDGAVTDGSGADNHEEGDEDEHDMFVPSPLGGEMVDVDPDLLQDMLRDVDDPALNERDSMKISRLVSDSETTLIAGRAGER

SEQ ID NO: 139005 - protein, 586 aa, Oryza sativa
  Clone ID: PAT_MRT4530_4033C.1.pep
MAKEDEEKTAFITPFGVFCYVKMPFGLITAGNTFQRTVQGALSNQLGNNVEAYVNDIVVKTKTSDSLIDDLRETFDNLRRYRLMLNPEKCTFGVPSDKLLGFLVSGRGIEANPEKIKAIENMKSPTRLKEIQKLLYVVIMTSRKLRHYFQAHRVTIVSSFPLGEVVRNKDVVGRIAKWVVELSQFDVHFVPRKAIKSQVLADFVANWTMLDNKSDNQGNNETWTMAFDGALSSQGAGAGFILTSPSGDQFKHAIHLNFRATNNTAEYEGLLVGIRAAAALGAKRLIVKGDSELVANQVHKDYKCSNPELSKYLAEVRKLEKRFDRIEVRHVYRKDNVEPDDPARRASRREPLDPGTFLDILTKPSVKEVSGEVGPSTPDISSEVMEAERAVADIETTDDWRTPLIKFISSEELPEDDKEAEKITRKAKIYCMIGNDLYKKVPNGILLKCVSTDDGRQLLLDIHKGICGSHVAAVAVAREGHHHGRRCVAVLVRLFTVTGDHRSSIAVIDPKVPAASSSSPAPSVASPPSLWSPAKGPEALSPEDIPPTTRLRARESHCSLEFRHFKIRLPILDTTILGRKGILEIC

SEQ ID NO: 139006 - protein, 80 aa, Oryza sativa
  Clone ID: PAT_MRT4530_40340C.1.pep
FVFFFFFFLSFFLSTMIIPRKLYTETRIHKHLHPNIDGKTLLAKHIFKAAKLEPAKWSQVLDLQALALRLNFNLSLWTGL

SEQ ID NO: 139007 - protein, 152 aa, Oryza sativa
  Clone ID: PAT_MRT4530_40341C.1.pep
MADKAVTASDMAVIPLEVVIDDDEIEYASRDTPGGSGPAQAEPLLPTNLAEEDFQDAFILFVDMRITAHFATAYNTPASDTPARIITKTMEAAHPTATFKLVASSRGTMALRFASRADRETAVLNQEGLESLRFVKDKIQSQVVFVLMVSEN

SEQ ID NO: 139008 - protein, 226 aa, Oryza sativa
  Clone ID: PAT_MRT4530_40342C.1.pep
STTSKMEPVGSIVGAVPKVASAIAKAVKTARRNKTRCRELAQRVKEVDDILREYKKVAMGDAAATTRKILGRLKDALDDALKLVESCGRSRDGLLFRLHRFVASDGLAAKLDDVNSRINNCLIALQAVNVAHLQKKMDRHLAVAAGGGDHRRTNNPREINAGKSGNKGNKGGQQHKQNGGKGGKRRKGKKAAGPPPQPQPCTPTGAVFPYYLVHSMEEDPTSCSVM

SEQ ID NO: 139009 - protein, 78 aa, Oryza sativa
  unsure (1)..(78): unsure at all Xaa locations
  Clone ID: PAT_MRT4530_40343C.1.pep
TNKIMSKYTFMTVRKSDSDVQISXXPTGVWPSGSEMTKSNISSAISHGYDLTTFQTTATSASAFFHFKDSSISNQPTT

SEQ ID NO: 139010 - protein, 70 aa, Oryza sativa
  unsure (1)..(70): unsure at all Xaa locations
  Clone ID: PAT_MRT4530_40344C.1.pep
APIXADLRLRCAXPLPVLRRVADXMASGMRXGLADDXXXXXKMIXSHXYXLXTGNXTGLFYALDLGGTNF

SEQ ID NO: 139011 - protein, 154 aa, Oryza sativa
  Clone ID: PAT_MRT4530_40345C.1.pep
ARGFRVKRRSGLTPEKRHMEDGTTNFTGNQVLKRLKKINAHDRQEHKLPELSCGARSEPVHTDDCIHCVDFISENGDDFIAPTKLKMIHQLDANIVEDEVASSQKYNSCNYQSPSIELGPKRLKIRGPSFPSRISELEVSCRFQDNDLGSQHAR

SEQ ID NO: 139012 - protein, 70 aa, Oryza sativa
  Clone ID: PAT_MRT4530_40346C.1.pep
LVFRRTYGSTVLLLIGFRSRCMYPCVFIPTFCSCILENVPSLSLHLPLCEWVGIWVWYSPPACQRWLIKK

SEQ ID NO: 139013 - protein, 121 aa, Oryza sativa
  unsure (1)..(121): unsure at all Xaa locations
  Clone ID: PAT_MRT4530_40347C.1.pep
KELAHYNGGEPTFLQGAKAGGTXDGPFCETRLNYGISCRNTMVKSNVRLVISIAREFEGPGMEFCDFIREGIQALARGSKVCASKGVDDLHNXYWWRKQAVLKYVLEQTQIIRLPAHMVEA

SEQ ID NO: 139014 - protein, 150 aa, Oryza sativa
  Clone ID: PAT_MRT4530_40348C.1.pep
MRTVAVLPGPPPHRRPPARQKLQRTAKSLLQGQALASDPSAARRRQPDVAGRHSQLAAGCRSPLVTSLFLAAELANVALDHLQAGSSLVTLGGCCLLDGLWRSCPEELPLVIEAWVVLSLAGFRVANPLTKGACGGFVVERWSWALLNGD

SEQ ID NO: 139015 - protein, 283 aa, Oryza sativa
  Clone ID: PAT_MRT4530_40349C.1.pep
MAVLLRTTTSATTATSGGSSSATALLATTFRRGGRRLLLLPATRGSAPRRAALLTARASAEPLEVCAKASLTVPDRLGDCPFTQRVLLTIEEKHLPYDIKLVDLANKPDWFLKISPEGKVPIVKLEEQWVADSDVITQAIEEKYPEPSLATPPEKASVILTIGNNFLYSGSKIFSTFIGFLKSKDPNDGTEQALLSELTSFDSYLKDNGPFINGETISAADLSLAPKLYHMEIALGHYKNWSVPDSLSHVKKYMKTIFSMDSFVKTIALQEDVIAGWRPKVMG

SEQ ID NO: 139016 - protein, 53 aa, Oryza sativa
  Clone ID: PAT_MRT4530_4034C.1.pep
YIELALQVQHLEKRLNDQFAMRRALEKALGYKPCAIHSSNESCIPKPTEELIK

SEQ ID NO: 139017 - protein, 63 aa, Oryza sativa
  Clone ID: PAT_MRT4530_40350C.1.pep
STAFAAKPRLARAPWIPAERFSVSCSASGNNGGAGEMAHSLAAWAKTFYWALALSSVLLSSGE

SEQ ID NO: 139018 - protein, 45 aa, Oryza sativa
  Clone ID: PAT_MRT4530_40351C.1.pep
PIFPVDQKSINLTSYHNHHHFWNVLLTDKLLATKEMPRYFSSNKW

SEQ ID NO: 139019 - protein, 56 aa, Oryza sativa
  Clone ID: PAT_MRT4530_40352C.1.pep
VAPHETTPLHCAPFPSPSLDSLPTQWRPPSTTYRSVPRRRWAWLRSGRRTRSLLGR

SEQ ID NO: 139020 - protein, 83 aa, Oryza sativa
  Clone ID: PAT_MRT4530_40353C.1.pep
CRRAAAFVRRAVAPEPPRHASPPCAAVEPEGVADPSEGQDPQDIEQCKSSLFLEHVDPNCEIVLFTNKIACNDEHPSCDYAMP

SEQ ID NO: 139021 - protein, 89 aa, Oryza sativa
  Clone ID: PAT_MRT4530_40354C.1.pep
IFWFLVFFFFFFKINSQHPFLLNKFKTSTKIHTTGTNFTLFSILIHSSTPSTPIPIFKPHTFLHLLHPVHTPTLFFKNPHFFKPNSLNL

SEQ ID NO: 139022 - protein, 109 aa, Oryza sativa
  unsure (1)..(109): unsure at all Xaa locations
  Clone ID: PAT_MRT4530_40355C.1.pep
MISVITCLLGLGSPPPPPPLLGLHPHPLPRCRHPPPPLGFCSHPSXHPPPGARAPPPPSPPPPPSTAAARAPLPSVATIGLRLHPPPPPLGFRPHPPPPLGLRSHPSPP

SEQ ID NO: 139023 - protein, 149 aa, Oryza sativa
  Clone ID: PAT_MRT4530_40356C.1.pep
TLRFQHPNIEEQTSKHQTSLLCWDSFVLLGVGVGVGVDSPPRRRASAGDGRPPAAAMPHLAPHGLLRPRRRPTPQPHLPPDPRPLGAPRAHHAHGRRPTRRAPPPLPPPCRQPAPSPRPGGGGSAPELRHPRPSSPRPVPAPALPENLL

SEQ ID NO: 139024 - protein, 86 aa, Oryza sativa
  Clone ID: PAT_MRT4530_40357C.1.pep
AKFTVAMLLGGASERPTCLVPPLRAVTSAFLGVDMLLVSACGDKAYIDGPYVCKVCVQDRTCLQAVNLYSLNVCDPRHSQCARLDM

SEQ ID NO: 139025 - protein, 163 aa, Oryza sativa
  unsure (1)..(163): unsure at all Xaa locations
  Clone ID: PAT_MRT4530_40358C.1.pep
VGIRCDTYQVSDDSTHVSGDTCKYHVILIRYHAXFYHVSCDTREVSCETCQVSDDFNHVSRDTHEVSGDTCHVSDDFYHVSRDTCEVSCDTCQVSDDFYHVSRDTCEVSDDTYQVSALQPSLVDKDGDGGGRGQARRQWWGTGAATAGDSDGGGGGWARRQRR

SEQ ID NO: 139026 - protein, 158 aa, Oryza sativa
  unsure (1)..(158): unsure at all Xaa locations
  Clone ID: PAT_MRT4530_40359C.1.pep
RVGIRCDTFQVSDDSTHVSGDTCKYHAILIRYHAXFYHVWRDTREVSCDTCQVSDDFYHVSRDTREVLCDTCQVSVDFYHVSRDTREVSDDFYHVSRDTCEVSDDTYQVSEPSPVDEDGTGRRGGGGERRRRRWGMGAAVVGGDDDGGEGRPRRRVSR

SEQ ID NO: 139027 - protein, 189 aa, Oryza sativa
  Clone ID: PAT_MRT4530_4035C.1.pep
MVTNRVDVFWHEGMLRHDAVEGVFDTGYDPGFLDVLEKHPENADRVRNMLSILRRGPIAPHVNWFTGLPAIVSELLMFHTSEYIEKLVEADKSGERCEIAAGTFMSPGSWEAALLAAGTTLSAMQHILDCHGKIAYALVRPPGHHSQPTQADGYCFLNNAALAVKLALNSGSCSRVAVIDIDVHYGNGT

SEQ ID NO: 139028 - protein, 420 aa, Oryza sativa
  Clone ID: PAT_MRT4530_40360C.1.pep
MCCFLLVSVLLATTLTDVASAQRWRQTSGGGKDRWDGLLDPLDADLRRDIIRYGELAQATSDALIGDPASPFAGASRYAPDAFLRKVRASDPDAYRVTRFVYATSSVRLPDAFMPRPAPSAGAAWSGESNWMGYVAVAADGVAAKAGRRDIVVAWRGTKRAVEWANDLDITLVPADGVVGPGPGWTQPSVHRGFLSVYTSKSFSSPFNKLSAREQVLAEITRLLRAYKNENCSITITGHSLGAALSTLNAIDIVANGYNVRGSSRVPVPVTAIALASPRVGDDQFKRAFDSTSNLSLLRVRNAPDIVPTILPSAFFKDVGAELLVDTRRSPYLKNPAGPAQWHNLECYLHAVAGTQGAGDGAGFSLVVDRDLALVNKEVDALRDEYQVPAAWWVEKNKGMVQNASGRWVLQDHEEGNLAM

SEQ ID NO: 139029 - protein, 76 aa, Oryza sativa
  Clone ID: PAT_MRT4530_40361C.1.pep
MRIFLAGNSYPLLFGVETRKRNIITNYTASPAPLENTHRPEWHRDDNGVDFNRRDLGNQCTQKSTRQPKLWTFGSG

SEQ ID NO: 139030 - protein, 34 aa, Oryza sativa
  Clone ID: PAT_MRT4530_40362C.1.pep
WAVVCTYASGWAPFPAVHDLGPLGSPRPSPPVNG

SEQ ID NO: 139031 - protein, 97 aa, Oryza sativa
  Clone ID: PAT_MRT4530_40363C.1.pep
LAIEAFSKALRAIPPIIADNAGFDSSELVTRLRAAHYEGRSTAGLDMERGVVGDMVDLRITESFKCKSQVLVSGHEAAEVILRVDDIIRAAPRQRTH

SEQ ID NO: 139032 - protein, 121 aa, Oryza sativa
  Clone ID: PAT_MRT4530_40364C.1.pep
GLDTNEQLDRPFDGGVESALPKLAGGGSELDAVGFVGESHWFGREGWGWPPSSRSAPEDGRSASFFLNFCEGGRKKRNRLGTGGMEFGRVPLCQTAHGRFGRGPSRAAASAVGARGGLKER

SEQ ID NO: 139033 - protein, 263 aa, Oryza sativa
  Clone ID: PAT_MRT4530_40365C.1.pep
MVLQRLQLRPVLIYVDDIIFGCSTHALVVEFAETMRREFEMSMMAMLDPDEDGEAVDQKEYRSTAGFGPVGPSRCCQSDRRVLHGQTGASADTVSVSARQAISAVRPEFDLGQTDMFQVVRAAQHLRAATAAMSAALHIPMCRFSVHHALPEHFLFIFSNSDDRDLALARSPIPAASSQQLLLWPWTRQATATAFSLPFKVSLDLVGVPAHAWNPSTAVVLIAPCRLFDMDMEACRLADFRMLRVSALAHDPVHPAGAPPPHP

SEQ ID NO: 139034 - protein, 609 aa, Oryza sativa
  Clone ID: PAT_MRT4530_40366C.1.pep
MSAAAVNDVAAWILLALAVALSGSGSPIISLWVLLTAAGFVAAIFLFLRPALAWMARRSPEGEPVKELYICATLAIVLAAGFVTDTIGIHALFGAFLVGIAVPKDGPFAGVLIEKVEDLISGLFLPLYFVSSGLKTNVATIRGAKSWGLLVLVIVNACLGKIGGTVITSLLVKIPVREAVTLGFLMNTKGLVELIVLNIGKDRKVLNDEAFAIMVLMALFTTFITTPIVMAIYKPARPTAPYKRRTVDGGEADGELRVLACFHTNRNIPTLLNLVESSRGTGRGRLVMYAMHLVELSERSSAITLVQRARRNGMPFFNSGDKAEQMVVAFEAFQQLSSVRVRPMTAISDLDTIHRDVIDSATAKRAAIVVMPYHKMLQHDGTFQSLGSAYHAINKRVLREAPCSVAVLVDRGLGGHAQVSAKNVAFSVAALFFGGPDDREALAYATRMAEHPGVAVTLERFRPSRAQPDEEDAADEAAVEAFKSKVGMVKDGSVRFDERPAQSKAEVMEAINSLSMFSVFVVGRMPPTAPLVEKPDELGPVGSYLASPEFRTSASVLVVKRYDPAANPASKRYDPKARPPAATEEDALDELTGAAVVPVAHSPMNHDIV

SEQ ID NO: 139035 - protein, 198 aa, Oryza sativa
  Clone ID: PAT_MRT4530_40367C.1.pep
MDCCRRVNPFRACSPLRGLGYLMLAFVAAIVAVSYYAVVVYTWGPLLLGGGAAAGAAAVLVAFHLLFEFQETPYHEYTAVQYHCASQNLDTNPGTKQAPNQVGAGLQMLLSGRIDIPNLMLAMIIWCYLMVVFTDPGAVPENWRHASEEDGIGVNSRTISYNWDATYPNPEGQSAQKYCSRCQNGKPPRCHHCSVLLC

SEQ ID NO: 139036 - protein, 44 aa, Oryza sativa
  unsure (1)..(44): unsure at all Xaa locations
  Clone ID: PAT_MRT4530_40368C.1.pep
SCFVCDHCLNLLXHFDLEYFVVLCRDVNVDDVQQRGQRAWQRLP

SEQ ID NO: 139037 - protein, 413 aa, Oryza sativa
  Clone ID: PAT_MRT4530_40369C.1.pep
MPPPARSPAAGVRRRGALLPLAFLLLLLLLLLHLTSSPARSPNSPLLRGSGDGEPRQRGPCDYASGEWVPDDDDPAVSGGLRYDQTCREIFKGWNCLANGKRNGRELLRWRWRPRGCELPRLDPLRFLECHRNTSIGFVGDSLNRNMFVSLVCMLRGASGEVRKWRPAGADRGFTFLRYNLTLAYHRTNLLVRYGRWSASPNGGPLESLGYKQGYRVDVDIPDQTWAEAPSFHDVLIFNTGHWWWAPSKFNPVQSPMLFFEKGIPVIPPLLPPAGLDLALKHMIIFVNKAMRPNGVKLFRTQSPRHFEGGDWNEGGSCQRDKPLSAEEVEELFSLDNNGTNVEARLVNQHLVRALEKSTFNVLNITGMSEFRADAHPSTTGGKKHDDCMHWCLPGPTDTWNDLLAANLLATES

SEQ ID NO: 139038 - protein, 250 aa, Oryza sativa
  unsure (1)..(250): unsure at all Xaa locations
  Clone ID: PAT_MRT4530_4036C.1.pep
PAADATVGQPPVVAAVQSLPPPSPXEPANSAAPPPLRACLTPDLPDSGATGSGPLSPSSPPAXPSPPSSPSPLPSVPIYSPSSXPLSPPSRVAPALEVPAVAPSLTAAPSSGLLATPLARRHQPDPPXGWQMGAPPQDPWSSPPPPLIRSHEVPTAEGTSQRQPSRSCVALPPGRLRRRQVRPPLPAPSSSSTSPLPERSPAKTVRMAAAGLLASLLRWPGESPRWRRRRPLDPCRPGLIWRGGGRRQGQ

SEQ ID NO: 139039 - protein, 437 aa, Oryza sativa
  Clone ID: PAT_MRT4530_40370C.1.pep
MMAAAKRPYCKPPPPTTTTTAITSSSGQNHKRLRPSLPAAAAMDGGMEEEAVAPPPPTTMTTTTPPQPLLPGLPDHLAQLCLSPLPPRLLHAVCRPWRRLMYAPSFPPFLSLYALLDDADADAGVSFAAYDPLAGRWDALPSPPMPSPPPMLWHPSFLARRLPLQSVAAAGRLVLVSGSTQSLHPALSRPLVFDPAAPTPRWQLGPRIPLSPRRWCAAGAARGRVFVAGGVGAGYDPAVARSGATWDPAASPPPAAAWEPIPPLRDGRFSRDAAEAVCSGGKVCMVNLRTPGAKEGAVFDLRAGRWEDMPPGMLAGWKGPAAASPPDDGETIYVVDEERGALTAYDWGADRWRTVAESDRLKGAAEMTVAGGKACVVAPGGGKVLIVDVTPPPPPPPAARRESWAAPPPPPRMWEVAAPGGKRVVSLHVLPRMTRPE

SEQ ID NO: 139040 - protein, 62 aa, Oryza sativa
  unsure (1)..(62): unsure at all Xaa locations
  Clone ID: PAT_MRT4530_40371C.1.pep
XEGLEAKHTCTELLNELLTKDKQKAITDTERPHAHAKALSSTLHDRTISASMDRCYLLHGST

SEQ ID NO: 139041 - protein, 211 aa, Oryza sativa
  unsure (1)..(211): unsure at all Xaa locations
  Clone ID: PAT_MRT4530_40372C.1.pep
MRVSSPPHSAPDLFGATCSLPLISTSSRSLRTRKAGAAMGPVPAVSRARGAPLPARPRXPALVMKLLRAWVSLNGLLGWGPTKGQQASRLLCASSFAQALLRSFDAVVNRLXAALDATDAAAASLLRDHTALDDGNTRLGARLDRAHASNLIVLIQAHAEKSKVKCQESRPSKAFNGYKPTIDFEXLTMDFQWVQGTIDSKGTDRELVKGG

SEQ ID NO: 139042 - protein, 85 aa, Oryza sativa
  Clone ID: PAT_MRT4530_40373C.1.pep
DGYFKIIRGTNECGIEEDVVAGMPSTKNMVRNYDSAFGLDTIAAASTRLDASSSKFLQNTGYLGSMGTEKSDNDSRHRFQDSPFK

SEQ ID NO: 139043 - protein, 204 aa, Oryza sativa
  Clone ID: PAT_MRT4530_40374C.1.pep
MRASSPPHSAPDLFGPTCSLLLISTSSRSLRAREADAAVGPVPAVSRARGAPPALVLKLLRAWVSLNGLSGWGPTKGRCAGRLLCASSFAQALLRSFDAVVNHLQAALDATDAAAASLLRDHAALDDGNTRLGARLDRTLASNLIVLIQAHAEKSKVKCQESQPSKAFNGCKQPLILRELTMDFQWVQGTIDSEGTDRGHVEGG

SEQ ID NO: 139044 - protein, 222 aa, Oryza sativa
  Clone ID: PAT_MRT4530_40375C.1.pep
MVGHVKSKISGDAKANISSNGSPSVMLMNIADETKKTQLIEVVEMLGGVVTCEGNSCTHVITGKVRMTMNFCIALCSGAWIVSPKWLKESFKKGKFVGEAEYVFQDDEFKVKYKSELRDAVVRAKERPCSLFSGYTFCLTKNIQPSVNVLSRIIKSSGGKLINKLDDITQPLKTIFLACEEDMELALDAAKRGIKTFSGEWFLSCVMTQELDLEAPQFTESL

SEQ ID NO: 139045 - protein, 1082 aa, Oryza sativa
  Clone ID: PAT_MRT4530_40376C.1.pep
MTWTSNAEIYLSYNVEQEVEEHGASDKVVMENILSNNDFSEGLHLWHPNGCHGFVAVEGSGYHHGIRPHSGSNYAVLTRRTHNWQGLEQDITEKVTVGTEYIVAAHVRVHGELNEPVGIQATLKLEGDGSSTNYQSVARISASKDCWEKLEGSFELKTLPRRLVFYIEGPPPGVDLLIDSVTISYKKTERAASKLVSGTENIISNYDFSEGLHLWNPICCHAYVASQWSGFLDGIRGSSGENYAVVSKRTESWQGLEQDITDKVSAGTAYAVSAYVRVDGNIHTKVEVKATLRLHNTDDSTHYSPVGSLLASKEKWEKMEGSFCLTNMPKRVVFYLEGPPAGVDLIIDSVNVTCSGYQQLKEVKVPSGVDTIVKNPHFDEGLNNWSGRGCNICRHELTAYGNVKPLNGSYFASATGRVHNWNGIQQDITGRVQRKVLYEISSAVRIFGSANDTEVCVTLWVQEYGRERYVSLAKNPASDKQWTHLKGKFLLHAPFSKAVIFVEGPPAGIDILVDGLVLSPARKLHAAPRPRIENVSYGANVIHNSAFSHGLSGWSPMGSCRLSIHTESPHMLSAILKDPSAKQHIRGSYILATNRTDVWMGPSQLITDKLRLHTTYRVSAWVRAGSGGHGRYHVNVCLAVDHQWVNGGQVEADGDQWYELKGAFKLEKKPSKVTAYVQGPPPGVDLRVMGFQIYAVDRKARFEYLKEKTDKVRKRDVILKFQGSDAANLFGSSIKIQQTENSFPFGSCIGRSNIENEDLADFFMKNFNWAVFENELKWYWTEAEQGRLNYKDSDELLEFCRKHNIQVRGHCLFWEVEDSVQPWIRSLHGHHLMAAIQNRLQSLLSRYKGQFKHHDVNNEMLHGSFYQDRLGNDIRAHMFREAHKLDPSAVLFVNDYNVEDRCDSKSTPEKLIEQIVDLQERGAPVGGIGLQGHITHPVGDIICDSLDKLSILGLPIWITELDVTAENEHIRADDLEVYLREAFAHPSVEGIILWGFWELFMFREHAHLVDVDGTINEAGKRYIALKQEWLTSITGNVDHHGELKFRGYHGSYTVEVATPSGKVTRSFVVDKDNAVQVVTLNI

SEQ ID NO: 139046 - protein, 138 aa, Oryza sativa
  Clone ID: PAT_MRT4530_40377C.1.pep
FPTQTITNWATNGIPCSQVTMMPKTLWPLGLASTTQCSCSQPNGAPAPANVASSYKAMDPVKCHLWHQLPDDRRACKQSYLVLDSATQQMYEEWRCRSTYMCNMAPVNFQLSSCGCCGSNVGYMYSSNKVLHTIVSKH

SEQ ID NO: 139047 - protein, 146 aa, Oryza sativa
  unsure (1)..(146): unsure at all Xaa locations
  Clone ID: PAT_MRT4530_40378C.1.pep
KQIDHTTLLTMKFGKPRSHYRSRVSIGFRVLESADGNYQVADSRISAIFTYFLIANKGFIEVSADEMTSDFQPMYVLTFGXCLFYHIVSQLISTGLYYCCIALSSADCIYIVIYIGHITDXQNPIAIGWYRHXWNYSIGLSADRLI

SEQ ID NO: 139048 - protein, 243 aa, Oryza sativa
  unsure (1)..(243): unsure at all Xaa locations
  Clone ID: PAT_MRT4530_40379C.1.pep
MNSVWQCRSVIFAVLDKQRKRSLWAGTGDLTSGKCKVNWVRTCSQTTNMGLXLHLEKFVRALRMRWLWHXVEIAGKSFVXGMETPCDDTNKILFAVATQIKVGDRTTVRFWDSAWFNGLRPKDVAPKVYAISKKKXKTLKQAITNNQWVXDLDLPIVQGMTTDLLDXLVNLWNXVQLVELSPSEADDIIWKITNNETYSAASTYEAQFFGSTKTNFDMLIWKPWALVGHVEQSPDVQQTVLIY

SEQ ID NO: 139049 - protein, 79 aa, Oryza sativa
  Clone ID: PAT_MRT4530_4037C.1.pep
RHEAILYVFLWPNPPYDTPSPPRGERERPPAAATTRPPPPTPERPVAGTGIDTIGVPRGYLEGVEGPSRRTLPTYIAAQ

SEQ ID NO: 139050 - protein, 538 aa, Oryza sativa
  unsure (1)..(538): unsure at all Xaa locations
  Clone ID: PAT_MRT4530_40380C.1.pep
MDSAGVILSILSKLQSLGFCAHLRIGDAAASGPPSDLFDTVLAAFLREVYPGGREVRPLPAKLGDGSRVDLLRLFSAIRAAGGYAATSSSPAVWASAAESVCLDATLAAPVKLIYHKYLAALDRWIQRLVEAHGPFLDGNDGRKKPEPFFDSNGRENEEPLLECNGGDLQHPILKRKREDMVGMLDWVRELAENGGEAGTMAAGSANGYYSLALAARKAVFAKRARRSSMTMNGALMQEIFPMDCKCCMSSSTTGIDTQEKCSKKIQLVIPQAGSDINELINVVENINVPSIGMEQENNIIGQAKYESRKHHNSDNWLFTSQQRNKIPVGSEFQAQVPQWTGELPVSYDNAETRKWLGTKVWPLENGNRKLSYFCNPVGKGREGVCGCNLPGSVECVRFHVAERRLQLRRELDSAFYAWGFDRMGEEIALSWTDXEEANFKACVQLNAPSSGRNFWKRLHMLFQSKGRKELVSYYFNCFLLRRRCYQNRMTPNNIDSDDEDETEFGFLGNRLGHNATKYDSSKYTLCIESTHCMDLNQ

SEQ ID NO: 139051 - protein, 55 aa, Oryza sativa
  unsure (1)..(55): unsure at all Xaa locations
  Clone ID: PAT_MRT4530_40381C.1.pep
QRSGVLXCLEDDDDDEDDDDDEDDKDDDVEGAGGDASXRSKQSRSEKRQEASELG

SEQ ID NO: 139052 - protein, 127 aa, Oryza sativa
  unsure (1)..(127): unsure at all Xaa locations
  Clone ID: PAT_MRT4530_40382C.1.pep
GPVYPFISKYIKPLVVKMMMFQKLHCRLDLTAGYYRDSFPFSCWPGALXFGPHTLGEWKDGRRLXGXXIGQRRAGLKPWGKGARPSHSELREAATRRDRWWSGGAPCRGDQHGGTTSGGMRKLLNKG

SEQ ID NO: 139053 - protein, 64 aa, Oryza sativa
  unsure (1)..(64): unsure at all Xaa locations
  Clone ID: PAT_MRT4530_40383C.1.pep
TGCLLPKGVVYVQCFFVLFFLLLLMVNLHSTTLPVCXQLDEQTCVFCSTFFFCISTCSSVLQVA

SEQ ID NO: 139054 - protein, 316 aa, Oryza sativa
  Clone ID: PAT_MRT4530_40384C.1.pep
MNALEILRKTVRVLRPDPHAFTSVLFFLLCPASGCLMLSAAALEGAAVLPLARRLLAAAAASGLPLTHFVRQLAHHLAATLVASVVSFPATFTLLLAARAAAAYAVAAVYAGKPLLAGAELSLLARRAWPRLAATYALACAAVIACLSSFLALLVTACSTLKFMLYPPDIVVCAGLLTVLAFSVAYAHTIIVCNLGGVIAVLEDIAGVSALRRSVQLMRGQTHVGLLIFLGSTIGLAFVEGLFEHRVKTLSYGDGSSRLWEGPLLVLMYSFVMLIDSMMSVVFYFTCRSSSMEILDDEGGSIEELEMMVGSNSVIR

SEQ ID NO: 139055 - protein, 87 aa, Oryza sativa
  Clone ID: PAT_MRT4530_40385C.1.pep
SASPLDKHMNQTVCLQFSASISGHIKYGSQGSILVVPSPLASVRTSLTFRYTIYLPVPVPSIVNIIKLIARCPKYNVRMCSKTSGVE

SEQ ID NO: 139056 - protein, 102 aa, Oryza sativa
  Clone ID: PAT_MRT4530_40386C.1.pep
MATSTSTGHRAADLVLPSYPEMIVEAIASLAEENGSSQAAIARRIEAARGGGGLLPPSHPALVAAHLSRMSAAGELVAVAGGKYALRPTPPPPPPADPAVAA

SEQ ID NO: 139057 - protein, 291 aa, Oryza sativa
  unsure (1)..(291): unsure at all Xaa locations
  Clone ID: PAT_MRT4530_40387C.1.pep
LFWKRKRGLLRHRLGFAVDRVHGGGSRKRTAEIDPSKTNGWDLSAHDRSTGHGDDDVITGGGSGAQARRXNDDTTALTKSTKXCERRGELTGDQNSGGSSTDGDGDDGAPAVFGKNGRRDEDGDGLANPMVXSRATTTTGAAAAHGWTSGGDGGARLHGARVLSATRGEGEGGDGGXEAATKAHGDRRRDGKIRVRXRETNPIRDRIHGFPNDFSRRFQKRKGRVDRGDQFPSINFTGSGKSRWAPPVSGRTRARELRLGCGPTWAWEEREKVSDRLSAXAKRELFKTFSN

SEQ ID NO: 139058 - protein, 575 aa, Oryza sativa
  Clone ID: PAT_MRT4530_40388C.1.pep
MQHGRRGGWRKGEAAAAGERGGGLVLPDHTLRHGERMAQAADRAGDQRQAVVDAALTKPSRGRGIVNGGGETEARATTRWLRQGSAGGGVTAPSGVAFNITAGPMTEIVDDIDVAMVEEVVAAPAEKDEHVQAILLAIVASTREDRHGVERLERSEVEARDPRVRDVANVQALSLRRHRSRLPTSHRSSPPMPHRSRPPTPPLRNRARPPPSPLRLLWPPFWCGDGARLKRCPLGRPAPSPPAGLPSRQKIREEPQPQPPFSSQIRVAAAPNPTRAQRSTNAGRRQRPSPPPPQPYEREGASQPASQAWPPPLPLATAPPTSSSPPTPRHALFLNPSCSWPDAQICGGIDRVSWVVFSFSLLQMIVEAIASLAEENGSSQAAIARRIEAARGGGGLLPPSHPALVAAHLSRMSAAGELVAVAGGKYALRPTPPPPPPADPAAAAAVAEEEEEEEEFLADDDSADDLPPPPPPKRGRGRPPKVRPPGYPAVPAAAAPVPVPVGAPVDGSVAAAAPAVPRRRGRPPKPRDPHAPPKIPRPRGRPRKNPLPEGMVPPPPTRPGATAKPRPQFAEVGFV

SEQ ID NO: 139059 - protein, 65 aa, Oryza sativa
  Clone ID: PAT_MRT4530_40389C.1.pep
FFGGLTKGQRCNRGTNHSPYSHTHHKLIFLQKRKQLFLKEIKWYRYKQWRAIYPTNHVTKTRGNE

SEQ ID NO: 139060 - protein, 198 aa, Oryza sativa
  Clone ID: PAT_MRT4530_4038C.1.pep
MPHVRPRTSRLARAPSGCAVTTLGLTAASSPPAGRAVFSLGVAASTSTPACPRFRRNAVARAGLALRLAGVHSATPSAVPVRRQTSPSPPLASQHQGCPRPRLPSIRTPPVFVIVVSVRPRRRLLQSVVRPRRLVVSLRCHPRRHRSGVFRAVLVSVQLLLAALIASSPVPVVVLSSFPVVVAFVPPSSHSRPSSASV

SEQ ID NO: 139061 - protein, 101 aa, Oryza sativa
  Clone ID: PAT_MRT4530_40390C.1.pep
GWQRGRVGLELLRPRPPTSPPAPGPDYGCGMKTSPAPDPAGPRKPDRGPAFGSISDAPVGRKSPPPPSYPRRGGSPQGTRPRGGNCHPPASCRCFVAPIGT

SEQ ID NO: 139062 - protein, 199 aa, Oryza sativa
  Clone ID: PAT_MRT4530_40391C.1.pep
MWERREPPVCGRGRGGSRRRANVGRGGESPARRRRRGRGELSARGAGVAVVVVAEEGAGRRRTWGAGGARTLERREPAGGARTWGEEGSRRRGRRRHRRAEATSQSSSSPAAEVGSQGGSRPRRTWGEEGSQRREGHRRGRGEPSARGAGVAVVVFAEEGAGRRCADVWRGGEPASRSSSSPAAEAAISAIYRSLRFTM

SEQ ID NO: 139063 - protein, 678 aa, Oryza sativa
  Clone ID: PAT_MRT4530_40392C.1.pep
MRGGTVRRGGGVGLRALVVVAVAAAALVVARADTAAADGENICIGYASNSRMDTFNCHTDEQLNIMKGVGYDHRKGIITMNAANLGGQLGGLGNFTSIVTINLSNNKIGGTIPEDLPVTLQHMSLNDNQLNGQLPDAFGSLTGLVNLDISSNNLTGVLPPSMKNLSSLTTLNIENNLFSGPVPPKLQSIPNFKKDGNPFNTSIAPSASPPSTPGGPAPTPTPTRPAPTPPSRTPSNSSDGPTTRDNISSSKKQNSSTLKIVGFVFLGVVLFIVTVLLVIFCLSKYQERRSRYDYNRSIRDDAKKDQQSLAAVPKKPLESQREHIIDLEHPNNLARTNSELFAVDPPPPPPPPFLPPFPVEKVTVNPVVPPEKRYISPPRINKPTSATSFSVASLQQYTSSFREENLIRKSRLGKVYLAEFPEGKFLEVMKIDNTNGRISVDEFLDLVQLVSDIRHPNIHELVGYCAEYGQRLLVYNHFSTKTLDDALHDREGVDSTLSWNARLQVALGSGKALEYLHESFQPPIVHQNFEPANVLLDNKFSVRVAECGLEKLLASSSVTQLADRMHSLLNYEPPEFRESGIVTEQGDVYSFGVVMLEILTGRKPYDSSLPRAEQHLVRWANSQLHDIESLSRMVDPSIQGQCSEKALSRFADIISGCIREPQFRPPMSEVVQDLARMT

SEQ ID NO: 139064 - protein, 38 aa, Oryza sativa
  Clone ID: PAT_MRT4530_40393C.1.pep
HEALSTRVSQTAWAGVTAPPAVSTVTAVTIKTVRNRVN

SEQ ID NO: 139065 - protein, 268 aa, Oryza sativa
  Clone ID: PAT_MRT4530_40394C.1.pep
PRVRCNLVSAINGLYISLGSPKLPGWSGNGGDPCSELWQGVVCTGSSITSVTMNAANLGGQLGGLGNFTSIVTINLSNNKIGGTIPEDLPVTLQHIFLSANQLTGSIPSSLAKLKNLADMSLNDNQLNGQLPDAFGSLTGLVNLDISSNNLTGVLPPSMKNLSSLTTLHMQGNRLSGTLNVLQDLPLKDLNIENNLFSGPVPPKLQSIPNFKKDGNPFNTSIAPSASPPSTPGGPAPTPTPTRPAPKSVTNRTSNTITNQSKSRTITT

SEQ ID NO: 139066 - protein, 94 aa, Oryza sativa
  Clone ID: PAT_MRT4530_40395C.1.pep
AFSRVVASVPKEQLPTHIKLVRDAVSTARDKERRRRKGVPILLPGLCLSKALQPFLPIFHQVFICEFSFIMGPTYLKFERKKVHHKINFRHEDI

SEQ ID NO: 139067 - protein, 158 aa, Oryza sativa
  unsure (1)..(158): unsure at all Xaa locations
  Clone ID: PAT_MRT4530_40396C.1.pep
QRGGSDYLGNPSLIHAPEHPPIWRCSGAHGXVEGTASPGGRSGEVVDPLYPAAAFDPLGLADDPEAFXELKVKEIKNXHLAMFSMFXGFFVPAIVTXGKGPLENLSDQPQPTTSQTNNAWAXATNFVPQASEVGDRSLAVVICWMGFCPRFSLVGEMV

SEQ ID NO: 139068 - protein, 149 aa, Oryza sativa
  unsure (1)..(149): unsure at all Xaa locations
  Clone ID: PAT_MRT4530_40397C.1.pep
TTRRTNGAGVRLLLTTEVAVLPGAARAYYFLGGAGRSGRLLLRQAKSSSTRASFAQRTMGPDRPIWFPGXTPPPRLDGSLPGDLGLNPLGLGSDPESLRGNLQAELVHCRRAMLGAAGIFIPEFLTKIGILNTPSWYTAGEQQYLTDTT

SEQ ID NO: 139069 - protein, 389 aa, Oryza sativa
  Clone ID: PAT_MRT4530_40398C.1.pep
MSDSSSYSSSNSDDLDPSKVLDKYISEQNVLDSFASRIIEKMKEHPLYPEWMFRTRFRMHKPLFLRIVEALVASHDLWIWHAFFGVAGSNNDINVLNQSPLFLDTVRGEASRVHYYVNGEEYNHGYYLADGGRWAAAGGRHGGDGLSRAIATATATAAMVVHHPRDGLLQLGAEEVATHDEAHAERTEGGSSPSAAANRPAPRAAIPRTPHTPAPASPPPPPPFTTASSVAHSASASAARHPQQRSPGSSASAASRPLRLRLSLSGTTPAAQGPPPPPSTARSASTSAAHRPPPRELRLRRPLLGELRLRRRSPALPQTPGRPRSSISAAGHPLPCPSACVREMEWLRDCQIGLRIAIDLMAKQACGFENLGFTRVDMKNKLYSKSHTI

SEQ ID NO: 139070 - protein, 72 aa, Oryza sativa
  unsure (1)..(72): unsure at all Xaa locations
  Clone ID: PAT_MRT4530_40399C.1.pep
APTLASGKDAKSILFLPGRAFSRHVEHIWSTLVFALVVRHLRHRHGLNEXXXXXATISPLPIQTPPPLRSPE

SEQ ID NO: 139071 - protein, 549 aa, Oryza sativa
  Clone ID: PAT_MRT4530_4039C.1.pep
MDNTGNKGYGNDGSDDSRTQANGNEKSINETSPELIQIVVNQTNMLATAFQLLQNRNNPAGATNVQVPTVQQQCKLSEFLKTGPPTFAMAVDPMEASDWLRTVEKKLGLIQCTDQERVGFATHQLVGPASEWWDSYEASRPEGHTITWNEFSSVFKRSHVPAGMITLRKREFRYLKQGDLTVTEYLHEFYRLAQYAPEDVETDEDKQEKFLQGLKDELAVQLLLEDYEDFEKLVDKAMQLESEHNRMTNCKRRMVNNPVFPGGNQRQRTEPLQITGSSVVYQEFLPQEDERNAGNNNSNTNADDTTNNHGSCPIHDHLDQACNVNIIHQDIDDSINEGTQNDNPSNFDSGKDSNGDSNNGTTDANVSKDSQPPIPTPSQNDRPQMDSSVKKTLICYNCKEPGHFSRDCPQPKRNLRHHSGHYARRRQVTRLVVTGANAVPARSEIFNSVSDATRSEKCKHRLPVDNLSEVDSEDMNHEKFWNGSITELPQLSLSQPKGAPWSKSGEEKIPSATGGQAKQFRVVKFCWKFVKTQRKKSDKKRRPPNLSSC

SEQ ID NO: 139072 - protein, 48 aa, Oryza sativa
  Clone ID: PAT_MRT4530_403C.1.pep
ILEILVTLSVRLCSFTFFTVVSITAVVVTSPVRRMSSPTSPRRAPHSP

SEQ ID NO: 139073 - protein, 217 aa, Oryza sativa
  Clone ID: PAT_MRT4530_40400C.1.pep
VCFLLDSLLRGFETISLLIFLVVYFLGQSAQDLELVKREHEGIRSKKEKDEFLSSEDYKKMEYTQHVINEALRCGNIVKFVHRKALKDVRYKEYLIPSGWKVLPVFSAVHLNPLLHGNAQQFQPCRWEMPNKLPVAAMPFVHGPNHDSSHSKPAFLALLPFLSFCDEANGLIHRKADHRSSFLSFLENLCRWRIDGDDIPMAYPYVEFQRGLQLQPR

SEQ ID NO: 139074 - protein, 414 aa, Oryza sativa
  Clone ID: PAT_MRT4530_40401C.1.pep
MASPARRSGHRRLDDTQELALPDDLLAEVLIRLPSLADLGRASAACASFRRVATDPAFLRRARALHPPSLLGFCASPGGFHPAEPPHPSAPAARAVLRAADFGFSFLPSPLSWVVRDVLDGRFLLDRDGGEGGAALRILAVCDPLFRRYSLLPQIPEDLAASVRRRPRRGVAPNGRFDTFFAPIGEEERAAAAVAETSFKVIWIAQCPDKLVAFVFSSVTGQWRATASPCWGDLSPAFSRPACRSLLRRSYAYGCFYWMMGDSGNLLVLDMCKMNFSIVKLPSSPPGRDIVECAIVEAGEGKIGMFAFCNCIDIYALELYSTTMQNEGRVASKWSFESAILMPSRDGFRVLGVTGKELCLQVSPICVSGCYLLEFSTNPSCKKLEFVRRVIRGVRTSLPFLYVGYPPSLSSPSI

SEQ ID NO: 139075 - protein, 114 aa, Oryza sativa
  Clone ID: PAT_MRT4530_40402C.1.pep
MHVASWEVRRWWRHDESDGGCGAARWSIRPSDPSPSSMVDRGRKEEGSIRFIPLFHGRQQWRRGRKGGRAEGQSATRQASEAPEHEAAAAQLGMVASGKPTWRREARHYVQAAW

SEQ ID NO: 139076 - protein, 45 aa, Oryza sativa
  Clone ID: PAT_MRT4530_40403C.1.pep
TRGKILRDLMLLYMTIKATTRTAWTEPLASPDIDWPKPIASTTFG

SEQ ID NO: 139077 - protein, 74 aa, Oryza sativa
  Clone ID: PAT_MRT4530_40404C.1.pep
SERVAAHDGGPDPPKRPGELRQLRLPERLDVGGLPPPPEPPPRDVAQPRHLHLGLVRRPPQRLGLAVVDTGAGA

SEQ ID NO: 139078 - protein, 74 aa, Oryza sativa
  Clone ID: PAT_MRT4530_40405C.1.pep
SCLFAFVSNSTIQRRLCLGTSQMPYKCERKYYLPVLKLTPAQVKRNTPIKTCPLLRKNRIQPTIKPPFWGEKRN

SEQ ID NO: 139079 - protein, 46 aa, Oryza sativa
  Clone ID: PAT_MRT4530_40406C.1.pep
FLWLPSFFFLFLGANQSFLGGQPRQKFTPNVTHKAITAKRVNRSAL

SEQ ID NO: 139080 - protein, 95 aa, Oryza sativa
  Clone ID: PAT_MRT4530_40407C.1.pep
QACCVLCVVAGMELVAERIDHYVGLSLVTQGQGAACLLPLPTLRFPALSLSLLCFAEFICTMQSCIYSQLNSNANAMSNLSFHHPINYELSLQKK

SEQ ID NO: 139081 - protein, 54 aa, Oryza sativa
  Clone ID: PAT_MRT4530_40408C.1.pep
KKQQKCFFLVGTFTDLPFPSFAGVSTTAKGFFTGEKTTRGILTKGFSNKNAPFL

SEQ ID NO: 139082 - protein, 316 aa, Oryza sativa
  Clone ID: PAT_MRT4530_40409C.1.pep
MCLVAAPCSAVDLAASSPSTPPPNRGSTVGQPLVGPRGGCLRGVAIGRTAIQAHASPATSAASAVPSSLPPPSRRCRRRRLHPIATSIPSPPPLPHHPGASLLRWPSSERWIWPGGSQIRRRLVPAASDVASSVDVATALAGPQPSGVGGGRRPHRRRPCCRPALPAAARVAARRTRRGREGWRRGGLESPPVSPWSGATRGLGSKSTVYLYLINSTTKVYLESYDLPGTRGAADRGLAADVIYFPVLVRHRSRNCYADEHYLPTFLGILHLSRVANQSVTAGTGTTCDYNGDTTTAYFMFARKFLPNSLTRFLIF

SEQ ID NO: 139083 - protein, 360 aa, Oryza sativa
  Clone ID: PAT_MRT4530_4040C.1.pep
MAGISACASFPVVAVDSALRPEAVEGQGAAATAVAAPKTVTESESSASASASMEPEEQVEEPAKKRKRDPAPDVGSSSMDGTDGQGSDDDKNDDGEEAPVLQAVSPPRQNALQRLVDECRVLLDGSSKSTQPPNSTTVSRIVALLNGIGPDDLKLGTVLDTSEVTRAAAFRRRDPIQVIGGNYLYECDNFTVAVFYLPAGTVMPLHDHPGMTVFSKLLAGSVHVQSFDWVSPSVYGSGGKRAVHSKNTKLVKKVLDHVVEAGCGTWVLYPSTGGNLHRFVAGVDGPCAFLDVLTPPYSEGRLRRCTFYRDYPFQLHRNHRFARNLSAQEKSQFAWLRPINASAPPDLRIVPLTYSGPPVV

SEQ ID NO: 139084 - protein, 273 aa, Oryza sativa
  unsure (1)..(273): unsure at all Xaa locations
  Clone ID: PAT_MRT4530_40410C.1.pep
MRHCWELFLVMSLRNTNMEPNWGEPEPAASCAARPMPLPPPAPPPLSRRRCRRHLVVVAAAASIPSPPPSRRRLLCPTTRELASFDGPAASVGSGLEGARSGGXLVPAASDVASSVDVATALAGAASATVGLLRRCHDCPSWRLVLLXCGARPAPLCPDLATRGRGDGPDPLATTPALPPLAVGGAGATSTRRRPSACFPSGPQPSGVGGGRRPHRRRPCCRPALPAAARVAARRTRRGREGWRRGGLESPPVSPWSGATRGLGSKSTVYLYL

SEQ ID NO: 139085 - protein, 44 aa, Oryza sativa
  Clone ID: PAT_MRT4530_40411C.1.pep
MAGRPQRRWLQLDDGGGEGMAVASRFGARGSLHTDVTRNPKLVR

SEQ ID NO: 139086 - protein, 78 aa, Oryza sativa
  Clone ID: PAT_MRT4530_40412C.1.pep
SSRPQQYPPRSSSIHRHAESQHLLAARRRLCVVWCRSDRRRDGGGGGGRNNNGGVASPPCASPCLGRSRAWGPNTGVC

SEQ ID NO: 139087 - protein, 83 aa, Oryza sativa
  Clone ID: PAT_MRT4530_40413C.1.pep
YPSQPCMKKTSLEITHSNPKYHLAIAKGDIHCTQLDGQSTQILSSSRRIRRANWCLLPTPDILLIFSFTATTKIMASHHRFTG

SEQ ID NO: 139088 - protein, 152 aa, Oryza sativa
  Clone ID: PAT_MRT4530_40414C.1.pep
MTSLNCHQAKQQVVGALGGRSSNRLCGWRPVEATSILPPLSAVSFTTFPIHRFRGHFSSRRRRCHSSMLPSFEDVASIIGSMVPSFRLLPPPRIHAKLLGRHHHKPGRAVRSSSTTVDNHNTILSGHPPLPPHSLDFSHFDPFEKLISQIDL

SEQ ID NO: 139089 - protein, 174 aa, Oryza sativa
  Clone ID: PAT_MRT4530_40415C.1.pep
MACRGCWECLLKLLNFILTLAGLAMVGYGIYLFVEYNKAWDNTLNFSEDKTEVQFGRPMLVVVSLSNSFLDELPKAWFIYLFIGIGAVLFVISCFGCIAALTRNGCCLSFYSVLVLLLILVELGCAAFTFFDKSWKEEIPKDKTGDFDMIYEFLRENWNVVRWVALGIVIFEAL

SEQ ID NO: 139090 - protein, 56 aa, Oryza sativa
  Clone ID: PAT_MRT4530_40416C.1.pep
MAPTEVKLAVCHELISCLPSRVPMCTKAVFEENDAKVMVAAVMAQGGLRSAIRSPT

SEQ ID NO: 139091 - protein, 148 aa, Oryza sativa
  unsure (1)..(148): unsure at all Xaa locations
  Clone ID: PAT_MRT4530_40417C.1.pep
SSSSKQELKHTTSSTPHSQHRQTDELTHVDEKKEHRRQAAGEDRQAGGSACRTCSAQPARGEDYTILQALFSVDMRRCMFVRHTSAGIGRHSXGRSDNMGQIGXSLGYPQRSISXFVSLVSIWNYAGRVAAGFGSEYVLAAYKLPRPL

SEQ ID NO: 139092 - protein, 44 aa, Oryza sativa
  Clone ID: PAT_MRT4530_40418C.1.pep
PLLFLNQHQLPYLHSRHQPFTEHPQRPGWWLPISPGLKPFPSFL

SEQ ID NO: 139093 - protein, 79 aa, Oryza sativa
  Clone ID: PAT_MRT4530_40419C.1.pep
MSCGGSCNCGSCGCGGGCGKMYPDLAEKITTTTTTATTVLGVAPEKGHFEVMVGKAAESGEAAHGCSCGSSCKCNPCNC

SEQ ID NO: 139094 - protein, 783 aa, Oryza sativa
  unsure (1)..(783): unsure at all Xaa locations
  Clone ID: PAT_MRT4530_4041C.1.pep
MLYMGGRGCIDGVDVLIITIQGNAKLAVQCDKQSLDMVEHTPSPPATAEPPKKLSDMPGVPREVIEHKLMVRPDAKPVKQKLRIFAPYRKQAIREELDKLLKAGFIREVLHPEWLANPVMVWKANGKWRMCVDFTDLNKACPKDHFPLPRIDQLVDSTAGCELLSFLDAYSGYHQISMAKEDEEKTAFITPFGGALSNQLGNNVEAYVDDIVVKTKTSDSLIDDLRETFDNLRRYRLMLNPEKCTFGVPSGKLLDFLVSGRGIEATPEKIKAIENMKSPTRLKEVQKLTGCMAALSRFVARMGERGQPFFALLKKQDKFIWTQEAEEAFIALKRYLSNPPVLVAHQPNEELFLYIVATPYSVSTVIVVEREKVQRPVYYVNEALHDTKTRYPQIQKLLYAVIMTSRKLRHYFQAHRVTVVSSFPLAIKSQVLADFVADWTMPDNRLDNQIKNETWTMAFDGALNSQGAGAGFILTSPFGDQFNHAIHLNFRATNNTAEYEGLLAGIRAAATLRVRRLIVKGDSELVTNQVHKDYKCSSPELAKYLAEVRKLEKRFDGIERCEACQFHSXTHKAASASTPDYPSHLAVLVLGARYTRAIPTRTGRLQVPIXVAIDKFTKWIEATPMGEIMADNAIKFIKGIFCRFGLPHRIIIDNGSHVISADFQDYCIRLGVKIYFTSVSHPQRNGQVDRANGIVLQVIKTRVYDRLMSHDKKWVEELPSVLWAVRTTLTTSNKETPFFLVYGSEAMLPTKLRHQSTRVQKYSDEDQEEQRYDDVNLLEEHRD

SEQ ID NO: 139095 - protein, 78 aa, Oryza sativa
  Clone ID: PAT_MRT4530_40420C.1.pep
MSCGGSCNCGSCGCSGGCGKMYPDLAEKITITTTTTTTVLGVAPEKGQFEGVGKAAESGEGAHGCSCGSSCKCNPCNC

SEQ ID NO: 139096 - protein, 79 aa, Oryza sativa
  Clone ID: PAT_MRT4530_40421C.1.pep
MSCGGSCNCGSCGCGGGCGKMYPDLAEKINTTITTATTVLGVAPEKGHFEVMVGKAGESGEAAHGCSCGSSCKCNPCNC

SEQ ID NO: 139097 - protein, 94 aa, Oryza sativa
  Clone ID: PAT_MRT4530_40422C.1.pep
PISAAAARPVCHANIKLAWILGASRNGNLESSTIGCVLGKLDGLASVTAHRDCPLANKGHANTSDRTADALVVTTGDLTLGDALEIHEGVVLLR

SEQ ID NO: 139098 - protein, 78 aa, Oryza sativa
  Clone ID: PAT_MRT4530_40423C.1.pep
MSCGGSCNCGSCGCGGGCGKMYPDLAEKITTTTTTATTVLGVAPEKGHSEGVGKAAESGEAAHGCSCGSSCRCNPCNC

SEQ ID NO: 139099 - protein, 51 aa, Oryza sativa
  Clone ID: PAT_MRT4530_40424C.1.pep
CTNVACESCKVSPLCSCLNLKCYKMAICDLGPLKFSGYIMFVSLSHLSVWF

SEQ ID NO: 139100 - protein, 105 aa, Oryza sativa
  Clone ID: PAT_MRT4530_40425C.1.pep
SIHWSHSHHHIHTQWWGGGISHHSHVLASVGGGARRSIWSLQLRQVRLLDATWVHARDAPSLGRRRARRMHGRTSPIATGESRAAHRGPRTCARAVAPQPQNTGR

SEQ ID NO: 139101 - protein, 275 aa, Oryza sativa
  Clone ID: PAT_MRT4530_40426C.1.pep
MEPSDLAQKHTRFRIAVCKLAVSSSLVRTEKISMAISQEEQHAGGGRDYAEPAPQPFLGSSELRRWSLYRAAIAEFVATLLFLYVTVATCTAGVSGGHVNPAVTLGLLVARKVTLLRAALYVAAQCLGAGLVRALNSAHFARHGGGANVVGDGYSKGAGLAAEVAGTFVLVYTVFSATDAKRSARDSHIPVLAPLPIGFAVFVVHLATIPITGTGINPARSFGAAVVYNQPNAWHDQWIFWVGPLVGSAIATLYHEHVLRASTLKALGSFKGARQ

SEQ ID NO: 139102 - protein, 143 aa, Oryza sativa
  Clone ID: PAT_MRT4530_40427C.1.pep
MGTMGASELGTSSLSSLYSPPSSPEYPSGLMVNALDKPRRSDGCGPDNPPPPVAMPPPPRGGDYDNDDDDQRTPSSLFDNDRDQRRGGVGGGGGGGGDADRAGVAGEGSKELEFGTVLTCGARGNERMDKGTATRFRIICRLI

SEQ ID NO: 139103 - protein, 380 aa, Oryza sativa
  Clone ID: PAT_MRT4530_40428C.1.pep
MRQSRFKRICVFCGSSQGKKRSYHDAAIELGNELVARSIDLVYGGGSIGLMGLVSQAVFDGGRHVIGVIPKTLMTPEDGGSILCRNNVLLVLIGMMIADCKNQIMVHCFWQISGETVGEVRPVADMHQRKAEMARQSDAFIALPGGYGTLEELLEVITWAQLGIHHKPVGLLNVDGYYNSLLTFIDKAVEEGFINTSARRIIVMAPTAEELMDKLEEYVPYHDRVASKLNWEMGHLEVETRGWVDAEAGFDWLDSGLLDGRHAACAGKLIANLIVMGSGIIGRAMLQAYRKALDNANKTGVAHETINNIRRASKTMTEQEARQILGVSEQSTWEEIAQRYDNLFERNAKSGSFYLQSKVHRAKECLENVYQKNKQDGTPP

SEQ ID NO: 139104 - protein, 89 aa, Oryza sativa
  unsure (1)..(89): unsure at all Xaa locations
  Clone ID: PAT_MRT4530_40429C.1.pep
SNYKLYKHGDLQGLSVHSPRHLVHKPTRRRARGAGTRLWTVVKWRSLLMRKVSKARRRRSMWPXLDLNGRAPPGEGGGGNRRKXAGGGR

SEQ ID NO: 139105 - protein, 56 aa, Oryza sativa
  Clone ID: PAT_MRT4530_4042C.1.pep
AITILLVLLYYCHVKRKIHGCTCKEDVCVHKHDDDDDDMELYHVIGSLKIDLLFLA

SEQ ID NO: 139106 - protein, 69 aa, Oryza sativa
  Clone ID: PAT_MRT4530_40430C.1.pep
GCRNSARGFAAPLQSPPPLPSPDDPTGDAAPPPPPLSAAPPPPPPAGRGRSSPTSATCSASASPSRPSS

SEQ ID NO: 139107 - protein, 628 aa, Oryza sativa
  Clone ID: PAT_MRT4530_40431C.1.pep
MAEARLLRRRRLCLAVAVVWVVAVAVSRVGANTEGDALYSLRQSLKDANNVLQSWDPTLVNPCTWFHVTCNPDNSVIRVDLGNAQLSGALVPQLGQLKNLQYLELYSNNISGTIPNELGNLTNLVSLDLYLNNFTGFIPETLGQLYKLRFLRLNNNSLSGSIPKSLTNITTLQVLDLSNNNLSGEVPSTGSFSLFTPISFANNKDLCGPGTTKPCPGAPPFSPPPPFNPPTPTVSQGDSKTGAIAGGVAAAAALLFAVPAIGFAWWRRRKPEEHFFDVPAEEDPEVHLGQLKRFSLRELQVATDNFSNKNILGRGGFGKVYKGRLADGSLVAVKRLKEERTPGGELQFQTEVEMISMAVHRNLLRLRGFCMTPTERLLVYPYMANGSVASRLRERQPNDPPLEWQTRTRIALGSARGLSYLHDHCDPKIIHRDVKAANILLDEDFEAVVGDFGLAKLMDYKDTHVTTAVRGTIGHIAPEYLSTGKSSEKTDVFGYGIMLLELITGQRAFDLARLANDDDVMLLDWVKGLLKEKKVEMLVDPDLQSGFVEHEVESLIQVALLCTQGSPMDRPKMSEVVRMLEGDGLAERWEEWQKVEVVRQEAELAPRHNDWIVDSTYNLRAMELSGPR

SEQ ID NO: 139108 - protein, 68 aa, Oryza sativa
  unsure (1)..(68): unsure at all Xaa locations
  Clone ID: PAT_MRT4530_40432C.1.pep
TMRIRXNINKPNLANTYNPRARKITYVSRSKIPILNLAHMSAVKVNLCQTALLSLFWNINAYSGKTLL

SEQ ID NO: 139109 - protein, 84 aa, Oryza sativa
  Clone ID: PAT_MRT4530_40433C.1.pep
AASTLDEPAAEVRSANSRSYRQRSRSIDQAVKHAYFVYIKGLMPKHSTHRFIHPSIHPFHGGFHSRRPLSIDRLISDLSISLSC

SEQ ID NO: 139110 - protein, 74 aa, Oryza sativa
  unsure (1)..(74): unsure at all Xaa locations
  Clone ID: PAT_MRT4530_40434C.1.pep
ACSNITLYLTDDQAEYLEERRLXDLINKHSEFTSYPISVWTDNTTENDITRDEDEDXTNDADEGTVDDDVRDED

SEQ ID NO: 139111 - protein, 146 aa, Oryza sativa
  unsure (1)..(146): unsure at all Xaa locations
  Clone ID: PAT_MRT4530_40435C.1.pep
TLGFVSQGNEFSYYMMICSRFVLNHTRXTNEWTIYPWIHSNCNSLSDNDQLRPVSFPDIHPSSSGITEGFSMCAGDFVEVYNEESQESSWDAVVTCFFLDTAHNIVEYIEIISKVLKDGGVWINLGPLLYHFADSYGPDDDMSIEL

SEQ ID NO: 139112 - protein, 573 aa, Oryza sativa
  Clone ID: PAT_MRT4530_40436C.1.pep
MAERRYTEQEEALEISSLRRIIAAYANYHDAAERDVKRYERSFKRLPPAHKELLFNLGLKYQRLRWCISMNASFIMDMLEAFEPPFDMSQHVDMDGHDCAENMHGHCHADCAHSVDRGDCFRSSISVSNSELHEPDGCPRKDDKTHELSRETDNKDEVVDMESCSRPVGDKLGASQVEDKSCNGDKAMDAAANCQDTDCVACSADENVIPQQFMAPSLQLNVPPIDVDKVRCIIRNIVRDWAQEGQKERDECYKPILEELNRLFPNRSKERPPSCLVPGAGLGRLALEISTLGFVSQGNEFSYYMMICSSFILNHTQETNEWTIYPWIHSNCNSLSDNDQLRPVSFPDIHPSSSGITEGFSMCAGDFVEVYNEESQEFQICMIGNYGFFAFLTFSQYSYFAPASWDAVVTCFFLDTAHNIVEYIEIISKVLKDGGVWINLGPLLYHFADSYGPDDDMSIELSLEDVKRVAYHYGFVMEVEKMIDTTYTANMKSMMQNRYRAAFWTMRKNASRSKAQKHQEKLFQFDVYQLANGSTKVIFRATHWLRFWAQLQRCDEDEEFLNVACRKLETKLF

SEQ ID NO: 139113 - protein, 707 aa, Oryza sativa
  unsure (1)..(707): unsure at all Xaa locations
  Clone ID: PAT_MRT4530_40437C.1.pep
MRPNLVIVDMLSRSMHVVVLEVAAGGTRGCNFMDVAVHVLSLLVKIFQVPSLTWHIPTGHVLFPECSEVATILGSGSPPPSPCRGHLATTATLPSFTVVGSRGDQRLLGVLVAHKRNRAAHVWAAVHRLSVFPGGESGRRGRSTASSEMADADGGSNLAVLDALDSARTQMYHMKAIVIAGMGFFTDAYDLFCISTVSKLLGRLYYQPDGSTDSKPGALSKTANNMVIGVALVGTLMGQLVFGYFGDKLGRKRVYGVTLILMAACAIGSGLSFGSSRKAVIGTLCFFRFWLGFGIGGDYPLSATIMSEYSNKKTRGAFIAAVFAMQGVGIIFAGLVSMIVSSIFLTYNKAPSYKGNHDLSRQMPXAADYVWRIVLMIGAFPAFGEPFYWRNERCRKTARYTAIIDGNAKQGGEXDMQKVLSIEIEAEQEKLAKFNAANNYPLLSMEFARRHGLHLIGTTTTWFLLDIAFYSQNLTQKDILPAMGLISGAAEVNALTEMFQISKASFLVALLGTFPGYWVTVALIDKMGRYMIQLIGFFMMSMFMLAMGILYDYLKTHHFLFGLLYALTFFFANFGPNSTTFVLPAELFPTRVRSTCHAISAAAGKAGAIVAAFGIQKLTYNSQVKSIKKALIILSITNMLGFFFTFLVPETMGRSLEEISGEDGNTGAGGGGAPAAANAGVGVSASDVSRDEKFPASSTEWQTSMHA

SEQ ID NO: 139114 - protein, 114 aa, Oryza sativa
  Clone ID: PAT_MRT4530_40438C.1.pep
MTAWCHSVRFIFPLKHISGDPGGMGGAQTAVALCTVQRFHGPCQYILPVPSNLSVNDEHRTGRVLKFETVETNNFREENDNLQKQLSLQENQVYGRLQQSHGTSSKVQSQQFLQ

SEQ ID NO: 139115 - protein, 109 aa, Oryza sativa
  unsure (1)..(109): unsure at all Xaa locations
  Clone ID: PAT_MRT4530_40439C.1.pep
ELXXIDPSKVXCVNLGEWVGVLPKLXGERVTVAMLMPCVAVRLRGRYGGEVVRXPWIPLGGLIPVHVVAQTCYECXPSWRFAGPTLSVVCVCAGGSDALTPLHSGXFDK

SEQ ID NO: 139116 - protein, 313 aa, Oryza sativa
  unsure (1)..(313): unsure at all Xaa locations
  Clone ID: PAT_MRT4530_4043C.1.pep
RIPVQQSRIPIRDEDKEQGATPVSDRFVGVIDIDPHEPSVLHLLEDYGSSTTSTPREVLAIDDVGTSARTNAEAENQVTTPAQHIRAVNXLVTNLSNAFEEAAAAAHPKQPPTCDANGEDPERRXSPHRATPPPRGTGDLRDHLNGRREARRTRDNENRSRRHISSRRHDNEDRGGHSSEDRDHDNRHNRHDHNDRERRVLGDTGRGRRNNDGDDGDRHRDNSGRRRQDSREPGRRPRNRTPELDDPSSSSSSSSSSSSDRHPRRTHDRQQPTAPSVGCRAFGCSLRNVRWPKRFXPGAIEKYDGSADPEEFL

SEQ ID NO: 139117 - protein, 139 aa, Oryza sativa
  unsure (1)..(139): unsure at all Xaa locations
  Clone ID: PAT_MRT4530_40440C.1.pep
FFFFFFFTRKTVKNTAKQHREPMGIYIYLAXAPCCQTXHDPQQPFMGAPFHLMSPWSNTHXTXLSHHSIIFHQPXHPFTISSPGHGAFQQPXGIYSAHVGVVPSWHWALXVRHAAXCPPPSVVLSRAWHDTSSVVLVAF

SEQ ID NO: 139118 - protein, 63 aa, Oryza sativa
  Clone ID: PAT_MRT4530_40441C.1.pep
QCSAAKVNLGNYHGLPADALLGYSPNSFNRMCPSTRELGIGIACTRRSTTTPAIRPRRSSSTS

SEQ ID NO: 139119 - protein, 417 aa, Oryza sativa
  Clone ID: PAT_MRT4530_40442C.1.pep
MSSRYGVSEGDVLHVMNEEMLTRDEAIHWLLEDFELMESQRRFDDKLDRLLQMFGVKEERMPTKCSTPGPSYATTKAVLNGTPTKPERVFPGTTSLFAPSIISAARATTLPSIETEEAEGDMTQVEEETEDTLHDLCAKVELKQRADSLIFVELKAPRPPPTKFISTKTPSIVAQQKLLLETNQRTLITRISPIEEKWVAGLKDKIRLEDVDFNWKILGLHDKEVVPKLSLIKNAMGRVAVKLSIKAMVYDERTMILESTKKKIETNKLVVHWNIFILVFDPGKDNDTLGERVANYMQELQTHWDPGGTGNNLHRLEDKSNIKERGLLGTQLGCRWAKLVMFQSWPKQAQLAAYIYEQQQQALGGIKHLESAKAASATTAAATWVAGLGTLLDLLLYPSSFSTCLETTITFYSVCIL

SEQ ID NO: 139120 - protein, 118 aa, Oryza sativa
  unsure (1)..(118): unsure at all Xaa locations
  Clone ID: PAT_MRT4530_40443C.1.pep
ASPTCHRLRDAGPRWTESTGPGKGCTTWRAHVAPTWRPRGQPHGRWMDGPDLPPGRPDGGGGARLGAHGRXSRPGGHGDAAARRSTAAAQGGERPIAESGGDAAARAALAAAKQRLGS

SEQ ID NO: 139121 - protein, 149 aa, Oryza sativa
  Clone ID: PAT_MRT4530_40444C.1.pep
MGHGTPGISGFWSVPDLAPCRLTPNNLDYNNTKLKDRAKNWNTEKNTVVVSIADCPDSELACRTSMMETFLLRTKYWNGVAYTYCYAVAGLMFVAHYTQESGQRLKVREHGVDWTNIEIGNIRFGSRWMAPGADSDLKGPKTKPPCTTF

SEQ ID NO: 139122 - protein, 83 aa, Oryza sativa
  Clone ID: PAT_MRT4530_40445C.1.pep
RFGDKFHEPDGDCFSPAWEPTSDALLGADSNPADNALSAAFRGRNKRGLDMVFNAIGFVCLDVLCPACERVGVKSSDCCSCRG

SEQ ID NO: 139123 - protein, 177 aa, Oryza sativa
  Clone ID: PAT_MRT4530_40446C.1.pep
MAAPAAPQETNAAAGEMVTLISSDGARFEVPEAAVRLSQTVLDEMKKDDYNAINGIPLPNVAGDVLAKVVEYCTKHASAAAAAINADTAKTSKEEEELMMKSFDDEFILVDNHMLYSLLTAADAMRIQGLMDLACQRLADMIKGKTSEQMRQTLGITNDFTPEEEEEFRREDEEQWL

SEQ ID NO: 139124 - protein, 296 aa, Oryza sativa
  Clone ID: PAT_MRT4530_40447C.1.pep
MNNESRPKWRKVAYGGRQPGYDDNHTDESFLEEMVMNANVVKRDLLKVMIDSVSISQYLCIVALVVSTWTYTLNLVIDEVTLLKLDTSLLLAGFSMLLLTASPFSLKLLSKYVLNTSFFISGLYVLAPIYQTLTRSISSDSIWALAVCLLLVHLFLHDYSGSTIRPPGALNNPKLTSNISLNASIVASVLVASRLPSRLHVFAIMLFSLQIFLFVPLVAFCIKKFSLRLHLLFSFALMIMTLGVTYQLHHMFFILLLALLVFISIVCPYWLIRIQEYKFEINGPWDEAKLCFDITE

SEQ ID NO: 139125 - protein, 78 aa, Oryza sativa
  Clone ID: PAT_MRT4530_40448C.1.pep
PSPKSPGPPNLSLSPSPNPNLAQNSPPPPPRRINQRKFPPPQGLFGKNLWGFSKKFPAMPVCFQKKGFFLSINFYPPS

SEQ ID NO: 139126 - protein, 73 aa, Oryza sativa
  Clone ID: PAT_MRT4530_40449C.1.pep
TNQVWQTSRAVWRNNLHYQDIDIVQAIAHAALQLPASCSVMLLLGIGKSGLQAARLLVGLFNVANAEIMGMLP

SEQ ID NO: 139127 - protein, 63 aa, Oryza sativa
  Clone ID: PAT_MRT4530_4044C.1.pep
KMLMSVKGIYIFILDNPKLHQLELQGSEIARIDLIQYLKKPQLCNKTQQIHVLFLDTFCRLLD

SEQ ID NO: 139128 - protein, 264 aa, Oryza sativa
  Clone ID: PAT_MRT4530_40450C.1.pep
MAATLFSTSLTPTFLPAVPCPKPAPPASACFPCALPPRAALAAPPAPLRRRLSPVAVAVSSEVEEEEGGAESEGEFAEDLKVFVGNLPFSVDSAQLAGLFEQAGSVEMVEVVYDRQTGRSRGFGFVTMSTAEEAGAAVEQFNGYTFQGRPLRVNSGPPPPRDDFAPRSPRGGGSNFDSSNKLYVGNLAWGVDNSTLENLFSEQGTVLDAKVIYDRESGRSRGFGFVTYGSAEEVNNAISNLDGVDLDGRQIRVTVAESKPRRQF

SEQ ID NO: 139129 - protein, 75 aa, Oryza sativa
  Clone ID: PAT_MRT4530_40451C.1.pep
GTLIILSQICSVNQEKICITNTYSKDGVTGPSLSSTLYFVSLQKLAWTNPGHFNLLTNKMGLEEFFFLFCFLGLH

SEQ ID NO: 139130 - protein, 206 aa, Oryza sativa
  unsure (1)..(206): unsure at all Xaa locations
  Clone ID: PAT_MRT4530_40452C.1.pep
VRSRPKPPPSPILILPGVNHANSCRTVELKIDGSFPSHKSNQSPLSRXFNPRCQPFLTAVKPILRRXYSNVAXPPLKCILSSNQSSASSFTSPHQAEHCRPRAALFFAAVKFFRPQPVVSTNLAASPTTYQISSSSAARRHQRTLAPSHPRPQPHFPSNAAFGEWLEVEEEKRERERLTGLENSSDTLDNINQSQEIEQGKLLYTF

SEQ ID NO: 139131 - protein, 555 aa, Oryza sativa
  Clone ID: PAT_MRT4530_40453C.1.pep
MPALTRALRCALLAARVALAREKARRAFASHGEMLSQPAAALARLPPASVRVLVGFGAALLVSLVVLHRRPAARGAAGGGGPAEYDPAARFLALSEGANATIAADLRALTAGPHLAGTGAAAGAAARVLSGFRAAGLRTLTREYTPLLSYPGHASLALLRADRTLLAHLSLDEPADVGRRLVRPYHAYAPSGGAVAEAVFVNLGREEDYLTLERLGVSVRGRVAVAIRGGGYRGGVVRRAAERSAAAVLIAGHADGGVERGTVILGGPGDPLTPGWAATAGAERLDFDHEDVKRRFPAIPSMPVSGKTASAIIRTLGGPALPADWQTGVGLPVDVGGVGPGPTLVNFTYQEDRKMGMIQDIFAIIKGYEEPDRYVILGNHRDAWTYGAVDPNSGTSALLDIARRLGIMLQSGWTPRRTIILCSWDAEEFGMFSKISFICVPFISFLHFEGSFFQIGSTEWVEENLEDLQSKAVAYLNVDCAVQGIGLFAGSTPQLDNLLVDVTRQVKDPDVEGKTVHDTWNKMTGGINIERLARTDSDFAPFLHHAGIPCIDFYY

SEQ ID NO: 139132 - protein, 63 aa, Oryza sativa
  Clone ID: PAT_MRT4530_40454C.1.pep
NNISKPPVHHNYSHHHRGFHPFPFSFLISSSIPSQEARIIFQFWVISPQASHTHPPRQFHQAK

SEQ ID NO: 139133 - protein, 83 aa, Oryza sativa
  unsure (1)..(83): unsure at all Xaa locations
  Clone ID: PAT_MRT4530_40455C.1.pep
HILFRPVCLEGYLXCTWLMLMXIYCHCSVVRSSFXXPASHGGEMVGVSDFGIPYFFGVAXIXKDMGLAIKXXXFXCAKKKKKK

SEQ ID NO: 139134 - protein, 565 aa, Oryza sativa
  unsure (1)..(565): unsure at all Xaa locations
  Clone ID: PAT_MRT4530_40456C.1.pep
MDIFCILLPDLNCISAFFDGISSRSPGRRRRTRVAASPATRLLRAARRKAALESAAAACGRVETSQGERSCQQPIPARSMSLVNRPLPALYGICTASAKTRAWWLCRDGNLPSTSRISCTEPSNGGSVMELEVMDRNEQTYHENSSASEDEDDDEEEAVEWSKDELDAISALFDRPMRQKPPKPPNPVRQRPLPLPLPHKTRLPNAPAPKQHIRLAARAALSSRSSFSDQVCKNPEVLIGIAREIAALPPESDVSIVLDRWVRFLRKGSLSMTIRELGHMGLPERALQTLCWAQRQTVVPLFPDDRILASTIEVLARFDQLKMEDALEQCVPSASRAVLEAMVSGFIRAGKVGLARKLLEFATINKRTLSPSVHVKLMLEAVRTPEGYGLAAALLDELGERPELHVRQQDCTAVMKVCVKLRRYAAVESYTSQXACSRRSPGRGKRTIWRQSTGSMGLVNRALPAXVWNLHGLGEDQSLVALQRWQSPINKSNFLHRAIEWXSGMKDAGFVPTGDMYGGLIGGYAAEGRMGRCRRLIREAELAGVKLERRLLSRLSEMGVEHSQL

SEQ ID NO: 139135 - protein, 598 aa, Oryza sativa
  Clone ID: PAT_MRT4530_40457C.1.pep
MATAASTSAAAVAAASRLLVRRAPPRLLRRLPRAALAASRPSPPSSSSYGAAAVALGRQPLGHRARMGHTAAAAAAAGPALGLTKPNAVEPPQVSFAAKDVEFSEWKGDILAIAVTENDLVKGSDSKFENAVLKKLDGQLGGLLSEASAEEDFTGKAGQSVVLRLPGQGFKRVGLIGLGQNAPSTTTACKGIGESVASVAKSAQASSAAIVFASVGGIQEDFKLTAAAAIASGTVLGLHEDSRYKSESKKVHLKQVDLIGFGSGPEVDQKLKYANDLSSGVIFGKELVNSPANVLTPAVLAEEASNIASTYSDVFTATILDVEKCKELKMGSYLGVAAASANPPHFIHLCYKPPGGNAKRKLAIVGKGLTFDSGGYNIKTGPGCSIELMKFDMGGSAAVFGAAKALGQIKPPGVEVHFIVAACENMISGTGMRPGDIVTASNGKTIEVNNTDAEGRLTLADALVYACNQGVDKIIDLATLTGACVVALGPSIAGIFTPSDELAKEVAAASEISGEKFWRMPLEESYWESMKSGVADMVNTGGRQGGSITAALFLKQFVDEKVQWMHIDMAGPVWNDKKRAATGFGVSTLVEWVLKNSS

SEQ ID NO: 139136 - protein, 460 aa, Oryza sativa
  unsure (1)..(460): unsure at all Xaa locations
  Clone ID: PAT_MRT4530_40458C.1.pep
MADSIELARRLCLQPPARRTGTGRCRPRGRLGAPSLRVPRPPLSLSLSLWSSLRCRALDSTRPVAVEGGLGDEEDEDEEGESYFALTSSRLSRVDYLGESTKGDLNVRREHLDAFGGNGKSTLHGPIEEIAWQEAREAESLLRELGIADPFSVRHSPRGIFCTRTLNLRSISVIGYDMDYTLIHYNVMAWEGRAYDYGMANLKGMGFPVDDLEFDPDLVIRGLIMDKDKGNLVKADRFGYIKRAMHGTQMLSTSAVSEIYGRELVDLRXESRWVHLIEAMSRKNSVSTLIQQKEVVGDLFNQLRLALQRRTNSRPAQTLAATCMDDQELTESMQKLLIVMQRLDEKIAPMLESDGELFNKRWGWLSRTGLWDKSHLTRQIEKYADIYTSRVSNFSTLYSIHVFPITRTXRLGMTCIPIPGGNNTDIRSIHHSCGGVGRKIGRDRKAAGWTCLCQCVSRGD

SEQ ID NO: 139137 - protein, 59 aa, Oryza sativa
  Clone ID: PAT_MRT4530_40459C.1.pep
KWESKPRAGRRACFQLGIAMWTPLVLARGGRATYWLESPPPRPGGTPWAGLSPGMGYPD

SEQ ID NO: 139138 - protein, 215 aa, Oryza sativa
  unsure (1)..(215): unsure at all Xaa locations
  Clone ID: PAT_MRT4530_4045C.1.pep
PKEGGPKREEGPGRXRRRRTGXARRRRGKKRTTARAXIPHGKKDRRTGGNRRREXGERLYSVGRKKNRPERKETGAAIXGSINDAGEDFGXGFQTNPREREREKRGKRERESRGVISPSLWRAGTAGCGGFGGGGGARARAXRRARREDRDDRWAPPVSEGGGRARPSAARARGGDRWAAGERREREGAGPSRPSKGRGGGXRRLFRIFLFIKPF

SEQ ID NO: 139139 - protein, 112 aa, Oryza sativa
  Clone ID: PAT_MRT4530_40460C.1.pep
MLPATSANPAGMPSTPSCRAVFIATSSLTTPKKEVTLPTRQALYSLPPRRGRPGGLDTTVLICSRDDSNNNYGKATEDSSNGCDESMKKDIRTHLRPRHTHKPPYIQQRMPR

SEQ ID NO: 139140 - protein, 337 aa, Oryza sativa
  Clone ID: PAT_MRT4530_40461C.1.pep
MMLLAKELGLSPPAAVTPRRRPPPARVPASPSGGSPVAVGDLWLRTKGAGGGGDGFGSHSHESEMDLAMLVTDFLENGGTGGADSRASSDSDSALSDHLADNISIYKQGGDEKENELLSMVHSLLFSIHESDLLAFKRGQCSASCIRHLLVKLLRYSGYDAAVCVSKWQGFDKIPGGDHEYIDVIMNSDTEYRLIIDIDFRSHFEIARAVDSYDSLLNSLPVVYVGTLPRLKQFLHVMVDAAKWSLKQNSMPLPPWRSLPYLQAKWHSKYERIDLHIEQDFHSTASDHALCIGHLKRLKSSLQSELDTERLLMMPIKTDMKRRAKFERRRRRSLLSF

SEQ ID NO: 139141 - protein, 475 aa, Oryza sativa
  Clone ID: PAT_MRT4530_40462C.1.pep
MAVDQPIRIKIMLGMKGGRGRTSKFAGLKGLLWKAGIAGDEEVKPRGNDIHRRWLRVRRVEEDSETDFSFKDANKLCSLVRKQKALAKKKRKYLAESYVRSDEVSCEKVIAHVEKCFDFQSDGYSHHIVQDGLQFFKLQKGKDGSLSPQGLADMQLIINKLSNEALHSVANIVTHNRVSFEKTRPAMNKIIEDHLPQYLANLRDENDMSQLSHILTNSFSCRSNSLNIATPISPKMLSSINQALNVLGTLTIQSLVAMKRKLDEISFTPKFSFVPRISRKAHMVTVIRKQCNKMISRVGESGDLPKNLAKALSVVNLYRKQELKCMDISQAEFFPFSKKAIFLQNDVLNAIWSIQKLKKGDLKLLRPILCQGSNDEMLFKTTVRRVIYQMRHQMPLRQKIDFTEQRKGAEVEAVLNLMNCGSECHSDEQVMSLGCDDYSCDNDFVLTEGYKNFGHQQHKIDEACSSSMANPVGLS

SEQ ID NO: 139142 - protein, 87 aa, Oryza sativa
  Clone ID: PAT_MRT4530_40463C.1.pep
MGRGGMRQQGGSAVLVAATSAELVTVKLFAASPLVGSGSAHTISGDVWARRWPDIEGGRRNDITGGGTIFARSGKIHDSLGSKKNRE

SEQ ID NO: 139143 - protein, 81 aa, Oryza sativa
  Clone ID: PAT_MRT4530_40464C.1.pep
WLTMKKRATAPSRDAVGYRTMVMCGRLHEDRFRGAASPDGETWRMHNNMGGQMVTDMASYKDDQSILCLGGGAPSNGRWYC

SEQ ID NO: 139144 - protein, 77 aa, Oryza sativa
  Clone ID: PAT_MRT4530_40465C.1.pep
PQDVPPHVACVPRLFSLFLLSPPSPAFVFISPDLSLTSCKSGMCFIYMLLGKAYVKFHRCDPRLLILPQDKKKWNNH

SEQ ID NO: 139145 - protein, 213 aa, Oryza sativa
  Clone ID: PAT_MRT4530_40466C.1.pep
AAGSPGHRAHHVGVVEGDDFVLQKAVTLVLQNREDFVAILFYASWCPFSKIFRTDFQKLSSFFPTIAHFSFEESRIKPRMLSRYGVRAFPTLFLVNSTMRVRYHGSRTMNSLAMFYKDVTGMNPVSLDAISLERMEEVVNIIENDKKTEQGDSLFMFARSPDRLLHQDTCLALASSFVLMRLLCFLLPKLNACVKQAWRMQFYELKRLFPSLS

SEQ ID NO: 139146 - protein, 101 aa, Oryza sativa
  unsure (1)..(101): unsure at all Xaa locations
  Clone ID: PAT_MRT4530_40467C.1.pep
LRFRCLWSSSTKIPPLPPPLVVVNSSGQLGHPNRPPQASDAAFGEESASTSLVVRSFKEASHCVVLGFLLWHAKHPPRVXKVLKSVYKDATYVLKYLIGFI

SEQ ID NO: 139147 - protein, 73 aa, Oryza sativa
  Clone ID: PAT_MRT4530_40468C.1.pep
MDEPEEGIDVAKTNNRRQSDGRRSFLGRLFSPVHPLSIFFLGGHAVLLGCGPIRADTNIPLRLSVTWNREYHD

SEQ ID NO: 139148 - protein, 187 aa, Oryza sativa
  unsure (1)..(187): unsure at all Xaa locations
  Clone ID: PAT_MRT4530_40469C.1.pep
SDQFQIVKNPNPPPPPXPSHPQRCLSSSPSPSGAASPPLPSPHAPPPPQPSRPPPPPPTPPFPXPPMVPSPQPNRPPPPPPTPPLPLRLSPPMPLPLPSPPVAPLPLPLSLPSHRHGVGDGGVQRRRRTAPSPLSLLSHQHGASDGGERGDIVGVRAPSATAVPTAASTATTASVASAGRAAADLGR

SEQ ID NO: 139149 - protein, 158 aa, Oryza sativa
  unsure (1)..(158): unsure at all Xaa locations
  Clone ID: PAT_MRT4530_4046C.1.pep
MAAGPPAPISFPSGRSLPFQPYLNLSRASLARFRPLPHRLXTGIELAPSPSLSSVADDLRPAFSARRDRLPPRRCLLRLRRTAVDPVHPLVSLADHRNAVDPVDPSRAAAFLRSGRLFGRRRRPRGRGRRLPPAAPSGRLRARRVAAAWGPAVSRPRP

SEQ ID NO: 139150 - protein, 235 aa, Oryza sativa
  unsure (1)..(235): unsure at all Xaa locations
  Clone ID: PAT_MRT4530_40470C.1.pep
TRPAASSSYYYPTAVSAAASAGQYDPYAAYQYYADPAAAGPGSGGAGGLPGYYFGAGEAFQAPASSASQGAPAATAAAGKEAGKHFGFDPQRYAQAAAARSSNGVAPAIAAPGMHPAQWNAHFGHPVPKIVSRKHIKKKPKVVQPLTCEVCKIQCDTPEVLRIHKTGKKHKKNLERLQDSITPKPVKPPSTPNTVALAAXMAPDPVTTSVTTSVIPAAQTKKKKSAAATPEELEV

SEQ ID NO: 139151 - protein, 408 aa, Oryza sativa
  Clone ID: PAT_MRT4530_40471C.1.pep
MSVLMILCRTSSHILYAQCWSVLISQCPHVLMKMLKLCTIISSCFVYPAVSAAASAGQYDPYAAYQYYADPAAAGPGSGGAGGLPGYYFGAGEAFQAPASSASQGAPAATAAAGKEAGKHFGFDPQRYAQKAAKAKVEASLILQSDLSYLNFAYAPQTATTVVPIIDVFSGGPNKFKWFWSLSAIVSAESKSCDLFKVMYGTTIDPRSTLDLKIAAAARSSNGVAPAIAAPGMHPAQWNAHFGHPVPKIVSRKHIKKKPKVVQPLTCEVCKIQCDTPEVLRIHKTGKKHKKNLERLQDSITPKPVKPPSTPNTVALAANMAPDPVTTSVTTSVIPAAQTKKKKSAAATPEELEVKRRRVLDAGAAQGEVKICTVCNVVVNSQKVYEFHIIGQKHKAMVQKQQAQPPIA

SEQ ID NO: 139152 - protein, 198 aa, Oryza sativa
  Clone ID: PAT_MRT4530_40472C.1.pep
MESSDLGVDGIRLWEELGPTGDRRGKSGARPARAEMGAAGSWRGRSWTRRWGLRGDDSGGGGGGGGGGGRGGGAVAAARERKAGSWVAQGGEEGKARSVSRLCSRKEGSGSDSCLTSADGRVRVWACERWERDFLAELGTVGHARHPNVCALLGCCVDRDLYLVFHFSGRGSVSANLHDENAPAMWWADAASGRGTSR

SEQ ID NO: 139153 - protein, 74 aa, Oryza sativa
  Clone ID: PAT_MRT4530_40473C.1.pep
APSTQPSAQATATATTTSFRWRSAPTRSWRAPRSSSCAISAAPSSTPATAARPSPTSGRPSASAPTTAAPTRCS

SEQ ID NO: 139154 - protein, 91 aa, Oryza sativa
  unsure (1)..(91): unsure at all Xaa locations
  Clone ID: PAT_MRT4530_40474C.1.pep
ALGFSISLHRFRSHLFRDLFFEQSMQKSLRTEVFLSACHFLPNCGITNRNRHGVYAHIPHDMHLAHESXKKIWISYFLSFSLGLGLQTRIK

SEQ ID NO: 139155 - protein, 130 aa, Oryza sativa
  Clone ID: PAT_MRT4530_40475C.1.pep
MAMALRRVLKHGVIPRDAAQVVGIRGFAIASKAKKGGKGAADAAKTPVLSKELKSTTVFGANILKEGSDPKLQPDSEYPEWLWHLLDKRPMLSELRRKDAKTLPYEDLKRFVKLVNRARIKEQNALTAKN

SEQ ID NO: 139156 - protein, 56 aa, Oryza sativa
  Clone ID: PAT_MRT4530_40476C.1.pep
KKKKKKYKKKKTKKKKKKKKKKMEKKKKKKKKKKKGAAFLKNQSSRTRPCKLKPFL

SEQ ID NO: 139157 - protein, 94 aa, Oryza sativa
  Clone ID: PAT_MRT4530_40477C.1.pep
AAAESCPGKKISGGGCWRSTRQPAANHRSIQTFDPTFIKSSDTDNTRLRWRRPGQRPVDPGETALMGRTAREREKAVAFPCSCGGGIVEAVNRW

SEQ ID NO: 139158 - protein, 76 aa, Oryza sativa
  Clone ID: PAT_MRT4530_40478C.1.pep
LAFCCADKANVWNAVCLFPGHAGLVRFLGNCPMFQTKTVVHSTGAAQHSALGWVVPAADDPRGCGVRRARMRPCHE

SEQ ID NO: 139159 - protein, 54 aa, Oryza sativa
  Clone ID: PAT_MRT4530_40479C.1.pep
DYLILPLSTELFLLCSVWVARKPPGFAFIDFDDRRDAEDAIRDLDGNKRRYLSL

SEQ ID NO: 139160 - protein, 101 aa, Oryza sativa
  unsure (1)..(101): unsure at all Xaa locations
  Clone ID: PAT_MRT4530_4047C.1.pep
RRWVGETRLMRXLVNSLXRIHGTGIVHRDIXPSNLVXXRRGQXKLIXFRAATELRIGKXYXXXXLLXPXYCPPELYXLPQEXPXPPXXPIXPSSPXSSWXI

SEQ ID NO: 139161 - protein, 81 aa, Oryza sativa
  Clone ID: PAT_MRT4530_40480C.1.pep
MIDFVEISGVRVQGVRMYGYIRCKVRMSAVGDGAFLACTLAGCSATVMLSCFEVGNGQAPTMAAGGCLLHAGRRLLAIVSS

SEQ ID NO: 139162 - protein, 433 aa, Oryza sativa
  Clone ID: PAT_MRT4530_40481C.1.pep
MDKKKAVDDTEPGPAPSRPVDRFGFIKPEQGTSPDGISKSKFIHERERESGYWLTVHYFTNLTADIFLGNHRDGRRIKKWRKMIGVGGSDWKHYVRRNPHVVKRRIRKGIPDCLRGLVWQLISGSRDLLLMNPGVYETLVIYETSASELEIIRDISRTFPSHIFFQQRHGPGQRSLYNVLKAYSVYDRDVGYVQGMGFLAGLLLLYMSEEDAFWLLVALLKGAVHAPMEGLYQAGLPLVQQYLYQFEKLVLEQMPQLGQHFIEEMINPSMYASQWFITVFSYSFPFHLTLRVWDVFLYEGIKVVFQVGLALLRFCHDELVNILFALFLAAFVLSLIFGDVLKFVTCCQVKLPFEKLLHAFRNFPEEATDPDVLLPIAFTFKVSGRLEELEKEYQKKLEGSNASTSTKRSHPLKLKTMSRIGSRALSNFTNSEK

SEQ ID NO: 139163 - protein, 174 aa, Oryza sativa
  Clone ID: PAT_MRT4530_40482C.1.pep
MAYQSFGAVDLAASFFFSSSSSSPQPGLVGVHGDRFLGGGGGDGGDGGSSYDGGGDGGAASGKGTRRDERKERRLASNRESARRSRVRRRRQLDELSSHVAELRAANHRLAVELNRAAARHAQMARENARLAEEARALRERLPLRGGGGGGGDGEAEEEAGGGCGAEAILAPMD

SEQ ID NO: 139164 - protein, 289 aa, Oryza sativa
  Clone ID: PAT_MRT4530_40483C.1.pep
WFLLQDLPDEVGSVNVFSWISCLDLRTLAVLTNSTISSSSDPHNISFNFLIPERGTDKSPYYKLKAVLPDSNVTVASQKKIEDKLNVATPEGNLFWSFPNELSPIIIGTTQFSQKRYVYISADSIVKGKIEDLGRIDLGTYAIAAVEDCTKRIGDYVSIDVLNAVQKTAPKNLVYTEPYDKDACLLDFDVLVVEPRKLRKDLIDSIMVWFRAFSLANPRDQIRLAITLALYDNYLKLPSNWKRADANSDILNYNGPKNVCSEGGRQLQEEGNGDEWQLYLDQKSLAVLS

SEQ ID NO: 139165 - protein, 46 aa, Oryza sativa
  Clone ID: PAT_MRT4530_40484C.1.pep
MARDVFGAASFLGDVFYMFGLFDEAFAFVVLVLACGRWLAHFIGLC

SEQ ID NO: 139166 - protein, 477 aa, Oryza sativa
  Clone ID: PAT_MRT4530_40485C.1.pep
MLLACQAHFPSLHPPPCDAAAGQCAAVSGRNLSLLRLGLYVIPLGEGALRVCGAALGGDQFDGGEVGGDDPAAAAAAEARGKASFFNWFAFCISLGGLVGLVLVVWVQNNEGWDLGFALAALMALVAMAVVLAGLPFYRHRVPTGSPLTRILQVFVAAFRKRNVTMPESLVEMQECSDGSTIELLDKTPDFKFLDKAAVDDGDRRRWSACTVTQVEEAKIILRMLPVFLTSVLGYVPIPLLLTFTVQQGGAMDTRLAGTSVPPASLFVVPIVFQMLILVAYDRAAVPWLRRATGYAAGVTHLQRVGLGFASSAAALALAAAVESRRRRCLGVAAPAMSVFWLTPQFFLLGVMDVTSFVGLLEFFYSEASAGMKSIGGAVFFCILGVASWLGGALIQAVNRATAGGAGHGGWLDGADLDASHLDRFYWLLAVFELVAFFLYLYSAWRYTYRHHPRVQPSMEDAKVSATATTTTKKAEV

SEQ ID NO: 139167 - protein, 616 aa, Oryza sativa
  Clone ID: PAT_MRT4530_40486C.1.pep
MEAVILAVSKIGSVLVEEATKAAIAKLSEKVANLKELPTKVDEIKKELETMNNVIKKMSTTHPIDEVVKGWIVEVRGLAHHVQDVMDKYSYHALMLEEESSMKKVFTKKKYVTVFSDIAEEIIQIEKKIENAGKRKERWLQQPDLIPNPLTYIERKQFQDCLLAQDYLVGIEGNRKLLTEWLYSSEQGNTVITVSGMGGLGKTALVNNVYEYEREKNNFDAFSWIVVSQTYNGVDLLRKLLRKIGVVETTPTIGYPEQTNLSDLDPRDLKNIIKERLKDRKFLVVLDDVWNREAYTLIEDAFLSCQTSRIIITTRQDDVATLAYPTHRLKLKPLEHNDAFDLFCKKTFYNSMHSKCPQDLEKLAHNIVDSKRGEIWLSNDYGTMIEMERDVRRLSSCGWENNDVLKLKFPRLRTLVSLRAMSPSTYMLSSILSESNYLTVLELQDSEITEVPESIGNLFNLRYIGLRSTKVKTLPQSVEKLSNLHTLDIKQTKIEKLPKGIAKVKKLRHLIADRYADETQSTFQYFVGMQAPKNLSNMEELQTLETMQASKDLAEHLSKLLKLRRVWIDNISYSDCAKLFATLSNMQLLSSLLISARNENEALCFEELRPKSKELH

SEQ ID NO: 139168 - protein, 119 aa, Oryza sativa
  unsure (1)..(119): unsure at all Xaa locations
  Clone ID: PAT_MRT4530_40487C.1.pep
MTVVLRRETAATEGWPRFFSSSRTRWWQRQPKAAAATAVRRGWTDVDGGELRVDGVGGAPVICGGNGGRDEDGGDLAILMKETATDGDDRSDGGXDWTPAGGSDAKNHAKATLEKELSS

SEQ ID NO: 139169 - protein, 192 aa, Oryza sativa
  unsure (1)..(192): unsure at all Xaa locations
  Clone ID: PAT_MRT4530_40488C.1.pep
ALSSAFSLLSLPSXSSPAAAAAAAPXSFAVSSRARXRRAVAVVASTXTESXKVLELGDAIAGLXLXXARGLXDXLHXRLXVSAAAFAPAAVFSAPGXGGAGXSSXXAPANNTXFDXVXEEVPXSXARXASFXVVRALTNLXLXEAKXLFKGPPQKXQGXXSPTAVSPKPFFPQFSICPFFRSPPFFIFFFPT

SEQ ID NO: 139170 - protein, 77 aa, Oryza sativa
  Clone ID: PAT_MRT4530_40489C.1.pep
NIKNYMKTKLKDIKTIKMGGASKGGEFSNVSMLTYTCLRRHTFSIVPPNLIQIARFTQPGCAKTLAYPTLNVSQDIP

SEQ ID NO: 139171 - protein, 358 aa, Oryza sativa
  Clone ID: PAT_MRT4530_4048C.1.pep
MAMGGMGMVKLQSVAAPPSPPSLQPCAAAVPDVVVAREDRRRGRQAVAVLVHRFATVGDRRSIIAVVKPKTAAVSTSSPSPSVGLPPSLWSPMPRYKPEYLFGVEGFVQELRTMSFAIGFGTAPFYAQIPHDRHEEKCRVKVTLNSNSEDIPSVMFEAGGRNYIHSCQEVARIAIGELRDRYSDQLADTEYRYHPRQPQGSDRGSYLETEGIENDATTRHLVEMLWAMDESRAETVLAAQDREDRNRGKICKLEDKVDRLEKELAALKGEAPPQKARIRLTARKRALFVPRYQLAPKVRVVEKEVAPALTDPPVIIISDDEEEESKRNHSKIEWVATQDDEDEPSIDLRCSEELECHV

SEQ ID NO: 139172 - protein, 447 aa, Oryza sativa
  Clone ID: PAT_MRT4530_40490C.1.pep
MGYNNGKGGGGGGGGLPMTAPRPRGASPLSSHGHHHRSRKIHRTFNKPTDADALAGAKAVEDIDRILREIRSDGGADDDAAAAGDLAGSFNATALNATEAAAAYASAVERYALGPKISDWDGQRRRWLRQNPGFPSTVAGGKPRILLVTGSQPGPCDNPLGDHYLLKTTKNKIDYCRLHGIEIVHNLAHLDTELAGYWAKLPLLRRLMLSHPEVEWIWWMDSDALFTDMAFELPLSRYQDRNLIIHGYQDLLFEKHSWIALNTGSFLFRNCQWSLDLLDAWAPMGPKGFIGDEAGKILTANLKGRPAFEADDQSALIYLSLSQKEKWMNKVFIENSYYLHGFWAGLVDKYEEMMENHHPGLGDERWPFVTHFVGCKPCGSYGDYPVERCLRSMERAFNFADNQVLRLYGFAHKGLESPKIKRVRNQTTKPIDDKENLDVKAKISTTS

SEQ ID NO: 139173 - protein, 123 aa, Oryza sativa
  Clone ID: PAT_MRT4530_40491C.1.pep
ILRERWWCPWLLSGDAPRGRGAVIGSPPPPPPPPLPLLYPIPSCPIPPPPLAASDLSAAREGSGRLANRGRGDREGECEWLTHITWARRWRGRGEAVRIDDGIGEVGWDLEERRRRGVPPRAE

SEQ ID NO: 139174 - protein, 77 aa, Oryza sativa
  Clone ID: PAT_MRT4530_40492C.1.pep
FFFFFFFFFFFFFLFFFFFFFFFFILFYIVKIYLYMCQFNCANSGGKTRFVNLKRAKRYTNGAKKTSKDSKPSGENP

SEQ ID NO: 139175 - protein, 216 aa, Oryza sativa
  unsure (1)..(216): unsure at all Xaa locations
  Clone ID: PAT_MRT4530_40493C.1.pep
SRGASPLSSHGHHHRSRKIHRTFNNVKITVLCGLVTILVLRGTIGLNLSLPNQPTDADALAGAKAVEDIDRILREIRSDGGADDDDAAAAGDLAGSFNATALNATEAAAAYASAVERYALGPKISDWDGQRRRWLRQNSGFPSTVAGGKPRILLVTGSQPGPCDNPLGDHYLLKTTKNKIDYCRLHXFEIXHNLAHLDTELAGVXWAKLPLLRXLM

SEQ ID NO: 139176 - protein, 157 aa, Oryza sativa
  unsure (1)..(157): unsure at all Xaa locations
  Clone ID: PAT_MRT4530_40494C.1.pep
YFVILAATENQVPGGLVVTQFGVQLQAAERERELREDGGARNIQSKYTVGRVAILSCAESHTLPRATGTDRRPSGGEENKPNQTKPNREEEHDEVGCGRSLFPHDTARLEECGWRYLRXXXRARAGRGDDAGGHLILTISHLCSGTRHVTRCAAPPG

SEQ ID NO: 139177 - protein, 337 aa, Oryza sativa
  unsure (1)..(337): unsure at all Xaa locations
  Clone ID: PAT_MRT4530_40495C.1.pep
MAVTRGGGGGPGGGPRWTGSTDRGRSGTPRGAHVAPTRRTRGSHVAATRAAGLDGPDLPGRSDGGGSTWPARTGGSSRPGGQGARRRKAATGGDRPAAEGGGVAATRTATSAASRLGGGAAAKRRGRGGXGEEVSHRRRLATASDGGRXRQRDELWNHLANTKKGVREREEDGRGRGRRPKVAAMAELTGARCERGSRGVXGGGEEDGMALGLANPTAATVRXASGYRSGGGGYEGDSARAIEGTGELGEMEKKREGRAGMLKXGRGGSDVGGRRRGQRGQGGTGARGRRRLRDARQRLEVGGGPNXGPHLSATPGERRGGSDSRLDRGLRPAQRGG

SEQ ID NO: 139178 - protein, 69 aa, Oryza sativa
  Clone ID: PAT_MRT4530_40496C.1.pep
GQRRGGAFEDDVAEALRLCRTGRRRRCLHLPLGAHGEVSFSSNRLLPVAPAPRREISLLVIVIPLGEIA

SEQ ID NO: 139179 - protein, 278 aa, Oryza sativa
  Clone ID: PAT_MRT4530_40497C.1.pep
MAWQGHLPITTLRRKRGGKEERGGGGASLGDLTGAVDSFRPADEAGGSAVGQWWRWIGMLEEARGTGEEEVGLSACMNLKAYLMVQNSNDRSPFSSPDSLRVHATMPSFLHALALAGPSTACVHHSQAPTPASYDSVETEKGQRLAANRRAEAGARRGAPPAAERGRVERCCFAAAGRESTGCSSMPSSSQRPDSRAMFLDLFWTGNGLRMGSTHFLVFVLNRFGLSLLQMKNTEVKRPGKLAGRPSTMERQIEAELKGKIMGKILRNKWGINFCNQF

SEQ ID NO: 139180 - protein, 294 aa, Oryza sativa
  Clone ID: PAT_MRT4530_40498C.1.pep
MAWQGHLPITTLRRKRGGKEERGGGGASLGDLTGAVDSFRPADEAGGSAVGQWWRWIGMLEEARGTGEEEVGLSACMNLKAYLMVQNSNDRSPFSSPDSLRVHATMPSFLHALALAGPSTACVHHSQAPTPASYDSVETEKGQRLAANRRAEAGSDGGAPPAAERGRVERLLLRSGRARKHWLQQHGSWLFGEHSISSSQREPSSSQRPDSRAMFLDLFWTGNGLRMGSTHFLVFVLNRFGLSLLQMKNTEVKRPGKLAGRPSTMERQIEAELKGKIMGKILRNKWGINFCNQF

SEQ ID NO: 139181 - protein, 122 aa, Oryza sativa
  Clone ID: PAT_MRT4530_40499C.1.pep
RYSAQIALKANLCINEFNMWGYNEKKNWSNNCLGHWWWTDLNHNRVFLLSRTKIRLAIPGPRPFYFGWKFRSKGIKPPTSGARLGLLWPTGEGILAPCDLFLEAEGHLPVNFKKWGAFKGLN

SEQ ID NO: 139182 - protein, 722 aa, Oryza sativa
  Clone ID: PAT_MRT4530_4049C.1.pep
MGTERKRKVSLFDVVDETSVSAKLGRAATTNGSAAAAAANPSINRWTGRPYSARYLEILEKRRTLPVWQQKDDFLAVLRDNQTLILVGETGSGKTTQIPQFVLEAEGLSNRSMVACTQPRRVAAMSVSRRVAEEMDVTIGEEVGYSIRFEDCSSHKTVLKYLTDGMLLREAMADPLLERYKVIVLDEAHERTLATDVLFGLLKEVLKNRPDLKLVVMSATLEAEKFQTYFSGAPLMKVPGRLHPVEIFYTQEPERDYLEAAIRTVVQIHMCEPAGDILVFLTGEEEIEDACRKINKEINNMGDQVGPVKVVPLYSTLPPAMQQKIFEPAPAPSREGGPAGRKIVVSTNIAETSLTIDGIVYVIDPGFSKQKVYNPRIRVESLLVSPISKASAHQRAGRAGRTQPGKCFRLYTEKSFNDDLQPQTYPEILRSNLANTVLTLKKLGIDDLVHFDFMDPPAPETLMRALEVLNYLGALDDDGNLTPLGETMSEFPLDPQMSKMLVISPKYNCSNEILSISAMLSVPNCFLRPREAQKAADEAKARFGHIDGDHLTLLNVYHAYKQNNEDPQWCYENFINARALKSADNVRQQLVRIMTRFNLKMCSTDFNSREYYVNIRKAMLAGYFMQVAHLERTGHYLTVKDNQVVHLHPSNCLDHKPEWVIYNEYVLTTRNFIRTVMDIRGDWLIDVAPHYYDLSNFPSCEAKRVLERLYNKRERERAANRN

SEQ ID NO: 139183 - protein, 109 aa, Oryza sativa
  Clone ID: PAT_MRT4530_404C.1.pep
MRREKKKQQQQQQHSSRADDASTPVLRGTGIGGSGGGAPRGCRGSSSTQQGWGRGAAGSGTERSAQAARGAREEEERKGRWTRKAGKLGEMAIHGLFYSPTNPNSERNV

SEQ ID NO: 139184 - protein, 73 aa, Oryza sativa
  Clone ID: PAT_MRT4530_40500C.1.pep
KIYMGPKKFFYISRGGPPLWVFPGKNFMAPKPTGGGGFFFKKIFSRFPLRENGGLNWGKIKIGGGGQRGLVAG

SEQ ID NO: 139185 - protein, 59 aa, Oryza sativa
  Clone ID: PAT_MRT4530_40501C.1.pep
PSECKKASFLPWASRGVSELKASTHLLQGPPRSRLLVDAVATVCKSHGASLVISWPRWR

SEQ ID NO: 139186 - protein, 120 aa, Oryza sativa
  Clone ID: PAT_MRT4530_40502C.1.pep
MACPVVVLLPLQLYTGIDILYLRTHRATYPSTARRCGDFVNLKICRPSLPEGGDFVNLKICRPSLPEGGDFVNLKICRLSLPEGGDFVNLKICSIYAGSVYFVNLKICSIYAGSVFRRCS

SEQ ID NO: 139187 - protein, 873 aa, Oryza sativa
  Clone ID: PAT_MRT4530_40503C.1.pep
MSAAAAASNVEFIRSRSDKREYRRVVLPNALECLLISDSDTDKAAACMEVGVGSFSDPEGLEGLAHFLEHMLFYASEKYPGENDYSKYMIEHGGYCDAYTYSETTTFFFYVNAANFEEALDRFAQFFIKPLMSQDAVLREIKAVDSEHKKNLLSDSWRMYQLQKHLASKDHPYHKFNIESLDCIQSFVEHMFSDIKNTDQRSFKCPSQPLSEEHMQLVIKAIPISEGDYLNISWPVTPNIHFYKEEHMEDIIGLVFKYILLLKENGIHEWIYDELVAINETEFHYQDKVHPISYVTDIVTTMRSFPPEEWLVGASLPSKYAPNRINMILDELSAERVRILWESKKFEGTTDSVEPWYCTAYSVENVTPSMIQQWIQKAPTEKLCIPKPNIFIPKDFSLKEAHEKVKFPAILRKTPLSRLWYMPDMLFSTPKVHIVIDFHCPLTSHSPEAVISTSLFVDLLADYLNAYAYDAQIAGLFYSIYRTSAGFQVSVGGYNDKMRILLDAIMKHISNFEVKPNRFCALKETAVKDYQNFKFSQPYYQASNYLSLILEDQKWPWVEKLEALSKLEPDSLAKFIPHLLSKTFLECYIHGNIEPNEATSIVQEIEDTIFNTPKSVFKSMSPSQYLIRRVITLENELKCYHQIEGLNQKNENSSVVQHIQVHLDDALSNIKLQLFALIARQPAANQLRTIEQLGYIADLYVRSDRGVRALEIVIQSTVKDPSYLDARVDEFFKMFENKIHELSDKDFKRYVKSLIDSKLEKSKNLWEESDFYWAEIEAGTLQFDRGRSEVSLLRELKKEEFIEFFDQYIRIGAPQRKTLSVQVFGGKHLAEFKKAIAEADAPKTYRITDIFGFKRSRPLYRSLKGGPGRITMD

SEQ ID NO: 139188 - protein, 78 aa, Oryza sativa
  unsure (1)..(78): unsure at all Xaa locations
  Clone ID: PAT_MRT4530_40504C.1.pep
MSPYCGKYKDELIKNAAYIGTPAQGILAAHESTATIGKRFAXLLSENVEENRLSLRELLSCTPGALQYLSGVILCQET

SEQ ID NO: 139189 - protein, 71 aa, Oryza sativa
  unsure (1)..(71): unsure at all Xaa locations
  Clone ID: PAT_MRT4530_40505C.1.pep
DILNFTLLQIKCIGRXLCXTSIGRQRYMIPLVLVLSLIFPIWLTRXGLRXSDSWGGRDIYRPSSIVQKKKK

SEQ ID NO: 139190 - protein, 64 aa, Oryza sativa
  unsure (1)..(64): unsure at all Xaa locations
  Clone ID: PAT_MRT4530_40506C.1.pep
ANAVVSHLARKNSVLRTLPVDVVANADRISREQGLSLXSYGEEEHGAFTPRCLRPHDPALSNES

SEQ ID NO: 139191 - protein, 52 aa, Oryza sativa
  Clone ID: PAT_MRT4530_40507C.1.pep
MSKHGGKAMPLMGPNAEKNEYDESDLGYLPKKKDEEKALTELKATAGQKGAL

SEQ ID NO: 139192 - protein, 109 aa, Oryza sativa
  unsure (1)..(109): unsure at all Xaa locations
  Clone ID: PAT_MRT4530_40508C.1.pep
TRSGGLCIALCGPAHRVIGGECRCXVLTAAGTVQVIVGSFMYGGTKKNKAKAEQETENNEEPIGGEEETPTMALPDHNMPHHTMGGWSAGLMRQMDSRTPNIDINSIRE

SEQ ID NO: 139193 - protein, 93 aa, Oryza sativa
  unsure (1)..(93): unsure at all Xaa locations
  Clone ID: PAT_MRT4530_40509C.1.pep
LHPPPLPLRRAGHGRRXXAXPPPPPGRXPSRPDPPVPPLXLPPLPLAXSXPGTLRGLXVXVRWRGXRRHRNGASGGRGRRLPLAARAVXADEA

SEQ ID NO: 139194 - protein, 197 aa, Oryza sativa
  unsure (1)..(197): unsure at all Xaa locations
  Clone ID: PAT_MRT4530_4050C.1.pep
YLFDPRASLFRFRRSPLALAVGFVLAPCSSLSAVAAELRSAAAAAPDFLLTRRHLRPLRRVAADSVRASSSPEHRRSTVALVIPSRAAVFFRFGRRSRRRRXTGVSRRPXVRFPLPSSLSGATPPRRWSPAATIGARVRXSSRRPCRRGRLRXRPRGCQVGPAVSRPRPRVRLTRGTHGADRRQPRAPGPPWTERFH

SEQ ID NO: 139195 - protein, 53 aa, Oryza sativa
  Clone ID: PAT_MRT4530_40510C.1.pep
HCFQAAPELSRKDQQMKHVGHELPYLNPTNKPRIGGDANQNLKASEAHCCQCE

SEQ ID NO: 139196 - protein, 81 aa, Oryza sativa
  Clone ID: PAT_MRT4530_40511C.1.pep
QRQENTLRDLFSADGVSSFRLTISKPQIVSLLADQYSQFAMSFEHLPRVSGRCSLTGDHCHPKKVVVGTLVTLVVSCRSWL

SEQ ID NO: 139197 - protein, 89 aa, Oryza sativa
  Clone ID: PAT_MRT4530_40512C.1.pep
MAAAEAAAAVGKQQQKGGGGRGGGGGGPAPFLTKTNQMVEESATDEVISWGKEGRSFVVWKPVEFARDLLPLHFKHCNFSSFVRQLNTY

SEQ ID NO: 139198 - protein, 130 aa, Oryza sativa
  Clone ID: PAT_MRT4530_40513C.1.pep
MACIGSYSEAMLMPKIRTSKRRVLMLLVAVMYFCPNPYYKYLVTGEKNKKIIMDLTLISRAHQLVMEGFNWCQDKNVVTVFSAPNYCYRCGNMAAILEIGENMDQNFLQFDPAPRQIEPDTTRKTPDYFL

SEQ ID NO: 139199 - protein, 276 aa, Oryza sativa
  Clone ID: PAT_MRT4530_40514C.1.pep
MSQEQPRRPSEKAAGGGGGEQGIRYGDVFPVTGSLAAKPIAPRDAATMQSAENLVLGKTVKGGPAAAMESAASRNEEMGVVGHDQATDAAAEQGVNVSDTLVPGGGRIVTEFVAGQAVGHYVEQDDGAAVVAGVVGAAPGAVRVEEPAKITIGEALEAAALAAGGTPVERSDAAAIQAAEAKATGTDTYMPGGLAAQAQSAAVANLWTARDADKTKLGDVLSNATAKLAADKEVESGDAARVAGAEMRNKPGAAARPGGVAASMAAAARLNRGPTT

SEQ ID NO: 139200 - protein, 124 aa, Oryza sativa
  unsure (1)..(124): unsure at all Xaa locations
  Clone ID: PAT_MRT4530_40515C.1.pep
TPKGSLSSWIHCLGFPLFRQKLVRPIPYQXELTKGGYRGLVYTGAPALDMAFVGPHQWFRTLGSNVVPAWSPWSSPRQVAGFPPVLDPNLPLAPVKGGGPPAPGSRPKECLDMLDNWPSPAGEL

SEQ ID NO: 139201 - protein, 117 aa, Oryza sativa
  unsure (1)..(117): unsure at all Xaa locations
  Clone ID: PAT_MRT4530_40516C.1.pep
VNGCERLRSWKFPDNLAAHQNGQSCLWMLVTANLWIMCISSTQKKVLMPGFSASEMDYIDNDGKFLLSNGYVXGVGFATVSVSDSTLYVLAVVHLPTTSIVWCDNANSAFSHSGNYV

SEQ ID NO: 139202 - protein, 44 aa, Oryza sativa
  unsure (1)..(44): unsure at all Xaa locations
  Clone ID: PAT_MRT4530_40517C.1.pep
RLRRLFRNKGNVKIFPWPPXKGQQDGMFKPPPHGFQWGNIDKKF

SEQ ID NO: 139203 - protein, 126 aa, Oryza sativa
  Clone ID: PAT_MRT4530_40518C.1.pep
MKDGEVGGSELAPHLPLLPDPLEVGGLLLHLSSLLSSPGDISHVAGHRIVAAASRIWLLLAPLLKEATVTTGEKVVVAMIEEVATSERKPRRRLSLLHSRPQCLIASRITWWLWLDLLSLLMDLLA

SEQ ID NO: 139204 - protein, 510 aa, Oryza sativa
  Clone ID: PAT_MRT4530_40519C.1.pep
METFLSVILSDLASRSISLLINKCSKPTLPSVEERLQRLLLRVRIIVEEAEGRLITNQAMLQQLNMLRKEMYRGYYTLGNFICHGHEEDNAKDHEVSNYFKPSKLNPAKRIRYLWDGGQTLQDQLQQVLGRLQVTLEDMREFVIFLNFCPRLCRQPYSMHLLIDKCLFGRQMEMEHIMNFLLKEDTPGAENPGVLPIIGPGKVGKTTLIAHACDDERVRNHFSQIVCFSEDDLEDASMETLRDSGVIKHQNNATGGKMILIIIELTRDIDEGVWRRLYSVCKCCVANGSKIIVSSRSNKIACFGTTQALRVKFFTQEAYWYFFKLRAFGSMDAEEHPKLESIAMEIAREWNGCFMSSGIYNELLKANFNTRFWSTVLTRIREFRKLNISLYANFDGPWEVVESAYVRRVNGISSEYILILHDYQTCSVPNMLHRCTNSAQSEVEVPQLSFEDFQFGNVRPQGKFKVLGWRSHLPPYHDYMFSCEVLKSQHIVARNKRPRELCGRDFGLGA

SEQ ID NO: 139205 - protein, 91 aa, Oryza sativa
  unsure (1)..(91): unsure at all Xaa locations
  Clone ID: PAT_MRT4530_4051C.1.pep
LHIAYPTIICTASLALYALCFWSSHMPHHLHNVVKIEAHRNTTSNLIYYPTPELPSXCSYSATSVITRLPFQLPISSSXLPSCTLLVLXIA

SEQ ID NO: 139206 - protein, 71 aa, Oryza sativa
  Clone ID: PAT_MRT4530_40520C.1.pep
MLVQTVTADGIGVDACNANNLSANKIAKIDPAAHHWGGKLTWQTVGRPRRLPPSAKIAIRPLPPIQRAARG

SEQ ID NO: 139207 - protein, 206 aa, Oryza sativa
  Clone ID: PAT_MRT4530_40521C.1.pep
MGPCVIVSLPSNLLIPLTPLCISLGSEAVKEPRALAEAENEPRAGGCKPAQRGPACQAHWSCLVLPCSWKRQLALDWREEDGKRQPQSDFHGRIATLPIRKRQLATSMESRPALQPAAHPVLAAVDDEYANVLGAHACLVQKTAPNMMASASIEPHLCHARVRWLDEHGDEAMLRRARLNTATTSEGGPRAAALQSEVATKWQPEA

SEQ ID NO: 139208 - protein, 518 aa, Oryza sativa
  Clone ID: PAT_MRT4530_40522C.1.pep
MVKAYIAIFSIAVLLLIHFLFRRRGRSNGMPLPPSPPAIPFFGHLHLIDKPFHAALSRLAERHGPVFSLRLGSRNAVVVSSPECARECFTDNDVCFANRPRFPSQMLATFNGTSLGSANYGPHWRNLRRIATVHLLSSHRVSGMSGIISGQARHMVRRMYRAATASAAGVARVQLNRRLFELSLSVLMEAIAQSKTTRREAPDADTDMSMEAQELRHVLDELNPLIGAANLWDYLPALRWFDVFGVKRKIVAAVNRRNAFMRRLIDAERQRMDNNDVDGGDDGEKKSMISVLLTLQKTQPEVYTDTLIMTLCAPLFGAGTETTSTTIEWAMSLLLNHPEILKKAQAEIDMSVGNSRLISVVDVHRLGYLQCIINETLRMYPAAPLLLPHESSADCKVGGYHIPSGAMLLVNVAAIQRDPVIWKEPSEFKPERFENGRFEGLFMIPFGMGRRRCPGEMLALQTIGLVLGTMIQCFDWGRVDDAMVDMTQSNGLTSLKVIPLEAMCKPREAMCDVLRKFM

SEQ ID NO: 139209 - protein, 82 aa, Oryza sativa
  Clone ID: PAT_MRT4530_40523C.1.pep
SVFLEFMLIISSEVHFQLMRCSVWLCWVQHLSTEKKMISSSECIIFRVSVSRYQVTVRNHQSYSGHFTEVKIVSGLGSKLVP

SEQ ID NO: 139210 - protein, 149 aa, Oryza sativa
  Clone ID: PAT_MRT4530_40524C.1.pep
MSFLVVVYVATSAGSLFCRLMSSIASPEAAAARRRSGGLNDAVTCAVFAVLTAASQAFIACFVEEAVGPAPPATTTREERCAAWAVGVLTGVVTSLCISSYFFTYIAAGGVAPTSLQWTIAAVFSDANFVFVTPTIMRFIGRFNSARDD

SEQ ID NO: 139211 - protein, 245 aa, Oryza sativa
  Clone ID: PAT_MRT4530_40525C.1.pep
MPERSELGRQLPLRGPLKALEADIHHANTMANAIQRNYGGACVQMRLSCSSLAPFFLYLIQWLDCGCCYALSSYLGLFHILICKGYADGDSSVSTYERRASLREFYALNNLCLPAIIYPILQQLEGSLIERDLKGKGRCKDIVSRKRLEDWRKLCNKDVEREDECGICMETCTKMVLPNCSHAMCIKCYRDWYRRSESCPFCRGSLKRIRSRDLWVLTNYNDVVDPVTLERENVKFIVLLMVSLL

SEQ ID NO: 139212 - protein, 107 aa, Oryza sativa
  Clone ID: PAT_MRT4530_40526C.1.pep
TKKEPGSLIEESTFQDPNAYGQKQAYKYFSKSTKHKIQYVHLVNEQFAEISDKINKTDIFEFGFLNNSRCHVLELHKDMNEIPIYLSRHDHQVLAPLPSLTDWSLAF

SEQ ID NO: 139213 - protein, 109 aa, Oryza sativa
  Clone ID: PAT_MRT4530_40527C.1.pep
PGSVNSGFFSHGDTALFFPLMDSLLGQDPYLVFADFQAYVDCQNQVGEAYKDQENWARMAILNVARMGKFSSDRTIREYAEDIWAIKPVVIELEDLCPDGQCLLISPNK

SEQ ID NO: 139214 - protein, 98 aa, Oryza sativa
  unsure (1)..(98): unsure at all Xaa locations
  Clone ID: PAT_MRT4530_40528C.1.pep
KIRTRSGKEFSNDPKFIKYGESGIVKIFPAKSMVVRTFXSVPPYSVRFSLRYMKQTVAVGFFKNLGKKGPACPRRPRLPPTTKDPRSRGAFHQGKSEI

SEQ ID NO: 139215 - protein, 130 aa, Oryza sativa
  unsure (1)..(130): unsure at all Xaa locations
  Clone ID: PAT_MRT4530_40529C.1.pep
LYCVTDLLPFGGKVYVLGGNNLHMNMHIIINMDQVAIHVTNPCCELYTIYHTIHAEGQMIPNIIDELDHHHLIYILIMTGINXHVPRVDKGKGLYFLIDKAETNTYRGLSDSAELTSYYKSDHFKNRPGD

SEQ ID NO: 139216 - protein, 108 aa, Oryza sativa
  unsure (1)..(108): unsure at all Xaa locations
  Clone ID: PAT_MRT4530_4052C.1.pep
GLVSTHGYXNMYTRGHYKLSXRSIKLLSMHRHPLSRGFYLHDXTWHLMRGYIGFRSPAKGQVLRSASRSNCIGYIGVVQGCIASTSWIILVRLIFLPTYLSYILVDLV

SEQ ID NO: 139217 - protein, 76 aa, Oryza sativa
  unsure (1)..(76): unsure at all Xaa locations
  Clone ID: PAT_MRT4530_40530C.1.pep
FFFFFFGGDNPKPRLPTXNYYSLDSFTPPDRRHRLKYYARDTLNPTTSRHLDPRYTNLTIHILXTLYPXTDTHAWA

SEQ ID NO: 139218 - protein, 176 aa, Oryza sativa
  Clone ID: PAT_MRT4530_40531C.1.pep
MRGFRLEPLQPCFEACCPLAQKPPHRQWQHEVSTPPHWHPSADRLSHMLLHPAATPGSWPRPLLSRHLPAPSPILAKGEPATGRRRADGLSSTGEAAPLPGSPWLRLHHTIPRPPRRRHRAVALPPCLGCCCRIGQIWALDPTSEALDPPPSHAAPPSPPPTLRSTRGRGCSGAGG

SEQ ID NO: 139219 - protein, 141 aa, Oryza sativa
  Clone ID: PAT_MRT4530_40532C.1.pep
MELTSTMTSSPKVAQDPMIASDLGHGDANRGHQNEGSSLRGGKTKDGDGKRPASRLEWRRGTDRRWRWRFGNGRRQPRGGRPSPRSCKPKGGGDETWRQWEVQQGLAGDQNTTTNFGLTATMVPWWIYVAMKGRTGCSSFL

SEQ ID NO: 139220 - protein, 366 aa, Oryza sativa
  unsure (1)..(366): unsure at all Xaa locations
  Clone ID: PAT_MRT4530_40533C.1.pep
MRGRSSPGXDNTTKDETLKTMPQRRSRHQGCCHRHRPSKXMWFSPRXNSPRRRGILNSAPRGVATPKXVAVAGPMNHHARLSPGAPTTLLXEAAATPGSWPRPLLSRHLPAPSPILAKGEPATGRRRRVRVPISNEENNPPPPAPFALPPLPCTFALPPHRQWRQXAGATTTAAAASGRHATATALPPSPPQPHLHRGGRSTAGESLAAPPPHHPQAATPSPSCRRAAAMPGLLLPHWPDLGAXDPTSEALDPPPSHAAPPSPPPTLVGLQAXLASPLASFGGGEVKERAGLQRRGRLGFCPPSHPCESDTGGRGLFAIHTFLCIFPRMWHSRFVPSMHCASHRPLPSIRATCAYSCPSSLNTSSR

SEQ ID NO: 139221 - protein, 44 aa, Oryza sativa
  unsure (1)..(44): unsure at all Xaa locations
  Clone ID: PAT_MRT4530_40534C.1.pep
RWCKPRYDVYICSSKARTLQLQLQQCMYVCXLIVCVCVTDRGDF

SEQ ID NO: 139222 - protein, 781 aa, Oryza sativa
  Clone ID: PAT_MRT4530_40535C.1.pep
MERFYKPKRKAQDMIDGNGTSCPEEINWDEEIKYDPGLRKEIDAYHPNHREKVRRKYLENGPCQPRTFDFPITQLGGKEKPRRFNPEWFDEFSWLEYSKEKDRAYCFYCFLFREKKDPGYDAFVVNGWNGYHRKERLRSHVGEVGGLHYNAMKKCDALRNRKQHIDVAYNQISEVAKKAYFIRLNGSIDTARVLLKQGLPFRGHDESKESYNRGNFKEFYDCLAEHDPILHKAVTTNAAKNSCLYAPEIQRDIAECFANEIVQSILDDLGDDFFCLLVDESRDVSCKEQMAVVLRYVDKFGMVKESFVGLVHVTETSSAHLKSAIDSLLAKFKLSLKQCRGQGYDGASNMRGEFNGLQSLIMRDSKSAYYVHCFAHQLQLVIVATVRKHKGVSNFLNMISILLNVVGGSAKRRDMIRDINHEQVQQALGCGQLETGTGLNQEQCLQRPGDTRWSSHYKTLKSLLNMFPTIVQVLKVVEKDDRDWKNRDQASNLLVYFQSFDFVFYLHLMLTTLAATNTLSQALQRKDQDIVNAIGCLKSTKLHLDDLRTNGWEKLLDDVNQFCDLYEIDMMEMESTYVDPRQPRKKSGITNKHHYAVDCFNDVIDWLVQELDSRFSETTTQLLVCSAAFNPRDSFHAFDGETFMSLAKLYPDDFNNDDLRDLRHDLRLYIGDVREDNEFSNINTIAELSQKMVQTGKHQVYRLVYRLLKLVLVLPVATATVERCFSGMKIVKTSLANRMGDQQLSHRLICYIEKEEMKKVSNEAVVHRFMTMEGKGRKYDL

SEQ ID NO: 139223 - protein, 78 aa, Oryza sativa
  unsure (1)..(78): unsure at all Xaa locations
  Clone ID: PAT_MRT4530_40536C.1.pep
GPVEGHLIRRGMIGKVTYPVYHGGSFDPXALGSTGRTSFNRKXYENKNGLLHMVSMFGFFGLGMEIGXGPVENLADHL

SEQ ID NO: 139224 - protein, 42 aa, Oryza sativa
  Clone ID: PAT_MRT4530_40537C.1.pep
AATAEESALLVIIPPKLGLASFLQKKWVNRPFRSRSRPRGRP

SEQ ID NO: 139225 - protein, 143 aa, Oryza sativa
  Clone ID: PAT_MRT4530_40538C.1.pep
MADLVSSCKDKLAYFRIKELKDILNQLGLPKQGKKQDLIDRVLALLTDEQGQRHHGWGRKNSLTKEAVAKIVDDTYRKMQIQCAPDLATRSHSGSDFSFRPIEEAYDSFPPEAKVRCICSSTMVNDSMIQCEDQRCQVWQHLK

SEQ ID NO: 139226 - protein, 134 aa, Oryza sativa
  unsure (1)..(134): unsure at all Xaa locations
  Clone ID: PAT_MRT4530_40539C.1.pep
SSQFINNMWAIDLRTVQFXVSRQAQLELQFLMDTLADHQLQHERPDERAFILTSAGTTTAAAYNLHTYHLLIPVPXSQTWDKPIPNTCIIFMWLVFSDRLNTNGNRVHKQRASDPHCSFCLGNWTCRSIQASNN

SEQ ID NO: 139227 - protein, 77 aa, Oryza sativa
  Clone ID: PAT_MRT4530_4053C.1.pep
MQMLMSVFVIIIGCYTAIGWITDIVIFIMSVAFWGPSSSLLADLIAADWFLRLCGCATSSLLIGITIFPTTNIFATS

SEQ ID NO: 139228 - protein, 355 aa, Oryza sativa
  unsure (1)..(355): unsure at all Xaa locations
  Clone ID: PAT_MRT4530_40540C.1.pep
SALPNLSSTAPPLHPLPPPRHHLLRADHSLPTRSGRLDLNLKMRGQILIXGRSQKLAFGTSAYVTQDNVLMTTLTVREAIYYSAQIQLPDTMSTAEKLARGDDTVREMGLTGALDIRIGGRSSKGISGGQQKRLSICLDILTCPRLLFLDEPTSGLDSAASFHVMSRITSLAAREGMTIVAVVHQPCSEVFELFHGLCLLASGSTIFFGPASTAAEESEEGLPCMPEEEAIDILVNSYKSSNTSEVANQEMRYVNEDRAMIGRNRPGFVTKTLVLTRCSFVNMYRDIGYYWLRLAIYVCITVCLGTIFYHVGYGPDSIQARSHMLMFIATLLTFMAIGGFPSFVEDMKRTPSEYN

SEQ ID NO: 139229 - protein, 964 aa, Oryza sativa
  Clone ID: PAT_MRT4530_40541C.1.pep
MLPQQLQIYLCFILLSLKFGISASLPLETDALLDIKSHLEDPQNYLGNWDESHSPCQFYGVTCDQTSGGVIGISLSNASLSGTISSSFSLLSQLRTLELGANSISGTIPAALANCTNLQVLNLSTNSLTGQLPDLSTFINLQVLDLSTNNFSGPFPAWVGKLSGLTELGLGENNFNEGDVPESIGKLKNLTWLFLGQCNLRGELPVSIFDLVSLGTLDFSRNQIIGVFPIAISNLRNLWKIELYQNNLTGEIPPELAHLTLLSEFDVSQNQLSGILPKEIANLKKLKIFHIYRNNFSGVLPEGLGDLEFLESFSTYENQFSGKFPANLGRFSPLNAIDISENYFSGEFPRFLCQNNKLQFLLALDNNFSGEFPSSYSSCKTLQRFRISQNQFTGRIHSGIWGLPNAVIIDVANNKFVGGISSDIGISASLNQLYVHNNVFSGELPMELGKLSLLQKLVAFNNRFSGQIPAQIGSLKQLSFLHLEQNALEGSIPPDIGMCNSLVDLNLADNSLTGTIPDTLASLFTLNSLNLSHNMISGEIPEGLQYLKLSYVDFSHNNLSGPVPPALLMIAGDDAFSENDGLCIAGVSEGWRQNATNLRYCPWNDNHQNFSQRRLFVVLIIVTSLVVLLSGLACLRYENYKLEQFHSKGDIESGDDSDSKWVLESFHPPELDPEEICNLDVDNLIGCGGTGKVYRLELSKGRGVVAVKQLWKRDDAKVMRTEINTLGKIRHRNILKLHAFLTGGESNFLVYEYVVNGNLYDAIRREFKAGQPELDWEKRYRIAVGTAKGIMYLHHDCSPAIIHRDIKSTNILLDEEYEAKLADFGIAKLVEGSPLSCFAGTHGYMAPELAYSLKVTEKSDVYSFGIVLLELLTGRSPSDQQFDGELDIVSWVSSHLANQNPAAVLDPKVSSHASEDMTKVLNIAILCTVQLPSERPTMREVVKMLIDIDSISANGKAKNKNDKK

SEQ ID NO: 139230 - protein, 1055 aa, Oryza sativa
  unsure (1)..(1055): unsure at all Xaa locations
  Clone ID: PAT_MRT4530_40542C.1.pep
MATSDDKAGVKEIPRSDISKRELLFHVFQEPAVIGSACVLLESAASVHSWCPLHPSLRQEAKFKQKTNKFWEYQEQSNTWVEISMPFNLMSCINDTCTKVGSIEQPERRHGRASISSQEEKDAEIDDNDQADRNDPVLPIRKRISLTRMSESSVWVTGQSGSIYERFWNGLAWVIAPHELPISVGYATATFIVNTTILALSEAGILYQLQLNEHAQPIWTEVIFNFEQQFIVLGEKTQSQAMHIRNGIVSYDGRKLFLSITNGSLVEVTELQPLRWTYHGHPPGGDVSYISDAGNARPGTVFTVSSTGDLYEFDRESRPSWKKHIWSEETAENVSLSSSVGCALHGLLGSNSVSLFLITKDGLLVERRLHRRKWKWYKHGAPKSQRLSSITEVQQDESNDATSMYFTTTTGKVFEYQFPKYTGGAQSNKIRGLWVNHMSPENTKVARNVRGVQVQVGRVIFPLDDGRLGELHLPGMGGDDFGPSQHYSMRRKVPNKYEWSILDAPETEGWNAEYCTEEHGPTNCITGAKNVAADTKSNDLGNIPPSRWRKEDKQQYLYVNTHERDEIESYNFLSRSIDINFHMRVMHADRSLFLITDNGLTFEYLNNNGVWLWLRHEHTTSMKGTVGSYNGSLYLVDVHGNLHIRERNGDDLLWINCTAMRKGRQVASGSPWDGIPGLPRRVTTDDALFFVNKRGRLLQFTVALRKFKWKDCQSPPDTKIAFIVDQEVFRRNVIFAVGRNGRLYQYNRITELWHKHYQSPHLVLSRSPGTAMRPSHLSLAGSIFMVSEHGGLVEYHFSPQDGWEWVEHGTPHRDVAIVGAPGPCFDGSQLFIIGSDGDVYRRHLENWTWRWTSHGHPSAPSAVAMNAAGGDKSCATLGSAADAHYADGFVGSCDEKVAAARPVPFSEDAVVFELRDGRLAELRRGADGCGGGWEWARIISTPASACMTSYWTAVATXSAARRRRRRRRRSGVAEIFGVPRHSGKRGTVKVYYTRVIDLVLVPNYCTSTLVLRPRLATFQLLTPTYFEQELFQIVQILHFWERSWQSYSTNLYYGG

SEQ ID NO: 139231 - protein, 80 aa, Oryza sativa
  Clone ID: PAT_MRT4530_40543C.1.pep
PAIGCGGRGGARLPKMGEANAARGEGRPRPRRGGSGRSSPAPPPPAPQPQRAADAAAASGMERKGGSGRPAAVIALVPPR

SEQ ID NO: 139232 - protein, 44 aa, Oryza sativa
  Clone ID: PAT_MRT4530_40544C.1.pep
MAKVAGEEINVVVVGERQLCTHGFAVLYVYGYLLRAQRIAVAAR

SEQ ID NO: 139233 - protein, 97 aa, Oryza sativa
  Clone ID: PAT_MRT4530_40545C.1.pep
LKDSLPDVPMAVAHGKKVSKNIQLAMEKFACGEVKILVCTHIIESGIDIPNANTMVVQYAELFGLAQLYQDRLGAIEEHTDLGQGFHVAQKDMGIRG

SEQ ID NO: 139234 - protein, 730 aa, Oryza sativa
  unsure (1)..(730): unsure at all Xaa locations
  Clone ID: PAT_MRT4530_40546C.1.pep
ILRLFSPPSLFSSVFFCCFVSLVFFVVVVGARRGAALGHTGGPAGSWRPGEYVVHKKVGVGKFVCISAEDGLDYVFIQYADAMAKLAVDQAARMLYRYNLPHEKQRPRNLSKLNDPSTWEKRRLKGKLAVQKMVVNLMELYLQRMRQKRPPYPKPVGMDQFTAEFPYEPTPDQNQAFIDVDKDLTERETPMDRLICGDVGFGKTEVAMRAIFIVISAGFQAMVLAPTVILAKQHYDVMSERFSNYPDIKVAMFSGAQTKEEKDELITKIRNGDLHIIVGTHAVLTERMAYNNLGLLVVDEEQKFGVQQKEKIASYKASIDVLTLSATPIPRTLYLALTGFRDASLMSTPPPERVAVRTYVSGFSKERALSAIKFELARGGQVFYVVPRIKAIDDVLQFLKDSLPDVPMAVAHGKKVSKNIQLAMEKFACGEVKILVCTHIIESGIDIPNANTMVVQYAELFGLAQLYQLRGRVGRSGTEGFAYLFYTDKSLLSKIATFNISICXDRLGAIEEHSASGQGFXMLLEKDMGIRGFGSLFGEQQSGDVANVGIDLFFDMLFDSLSKVDQFCLIPVPYKDVQLDINISSRLSSEYISYLENPVELLNEAAKAAEKDLWTLIQFTEDLRRQYGKEPRDMELLLKKLYVRRMAADLGISRIYSSGKMIIMKTNMNKKVFRLMREAMSLETHRNSLSFTGKEIKGELLVNLPDTLLLNWLFHCLADCYAVIPALVKY

SEQ ID NO: 139235 - protein, 208 aa, Oryza sativa
  Clone ID: PAT_MRT4530_40547C.1.pep
MPRPLKFGLQTNLQALWEEIDCLEDWSFQTERPKAEELEWPRLATGGEEVGGARSHAAGRRLLREVGRDGRAVSAQFATAGADLSSGAAAASAAGRRVHKRGRWCLVAPSSPTPAETLPLSVIDRVAGLRHLVRSLHVFEAGGGGGEPARVVREALGKALVEYHPFAGRFVEVVGVNGGGEVAVVGRWLAGCNDVVPCPTGLLQVCRE

SEQ ID NO: 139236 - protein, 416 aa, Oryza sativa
  unsure (1)..(416): unsure at all Xaa locations
  Clone ID: PAT_MRT4530_40548C.1.pep
IRKFFSSVAMHDLELQXLDVKITFLHGELEEEIYMKQPEGFIVPGKEDYVCKLKRSLYGLKQSPRQRYXRYDSFMLSHGFKRSEYDSCVYIKFVNGSPIYLLLYVDFMLIAAKSKDEITTLKKHLSSEFEMKDLDAAKKILGMEITRGRHSGLLFLNQQSYIKKFVQRFNMHGAKPVSTSIAPHFKLSALQCASTDEGVEYISRVPHSSDVGSFMYAMVCFRPDLSHAMRLVRRYMANPSKEHWKAVQWIFRYXRGMVDAFLKFVKTNKGLVGFVDSDFAANFDKRRSLTGYVFTIGSCVVSWKVTLQPVVAQSITEAEYMDIAEACKXSFWLKXLSAELYGVDSCISLFCESQSAIYLTKDQMXTNHIDIKYHYIHDVVAQGRRIDXCYKKKFISRWSLLSCDPNSGWSEAEARR

SEQ ID NO: 139237 - protein, 93 aa, Oryza sativa
  unsure (1)..(93): unsure at all Xaa locations
  Clone ID: PAT_MRT4530_40549C.1.pep
SNSFQDTTLYVTLEPCAMCAGAILQARVDTVVWGAPNKLLGADGSWVRLFPGDGQTSSLDSAXTXRGPGPVHPFHPKISIKRGXLSAECSEIM

SEQ ID NO: 139238 - protein, 104 aa, Oryza sativa
  Clone ID: PAT_MRT4530_4054C.1.pep
SRTLTKNARKLCLKLYSSWVRELVMTYNDPFHQNPKFSTEMKSSWTNGIIKNEKTHEGPERSTSQYDCSYWKMYYTMCCKLDYYAPKCVKWVRLLCVQLHKAVE

SEQ ID NO: 139239 - protein, 108 aa, Oryza sativa
  unsure (1)..(108): unsure at all Xaa locations
  Clone ID: PAT_MRT4530_40550C.1.pep
CQQLQHVIRESRCPSILRMVSSYHXSMPMRLEQGRSSSSSESYVAQQSWSXTGNTARGPXEEAYTCEQQQHTGMIRVSLTMTRQYAEQLXLMCGVKPQQCSIFTSGQC

SEQ ID NO: 139240 - protein, 85 aa, Oryza sativa
  Clone ID: PAT_MRT4530_40551C.1.pep
VHSSYNRVETPTLHCLIELGPTLNSPPDITGLCHTPTGAHQPHPWEQQGHLGRPFSGGFPPTTKNLPAGNTPQKGPHGIQMGLCT

SEQ ID NO: 139241 - protein, 120 aa, Oryza sativa
  unsure (1)..(120): unsure at all Xaa locations
  Clone ID: PAT_MRT4530_40552C.1.pep
ACEHRPASHLIGVRLILDLGISRSKGRVGILAQKAVVYPCGFRPGFSMYXLVDSGTVDASVSGIAGTTGAXRDVPWLTGPLQRACHGALNQDSSPPTTQYWLHVYLGQGFYIVTYRLWTY

SEQ ID NO: 139242 - protein, 169 aa, Oryza sativa
  unsure (1)..(169): unsure at all Xaa locations
  Clone ID: PAT_MRT4530_40553C.1.pep
ARVRKLDPLERRRDLELAAPLGQLPCLKIAEISGAETVSCIKDSFYGHXGTFPSLERLTFSYMPNLVIWGQTPTENMFPRLRELVIIQCPKLKAVHMEFPSIEKXILWMDNRLLYTSEGSLKGLVKGLEHVSISFWMSCXASSSLKGLEDLVELIELDISGCHELTGSP

SEQ ID NO: 139243 - protein, 666 aa, Oryza sativa
  Clone ID: PAT_MRT4530_40554C.1.pep
MATTRVRCSACLHEFDLCVAGAGANVCSTCKRPWTNPPPAASSASSTLSFATFSSVNPPPAASSPSPFATSSSVNPPPAASSASSTLSFATFSSVNPPPAASSPSPFATSSSVNPPPAASSASSTLPFATSSSVNAPPQPAHGTTTSGLFGRSGPPPPWSSSATSLPRRPLTSCWPPAPSPVPVQTPPVAYPAQPSVFATPFRRVTEEGHAYDDNEPVESPASRGGGEPGGGEAAANDGELVVIKTHCEFPAIARSTPRDNFAVLLHVKAPSIAAEAAPARASVDLVTVLDVSGSMEGYKLALLKRAMGLLGPGDRLAVVSFSYSARRVIRLTRMSEGGKASAKSAVESLHADGCTNILEGLVEAAKVFDGRRYRNAVASVILLSDGQDNYNVNGGWGASNSKNYSVLVPPSFKRSGDRRLPEARIAITCPHAAVRVRSVNSGRYDSVIDGDGRAASVDVGELYADEERRFLVFVDVPAAGAGEDVTELIKVSCTYRDTASRQQMVVAGEHAVVQRPVEVATNTEPSIEVERERFRVEATEDIAAAQEAAERGAYAAAKAILDRRQEALARSARRLACDARCAALVSELRELSARVANRRECEQAGRACMLAGMSSHAQQRATSVQLFSPASALSSGAVPFGYSTPAMQSMVESSRKARESGSGGN

SEQ ID NO: 139244 - protein, 376 aa, Oryza sativa
  Clone ID: PAT_MRT4530_40555C.1.pep
MDSSSGGAGGGGGAQIKGMGTHGGRYVLYNVYGNFFEVSSKYAPPIRPIGRGAYGIVCAAVNSENGEEVAIKKIGNAFDNHIDAKRTLREIKLLRHMDHENIIAIKDIIRPPRRDNFNDVYIVSELMDTDLHQIIRSNQPLTDDHCQYFLYQLLRGLKYVHSANVLHRDLKPSNLFLNANCDLKIADFGLARTTTETDLMTEYVVTRWYRAPELLLNCSQYTAAIDVWSVGCILGEIVTRQPLFPGRDYIQQLKLITELIGSPDDSSLGFLRSDNARRYMKQLPQYPRQDFRLRFRNMSAGAVDLLEKMLVFDPSRRITVDEALHHPYLASLHDINEEPTCPAPFSFDFEQPSFTEEHIKELIWRESLAFNPDPPY

SEQ ID NO: 139245 - protein, 757 aa, Oryza sativa
  Clone ID: PAT_MRT4530_40556C.1.pep
MATTRVRCSACLHEFDLCVAGAGANVCSTCKRPWTNPPPAASSASSTLSFATFSSVNPPPAASSPSPFATSSSVNPPPAASSASSTLSFATFSSVNPPPAASSPSPFATSSSVNPPPAASSASSTLSFATFSSVNPPPAASSTSPFATFSSVNPPPAASSASSTLPFATSSSVNAPPQPAHGTTTSGLFGRSGPPPPWSSSATSLPRRPLTSCWPPAPSPVPVQTPPVAYPAQPSVFATPFRRVTEEGHAYDDNEPVESPASRGGGEPGGGEAAANDGELVVIKTHCEFPAIARSTPRDNFAVLLHVKAPSIAAEAAPARASVDLVTVLDVSGSMEGYKLALLKRAMGLLGPGDRLAVVSFSYSARRVIRLTRMSEGGKASAKSAVESLHADGCTNILEGLVEAAKVFDGRRYRNAVASVILLSDGQDNYNVNGGWGASNSKNYSVLVPPSFKRSGDRRLPVHTFGFGTDHDASAMHTIAEETGGTFSFIENQAVVQDAFAQCIGGLLSVPVQEARIAITCPHAAVRVRSVNSGRYDSVIDGDGRAASVDVGELYADEERRFLVFVDVPAAGAGEDVTELIKVSCTYRDTASRQQMVVAGEDAVVQRPAEVSTSTEPSMEVERERFCVEATEDIAAAREAAERGAYAAAKAILDRRQEALARSARRLAGDARCAALVSELRELSARVANRREYEQTGRACMLAGMSSHAQQRATSVQLFSPASALSSGAVPFGYSTPAMQSMVESSRKARESGSGGN

SEQ ID NO: 139246 - protein, 50 aa, Oryza sativa
  Clone ID: PAT_MRT4530_40557C.1.pep
PCLSALTPDCTNGSLHHGPLLPGEGPRGTVELLRALKRAPITMPRPRTQP

SEQ ID NO: 139247 - protein, 704 aa, Oryza sativa
  Clone ID: PAT_MRT4530_40558C.1.pep
MASAGGRCDGCHGDFGLWEPPLTAECSHRFHLHCVVSGADVCPACNARWTNAPSNPPPQPAGGSTTPFGQTTGFPMRVRPWSSCDKCRGVIDHSQPTVTSECSHTFHLRCFSGSVICPACNARWRDTVAVPNPSPAPPSTFFPAGVPAPPPTFSPFWVSQEYDDDEPVEPPVAAHGGGVAPASNGALVVRTHCEHTAVARSVIRDNFVVLVHAKAPSIAVAEATAAARAPVDLVTVLDVSGSMEGYKLTLLKRAMGFVIDKLGPGDRLAVVSFSYNAQRVIRLTRMSDDGKASAKSAMESLAAGGGTNILKGLVEAAKVFDGRRYRNAVASVILLSDGQDTYNVNGGWGASNSKNYSVLVPPSFKRSGDRRLSVHTFGFGTDHDAVAMNAIAEETGGTFSFIENQAVVQDAFAQCIGGLLSVTVQEARIAITCPHPGVRVRSVKSGRYESLVNGDGRAASVDVGELYADEERRFLVFVDVPAAGAGEDVTELIKVSCTYRDTASRQQMVVAGEHAVVQRPVEVATNTEPSIEVERERFRVEATEDIAAAQEAAERGAHAAAKAILDRRQEALARSAPGLAGDARCAALLSELRELSARVASRREYEQTGRACMLAGMSSHAQQRATSVQLFGAAAPTWSMPMCGSAAPPSLSFGGFGGFATPAMRSMVESSRKRRKGGDGSLSFLDLVRTEEEAGSSDDEKENL

SEQ ID NO: 139248 - protein, 50 aa, Oryza sativa
  Clone ID: PAT_MRT4530_40559C.1.pep
SRCGIISATFESVSQVELAMVLGYVEFADMNNVVVNIQVQDCAAYDLSVA

SEQ ID NO: 139249 - protein, 173 aa, Oryza sativa
  Clone ID: PAT_MRT4530_4055C.1.pep
KHQQLQDYMTQPSPSHQDGIHSRKGLVFAAKAIPFPTSGYSTLLQDMRSRKTEAKNRKRAAEKGNPPTKSPLTRRKSERDEALLDEEREEEDDEAGGDALRARHQRLLVRQQRHGGADAPDQEPAQIPVHAGQPLARLLAARRSLLRPRLRMPCAAASPRDRGWGRGLKLRGQ

SEQ ID NO: 139250 - protein, 48 aa, Oryza sativa
  unsure (1)..(48): unsure at all Xaa locations
  Clone ID: PAT_MRT4530_40560C.1.pep
RIYLPALQHASXPFIHXXNFSXPARGVPXYTSRPPFQTSTTTHLSRQD

SEQ ID NO: 139251 - protein, 1410 aa, Oryza sativa
  Clone ID: PAT_MRT4530_40561C.1.pep
MAIRLMRRLGLPLLPVLLTIAAASSSDEASLLAFKAGLTGSNSSALASWNSSGASFCNWEGVTCSRRRPTRVASLSLPSSNLAGTLSPAIGNLTFPRRLNLSSNGLYGEIPTSIGRLRRLQWLNLSYNSFSGAFPVNLTSCISLKILDLDYNQLGGIIPVELGNTLTQLQMLLLTNNSIIGPIPPSLANLSLLQDLYLDYNHLEGLIPPCLGNFPVLHELSLEANMLTGEFPHSLWNLSALRVIGVGLNMLQGSIPANIGDKFPAMRFFGLHENRFHGAIPSSLSNLSRLTDLYLADNNFTGFVPPTLGMLHSLKYLYIGTNQLEADNGKGSEFVTSLANCSQLQELMLSHNFFGGQLPRSIVNLSMTLQMLDLENNSFSGTIPHDISNLIGLRLLDLGFNPISGVIPESIGKLTNLVDLALYNTGLSGLIPSTIGNLTKLNRLLAFHTNLEGPIPATIGRLKNLFNLDLSFNRLNGSIPREILELPSLAWILDLSYNSLSGHLPSEVGTLANLNQLILSGNQLSGQIPNSIGNCEVLEFLLLDNNSFGGDMPQSLTNLKGLNVLNLTVNKLSGRIPNAISNIGNLQYLCLAHNNFSGPIPAALQNFTLLKQLDVSFNNLQGEVPVKGVFRNLTFSSVVGNDNLCGGIPQLHLPPCPILDVSKNKNQHLKSLAIALPTTGAMLVLVSVIVLILLHNRKLKRRQNRQATSLVIEEQYQRVSYYALSRGSNDFSEANLLGKGRYGSVYRCTLDNEDALVAVKVFDLQQLGSSKSFEAECEALRRVRHRCLIKIITCCSSIDPQGQEFKALVLEFMPNGSLDGWIHPKSSKCSPSNTLSFSQRLNIVIDIFEAMDYLHNHCQPSIIHCDMKPSNILLAEDMNAKVGDFGISKILPKSITKIHLNSKSSIGIRGSIGYIAPEYGEGSAASKLGDIYSLGIILLEMFTGTSPTDDMFKDSLNLHEFATAAFPDRALEIADQTIWLHETNYTDATDASMTRGIIQQSLVSLFGLGISCSKQQPRERMVLADAVSKIHAIRDEYFKSRVGSAASWSWNSSANSFCSWEGVTCSHRRRPTSVVALDLPSSDLAGTLSPAIGNLTFLRRLNLSSNDLHSEIPQSVSRLRRLRVLDMDHNAFSGEFPTNLTTCVRLTTVYLQYNQLGDRIPGIAINGNHLEGMIPPGIGSIAGLRNLTYASIAGDDKLCSGMPQLHLAPCPILDRLTCLAKEDYGSVNRCALEDEGASVTTAVKMFNLQMSGSSRSFEAECEALRRVRHRCLIKIITCCSSIDQQGQEFKALVFEFMPNEDKSAKVGDLGISKILPNSTTKTLQNSKSSIGIRGSIGYIAPEANETDVTNASTKRRIIQQCLVAVLRLGISCSKQQPRDRVLLADAVSEIHAIRDEYLRSWMVGIELNVG

SEQ ID NO: 139252 - protein, 89 aa, Oryza sativa
  unsure (1)..(89): unsure at all Xaa locations
  Clone ID: PAT_MRT4530_40562C.1.pep
GEGNLPSHPATCPYSLVLSPHSANRRSGRDGXGASGCHVMPLRPLRRFAQRPSPSRHLAGGASEEGAQAEPPLMRAAPQLPPVAFNAVG

SEQ ID NO: 139253 - protein, 83 aa, Oryza sativa
  Clone ID: PAT_MRT4530_40563C.1.pep
IPCLVMAFALAMFLLGTRNYRYYVSTQSSPFARLARAFVALIRGSKDDALAVVDDDDGGDHREELRGVLRLFPIWATCIIYAV

SEQ ID NO: 139254 - protein, 164 aa, Oryza sativa
  Clone ID: PAT_MRT4530_40564C.1.pep
KILPYKLHLIFFSKESHEASYIKIQELIFNVLRLIKPYLIGAHRFHFLYKEPYKRPLLVCLHNYPYDSLTNARRRKYRSNRNAMILSSRFNGNEWQQKKWIEMHMLAPFASLHLDAGVDDCTTVTLLLMVLAQTNIYPSCWLAPTPSTTQEPERLRSSLTESRR

SEQ ID NO: 139255 - protein, 61 aa, Oryza sativa
  Clone ID: PAT_MRT4530_40565C.1.pep
SFWHWSSLALGLLIHKASLGSSVLKPLNMFCWPLFIFTRCRLEGFSYFQLARNPSVEGQVY

SEQ ID NO: 139256 - protein, 56 aa, Oryza sativa
  Clone ID: PAT_MRT4530_40566C.1.pep
GSWSLVCSSSMVFIHHAARGANQTMLSSSNVEASVLIQLVIRLKLHVALALWHVMQ

SEQ ID NO: 139257 - protein, 234 aa, Oryza sativa
  Clone ID: PAT_MRT4530_40567C.1.pep
MAVGSAGSAGGGLGAMATTSARTERGRRPGASTTASTLVAMAARGDAGRRRREVLGLGAVAASSSSSASHDDHDKRGEVLGLGGLEVTATAAAIRDLLHHGAGRDEEHILFLPLAELTYRQLRQRFPRRAPCAAPRHCQPALAALSREKKERERRDKKAREETREADDVREEMEIVTVYTSPNNERFDCEMKAFITQRQHVCSWEYHFSPENNGARESHSSGQDEMQIQCSTAE

SEQ ID NO: 139258 - protein, 104 aa, Oryza sativa
  unsure (1)..(104): unsure at all Xaa locations
  Clone ID: PAT_MRT4530_40568C.1.pep
PRQSKGAPPFGHPGGFQLKTPPVMRPRGCPRLGGGGQQFPNRAXRGVRGIGRQQQLRRGGVVSFDRARGQAQALGAXNLPPKGGVYPNNTMAPGGNPPVGGVGA

SEQ ID NO: 139259 - protein, 313 aa, Oryza sativa
  Clone ID: PAT_MRT4530_40569C.1.pep
MSDLLFLSIFVRAISVASCSSSISFSGLWRAILTRQGLWCWHCRPWPLVSSLWLRQTRRTTSQRRRHCQRHRCTALRWLHRRQSSSSEVPCSSEGDGYMPAQRPLPRRERRAGAWRSLSSCCLGCTHFSVAPASSLRPFPMQNTNTSPRCARAGRRRAATAGGGFGTDSAGGGLGAMAVGSAGSAGGGLGAMATTSARTERGRRPGASTTASTLVAMAARGDAGRRRREVLGLGAVAASSSSSASHDDHDKRGEVLGLGGLEVTATAAAIRDLLHHGAGRDEEHILFLPLAELTYRQLRQRFPRRAPCAAPRH

SEQ ID NO: 139260 - protein, 166 aa, Oryza sativa
  unsure (1)..(166): unsure at all Xaa locations
  Clone ID: PAT_MRT4530_4056C.1.pep
RDKRLTENVEYLVELKXLFSSEGASEHDKFGTSCSTSERNELLSNCLCVXYTPKDEHFGIDPLEATAGYKPEIVCNSGGPVESVLNDETGFLXEPSAPEFSKAMLKLANDHDLAVNMXKHARRHVVQKFSTKTFGDLLNSYVLNAYHQRIERSPNSVDVIASDPLE

SEQ ID NO: 139261 - protein, 77 aa, Oryza sativa
  Clone ID: PAT_MRT4530_40570C.1.pep
MAAVGDGARGDKPPKLGGNLDLSEEEFYPYKSWAPKLHQNIRTWAQLPNKWIRQSSEEAQTKSGGPAQVRLNPGDHR

SEQ ID NO: 139262 - protein, 82 aa, Oryza sativa
  Clone ID: PAT_MRT4530_40571C.1.pep
MWWCGLQLLVVVSSLAGGGEAMAPNWDFGSIIWHFAICDERRRWMMGRSNWPCLRADGLFLRGVVVVAFFPTASVINHWGME

SEQ ID NO: 139263 - protein, 121 aa, Oryza sativa
  Clone ID: PAT_MRT4530_40572C.1.pep
TSRGPCRQRDNRCSSSGWSSRTAPSSPRSQGSPSSRCSLDLPRPHGAAGRAARPSRMAMPPPAARPSFPGSPPSTPFGGTPTAATAQPCGFGDRARSRRRRRRRPRRAPPTPRLPPTSPWP

SEQ ID NO: 139264 - protein, 41 aa, Oryza sativa
  unsure (1)..(41): unsure at all Xaa locations
  Clone ID: PAT_MRT4530_40573C.1.pep
FSSCIWLYLVSSRYLYYSMMXKAYDESQYKLLRVLHSVSSF

SEQ ID NO: 139265 - protein, 88 aa, Oryza sativa
  unsure (1)..(88): unsure at all Xaa locations
  Clone ID: PAT_MRT4530_40574C.1.pep
HQAVGFGLNQTHRPSSTLAPLFHAVSRVFTTLVKLVAIPRIELRGRSPQPIIVIRSSRTRGSTSRGGPVPNSPYSESYYARSXAVVLX

SEQ ID NO: 139266 - protein, 78 aa, Oryza sativa
  Clone ID: PAT_MRT4530_40575C.1.pep
MGVKIFLLLQKMRKRKEEISRRVARISTYKEKINKIPDKKSFTLQMDYINFGSILYASVIVTAYILERKDELARQKKL

SEQ ID NO: 139267 - protein, 97 aa, Oryza sativa
  unsure (1)..(97): unsure at all Xaa locations
  Clone ID: PAT_MRT4530_40576C.1.pep
QNTYLCSFSYISAEVYAGALYSFQWSEVLSHYAVSAFQADGLAHEKAIKWNVTRIRGSVPVLEGAQSPLXVFVSGRGRDPSMQAMIRPGGLLPVEAL

SEQ ID NO: 139268 - protein, 430 aa, Oryza sativa
  unsure (1)..(430): unsure at all Xaa locations
  Clone ID: PAT_MRT4530_40577C.1.pep
MTSHTRLQAKLLSDPAAAAAEKDRAHVHECAVCGVEFSTITALTVILWSGEHEEERERWRRRRLVEEDESLIVIILYLPPSPDPVSQSQFEFDQLKLDDHPPPPQLHRRRTKRCAEHLRWAASFAFKHNATLLLTVDRNQAAGCANFTRGSSRRRSTXGMPDCAATRTLIAVDAGIYREKVVVWSNKTALTLHGRGNLNTTVAWNATSNSTGGSTVYSATFTVLAPAFVAYNITFQNTSPPPEPGDAGGQAVALRVAGDEAAFHWCGVYSAQDTLLDESGRHLFRGCYIKGSIDFILGNARSLYGRASSPERTGFAFVRYSVVGTGQVWLGRAWGPYATVVFAKTYLVNVVSAEGWNDWGDPGRRQQVWFAEYACWGPGSATAATGRVSYARQLDQRQAAPFMDVSYIDANQWALPPSTPELYGSRYTPS

SEQ ID NO: 139269 - protein, 183 aa, Oryza sativa
  unsure (1)..(183): unsure at all Xaa locations
  Clone ID: PAT_MRT4530_40578C.1.pep
VYTAVLATPISASTAAVRLRHHRERHRSTVVLLLVECSFAENIFVIFYVVLTTARAGAARRAREGPVDVCSGHSGGRERRGNGGLDGRRPPLPRSSGGALGRGRERPRRAAGAARQSAQSLIFFCPHRLHFLLRLIQSASSPHVVSSFPWTASEKLPNVKSLGXSMGGXIAARREPRSVEIRR

SEQ ID NO: 139270 - protein, 86 aa, Oryza sativa
  unsure (1)..(86): unsure at all Xaa locations
  Clone ID: PAT_MRT4530_40579C.1.pep
MVGCEHMVLMVMLMTIKDRFTSFGCETLTVPTTCPHGQRFYLLYSMVHCGAPDXEVAEISPRGSLGSPCLVYKGVIMIKEWCVVVD

SEQ ID NO: 139271 - protein, 78 aa, Oryza sativa
  Clone ID: PAT_MRT4530_4057C.1.pep
SCISVLLELIHLCSVCSWSSNSQQYHRHKNQHQLRCWRCARHLQFYHHHQHLLGSVRGLHFEWDPFFYHPFQHRGRVG

SEQ ID NO: 139272 - protein, 269 aa, Oryza sativa
  unsure (1)..(269): unsure at all Xaa locations
  Clone ID: PAT_MRT4530_40580C.1.pep
DIKGANILVGPNGEVKLADFGMAKHVTSFAEIRSFRGSPYWMAPEVVMNNKGYNLAVDIWSLGCTIIEMATAKHPWYPYEDVAAIFKIANSKDIPEIPDCFSKEGKDFLSLCLKRDPVQRPSAASLLGHPFVHDHQAVRAXHAMPNRESSSRRNIAPLHGIAGLSAREFAGFSTAYPSPHNTSSSPTAVRANMSLPVSPCSSPLRQFKQSNWSCLPSPTHPALSPGLSAAAYPNNPLQNQSRRSAAVPDPWLELSQPRPPSPYGSPKRF

SEQ ID NO: 139273 - protein, 751 aa, Oryza sativa
  Clone ID: PAT_MRT4530_40581C.1.pep
MPPPHARFASPRLVSCGCGGGGCCCCSGGGGGGKGSFGNREERAEGMPLGWLRRKWRRRRDKPAGDAAAASTTATSPRDSVDLGGTSAYPSACASPSSTTPTPTRWGAGASAVPPRCPGPQDQHHGLPLPRPVSKSAPMPLASPAAAPPSPSPPACASAAESVSGGSSSDDEADHRNYRYTDPVVHTSGRTVLPDGHNGMVEEKRFVSCGILQEHQKFFEVPIANVNEVHHMQIFEPSTSESSYSRGRMLPEDTFAVRPRSHYPGPRGHAYSACCARDFGFTPRSPVKRMDDPRSPSQPLPLPPVPVASSSIPSSSITSSQFQSQWKRGKLLGSGTFGQVYLGFNSENGQFCAIKEVQVFLDDSHSKERLRQLNQEIDMLKQLSHQNIVQYYGSELFSLSFGLPNLNNFEQADEALSIYLEYVSGGSIHKLLREYGPFKEPVIRNYTRQILSGLAYLHGRNTVHRDIKGANILVGPNGEVKLADFGMAKHVTSFAEIRSFRGSPYWMAPEVVMNNKGYNLAVDIWSLGCTIIEMATAKHPWYPYEDVAAIFKIANSKDIPEIPDCFSKEGKDFLSLCLKRDPVQRPSAASLLGHPFVHDHQAVRAPTCNGTQLRNGISSPAASHRKPNRESSSRRNIAPLHGIAGLSAREFAGFSTYFSTWPCTCSSPTAVRANMSLPVSPCSSPLRQFKQSNWSCLPSPTHPALSPGLSAAAYPNNPLQNQSRRSAAVPDPWLELSQPRPPSPYGSPKRF

SEQ ID NO: 139274 - protein, 36 aa, Oryza sativa
  Clone ID: PAT_MRT4530_40582C.1.pep
WCHLPQYILFKLMQDEESIMAGSKQMEESEAKHSLQ

SEQ ID NO: 139275 - protein, 250 aa, Oryza sativa
  Clone ID: PAT_MRT4530_40583C.1.pep
MGRGRVELKRIENKINRQVTFSKRRNGLLKKAYELSVLCDAEVALIIFSSRGKLYEFGSAGITKTLERYQHCCYNAQDSNNALSETQSWYHEMSKLKAKFEALQRTQRHLLGEDLGPLSVKELQQLEKQLECALSQARQRKTQLMMEQVEELRRKERQLGEINRQLKHKLEVEGSTSNYRAMQQASWAQGAVVENGAAYVQPPPHSAAMDSEPTLQIGYPHQFVPAEANTIQRSTAPAGAENNFMLGWVL

SEQ ID NO: 139276 - protein, 97 aa, Oryza sativa
  unsure (1)..(97): unsure at all Xaa locations
  Clone ID: PAT_MRT4530_40584C.1.pep
KGFGPQLSFPPPPFCEGFPPPPLFIVGNPPPKGNENFPSRGPXFPNPPVNLQKGLFKFLEKKGFFFPPPNXRGVFMVPNQTKGCVGGIPKLKNFSPQ

SEQ ID NO: 139277 - protein, 133 aa, Oryza sativa
  unsure (1)..(133): unsure at all Xaa locations
  Clone ID: PAT_MRT4530_40585C.1.pep
FXGCXFGTRXIDPRWIRRXIFXTXGSGAGXMLFLDCGACGXGXRGGAXFHXXAXPVLGMEEXXXGVXRAFFTTPDXLLXXXXYDXQLPXKKRRLTPXXXDTPXSXLXCXDRRXAVLCSXIVXXXLDLSAXAXX

SEQ ID NO: 139278 - protein, 142 aa, Oryza sativa
  unsure (1)..(142): unsure at all Xaa locations
  Clone ID: PAT_MRT4530_40586C.1.pep
MVADRWVSPSGPSPLVPSEEQRDPAETCSPSATAAPSPFAARHPPPPLLGLTSETTVVDGNLGWRRIWRXRWRRQPTTTSETTVXRGADDGWQRRNDALEDLATARRRRRPTTADLVTATAPTAAASGNDDLNCSNGISTTW

SEQ ID NO: 139279 - protein, 207 aa, Oryza sativa
  unsure (1)..(207): unsure at all Xaa locations
  Clone ID: PAT_MRT4530_40587C.1.pep
HEGDKYFGLSSTGITHKSSAASLGSGSYSSGTHYRTTGRSTEVGSFKDIHTGTECIKNKKETVSNYSSNREGSKEITNSATSYKSKKSERHGRRNQNSLTLHSKLSANISTTSEAPSSKKGENEDDDNFNPRGFSTSTATGTTRSNHLDLFGPSLMDDLVDSTTSTSTATXNVSTPAVPEVDLFADAAFQSANAPLEAATVSHTQDK

SEQ ID NO: 139280 - protein, 87 aa, Oryza sativa
  Clone ID: PAT_MRT4530_40588C.1.pep
CFFNYFLFFFFFFFFFFFFFFFFFFFFFFFFFFFVKNQHFKKGGQNRPPQTLTKKGVGRPPQPEKKTKKQFTTNVRGTKKKTYPPGR

SEQ ID NO: 139281 - protein, 138 aa, Oryza sativa
  Clone ID: PAT_MRT4530_40589C.1.pep
MWSTRWLFLLAWVNISPLLAKALPGVRRRGPELHRGLYAPRLSLTETTACRCHQEREREARTHMRGLMKTMAMAGSPVFAACEMGEHTDEVEGGKPPHKKRSATTMNRHGVIILLPGAHRSPTTAVNRRGASSSCMEK

SEQ ID NO: 139282 - protein, 199 aa, Oryza sativa
  Clone ID: PAT_MRT4530_4058C.1.pep
MLLRGIRLPSEYSVPCPLASCPPEVCVTKHGHAFLNPIQGKWQRGVGVDMADSERGVNQAHHVTPMDKITSAPDESASEAEQKAWWLVGLWERSLNQQETPPHARRFVFPFFISIARLLVVSSAVGGCLVAGCSLAALAQAQHYPLDDSFRCCWLPERPCRCAAPAASLHHGTKPATNIPAIQHSSKHKLHNTAARLIW

SEQ ID NO: 139283 - protein, 45 aa, Oryza sativa
  Clone ID: PAT_MRT4530_40590C.1.pep
VWLPTWFTSTTSCCAFSHIASVECTLWYILVSPSRIHTICPSLLI

SEQ ID NO: 139284 - protein, 230 aa, Oryza sativa
  Clone ID: PAT_MRT4530_40591C.1.pep
MESRKDVVARYRDELGNTHKAIHLNVVAVVNDVEYPLVVSLGLGEHLPLAGEGTARRPAARPGASSWPLCSTPHLTGSGSSTAVQSIQETYSDKPTEKRTPLARDHPLLHPSIEHVSTHYPETTACRCHQEREREARTHMRGLMKTMAMAGSPVFAACEMGEHTDEVEGGKPPHKKRSATTMNRHGVIILLPGAHRSPTTAVNRRGASSSCMVRYRFMGWDGGSIQIPKK

SEQ ID NO: 139285 - protein, 455 aa, Oryza sativa
  Clone ID: PAT_MRT4530_40592C.1.pep
MTPTLLDITMITGLDITSSANPVSLNTKNKFDFKTKSIGGWSGFVSMNMGDGSVSLTDHTAFLLMWLEKFLFCGARCGPTANWQHLAEKLVEKKQFPLGKYLLGYLYQTLSNASAKIAYGTVIGTCGPWWLLQIWLNLITKEVVDRPSLTEEDFPRFELITDEDGEEVTHRRCMSFGEAASRNTGAKLSAELLKDCFCNFYDGFPKNARVWFAYADSASFQLPSDFRFDEINSEKFEKSRKVFTIAITPCILLVGIHQGKNIQISYEFYHPMSAAKQLGLGQLSIGLYFADRIQSRGEITLALMMDRLLNIEGPSLGSIENIEQALFGSKSFDQWWVEWKKHLFHQTTSMYMTDLFSDLIPQTTETSPPHQSESGREIDYAASLLPNGGRLASPIIGFHAPKTASLLQGQMREPIPADAGKKRKTKASVADPSAAEKEVQEAKDKVSRPDKFIPK

SEQ ID NO: 139286 - protein, 203 aa, Oryza sativa
  Clone ID: PAT_MRT4530_40593C.1.pep
MAPLLFKDMKSLSCSSPASTAICPSLERQPMVRPHKGGAIAASPLCQVPGEPRTVHRQDCRRGQQHQHKAAAANGGELVSPAGSSRYLLSSRAAAAEEIQEVEASAAPAVDAKVVREEQAGSDVKNTLTQEQVVVLKVSLHCKACAGKVKKHLAKMEGVTSFNIDFAAKKVTVVGDVTPLGVLNSVSKVKNAQFWAAPPAIAA

SEQ ID NO: 139287 - protein, 233 aa, Oryza sativa
  Clone ID: PAT_MRT4530_40594C.1.pep
GNATLGTDSCTSRQVCAEHDDFSSNCPLAVSLVRVLGRPAAELARAAGGGGGGGEEPVPPNPAAAALFSPLAARGGGSRSSWWTVEEENPVAAGGAPTRWRPSRRRGGTRPEADVEAAACGPGRRRGSRGGAEATCGGERGTHQRGGGRGGRGRRGAPRCRTSPTLARRPPVQLDLCPCGRHLDAAHRRPSRAARSASTRADPCAVRAETVRPPTRHRPSPALARRPSARPRL

SEQ ID NO: 139288 - protein, 101 aa, Oryza sativa
  Clone ID: PAT_MRT4530_40595C.1.pep
STRTYYIRIFLSCPYPTHFKGFQKHFELEGSSSWFSGSSVLTFLVSSGSSSLSSASRCSSLGVLFPNNSPSFSSALGSSCGVPQSSQWFSSVISAWVLLRD

SEQ ID NO: 139289 - protein, 282 aa, Oryza sativa
  Clone ID: PAT_MRT4530_40596C.1.pep
MIHQRDGDHLMEESTTMARRLWHVVRAVLFMLRKGMSKRKLAMDLHLLLHRGKIAGNKALGKIMNTTTATASHGHGHAADAASTAAGEAAAAAPFSCGRALDPALAVYDPRGAGLEVEFSCSNTPSYPSSFHLIPTKRRRRNNNGSNGRRRGGGGRGANGGEPGWYNYDAADIARVFEILNSSDQLLGDGGAAVAATPSPALWRTSFGGRSPAPVRQLRITDSPFPIRDDGGEDAGAGLVDLEAEEFINKFYEQLRTQQQSLATATPDYYAGYSRPVTGVAY

SEQ ID NO: 139290 - protein, 80 aa, Oryza sativa
  Clone ID: PAT_MRT4530_40597C.1.pep
KKKKKKKKKGGGWAVYRIKASFLLHATYYILYRKPKYMSSGRQFTRMGTAKPSHHKLIALMHIPLLQLEYKEQAGTDRTS

SEQ ID NO: 139291 - protein, 177 aa, Oryza sativa
  Clone ID: PAT_MRT4530_40598C.1.pep
MAVSASLPAATPAGRHAAAVYVAAVPLRGPKGPAQALMSAGYSLGLWDLQHFMVLLRPDPARAQALVFDFQPRDPEDALAAFAVLSRSEIPGVVRRRTLRRVPDTRCWLVGHHRSGGGAGAAAAVLAADAFTARWPTDLVVGRHDCRDFTNGLVEELTGEKRVLDALRSSAANDQSV

SEQ ID NO: 139292 - protein, 41 aa, Oryza sativa
  Clone ID: PAT_MRT4530_40599C.1.pep
NGLTGKTLALPNLIALKNIPFFLANIFSNRPATITLPNNFP

SEQ ID NO: 139293 - protein, 126 aa, Oryza sativa
  unsure (1)..(126): unsure at all Xaa locations
  Clone ID: PAT_MRT4530_4059C.1.pep
SGTIGGHQEGSSAISYLAEYVFEEEDYXVVDYVLMNXEQHRLRPTGVGLLPXILMNKGPNLYKNHFLYLXFYFNLAYTLVPTIPIPCKYRSRDLKRRHIQVRVTAFSIKNPRWRPERLVACSSVTL

SEQ ID NO: 139294 - protein, 575 aa, Oryza sativa
  unsure (1)..(575): unsure at all Xaa locations
  Clone ID: PAT_MRT4530_405C.1.pep
MSTPAGVAPRRSSRLASSAPPLGAGQPSSSPLPRRRRRRASPSGCAREVDNSPPPVVILDDNEMEQHVEAEEMKKQGEESVEANEAEEKDKDAEVLEELPDWLPDGWIMEVRCGDNGNIYRYYTSPVSGYTFSTKMETLHYLFSEMDERVLESQACADDNELHRMHTWLPDGWAIEVRAGGKKMEKMYKFYVHLPTGMRFLSKENVGLYSNEGKISRCDVKGLCDTSSEDNILAMVEFNPDGLPEGWVKEIIFRKCNDGIRKDPYYTDPVSRHVFRTLKSVINYLETGQITKHAYIPRRSVTDMYSFDRCTDLPQSMLKRLKIQGKAKKKSVGASVKGKKLSNGLASNNCNEGMSSGLDPEIGPEERKLGTVKSITKEAVNSDTIKRSRGRPPKILMPTIESTKPEIALVTXRGYQEIKSNFCTFAAEGVNSCLIHLSEPNEKMVKATSAVEPASSNNAKRHGGSPQKKFKHITDITLDCAKSSNKESEHIVTAKKLGIGGGEQVANENTLEHTNMKEHLGVIQDYTSNRKKDKLNLITDPDLHEHKNGKFTEKLACTAVHKFYMRRSSNHTVAL

SEQ ID NO: 139295 - protein, 81 aa, Oryza sativa
  unsure (1)..(81): unsure at all Xaa locations
  Clone ID: PAT_MRT4530_40600C.1.pep
RVFPAPSRVSSPSHPPASSASCRPDPRRRPPPPSPHSGTRSPPPPXPSXPAAGSRPAPLARSRPPPLNHQMVLACPLRWLC

SEQ ID NO: 139296 - protein, 102 aa, Oryza sativa
  unsure (1)..(102): unsure at all Xaa locations
  Clone ID: PAT_MRT4530_40601C.1.pep
HTTNPLKGTASSTAVAAAQRTSGPGLQFGSKVLSPCSEFVRQQYSXIXATPFWQXATXXLINXQVXKQXCCQXLXXXAXTISTXXAXXIXQEIXXXLTNCTI

SEQ ID NO: 139297 - protein, 155 aa, Oryza sativa
  Clone ID: PAT_MRT4530_40602C.1.pep
MSIYDIRLIWAFSCLVLAGSYPGKPSQLGKYDCTGCSLAGVHSSNPAAYYYTSDGKQWLVLMGMTSSQPVPTDQYHCYYCVPVNKKSSAKGYCWSVAGGWVIVLGYNADSGMLDSYFISAKEDDDKAKTAWVRGKLEERIVPNMCALPADSANQP

SEQ ID NO: 139298 - protein, 79 aa, Oryza sativa
  Clone ID: PAT_MRT4530_40603C.1.pep
MGDSFTGRRLRADSVGGRGTPALAEVRGRCWKLRQRMRRRLTQPTTAGGRHGDEVESSEAQAGQRQTELVRCMARTRWQ

SEQ ID NO: 139299 - protein, 90 aa, Oryza sativa
  Clone ID: PAT_MRT4530_40604C.1.pep
IYYPDVPCQPQFLGRIIFCSIKWFFQKKKKKKKKKGRPPLFFFFFFFFFIFFFFFNETVADSSVPSKITVGDTLFISFIIFLIKFQKNSI

SEQ ID NO: 139300 - protein, 276 aa, Oryza sativa
  Clone ID: PAT_MRT4530_40605C.1.pep
MAFRLSNSLLGILNAVTFLLSVPVLGGGIWLATRADGTECERYFSAPVIAFGVFLLLVSLAGLVGACCRVNCLLWFYLVAMFVLIVVLFCFTVFAFVVTNKGAGEAVSGRGYKEYRLGDYSNWLQKRMENSKNWNRIRSCLQDSKVCKKLQDKNWDRTQFFKADLSPLESGCCKPPSSCNFLYVSGTNWTKVPTNSSDPDCNTWVDDGTQLCYNCQSCKAGAVATLKRDWKRVAVVCIVFLVFIVIVYSLGCCAFRNNRRDNRGAYRGAAWKGGYA

SEQ ID NO: 139301 - protein, 242 aa, Oryza sativa
  unsure (1)..(242): unsure at all Xaa locations
  Clone ID: PAT_MRT4530_40606C.1.pep
QPHSPHGCPPAPPLPAPPPPPPADPSCPEPDPLPPPLPVPPFALPEPCPVPTALPERPVPLPPPEAPPPPDPPPAPPPPPWVTVTPPGPMXMPTPFPPPPPTLPSAELAAPPPPTPMPTSTPPLPTSTPTPTPTPPPALEPPPRLVQTPPPTPPPNPMVVSDPLCDTIQPKPWPLPEPLPDPAALLGNGSENLLPLTTAPPLLSSGKVLAAAGGNTTAVTHRSARRKKGKALELLLLPLEIA

SEQ ID NO: 139302 - protein, 47 aa, Oryza sativa
  Clone ID: PAT_MRT4530_40607C.1.pep
ICMHAGLRTRVYESLSVMKRTRLCQKENVCCRCNQYSPIKSILSFLI

SEQ ID NO: 139303 - protein, 167 aa, Oryza sativa
  Clone ID: PAT_MRT4530_40608C.1.pep
RCQTVALPYWPFPKIFPIFPTSMYQNTPPLPCSFSPSPANKRAGVVREGARRAAPPRFPTVPPPLPASRAAVSHRQLRRLPAPAPDAQRCTVTLAIGPGGREAYMVARTGAAGGAGEEEGRLAGAVEQKRKYLPMAMLQAPVTRPVSLASAMVSSASPLVADRRAFW

SEQ ID NO: 139304 - protein, 590 aa, Oryza sativa
  Clone ID: PAT_MRT4530_40609C.1.pep
MWPICMEKIVSQLLRPIIPWFLDKFKPWTVSKAGVQELYMGRNSPLFTSMRVLPETSDDDHLVLEIGMNFLSAEDMSAVLSMQLHKSVGLGMTANMHLTSMHVEGKILVGVKFVRSWPFLGRVRLCFVEPPYFQMTVKPLIGHGLDVTEFPGISGWLDKLMDTAFGQTLVEPNMLVIDVEKFVSTPSDNDWFSIEERPPVAYVKLEILEGSDMKPSDMNGLSDPYVKGRLGPFKFQTQIQKKTLSPKWFEEFKIPITSWESLNELAMEVCDKDHMFDDSLGTCTIDIHELRGGQRHDKWISLKNVKKGRIHLAITVEDISEEKGLEESSRKVDAELPISTSVNKFNADELPDEKQVLVDEVEHINIDGQEQPGGLYVHRPGTGVPKTWESRKGRARNPDTEIYKEVDKSKDAPTPKSSGQGGFFGSFFRKSLKKGSFHDIDPGIPTTPGPQSATELDPKIPQTPRPNLKEAGEKRTSIKIVVDEDAKPTRSAGDAENLTEDVAKVMEKNAGEPGRSLTSILSRKISRKKPEDKLSDIPEQTEAQASELVKEGPVPVEGKPIDGHPTTENGHGDGASGEAAETQTSAQTSQ

SEQ ID NO: 139305 - protein, 116 aa, Oryza sativa
  Clone ID: PAT_MRT4530_4060C.1.pep
METQAGVRFLATNWTLNPESRPIKKAGVVDVARKFGSNGFDWQIGVQHTHLYERTHAYPTPMNTSRRRDEHMLRFMKSPQTPRYQQGKCSLNYECVLLLYQYTCMFVSDRNIPCTS

SEQ ID NO: 139306 - protein, 308 aa, Oryza sativa
  Clone ID: PAT_MRT4530_40610C.1.pep
MSCSFRFHSSALPAAAARLHLSRGLRPPPSRRRLHNTFSPTLSISPPSRHAAIAAAAASPLGASQEASAMAVSASEGVGQYDLLIVGPGVLGRIVAERWQQEHPGCKIFGHTATTDHHSELTQLGIIPSLKGPAVQKVPYVIFCAPPYRTDDYPGDLRVAASNWNGQGSFLFTSSTAVYDCSDNGLCSEDSPCVPIGRSPRTDVLLKAENAVLEAGGSVLRLDAASLAIAIMKRRLRARVFVGCDNQPLSRQEIMDLVNRSGKFDTKFQGFTGTDGPLGKRMENSKTRAEIGWQPKYPSFTEFLGLSN

SEQ ID NO: 139307 - protein, 51 aa, Oryza sativa
  Clone ID: PAT_MRT4530_40611C.1.pep
MPDPALPHLDLVSLAGGSASNGETWHGMVAAVHGRRRPAWWRWCTIGGGRH

SEQ ID NO: 139308 - protein, 111 aa, Oryza sativa
  unsure (1)..(111): unsure at all Xaa locations
  Clone ID: PAT_MRT4530_40612C.1.pep
MVPTWAPSPSRLSFLFLFALPRPRXGSGGRSMPADGAAEGQAERRQATGGRGCQRRKRQRRRSPASAIATLCRPLRPRCPAGRRXPPRSVAARCLPPRQAAERRLPPRPAA

SEQ ID NO: 139309 - protein, 159 aa, Oryza sativa
  Clone ID: PAT_MRT4530_40613C.1.pep
MVSTAIGKLHNYMIMRAGHRVAGGRGLTVDQSARISWPPRASSGVCPSPLRWPHYAAVATLAREAIPGTFVSRACRSGLEEGPNPGLVATWIPLGTGRIVCAGSVAHNVCAARVPRAAPTGPVLAYRVNDTGRQTRAGPTPAQGRVFGAAAAFPDITML

SEQ ID NO: 139310 - protein, 159 aa, Oryza sativa
  unsure (1)..(159): unsure at all Xaa locations
  Clone ID: PAT_MRT4530_40614C.1.pep
GIVKYKTSYYSFYLPVACALLLNGARTRGAGERKSARRGMGVYFQIQDDYLDCFGDPXEVIGKVGTDIEDYKCSWLIVQAMELANENEMKILYENYGKSDPKCVAEVKSVYRELDLQDIFLEYESRVYKHLVSTIDAETDRAIRDILKSFLKKIYRRKK

SEQ ID NO: 139311 - protein, 100 aa, Oryza sativa
  Clone ID: PAT_MRT4530_40615C.1.pep
AARGRRRGNDELRSGARSGEAAGGSVRRGGGRRQVAGEARGAASASSRAGAAAGQRRRRRLQAGAGDATGAREQEAGPGEQQAGSSPIFHSWIRPWCWVW

SEQ ID NO: 139312 - protein, 239 aa, Oryza sativa
  Clone ID: PAT_MRT4530_40616C.1.pep
MGDHLALLVDRLLTESTLDAAIRKQVADLQAETVAIDYCCDGDGDGGSARKMVECRICQEEDWDTSMEAPCACCGSLKYAHRKCIQRWCNEKGDTVCEICLQQFKPGYTAPQQLFHYGSIPMNFRGNWEIARQDLHDSQIITMVPSERDFMDGYEDYLPIRTRSSTLCCRTVAIIFMSLLVLRHTLPLMIGGDGEYSLALFSERREMYMTSSDSEEEEDYSDTDPAQPIHSQTRLVPIY

SEQ ID NO: 139313 - protein, 57 aa, Oryza sativa
  Clone ID: PAT_MRT4530_40617C.1.pep
HRCFVSLYCQMKICSTTLIQLICFHYIRKNHEEKNSLRMSIRREHKKGHTKCLVCVS

SEQ ID NO: 139314 - protein, 75 aa, Oryza sativa
  Clone ID: PAT_MRT4530_40618C.1.pep
YRGWSCPLQALLHVQLGVETKGNPKHAFPSKETSRHDETHSDSDLPVRPATCRRSDWPSTGGLTAQHKAVRPAHS

SEQ ID NO: 139315 - protein, 173 aa, Oryza sativa
  Clone ID: PAT_MRT4530_40619C.1.pep
VTSYRGGRRRRRRGLRRRRTRSAVSGAGCCAFTCRDAPRRRRRRSRHRPSCSSRAARPASRACSWRPRRRTTTTRRRRRHHPSASPSWRRRRSPRGGRRRLPLPPRPAGGGRRRRLSRTGAGRCRRPGAGSRRTAPPRRRRPRPRRSPSLRRRRPRRPPARARRSWSTGVTST

SEQ ID NO: 139316 - protein, 50 aa, Oryza sativa
  Clone ID: PAT_MRT4530_4061C.1.pep
MEGIRGKRKKVLGISWKEMEHSYVTNVLHKDEAFAFGYDEEATIRAATAR

SEQ ID NO: 139317 - protein, 96 aa, Oryza sativa
  Clone ID: PAT_MRT4530_40620C.1.pep
MNLFPPKSQQTEWQSGQRCACPGHVRHLVTRRMHAKSRAKTTYPNAQQQPQPHADLSSQLTRSPSTDQQSGTGSTFHTVVRPNSQLGSSREFEHVK

SEQ ID NO: 139318 - protein, 199 aa, Oryza sativa
  Clone ID: PAT_MRT4530_40621C.1.pep
MAEQERCGELTGLQGAQCGGGLMRRRAPSSTPAASPEPRYARLQRSYPTSLPGKHHCSWRQQPCRDAPRRRRRRSRHRPSCSSRAARPASRACSWRPRRRTTTTRRRRRHHPSASPSWRRRRSPRGGRRRLPLPPRPAGGGRRRRLSRTGAGRCRRPGAGSRRTAPPRRRRPRPRRSPSLRRRRPRRPPARARRSQQWR

SEQ ID NO: 139319 - protein, 98 aa, Oryza sativa
  Clone ID: PAT_MRT4530_40622C.1.pep
MGATLAGRIWDGTDCSHRVVRAVDGAAGGLAFVRFERPPPAAEAFATLPHPLALLLAADLARQIRHPTERGERHGPLSRAVFGPTPQPVGQHGTARLL

SEQ ID NO: 139320 - protein, 157 aa, Oryza sativa
  Clone ID: PAT_MRT4530_40623C.1.pep
MADTDVQYRCFTGGLVWDTDDHCLEDGLCTYGEILHCKNINDSETGRSRGFGFVTFSSEQSMRDAIEGMNGKELDGRSITVNEAQSRRSGGGGGGYGGGGGGYGGGRGGGGYGGRGGCGLVRYEGRLPQIVICDNLERSPEASQDSEIPNVPSSTMK

SEQ ID NO: 139321 - protein, 106 aa, Oryza sativa
  unsure (1)..(106): unsure at all Xaa locations
  Clone ID: PAT_MRT4530_40624C.1.pep
TARRGSEDGRPIKQTAKISPSPLKSLNGSNPERANRRRCCDGGPARWRAHVAASAAAAPPRLAGGRARGRRQAVCYGXPRRRGGGGGNPKAAAKPTLPVPGEGRWR

SEQ ID NO: 139322 - protein, 94 aa, Oryza sativa
  unsure (1)..(94): unsure at all Xaa locations
  Clone ID: PAT_MRT4530_40625C.1.pep
VEFGWALRRPMRLPDSPRHERGLPAALRGVGVKPEVWCAWLEGXVMRRVLSRPLSDVDLNVNIVVCVPRPVLDGEFNAHSAXNSIREFLGATST

SEQ ID NO: 139323 - protein, 66 aa, Oryza sativa
  Clone ID: PAT_MRT4530_40626C.1.pep
GTEWNISGHSSSRISESVIYDFALQEARQCEWWTLGLGSQLLCVMICSLLLSYTIRINQSISNSTH

SEQ ID NO: 139324 - protein, 117 aa, Oryza sativa
  Clone ID: PAT_MRT4530_40627C.1.pep
SGPSCTSTGGLNNTLSRPVVWTRSHMMSCQKMRMRSCLISSSSSLVVTEFPCGSSSTVSSELHSFVPGAAERVRSSSSQVVQFGSLGPLERSSSPSFSTPTCTCWKSSYLSLKIFRS

SEQ ID NO: 139325 - protein, 57 aa, Oryza sativa
  Clone ID: PAT_MRT4530_40628C.1.pep
FFSESLNQKHSFRMVVTKCMIHPPTIENVDIGPSRIPTNCGNWVLKHEIVSYVFCLA

SEQ ID NO: 139326 - protein, 384 aa, Oryza sativa
  unsure (1)..(384): unsure at all Xaa locations
  Clone ID: PAT_MRT4530_40629C.1.pep
GGSVPCRQVVRRNHRAGHDRLHHDYFSEHPTYGLVLFRQRFRISRPLFLRIVNDVVAHYNYFVKKRNIASALGLSPLQKITAALRMITNGVAAATQDEYLQIAENTTIESLKRFVRAIVENFGDEYLRYPTSADTCRLLAPGEQRGFPGMLGSIDCMHWEWKNCPAAXQGMHKGKXSKPTIVLEAVASRDLWILHAFFGLLGSHNDINVLQHSPLFARLAEGQAPQVNYEINGHNYTMGYYLADRIYPSWATFVKTISEPQGNKKKHFAQQQEAAHKDVERAFGVLQARFAIVRGPARFWYAHQLKEIMIACIILHNMIVEDEKDDEGLDYNYDDEGERVTPLHTPIAELQDFIQNHHNIRNRQTHSQLQEDLVDHLWQFHGRN

SEQ ID NO: 139327 - protein, 130 aa, Oryza sativa
  Clone ID: PAT_MRT4530_4062C.1.pep
RGLVPNSAPRSNLVQFSASRASPSLLVLVPVDFGGFWGSGLGDFGGFLGSGRELEVELASIGTPSELFCAIIRRQLPPAPIHANAGLGFAAGIDEGHDPRRHRPVGLDPQPPCSSVPPSRLALAWIVPVF

SEQ ID NO: 139328 - protein, 357 aa, Oryza sativa
  Clone ID: PAT_MRT4530_40630C.1.pep
MGSRSGSSTTTSTPPVAPDENRPPVVKGPAIFSYTCAGLVTGVALVAVVVFYCNRHVRRRAHVVVAGGGGREDDDVRSVAGVAAKIPEFAYTGSASGGEGAAQCSVCLGAVRGGEMVRRLPACKHLYHVECIDMWLASHATCPLCRTEVEPPPGDGGGRPAPAADETPGNGDLEARIGGGVEAGTQAEIGGGEGAEEIGEEGVDSDAGGRDRRGLVDDLARDESGRCCHGMDVAKSHIATLYIVWQRRFARAAARERLERRPAAVAADEAMRLRGEEATQGGGRRCRINPMRGGGAEEIGEGGGDRGSGEEADGRGGGDAAAGRGGDAAAGRGGDAAAWGGDQSERGDERSRDGGGD

SEQ ID NO: 139329 - protein, 521 aa, Oryza sativa
  Clone ID: PAT_MRT4530_40631C.1.pep
MAPSKLRAALGAVKDRTSVGLARVGGADEVAADLAVAIVKATAHGESVPGDERHVQEILTLTCYSRARVAACVSAVSRRLGRTRAWAVAVKALALVHRLLADGDPAYEQEVFLATRRGRRMLDVSHRFPHRSSRSRATWDFHGFVRAYAAYLDDRLKHRMKGRVASQGKWCSDGRRDGFPDITDGSYEVGEAVAEVWALVPRDTPATGTTTTEELVSKAQHLKHILQRFIGCRPTGKARTNKVVAAALHRLVKESAVMYRELTEVMAMLADRFAELETPCCVRVHSIFTSIAKLFDELDEFYSWCRSATICRPSEIPEVERVAQKKLDLMDEFIRDRQPASSRWWRCTPPAPSSPLAPIASNGDNSSKASPAEPAPAGALVVVDDHMADFLNLGEESTPLSTEEQDRDLTLSLFGDDPATPAPKWETFDDDQCDDWETALVQSASKFAATQSATVLALPPPPGATGGEVADPFAASLAVPPPTYVQMMDMQARQRLLANEQMMWQQFETQQMAAWSYSSLL

SEQ ID NO: 139330 - protein, 53 aa, Oryza sativa
  Clone ID: PAT_MRT4530_40632C.1.pep
AFFFSKICREFYGIRNIKRNKNHKCITVDFSVDAIFVMPPLVRRPYAFGLLSV

SEQ ID NO: 139331 - protein, 134 aa, Oryza sativa
  Clone ID: PAT_MRT4530_40633C.1.pep
MDAAPPWDLQDVGGVDGLDTKYAGNPILSLAGSSNLHEHNGDIDPDGVDREGGNTKSVPPHLIATSNVPYLPLVGRTQLHRRYLVSALCLPHARSTRRHLNNTPANNTDALSTADLVALTPPPMPRRSSMSTVH

SEQ ID NO: 139332 - protein, 62 aa, Oryza sativa
  Clone ID: PAT_MRT4530_40634C.1.pep
ICMTFLFRFVSPRCFNLSHTMMHDFIFLSCTTYTCRTIQSPRYPPDWSVHIATCGAVFVAMW

SEQ ID NO: 139333 - protein, 49 aa, Oryza sativa
  Clone ID: PAT_MRT4530_40635C.1.pep
CHATCFPLHSALILSMHYFGISARLLYMFLFLRLFNPNLSLIFSSPLLI

SEQ ID NO: 139334 - protein, 87 aa, Oryza sativa
  unsure (1)..(87): unsure at all Xaa locations
  Clone ID: PAT_MRT4530_40636C.1.pep
HADSQCCQQLRMIAANSLTXQPITTVFSAIVQAATATNSLPGVYFDQAQAQAQAMLXPLNLPSISRYLPKLHTLLPCSIPTVGGIWY

SEQ ID NO: 139335 - protein, 125 aa, Oryza sativa
  unsure (1)..(125): unsure at all Xaa locations
  Clone ID: PAT_MRT4530_40637C.1.pep
CLAPSGEFVSHQSSHQCQPPFFPIHPVFQLRNCQVXMQQLCCQQLRIDSRQPRSFPPLPRAHLATCFRRLVQQLQLQQFAGVYFDQAQAQAQAMLALNLPSICGIYPSYNTAPCSIPTXVGGIWY

SEQ ID NO: 139336 - protein, 598 aa, Oryza sativa
  Clone ID: PAT_MRT4530_40638C.1.pep
MAGGGGKKEKGEGLGRALIRQRNKAAAAVKERGDALAHARRRAQPLESVIEVSDIDAVLERAAEADRLHSALADSVSSSDLVIDLDATGETDEERRRMQKEQEALHAGSLRVPRRPPWNSRMTVEELDENERRAFLVWRRNLARLEENDKLVLTPFEKNIDIWRQLWRVLERSDLLVMVVDARDPLFYRCPDLEVYAKEIDEHKRTMILVNKADLLPMNIRKKWADYFKAHDILYVFWSAKAATATLEGKILSGYSEQDSASLDLDTKIYGRDELLKKLQTEAEFIVAQRRAAAIKEDSRATSSDSVSSVAKHVVVGFVGYPNVGKSSTINALVGEKKTGVTHTPGKTKHFQTLIISEELTLCDCPGLVFPSFSSSRHEMVSCGVLPIDRMTKHREAIQVVADRVPRSVLEQIYKITLPKPKPYESQSRPPTAAELLRAYCASRGHVSHAGLPDETRAARQILKDYIDGKIPHFELPPGMVDTENEHEETSGLEGPTTSAYNESGGSDSDERDDTVDPAQPDMRHVLSDLESFDLATEGSKPAGKKKKEASHKQHKKPQRKKDRSWRVGNDGGDGTAVLRVYQKPAVNLSAVSASDKT

SEQ ID NO: 139337 - protein, 109 aa, Oryza sativa
  unsure (1)..(109): unsure at all Xaa locations
  Clone ID: PAT_MRT4530_40639C.1.pep
MFHPVVFSKPLTKPCPKFHASQPVACPYQPPGIDSAPTTFSPAQAISSVPGDLCQQLPATNQFAGVYFDXQAQAQAQAMLALNLPSICGIYPSYNTAPCSIPTVGGIWY

SEQ ID NO: 139338 - protein, 219 aa, Oryza sativa
  Clone ID: PAT_MRT4530_4063C.1.pep
MSTCADWVAARRASHRQRQYSAAAAVASAAALQPASLVSGDRTAAADVPDTAGVQQPENLNSICVVSSTVHVGELVGPGPPNQNGPNVERPKASPTTSCIREFASVQQKVPLGTGNSQYQARSNDRKRFDTVREKQRSSAVGIPCEKVTRVRILRGQLRSTVGIGTRLRKKLRSRRSRIPGDEVGYEMAYGGWTPCGRDLRNGLHEVCVQASVFAKEIE

SEQ ID NO: 139339 - protein, 81 aa, Oryza sativa
  Clone ID: PAT_MRT4530_40640C.1.pep
SSCRRMEREEMSKRLWTLELRMQCYRKARRNRRYIWQLLEWEIDALERLQRGLQFARQTGGDPLVSRSTPSPRGSRLIEFQ

SEQ ID NO: 139340 - protein, 63 aa, Oryza sativa
  Clone ID: PAT_MRT4530_40641C.1.pep
QLFRRLCSSYSYNQFAGRATSIRLKLKPTAMLRPKLSRAISGIYPSYNTCSPVAFLPVGGIWY

SEQ ID NO: 139341 - protein, 156 aa, Oryza sativa
  unsure (1)..(156): unsure at all Xaa locations
  Clone ID: PAT_MRT4530_40642C.1.pep
IFFFPLPSIPACSASPXFDALTQVYRQYXLHPQLMLQQQMLSPCGEFVRHXSTVATQFFQSXPVFQLRNCQVMXQQECCQQLRMIAQXKSHCQAIXSVQAIVQQLQLQXSLAGVYFDQTQAKAQARLALNLPSISVVYPSYKTAPCSIPTVGGIWY

SEQ ID NO: 139342 - protein, 201 aa, Oryza sativa
  unsure (1)..(201): unsure at all Xaa locations
  Clone ID: PAT_MRT4530_40643C.1.pep
AHHSSACPPAAARRTRRRAPPGGGAPARAAAARARRRRRAPPPPRPVTGTYPASPRTAASRARTPPPPPPPPPSSSSCCRRGSRRRRRLPPPRLLQRRGXAAGEARTSPSRALPPSACARXPRVVLAXVPAGDGAPARAAAAADRARRQRRAPPPPRRAAGTWRASPRTSSRSRPYSSSSSCRCGAASSPRRRRPRRRWRR

SEQ ID NO: 139343 - protein, 416 aa, Oryza sativa
  Clone ID: PAT_MRT4530_40644C.1.pep
MDRIVGAKYKLGRKIGSGSFGEIYLATHVDTYEIVAVKIESSKTNHPQLLYEAKLYNALQGGTGIANIKWCGIDGEDNVLVIDLLGPSLEDLFVYCGRRFSLKTVLMLADQMITRVEFMHSKGYLHRDIKPDNFLMGLGRKANQVYIIDFGLAKRYRDATTNRHIPYRENKNLTGTARYASCNTHLGIEQSRRDDLESIGYVLLYFLRGSLPWQGLKAATKKQKYDKISEKKLATPIEVLCKSHPVEFASYFHYCHSLTFDQRPDYGFLRRLFRDLADREGYQYDHVFDWTLLKCKQSQKAKAQQQDPGVSSRAVPTNIEKHQVSVSRPTEASGQLESEQRPAIRMQFKSTAENSRSSNRHTDKLRVGTSTENVLLQSTSFGHADAPRRNIAISKTQGLVDSNAHGTNNPGPSNHL

SEQ ID NO: 139344 - protein, 113 aa, Oryza sativa
  unsure (1)..(113): unsure at all Xaa locations
  Clone ID: PAT_MRT4530_40645C.1.pep
APVAVIRKHQVQHRWATPLAGQSPVFQLRNCQSHAAPVCQQLRMIAQQSHCQXYSVQAIVQQLQLQQFAGVYFDQAQAQAQAMLALNXPSICGIYPSYNTAPCSIPTVGGIWY

SEQ ID NO: 139345 - protein, 151 aa, Oryza sativa
  unsure (1)..(151): unsure at all Xaa locations
  Clone ID: PAT_MRT4530_40646C.1.pep
NHFLLCSLYSPSAPLPFDALTQVYRNISSTPAHAHQQMLSPCGEFVXHQCSTVPTPFFQSPVFQLRNCQVMQQQCCQQLRMITQQSHCQAISSVQAIVQQLQLQQFAGVYFDQAQAQAQAMLALNLPSICGIYPSYNTAPCSIPTVGGIWY

SEQ ID NO: 139346 - protein, 162 aa, Oryza sativa
  unsure (1)..(162): unsure at all Xaa locations
  Clone ID: PAT_MRT4530_40647C.1.pep
MKIIFFFALLAIAACSASAQFDALTQVYRQYQLQPQLMLQQQMLSPCGEFVRQQCSTVANPXSFQSPVFQLRXNCQVMQQLCCQQLXRMIAQQSHCQAIYSVQAIVQQLXLQQFAGVXYFDQAQAQXAQAIVAPKLPVNMPVSYPSYNTAPCSIPTXGGIWY

SEQ ID NO: 139347 - protein, 51 aa, Oryza sativa
  Clone ID: PAT_MRT4530_40648C.1.pep
PPGGFQAPVSCCTQAIFCLGNVPLVSLPVPFCASRFNLGSNNFLRGLPSPS

SEQ ID NO: 139348 - protein, 459 aa, Oryza sativa
  Clone ID: PAT_MRT4530_40649C.1.pep
MEFFTEYGEASQYQIQEVVGKGSYGVVAAAVDTHTGERVAIKKINDVFEHVSDAIRILREIKVLRLLRHPDIVVIKHIMLPPTRREFRDIYVVFELMESDLHQVIEANHDLSPEHHRFFLYQLLCALKYIHSANVFHRDLKPKNILANSDCKLKICDFGLARVAFNDSPSTIFWTDYVATRWYRAPELCGSFFSKYTPAIDIWSIGCIFAEILTGRPLFPGRNVVHQLDLITDLLGTPSSETLSRIRNENARGYLTGMQRKHPIPFSHKFHNADPLALRLLERLLAFDPKDRPTAEEALADPYFRGISKLSREPSRLPVSKFEFEFERRKLTKDDVREMIYREILEYHPQMLQEYIRGGEQISFLYPSGVDRFKRQFAHLEENYSRGERSTPLRRQHASLPRERVCSSVDSNNQDSDNEERRAISSIARTMISPPRSQEKGKNLCICLSKWHNQSKLQS

SEQ ID NO: 139349 - protein, 49 aa, Oryza sativa
  Clone ID: PAT_MRT4530_4064C.1.pep
MSERPRGIKIQRQHLNEVSKVFGAENANKLKQFLPPGSQKVSGLSIQEV

SEQ ID NO: 139350 - protein, 96 aa, Oryza sativa
  unsure (1)..(96): unsure at all Xaa locations
  Clone ID: PAT_MRT4530_40650C.1.pep
MVSAHTSLTGQAIKQVVQADWSQASYKLQQFAGVXYFDQAQAQAQAMLXKLPSIXGIYPSYNTAPCSIPTVGGYLVLNCTSIVVQERKIKSCIIVW

SEQ ID NO: 139351 - protein, 639 aa, Oryza sativa
  unsure (1)..(639): unsure at all Xaa locations
  Clone ID: PAT_MRT4530_40651C.1.pep
MAGGGVVDGVRRWLRRRRGRTASAYQPLRSSSLARHPGGDGGLEVVPGPFALPAAIRVPARNSPPPPDAQLRNEVVVVAQQNNSFKFSGSKYYKVASGVGILQQDDLFSRSACAFQVLEYILTVPWQKNYSVELSIVGVRTWELRSFMKDEIFVHDRSNDSNMEARDDMNQWNCAMRTSDMEFFTEYGEASQYQIQEVVGKGSYGVVAAAVDTHTGERVAIKKINDVFEHVSDAIRILREIKVLRLLRHPDIVVIKHIMLPPTRREFRDIYVVFELMESDLHQVIEANHDLSPEHHRFFLYQLLCALKYIHSANVFHRDLKPKNILANSDCKLKICDFGLARVAFNDSPSTIFWTDYVATRWYRAPELCGSFFSKYTPAIDIWSIGCIFAEILTGRPLFPGRNVVHQLDLITDLLGTPSSETLSRIRNENARGYLTGMQRKHPIPFSHKFHNADPLALRLLERLLAFDPKDRPTAEEALADPYFRGISKLSREPSRLPVSKFEFEFERRKLTKDDVREMIYREILEYHPQMLQEYIRGGEQISFLYPSGVDRFKRQFAHLEENYSRGERSTPLRRQHASLPRERVCSSVDSNNQDSDNEERRAISSIARTMISPPRSQEKGKNXCICLSKWHNQSKLQS

SEQ ID NO: 139352 - protein, 49 aa, Oryza sativa
  Clone ID: PAT_MRT4530_40652C.1.pep
MDYMDPVSGPGEEKPLGIGSVPTYVRWERVAKLRDACNWALDFLKTQGN

SEQ ID NO: 139353 - protein, 443 aa, Oryza sativa
  Clone ID: PAT_MRT4530_40653C.1.pep
MAKRSSPDPASSSPSASSSPSSPSSSSSEDSSSPMSMPCKRRARPRTEKSTGKAKRPKKESKEVADPSSNGGGGGKRSSIYRGVTRHRWTGRFEAHLWDKNCSTSLQNKKKGRQGAYDSEEAAARAYDLAALKYWGPETVLNFPLEEYEKERSEMEGVSREEYLASLRRRSSGFSRGVSKYRGVARHHHNGRWEARIGRVLGNKYLYLGTFDTQEEAAKAYDLAAIEYRGANAVTNFDISCYLDQPQLLAQLQQEPQLLAQLQQEPQVVPALHEEPQDDDRSENAVQELSSSEANTSSDNNEPLAADDSAECMNEPLPIVDGIEESLWSPCLDYELDTMPGAYFSNSMNFSEWFNDEAFEGGMEYLFEGCSSITEGGNSMDNSGMAEYNLFEECNMLEKDISDFLDKDISDFLDKDISISDRERISPQANNISCPQKMISVCN

SEQ ID NO: 139354 - protein, 280 aa, Oryza sativa
  Clone ID: PAT_MRT4530_40654C.1.pep
RSVVCCTCSEGRRGRRSGGGGQGPGGVDAGGGRATRGGGGGEGAGALEGGRGRGAGAAGEVARGAVVVADQHLGPAEDADVLRGRAAPTRTRPTRNNGGELPRPPTRSRPPPRHPPGAGPRSTAAPPPRPRKRRRAAVPPRAAPRRLRRHQRGGRRAAPRRLHPCRTSPWISPRRPTTTTRAPATTRWRSLRSRRRRRSSLVSLCFRRRRPRPRGCAWRRPPAWSTGLRRPTRLRRCRSARRAPPPPPSQPPPWSAGRRRRARRRRPWRGRRRGWSRTRG

SEQ ID NO: 139355 - protein, 487 aa, Oryza sativa
  Clone ID: PAT_MRT4530_40655C.1.pep
MAKRSSPDPASSSPSASSSPSSPSSSSSEDSSSPMSMPCKRRARPRTDKSTGKAKRPKKESKEVVDPSSNGGGGGGGGKRSSIYRGVTRHRWTGRFEAHLWDKNCSTSLQNKKKGRQGAYDSEEAAARAYDLAALKYWGPETVLNFPLEEYEKERSEMEGVSREEYLASLRRRSSGFSRGVSKYRGVARHHHNGRWEARIGRVLGNKYLYLGTFDILYNLSQNYRFKNLFYKNTDSVASFITKLQLSDTEAKLPADTQEEAAKAYDLAAIEYRGANAVTNFDISCYLDQPQLLAQLQQEPQLLAQLQQELQVVPALHEEPQDDDRSENAVQELSSSEANTSSDNNEPLAADDSAECMNEPLPIVDGIEESLWSPCLDYELDTMPGAYFSNSMNFSEWFNDEAFEGGMEYLFEGCSSITEGGNSMDNSGVTEYNLFEECNMLEKDISDFLDKDISDFLDKDISISDRERISPQANNISCPQKMISVCN

SEQ ID NO: 139356 - protein, 84 aa, Oryza sativa
  Clone ID: PAT_MRT4530_40656C.1.pep
HPARSCVTTDLHKLASRSNARNKQPQERSTVVRIVLRRWLLKSQRAAPAMARSELVRERGRSRKWVASGGSSAGVGTRPKSPSC

SEQ ID NO: 139357 - protein, 77 aa, Oryza sativa
  unsure (1)..(77): unsure at all Xaa locations
  Clone ID: PAT_MRT4530_40657C.1.pep
KKPWIKTECKHDESMLLESNPTFVXWYGNPDDNGLHTYXGYRVYAKPGEYRHFTSNDKALTLXYASKHEQYVDCVGG

SEQ ID NO: 139358 - protein, 162 aa, Oryza sativa
  unsure (1)..(162): unsure at all Xaa locations
  Clone ID: PAT_MRT4530_40658C.1.pep
LFLPCDRSVEGGLMENWGGLYCGSFSTCFGGKRPFWVHEWETHGTCGYPEIQDEYDYFSTALYLYSKYNVTKALKKAHIYPRGGRKYLVGHIVSAIEFSFGAMPSIVCKNGSVQELRLCFHKDYQPRDCXLRVRTLLEETIALDTSLYHHINHMHLAILQKE

SEQ ID NO: 139359 - protein, 80 aa, Oryza sativa
  Clone ID: PAT_MRT4530_40659C.1.pep
SITHGFNLPLISTHTNHTFLGGFYWGLIKGGDSPAGRVRLFCNFTGPTFSGAKNNWGQIFTRRFPGGGEPPKRGFFGVKL

SEQ ID NO: 139360 - protein, 149 aa, Oryza sativa
  Clone ID: PAT_MRT4530_4065C.1.pep
MEEEEEEEEEEKKERKKERVVELISMEDERWKLSSSKGRSKSGRSCSSSSNYYYHSSDFNSSNATTLSRSYSASVTASRHATTAWSAAGAGGGGASSSSSSQHQHQQQQQQSNNSQRLSKKCVEAVKEHRARFYIVRRCVSMLVCWRDY

SEQ ID NO: 139361 - protein, 739 aa, Oryza sativa
  Clone ID: PAT_MRT4530_40660C.1.pep
MTSHRGLTTTTLCLAIAIAAELLAGRAEGQCQNTKCGDVEIPYPFSTSLDKCAASAFEFDCNDTGNGVYKPFYGNVEVLSVSLQLGQVRVMNHISSSCYNLSSKEMDSDTWQLNMTGTPFMLSDSNKFTVVGCRTQAYIADQDYVGKYMSGCVSVCRRGDVWKATNGTCSGIGCCQTAIPKGLDYYQAFFDDSSMNTSGIYNRTPCSYAVLMDSSNFTFSTTYLTTSEFNNTYDGRAPMVLDWAIRSANSCEEAWKKMDSYACKSTNSECFNSTNGPGYTCNCSKGYEGNPYLEGPNGCRDIDECQDSKTHHCYGECRNKPGGFDCNCPAGSKGNATIPDGCRKDFRLPLKARLAIGAVICVLVGLFSFLGWEVIRHKRSIKKQALLRQTHEFFLQHGGQLLLEMMKVEGNVGFTLYERGEIETATSNFNKEHIIGEGGQGTVYRAALNGVNVAIKKCKEIDESRKMEFVQELVILCRVRHPNIVKLLGCCLQFEAPMLVYEFVQNKTLQELLDLHRSKRFHVTLGTRMRIAAESAEALAHLHSLPHPIIHGDVKPSNILLAEGLIAKVSDFGCSTIDENTQAVPKGTPGYIDPDYLLEYQLTSKNDVYSFGVILLELLTSKKPLSKDRKSLTLMFQEAMAEGTLFELLDSDMVDEASMRVMHQAAVLASQCLVVPGMTRPTMVLVAAELRRLALADEVQQCPQPPLVLEDLSFVEMGSTTSGVYSLEKKAVLSIEFAR

SEQ ID NO: 139362 - protein, 120 aa, Oryza sativa
  unsure (1)..(120): unsure at all Xaa locations
  Clone ID: PAT_MRT4530_40661C.1.pep
KKKMLQSVQIDGGCDEVIWPYTKHKSFTAKSMYNLLTFGGLRIQTCRXVWKSRIPLKIKHFLYLSGRGKLPCANQLVKRKWKGGNELFLRGEEQKVLDGWHEAILDKLYQVKPSVLPAAI

SEQ ID NO: 139363 - protein, 97 aa, Oryza sativa
  Clone ID: PAT_MRT4530_40662C.1.pep
MAFKANTVSTSSMHPTFAQDTGAGRSRRRHSNSVRVGTVTRGPRPHPCAGRGEVTTLPAAARHDGGTPDEGGDPATAVEAVTNMSGEAVFVGMPVCV

SEQ ID NO: 139364 - protein, 57 aa, Oryza sativa
  unsure (1)..(57): unsure at all Xaa locations
  Clone ID: PAT_MRT4530_40663C.1.pep
IKSGRLAMLXMLGYFVQASVXGKGPLETLADXVVGQVSENAWGYATFFVPGKWSGAP

SEQ ID NO: 139365 - protein, 248 aa, Oryza sativa
  Clone ID: PAT_MRT4530_40664C.1.pep
MWGPERGTASLTLGPTALDDKLFYLAPRHAYPHTPTESSTTTPAHSTHHSLHAHVRTTPASRRRRRRARAMHVLHGVRRRRASLPRHALTRWPSRPPAPRPAPPPPPSPPRRPAPAPPPPPSPPRPPVPPARPPWPPPRRRRRALAPPPPWQARPPARPARARPPSPPPPPARPQLAPPPWSPPPRPRRAPPPRPQPRPAPPASPPSAPPPRRRRPPASPPLAPPRPARWSGSQPLRWPLMSMRRCAY

SEQ ID NO: 139366 - protein, 131 aa, Oryza sativa
  unsure (1)..(131): unsure at all Xaa locations
  Clone ID: PAT_MRT4530_40665C.1.pep
SRRPFASLHLTGGGAISGCPLLSDFRWSLPEVEPYPANLFMADSSMSCGVQATAKKLDLEAPVVATTATSDNNGHSELQLCSQMWCGRRETRRHEFRRCSVCGAANYSSRVSQVLDWXHKAQCMPMDLWLL

SEQ ID NO: 139367 - protein, 137 aa, Oryza sativa
  Clone ID: PAT_MRT4530_40666C.1.pep
MGLKASVELSVSYIFAASTFFVLGDVPGAFGTWCFLSNSLRALKTNLSRAGREISLALQQRCWKADLLQKRGIDRHSDYPFYTQELKTVSCNVLSPPSWPDLATSHGCSLQVWWLTARACLPEHLRKGFDSLVLLVS

SEQ ID NO: 139368 - protein, 125 aa, Oryza sativa
  unsure (1)..(125): unsure at all Xaa locations
  Clone ID: PAT_MRT4530_40667C.1.pep
PLFCLGFPKARPNRVKGPCFAQGSQFRQFPRKMVGFLAPPASPCVLKDLVSNFFPEVFGKGFGKSPSXFFPFPNGFFPRGRFFRAPKFFFGKFMGVPGASKENVGFKLAGPFWTSKAGAGGVPPP

SEQ ID NO: 139369 - protein, 414 aa, Oryza sativa
  Clone ID: PAT_MRT4530_40668C.1.pep
MDSSTTETEERERERERESSRKPWSSAPSTVARIPEEQGSRNPCEDALAGKPEQSATRPEEVSLPATLLERKLKEKLALSRTFDRPKQISASEGVMAEKKACARQVRLQCSERVGQEAPCPESTRNWGMDETGSGPWMSHSQELPSRKELTYHPLARRRWMPQICRRRLARRRPSDPSSRSGQSAEARVSEDVERNPLYSKTTRNYYTSVRCLLQYSGINNWHSRHSCCPRLTTMLLSQLLHGHGIDRPMNCMVQEFNSSVHALPAAMPLRNHKINVPRNVGTVSVWQRREIHGGSICVGATARDDASSRSVALSRLHGIMYLHVAAVDLDQQQQACTTLPKTNPDASCTEQYVYSNTPVHLYIYASMFGTCGSAETGNVGEARRPEPGGETRERDKKGGERVAEPSGMPETRR

SEQ ID NO: 139370 - protein, 70 aa, Oryza sativa
  unsure (1)..(70): unsure at all Xaa locations
  Clone ID: PAT_MRT4530_40669C.1.pep
LSLTGTSITLEVEXGDTINNAHSTSQDKEVIPETRRANVAGRRCVXPTFADYNMQKESTLYLVLRILGEI

SEQ ID NO: 139371 - protein, 90 aa, Oryza sativa
  Clone ID: PAT_MRT4530_4066C.1.pep
FALPQSTHVIVCHPFRHQFKRCIPTSSLVVLYCCLPSLTQLIQDPYCRNQDECKLWRNLANNQGTIDMLTMEHASMPNETEISSTYSTTV

SEQ ID NO: 139372 - protein, 592 aa, Oryza sativa
  Clone ID: PAT_MRT4530_40670C.1.pep
MVSDASKKKAAQKKAAAAAKRGAKASSSSSSSSSAADKAANGIAALKLSDRTCTGVLASHPLSRDIHIESLSLTFHGHDLIVDSELELNYGRRYGLLGLNGCGKSTLLTAIGCRELPIPEHMDIYHLSSEIEASDMSALQAVICCDEERMKLEKEAEILSAQDDGGGDALDRIYERLEALDASTAEKRAAEILFGLGFNKQMQAKKTQDFSGGWRMRIALARALFMNPTILLLDEPTNHLDLEACVWLEETLKKFDRILVVISHSQDFLNGVCTNIIHMQSKKLKLYSGNYDQYVQTRSELEENQMKQYKWEQEQIASMKEYIARFGHGSAKLARQAQSKEKTLAKMERGGLTEKVVRDKVLVFRFTDVGKLPPPVLQFVEVSFGYTPDNLIYKNLDFGVDLDSRIALVGPNGAGKSTLLKLMTGDLAPLDGMVRRHNHLRIAQYHQHLAEKLDLDMPALQYMMREYPGNEEEKMRAAIGKFGLSGKAQVMPMRNLSDGQRSRVIFAWLAYRQPQLLLLDEPTNHLDIETIDSLAEALNEWDGGLVLVSHDFRLINQVAQEIWVCEKQAVTRWEGDIMDFKEHLRSRAGLSD

SEQ ID NO: 139373 - protein, 71 aa, Oryza sativa
  Clone ID: PAT_MRT4530_40671C.1.pep
KSRENRWLNPQYIHAFFCEDYIHVIHTPFLNVNISSFYVFKRPFVLLFLVCRSRSRAAARDLEPDAWADAW

SEQ ID NO: 139374 - protein, 104 aa, Oryza sativa
  Clone ID: PAT_MRT4530_40672C.1.pep
PTPFSQSPVFQLRNCQVMQQQCCQQLRMIAQQSHCQPITSVQAIVQQLQLQQFAGVLPSIQASKPQAPSLLFAPKPSRSICRYLPQAYNTCLPVAFLPVGGIWY

SEQ ID NO: 139375 - protein, 123 aa, Oryza sativa
  unsure (1)..(123): unsure at all Xaa locations
  Clone ID: PAT_MRT4530_40673C.1.pep
MASNKGKTSELILIISXVLAATATMADHHIDQPVYSLRERCQTGMGYPMYSLTRCQAVANRQCASHGAPGGDVDEHLRQDCXRQFAAVDDNWCKCSALNHMAGGIYKELNATDDRHPMAQVFP

SEQ ID NO: 139376 - protein, 76 aa, Oryza sativa
  unsure (1)..(76): unsure at all Xaa locations
  Clone ID: PAT_MRT4530_40674C.1.pep
DDRSKQGPSPWPGTLYSGSGDCAASYKLQTVSGVYFDQAQAQAQAMLXLNFRQYRYLPKXQHGCPGSIPTVGGIWY

SEQ ID NO: 139377 - protein, 179 aa, Oryza sativa
  Clone ID: PAT_MRT4530_40675C.1.pep
MDTTASWRLLPPAASSPPPRRQAALLRRHPAATTTSSSSGKRTTRLLCLLHDTPPPAPPPAADEISSPPLRKLAAALQCGAIWAAVEAPAALAVTGEEDLDILGILPTVAAIAFVYLFVFPPIIMNWMRLRWFKRKFVETYLQFMFTYLFFPGWVASAPLVCFRRSPWGPTCGFPGSWP

SEQ ID NO: 139378 - protein, 156 aa, Oryza sativa
  Clone ID: PAT_MRT4530_40676C.1.pep
MKIIFFFALLAIAACSASAQFDAVTQVYRQYQLQPHLMLQQQMLSPCGEFVRQQCSTVATPFFQSPVFQLRNCQVMQQQCCQQLRMIAQQSHCQAISSVQAIVQQLRLQQFASVYFDQSQAQAQAMLALNMPSICGIYPSYNTAPCSIPTVGGIWY

SEQ ID NO: 139379 - protein, 140 aa, Oryza sativa
  Clone ID: PAT_MRT4530_40677C.1.pep
MEALGDMEGEEGQRRQQQIRVVRCPKCEKFLPELPNYSVYVCGGCGATLQAKKNSASENSSEKSDGGHVKYLEVLESSPDNKGAASKDTCEAAQEGEAKNGEAKAEERQVLLDRMAACDDSRIPREPNALKLEASLRDDS

SEQ ID NO: 139380 - protein, 234 aa, Oryza sativa
  unsure (1)..(234): unsure at all Xaa locations
  Clone ID: PAT_MRT4530_40678C.1.pep
MEVTGKGLGVGSETPCDKTDKLLFETATTKQIGDGAKVKFWELAWLXQRLKDVTPLVHAASRKKSRTLKHAALVDQWLXVDLALPTNEGWTTDLIDQLITIWSAVQNVHFTEHEDQITWKLNNHGEYTATTAYKVQLLGTTSSNFDTLIWRPWMPHKCKSFAXLILQYREWTSDRLATRGWPNGSTCPLCRQTQETALHLLAEYRYIRRIWNEIAQWTGNDHLRPSSWQVTLTV

SEQ ID NO: 139381 - protein, 506 aa, Oryza sativa
  unsure (1)..(506): unsure at all Xaa locations
  Clone ID: PAT_MRT4530_40679C.1.pep
RDAAVLAEAAVPGSVTPALASPRGSAVAERKGTERVALLGKAAGLVDDRPAGRRPPRRRRQGRFRFWHSRKGWWHTRPQTTPPRHVTTGGPPLVGSGARTPAPDSWQWGREGSSWRRTTTRKTINRRKTAYGSGRVQQPQLPGAPLXACAEVGKFGMEEEIEMLKGDTNVLMXNLSELRQQQQTTDHQLQTLGKRLQGMEQRQQQMMSFLAKAMHSPGFLAQFVQQNENSRRRIVASNKKRRLPKQDGSLDSESASLDGQIVKYQPMINEAAKAMLRKILKLDSSHRFESMGNSDNFLLENYMPNGQGLDSSSSTRNSGVTLAEVPANSGLPYVATSSGLSAICSTSTPQIQCPVVLDNGIPKEVPNMSAVPSVPKAVAPGPTDINILEFPDLQDIVAEENVDIPGGGFEMPGPEGVFSLPEEGDDSVPIETDEILYNDDTQKLPAIIDSFWEQFLVASPLSVDNDEVDSGVLDQKETQQGNGWTKAENMANLTEQMGLLSSHHTG

SEQ ID NO: 139382 - protein, 249 aa, Oryza sativa
  Clone ID: PAT_MRT4530_4067C.1.pep
MGRGRVELKRIENKINRQVTFSKRRNGLLKKAYELSVLCDAEVALIIFSSRGKLYEFGSAGINKTLEKYNSCCYNAQGSNSALAGGEHQSWYQEMSRLKTKLECLQRSQRHMLGEDLGPLSIKELQQLEKQLEYSLSQARQRKTQIMMEQVDDLRRKERQLGELNKQLKNKLEAEADSSNCRSAIQDSWVHGTVVSGGRVLNAQPPPDIDCEPTLQIGYYQFVRPEAANPRSNGGGGDQNNNFVMGWPL

SEQ ID NO: 139383 - protein, 191 aa, Oryza sativa
  unsure (1)..(191): unsure at all Xaa locations
  Clone ID: PAT_MRT4530_40680C.1.pep
MTYLEFLQKNQWGQEASVGADGVQVDDVCAGSLGGHATAGVWPGRWREIGGRACAWTAAEGLENGGQESRADGSSRRIILELGDRDDSYPWRKYGQKDILGARFARSYYRCAQMLGCTARKQVQQSDDDPSRLEITYIGLHTCGGDRPSSXRLPPTPPTARVATQQPVVTVFCRQLCSRSWRNMSRRRRTT

SEQ ID NO: 139384 - protein, 379 aa, Oryza sativa
  Clone ID: PAT_MRT4530_40681C.1.pep
MKIIFFFALLAIAACSASTQFDAVTHVYRQYQLQPHLMLQQQMLSPCGEFVRQQCSTVEIPFFQSPVFQLRNCQVMQQQCCQQLRMIAQQSHCQAVSSVQVIVQQLQLQQFTGINFDQTQALAQAMLALNLPLICSIYPSYNTAPCSIPTVGGIWCCYYAAYLKDTGGSCLSLLAGTPSSRAVTPSGLAAASSSPASLRFTGKSSEPRPGRRPVVSPPLHRLQLPLPHRSGAGRPRHLLPRRRRVDLHPGLPSDSSGDRRHCRAGFSILLVDSSDWPFLLAGSSSRCAATVVDIAAACSTPSLPPCSCCRLPSSPPRRFRASSFRRSCPVIVFILASASSSLVPVASRLRLRIAAEIVPSPFVSAAHSSSSFPCLVAWW

SEQ ID NO: 139385 - protein, 84 aa, Oryza sativa
  unsure (1)..(84): unsure at all Xaa locations
  Clone ID: PAT_MRT4530_40682C.1.pep
MQASCAANKLRMIAATSLTCQAITVLQADCAAADSLQQFAGVYFDQAQAQAQAMVALNXPSICGIYPSXNTAPCSIPTVGGIWY

SEQ ID NO: 139386 - protein, 155 aa, Oryza sativa
  unsure (1)..(155): unsure at all Xaa locations
  Clone ID: PAT_MRT4530_40683C.1.pep
MKIIFFFALLAIAACSXASAQFDAVTQVYRQYQLQPHFMLQQQMLSPCGEFVRQHCSTVETPFFQSPVFQLRNCQVMQQQCCQQLRMIAQQSHCQAISSVQVIVQQLQLQQLTGIYFDQTQALAQAMLALNLPLICGIYPSYNTAPCSIRTVGGI

SEQ ID NO: 139387 - protein, 155 aa, Oryza sativa
  unsure (1)..(155): unsure at all Xaa locations
  Clone ID: PAT_MRT4530_40684C.1.pep
CLCKDKKKKKKGGRITVLNSQKLPVLKLIKMSVNRGVMRRNAILAPHWNINAHAAVYATSGSARLQVVSSEGRRVFDGELRRGQMXVVPQTFAVAGRAGDEGFAWVSFQTSDGAMXAPVVGKSSALRGMPADVLDNAFGVSREEARMVKFGRGQE

SEQ ID NO: 139388 - protein, 77 aa, Oryza sativa
  unsure (1)..(77): unsure at all Xaa locations
  Clone ID: PAT_MRT4530_40685C.1.pep
PLAIPPCSPSAQFDAVTQVYXQYHSPHLMLQQQMLSPSVSSYRXQCSTVATPFFQSPVFQLRNCXVMQQQCCQTAQG

SEQ ID NO: 139389 - protein, 106 aa, Oryza sativa
  Clone ID: PAT_MRT4530_40686C.1.pep
ICMTFLFRFVSPRCFNLSHTMMHDFIFLSCTTILYNSNHPASPTARYRQMRHQGSRCCQLWVSITAQSLHGHSFRGPNHQLGALPACSLHPQGQHASNNLFVSLVS

SEQ ID NO: 139390 - protein, 104 aa, Oryza sativa
  unsure (1)..(104): unsure at all Xaa locations
  Clone ID: PAT_MRT4530_40687C.1.pep
QVPNPRCGREAPGVSTEKLPKVMHHQCCQQLRMIAQQSHXAQPLPSVQAIVHQLQLQQXSGVYFDQAQAQAQAMLALNFPSICGIYPSYNTAPCSIPTVGGIWY

SEQ ID NO: 139391 - protein, 493 aa, Oryza sativa
  unsure (1)..(493): unsure at all Xaa locations
  Clone ID: PAT_MRT4530_40688C.1.pep
MRFEGPLDEALLGLQDLFEALLLRLKHPGRGGGGGEVSDVEEEYELGTDDEVDAAARIARTLAGNDCLDICLDIYVKVRYRRAAKAMMRLNPEYLKSYTPEDVDAMEWEALESAMALWGPHFHVAISGVLAAERWLCARVLAPLPPAVWPECFAKIAARIAAAFFRFADGVAAAAAREPQRLFRLLDMLDAVARERGRLDELLSGESATLLAIRERAREVERALARCRVXELYEFGLRVETHYIVRYAVNYLKCLASDDYRGTMDAALRAGAGDDDGGDSEALAEAASNVLEALHRHVEAARRALPDAVASHVMAMNSYWYIYMRARGSELASLVGDDTMRRRYKASAEEAAWEYQDAAWGPLVRLVSGSSSGAAKAWPSPEEAREKAAAFADALEERARRHGAEYKIPDGDLREQIKAAAAKAVRGAYAGFLRANDSAVASGGGRREFLPVDAIEGMVRRVFDEMGDGGGVAGSAGRTRSRRQSGNLEGFEG

SEQ ID NO: 139392 - protein, 81 aa, Oryza sativa
  unsure (1)..(81): unsure at all Xaa locations
  Clone ID: PAT_MRT4530_40689C.1.pep
QDAGSPSPATRSSPGSPAAAKKPRIEAPSPMPTFKVRELVNTXSVLHEAIEYIKFLHDQVAVSTTLQSLRCGRPVQLDFSH

SEQ ID NO: 139393 - protein, 247 aa, Oryza sativa
  unsure (1)..(247): unsure at all Xaa locations
  Clone ID: PAT_MRT4530_4068C.1.pep
APPPPRIAPHPAVPARIKERGITPRVSLSRFPLFSLSLSLGFVRIHPAKFAGVFNGARDLRARFPLSXAALSPSRCYKIVPRASLFRFRRSPLALAVGFVPAPCSSLSAVAVDLRFAADVAPDVLPTRRPLLRLRRVVADPVRRSASPADRRSTVVIVIPSRAAVFFRSGRRSRRRRCPGVSRGPPFAFPLPSSLSGAAPPRRWSPAVTIGARARPPPFGRAGEAAFGRAPRLPGGARPSTARARGF

SEQ ID NO: 139394 - protein, 78 aa, Oryza sativa
  Clone ID: PAT_MRT4530_40690C.1.pep
MFAEIEIKTAGGDFRLPTTNQTRHCFTRYVEYHRCLNAKGDDAGVCEKFAKYYRSLCPGEWAEIWNEQREHGTLPGPL

SEQ ID NO: 139395 - protein, 156 aa, Oryza sativa
  unsure (1)..(156): unsure at all Xaa locations
  Clone ID: PAT_MRT4530_40691C.1.pep
VVVPEVAAAAASGGGGGGGGGGGRRGHGGGGRIRARAHPPPRPLHRRGAGATGVRGHXPPRPPCRRGAARARAIGRRLGRGPSFCSSPLLYASAVFISNLLNVTATAVDSVAPVAADPLVLTSVVGDLIPTRWLACPRGEVREGERDREEEGRSGH

SEQ ID NO: 139396 - protein, 163 aa, Oryza sativa
  Clone ID: PAT_MRT4530_40692C.1.pep
GRRRACTTYASNGPKNWLLTLAQMCSEKSDYSIPLAGVHQRSGEQVSGTSAFDVLHREKAAISHTRDGSCPRADAVRDLSPKRASGGRQYPRWLCWATLAFGKRHSATLLHLRDPMADQQEKDVQAQMGEIFSTHSLSRLLPSDANSQMEDTRVTGYGPCLMG

SEQ ID NO: 139397 - protein, 307 aa, Oryza sativa
  Clone ID: PAT_MRT4530_40693C.1.pep
MAVVARWPRRSSLSTVGLNVAQQSKPNQKSVLVVILDLALPFVLLSAYLRARDASFVEAVVAQRHSVEHLERVGGWRRMYGRRASQLLKEVDSCEAGQLVPFNGGIMDMVPPKDPYIQVRVLEDIGEVSLGDHSISLTKNSLHFLRRTDTEQFISQGLPHLHRGTHPVTHFTQAAVPHVQRHGHVNRSTSRLPPPSASRVPPSSPKWFQRRRWPEEADPAPRRADLVGGRGGVEVAGAVVAGSSSSSPSRKPSPSPAGGRRLPRRWPDLVRPRACQSYMATTTLTLFAGATMRELVGSYPTRGIGIG

SEQ ID NO: 139398 - protein, 140 aa, Oryza sativa
  unsure (1)..(140): unsure at all Xaa locations
  Clone ID: PAT_MRT4530_40694C.1.pep
APQIXRGXGSXXPRGRPPRPQXRPRVMRATSPLSXXXRXRHPSIYIWSASNTHHLLTAPRRTPLRLRVHLNDDDDASSPGGGSAGGGGGXSPTVSLLGVGWKLCSCAGFSGPSQVTTSRAPLYYYCFCFLTFPVSPRTRV

SEQ ID NO: 139399 - protein, 410 aa, Oryza sativa
  Clone ID: PAT_MRT4530_40695C.1.pep
MSVSTAAVPTANTNGNHALSMDSHSSQDVRRRTVVVARKKASPELLADGGFNGTSSVDKITDKKDLSHTIRGESVLGKSKYPLEARKDAIASAAAADRQKKSGAKQEKAKLSKVEGFKKTTKMLQVQLDILDKKLGNEIDKTRRDITKQFEDKGNKLEIKMKALEGKTDKLDKSLAELRDMGFVSKKEFDEIVEQLKKKKGLDGTVGDISLDDIRLFAKEIVEMEIERHAADGLGMVDYALASGGGKVVKHSEAFRKAKSFMPSRNSLLEQAKKMLEPSFGQPGECFALQGSSGYVEIKLRTGIIPEAVSLEHVDKSVAYDRSSAPKDFQVSGWYEGPEDDSDKESRVVTNLGEFSYDLEKNNAQTFQLERTADSRVINMVRLDFCSNHGNSELTCIYRFRVHGREPGSP

SEQ ID NO: 139400 - protein, 228 aa, Oryza sativa
  Clone ID: PAT_MRT4530_40696C.1.pep
MSVSTAAVPTANTNGNHALSMDSHSSQDVRRRTVVVARKKASPELLADGGFNGTSSVDKITDKKDLSHTIRGESVLGKSKYPLEARKDAIASAAAADRQKKSGAKQEKAKWEIALSVLMKLCLLISAVAWMGQLFWRWQNGDLSFTTLDMESRLSKVEGFKKTTKMLQVQLDILDKKLGNEIDKTRRDITKQFEDKGNKLEIKMKALEGKTDKLDKSLAELRDMGFCF

SEQ ID NO: 139401 - protein, 593 aa, Oryza sativa
  Clone ID: PAT_MRT4530_40697C.1.pep
MMGAAVTMVDRRMAFAAEADVDSKAAFGFFGGECFVGEGDLVNPAPPPPQQQQVHEGGFAAEDESDGDDDDDDDDDVDDIEELERRMWRDRVRHKRLKELQQSRAGRESRAGDAGGGGRQQRQSQEQARRKKMSRAQDGILKYMLKMMEVCNAQGFVYGIIPEKGKPVSGASDNLRSWWKEKVRFDRNGPAAIAKYQADNAVPGCDGDAGGAAPAGPHSLHELQDTTLGSLLSALMQHCDPPQRRFPLEKGVPPPWWPEGSEAWWPEAGVPKELGPPPYKKPHDLKKAWKVAVLTAVIKHMSPDVDKVRRLVRQSKCLQDKMTAKEIVTWLAVLKQEEDLYLKLHPGALPPPLSAASFNASVSGEYDVEGVDGDEAGNNNLQKAQNDATAFMDLTTTMDAALSNNKFLIMPLMKEEAIDVDFIQKRSEPELMLSSDSHARVYTCGNVQCPHSNYALGFLDRNERNAHQYACKHNAAAAAAESKPPPPHIFEPLGSFDFDLPVDGQRCLAGLMTMYDNDVAAATQMHHHHHQQQQANFFIRDDAPFGGDVAATAAAAPEFRFSSNFNVTGGGAVDYGGAMQQPPAKYAGSNWFY

SEQ ID NO: 139402 - protein, 281 aa, Oryza sativa
  Clone ID: PAT_MRT4530_40698C.1.pep
KKGISWEFLVPSSSQGMKRRVSISMADSSAARPTVLVTGAGGRTGNIVYNKLKERSDQFVVRGLVRTEESKQKIGGGNDVYIADIRDRDHLVPAVQGVDALIILTSAVPKMKPGFDPSKGGRPEFYYEDGMYPEQVDWIGQKNQIDTAKAAGVKHIVLVGSMGGTNPNHPLNSLGNGNILVWKRKSEQYLADSGVPYTIIRPGGLQDKDGGVRELIVGNDDELLQTDTKSIPRADVAEVCVQALQYEETKFKAFDLASKPEGTGTPTKDFKSLFSQVTARF

SEQ ID NO: 139403 - protein, 149 aa, Oryza sativa
  Clone ID: PAT_MRT4530_40699C.1.pep
MHPPVARARKIRGGDGETGRRRLPQRGGVGEEEEPGRHGGSRGRSGTKSSGARSPLIASVATRRSPPATMPLVRAHGAPLFFADADGYPTRIMDAGEGFVFLKHYGSGWVFALSLETMMFIDLPHRRFYSGPALPYRMALHPPLPALAD

SEQ ID NO: 139404 - protein, 371 aa, Oryza sativa
  unsure (1)..(371): unsure at all Xaa locations
  Clone ID: PAT_MRT4530_4069C.1.pep
WRSLPPVCIPAWPCHSAVRAVSADPGHWVRGRVAGRHRGLGPRWAGTPSLPSAPPPSPPSPPHPQRPLSHPIAAHSSGPPRPRQPGPGPPRAPMVPAGAHXAAAERAPERPERRGKRKGGLRLTPGSTATTGTAAEAEEGAGAVRDGEDDGAPAVGERSGGVAEVDGDAAKPKEVTPSGEEVRSDDGGEPELGGDGGEKVRRCGLDSDGEERRRVAETEEESTGNAYIASGGGERGRRGRKRARRSRPPLKTPAKIAGAIPNGSEGERERKEGEKREGITGXIPPTLMRAGTAGGGGIGGGGGARARXGRRTRREVGDDRWAPPVSEGGGRARLSAARARGGGXMGRGERREREGELGRAGPREEGGKEDF

SEQ ID NO: 139405 - protein, 76 aa, Oryza sativa
  Clone ID: PAT_MRT4530_406C.1.pep
SAVGSICAEAEKVLNQDLYFKQTVKYVGEPMTHLESIASSAVRAAIKVKASVIICFTSSGRAARLVETDMLIQGCS

SEQ ID NO: 139406 - protein, 45 aa, Oryza sativa
  Clone ID: PAT_MRT4530_40700C.1.pep
RFEPSDQGIKLGVIDRISAFKIHIILLAPPLKSYYLFLAKSEGKT

SEQ ID NO: 139407 - protein, 164 aa, Oryza sativa
  unsure (1)..(164): unsure at all Xaa locations
  Clone ID: PAT_MRT4530_40701C.1.pep
QLESHHNEDHFACFALLAIAACSAXLRQFDAVTQVYRQYQLQPHLMLQQQMLSPCGEFVRQQCSTVATPFFQSPVFQLRNCQVMQQQCCQQLRMIAQQSHCQDISSVQAIVQQLQLQQFAGVYFDQAQAQAQAMLALNLPSICGIYPSYNTAPXSIPTVGGIWY

SEQ ID NO: 139408 - protein, 172 aa, Oryza sativa
  unsure (1)..(172): unsure at all Xaa locations
  Clone ID: PAT_MRT4530_40702C.1.pep
MXAGTMXLSSXXXXXRGAVELLRALPAKARIXMXKNAXKPKXGGVLPGTRGTGAXRVLYLXPLSXEXXNXSXGXFPGQXGWKTPGFXPNPKTSAKNRKXKXXFSRWAXLGPSGXFSPELLPRNGXQFPARPCWFQGRGXXIXSXXGGLDYLGXPXLIHPQNILPXLGGXVVL

SEQ ID NO: 139409 - protein, 170 aa, Oryza sativa
  Clone ID: PAT_MRT4530_40703C.1.pep
MSNNNGNPGYYNNRNAGDQSDYKATIAILFSVFFVVILIRLIHFIINQSNNRAPANGGAAATSDRRLGGGGGVSRVPARLPRQRPGGAGAGNGTAMAWQPPPCTSTYRRDDGWKETACPVCLSEFADGELIRLLPECMHYFHAACIDEWLRTRATCPLCRAAPAGDVSTA

SEQ ID NO: 139410 - protein, 338 aa, Oryza sativa
  Clone ID: PAT_MRT4530_40704C.1.pep
MAAWRVPALLKSHVGDEISYHGGAVLRGDILVTVVWYGKFKLAQKAIVVNFLLSLTATPPPPNATTPSAEKWWSTIAAVVLASGSRARRPMGGRERSGGRQSAGVGGAREEQSAGRGGDSGNGGGGRRASAGVCGMEAAPCDGGVRGEACDEGEEAMAAGSTKWDLRRREHPVTHKDEHPDGGDNVADIYMAKVFAAGSSHSQQAHNLRSTSPSGVMLLDAITVRVRSSAHQPWATQVILGLLHHRFNWPYHRRAPHSLPTSNIFTAMTRGDQRERDRQRAQARKPVVKGRDDGLTPEQRRERDAKALQEKAARKAAQATGQGGNGGAGAKGKSGGKK

SEQ ID NO: 139411 - protein, 113 aa, Oryza sativa
  unsure (1)..(113): unsure at all Xaa locations
  Clone ID: PAT_MRT4530_40705C.1.pep
PPQGQQSTGGASDXKEGEAPQQPEQEQKRGNQPKNTHPPAGTXTNTTKTRQPKHPQDQATTQQPSGRPAEEQGAPDXATQARQPGHRSAPRPGRDTTARRRHRHRGEPDERAD

SEQ ID NO: 139412 - protein, 128 aa, Oryza sativa
  Clone ID: PAT_MRT4530_40706C.1.pep
PPAVGPPPGSMGGRATGLGDRRRGGSGTADQIERDREPVCRRKEKECGSVFVGAVLGTATPRFGHYYSVQFSVTPFFFSVTLFIPRERPAYTELGPFKQNREISRTPSVQKQVYFFIFIGLSRKKKTK

SEQ ID NO: 139413 - protein, 259 aa, Oryza sativa
  Clone ID: PAT_MRT4530_40707C.1.pep
MPPIKLGDMSSFVRTTDPDDFGLRFNEEEANNCTKANALILNTFDELEADVLAALRAEYARIYTIGPLGTLLNHAADAIGGGLSLWKQDTECLAWLDTQQPRSAVENLVPGGPNALPPEFVVETDGRRCLATWCSQEQVLRHPAVGCFLTHSGWNSKCESVASGVPMVCWPVFADQYINRKYACESWDVGLRLDEEVRREQVTAQVKQVMESEEMRQDAARWKAKAEQAARLGGSSYKNLQSVVEVIRSFASDSKKAEA

SEQ ID NO: 139414 - protein, 362 aa, Oryza sativa
  unsure (1)..(362): unsure at all Xaa locations
  Clone ID: PAT_MRT4530_40708C.1.pep
IANFLNYGQRLTFVNSVLSSLPTYYMCTLQLPKKIIEHIDRARRHCLWRKSNENSNRPQSLAAWNLVCKPKDKGGLGIIDLHYQNTSLLMKHLYKFYNEQDLPCVKLWNKYYHNVDLPPHACKEIGSFXVEEYLQTDSSLPVQNHFNLPLSSQAMTEWRSLENIIQHTSLSSSNDSWDYPWDGLFSHSKKIYSLFFAHLQPAVPLTHIWKSKCTLKLKVFLWLLLMSWLNTLAMLQHKNLLSTPNISCGMCNSNQPEDLTHLFFACPFAAQCWSYLGIQWHGNLEFMNMILVAKQNFGLSFFYEVIAVASWNIWLRRNDLIFNNIRPSLSRWKCLFKEDFTLLLHRVNRQDIPAWQSWIDQL

SEQ ID NO: 139415 - protein, 236 aa, Oryza sativa
  Clone ID: PAT_MRT4530_40709C.1.pep
MAKKQPPPLSSKGCVKEKMLKLGLTDVNEGNVVPTRKGTLVQKYKIKVVADDPGTSSSKDGDGKQALDGSAQPSIKGATDGSLGNQGDNSQGVHGVQGDGVHGVQGDGAQGMQGGNFNSEVAQDFFNNFQDRVDYAVHHALINQSGVLVNTLSNMMKSIADGSIAEHQAAGPVYLQGGVFPNYQSLITDVQPSIQAIPSVAPTTQPAAPASIPLSATSAMAPGQLVNPRLLMREQP

SEQ ID NO: 139416 - protein, 134 aa, Oryza sativa
  unsure (1)..(134): unsure at all Xaa locations
  Clone ID: PAT_MRT4530_4070C.1.pep
PRPPLSAFDLRPWPRAAPDLPLPDGRPSSSSPPRCSXSAAPPSSSPSPSSPPSSSPSRSPPSSSRSPPSSSRPPPDPLPSPASPPXPQPHLSPPLPPAIQRRELGEERGRRTAPSLSTAPPPSTAPSPSTVPPL

SEQ ID NO: 139417 - protein, 303 aa, Oryza sativa
  Clone ID: PAT_MRT4530_40710C.1.pep
MVFTLPAEFGIDQVDVDEVEEESAKLVLSPEQAVFEKPEGTDNRHLKPLYINGYVNGKPMSKMMVDGGAATRKGTLVQKYKIKVVADDPGTSSSKDGDGKQALDGSAQPSIKGATDGSLGNQGDNSQGVHGVQGDGVHGVQGDGAHGMQGGNFNSEVAQDFFNNFQDRVDYAVHHALINQSGVLVNTLSNMMKSIADGSIAEHQAAGPVYLHGGVFPNYRSLITDVQPSTQAVPSVAPTTQPTAPTSTPLPASSAMAPGQPMNPRLLMREQPQHGGQVTSRLTQDQVAAMFLPSQPVVDPIQQ

SEQ ID NO: 139418 - protein, 123 aa, Oryza sativa
  unsure (1)..(123): unsure at all Xaa locations
  Clone ID: PAT_MRT4530_40711C.1.pep
NEGSPLLLARRPPTPVSSHSLTGEHPNPSHPASASNFVSSXPPLAPIPILRAEVAPGVLLLPPHRLSPVTIPPSLSTPHQVFCVIPQKSLGVQPKTDPSTETGLDLPLPSSTYFQLVNFDFCF

SEQ ID NO: 139419 - protein, 79 aa, Oryza sativa
  Clone ID: PAT_MRT4530_40712C.1.pep
GGRIGPGAGPFGASGPGVVFRLPGVSPEGGRGGLPRHQRPGAPRDPLKNLVKRVTLRASQYSTLFYPVCDQSQTGQIKG

SEQ ID NO: 139420 - protein, 272 aa, Oryza sativa
  Clone ID: PAT_MRT4530_40713C.1.pep
MAGATDLPPKGGFSYDNCARNAMLVEKGLKMPGFLKTGTTIVGLVFQDGVVLGADTRATEGPIVADKNCEKIHYMAPNIYCCGAGTAADTEAVTDMVSSQLQLHRYATGRESRVVTSLTLLKSHLFSYQGHVSAALVLGGVDVTGPHLHTVYPHGSTDTLPFATMGSGSLAAMSVFESKYKEGLTREEGIQLVAEAIRGGIFNDLGSGSNVDVCVITKGKTEYLRNHQLPNPRTYVSSKGYNFTKGQTVVLSTKITQLKPKVEVTEGDAMEE

SEQ ID NO: 139421 - protein, 27 aa, Oryza sativa
  Clone ID: PAT_MRT4530_40714C.1.pep
PIRFTWCQSAFTFLGLKARENNAFMDI

SEQ ID NO: 139422 - protein, 220 aa, Oryza sativa
  unsure (1)..(220): unsure at all Xaa locations
  Clone ID: PAT_MRT4530_40715C.1.pep
VPYELILNLIIALYMGFDYWHWQRCLVAWDSVCMPKNVGGLGVKNIEKQNTALLVRXLHHLHADHSSWASWIWGEHLNSNLAXIINMLGTHWDSMMSLLPILQKHTSVXQVGDDQRTSFWHDHWCGDVLADKFRPLYTHSLEKNASVAQVLADDLRTHFAPRLSTAAEDQSNHLSSLLMQCLVTHHQDGKIYSANHICSGNLETTVGSRNRRPRFVHVTR

SEQ ID NO: 139423 - protein, 352 aa, Oryza sativa
  Clone ID: PAT_MRT4530_40716C.1.pep
MGGERQPGGGEGGEGGVIAVIALRGLDGGEVGAVELGDERRGEERRGGDGGCAASLTSSHRMLLLLEPRAAPKRTSVVLWRENPKVTDFGRPHRAVTLINNSKGVAKTLSFSFLPQTFSPFAGGGGGGGAARRRCLPNLIASKLRAPLVPPIVADALQKFSLKKTAVQKALDALADSGQISFKEYGKQKIYLARQDQFNIPNGEELEEMKKANIKLQEELADQKKAISEVESEVRGLQSNLTLAEIKSKEAKLQREVQEMEEKLNKLRNGVILVKPEDKKIIEESFSEKVNQWRKRKRMFKELWDNITENSPKDQKEFKEELGLEYDEDVGVNLQSYSDMLTSLSKRRKVSR

SEQ ID NO: 139424 - protein, 125 aa, Oryza sativa
  Clone ID: PAT_MRT4530_40717C.1.pep
KTKKGNRRGQEQKNPWEEKKKERSVHFFFTKPPLDRCLITKRTPDRRYPGPPLQMPGSNTGSLANDKEGGGLPSSFSPGGRAERGALSLSVLAGVLAGRRCPPPPNANTPIRGPRVVLRSEKNNP

SEQ ID NO: 139425 - protein, 85 aa, Oryza sativa
  unsure (1)..(85): unsure at all Xaa locations
  Clone ID: PAT_MRT4530_40718C.1.pep
TXCFLCFVCCLAVPEADVPAALLVVAEVPVPPPTXAPSTAEGXVRTGASSWLRLRLPHRRVLRASHLXVGGGGGGGGDVAVGFQT

SEQ ID NO: 139426 - protein, 59 aa, Oryza sativa
  unsure (1)..(59): unsure at all Xaa locations
  Clone ID: PAT_MRT4530_40719C.1.pep
YSLAPPRCRYFVWVTVLNGCXAADRLRARGLPHPDRCVLCGFAIVGRRLIKPTDEVSTP

SEQ ID NO: 139427 - protein, 66 aa, Oryza sativa
  Clone ID: PAT_MRT4530_4071C.1.pep
YTMHPNYISLDKLIRSISSTACSADHVIMTWLVLRAIKNSSQHSFRTEPSVFYGTQNKTSHWHMIS

SEQ ID NO: 139428 - protein, 70 aa, Oryza sativa
  unsure (1)..(70): unsure at all Xaa locations
  Clone ID: PAT_MRT4530_40720C.1.pep
FFFFFFSSNSALVSLYPMSLSSAHDGRCGALFPFYTTDPKRHLNTTPSDPNNGVVXTRTPLLXGHGGQSX

SEQ ID NO: 139429 - protein, 64 aa, Oryza sativa
  Clone ID: PAT_MRT4530_40721C.1.pep
ICYTKVTLSIASYDISQIIGLIYCMQSFSMDKFEVSCGTNFMLWWAVAYVQARRSSPAILAATA

SEQ ID NO: 139430 - protein, 68 aa, Oryza sativa
  unsure (1)..(68): unsure at all Xaa locations
  Clone ID: PAT_MRT4530_40722C.1.pep
MWKNRQHRKSWGYCMFAGGKGMRPTNEDVGVFAGGPLNLTSAKISXLTPIFAXRCGDVDRQRRYLHLH

SEQ ID NO: 139431 - protein, 475 aa, Oryza sativa
  Clone ID: PAT_MRT4530_40723C.1.pep
GAAVERGCVHARVVVVFEFSIGATFSKGFNRGLGTLTAGGLALAVAELSKHLGKLEEVILIISIFIVAFFTTLTKLHPKMKAYEYGFRVFLLTFCYVMVSGYNTGKFTDTAVSRFILIAIGAAVSLGINVGIYPIWAGQDLHNLVAKNFIGVAKSLEGCVDGYLKCMEYERIPSKILVYQASDDPLYSGYRAAVEASAQEETLLGFAIWEPPHGAYKMMKYPWRNFTKVGGALRHCSFAVMALHGCILSEIQAPPESRKVFSAEIQRVGIEGAKVLRELGDKVKTMTKLSSSDILAEVHLAAEQLQKRIDEKSYLLVNTERWDTSKQAEGIKEVLNGTGIMGKENKIEVKEPTIVEQTTAHHSKSFAVNSFLSRHDSSSTVDFKLLSWPARRSFHPNLPLEDEETKTYESASALSLATFASLLIEFVARLQNVVNAFQELSDKANFKEPVQEPVAVSTSDGGFLHKICKFVGIKS

SEQ ID NO: 139432 - protein, 265 aa, Oryza sativa
  Clone ID: PAT_MRT4530_40724C.1.pep
TLNEDTEPSIPPGFGPFATLPLWGIHNDAKPAVTHSTPVQALQSIRKDSEECQPSAAVSRSDTPCSTSGTQTCRKSLRNRPPIDYSRFEHISDEDSDVEIVEKDVSSTRRRQQLPKGVLRGCAECSDCQKVIAKWNPAGARRPVLDEAPVFYPTEEEFEDTLKYIESIRPMAEPYGICRIVPPSSWKPPCLLKDKSIWEGSKFSTRVQKVDKLQNRKSSKKGRRGGMMKRRKLAESEENSATAHTQTGMQQSPERFGFEPGPEFT

SEQ ID NO: 139433 - protein, 75 aa, Oryza sativa
  Clone ID: PAT_MRT4530_40725C.1.pep
YRFWLFILGCVDGYLKCMEYERIPSKILVYQASDDPLYSGYRAAVEASAQEETLLGFAIWEPPHGAYKMMKYPWR

SEQ ID NO: 139434 - protein, 126 aa, Oryza sativa
  Clone ID: PAT_MRT4530_40726C.1.pep
MGRTAGNAVLLTAQLIVRAILRSLRRYHEYCRMLLLAGVAAVSHAIVWSRGSHNKATGCWLADPAAQPHAGRCAIACRLRRAADFCRVVAFRPASTCHHAIHASGYPSHVTEVEPWRFSGARRRED

SEQ ID NO: 139435 - protein, 470 aa, Oryza sativa
  Clone ID: PAT_MRT4530_40727C.1.pep
MAATIETMSLPFATQNSSQNSEPSFDWLTGRVQMIGSRCRCRRRRECSTQINPVSRRRLQIRRFVVRSPVIAVAHAARTHALADRGTPAVEWIAGRQRSKTPHRPLCTGSEAGITGSSWTPPNPRYGRCSDHKLNKISNENKCRQANLSLDYDTSGYYDYCAIECPQGLSPLAHAETVETARAPHRAERGEVRDKIAIGCRRQQRAGALHPGALFNRALAAPVAMCFFYPTFALFACSCRIRRHSTARCLPAKMIQTYEERVGYPVAISKACARIASSTKYQQHGQDSRELALPPLTRNSMLPSHHTTTQIYARTIVALSNVSNQLDPKYQRYIAPEYLKFFDGTDRGRGGACFACCRCRCDWEGEISGFGKQGRCPYEQNVLKKNRRCGQAIFRSRSGKIDRYMDAGQIDARTRTSSQLQWLGYFKRGQRSCRRPLDRARRTQPQPSQTKPTAGSSQFDFALLNRRVSV

SEQ ID NO: 139436 - protein, 186 aa, Oryza sativa
  unsure (1)..(186): unsure at all Xaa locations
  Clone ID: PAT_MRT4530_40728C.1.pep
MWVAPAASHCQPLATQLRPPPPLTPPPSSRPCSAHFPRITSMRQQWVNENHGMLHFKGLFRSRRRLFSARRRRMLSALLFILSLLPQIRRRCSPPRRRRPLLTGAGGRRRGGGRDDEELGGERGEXEGERERGAVEPERGAVAATSSMAGSKRICYSVGDEDLHGWRXGCAEHVVVHSRLRRLGRH

SEQ ID NO: 139437 - protein, 48 aa, Oryza sativa
  Clone ID: PAT_MRT4530_40729C.1.pep
KKKTPGVGAQTALKALAVFGIKIGGFEDVVPGPTDSTRKKGGKKGRRL

SEQ ID NO: 139438 - protein, 470 aa, Oryza sativa
  unsure (1)..(470): unsure at all Xaa locations
  Clone ID: PAT_MRT4530_4072C.1.pep
MSWQRVGALLLGXSVLPACPGGSGRRXIGSVLLFMARMGWELCHVFRPYTVVMFNREKGKNVRGYASSNSSFQLNPPLASRELTRAHPWSIPSMPLSSQLPLVGSQDQNQYVFDRAFATQVNELPMPEEDVPFCHDCREQGHYALNCPWVYAKEAPSFGLTGQTSLNQPPRTKSSLQPSVQSREPNGENPLNPGNCFPPSPSYHVGSRTKQAKGKKSKNQKRKAPMRTEEEVRKMAISSTEWPPAGITIPRRQRGNTFRGARQLTQHLLSHGGRVSDSEGSDQVSSDDEDESPRHLGEEEMESKACIRCGEIGHIASMCLTLCAYCEEDHPPGECPTRKVTCFLCEGTNHVPKDCQLSVLLTKTAEIQRTTLRLSRQLVSSNSNIDDIIHNTNAPPAPPNSAINHSNNIFSTNHSLHRQPQQRVVVDGRSCVSPRPTPGQAKGNQPQEGDTKQKTVIRFNQQSEGSFSCE

SEQ ID NO: 139439 - protein, 173 aa, Oryza sativa
  unsure (1)..(173): unsure at all Xaa locations
  Clone ID: PAT_MRT4530_40730C.1.pep
RRRAPPRRRHRRRSASAFTASTXGGPSRAVLALKRRPRIDAGVSRVEEVESPIIRLVSEEYGVGGDAGPRCLPRRVPEHPARVPAGGRATPSGSSWSSTRRASTLGTNYEVGSFETAEAPSRPKQVLERLLTLAGVPLLSIPGASKVCLAFSGWKGSLSLDLGLSTPVAVTLG

SEQ ID NO: 139440 - protein, 85 aa, Oryza sativa
  unsure (1)..(85): unsure at all Xaa locations
  Clone ID: PAT_MRT4530_40731C.1.pep
AGWLHKTXRLFRSSLFPINKSVFAFYLRINKKKAKRVFRFLGFXXFFPRGPLCLFFFSPWTPGGGRFNFYGVTSPFFNWGSLRNF

SEQ ID NO: 139441 - protein, 74 aa, Oryza sativa
  Clone ID: PAT_MRT4530_40732C.1.pep
PPRPPPPWKKTTKRSAPISPMVTRVIRVPNTKKVQGFSLGPCQTLKTPPILKSARGGFNQPIWVFGFKKHFLFN

SEQ ID NO: 139442 - protein, 81 aa, Oryza sativa
  Clone ID: PAT_MRT4530_40733C.1.pep
MAQSHVDPVIAEEEALDANQSRFLIANWPDETAFSSAELLTDSNEWDLIVSFGAFISVMHHRLPGFRVNAEILKSKHVVFA

SEQ ID NO: 139443 - protein, 228 aa, Oryza sativa
  unsure (1)..(228): unsure at all Xaa locations
  Clone ID: PAT_MRT4530_40734C.1.pep
MACEPISIRFSQHLNSPEILILEMIKDAFVGGIDTTAVTATWIMSELMRNPRVMQKXAQAEVHNIVKNKSKVCEEDIQNMKYLKMIIKENCRLHPPGTLLIPRHTMKTCTIGGYSVPSETRIYVNVWAMGRDPNIWDNPEQFYPERFEDKGIDFRGSHFELLPFGSGRRICPGIAMGVANVELVVANLLYCFDWQLPKGMKEEDTDMDEIGQLAFRKKLPLFIVPMKH

SEQ ID NO: 139444 - protein, 139 aa, Oryza sativa
  unsure (1)..(139): unsure at all Xaa locations
  Clone ID: PAT_MRT4530_40735C.1.pep
PAGWLTNYLAIAPTARAASPTSGGPFQGLKLSAXLPGRRRSTNSGSGNVRHGRRIKCMQAWPIAGIKTTKTLSDHAPITGXDLLQQIEHPLTSKLEPLLRFSKVVFVYQENHRSPAFYYGRCWTMWKLPMFGCTEATHV

SEQ ID NO: 139445 - protein, 99 aa, Oryza sativa
  Clone ID: PAT_MRT4530_40736C.1.pep
KVHHRSLNFYRCIIPVPKLVNRPFRFSNLFDCVIPVLKLADNSFRFSNLFSCVAPVPKLGFEYHLGQIGQDRGDTTEQVGGSKRVIYKFRDRNDTVKQV

SEQ ID NO: 139446 - protein, 61 aa, Oryza sativa
  Clone ID: PAT_MRT4530_40737C.1.pep
AHGGGVLYDEKTETYFWYGENKDGKTYKAHSKGADRVDIVGVSCYSSKDLWTWRNEVVVLR

SEQ ID NO: 139447 - protein, 800 aa, Oryza sativa
  Clone ID: PAT_MRT4530_40738C.1.pep
MAVGKNKRISKGKKGSKKKTVDPFAKKDWYDIKAPSVFNVRNVGKTLVSRTQGTKIASEGLKHRVFEVSLADLQNDEDQAYRKIRLRAEDVQGKNVLTNFWGMSFTTDKLRSLVKKWQTLIEAHVDVKTTDNYMLRLFCIGFTKRRPNQVKRTCYAQASQIRQIRRKMVEIMVNQASSCDLKELVSKFIPEVIGKEIEKATSSIFPLQNVFVRKVKILKAPKFDLGKLMEVHGDYKEDVGTKLERPAEDEVVVGQEICRLSPLKMYILETYTPWDKSTDVLHVLLNYWYWVASVRFLGPSLPFSLGSGDYQLEQKGASMGLRSKQPKALAFRCYAASHRSLTLAVWSLAALVVVVNFHLLIIHKEDESTSIHEINRSIVSELEEVEEEKFRVSPPRSRRNPRAVRRKGEQKPPSVVDEFLDESSAVHDMFFPERNMAIDPINGGNDSMYFYYPGRVWLDTDGNPIQAHGGGVLYDEKTETYFWYGENKDGKTYKAHSKGADRISVRPYVIPNHDNLFQVDIVGVSCYSSKDLWTWRNEGVVLRGEKKNVTHDLHKSNVLERPKVIYNDRTGKYVMWMHIDDTNYTKASVGVAISDSPTGPFSYLYSKQPHDCESRDMTIFKDDNGKAYLIYSSEDNSELHIGQLTDDYLDVTDNMRRLLIAQHREAPALFKYEGTYYMITSGCTGWAPNTALAHAATAIMGPWETLGNPCVGGNDIFRSTTFFSQSTFVLPIPGLSGSFIFMADRWSPSELRDSRYVWLPLTVGGLPDEAADYSFMFPLWSRVSIYWHRRWRLPEGWRDS

SEQ ID NO: 139448 - protein, 49 aa, Oryza sativa
  Clone ID: PAT_MRT4530_40739C.1.pep
AISCYRSHCYGCPYIPRSLIILSIIALAPQPSKPQAHVVYLVGLLLSLV

SEQ ID NO: 139449 - protein, 163 aa, Oryza sativa
  unsure (1)..(163): unsure at all Xaa locations
  Clone ID: PAT_MRT4530_4073C.1.pep
QPHPRARAADGQAPHGSRGARPKAASLAQPTGGGAPAPPGSTATAETATGAEEGGGAARVDEDGGVPAVGDRNGEVDEVGEVAANPKKATPKREKVRGDDGGGPELGGDGGERXRRRELDSDGERERRVAETVEGGTGSVYIGSGGGERGRMRGNRPRKIRPP

SEQ ID NO: 139450 - protein, 111 aa, Oryza sativa
  unsure (1)..(111): unsure at all Xaa locations
  Clone ID: PAT_MRT4530_40740C.1.pep
QLGVIMVHSCIYLCEIVYTGHQFHXQHHEPASIKVLTAWGCLMQVSITSTLIALALTCPLSPRSRQHRAQSAQPATSNANSAPTTTVRRQAXXFAAHTRGPPQGDXAYLSP

SEQ ID NO: 139451 - protein, 173 aa, Oryza sativa
  unsure (1)..(173): unsure at all Xaa locations
  Clone ID: PAT_MRT4530_40741C.1.pep
LDRETGAKCYVLAARALVIIWTXQPRYWRWIPLTDSRFTEAAELLSVCWLEIIGNIDSRMLSPNSTYAAVLVFKIAEEFYQLDTIDATVNLGGSKSSREVALTRSRRRPEEEISAVLFPRTRADGWMEVELGEFFNEEGEDGNVNIRIFGKGPNWKKGLIVLGIEIRIKKSGR

SEQ ID NO: 139452 - protein, 81 aa, Oryza sativa
  unsure (1)..(81): unsure at all Xaa locations
  Clone ID: PAT_MRT4530_40742C.1.pep
LHGAAVVGAXVVAPRALXPXHLXXPYXLQLYPSSQXCXXIXXXCCSXGVXPXLLDSTTCCXCSLKEGKEXVARXWRRSWCG

SEQ ID NO: 139453 - protein, 236 aa, Oryza sativa
  Clone ID: PAT_MRT4530_40743C.1.pep
MEGKRSGLPSSTGGKGKGVAVVGANAWYSDDGSDGSKSSSESERTVTDDYFGIFVHPGHGDQEVDSRKANRHEADHSETDSERTGSAGLGKIANSAGNSHHFSDVDSGLSPEGKRQKSARFQPERILSGGNSYGANSGHQRDADSGMFLSFSEKTQVQTNKDIPESWKVHPRKDEVDPDGWVVEIHLRNDQKTKDKILERSRSWQTSYNKDDDPKFRFWYVCLWRERSRIPLTTSA

SEQ ID NO: 139454 - protein, 135 aa, Oryza sativa
  Clone ID: PAT_MRT4530_40744C.1.pep
LAQYDSRTNYADRIKHVEEDTRQVVEEAVAVQVSVDHHIDHISHVGSPRQVHGSELDSSLQRIAIPLNSHHQKSLIFLTTKIQPKSINHNQNSTPIRSQGSDLLQEDEIEGFAEQFRSQMDQKMQMNDNLPNQSM

SEQ ID NO: 139455 - protein, 197 aa, Oryza sativa
  Clone ID: PAT_MRT4530_40745C.1.pep
MAMQVGESVAPLSPQMIGNAFVQQYYNVLHSSPGQVCKFYHDSSTLGRPDSNGTMTSVTTLTAINDEFLSTDFSSCLIKLENVDAQLSLNGGVHILVTGSIGHNGTMRHRFSQSFFLAPQESGGYFVLNDMLRYDSLQETLLTETNDSPQERLLTEINDSLPNHVDDNTHSVTFTSEPETSGNVNETADLELPSAEN

SEQ ID NO: 139456 - protein, 94 aa, Oryza sativa
  Clone ID: PAT_MRT4530_40746C.1.pep
MMVIAVGMVGNTLRPSLGLHLNRPAKTWIQRRRGRFSRTRGWPKLAHFRLAASSVVLLRGLVNFGPVCHVNSMFLAHSYISLILDIARLIYHLC

SEQ ID NO: 139457 - protein, 505 aa, Oryza sativa
  Clone ID: PAT_MRT4530_40747C.1.pep
AGGAGAASAPPDPPARTADHMLGPLRRAAVAAGAASASAASLRQFQCAYHRSNERLLPCREDQEVSYGLNWAIAGRGVVVKDKVFYNLEKSELQKGGAAYTECLSGIPLHVRGNVISGIPDVSRAQFAKLLKLVTFHLSSISSLYVQDGAVGSSVECDAKVRVISDNPSAVLLLSNILWKTPDRSISHDTCPLTIYVASSISANVRNSLGSGSQYANGFAAADIERSSLILCGKAFADSAMLKGALSALTAPVLSARGGLPFPGWLLSFGGSAVLLFAPVDVIKSLKLQDVLVSTDSGVVVSPKGSNVLFATKAREPNLFTRPTQVIIVSSDSTDALPALSKLSPGQAAYHFLAGYCDGKFIPAYSKDPSPLDPIALANSLFSHLKEDNTPTYLINAKSSGKYIDGKEFVRLIEVLLSNNLPDRKSEDIRGHYSFWHSFVDYWDHKEMSDLHMVSLRRNWSGGPLDHGGLRFSFISSSINKRSAGRLSRSLLQRSRSTETKHIAK

SEQ ID NO: 139458 - protein, 36 aa, Oryza sativa
  Clone ID: PAT_MRT4530_40748C.1.pep
VWDWKTYVTSYIVWPFVVVHIECFGSLIYPFCSICA

SEQ ID NO: 139459 - protein, 111 aa, Oryza sativa
  Clone ID: PAT_MRT4530_40749C.1.pep
GFLCNKKAVINLFDLSTGMTSKNVLTDRTHRDGSRVHKSRQDVNRTVDPKIGCVEDKLVVASTRNSSSNKSTISPMNRLVAMEMSKGVESKRKPPSVVARLMGLDDDPPAK

SEQ ID NO: 139460 - protein, 401 aa, Oryza sativa
  Clone ID: PAT_MRT4530_4074C.1.pep
MWEQSNHMLEIYPQSHRRPLTAEYTLILHASEEAGAVINTSILSCSTPHSDESRARRRRAPKPWARGSGQTGGSECAVLRYITPVSNFVEHFAFIVRTPSSHWQQNQQELTVLTQSHQKINNPDSSIPPTQIILPIEVAGNQERTTQPSTNQDPRNRKSKLEKFLQKNELTGARRSMRRRRSEQRWKQDLCVLGWATESSRALASARQFTSRLLDFFLYFVARFPSKGRFLWFPSLASIRAGAEARGERRVERGVTPCKAVAVTGEATTTRYVAAPKADLASSIRRRLWQRMRKRRWRLTSFLSPFSCRRARRRPRSKPRNSLTERERSLSVSSQRRKTAGWRRRRGEGSPPISPSPAVQAVKLVGAPARRVGPSVGGENKGSAARKERGSAAGRETDGDG

SEQ ID NO: 139461 - protein, 140 aa, Oryza sativa
  unsure (1)..(140): unsure at all Xaa locations
  Clone ID: PAT_MRT4530_40750C.1.pep
SFFKAAGIGAVQAFXRESNFMAMEGEGGGTGAVSDSTGARKRSFPDLNGGNSSKSAEAMVKSVSKESLQWGLAAGLHSGLTYGLTEARGTHDWKNSVVAGALTGAAVALTSDRASHERVVQCAIAGAALSTAANVLSGIL

SEQ ID NO: 139462 - protein, 52 aa, Oryza sativa
  Clone ID: PAT_MRT4530_40751C.1.pep
SVPQPLHTILHQTFLVSARPLSPLAANTVGTSHQSCGDLLQAWSLRREWHDA

SEQ ID NO: 139463 - protein, 59 aa, Oryza sativa
  Clone ID: PAT_MRT4530_40752C.1.pep
MSTGVLSKPWEFNECFSNDMDETVRHARSEGGTLYPHDITNPDHPARAERPHIETLRLS

SEQ ID NO: 139464 - protein, 1135 aa, Oryza sativa
  Clone ID: PAT_MRT4530_40753C.1.pep
MTVGVHLEKSQIARQVNRIQFTCGTQEPFPDASKEENVKNRRKSSYGEATISQHFTFSWMNGLLAKGANKPLNEDDIPDVGEEESAQHISRIFSNIIVKGNFPLTVSSICKAAFLLIWKKAALNATFGVLSVVASFVGAYLIKDFVGYLSGDNGFERGYSLVLVFVGAKAIETLAYRQWFFGSLQVYLRLRTSLISQVYQKVLYLSSQSRQKHTSGEIINYVSVDIERIVNVAWYVNMVFMMPIQITLATYILWKNLGLGSLAGIATTAIIMLCNIPFTRIQKRLHAGIMKAKDDRMDMTSEVIRSMKILKLQAWDIQYLRKLEYLRKGEHLWLWEFLRLKALLAFMFWGAPAVISIMTFASCILMGIPLTAGRVLSTLATVNILKEPIFSLPELLTAFAQGKISADRIVSYLQEEEIRSDAIEEVAIDENEFSAEIDQGAFSWKTDAKIPTLQDIHVKIHKGMKVAVCGAVGSGKSSLLSCVLGEMPKVQGTVKVFGTKAYVPQSSWILSGTIRENILFGSPFETDRYERTIEACALVKDIGVFSDGDMTDIGERGTTMSGGQKQRIQIARAVYKDADVYLFDDPFSAVDPQTGRHLYKKCLMGVLRDKTVLYVTHQVEFLVDADLIMVMQNGRIAQAGKFQELQQNMAFGVIFGAHFCAVEQVCNAKGTSIYLSKHHAESEKIFEVGSNYWMASACHPRTGSKSKMESTQFMASIDQSVLDLETASTLSESTFSVMQFLGTILIISYVSWPVLIIFIPSILICIRYQRYYSLTATELARLSGIQKAPILHHFGETFYGAAIIRAFRQEDRFYRSNLSLLDNHSRPWFHLMAAVEWLSFRMNLLCNFVFGFSLVLLVRLPQGFVNPSIGGLVVMYAWNLNTQLSEATRNISRAEANMISVERILQYTKLPSEAPTITEGSKPPMAWPEFGMISISNLEVRYAEHLPSVLKNITCVIPAEKTDPVMFDGTIRGNLDPMNEYPDSRIWEVVDKCQLANVVRSTEKKLDEIVIENGDNWSMGQRQLFCLGRILLRKSKILVLDEATASVDSATDRIIQEIIRQEFKDCTVLAIAHRMNTVIDSDLILVLGEGSILEYDTPTKLLQREDSTFSKLTKEYSQQSQDSKSSTAMHRMGSY

SEQ ID NO: 139465 - protein, 64 aa, Oryza sativa
  Clone ID: PAT_MRT4530_40754C.1.pep
ARTDRFFVQTISNGGNHTPRRGSNGVQTTERPYEMWINRHLPCNHVPQWNESPLGAFFFLGIRT

SEQ ID NO: 139466 - protein, 81 aa, Oryza sativa
  Clone ID: PAT_MRT4530_40755C.1.pep
TKWVNTHHKLLTLQHLINLINNKHILTKLFVVQLNLSYNEKTNSLHILHSNPTNQIPFLTYKHLNLQPNPPKTIHHKHPSL

SEQ ID NO: 139467 - protein, 77 aa, Oryza sativa
  Clone ID: PAT_MRT4530_40756C.1.pep
MGCNDTRPKPKFLMKVHVPPRSSNHDHGKAETPVNLGSGLELLGHDNVACLWVHRNPSIVREGLSWHSRRPRNKDAA

SEQ ID NO: 139468 - protein, 201 aa, Oryza sativa
  Clone ID: PAT_MRT4530_40757C.1.pep
MGKKSKNGGGGGGEKKATTTEVVLTVAMHCKCNGCKDKIRNGVKELALVPGVEAVDKSAVESKGEVRLVVAAATAKPEKLKDRLHRVTGKKVDLLVIAPPKPAAAADDDDKAAAAEAVAALIRQAQAQAGVHVVPGAWAGGGAVAYPAWGMQQPEGGYYYSPSTYPAGGLVYPYAAAYPPPGQQLLGNGGGVVSPWYTHGY

SEQ ID NO: 139469 - protein, 188 aa, Oryza sativa
  Clone ID: PAT_MRT4530_40758C.1.pep
MSPLYCCLVAVLCLPRASASPVAAASISVSAVQTPVEPTPVQFLRVHNEARAAVGVPPLSWNGTLQLDAARYAGELRTECSLRPPPPTAARGTGDGAAVYGRNLFKAYGRRHTGAEVAAFWADGRRWYDRDAGRCAAPPGRTCGAYTQVVWRATTQLGCARRTCRNGVDTVAVCDYYPPGNIVGQRPY

SEQ ID NO: 139470 - protein, 145 aa, Oryza sativa
  Clone ID: PAT_MRT4530_40759C.1.pep
MKGKADASKKGEGRLKAAGGAGKRKKAAASGKPKRPPSAFFVFMSEFRQEYQAAHPDNKSVAAVSKAAGEKWRAMSEQEKAPYVDKAGQKKQDYEKTKANFDKKESTSSKKAKTHDDGEGSDKSKSEVDDDQDGGSDEENEDDEE

SEQ ID NO: 139471 - protein, 270 aa, Oryza sativa
  unsure (1)..(270): unsure at all Xaa locations
  Clone ID: PAT_MRT4530_4075C.1.pep
ALVVEDPPVALALRRRRRAPGRRRRRPXPPPTSAPPRSASPHPRRPRPPLRFARRPPERRRPRRPEPRRRLPPLRPPFXSSPSTXGEPWTAASFPPFPPFSRPPLRHAYGRRRRPXGRGRAASRWPCRRGRLRAHRAAAAWGPAVSRSRPRVRLTRGAHGAGRXSPGAPGPPWTHLGHIRTGLRASVAKRYRXFHMSSGTNEGYTSYGLVAKMSWHRAGVLLLGAQSCLPVPGVPAVGGVGSMYTSDQSIIYSNSRALGYGQAEQCTQVS

SEQ ID NO: 139472 - protein, 69 aa, Oryza sativa
  unsure (1)..(69): unsure at all Xaa locations
  Clone ID: PAT_MRT4530_40760C.1.pep
DLKGPFPPQKLAIEVRGSPIYILGLSPFHNQCKTIQQSPPSHIGVPQPFTAPSSYPXPHWPTVHQVYEP

SEQ ID NO: 139473 - protein, 85 aa, Oryza sativa
  Clone ID: PAT_MRT4530_40761C.1.pep
LSLLVAAPCFRPRVSSCALDEVLYDLRQHFCLLVEITLPHLVRVRAPSQQLLHVHGERSHHLSWVWPRLDVQKALPRLLRFLAYT

SEQ ID NO: 139474 - protein, 340 aa, Oryza sativa
  Clone ID: PAT_MRT4530_40762C.1.pep
MSAAMAAFAFLLVIAIVFPLASAFPSPPVSWGQQQLDPHFYDHSCPQAQQIVASIVGKAHYQDPRMAASLLRLHFHDCFVKGCDASILLDSSATIMSEKRSNPNRDSARGFEVIDEIKAALEAACPHTVSCADILALAARDSTVMTGGPGWIVPLGRRDSRGASVQGSNNDIPAPNNTLPTIITKFKLQGLDIVDLVALLGSHTIGDSRCTSFRQRLYNQTGNGLPDFTLDASYAAALRPRCPRSGGDQNLFFLDPVTPFRFDNQYYKNLLAHRGLLSSDEVLLTGGNPATAELVELYAADQDIFFAHFARSMVKMGNISPLTGGNGEVRTNCRRVNHNY

SEQ ID NO: 139475 - protein, 179 aa, Oryza sativa
  Clone ID: PAT_MRT4530_40763C.1.pep
MGGCFSLEEHRLQGKTEAGGPDGLRKCKSDSKATASVLAPPKDVEDLQIEGYGNVNIFTYNELRAATKNFRPDQILGEGGFGVVYKGVIDENVRAGFPSTQVAVKELNPEGFQGDKEWLAEVNYLGQLSHPNLVELIGYCCEGSHRLLVYEYMACGSLEKHLFRRKLTLSFLTVITPTY

SEQ ID NO: 139476 - protein, 75 aa, Oryza sativa
  unsure (1)..(75): unsure at all Xaa locations
  Clone ID: PAT_MRT4530_40764C.1.pep
TSSGNILSSKGYCWEKKMCSKLIIEGNSAKERTYILXRSSTMKVFGYGFPKAIGRKQTETPKIHHYHIWSTEQKX

SEQ ID NO: 139477 - protein, 404 aa, Oryza sativa
  Clone ID: PAT_MRT4530_40765C.1.pep
MACMDDVPLCILQCIMMFLLPDVGDVVRASAVSRRLREAWMGMEAYELDASTIPDHHLLDLDSTFAAIVDRVVFNHSGPGIKSMSLAHTRYDTDGDRRVTAWLDRLASREHHRLERLDVNIGAALHTPASLFRCETLVELRLVVHAAARGLRLDVDGAVHLPQLRRLCLEHAGFRSSTQFQNLIDGCPLLELLHLRFTAVARREDTVGIEIRSPSVRRVVLEGCGGYGMVPFEVSAPNVEELVLSGRNMVAVEKGGVRRLSARKVSLLMDDKLWWYNVFAPFHHFTAFLNVGTNMSRIMAGFHGVLELAISGWCIELEHPREISIDENREQYPATPEFLFDAVPGRLTHLRRFFMFNFSGNRNEISIIKFVLGSSSISINPDQFGVTDYLGNDWSSTQLILASL

SEQ ID NO: 139478 - protein, 91 aa, Oryza sativa
  Clone ID: PAT_MRT4530_40766C.1.pep
MPPDEDISVAKPATQEGLSSSPLVCQAEFGLRLYDILGCGGIQRTDKAVTTCRLPHFPWGSHQTKNPSTRALNNSTKRRTRNDGNMSHSIK

SEQ ID NO: 139479 - protein, 45 aa, Oryza sativa
  Clone ID: PAT_MRT4530_40767C.1.pep
KKEKKFFFFFFHPKFQMANMKILGLFLNFQTPFLGKFRTINRQGG

SEQ ID NO: 139480 - protein, 110 aa, Oryza sativa
  Clone ID: PAT_MRT4530_40768C.1.pep
MDGSNPRPPNLLAKQFGEGRRKKRKGNQGEWNGWVVRQWRCPAKAVELVVNNVTGHLILVSLRRGKAAGRDERGGTSGLSGACWRLPMLAQWSGYVLVVTDGHGQTVREL

SEQ ID NO: 139481 - protein, 90 aa, Oryza sativa
  unsure (1)..(90): unsure at all Xaa locations
  Clone ID: PAT_MRT4530_40769C.1.pep
MAGETGVLKGGMTCQGSARAGRGGLTKMEGEETFDIHMEHXKVTVKGTDKPEDVIETDSTTGKMTFYCEAAKADSDSAAADASACASATE

SEQ ID NO: 139482 - protein, 274 aa, Oryza sativa
  unsure (1)..(274): unsure at all Xaa locations
  Clone ID: PAT_MRT4530_4076C.1.pep
YHHATRRGNDNDERARRRQTGXNGDERRGDGFGGDPWTKARRGRHDAXRRGGEDEDDDGXAAATGNDERTTTTTTGAGEEATRAAGSGCTAARMAWNTRRCSVGGEARPRTTSRVTMPREGTAAPADARAWRKGQPEEMSTRRKVRPARATVFRRSSGEEEVMPGMRAASWSRGRWWRRRPALRGRGRGGRRRRSGGDATGRRRERVSGAFPAKRRADRGREGSCEAEGEDGAAGRRSGEERKAAGGGRREGRRRATAGMGLETTGRLGMGLKR

SEQ ID NO: 139483 - protein, 478 aa, Oryza sativa
  Clone ID: PAT_MRT4530_40770C.1.pep
MPWSCGWCGRWRRSSGGRGGGADREANGGGGGGGGGAASGREEEQWSLFIELPVLEAATRGFSDDNLLGRGGFGPVYKACFLLPSHRPLSPWLCFAARLLPCFACGIHLTLTKTGILHLGKNELLTDKKSVDLVTISLQGVLENGQEIAVKKLSLESRQGVREFLNEVRLLLKVQHRNLVSLLGCCASSGHKMLVYPYFPNGSLDHFLFDRKKSVQLDWPKRYQIIVGLARGLLYLHEESPVKIIHRDIKASNVLLDEQLNPKISDFGMARLFLEDATHVNTFRISGTYGYMAPEYAMNGYLSTKTDVFSFGMLVLEIVSGRKNIDKHLDAEKTDLLNYTWKLSEEGRQMEIVDPAMAEWDADEARLCVQLGLLCCQAVVSDRPDMYTVHLMLSSDSFTLPKPGKPAIHGRVGRWMSTTTTASSAASTANTATTLGTDTMTTRASASAAALGGIAEDDSRNSISISFTTEGRSTVAVN

SEQ ID NO: 139484 - protein, 48 aa, Oryza sativa
  Clone ID: PAT_MRT4530_40771C.1.pep
PRHPAMTLGSSCAGSSGLNVVNLTLLEELEPIEWVIQKTSTCYLMTDA

SEQ ID NO: 139485 - protein, 148 aa, Oryza sativa
  Clone ID: PAT_MRT4530_40772C.1.pep
FEGVNISMVVHQPSYTLYRMFDDLILLAKGGMTVYHGPVKKVEEYFTGLGITVPERVNPPDYYIDILEGIVKPTMSAGVSVKDLPLRWMLHNGYDVPRDMLQSSSDSESSFRGSTSPASGDASVAAEVWGNVKDIVGQKRTSMTTTEH

SEQ ID NO: 139486 - protein, 768 aa, Oryza sativa
  Clone ID: PAT_MRT4530_40773C.1.pep
MALAAASVSVLHLPAISLPLPCLQGSNPSRPSLGLTNALPWRRRGGRGAGAVAGAVRCAKRTGKRRYPSEKKRLDRRHKELLRKAAPEEGSAGREAGYWRLSKLAVPARDDPGKDFAGVSPPLLQAIAKALKFPVSSMLPEEAFTVIRKSFDARKILKEPQFVYTVDVAVKRLLDLEPRTWDFIARLEPKLGTIEYMPDEKVASDLVSMLNVYKQGSDGELGINDTVNNGSICSPRKKPRVAVVGSGPSGLFASLVLGELGAEVTLIERGQPVEQRGRDIGALVVRRILHSESNFCFGEGGAGTWSDGKLVTRIGRNTDGVQAEPLRNCFGYLLIQALASSAIWDQDPKVMKTFVQFGGPPNILVDGKPHLGTDKLVPLLRNFRHHLKELGVNIIFNTRVDDLVVEGGQVKGVVVSDSRLQLGSPNQTLSFDAVVLAVGHSARDTYSMLLRHNVDMHPKSFAVGLRIEHPQELINDIQGQGLYPKVIYDIDTIKITIYCVYSELAAEVHKGRGRIPVADYKIVKSFGEGDAELPEQNRSCYSFCMCPGGQVVLTSTNPSELCINGMSFSRRASKWANSAFVATVSSHDFRPFESHGSLAGVEFQREFERRAATMGGGNFVVPAQCVTDFLSNRLSVTTLPPSSYRLGVRPSKLHELFPSHITEVLQQSIIMIEEEMPGFVSSEALLHGVETRTSSPLQISRNTGTYESTSLQGLYPIGEGAGYAGGILSASVDGMYCGFALAKQLSLFHGDIESTLGKAQNQKGFVKY

SEQ ID NO: 139487 - protein, 93 aa, Oryza sativa
  Clone ID: PAT_MRT4530_40774C.1.pep
TDLDGRRAAAGGHDVEVWCTVRPRPRATALRLLANPRRPLGTRASSPLLWFSWHCNTLDGLRLLPLLFTTCSLTHTRHHTHTHLYTHNFTATR

SEQ ID NO: 139488 - protein, 168 aa, Oryza sativa
  Clone ID: PAT_MRT4530_40775C.1.pep
PTRPLDSYEVGELCYAAEQIFMQEPTVLQLKAPIKVFGDLHGQFGDLMRLFDEYGYPSTAGDITYIDYLFLGDYVDRGQHSLETITLLLALKIEYPENVHLIRGNHEAADINALFGFRLECIERMGESDGIWAWTRFNQLFNYLPLAAMIEKKIICMHGGIGRSINTI

SEQ ID NO: 139489 - protein, 155 aa, Oryza sativa
  Clone ID: PAT_MRT4530_40776C.1.pep
MVLPSITLKIPAMRCRAIISSPPPMTLEEFKKWFMKFNTNNDGRISGVELREAIRSKGFGFSAWWKSIVALHQADKDRNGYIDEFEIENLVTFAQKVLGIKITTWQQHLDNVQKAVKGVLAVTSVSVLAVHFDNYNEQKLKLNPFMFSAALFFSI

SEQ ID NO: 139490 - protein, 391 aa, Oryza sativa
  Clone ID: PAT_MRT4530_40777C.1.pep
MDADSGDFGSGNKLPDDLTLDVLSRLPYKSFCRAKCTCTGWLSFSSNPHYCDKLPKPLTGFLYQKSDSSAIEVASLCPDDRSFDTSLSFLPRYEWLELTDSCNGLVLCKYGRNTSSPSVANFVVCNPATRQWMELPETLLEPEGHSYATKLAFDPSWSPYFYVFNFEEKRNPVERWACISKVAIFSSRNSTWFMDDKWEPSNQISVDCQPHVLLGGKLFLQTSSCRVLVIDAFHNTEQPSHWIFDLPGYKPTSPMVDCLTGYLGHKSGVLHYVQPDTGGRTLLVWARDGYPHGDWNLKHRLSMSDAFGQDIFLDEHFDGFLSCHYDIQSLDLERGLVFLCHFAAERLLSYSLSTGKLTKIRDGLRRYLYYVPNCSMFPAKETEKDQDVSEP

SEQ ID NO: 139491 - protein, 77 aa, Oryza sativa
  unsure (1)..(77): unsure at all Xaa locations
  Clone ID: PAT_MRT4530_40778C.1.pep
EGHKQYXLFSDVRAGKRRWCTFHKEPRWGTDPENGKNQRSLQICNGWCDNAFDLINATEDEAILLRDIYDRPPTFNW

SEQ ID NO: 139492 - protein, 108 aa, Oryza sativa
  unsure (1)..(108): unsure at all Xaa locations
  Clone ID: PAT_MRT4530_40779C.1.pep
MASQLSAATSVPQFHGLRTYSSPRSMVTLPSLRMSKKRSQGIRCDYIGSATNVIMVTTTTLMLFAGRFGXXPSXNRKSTGGAXSXEARDFGLQTGDPAGFTXADXFAS

SEQ ID NO: 139493 - protein, 383 aa, Oryza sativa
  unsure (1)..(383): unsure at all Xaa locations
  Clone ID: PAT_MRT4530_4077C.1.pep
FLSLSRPAVEVLPFSLSFSPSPSLPSSLGPPLPLPAHSILSSSHLGLPRPKPSRARPRPHACAFFRVSPWPHHLSPSPPPLSPAPAASXPPVPPRLCTSRRRHHFPRLRDAVLISGLTSSSPEARRSGLLVGVQYLPSSGRLLFLAGEPSYAAVSSLGTVTSPFTLAFPRFHRNAAAAPASPSSSSTSPPVAPSAVPVRRPTSPSPPPASQRCLFPVVVVVVVLSSFPVVVAFVPPSSCVXFVACVSSSCXQPCRRLRPRLCVVKHCAGRVSPSSKDRRRSRSLAVRLHRPRAISAAPVRLRRAAPFRVVVRIPXSLPRSRPFGVAPCLSCGCRPRYPCTGVGSRSCVRVVTVLVCPLGSRVVSTCAARVVSSGVRLSATRLG

SEQ ID NO: 139494 - protein, 681 aa, Oryza sativa
  Clone ID: PAT_MRT4530_40780C.1.pep
MSGWSGIHDDMLLLVVGRLPALDLLRFRAVCASWRAAAAIFVDGRGRPRPDRPWLLLPADAPDPDDGCRFVVSRDREVPVVALPARLGRDGGRGFVPLGSSRGVIVAADDRGEMHLLDPVTGKRRALPPVISLPLVDGVEGGPAGLNVRHGGGTVSRIDGLIHKAVPVPAPDGGLLVVVIYRQVHHRNQWATARPGDRAWKSVKPTSIPAVVDVAVHRGQLYANTRYGMVYAFPELRGLGSASPEIIPSVTRRPNAYVERSFLVESPPGSAGGRRGLMQVELLRPVAASGGGEDEEEGFVVRVLDECGETWEEADDIGDVAVLVDASGAVAASTRECPGLRPSTVYFAVDLAGETRVCAYSLAAAAKGKHKRIEVIESIPMAEGYKPPCFWFAPVILARYQVGITCQVSRDIYPTYSDDHCRPSDPSFLAPTTAAAPSSNSDAAPSPPPPSPGSGYHHRCPSLPGSGHRHRSLPLLRSVVTDDTKIPVMIFIRPKNKITSHSQSFGHKTKLQKSSQSYSSGGGAVVEEAANGQEGGGGRIRARIRRLAVRWRRRKRLTVGGEAAMAGGREVGRRRRPTVGGEAAAAGSAPRRPDPATGGREAGRRRRPTVRRRGRVSGRRSGDGEAAATDGRGRGRGGPIRASYARSGDRRSGGGEVAAAAGRETGRRQRPALGRAPWPDL

SEQ ID NO: 139495 - protein, 89 aa, Oryza sativa
  unsure (1)..(89): unsure at all Xaa locations
  Clone ID: PAT_MRT4530_40781C.1.pep
MGNLFGGAMQIMVTTTTLMLFAGSSGLAPSXNRKSXAGLKLEARDSGLQTGDPAGFTLAXTXXCGAVGHIMGVGVSXLKNIXVLDQIIG

SEQ ID NO: 139496 - protein, 60 aa, Oryza sativa
  unsure (1)..(60): unsure at all Xaa locations
  Clone ID: PAT_MRT4530_40782C.1.pep
RTTYEAATGGFGHVAGGGNAVEIERXFTPXFXVRGRNKCQDGYVIRLKNEGLCVNNSISF

SEQ ID NO: 139497 - protein, 46 aa, Oryza sativa
  Clone ID: PAT_MRT4530_40783C.1.pep
MGSTFASISLSDIIVVPGRRRPSTYNDMMVASDYDDEDGVGGFERR

SEQ ID NO: 139498 - protein, 50 aa, Oryza sativa
  Clone ID: PAT_MRT4530_40784C.1.pep
DGQVIHRPQFRFTERQQVRSRPRPRYDRRRVTMQTEQKEAMQKGPSNLQQ

SEQ ID NO: 139499 - protein, 141 aa, Oryza sativa
  Clone ID: PAT_MRT4530_40785C.1.pep
WRAAAAGARTRLTAGCRGRRRSSPPLPHPWTTSPTTFSRTSSSASAPPPPASSARRTRASGGAASSRPRASSTPSARSTARTTTASPGTTTPSRGATRVSFVRPTSLDTDASASSCSAAAAAVTSACPTSGSSARSTISTG

SEQ ID NO: 139500 - protein, 450 aa, Oryza sativa
  Clone ID: PAT_MRT4530_40786C.1.pep
MARRGGRRADKASNCGSAPRKAKAVPAAATSVDDVPDHLLEDILLRLGPSSACLVRAAYACKRWRRVVTAAGFLDAFRALHGAHHHRVAGYYHTVDAYYAPALPGGESSVFVPSSSSLAGVDGRLWFSLDFLPASDDFSWELADSRGGLLLLSKKRRTHTRSGYAAEGDFFFTDLIVCEPLTRRYQGILCPADFTGYRCIGVFLLDGGDDGGGDISLSNFRVLCALYDLYWLNNRHIGVQSACVFSSGRHGGGWRLPKSAVADDIQLTARFNAMSFVGRAGGCFYWGIDDDDDEDDGAMLVLDETTTEFSLVTFPDIIRENYHMTTFRIIAGGDGAMRVLRVIGNDLKVFTQLAGSGVEWVLEKLVRLPEATRGLPGHEERYFEQNEAMIVAADAAYVLLTPSVEKTWLFSVELETMTVERHHERNKYAGVAYPYELPLLRALHAGGRYR

SEQ ID NO: 139501 - protein, 58 aa, Oryza sativa
  Clone ID: PAT_MRT4530_40787C.1.pep
YWDVLGGQLVPEQLSALAYKTSGILSFIILSNHLQCFGGTEIYCSSNEHLFEEPAQIY

SEQ ID NO: 139502 - protein, 319 aa, Oryza sativa
  Clone ID: PAT_MRT4530_40788C.1.pep
MSPTSPAVAASNPPRPATISPSRASSLSPRRSRAPPLSGELRPPTTAAPPTAAQIRHHRRLRGAVLQPGPYSISPLRLRNIAASRTTSLRRRCRLQPRATAAPAAVVLRRLHCRLHRHAGKLGLRFVSPFHHRNSISSVSPSRHHLAATASDLQPHTLLRRLRSNDREPDIPSSKLFVAGNPFPAILPVAVRRFPLAEHRLPLVPCRLLSIPSPLFPPLSACRPAPPVSSPVVAVRPRVAVVVRRRSAAPVLWPPVDHSCGLGPWCRQAAVDRVHRAPSPSPADVWGPPVGAPFPFDDVSGCAFSTYHKPAWATAGLVV

SEQ ID NO: 139503 - protein, 220 aa, Oryza sativa
  Clone ID: PAT_MRT4530_40789C.1.pep
MEMDPAAAAGNGGEDEAVAVKKHLATTALGALRLVTISASDAYSHTLDALHALRSAYANIVEVAPPDLAAAEALLAHDCNHSIALASRLVTHMELMAMEATIHVDRWLTSTDAAVRLQGIPAVVWRYKMDAVVVWLGNARKKLLDASADCHAVTPLLAVAAAVDEYAPDVRSQWTAAANTGLFGALGHLRGACNIIANAPAVAALARDATTTLFDLLLLL

SEQ ID NO: 139504 - protein, 1690 aa, Oryza sativa
  unsure (1)..(1690): unsure at all Xaa locations
  Clone ID: PAT_MRT4530_4078C.1.pep
MVRCGGLCYARGIVTAPFRAPGLEWHIPGLEIELCSRDGCSEWLGLYNRMPRYKPEYLFGVEGFVQELCTMSFAIGFGTAPFYAQIPHDRHEEKCRVKVTLNSNSEDIPSVMFEAGGRNYIHTCQEVARIAIGELRDRYSDQLADTEYRYHPRQPQGSDDGSFLETEGIENDATTRHLVEMLWAMDETRAETVLAAQDREDRNRGKICKLEDKVDRLEKELAALKGEAPPQKARIRLTARKRALFVPRYQLAPKMVLTRSNGNGPNNNNNNNNNNGENPTLAQVLAQQAQLMNMMMQQLQNQQNQGNNHAPPQNKLAEFLRVRPPIFSSTTNPVEAGDWLHAIEKKLDLLQCTDQEKVSFASHQLHGPASEWWDHFRLNRTTAEPITWLEFTAAFRKTHIPSGVYLHEFNRLARYAPEDVRTDEERQEKFLEGLNDELSYPLMTGDYPDVQKLVDKAIRQEDKYNRMEQKKRRIAQFKAQQGNSQKPRLTLGPQSMPQGGSSSVVRPQRQFFNNNAGNNIRNQAPRPVAAPTQQQPAKREQGSKPGSNSTVPASKARVNHVAAAEAQGAPDVILGTFLVNLVPATVLFDSSATHSFLSMSFAGNHGMEVEDLRRPLMVSTPSNQALSLQRSPSVRIEIQGISFLANLILLESKDLDVILGMDWLARHKGVIDYANRKVTLTSSDGRVVTVHALSSESLRSSLNQITLEEIPIVREYPDVFPDDLPGMPPKRDIEFRIDLVPGTTPIHKRPYRMAANELAEVKRQVDDLLQKGYIRPSSSPWGAPVIFVEKKDHTQRMCVDYRALNDVTIKNKYPLPRIDDLFDQLKGATVFSKIDLRSGYHQLRIKEEDIPKTAFTTRYGLFECTVMSFGLTNAPAFFMNLMNKVFMEYLDKFVVVFIDDILIYSRTKEEHEEHLRLALEKLREHQLYAKFSKCEFWLSEVKFLGHVISAGGVAIDPSNVESVTNWKQPKTVSEIRSFLGLAGYYRRFIENFSKIAKPMTRLLQKDVKYKWSEECEQSFQELKNRLISAPILILPDPKKDFQVYCDASKLGLGCVLMQDGKVVAYASRQLRPHEKNYPTHDLELAAVVHALKIWRHYLFGTRTEVYTDHKSLKYIFTQPDLNMRQRRWLELIKDYDMGIHYHPGKANVVADALSRKGYCNATEGRQLPLELCKEFERLNLGIVSRGFVAALEAKPTLIDQVREAQINDPDIQEIKKNMRRGKAIGFLEDEHGTVWLGERICVPDNKDLKDAILKEAHDTLYSIHPGSTKMYQDLKERFWWASMKREIAEYVAVCDVCQRVKAEHQKPAGLLQALKIPEWKWEEIGMDFITGLPRTSSGHDSIWVIVDRLTKVAHFIPVKTTYSGSRLAELYMARIVCLHGVPKKIVSDRGSQFTSNFWKKLQEEMGSKLNFSTAYHPXTDGQTERVNQILEDMLRACALDFDGSWDKNLPYAEFSYNNSYQASLQMAPYEALYGRKCRTPLLWDQTGERQVFGTDILREAEEKVKIIQERLRVAQSRHKSYADNRRRDLSFEGDYVYLRVTPLRGVHRFHTKGKLAPRFVGPYKIVSKRGEVAYQLELPQSLAGVHNVFHVSQLKKCLRVPTEEANLEQIEVQEDLSYVEKPIRILETDERRTRNRVIRFCKVQWSNHSEEESTWEREDELNRGFEFVSDSIFPNFPSRRRPPWAFVVVS

SEQ ID NO: 139505 - protein, 69 aa, Oryza sativa
  Clone ID: PAT_MRT4530_40790C.1.pep
SGLFSFLSREESFNVSVHVRAYHEISLTKEMEPAPLYICILVLSTVLQMQKREGVLLWGRDVLYQFSYP

SEQ ID NO: 139506 - protein, 160 aa, Oryza sativa
  Clone ID: PAT_MRT4530_40791C.1.pep
MPPSSSSQLSSIENAGAGLAPPVAILLISVEPSGVWAVAAAIANPASTCCKCLKGKMATPFSERRLLDNNKLSGSIPSTLGLLNTLEVLRFDNNAQLTGPVPTNLNNLTRLTELLRAMLSFDTSHLANCNLTGPLPDLTGMNELMYLYMNNNSFSSSLFE

SEQ ID NO: 139507 - protein, 392 aa, Oryza sativa
  Clone ID: PAT_MRT4530_40792C.1.pep
MAALAGVPLMLIPSISKGEPPQQAASITDELIVEILRRLPVRSVCRFKCVSKSWRKLIADHEHRKKLPQTLSGFFYKSIDYERCPHMARHFTNATGRGMPLVCPTFSFLPQCHHVVILDSCNGLLLCRCHVSRETLQFQYAVCNPATGECVMLPDANWAIDENRTACLCFDPAISSHFHVLEYVEDEEYVEDEDEYDALVTGVVIYSSKTGLWSLHVNGWDDEVMVSLPVDRTRVFLNGFLHSVTTCDIVAVDMEGKKWRKIPMPDPDGDIGIIHQTQGRLCAFNVDPNDILELSIWFLEDYDTDNWILKHTVSSINLFGRKKYQLDFDYQVIAVHPECNLIFFVYGWHNTLMAYEMDRKEVRVIRKLGHESCLPYLPYVPMFSESLPDGWC

SEQ ID NO: 139508 - protein, 97 aa, Oryza sativa
  unsure (1)..(97): unsure at all Xaa locations
  Clone ID: PAT_MRT4530_40793C.1.pep
PRRPEGLCRAAWGPLPGKEXXRGGVGGWPKVREXRPFXKAVGEGREVRSXPSGSSGRRXEXSLPGLXRSPPQCRPAGGDLGFSAKXGEGEGERGGNL

SEQ ID NO: 139509 - protein, 33 aa, Oryza sativa
  Clone ID: PAT_MRT4530_40794C.1.pep
CEGLLLGDLVSSLVGLAMKPYENVWLLLLGFKP

SEQ ID NO: 139510 - protein, 274 aa, Oryza sativa
  unsure (1)..(274): unsure at all Xaa locations
  Clone ID: PAT_MRT4530_40795C.1.pep
MAGAASTWSCSCVALSDRSFATFVVFIAVRALTTSLCTLVIVSRSVNLYMATDVAVXAVGPAILPSSLSNMSHRQRRHIFLDYSSLFSVNCVLLRQFSLYTVLACPRVWQTRRDVLSITVRLHRLFGVIFLXTTTAIVSPSLSPARPRTPLVHDALPSVHDHSTAPHVRLAAQLPRHHRLPYLGYIDHGYSTHGFIDHGSLGSFVLATSTTAQRAIXRVEYSCRFFFSSPSVRREHLNCGGILEYVYSYIYXLPRLHTMCPIFAVFLFPYTIQH

SEQ ID NO: 139511 - protein, 53 aa, Oryza sativa
  Clone ID: PAT_MRT4530_40796C.1.pep
VMLCFTMKQSKLYAASVVGIMLNTFGSVKRAVLEAIRSSLVYTIPVVPSLWRC

SEQ ID NO: 139512 - protein, 112 aa, Oryza sativa
  Clone ID: PAT_MRT4530_40797C.1.pep
PRVRPRVRTRLREFSVKEGSSSRAKPFAAMSGAQGAQPMGETTPTTYESVGGGENRTRTDLRSREDQGAIQIDKVQDKVDEPAARKVDDRAFDAKQVGHGAGADAGATGTGA

SEQ ID NO: 139513 - protein, 288 aa, Oryza sativa
  unsure (1)..(288): unsure at all Xaa locations
  Clone ID: PAT_MRT4530_40798C.1.pep
MTSAMTSPTAAAARRSRRLGRRTLAGERRREDANGRHQHVEDDAANSPVTTTAAEGQRTATATRRKRRSSSGRRRRXCSGDLRRRRRGGRGRRRNGDHDDVLPERRRRLERRRSTAGAAATTAALGHTALELFRRREAKARVATGRGDHGEPFKGTRRRRRRPTATATAKESSAWRERXDPIRTRIPRFPNRFSRXFQRRKGRGDPEDHFPSIDSAGEGKERPNLERNGGGGVLGFRPEEDDGXLTGGPHLSAAARARARAAANWAGWAEEREXGFGPTFGPKPKEDF

SEQ ID NO: 139514 - protein, 60 aa, Oryza sativa
  Clone ID: PAT_MRT4530_40799C.1.pep
MPLPRCRHAPPPLLQGAARAAVRACSSSAAPPCRSPAATPLHHDRKGPPEQLQRPVKGRR

SEQ ID NO: 139515 - protein, 846 aa, Oryza sativa
  unsure (1)..(846): unsure at all Xaa locations
  Clone ID: PAT_MRT4530_4079C.1.pep
MVRKANGKWRMCVDFTDLNKACPKDHXPLPRIDQLVDSTAGCELLSFLDAYSGCHQISMAKEDEEKTAFIMPFEVFCYVKMPFGLITARNTFQRTVQGALSDQLGNNVEAYVDDIAVKTKTSNSLIDDLRETSDNLRRYRLILNPEKYTFGVPSGKLLGFLISGRGIEANPEKIKAIENMKSPTRLKEVQKLTRCMAALSRFVARMGERGQPFFALLKKQDKIVWTQEAEEAFVALKRYLTNPPVLVAPQPNEELFLYIAATPYSISTVIVVEREKVQRPVYYVSEALHDAKTRYPQIQKLLYAVIMTSRKLRHYFQAHRVTIVSSFPLGEVVRNKDVVGRIAKWVVELSQFDVHFVPRTAIKSQVLADFVADWTMPNNKSDNQIDNETWTMALDGGLNSXGAGARFILTSXSEDQFKHAIHLNFRATNNTAEYEGLLAGIRAAATLGVKRLIVKGDSELVTNQVHKDYKCSNPELSKYLAEVRKLEKRFDRIEVRHVYRKDNIEPDDLARRASRREPLEPGTFLDVLTKPSVKEVSGEVNPDAPGISSEATEAERVIAEIETTDDXRTPLIKLINSEELPEDDTEAEKITRKAKIYCMISNDLYKKAPNGVLLKCVSSDDRRHLLLDIHEGICGSHAASRTLVGKAFRQGFFWPTALKDACDMQAHKATCTSAPDYPSYLAVLVLGXDILGPFPRRQGGXRFLFVAIDKFTKWIEVVPMGEIKADNAIKFIRGIFCRYGLPHRIITDNGSQFINANFQDYCIGLGVKICFASVSHPQSNGQVERANGIVLQGIKTLLWTVRTTPTTSNKETPFFLVYGSEAMLPSELRHQSTRAQNYSDEYQEEQ

SEQ ID NO: 139516 - protein, 67 aa, Oryza sativa
  Clone ID: PAT_MRT4530_407C.1.pep
MAGAFFLFLPSTPRDRGHDIHVTVDVKDAITMLLAMTWMMDLAPRANPVTLPLPLGHEAASDGKGQI

SEQ ID NO: 139517 - protein, 215 aa, Oryza sativa
  Clone ID: PAT_MRT4530_40800C.1.pep
MHDPRGFPIHPQPYHLHPTAGGLGEGRMRGGGRRRPGAKLSTDPQSVAARERRHRISDRFRVLRSLVPGGSKMDTVSMLEQAIHYVKFLKAQVTLHQAALVQHEEGCQHADVAAAFSAADADLALELNHRHGGAGDDDAGMTTLEMAPMQEAVGYGDGPAHQMMQQALDPAGQLMMGGAHQLPPLPCCVFVQETDPSCYSVCNVHGEESGAQGSY

SEQ ID NO: 139518 - protein, 192 aa, Oryza sativa
  Clone ID: PAT_MRT4530_40801C.1.pep
MRRSMKAATTACMPRLVRGGCRASTARPAASVSLLERIRDVVLRLIMLSAVSKASVKRTGGGKASSSSSPRAAPPPPVMTSCRRDDSIRNEAVEDCIEFLKRSSAEGDAAKLSSVTAAETVAVARDLAMATTKPSSPSCAITTDDAVTAHGAAPVKQPTILASTSPHLRQPRLSPPAPSTSPAAASSSPRLV

SEQ ID NO: 139519 - protein, 62 aa, Oryza sativa
  unsure (1)..(62): unsure at all Xaa locations
  Clone ID: PAT_MRT4530_40802C.1.pep
VXLLRRRLRFAXXLLSLALLLXFXXCCXXLXXXXXVXVXPPXWVXSFLARGCXVRXXXPPPP

SEQ ID NO: 139520 - protein, 86 aa, Oryza sativa
  Clone ID: PAT_MRT4530_40803C.1.pep
LLLLPPLALGRSTRCTPTTPWIWSTPSVQKVNLALYVTHYSTTNLDRNMSRFVVLGCVASSVGFLWDGGSGNYWQNHHHLLVNLEP

SEQ ID NO: 139521 - protein, 454 aa, Oryza sativa
  Clone ID: PAT_MRT4530_40804C.1.pep
MRQQLVTLLVLIALPARAASAPGAGAGGVVVARVTHADAGRGLAMPEIVRRMAHRARARRRLLSAAEAAPVRARVRAGLGAGGGIVTNEYLMHVSVGTPPRPVALTLDTGSDLVWTQCAPCLDCFEQGAAPVLDPAASSTHAALPCDAPLCRALPFTSCGGRSWGDRSCVYVYHYGDRSLTVGQLATDSFTFGGDDNAGGLAARRVTFGCGHINKGIFQANETGIAGFGRGRWSLPSQLNVTSFSYCFTSMFDTKSSSVVTLGAAAAELLHTHHAAHTGDVRTTRLIKNPSQPSLYFVPLRGISVGGARVAVPESRLRSSTIIDSGASITTLPEDVYEAVKAEFVSQVGLPAAAAGSAALDLCFALPVAALWRRPAVPALTLHLDGGADWELPRGNYVFEDYAARVLCVVLDAAAGEQVVIGNYQQQNTHVVYDLENDVLSFAPARCDKLAASL

SEQ ID NO: 139522 - protein, 291 aa, Oryza sativa
  Clone ID: PAT_MRT4530_40805C.1.pep
MGSRYEVEVTVSSARDLKNVNWRNGDLKPYAVLWVDDGAKCSTRVDLDNADNPNWDDKLTLPLPPSSRLDDALLYLDVVHANAAEGVKPLVGSARLPLRDVLDDAGVGARVSRSLRLKRPSGRPQGRLDLRLAVRESARYYDPSPYPAPYGQPAGTRDPYGAPPPAYSSGSGGQYPYGGGYGSGGYAAPPAGYPSAYGAPPQPAYGGAPPVAAYGAAGGAPVVVEETKKKSKMGMGTGLAVGAAAGVLGGLALAGGASYLEDKFEEGVAEKVEDDLDRDDDYAAGGYDDDY

SEQ ID NO: 139523 - protein, 139 aa, Oryza sativa
  Clone ID: PAT_MRT4530_40806C.1.pep
DRAATVGLEEGVGDDGGSAGGGAVASASTGPPTAARVGCSLRRRFAVGSSPRAAAATAEGDSMGMRRTPSTVAWRRSAAGARPPERRRLGSLVSSPSSAAVASPTSATAASSDDGDVGRMENDGATWSLESKSLPPVES

SEQ ID NO: 139524 - protein, 771 aa, Oryza sativa
  unsure (1)..(771): unsure at all Xaa locations
  Clone ID: PAT_MRT4530_40807C.1.pep
MAKKKLKKLHAKDALEFFNQVMVEQPLLPFLVPLVLFAWFVERWVVPFSNWVPLLAAVWATIQLTSECSLNLQKRLKHRKPKLIDKIELQEFSLGCCPPTLGEHGMRWMTSGDQKVMRLGFDWDSNEMSVMFLAKLAKPLIGAARIVINSIHIKGDLLLLPILDGEAILYSFESTPEVRIGVAFGSGGSQAVPGMELPGVSTWLVKLLTETIVKTMVEPRRLCFSLPPVDLRKRAVGGVLSVTVVSASNVGRNTTNEIGIRQSSSGGSTSGIADNKVSQTFIEVEVGSLVRKTSTSKGPNPAWNSTFNLVLHGETGVVKFNLYELDSGGVKVTYLXSCEIKVKYVLDDSTIFWAIGHNSGAVAKRTELCGQEVGMVVPFEDIRGELTVTLVLKEWQFSDGSVTLSNSLSNGSHSSFDVSPKLQSRTGRKLRVAVVEGKALAVNGKSGKCDPYVKVQYGKALYKTKTLSHTTRPVWNDKFEFDEITGGEYLKIKCYSADTFGDESIGSARVNLEGLLDGDSREVWVPLEKVDSGEIRLQIEPIKSDFNGILKTSSGRVEATWIELVIIEARDLIAADLRGTSDPYVRVHYGSKKKRTKVVYKTLSPDWNQTFEFPETGEPLILHVKDHNAVLPTASIGQCTVEYSMLPPNQPAVKWIPLQGVKSGEVHVKITRKVPHLEKKTSFQTDASSLGKGHKISSQMRDSLKKFTGLVDEGGDTEAMSLALTEIESIQDEQDMYIQQLEREKAALLRKIQELGSEIVRTSSGPARMPY

SEQ ID NO: 139525 - protein, 78 aa, Oryza sativa
  Clone ID: PAT_MRT4530_40808C.1.pep
MAGLDGDAAAGVALAAAKLMAVANWLGGGSSGGERRPEEWKSRRSGRSHGETEVEEDATLTSKNKEQEQSRLKRYPKT

SEQ ID NO: 139526 - protein, 70 aa, Oryza sativa
  unsure (1)..(70): unsure at all Xaa locations
  Clone ID: PAT_MRT4530_40809C.1.pep
MSCCGGHCGCGSGCQCGGGCGGCKMFPDVEATATTXFFFLAAPSNTASSAGMEMAADSGENGGLCLKHLQ

SEQ ID NO: 139527 - protein, 788 aa, Oryza sativa
  Clone ID: PAT_MRT4530_4080C.1.pep
MGRRSKLRRGGRAITAIPGGFLHLSLLASLRRRPSLQAHAQLLLLGLPLPAPTASRLLCPHLRSGNPSATLRLFLRVLRDRDRRPCPVDSQEDVPDSSSFSAALAACSHHASPSPGFSIHAFLLKSGFASDVFAANSLLHFYGSFGLHSLARNLFDEMPARDTVSFNTLISSYVHSCCSSDAFEVFRIMVDSGLRPDGWTVTALIGACAELQDLRAAKAVHGVARRMLEPRVFHSGEVATSLVDAYVKCRSMELARQVFDLAGDNARNARLWTTMVSGYARAQEFDIAQRLFHEMPEKDTVAWTALIGGFVRAGRYKEAVVLFEEMEEAGFEADEATIVTVLSACVGYGNIDLAKRLHCLVGRDGLINRNAKLATTFVDMYAKHGCIQTAQEVFSGVDDDFKTLELFNAMINGLARCKFGEKAIALFDEMGSLGLHPDKITFVCVLSACRHSGLVSQGFHIFDSMEEKYGVKPEIEHYTCMADLLARDGQLDDAYIFIQNMPFKANSVVWSSLVRACMLHGNIKIRKLAEEQLLWLDPNYKPENLPLSNLFSEGKRKERTARLIFTGRGMSGDNTVHHIEMVAVAFGFIFNKDIWLNNRATSMKWKQEACPCMDNGDAFADLVNTGSAFSSCGLPFVYMVHAETKFVLSSVKRSRSPQVNLITEVMASEITAQQPRRKKKVAGEFSGLCSSWQERCKANGLKTSVFSVDIHCKCNGCIKKINDGMKRISLSEVVHIFCLHFIDELSKFRPWYHLFTDEGVEWADLMMDKSRGGSGRDYGSREAMLSVA

SEQ ID NO: 139528 - protein, 435 aa, Oryza sativa
  Clone ID: PAT_MRT4530_40810C.1.pep
KMEIQTSGKPIDLLMEKVLCMNIMSSDYFKELYRLKTYHEVIDEIYNQVDHVEPWMTGNCRGPSTAFCLLYKFFTMKLTVKQMHGLLKHPDSPYIRAIGFLYLRYVADPKILWTWYEPYLKDDEEFSPGSNGRMTTMGVYVRDLILGQYYFDSLLPRVPLPVIRQVTSNLEKMKLPTKLSGITGESNRHGSEDTARRPPSVKASLSVSFGQRAPHRASTRESSPVRRTVTHDGHRKSSSPSRRSGSREVPDRDRSSRDRSSRDYDRSSHDRDRDHSSRDYDRPSHDRDRDRDRSSRDYDRSSRDRDHDRDIRDYHRRDRDSRDRDYRSRHSSERQDDRRDRDREGSRHRRSSSRHRSRSRSRSRSRSRSRSRSRNEERSSPFGNAGKEKTAAISSNLAKLKDLYGDVTEKKDDGEAPRRDSCAEEVIRLGGPRWR

SEQ ID NO: 139529 - protein, 97 aa, Oryza sativa
  unsure (1)..(97): unsure at all Xaa locations
  Clone ID: PAT_MRT4530_40811C.1.pep
ITLEASELEXPXXAAVASSIRRHDLQAXQWXPQQARSXATSKYIXCSNCAKCCPKDQAIKKVSXXXXSWXXPAXRDLPXXATFXXGYXXXXXFYTXS

SEQ ID NO: 139530 - protein, 326 aa, Oryza sativa
  Clone ID: PAT_MRT4530_40812C.1.pep
MAATGDSSGALVCVTGGSGFIGSWLVRLLLDRGYTVHATVKNLQDDGETRHLQALDGADTRLRLFQMDLLDPASITPAVDGAHGVFHLASPLTLHPTQDPEGELLKPAVSGTLNVLRAAKDCGVARVMLMASQVAIVPNPEWPADKVIDDDSWADVELLKKHQHWYNVSKTLAEKAAWDFAAKEGLQLVALNPGLVLGPMLMPSPTSSLHMLLQILGGQRFDIDDFYIGCVDVRDVAQSAVVIYENTSAQGRHLCIESIERLIDFHDKLAELYPEFPIHRIQEDKQGWVVRSKAASKKLIDLGVHFIPFEKTIRDSVDCLRSKGYI

SEQ ID NO: 139531 - protein, 177 aa, Oryza sativa
  Clone ID: PAT_MRT4530_40813C.1.pep
MSMITSMLGRKQNAQQKGGGGGGRTGGGGGGEIEPVSVDIMEPFMDAISLTAFAAAPSAAAAAAGVPSTASMDWKETAAAHVFMADMPGVRREEVRVEVEEEKVLRISGQRARAAEEKGERWHRVERSSERFVRTVRLPPNANTDGVHAALDNGVLTITIPKDNDRKPHARIIPITN

SEQ ID NO: 139532 - protein, 120 aa, Oryza sativa
  Clone ID: PAT_MRT4530_40814C.1.pep
MKLSMKRLSYNRISRMGIDLAEYIAERRQYPCIVVILDVCEAGPTVGQPLVGPRGASAYSGVAIVDGNEVEEDPYAYLQEDAEDNDASVKRPESAHKTDDCEDVQHEEYQVVACKNREQV

SEQ ID NO: 139533 - protein, 814 aa, Oryza sativa
  Clone ID: PAT_MRT4530_40815C.1.pep
MAMMNRTRDLLMEGFEGLVREGSFSWALPRRGASPVDDADDPDSSSSSSSGKQPSISGLSPKANAVVSRCSRVLGTSTDELQYDFDMQASDSIKQPRNYARNFLEYCCLRALAHASQVAGYLSDKSFRRLNFDMMLAWEVPSSSSELTVKVEVDNTVSLEAFSRIAPAIPTITDVVTCSNLFDVLSSSSGGRLTFPVYDKYLTGLDRAIKKMKGQSESSLLSAQRSQRGERIVEVDGTLTTQPVLEHVGISTWPGRLTLTDHALYFEALRVVTYDKPKAYELAEDLKQSVKPELTGPWGSRLFDKAVMYKSTTLTEPVIIEFPELAGHFRRDYWLAIISEILYVHRFVRKFDISGVDKEETILKAVLSIMRLQAIEELAIPVSNRFESLLMFNLCDKLPGGDVILETLAGSISSRRSTQVNQPGTSSGRHSMSPFTVLSNLGVVSPINKGERLFVGEIVVGEMSALQKVVNESMNNYKKVELAQATVDGVKVDGLDTNLAVMKKLISNSLFVTIHHMLFLDFTEILIPIEFIRLWKFEGINMFNANPVGSTFGPTFQTLIINYFSMLSLKRKKMELLSPVSELWRFLVLLASWDEPIKSMVFCFSSSYIIISIFRKFLAIITCICTCTHPQSTDEAFPSLRKPISNCLFQYNELHVLRGWLVYFLVLVLLFSAAFMFLTRLTSHGKPMTEVKVTSPPPMNTMEQLLAVQNAISKVEELVQDANIVLLKIRALLLAFPSQATDRAILALVVMALSLAFVPTRLLVLMMFLEAFTNHSPPRRASTERWTRRLREWWFSIPAAPVVVEKDKEDKKTK

SEQ ID NO: 139534 - protein, 70 aa, Oryza sativa
  Clone ID: PAT_MRT4530_40816C.1.pep
MGKNNVCWTEALATAGACANNGADTHRTSLCRQWLPSIADRVASASCRPSRGMDTDLLLRASSSAADRPP

SEQ ID NO: 139535 - protein, 90 aa, Oryza sativa
  unsure (1)..(90): unsure at all Xaa locations
  Clone ID: PAT_MRT4530_40817C.1.pep
MVPGLVPPPQMYRAKPMQAAAEPMQAAAEPTRVXLSSLRRRGLTRRRRSYQRRWRAHVEDSFQKDVRSPLLACDLVRISSWGMSLDIECQ

SEQ ID NO: 139536 - protein, 721 aa, Oryza sativa
  Clone ID: PAT_MRT4530_40818C.1.pep
MAMMNRTRDLLMEGFEGLVREGSFTWGLPRRGASPVGDGDDPDSSSSSGKQASVSGLSPKANAVVSRCARVLGTSTDELRYDFDMQASDSIKQQINYARNFLEYCCLRALAQASQIAGYLSDKSFRRLNFDMMLAWEVPSSSSQLTVKVEVESTVSLEAFSRIAPAIPTITDVVTCSNLFDVLSSSSGGRLTFPVYDKYLTGLDRAIKKMKGQSESSLLSGQRSQRGERIVEIDGTLTTQPVLEHVRISTWPGRLTLTDHALYFEALRVVTYDKPKAYELAEDLKQSVKPELTGPWGSRLFDKAVMYKSATLTEPVILEFPELAGHFRRDYWLAIISEILCVHRFVRKFDISGIDKEETILKAVLSILRLQAIEELAIPVSNRFESLLMFNLCDKLPGGDVILETLAGSISLRRSAQVNQPGISSARHSMSPFTVLSNLGVVSPINKGERLFVGEIVVGEMSALQKVVTESMNNYKKVELAQATVDGVKVDGLDTNLAVMKELLSPVSELWRFLVLLASWDEPIKSMVFCFSSSYIIIRGWLVYFLVLVLLFSATFMFFTRLTSHVNPMMEVKVTSPPPMNTMEQLLAVQNAISKVEELVQDANIVLLKIRALLLASPSQFYRNEWICFCVYVTFEFHLIFFPLDKATDKTILALVVMALSLAIVPTRLLVLMMFLEVFTNHSPPRRASTERWTRRLREWWFSIPAAPVVVEKDKEDKKTK

SEQ ID NO: 139537 - protein, 132 aa, Oryza sativa
  unsure (1)..(132): unsure at all Xaa locations
  Clone ID: PAT_MRT4530_40819C.1.pep
FPEADVILETLAGSISSRRSTQXNQPGTSSGRHSMSPFTVLSNLGVVSPINKGERLFVGEIVVGEMSALQKVVNESMNNYKKVELAQATVDGVKVDGLDTNLAVMKKLISNSLFVTIHHMLFLDFTEILIPM

SEQ ID NO: 139538 - protein, 480 aa, Oryza sativa
  Clone ID: PAT_MRT4530_4081C.1.pep
MGKPSNVPKSVFQFLKFAQQLKCGVVGLGWLGTSWDPGSGCQFGLNHRRPWVKAGLKCLCNNMFNREKGKNVSGYASSNSSFQLNPPLASRELTRAHPWSIPSMLLSSQLPLVGSQDQNQYVFDRAFATQVNELPMPEEDVPFCHDCREQGHYALNCPWVYVKEAPSLGLAGQTSLNQPPHTKSSLQPSVQSRELNGENPLNPGKCFPPSLSYHVGSHTKQAKGKKSKNQKRKAPMRTEAEVRKMTITSTEWPPAGITIPRRQRGNTFRGAQQLTQHLLSHDGRVSDSEGSDQVSSDYEDESPRHLGEEEMESKACTRCGEIGHVASMCLTLCTHCEEDHPPGECLTRKVTCFLCEGANHVPKDCQLSVLLTKTVEIQRTTLRLSHQLVSSNSNIDDIIPSTNAPPAAPDFAINHSDNTFNTNHSLHRQPQQRIVVDERSCVSPRPTPGQAKGNQPPEGDTEQKTVIRLNQQSEGNFSGE

SEQ ID NO: 139539 - protein, 92 aa, Oryza sativa
  Clone ID: PAT_MRT4530_40820C.1.pep
MEPATSEADLPPPSAPPTHPATRSGEDGEVRGDGSTVESRGGPRKCGRGRRRGMHDAAGGKADAFGVTALWERELASCGGVMAVEETGGRAS

SEQ ID NO: 139540 - protein, 210 aa, Oryza sativa
  unsure (1)..(210): unsure at all Xaa locations
  Clone ID: PAT_MRT4530_40821C.1.pep
FTANPIVTRFGPTFQTLIISYFSMLSLKRKKMELLSPVSELWRFLVLLASWDEPIKSMVFCFSSSYIIIRYAKLTWIFSXDFILHDAFLTVVHYCDFXYNFVQLTNIMQYKYISLAPLEGWLVYFLVLVLLFSATFMFFTRLTSHVNPMMEVKVTSPPPMNTMEQLLAVQNAISKVEELVQDANIVLLKIRALLLASPSQVTMHASLSIL

SEQ ID NO: 139541 - protein, 73 aa, Oryza sativa
  unsure (1)..(73): unsure at all Xaa locations
  Clone ID: PAT_MRT4530_40822C.1.pep
RLHDRASVDGEVNYFAAALMAVMVAMLTASQCNSLYDVKNRQSSDRSIDSPIDTCLPVLNRXLTRPERFQPML

SEQ ID NO: 139542 - protein, 86 aa, Oryza sativa
  Clone ID: PAT_MRT4530_40823C.1.pep
SILGTEPLPTFIMHANIILIKEKTCIYRLYKLCMHTEHSMKKITFLLHEIATILYSVKHPGIAMEHCITEDLSIMRNVEQINFHAT

SEQ ID NO: 139543 - protein, 140 aa, Oryza sativa
  Clone ID: PAT_MRT4530_40824C.1.pep
VVGEMSALQKVVNESMNNYKKVELAQATVDGVKVDGLDTNLAVMKELLSPVSELWRFLVLLASWDEPIKSMVFCFSSSYIIISIFRKFLAIITCICTCTHPQSTDEAFPSLEECVPITFHPCWRLLVFDQEVWIAQAKTT

SEQ ID NO: 139544 - protein, 102 aa, Oryza sativa
  Clone ID: PAT_MRT4530_40825C.1.pep
MGPQKQENARCAGTRCSAHALGAATAWAHHAACCATHVSPTRVLVLPRVPTTRHQRGWHRPICASPLRPSQSARVTALEPDEKQVETAPPRISTQRNWYVLP

SEQ ID NO: 139545 - protein, 87 aa, Oryza sativa
  Clone ID: PAT_MRT4530_40826C.1.pep
NTQACMPAAISQATDKTILALVVMALSLAIVPTRLLVLMMFLEVFTNHSPPRRASTERWTRRLREWWFSIPAAPVVVEKDKEDKKTK

SEQ ID NO: 139546 - protein, 113 aa, Oryza sativa
  unsure (1)..(113): unsure at all Xaa locations
  Clone ID: PAT_MRT4530_40827C.1.pep
IFVVSRAIKKMKGQFESLILSGQRSQRGERIVEIDETLTTQPVLEHVRISTWPGMLILTDHALYFEALRVVTYDKPKAYELAENLKXSVKPELTCPWGSRLFDKAVMYKSTTL

SEQ ID NO: 139547 - protein, 75 aa, Oryza sativa
  unsure (1)..(75): unsure at all Xaa locations
  Clone ID: PAT_MRT4530_40828C.1.pep
GGVSSFPSFQXFINLIIMGSSITARSQRNSTPFSPXHAWVAPGNSGHRSPARRTSSPHSAVVIKAGRHSRAHQLV

SEQ ID NO: 139548 - protein, 54 aa, Oryza sativa
  Clone ID: PAT_MRT4530_40829C.1.pep
ILAPISRFWGLFKFLIFGYFKAWAPLWLYFSNQNCLFLQKKKKKKKKKKKKKKK

SEQ ID NO: 139549 - protein, 290 aa, Oryza sativa
  Clone ID: PAT_MRT4530_4082C.1.pep
LIVAGLLLEELHISRIRFIFFSNRITQPVGISHVGRPPSFHDKAFPKPTQAQDVQRWLALLEILSLILEILGLRVFGARGKRIKHASCDDDSDGSVAGRPLVSPSSPAVRLPWDLVYSASIDAVSGLDLDHPTLDPVFNLTVRLSSQNQVTNYPNCIWPGTTVEVTYRGVQLAIGSVEQLCVGARETKEQHVVAWGAGVRLPGSALDALAADARRGAEAFDVAVKIPTVIHSGYHSYDPRHVHLGTLVSCMSRRVGDDPVAALRTPCHASSTDIAASYPNKGRTQPGGAS

SEQ ID NO: 139550 - protein, 149 aa, Oryza sativa
  Clone ID: PAT_MRT4530_40830C.1.pep
MVERRISCQARELEKAPRQATKPATRNRRGGDPRSRSVAAPGLAAWTVGTERTAAGTVGRRGAGVDSREHWRRACSRSAAPPPSAVVSAGRSRSAAPPSSAVVSEGATSPPSNLRLLSRKSEEYHSGPSTMWDVAGDSFELFDGGANFL

SEQ ID NO: 139551 - protein, 73 aa, Oryza sativa
  Clone ID: PAT_MRT4530_40831C.1.pep
IPTKNDSSESSMRVSERCCVIEGICARVWETLERAPKPIQRDNIYIPELQFSARTLPVQYFQMKVSYFELKFL

SEQ ID NO: 139552 - protein, 59 aa, Oryza sativa
  unsure (1)..(59): unsure at all Xaa locations
  Clone ID: PAT_MRT4530_40832C.1.pep
FFFFFFYVIPSIFFICRRIYQICSRYILLVCTTTPDALLSPXXSSPQRLRLYVPLYPHN

SEQ ID NO: 139553 - protein, 93 aa, Oryza sativa
  Clone ID: PAT_MRT4530_40833C.1.pep
IFKTETEREKLLDGSSDVGGPRMKSTQEILTKYKFGGDAAAAAAHAKDKLKERGEKLARISQESAELQNESENFASLAHQIAKSMENKKWWKP

SEQ ID NO: 139554 - protein, 61 aa, Oryza sativa
  Clone ID: PAT_MRT4530_40834C.1.pep
SWFRGRQVMGVVGLRRGGSQVVTRRGEGVDLGQARWDGWAQAARGGGGLGQVRGGIRIRER

SEQ ID NO: 139555 - protein, 98 aa, Oryza sativa
  unsure (1)..(98): unsure at all Xaa locations
  Clone ID: PAT_MRT4530_40835C.1.pep
MMVVTVGMVGNTLQPPLGVNPSRPSKPCTHRRHGRFGPTSWFGRTRGRPNLAHIQKVASSVVLLRRLXNFGPLCCVNSEFLVHSYISLSLDIVRLIYR

SEQ ID NO: 139556 - protein, 140 aa, Oryza sativa
  Clone ID: PAT_MRT4530_40836C.1.pep
LRHQALGCRCVRPPRVAVPLPVVHTSTGCCSAERRPPQHFYITSGLLAATSTWSGHRRPLRVFFIDFEHRRRISKMIHRQRRRIFLDYTSLFSSNCVLLRQFSLYAVLAPRPSRRPSLSPRRPSRASTTTLRRPMRVLDH

SEQ ID NO: 139557 - protein, 172 aa, Oryza sativa
  Clone ID: PAT_MRT4530_40837C.1.pep
TSSSTRLRHQALGCRCVRPPRVAVPLPVVHTSTGCCSAERRPPQHFYITSGLLAATSTWSCSCVVLSDRSFAAFVVFIAVRASTTSSSALVIVGRSGYLYMATDIAVQAIGPATSPSTSSNMIHRQRRRIFLDYTSLFSSNCVLLRQFSLYAVLAPRPSRRPSLLVSSDISV

SEQ ID NO: 139558 - protein, 190 aa, Oryza sativa
  Clone ID: PAT_MRT4530_40838C.1.pep
MASSAASMLDMALLLAVFASILAACNAKSLLSYVKSCAVKKLKLVCKPLPNVRLHLCRPYGSRCCPSSSSSPFALRHPRHPHWSSSAAQGLLRLLRASSPHLQAATVAALGRWSSYLYMVTDVAIQAVGPTTSPSSSSSMIHRQCHRIFLDYTSLFSGNYVLLRQFSLYVVLAPRPSRRPSLLVSSDIGV

SEQ ID NO: 139559 - protein, 1902 aa, Oryza sativa
  unsure (1)..(1902): unsure at all Xaa locations
  Clone ID: PAT_MRT4530_40839C.1.pep
MGKHKGRAASSGLAASLLPHAQGAVPIVGFGGYHGASRVEPAAPSSSTDPDASILLPPDVDSEVLQHLRRLGRKDPTTKLKALSTLSIRFAQQHSQEVLQIASQWAFEXMRLLLDYKNEIRRATRDNMPGLDXTVNGGADPHVKVFMCPSWFSQCDPVLEAAXAARHSFEAAFPQSDKRLDALMLCVKETFLHLNENLKLTTQALSDKATPMDELEDMHQRGGIEAGQVTGTVCHKSLQQPSDEHKQLFVGWVISSSLLAMATLIDILLGVKLQNCVRDNSSSENTSLSKVLSGTLSSAESAFSMNKYFLDFLKSKSAIIRSATYSLLASYIKHVSHVFNEEAMKVLSPALLGAFNEKDPSCHSSMWDAFLAFSRRFPEAWSYCNIHKVVFSRFWHFLQNGCYGSKQASYPLLVQFLESIPSKAVTTEQFVFDFLHNLWAGRNQRQLSAADSLAFFTTFKQSFLWLLKVLPRHSGGGSSDDIPIKLITYFLAKVVWHDYLRIPSSKNQDISLSGLSDEAISGDCQLSHKESLLASSTRYPTYYLQDLGKCIIEILDEISAMENHLLNIACETLLKDCLDIIHQRESLPNFQYHVEQVVSFFISLDQLIVQKGKTWPLESLARPLNEQSVPAIKSMIQKDTPIVVKLLSVLVEIFRPVPLFLKNSQKESEESVQDECFFDQWCTIIKYTSAKQKHPVDNKNSHVDDQFELLTLILQKVRERIAGGKLRNLQKNGSLPEHWRHDLLDSAAESVFCDLPATDSHVHYVCAALGGSDQDDQICFLSADTVHKMLGSILKCLTSVLMTSTFEWARFAYVVLLPTEPKDSKVIGAQSFSSNIKMAHFAFKVLEGSLFALRRLEEDSLFPSVLAALFIIEWEYSMALTLDEEHDLKGYKEDIDVGSSACNSSDDHLDEGIHLKANLAESIHTFCQSLSPSFWSDLHPFTLNNLLNILAQSVRCALFQTLELPTESTSVLCSEWMVNMLKLISLDHTKLQSFFYLLLSEGEYWPLWVKPSLQNENAPVKIKFEPVITNETGLKHHQFVAFVDKLVLNLGFGEVILGVPGNTCYNTSQSIDTTSTVPSLSRAWVAAEILCTWKWKGGSVFSTFLPSMIQHLKMESCAEVSILSILLDTLLEGAFHECNQWVLFNAWHISDNEIEKIQDHFLRALVALLFSINSINECIWRESEALVFFEKLLSNLFIGSTVNRKCVKTLPFVMSTIIKPLSGKLKLNEASCYTDLVGQNILSWLDVAISCLSSSPREVLQQDIVDWMQVVLSCFPLNITCGTQKLEVKIEREISDTERSLLLTLFQKYKIFCAIEAPSLSTSGTTLSTMVELLGVKLIAVMVGYCWTELQENDLHFVFHTVQKWIESAVLLVEEMTDAINDAVINQKSNEDTLEKLKLVVSSIDELTLSFGEFALVTLCHLNHLVDIQETENFQSLQIIKSGDFADRNNNMMESMLRLFLASGVSEAIAKSSCEEASSIIASSRVAYMHFWELVASFVIYASPQTRRCALESMELWGLAKGSVSGLYSILFSSQPISHLQFAAYSLLLSEPLCQFSLIKECSLGSNRPLTQESCMGQSIELMPDSEKTLDLREELSSLIEMPTSELLQTDLLAHDRVDAFIAWSLLLSHLQLLPPASITRERHIPLRTGAPCGKKKDAELMPEAEVAAQASKNAIITCSLLPCIESLWPVGTWQMASLAGGLYGMMIRLLPSYVRTWFTSLRDRSLSSSIESFTRAWCSPPLLLDEFSQVKDSLYADDNFSVSVNRSAYEIVATYKKEETGIDLVIRLPSCYPLRHVDVECTRSLGISEVKCRKWLLSLTAFVRNQNGAIAEAIHTWKSNFDKEFEGVEECPICYSILHTSNHSLPRLACKTCRHKFHGACLYKWFSTSNKSTCPLCQTPF

SEQ ID NO: 139560 - protein, 154 aa, Oryza sativa
  Clone ID: PAT_MRT4530_4083C.1.pep
MAASLGALDFDHLSYSIDGKEWFLLEELQGQIAKLADLDMADDKRSHDSFGKRRGGREHCRGSKRRLGAPVALAGLRRQEEVGTALRLGRRMGAVRGLKWAALCSWLASIGRLRPRRGGDSRHGGTACILREEDGGNRRFCSELGQVRPAALFG

SEQ ID NO: 139561 - protein, 94 aa, Oryza sativa
  Clone ID: PAT_MRT4530_40840C.1.pep
PEEETRWVRASWGHRNHPRKARGRTIGSHSPGSAEDMVGEEQPHRTEANTTPYPPPGPPCGARRHLAPLTTGAAGSGDEVAGVEALGMGRGRLP

SEQ ID NO: 139562 - protein, 313 aa, Oryza sativa
  unsure (1)..(313): unsure at all Xaa locations
  Clone ID: PAT_MRT4530_40841C.1.pep
HFWELVASFVIYASPQTRRCALESMELWGLAKGSVSGLYSILFSSQPISHLQFAAYSLLLSEPLCQFSLIKECSLGSNRPLTQESCMGQSIELMPDSEKTLDLREELSSLIEMPTSERLQTDLLAHDRVDAFIAWSLLLSHLQLLPPASITRERVLQYIQDKISPCILDCIFQHIPLRTGAPCGKKKDAELMPEAEVAAQASKNAIITCSLLPCIESLWPVGTWQMASLAGGLYGMMIRLLPSYVRTWFTSLRDRSLSSSIESFTRAWCSPPLLLDEFSQVKDSLYADDNXSVSVNRSAYQIGATYKKEETGI

SEQ ID NO: 139563 - protein, 43 aa, Oryza sativa
  Clone ID: PAT_MRT4530_40842C.1.pep
MIFRFRRIGTNTGSTHDVMVYPRIFLHFVGKTTRLKKNQEMGE

SEQ ID NO: 139564 - protein, 57 aa, Oryza sativa
  Clone ID: PAT_MRT4530_40843C.1.pep
MASSSSSQSAEQQQSVENEEGGGKESKARPRRLGMEEETLGAEMRRRQQGLGVDGMD

SEQ ID NO: 139565 - protein, 318 aa, Oryza sativa
  Clone ID: PAT_MRT4530_40844C.1.pep
PLSPNLHPLSPSPSAAAAAAATPTPAAAAASSRSSRSKKPPHSSDPNQSKKPRLTLTVPGRPLSADGEVAAAIQHLRAADPALATVIDAHDPPAFQCPHRPFHSLVRSILYQQLAFKAAASVYSRFLSLLGGEHNVLPEAVLALTTQDLRQIGVSPRKASYLHDLARKYASGILSDAAVVNMDDRSLAAMLTMVKGIGAWSVHMFMIFSLNRPDVLPAADLGVRKGVQHLYGLDAVPRPSQMEKLCEQWRPYRSVGAWYMWRLIESKAPPPPPAIPVGPPALTEHGDELMLQQQQHQQQQQQSVIQMIDPLQMLPGMG

SEQ ID NO: 139566 - protein, 45 aa, Oryza sativa
  Clone ID: PAT_MRT4530_40845C.1.pep
RSRRRCVSSLRFPTEKDQKQSAVAASMVLPVPVKERRIHAENLLN

SEQ ID NO: 139567 - protein, 221 aa, Oryza sativa
  Clone ID: PAT_MRT4530_40846C.1.pep
MMMSSGFQLGVIGSLALSVASSVAIVICNKALISTLGFPFATTLTSWHLMMTFCTLHVAQRLHFFEPKAIDGQTVILFGLLNGTSIGLLNLSLGFNSIGFYQGFIMLSCLIAVSVNFSTFLVIGTTSPVTYQVLGHLKTCLVLSFGYILLHDPFNARNILGILIAIFGMGLYSYFSVKEGKKKATNDPLPVSQMPEKETEPLLATKDNSDTKKANGVSHDC

SEQ ID NO: 139568 - protein, 233 aa, Oryza sativa
  Clone ID: PAT_MRT4530_40847C.1.pep
MADKQACEALENGASGGRRRAAAADAERRRAVWATGETRHPPMLDQPMVGQGMTVPPKERTPEAMRWLDRRAFRSGFRGAFQRHVKRRRRRTSARRSIGGLPILLLAVEPSPSAPIGIRVHPGRSPLHPPPVSRRGGAWRRGGGVAGHNKVAARPLTRHGSGWGEAAAGRRSRRRGRSGRPPLSPSLGTAAFPLLWRRPPLLPLSRFFPARRSARCAGSRAHSAVGRYLPACA

SEQ ID NO: 139569 - protein, 140 aa, Oryza sativa
  Clone ID: PAT_MRT4530_40848C.1.pep
MNIYGLFRGGIRLKTITQKLSADGPFIPGATPNGQWYSTPSTDVMIMGKLFNNVSVDYLNIANNITKATGNNCVGQVGIEFSDPVSNYTNLLPGFTNSSSTTFVDQRIEGCAEFEIPYYNSTHITPAITSVQSDPLVPVT

SEQ ID NO: 139570 - protein, 40 aa, Oryza sativa
  Clone ID: PAT_MRT4530_40849C.1.pep
MCKHIYMHGPRRNTELSACLPAILPHVLHCTLSYVTVICF

SEQ ID NO: 139571 - protein, 85 aa, Oryza sativa
  Clone ID: PAT_MRT4530_4084C.1.pep
MTRGGQNRQNESLVFLTTFLGLKKYGVWILGFKQKDGGGEKRNGGDSNGKGGASFSFFWVGGKILHWGGLNAQNEGGGVRYCFSP

SEQ ID NO: 139572 - protein, 162 aa, Oryza sativa
  Clone ID: PAT_MRT4530_40850C.1.pep
MHLGLGLMRLLFEVSGERDDHSTLGGSIPMTTNPELFLTRGVGGGWVGGSGRDAKVPCPSGAPVAGDSPAVSSSILLFFLFEDTPADSSTVRFPTCSIAFALERVNLPDDDLGLSSCSAISESGFDLDRVDLAGDDLGPLKAATDFLGLGDMAASRRTNRRR

SEQ ID NO: 139573 - protein, 508 aa, Oryza sativa
  Clone ID: PAT_MRT4530_40851C.1.pep
RRRLVRREAAMSPKPRKSVAALSGPKSSPARSTRSKSKPDSDIAEHDDSPKSSSGRLTRSRAKAIEQVGNRTVEESAGVSSNKKKRRIEEETAGESPATGAPEGHGTLASRPLPPTHPPPTPRVRKSSCIVRLEVARLQKLTLRRDKKDDPSTAAALPTPSDKNMVLGMSRSIVRVSSPPSEGKLISPRTGFVISWDGATKRAMIVTLFTYFKKKPHEPQPEVHLPDKSIVQGRLIFMNRHYNLSILEITSDLPLQVPAFGSAPKYGQKILALSRDENMSLVARRGAITWSDGSFMWRNHYMFVDCDVPEGGVGGPVVDSCGSSIAMMWKQFSCVARPVFDVDLRSVELAGVSLREELSVKHNINGGFIVKRIADDSALEHLGVRRGDVIFFENECGTSLPEIEGYLLSLGWRYLQGMKKSMVLKLEVHDIEGPCEETITLPLKFSVDSGKFGREGVDPSSKNSILRFEKLDSCREKIDPAARASVRVHEVDQRELEISWWSSRTLLG

SEQ ID NO: 139574 - protein, 375 aa, Oryza sativa
  Clone ID: PAT_MRT4530_40852C.1.pep
MSTRSKSTPDSDLRSHDGSNPSPESWSGRLTRSRAKQIGLVLPIQAVESPGISSNNKKKRKRREIEEETAKKQAQMSAAAAAVDRLQKLTLRRDKEDEPSTAAALPTPSHKNMVLGMSRSIVRVSFPSSEGKLISPHTGIVISWDGATKCAMILTLFTYFKKKPHEPQPEVPAFGSAPKYGQEILALSRDENMSLVARRGAITWSDGSLMWRNHYMFVDCDVPEGGEGGPVVGTGGSTIGMVYIDGPGAVIISISIICTFFEIWKQFSCVARPVFEVDLKSVELAGVLFREELSLKHNINGGFIVERIADDSALEHLGVRRGDVIFFEDECGTTLPEIEDYLLSLGWRYLQGMKSMVQGSPMEDGLKMYSKTEVT

SEQ ID NO: 139575 - protein, 305 aa, Oryza sativa
  Clone ID: PAT_MRT4530_40853C.1.pep
LLKGKLISPRTGFVISWDGATKRAMIVTLFTYFKKKPHEPQPEVHLPDKSIVQGRLIFMNRHYNLSILEITSDLPLQVPAFGSAPKYGQKILALSRDENMSLVARRGAITWSDGSFMWRNHYMFVDCDVPEGGVGGPVVDSCGSSIAMVYRAGPGAVIISISIICTFFEMWKQFSCVARPVFDVDLRSVELAGVSLREELSVKHNINGGFMVKRIADDSALEHLGVRQGDVIFFEDECGTNLPEIEDYLLSLGWRYLQGMKSMVLKLLVHDIEGPCKETITLPLEFSVDSGKFGCFDEQTDSGKL

SEQ ID NO: 139576 - protein, 34 aa, Oryza sativa
  Clone ID: PAT_MRT4530_40854C.1.pep
TSWTRNLLGLGCDFLRRLGGRDPRRATCGRCGVP

SEQ ID NO: 139577 - protein, 404 aa, Oryza sativa
  unsure (1)..(404): unsure at all Xaa locations
  Clone ID: PAT_MRT4530_40855C.1.pep
MDDAPWRELDADVLRLIHSHLPCHVDRRRMGRVCRNWRVAVAPQQPPPPPLPSILVPRADVEPSFACAIAGCATHAFRLPLPGDTRAARYYGAYDGRWLFVAFGQTKDYAXXSLRTHHRLRIPYPYVSWATVAATLSSPPENEDCLAAAICHYCQETGPRVHRFWRMGQHQAALKRTRISVPTIMSATNLEDVIHHRGAFHFLTGEENLHVFPVPGFHEDGNGNLEIPPMVIRRFSRGGRDYDGKKVVVRYLVESGGYLLMVVRLAPFPPLQAPPPPRTSAFKVFEMVEPPPPTPINSSEAQYSWKELDSLGGRMLFVARGCSRSYDAGDYPRGLEFTAGVYFLDDGRLYGEERVIGAAAERRYPCRDSGKWLPLPAAAAAGRVDKLLPEQAPSNYSPPVWILP

SEQ ID NO: 139578 - protein, 73 aa, Oryza sativa
  Clone ID: PAT_MRT4530_40856C.1.pep
MAAAAAAATATLRWVLQMHRDVPRAARFYSEGLDFSVNVCTLRWAELQSGPLKLALMHTNDRSPDCLASSFSL

SEQ ID NO: 139579 - protein, 139 aa, Oryza sativa
  Clone ID: PAT_MRT4530_40857C.1.pep
NFRNGVPFPLPPTSALLGLGFPPPFVVFHKLFLPPKKDIQWVPPVFPPWVAKLGPFFFFFKEKDPSFFGLKKRPKGAKPPLGGGMGKFGQKQTQAPRLLKERGRKKKVYPPPPVFFPGFKKGFPFFGPQRMGFFFKKLF

SEQ ID NO: 139580 - protein, 165 aa, Oryza sativa
  unsure (1)..(165): unsure at all Xaa locations
  Clone ID: PAT_MRT4530_40858C.1.pep
QASEYGSGCTNGGEETFSTMMVRQNIDNANRADAYNPRAGRVQISQPEYTHLNLXQMSADEVNLYQSALLSPFWNMTRSHXIEYMTQGRAQAQVVNNNAKTVFNGELSRRQLLNGQHHYVVVQMAHSEGCAYIACKTYPNCMVRHIARKRSILRAIDTAVLANAY

SEQ ID NO: 139581 - protein, 57 aa, Oryza sativa
  unsure (1)..(57): unsure at all Xaa locations
  Clone ID: PAT_MRT4530_40859C.1.pep
CHFPRDHSRTLYYPDIICNNCEISEPLDNRKKKKKKKKKKKKKXKKKKKKKKKKKKK

SEQ ID NO: 139582 - protein, 125 aa, Oryza sativa
  Clone ID: PAT_MRT4530_4085C.1.pep
MGMPTVQDALRYLTPLIRSHYATANPAALRCLLVLISPPRTPQPCAKVYVEGADHKSVTYVVCHFGGQTWSKDGWTGSGTLNQVHGSKHAIFKFTDLSDTSPQLAAAGMLLSIGYLMIFFANAVI

SEQ ID NO: 139583 - protein, 57 aa, Oryza sativa
  Clone ID: PAT_MRT4530_40860C.1.pep
SSKTLSRKCPFKTISKLNGKVALFISPCPHGEKFKYQSSWTNAVQIQNLFVLIFCVI

SEQ ID NO: 139584 - protein, 364 aa, Oryza sativa
  Clone ID: PAT_MRT4530_40861C.1.pep
NKKSVIDSSKVVASSEQNKPDDSEFPHEASWKKQLLSLYKNKGKLQHQPVKLYPSSNEDRGRPRYLIGNESGRSSPARRRGGGILSFPIPSAFTTEPSTAPFTPPPESVHLTTPSSPEVPYAKLLTSINNSKNAETGELQSYQIYPESPIGRLISPSSACSGTCSPFPDPEVQTSSRSTFPSFPVREPPKILDGEGIATQKLIPRHMRNGGSLLDGHISAAVPVVDFSARLQNNDHAMDHRVSFELTVEDVARCLEKKTNINGESAAASFRLVPTGNGDHIHPRESNDTRAGLCVDETYHDLPEKARRSLSLRKAKEFKFNNVDAPSVEPSVGSDWWANEKVAGITSEPRKSWSFFPVAQPGVS

SEQ ID NO: 139585 - protein, 316 aa, Oryza sativa
  Clone ID: PAT_MRT4530_40862C.1.pep
MATPSTSASGPAPAPAPASSAFPLTAAARFLRVSAFSSTRAFALAERRRTPRCRLSEVGGGDRSVAAGRSPGPRSFHGLVLSGNAEGAMQSLRRELSSGMHPLRENFVALVHVFAKNDLTTKGMEILAAMERQSIKSEADTFRPAKIQEAFGMRRCSKSLLQLGTLPCCTMAWLSFAQTAQASEGTNINMVYEVGELFELGIQLSYLLILLGLLGAGTFFVIRQVLVRRELDLSAKELQEQVRSGDASATEYFELGAVMLRRKFYPAAIKYLQQAIQKWDRDEQDLAQMQSLRRELSSGAPFTRKLCGFSACFCQE

SEQ ID NO: 139586 - protein, 119 aa, Oryza sativa
  Clone ID: PAT_MRT4530_40863C.1.pep
YKKLIPFNTFINITHSVFFFFGGPIFLKRPGAAAPGGGRGSSGYPQSRGGLPPEEGGTGAGPTPGGGGNGGGGCTNPSLPPHFFLVFGSSPSGDYFQRSNLFFQGGSVHLSWETIFILV

SEQ ID NO: 139587 - protein, 122 aa, Oryza sativa
  Clone ID: PAT_MRT4530_40864C.1.pep
VGHTSHVAHSTWEIYIDILRVLAELHKRAQGLRRQDRIPARRRRPPADQGGGAGQEGGGGEARLCCQHGKSWAHTDCSCPLAPRGPRPVRQSQCQCNGGEEEGWGCMSRRRGDSPSAHHWGA

SEQ ID NO: 139588 - protein, 97 aa, Oryza sativa
  Clone ID: PAT_MRT4530_40865C.1.pep
GTQWHWMTSRCSSRPIAAILPPCWVHLLCSASLVPDLQCINESCSSCALSYIFLKFSPSAHLRLRSSVHVVDVATTSSGKVVCVLYRPGQAHLDTLN

SEQ ID NO: 139589 - protein, 113 aa, Oryza sativa
  Clone ID: PAT_MRT4530_40866C.1.pep
MAGACERERGRVFPKKRERGGEEENTQWRKKGGEEHVSSVGARAAHVEREGGCVRGSRAIQTTIAVREENVLVCDKDRHSNSKMLSEDMESCIHMYKEQKYLMMVIMLTTNKK

SEQ ID NO: 139590 - protein, 38 aa, Oryza sativa
  Clone ID: PAT_MRT4530_40867C.1.pep
INNWVVRRLRVEPRNKLFYFKDPCQFPLNLTIVYCGVA

SEQ ID NO: 139591 - protein, 43 aa, Oryza sativa
  Clone ID: PAT_MRT4530_40868C.1.pep
RHSQRCTSRYTHRYRDSIYESMSNAICSLCVAVVLQTLDYQLA

SEQ ID NO: 139592 - protein, 106 aa, Oryza sativa
  Clone ID: PAT_MRT4530_40869C.1.pep
QRLPCLVYQPDCNQSEYTVSVLPFHEDGGRMARLLTFLRNRRVTVACVGAHEVMEKLTEEWELDVAWPAELTDLFSFTCGKVAGVDAVRLPKELEPDKEEIKESKH

SEQ ID NO: 139593 - protein, 250 aa, Oryza sativa
  Clone ID: PAT_MRT4530_4086C.1.pep
MENGLSDEVLKAVFPLLDGQDLVFCMLVCRQWREIAKDDYFWKCICARKWPSICKQPPSDANYQKLYLTFSKPRTPQHLPVPKLTFEDLVFYIDMWLDGSLIFSQAVSGCILRGGLQNTPCGIPDVLVAHLTAPDCILMMEVEPKLEITMGPSITVSVLAHRKDTKKMACVINKSTFDYIDSNAARALAYEYLQFSPRYPFISDIRAWMSLLFLYKGTNVIEVFGIELDFCDAARSETEILWLLDMLDWK

SEQ ID NO: 139594 - protein, 140 aa, Oryza sativa
  Clone ID: PAT_MRT4530_40870C.1.pep
TQSKCICGVKVLADDLIPNQTLRSTISNMLATRASSITSGTGKHRSSSGSNVDPNSASQTPSAALEKQSKDHHISSAAPDAGLQVATEHVSHLEHKLTTGVDLEVKDEGNSAGILVEKIVPTADARLKDVTDSTSKPATI

SEQ ID NO: 139595 - protein, 84 aa, Oryza sativa
  unsure (1)..(84): unsure at all Xaa locations
  Clone ID: PAT_MRT4530_40871C.1.pep
GGRAPPLSLPLSVVVVLPGLLRLTPSPAEGSRSSAKASGFGPPAXDWDGDDGGASNGGRGADPSTPQLLVKLIGRIGWWRCGWI

SEQ ID NO: 139596 - protein, 71 aa, Oryza sativa
  Clone ID: PAT_MRT4530_40872C.1.pep
WVQSANRSGDSLVVASQSPPLFKLDALRVSGDVWFGSSLAFRGRVPFSGQFGVKLPFPPGSVVQVSAYPCL

SEQ ID NO: 139597 - protein, 137 aa, Oryza sativa
  Clone ID: PAT_MRT4530_40873C.1.pep
MASKVVAPFIALSLLLLAVIANGCTPNCPGEQVVPTPTHHGKNGGHGRCPMDALKLRVCANVLKGLVDVEIGHGPDDCCSLLSGIADIDAAVCLCTAVKANFLAGRANPVTGTGRKDDVEILRGDRSNFIKLAHIRA

SEQ ID NO: 139598 - protein, 153 aa, Oryza sativa
  Clone ID: PAT_MRT4530_40874C.1.pep
MELAEGAEAAAVPPRSAPLGRIWRVEAVGRRQLATTTTTAGGSRRWSRPDLDAGGSGRRRRQCGDGSGGGRGPAATWWLPCHLATAVEAMASGCYLLGGGGRWRNGGFAEAVVGVGGSGDGGCDSRGGDDVGGGEGVGCEVGMMTARWLGVRQ

SEQ ID NO: 139599 - protein, 107 aa, Oryza sativa
  Clone ID: PAT_MRT4530_40875C.1.pep
QRPKKAMLRVKQPATRNLPRLEPSKATLCHSSRRYKPSRLSDRVIQEGVSVVALAKATVPSSQATVVLIDSSKQTSMFQNSEAHLLYISCVILYWYYYPFFRILYEF

SEQ ID NO: 139600 - protein, 202 aa, Oryza sativa
  unsure (1)..(202): unsure at all Xaa locations
  Clone ID: PAT_MRT4530_40876C.1.pep
MASGSSSGDMGSSGAKDVILDEPLLTSGSAESSQQRSTDADTKSRVEDIWKKMNSGMPAKMPKPVMNKLSTPAKEKKSTTGNNWMSVLGLSPSKASTNDQGSKNGQKQAQQETSEDAKKLAASALAAVRDAASAAAGRGKVXEITEVRDFAGKDIXEIKKLVDADSTEAIEKAKAXAGAAPSALDHILEQIKKKQKLSVLDK

SEQ ID NO: 139601 - protein, 295 aa, Oryza sativa
  Clone ID: PAT_MRT4530_40877C.1.pep
MAGAKDVILDEPLLTSGSAESSQQRSTDAGMYTGLSAPCFTGPSGLQVRVTQKSEASVLNMSYVDELCDKDYTKSRVEDIWKKMNSGMPAKMPKPVMNKLSTPAKEKKSTTGNNWMSVLGLSPSKASTNDQGSKNGQKQAQQETSEDAKKLAASALAAVRDAASAAAGRGKVEITEVRDFAGKDIEIKKLVDADSTEAIEKAKAAGAAPSALDHILEQIKKKQKLSVLDKTKKDWGEFKEENKGMEEELDQYKKSSNKYLDKVSFLQRADYREFERERDARLSMMSKRKSDTRED

SEQ ID NO: 139602 - protein, 36 aa, Oryza sativa
  Clone ID: PAT_MRT4530_40878C.1.pep
MEFSGGATVSEPIGCCRAACGAGGAVAGAEGRSRGV

SEQ ID NO: 139603 - protein, 82 aa, Oryza sativa
  Clone ID: PAT_MRT4530_40879C.1.pep
MEEDDDTVAVDGGRHKEVFTWANSNNQQLLHVDDIDAANKSYIYTSCSMSLAAEDRVESADDGWLLLRNVELISIPHRYILP

SEQ ID NO: 139604 - protein, 113 aa, Oryza sativa
  Clone ID: PAT_MRT4530_4087C.1.pep
MPVSNLAPSRRPLFPLPPPTDPPREPPPTLDPPWETPPTSDPMWEHPLTPDPLRKSPPKPDLPREHPSTPPIRPDARYMRETPPMTPCPLTTPPRPSLTPSPLDPPWEKPPSL

SEQ ID NO: 139605 - protein, 70 aa, Oryza sativa
  unsure (1)..(70): unsure at all Xaa locations
  Clone ID: PAT_MRT4530_40880C.1.pep
MEAEKKPTAVSDDRAWAMNVXASVGIIMANKQLMYSFGYXFSFATTLTGFHFTVTALGGWIFNATGFFVS

SEQ ID NO: 139606 - protein, 108 aa, Oryza sativa
  Clone ID: PAT_MRT4530_40881C.1.pep
ARSHLHHSQLVFSHQDDMEASAADHHGGHHHQTTKKIISQGSDGIGGGGGGKSRVDLYAGAVAQRALYGPTTTSRCRGAARQRQQAVAGGKDSKQPSRLSKMSGAEGT

SEQ ID NO: 139607 - protein, 91 aa, Oryza sativa
  unsure (1)..(91): unsure at all Xaa locations
  Clone ID: PAT_MRT4530_40882C.1.pep
QFXLGRVDXXGPTQKYKWPKSNPKILRDFYXXVXPFTXTLXQXEGGEKKQVRTRKKNWKKKIWXXERKEGRTTEVEPXPXGXSXXPTPXIG

SEQ ID NO: 139608 - protein, 93 aa, Oryza sativa
  Clone ID: PAT_MRT4530_40883C.1.pep
MSLSSCAPSAPSSSKHLGNKGNGTRGEESTCAAGAREKGEGVTLPRRISRLVTGGGGGLAGGEESVFRSPEARASESRDSRHPSPRRRERGGG

SEQ ID NO: 139609 - protein, 700 aa, Oryza sativa
  unsure (1)..(700): unsure at all Xaa locations
  Clone ID: PAT_MRT4530_40884C.1.pep
MATMNNWLAFSLSPQDQLPPSQTNSTLISAAATTTTAGDSSTGDVCFNIPQDWSMRGSELSALVAEPKLEDFLGGISFSEQQHHHGGKGGVIPSSAAACYASSGSSVGYLYPPPSSSSLQFADSVMVATSSPVVAHDGVSGGGMVSAAAAAAASGNGGIGLSMIKNWLRSQPAPQPAQALSLSMNMAGTTTAQGGGAMALLAGAGERGRTTPASESLSTSAHGATTATMAGGRKEINEEGSGSAGAVVAVGSESGGSGAVVEAGAAAAAARKSVDTFGQRTSIYRGVTRFVGFXHYVIIMWDMIVVINKVVISFGLVIGIDGQGGGYDKEEKAARAYDLAALKYWGPTTTTNFPVNNYEKELEEMKHMTRQEFVASLRRKSSGFSRGASIYRGVTRHHQHGRWQARIGRVAGNKDLYLGTFSTQEEAAEAYDIAAIKFRGLNAVTNFDMSRYDVKSILDSAALPVGTAAKRLKDAEAAAAYDVGRIASHLGGDGAYAAHYGHHHHSAAAAWPTIAFQAAAAPPPHAAGLYHPYAQPLRGWCKQEQDHAVIAAAHSLQDLHHLNLGAAAAAHDFFSQAMQQQHGLGSIDNASLEHSTGSNSVVYNGDNGGGGGGYIMAPMSAVSATATAVASSHDHGGDGGKQVQMGYDSYLVGADAYGGGGAGRMPSWAMTPASAPAATSSSDMTGVCHGAQLFSVWNDT

SEQ ID NO: 139610 - protein, 220 aa, Oryza sativa
  unsure (1)..(220): unsure at all Xaa locations
  Clone ID: PAT_MRT4530_40885C.1.pep
RQNPPPPPPPPPPPPQPPPLNPLLAPWSPEXWCPPPPPWSPPWWCQPPPPWSPPXPVVMVXPPPPWSPPCPWPWWWCPPPLSPPCPWPWWXCPPPPPPPQPPPPPQPPPPPWSPEKWCPPPPWSPPWWCQPPPXSPPCSWCPPPSPPPSPPSGPSSPPPSPPPPPSAPPPPSAPPPQPSAPPPSPPSSPPPPPPPPSPPPSPPAPQQPSLNLAVAPLVDP

SEQ ID NO: 139611 - protein, 163 aa, Oryza sativa
  Clone ID: PAT_MRT4530_40886C.1.pep
MQRNTNQHLSNTAHQYFSKIIHLTTISHGSTNQHTRYQTRRRRLPTDGVLPAMAAPDGWRAPGDGFSRPRDDGCWRHARVDGCRRRATRHRRLPAARRRPMEGTGQRRRARLERLAVAVWLQRRAGVPDCRRSWRRRPGEEALRTAVLDLDRRIWNFGCGIVG

SEQ ID NO: 139612 - protein, 225 aa, Oryza sativa
  unsure (1)..(225): unsure at all Xaa locations
  Clone ID: PAT_MRT4530_40887C.1.pep
NPPPPPPPPPPPPQPPPLNPLLAPWSPEXWCPPPPPWSPPWWCQPPPPWSPPXPVVMVXPPPPWSPPCPWPWWWCPPPLSPPCPWPWSPPPPSPPSPPPSGPSPPPSPPSPPPPSPSPPPQPPPPPQPPPPPWSPEKWCPPPPWSPPWWCQPPPXSPPCSWCPPPSPPPSPPSGPSSPPPSPPPPPSAPPPPSAPPPQPSAPPPSPPSSPPPPPPPPSPPPSPPA

SEQ ID NO: 139613 - protein, 59 aa, Oryza sativa
  Clone ID: PAT_MRT4530_40888C.1.pep
FFFFSESSRFIERNIGVHHLFTTHMLPNKRKTLIILVTTPHTCTASYSSLASSQISASQ

SEQ ID NO: 139614 - protein, 549 aa, Oryza sativa
  Clone ID: PAT_MRT4530_40889C.1.pep
MQAWFSGTGPSASSASSSSSPPQPSLLAEWNSYAAARSAEEEEDGGGGGFGIDIEAAVRSANDRVSGTFGVVSKGVLGLPGSFKSTTSSVPSSKSLVYFGLFLASGIFLVFIAFTIFLPVMRLPFTMGFVGSMAATIYVSMVLHSYILSVFFSCLQNLTGILGGMARLPYPGTGDGVFAAHGYLRFGLGIWYILSLSLSAYELIKTAKYIATPGKGILAADESTGTIGKRLASINVENVEPNRQALRELLFTTPGAFQYLSGVILFEETLYQSTAAGTPFVDVLKAGGVVPGIKVDKGTVDIAGTNGETTTQGLDSLGARCAKYYEAGARFAKWRAVLKIGAAGEPSELAVKQNAEGLARYALICQENGLVPIVEPEILTDGAHDIKTCAAVTERVLAAVYKSLNDHKVLLEGTLLKPNMVTPGSDSPKVGAEVIGEYTVAALRRTVPPAVPGIVFLSGGQSEEEASQNLNAMNKLEVLKPWTLTFSFGRALQQSTIKKWGGKKENVAAAQAAFLARCKANSEATLGKYGGAAGDAATSESLYVKGYTY

SEQ ID NO: 139615 - protein, 118 aa, Oryza sativa
  Clone ID: PAT_MRT4530_4088C.1.pep
MSSSPWPPTTGAASAAAAAASPAPPEGAAGGAATPAAAPATTSEQRPVTKRIHKIFEKDQVGTYFLRFTIETEIQVHEQKINKYQAILAARLKAKYFSNKDFDGGMPFFQSHAIEICY

SEQ ID NO: 139616 - protein, 231 aa, Oryza sativa
  Clone ID: PAT_MRT4530_40890C.1.pep
MQAWFSGTGPSASSASSSSSPPQPSLLAEWNSYAAARSAEEEEDGGGGGFGIDIEAAVRSANDRVSGTFGVVSKGVLGLPGSFKSTTSSVPSSKSLVYFGLFLASGIFLVFIAFTIFLPVMVIMPQKFAICFTAGCAFIIGSFFALKGPKNQLYHMISKERLPFTMGFVGSMAATIYVSMVLHSYILSVFFSCLQVLALAYYAISYFPGGSAGMKFLSSALVSSVLRCFGR

SEQ ID NO: 139617 - protein, 235 aa, Oryza sativa
  unsure (1)..(235): unsure at all Xaa locations
  Clone ID: PAT_MRT4530_40891C.1.pep
MSAFVGKYADELIKTAKYIATPGKGILAADESTGTIGKRLASINVENVEPNRQALRELLFTTPGAFQYLSGVILFEETLYQSTAAGTPFVDVLKAGGVVPGIKVDKGTVDIAGTNGETTTQGLDSLGARCAKYYEAGARFAKWRAVLKIGAAGEPSELAVKQNAEGLARYALICQENGLVPIVEPEILTDGAHDIKTCAAVTEXRLAVVYKSLNDHKVLLEGTLLKPXMVTPGSD

SEQ ID NO: 139618 - protein, 56 aa, Oryza sativa
  Clone ID: PAT_MRT4530_40892C.1.pep
LLSLSAHFSSPPAIHPRPRGGGSRTPPRGEQGREGEEDTLFAIRDYQLTSPSKTST

SEQ ID NO: 139619 - protein, 85 aa, Oryza sativa
  Clone ID: PAT_MRT4530_40893C.1.pep
GGGDLGGAVHIAYFIMDEMTPGQRGWRELEALGDKINQFSGIIEGYIWAPKGSDSNDRHDDWAFEEGPHSDFTGPNCGSTACVAL

SEQ ID NO: 139620 - protein, 186 aa, Oryza sativa
  unsure (1)..(186): unsure at all Xaa locations
  Clone ID: PAT_MRT4530_40894C.1.pep
MAGQKSQCEGSFQVPKTEGFILGVTANIFSCPPFLWKMQNQVXSMVEPSLSHIREQGIPTXYIPQMQNFIGXTSTSLPKLQGEXGPSNSTGGGAALSFSIXLVYAAEHASFLKAISEELYRRVGXQINLKSPLXEENIRNIVYKIMNDDFELFFDPIEDLKDWLQFIKANPLSFQDLIQFWMALAK

SEQ ID NO: 139621 - protein, 153 aa, Oryza sativa
  Clone ID: PAT_MRT4530_40895C.1.pep
MTTTRLASSAWLRHPVGFGCRHSARASAHRRPTPSRQAPASRGAGDSATKTKVKAPRWTKPVPRRIKPVSPTRPNLQNAHAGITTTLLEAGRCGQTGVVRKRTSAPGASKRRLTARRVCDPELSRAGLALVLSGRETRGGERHTRVKRSVAAG

SEQ ID NO: 139622 - protein, 73 aa, Oryza sativa
  Clone ID: PAT_MRT4530_40896C.1.pep
RSDRLALAPLPLGRARMRTPGEHLRDHVHDKSRLIDATLEHVRELVTECVHLLARASRPAKVKNPAKSMFFVV

SEQ ID NO: 139623 - protein, 302 aa, Oryza sativa
  Clone ID: PAT_MRT4530_40897C.1.pep
MLKLQASLPLFRLRPRPSSPPPCGPRLPFVPICKRRMSTQAQPSFAPLPTAQSESDAGAAGYQFRLVSYNILAQVYVKSAFFPHSPSACLKWKTRSKAVLSELKSFEADLMCIQELDEYDTFYKKNMENSGYSSIYIQRSGDKRDGCGIFYKPKRDPEWIDVKLAQAKYILSRVTQFEKLISNKFNCKPSVMIAGDFNSTPGDKVYNYLVSANSDSTDEAPIKLRSLYAANGGEPEFTNCTPGFTGTLDYIFLSDGSSVKPTSLLRIPRGDSAEVQGGLPNFHHPSDHLPIGADFQVLGSEG

SEQ ID NO: 139624 - protein, 856 aa, Oryza sativa
  Clone ID: PAT_MRT4530_40898C.1.pep
MSTRAPRSLLPLLFVAAAVAFFSRAATAADVIGQAGFITGNQTLVSSGGVFELGFFVPNGATDGRTYLGIWYASIPGQTVVWVANRQDPVVNVPAVARLSADGRLVIADAKNTTVWSSPAPARNVTAAGATARLQDDGNLVVSSGSPGSVAWQSFDYPTDTLLPGMKLGVDVKNGITRNMTSWTSSSDPSPGSYTFKLVPGGLPEFFLFRGPAMIYGSGPWNGAELTGVPDLKSQDFAFTVVSSPDETYYSYSILNPSLLSRFVADATAGQVQRFVWINGAWSSFWYYPTDPCDGYAKCGAFGYCDTSTPTLCSCLPGFQPRSPQQWGLRDASGGCVLTANLTCDGAGDGFWTVNRMKLPAATNATVYAGMTLDQCRQVCLGNCSCRAYAAANASGGVSRGCVIWAVDLLDMRQYSGVVQDVYIRLAQSEVDALNAAANSEHPSNSAVIAVVVATISGVLLLGAVGGWWFWRNRVRTRRNETAAAAAGGGDDVLPFRVRNQQHPASSVKRDQRLDVKRECDEKDLDLPLLDLKAIVAATDDFAASNKIGEGGFGPVYMGKLEDGQEVAVKRLSRRSVQGVVEFKNEVKLIAKLQHRNLVRLLGCCIDDDERMLVYEYMHNQSLDTFIFDEGKRKLLRWSKRFEIIVGVARGLLYLHEDSRFRIIHRDLKASNVLLDRNMVPKISDFGIARMFGGDQTTAYTRKVIGTYGYMSPEYAMDGVFSMKSDVYSFGVLVLEIVTGRRNRGFYEAELDLNLLRYSWLLWKEGRSVDLLDQLLGGSFDYSEVLRCIQVALLCVEVQPRNRPLMSSVVMMLASENATLPEPNEPGVNIGRHASDTESSETLTVNGVTITAIECR

SEQ ID NO: 139625 - protein, 101 aa, Oryza sativa
  unsure (1)..(101): unsure at all Xaa locations
  Clone ID: PAT_MRT4530_40899C.1.pep
LCAVKFYRMNKSVDVGFVSSVHKTXNKGFSSCLLGRXSNFAWQDDCGDMRVDGALLQVESGGRNYRDRGIAGVSCLXEPGGGLSGXLGVSGEKGSTQVLVH

SEQ ID NO: 139626 - protein, 102 aa, Oryza sativa
  Clone ID: PAT_MRT4530_4089C.1.pep
QGRRPRRAPNHQPLPRLQLQPCRLPLPLPLPQNPRRGEGGWREALRGEDGVRREAPQPIHRWPPSPVSLLPASHAPPCYASPRGGAGGRGSGEALRGAEEAG

SEQ ID NO: 139627 - protein, 60 aa, Oryza sativa
  Clone ID: PAT_MRT4530_408C.1.pep
GLIECRFSRPWRGISTVQNLTRSGKPPGHRPSCHQCYLADFPDPLWGKILYNEQSLYQNQ

SEQ ID NO: 139628 - protein, 74 aa, Oryza sativa
  Clone ID: PAT_MRT4530_40900C.1.pep
RIWSTLKIMNGLVLKAIMQQLGFQIMPRCKHVRQASELNGGLEELYRKDEAELALQQKMRHNLVERFFVSLFFG

SEQ ID NO: 139629 - protein, 425 aa, Oryza sativa
  unsure (1)..(425): unsure at all Xaa locations
  Clone ID: PAT_MRT4530_40901C.1.pep
MVLNKVLELFCVKKKDSKKKGKAINPLCKVAAPHPTANVSTNNSLLDPFSTGNGTVLSVQKHEPECSSVISSMTWIWWXDDLELLSDGADLAGGRMLQGEIDPEVDGRRHGGVASAASGHRTARLFPPFFGPHLLPRLAALLPGAFRVKRVLRMVLNKVLELFCVKKKDSKKKEYGSESDGYNLFNQFDVVQDFSDHYYAKNSPGKTSKDWVKTIQNEWKLLQKDLPESIYVRAYEDRIDLLRAAIVGPAGTPYHDGLFFFDVRFPSEYPQSPPVLVSIQGLVLNDKPYFNEPGNKNSANTAPGEKYSLAYNQTAFLLSCRTMMYSLRKPPKHFESLVARHFHERERVILDACDAYISGAVVGSSSAKGTKHPRDNNRSFADFKKSLEKYSELLRKDLAANRTHFLKLTRDSPAAADEIVECTSS

SEQ ID NO: 139630 - protein, 402 aa, Oryza sativa
  unsure (1)..(402): unsure at all Xaa locations
  Clone ID: PAT_MRT4530_40902C.1.pep
MAAAAVGVASRARRSSGPRGVAFCRWTNGLLHPRFVFPEAAAVAGSGAGSAQDCIALRNAIMPMKISPYASYTGSHSVQHCAFCVKWVLRMVLNKVLELFCVKKKDSKKKGKAINPLCKVAAPHPTANVSTNNSLLDPFSTGNGTVLSVQKHEPECSSVISSMTRTEYGFESDGCNSFSHFDVQDFSDHYYAKNSPGKTSKDWVKTIQNEWRLLQKDLPESIYVRVYEDRIDLLRAAIVGPAETPYHDGLFFFDVHFPSEYPQSHRGERLEEGEGKGEGGDGGVEMEEEKMVAATRVPRFPVARSTGDLCDGLSRRERRRRGEDGWRRLDACAHPFFDELREPNAHLPWQMVVHSLLCSTSSMNHFSKDSVPEKYNYVNYLAXGEMRAAAAGVKEGLQGEAP

SEQ ID NO: 139631 - protein, 333 aa, Oryza sativa
  unsure (1)..(333): unsure at all Xaa locations
  Clone ID: PAT_MRT4530_40903C.1.pep
MVLNKVLELFCVKKKDSKKKGKAINPLDRIXSESDGYNLFNQFDVXANNSLLDPFSSGNGTVLLVQKHEPECSSVVSSMTRTEYGSESDGYNLFNQFDVVQDFSDHYYAKNSPGKTSKDWVKTIQNEWKLLQKDLPESIYVRAYEDRIDLLRAAIVGPAGTPYHDGLFFFDVRFPSEYPQSPPKVHYHSGGLRLNPXNLYESGKVCLSLLNTWWGTGCEKWGKSKSTILTMMYSLRKPPKHFESLVARHFHERERVILDACDAYISGAVVGSSSAKGTKHPRDNNRSFADFKKSLEKYSELLRKDLAANRTHFLKLTRDSPAAADEIVECTSS

SEQ ID NO: 139632 - protein, 68 aa, Oryza sativa
  Clone ID: PAT_MRT4530_40904C.1.pep
TTPYFIAQVKNLHRNTHYRNKSNLVSNACTSMHGVHTNTYIYTVHVRPFTEPGTHTHTFLKRRAWSET

SEQ ID NO: 139633 - protein, 134 aa, Oryza sativa
  Clone ID: PAT_MRT4530_40905C.1.pep
MLGPKFIGLARPDQHTGPCHAGPRRAQLSGRAGPGTIPIGPRPGGEPQTRSPPSHGHDALHQTMMLCRRSLIATLRRLACCGVAAVVDDKFHGKKEFGLPLAGKLQGVLVTGLEDDDSRIVAVTVLFSGDGEDR

SEQ ID NO: 139634 - protein, 392 aa, Oryza sativa
  Clone ID: PAT_MRT4530_40906C.1.pep
MSCCPCTTTTSSPLSLPRPACRGRWSGGGGSSANAAAWRARGGGAKRSLVVAASGSKDETAEGKKQEEESEFNPFGFVTDNPSSRGAIQLPESPAQDGNVGQMLYRIEDKGREFGSRVKSGKLRWFVRETGSAGARRGTVVFIHGAPSQSFSYRMVMSQMADAGYHCFAPDWIGFGFSDMPQPGYGFDYTEEEFHKSLDELLSTLNITEPFFLVVQGFLVGSYGLTWALKNSSKVLKVAILNSPLTVSSPVPGLFNQLRLPLFGEFTCQNAVLAERFIEAGSPYVLKSEKADVYRLPYLSSGAPGFALLEAARKANFRDVLSRISAGFASNSWEKPILLAWGISDKYLPLPIAEEFQKGNPAAIKLEPIEGAGHMPQEDWPEKVVTALRSFL

SEQ ID NO: 139635 - protein, 116 aa, Oryza sativa
  unsure (1)..(116): unsure at all Xaa locations
  Clone ID: PAT_MRT4530_40907C.1.pep
RMNQGAPNPWHSVVXRTRRALARYTCPPRRGAGPPGSNXDSRXPRXALFLRPXAQIRWAPXSAKYXPGRRRPPRRPQGRXLFSRNLRLTNPDPIPVKTVNLLLLLLPYYSLPAYTA

SEQ ID NO: 139636 - protein, 72 aa, Oryza sativa
  Clone ID: PAT_MRT4530_40908C.1.pep
MPLVYAISGKRKKTMLQGKENYAWVGDLSLEANPVITVALVEQLEALWTTVCDVQLDEEELDQISWKFTPHG

SEQ ID NO: 139637 - protein, 72 aa, Oryza sativa
  Clone ID: PAT_MRT4530_40909C.1.pep
ATIAMLPSTRILAGGKPCKSLQRMESLEGREGHLGTPLEAHQRLSSMLAPGAARLQTHHSLCQRGQQRAYPT

SEQ ID NO: 139638 - protein, 458 aa, Oryza sativa
  unsure (1)..(458): unsure at all Xaa locations
  Clone ID: PAT_MRT4530_4090C.1.pep
MAGSGEAGAFNGVELKPPEHLERVELELEPSTDLSGLALWLFLRSRGASRLLXFDNDDLSRDIKTNTLTASSFHARPSVGANARRCGFLSKIKASPLPTARRAFPLLATAVAAAAAAPFPAPTRRPPPPPPPPPRCPGGSAADRHMTQPPRRPDATETTTAFLGAASTPSPRPAPATPLPDAPSFLLGPSTPLPPPLPPPTSTAAAAAAAKAKHQKQQQQQTSKHWSRPARFVRSVRAAFRSFPILPAPSCRGLPSLPHLPGLHHGGAGGAVRNHFHGSTRTTGTLYGHRRARITIAFHDSPGSPPALLLDIAVPTAKFIQDVSAAGMVRVTLECDKQQHQPPPHAHPPGDPLPPRRLLDEPVWSAEVNGESVGYAARREATEADERVMRLLHAMSMGAGVLPAVAADAPTSAADGEVTYMRAHFDRVVGSKDAETYYMHNPEGCATGPELTIFFIRT

SEQ ID NO: 139639 - protein, 77 aa, Oryza sativa
  Clone ID: PAT_MRT4530_40910C.1.pep
HLYLDSKTCLVPIYFPPRWCFLLSQALFYLALGNLVAVYRINISVEFFVLYIYYKFNYYVWYLRIPNLVFPFIKKKK

SEQ ID NO: 139640 - protein, 126 aa, Oryza sativa
  Clone ID: PAT_MRT4530_40911C.1.pep
STLEDPPSPPTQTPSPSPAANPARSSQSGSPIWVCAPPPPTGAVATATDRQLPPPSLSPAASRHPMVATAAAQAAPPAVRVHAGQSPATAVLAAARLCRRLLRRRRARERRGRRESAAVLPLVFVL

SEQ ID NO: 139641 - protein, 133 aa, Oryza sativa
  Clone ID: PAT_MRT4530_40912C.1.pep
MAYSPPPHLAATATPLRRRAPLSRPLPSGHPLSLRLQSHAGRSHTPFSLLFPGNGARVGGTRAAHGRQTRSEQATRGLAVGGARATRGQRTATASPTTDKQATHASLFLRQSSPGDCGSPVGLRGPVGAGAEG

SEQ ID NO: 139642 - protein, 69 aa, Oryza sativa
  Clone ID: PAT_MRT4530_40913C.1.pep
MGASVFHETLRSVRNAPGFAVAASLQASLVAIRYGMARFAPALAHAAPQRSETSIPWWSVYHQGREEEL

SEQ ID NO: 139643 - protein, 63 aa, Oryza sativa
  Clone ID: PAT_MRT4530_40914C.1.pep
SRASRVAGAVNIPGVRPADRPANTDGVCGADYLDRRRRRRSGVGGERRSPARGARRTLDALGP

SEQ ID NO: 139644 - protein, 62 aa, Oryza sativa
  Clone ID: PAT_MRT4530_40915C.1.pep
SKYMHAYALVNCPDGFFQACIYLLIRVKCKPDQHMTGFTKKMRLIKKRGVPFHGQGGSNFFL

SEQ ID NO: 139645 - protein, 289 aa, Oryza sativa
  unsure (1)..(289): unsure at all Xaa locations
  Clone ID: PAT_MRT4530_40916C.1.pep
DNDGLFLLLRAFRKVHLQPVHDKIKGRLSGWKPSMLYIGGRRVMQFLQEIDKARRRFLWVGNEEIRGXKCKVMRFCYGGLGVPNLEKFARALRLRWLRYEWKAPNKPWIRTETPCDDLDKELFAVSTRVVIGDGRKANFWESNXIGGHRFKSLAPNHFRHSNRKSHTAHDALQHGRWINDIYHNLTITILSEYIKIWEVLALQCPQLIEGVEDLITWRWTVNGEYSAKSAYLYQFEIMTTPPSATLSWEAWAPAKCKIFSWLAIQNQVWIANSLQIRGWPNNYLCQLCF

SEQ ID NO: 139646 - protein, 905 aa, Oryza sativa
  Clone ID: PAT_MRT4530_40917C.1.pep
MAEAVMLVVSKIGSVLLEEITFTVISKLSEKITNLKELPVKVKEIGKELNMMNTFIKRISTTDLTDDVKAWIAEVRELAHCVEDVLDKYSYHALKLDEENAVKQIFTKANYIKVFSEIADEITQIEGKIENAVKRKDRWLQLSELTPYPLADVQRKQSRDCLLELVQDDLVGIEDNRKQLTKWLYSDEQGSTVITVSGMGGLGKTTLVANVYEQEKMNFNVYHWIVVSQKYDIAELLRKMLRKCWSLEHTQLADLDAHDLKSAIKERLKDSKCLVVLDDVWNREVYTQIGDAFQNQKASRIIITTRQDQVASLANITRQLKLLPLKHNDAFDLLCRKAFNASMGCKCPQELEKLADDIVDRCQGLPLAIVSIGGLLSSMPPTKYVWNETYKQLRSDLANNNHVQAILNLSYQDLLGELRNCFLYCSLFPEDHELSRETLVRLWVAEGFAVQKEHNTPEEVAERYLRELIQRNMLEVLEYDELGRVSKCKMHDLVRDLALSIAKEEKFGYANDFGTMVKTNREVRRLSSCGWKDKTMLKVKFLRLRTLVALGITTSSPQMLSSILSESSYLTVLELQDSEITEVPASIGNLFNLRYIGLQRTRVKSLPESIGNLSSLHTLNIKQTKIQKLPRGIVKVKKLRHLLADRYEDENKSEFRYFIGVQAPKELSNLEELQTLETVEASKDLAEQLKKLMQLRSVWIDNISAADCANLFATLSKMPLLSSLLLSASHEKETLCLENLKPSSENLHRLIIRGCWAAGTLQSPIFRDHGKFLKYLAISWCHLQEDSLLLLAPHVPNLTYLKLNRVSSASSLVLSAGCFPQLKTLALKRMPDVNHLEIIGGALQHIEGLYVVSLPKLDTIPEGIESLRYLKKLWLLGLHKNFRSQWEKNGMQQKMQHVPELRVKD

SEQ ID NO: 139647 - protein, 247 aa, Oryza sativa
  unsure (1)..(247): unsure at all Xaa locations
  Clone ID: PAT_MRT4530_40918C.1.pep
RKVHLQPVHDKIKGRLSGWKPSMLYIGGRRVMVNSVLSSIPTYVLTVLKPPKQFLQEIDKARRRFLWVGNEEIRGXKCKVMRFCYGGLGVPNLEKFARALRLRWLRYEWKAPNKPWIRTETPCDDLDKELFAVSTRVVIGDGRKANFWESNXIGGHRFKSLAPNHFRHSNRKSHTAHDALQHGRWINDIYHNLTITILSEYIKIWEPGQGGGGGRRRGGVGEEAGAAERAGGVVVVKPCLEAGAVKM

SEQ ID NO: 139648 - protein, 83 aa, Oryza sativa
  Clone ID: PAT_MRT4530_40919C.1.pep
MTGAVVKKGSCQNHATSKDSSSGHQVHLGEAPMAKTVKQKRRRAKDRAGIPQGQRHLGRKLNGEGCMPKEGDFSITSPASRRP

SEQ ID NO: 139649 - protein, 91 aa, Oryza sativa
  Clone ID: PAT_MRT4530_4091C.1.pep
DCLISDCEVHSSSGECCFFVKHLREASPSTLTEETSDIRAALRLLYSLETRGLVSSDSVSSSNRIGGLSASGIREVLEEGGEIAEGVLEVS

SEQ ID NO: 139650 - protein, 58 aa, Oryza sativa
  Clone ID: PAT_MRT4530_40920C.1.pep
GFGFKGGGGQFTGTVLTMITPSWKLTLTKGNKRWGSTAVAAVLEIVDPPGCRNLARGS

SEQ ID NO: 139651 - protein, 76 aa, Oryza sativa
  Clone ID: PAT_MRT4530_40921C.1.pep
VHQHVRGPELTGLIQASNDTFEKIDGRSQRQGLDDGELVALSGAQTIGNCRGVRWRQKLYGQVNKVGKEDVTLEST

SEQ ID NO: 139652 - protein, 74 aa, Oryza sativa
  Clone ID: PAT_MRT4530_40922C.1.pep
MSKYHESESDAEEDNDVYFNYLVNKFINVATNVVQPNQSDDDSDGDFEEALQRISNEYAESSLKNYNNDEKNKI

SEQ ID NO: 139653 - protein, 246 aa, Oryza sativa
  unsure (1)..(246): unsure at all Xaa locations
  Clone ID: PAT_MRT4530_40923C.1.pep
SGAPHRLPIARAHPRHPRPQPLLCRGASPSPPQSPATWEPEGNPSPRPPRMVLHDSLGGAGFSTVHAGVARPGENKAACRVAHAAGHDTSIAINRXADLAPAAFCVAAADDXSLLVSQIPNPAPHPIEAIVAPLDDLSTCFLADSYLLXPPTDAPPEVFFNHVDCSIXIHIVLTCQLGIXHALMLLLIFSETLKTLXLALLVFTMWIYFFSHYPNILPRGYEKHKSKLGTNPPIYLNLSLLLIIIA

SEQ ID NO: 139654 - protein, 60 aa, Oryza sativa
  Clone ID: PAT_MRT4530_40924C.1.pep
IGKDGAPAGTAREFSAGPRRPPAPEPADENHHHRAEQHRLHHQSATGAPARPSSYTSRYC

SEQ ID NO: 139655 - protein, 33 aa, Oryza sativa
  Clone ID: PAT_MRT4530_40925C.1.pep
MVASHAGYDGGGVSGGYPHAGNADGRSIAMGMR

SEQ ID NO: 139656 - protein, 417 aa, Oryza sativa
  Clone ID: PAT_MRT4530_40926C.1.pep
MRRWVLAIAILAAAVCFFLGAQAQEVRQGHQTERISGSAGDVLEDDPVGRLKVYVYDLPSKYNKKLLKKDPRCLNHMFAAEIFMHRFLLSSAVRTFNPEEADWFYTPVYTTCDLTPSGLPLPFKSPRMMRSAIELIATNWPYWNRSEGADHFFVTPHDFGACFHYQEEKAIGRGILPLLQRATLVQTFGQKNHVCLKDGSITIPPYAPPQKMQAHLIPPDTPRSIFVYFRGLFYDTSNDPEGGYYARGARASVWENFKNNPLFDISTDHPPTYYEDMQRSVFCLCPLGWAPWSPRLVEAVVFGCIPVIIADDIVLPFADAIPWEEIGVFVAEEDVPKLDSILTSIPTDVILRKQRLLANPSMKQAMLFPQPAQAGDAFHQILNGLARKLPHGENVFLKPGERALNWTAGPVGDLKPW

SEQ ID NO: 139657 - protein, 1178 aa, Oryza sativa
  unsure (1)..(1178): unsure at all Xaa locations
  Clone ID: PAT_MRT4530_40927C.1.pep
MVTAGDHRHGRAAPERAERRGKRKGRSSAHPGSTATTGTAAEAEEGGGAVRDDEDDGAPTVGGRNGGADEVDEDAAKPMEVTPRREEEVEADSIEIIGDSLLVISQLAGEYECKNDALMIYNEKCPELMDSFRLLTLKHVSREQNIQANDLVQGASGYKPMGNLHGCPYERDIYMGTLRPECTVFAIGVHLLPSSLHCLRHVASVSLPWGFAPLKLNTLSLDPDWSHGFGRSGRRVSRHTANKPLTGKGQMGASAKTMQTMCALRVARSFACPLFSPQHTLFAMAPRKPNPASATGLDPGQIDDDTTAFLGVSLVDREELAKLVSSGAVVEGQAFAPGKAVVPKPGDNRTVVFTVFCEAGLLRFPCNILLPEILLIFWVELPQLSPSALVHIAIFDWACRTARFKPSAELFGAVFFTTMNSKTVVTPAGTKKTVFGSVNFNVRPERSDLWPVNAAMSKLDRHWMAKWFYHSIPFEDGSDAVNALRWRRGTISPNRKPKVAIDGAMEAWFTLLRNICSRLSYRDLVEEFCMLGIFPLSKSWQVEIDQGREVDGLPKLVMPAEASGKYMFSHTFCGSTPDMATPFVLAVLTLAQAETKARKMIGDVSVTEFSQLLTRQAAGRANRVHDGELPPRATSLKGDDDAGPSRRRMRGQVKKAPCKRREPDSDADDEETAEENNDEDEGEDVKETEAVGEKATGDAANNRAETPGYTPTSSPEPVETGVESNCSPLRPKDVEGAMALVVITAAKVGSIKKTSRKGLVDVGRVFSDDKSSNETPTLPAGRSLDLSTGXMAGGSVAGTSASTDQSAKTAARVFGSPSRTSSTRXCSAVKSLAVRNCLRAKDDELGRKRLEMEGLTHALKETKAENKRLQAELEKGSEAKAEIERLKAELKKEQGHSAVLTDYYNLTEPKMEALRQEVVKAETNARKEAQRFAWEMAKATESAKTACQTLRLAHSDMGARVHGVPGEGASAFDFSEWTQQAGGVVSDCATAYGDSCARVSASFALGLLQQFGCEHVAEFPNFAKGDWEISVQDISPALRAWRKQFWQKDGRSVAKARLLEQLAKAEAADRGEEPAAGGGGGDAEDHPEGVHRKLCVRPPFGNRRSRNEKFVAVKVLPKVRCPFRPIYREMIINGNSYKVLKVVGWMRAHPGRTLENYDRVHTERQEDMGVEIALGAKM

SEQ ID NO: 139658 - protein, 60 aa, Oryza sativa
  Clone ID: PAT_MRT4530_40928C.1.pep
VPGLFGKSISPWFGLIKRSFWFYFVEFVFGSLFGVGFKFYSGRGFFYFPSHPFEPFGSVG

SEQ ID NO: 139659 - protein, 74 aa, Oryza sativa
  Clone ID: PAT_MRT4530_40929C.1.pep
PYVGILHQLRSPALHLIRSQASITARKIHVAIAGDYGGNRLYSSAPPTHSSPATAAGVALAAVSPPVQTMVGPN

SEQ ID NO: 139660 - protein, 61 aa, Oryza sativa
  Clone ID: PAT_MRT4530_4092C.1.pep
MGSRQLFITLVRSLQGTRRLHRRKIEDMRVRRCHRMVEHQYHASPILEDELRMDRQELQTL

SEQ ID NO: 139661 - protein, 89 aa, Oryza sativa
  Clone ID: PAT_MRT4530_40930C.1.pep
MGGSADPEAPTPTPSPSPSPAKATPSPASADGNRLRRCVQSKLSWGPPKAGGGGGEAGGAGLPPLAAGDGTPEKVKKRGRPRKSEAGKK

SEQ ID NO: 139662 - protein, 203 aa, Oryza sativa
  unsure (1)..(203): unsure at all Xaa locations
  Clone ID: PAT_MRT4530_40931C.1.pep
MHRVGSAGNTAGSSRPRKEKRFTYVLNDADNKKHCAGINCLSYLNASTSGTSDYLFTGSRDGTLKRWEPKNGVASFSATFESHVDWVNDAIIVGQNLVSCSSDTTLKVWNCLSDGACTRTLRQHSDYVICLAASEKNSNIVASGGLGXXEVFIWDLDSSLAPVAKSVDAKEDEAPNGNSGPALTTLCNVNSSSNLASTNGQSH

SEQ ID NO: 139663 - protein, 48 aa, Oryza sativa
  Clone ID: PAT_MRT4530_40932C.1.pep
MQATSEHAVGHALTLSKRETAWGPAGLGSRQTAAKSLYERFWNARPMH

SEQ ID NO: 139664 - protein, 820 aa, Oryza sativa
  Clone ID: PAT_MRT4530_40933C.1.pep
MEKPASCCCYFPLRWESTGDQWWYASPIDWAAADGHYDIVRQLLHLDPNLLIKLTSLRRIRRLEALWDDDARFAGAAGHRAGVARSLLLECECSKNGGAAAAAENTLLRAGYGGWLLYSAASAGDMAFVQELMERDPLLVFGEGEYGVTDMFYAAARGGNAEVFRLLLDHAMSPRCSTNCPNGGEGARGGGGGRSSVFRLEMMSRAVHAAARGGSVEMLRELIERRSDVSEYLDFRGSTVLHAAAGRGQLEVRHLLLGHCLLHYFCKMHHSELLFVPICMDDKVVKYLMATFDIVDSTDNQGNTALHVAAYRGHLPVVEALVAASPSTISAVNRAGDTFLHSAIAGFRTPGFRRLDRQMELMRHLIRGRTSNIQKIINLKNDAGLTVLHMAVVGCVHPDLVELLMTTPSIDLNAEDANGMTPLALLKQQLRSSTSDKLIRQIVSAGGVLNSTVLRTRSAIVSQIKMQGGIASSPGTTFKISDAEIFLYSGIGTAESRRPSSCSSNGKCDHAHHGDAKCGNAENHGSSEKRLSSASRAKDRLKLMLKWPDAEIFLYSGIGTAESRRPSSCSSNGKCDHAHHGDAKCGNAENHGSSEKRLSSASRAKDRLKLMLKWPRQKMSRGHKKSDDGDAMDSIKKLSEQAPPPPQSGKMKGTKTTALNNKRTLAVKTSTPSSATKKKLNSKLILGEPSSSGSSVNDDASAEMPARRHGCGNGRLINICFGAQGLTVEDSASGQQTSKMFKQQYNDDDDDAMGEPSSSGSSVNDDASAEIPARRARVRQREADQHLLRRAGPHRGGLGQRAADQQDVQAAVPQGVLTPE

SEQ ID NO: 139665 - protein, 373 aa, Oryza sativa
  unsure (1)..(373): unsure at all Xaa locations
  Clone ID: PAT_MRT4530_40934C.1.pep
QGGILRLYLLTSDSILLSSSRKSEFQPTPARPRLPTAASSSPSSTSSSSSSHDSLAAQAMRASAAHRDASSLSSAYSSSSAXPRPPPPPRGSSGYEYTSMKNLNEAKYGFWGALARKAKSFLDEDGSPGQYDSPARQQPSRDAPPYTRSQQPPSETWKSETPPSHKRSEAIASSLNYIGGTIKSALEEGRTIVENKTADIIHETRKLNREAPQRFTQRNLPQNPLDYETQLKASRDVANAMAAKAKLLLRELKTVKADLAFAKERCAQLEDENKILRESHDKGDNPEDDDLIRLQLETLLAEKARLAHENSVYARENRFLREIVEYHQLTMQDVIYVDEGIEEVTEVYPTQVLPPAPSRAGSGLESPSYTLLK

SEQ ID NO: 139666 - protein, 106 aa, Oryza sativa
  unsure (1)..(106): unsure at all Xaa locations
  Clone ID: PAT_MRT4530_40935C.1.pep
RWPNGPGQTGGPRHGRSCSRHGPARPATVTGRAGTARVAVPCLGRWPSPRAGTARHGSCSRPARHGPRHGTARHGPSGRKAPAARDXTDRAGGGPTGRRHVALTAI

SEQ ID NO: 139667 - protein, 64 aa, Oryza sativa
  Clone ID: PAT_MRT4530_40936C.1.pep
ASAPRTELAGPHPRRSVSLGRHHRRCCCCCGRWCTRRLAFSCDGRGRRPMRERGKPLCVNDNRG

SEQ ID NO: 139668 - protein, 66 aa, Oryza sativa
  Clone ID: PAT_MRT4530_40937C.1.pep
TPPVASLPNDDLAPPSVPSAQVTMPAAWLQPVTDYTFATGVLALLSPSPQPPVPVSPRPAADLTST

SEQ ID NO: 139669 - protein, 86 aa, Oryza sativa
  Clone ID: PAT_MRT4530_40938C.1.pep
MAAAEGFGLTRELAKGEGDRSRGFYLCRLSGSHVRQRSAGATASRARDIRSAPLRSVRDRWRGDHSLPLCPDSKNVLHPDYDSAGP

SEQ ID NO: 139670 - protein, 320 aa, Oryza sativa
  Clone ID: PAT_MRT4530_40939C.1.pep
MPFWTKMTLVLLPSSNAGGARRQPPEEAVADAINVDGAELIGDESGADELTGDEGNALSWEWYSSEANLSDGISTKPILCDGRYAIFSQATERQRHAAAGGRGGSGAQRWRHGSGGCGRKRNRWREKMASGGRRSDIVAVPTAVDHRRSNPRANNLSSSVQSIALKNREEWSAEEGDRPHLLQLRPPASIFDSRCFEDGRSGTFMIGNESFPASLLDLPTVMESYKTYNDSVLIKTADIGQMIMVREEDDPAPEGIEYTHGLTPPMRDARRRRFRREPDLNVFNAFPLAPHGSTLSIITVIVPFTHVYRQNWFTELKSIS

SEQ ID NO: 139671 - protein, 59 aa, Oryza sativa
  Clone ID: PAT_MRT4530_4093C.1.pep
HGVQHSASSNTVLAAPLVARSAQQPASIMHLDLALACQWQSCIIAHRTQTSSHHSIGTP

SEQ ID NO: 139672 - protein, 174 aa, Oryza sativa
  Clone ID: PAT_MRT4530_40940C.1.pep
MATPNTYSVHISSETHRIEAWLASDEALARQLQEEENAHDAIATREFAGNASLEPSSPAVEYRPPNNAAQVATEDNVDPDNMSYEQLQALGEAVGNQSRGLSDDLICYLVPFKNKCSFFSRKKNDEECVICKSTYKSRQKLIRLPCSHCYHADCITRWLKINKACPVCNEEVFG

SEQ ID NO: 139673 - protein, 186 aa, Oryza sativa
  Clone ID: PAT_MRT4530_40941C.1.pep
MARMSVPGWEWAECLGLHTGRKEKGQEAAAVELGVKRGVPTLVVLAAETKGGLYYLSNLDQNIAIVVQTVYYFTAADDDAATGDALREPLLHRSFRFTSEPIVHVKALVAVDGGGSGRAPTMFEALAGFVWSVDGVAVGFIPVGTGAAALSFSHVATAASPVVGPPLPPHPSDLPTRRLACLEEKK

SEQ ID NO: 139674 - protein, 63 aa, Oryza sativa
  Clone ID: PAT_MRT4530_40942C.1.pep
TAYSTQHSARIPLRGRPLFFFVFGSIRTFLTCLHNNYTYARPSPSSHLTLATLVRFAKHSWRC

SEQ ID NO: 139675 - protein, 125 aa, Oryza sativa
  unsure (1)..(125): unsure at all Xaa locations
  Clone ID: PAT_MRT4530_40943C.1.pep
XPDCXQPYPWKCATFSLYVMFLNQLRKSGLKEYTVSSIVNFAHNFLCAVFAPFHSTTNSYGSSPLWTYMRPSGGGEGGGGRDPLGASGDPGGRRRSRRAEGXRDPAATECVAASXXERREEKRRR

SEQ ID NO: 139676 - protein, 989 aa, Oryza sativa
  Clone ID: PAT_MRT4530_40944C.1.pep
MEHHAALRAAAGDMLYGVEAALPRIRILVEATERRAISRASFAAWLQQFKDAVAEAEDLLDDLETRRIRAALRARGSKLGSATSLALRFLRNLVLSDGDLQRLKDVLAKLNRITSDATGFHDILKLADDDVGAMRSVLPVPATPPAVIGRDEEQQQLVKMILRPGAPPCPQDGAESCSGVSVISVVGAAGVGKTTLAQLIYSDPNVKEAFLLRGWVFTSRSCSRTGLEQDIIESFASEQEENLQRKSVSSESSLIDVVRNKKFFLVLDDVQHNLHSQWDSLRSTLARGANGSVVLLVCQSKEVANSLGATAQVPMGYLPSPVLWRVFEHHAFGNQKRASLESIGKKVLQNLHGLPLLAEAIGRLLRQRLDKAHWQKISSSPWWLFSEDEDDVALPSVAIMCEHLCDHLRKCLCYCSIFPSGYLFEKNMLIHMWIASFMQQHDGIGMKEMEKEWFDELFRRSFFQPTIWKNRYIMPDMIRKPLCSIAGKECHAASELGEQKRRLQDYRHLAISFPDFNVHLDLRKDNKLRTILLFDGRKTIKPHEAFANILSHLSGLRVLDFSYSEAKLEKAPDFINKFTHLRFLDLSFTGMTVLPDSLCKLHLLQVLGLRGCQFKELPRAINELVNLRFLYAEAHTVSLIYKIGKLTNLQGLDEFLVGRMDGHKITELKNLNEISGQLCIGNLDKVASTDVVSDAELFKKRHLKKLVFRWGLTACKPLAEADGFMRTLAGLKPNTNLEELKIQCYMGVGFPSWMAEEQYFINLRRIHLIECKQLLTLPPLGQLPSLVVLILQGLTAIEKIGYEFCGKGYRVFPSLKEVTFLDMPNWRKWSGIEELQDLQIPPFPQLRKVQIKNCEVLIDMPVCCLKASLEELEISGCNEIFACNPSCLDRLTSLVRLKIHHCLGKIYLPCRLLESIEVLNLQRCEVYFQGGKEHLMKLRRTVTNDVHELNLDESKAISTELLVLKLSEGYHYLSSCFLNKWNFEASSVS

SEQ ID NO: 139677 - protein, 144 aa, Oryza sativa
  unsure (1)..(144): unsure at all Xaa locations
  Clone ID: PAT_MRT4530_40945C.1.pep
KGWLAFSSTVELPGSIPPTFWGKNLKNQGTFGGNLPGQNLHFTRFKXMAQELDEGKQTDQDRGEGLGFQLFDXTSKDITRGKGFVXSLFQASTGDGTHQGRLNFYQYLNQGLRTYDFDNTMGGFYIAPAFMDKLVVHISKNFMT

SEQ ID NO: 139678 - protein, 51 aa, Oryza sativa
  unsure (1)..(51): unsure at all Xaa locations
  Clone ID: PAT_MRT4530_40946C.1.pep
IGLMVHHQARRAQYLGINLSIWSHLQXSVPSSIVVTAIGLLIVMSTLLTSL

SEQ ID NO: 139679 - protein, 70 aa, Oryza sativa
  Clone ID: PAT_MRT4530_40947C.1.pep
MPWFPFGFGRDSDSLRSAVLLRRAASVREFGSVAPADSGRRFAPFLEPHGPCGPSDCDPVAEEGVAHTGL

SEQ ID NO: 139680 - protein, 508 aa, Oryza sativa
  unsure (1)..(508): unsure at all Xaa locations
  Clone ID: PAT_MRT4530_40948C.1.pep
GGGDLLRQLHELAKAEADLANHEKRLSVIEQKIVVLLPLQKKFTELKSQFELKSYDLSLFQNRVEQNEHHKLGELVKKLEQELQESKQELKAKQAQYEKSVSTVSELEKTIKTYGSEREGRLKALERKIKSLKSELQSMSKQLKAHESERERLIMEKDAVANELAMLEEQLTTSKAQIAAMTETLNRHQTKVASIKQDYDQAESELNIGRSKLKECDSQINSMAKEQQKLQQQLSDSNVERKKMENEVKRMEIEQKDCSSKVDKLVEKYSWIATEKQLFGKSGTDYDFVSCEPHKAREELENLQAQQSSLEKRVNKKVMAMFEKAEDEYNDLMSKKNIIENDKSKIKTVIEELDEKKKETLKVTWLKVNKDFGSIFSTLLPGTMAKLDPPEGGTFLDGLEVRVAFGTVWKQSLSELSGGQRSLLALSLILALLLFKPAPLYILDEVDAALDLSHTQNIGRMIKAHFPHSQEDEVVCYALCXNNANVIFRTKFVDGVSTVTRTVPSKQR

SEQ ID NO: 139681 - protein, 90 aa, Oryza sativa
  Clone ID: PAT_MRT4530_40949C.1.pep
SQCNKTPFYVYSLVSSDVLPPSLNIRDFDILLALFDHSSYPQNFGIIILFVTYFIIQNTLSTTFPFFILAHIFLNKTSGQTAQDKYQNAL

SEQ ID NO: 139682 - protein, 96 aa, Oryza sativa
  Clone ID: PAT_MRT4530_4094C.1.pep
MEQRGSSTCRPGGPSWYACPADSVTDMWGRGKGGQRCQWVEWVRRLVALWGLGGWGPQGSGRDKAKEYRAGARHPPDCAAGFVGPRLLVRSAAYTL

SEQ ID NO: 139683 - protein, 695 aa, Oryza sativa
  Clone ID: PAT_MRT4530_40950C.1.pep
MEIVDKIAEPKEPLMVTGRKVQSLEAPIPIKASWKGKSSQQQQQQQQDEKDFPADGEESFLSLDSSDEGGRSSFSGASHPLEPIDMDLMKTVYVAIDEEKSEQPVCLVRGVSAKGPFIDDLSICVTGMKANAVVGAGSADGLAEEMKVPGAAVPSLATARSSQATEAVSLPPDSEEKDCVWDASLPPSGNVSPHSSIDSMGVVTAMNTMSSCTSTYKSEAVSSEPVPTMERNCGSVKGSVRGDSLESAKTSMSRASDSSGVSDDSSWSNITGGASKPHKGNDPRWKAIHAVRTRDGVLGMSHFRLLKRLGCGDIGSVYLSELSGTRCYFAMKVMDKASLASRKKLNRAQTEREILQLLDHPFLPTLYTHFETDRFSCLVMEFCPGGDLHTLRQRQAGKHFSEYAARFYAAEVLLALEYLHMLGVVYRDLKPENVLVRDDGHIMLSDFDLSLRCAVSPTLIRASAFDSDPRRAGGSFCVQPVCMEPTSVCIQPACFMPKLFGQKSKKKTKKTRSELGPSATTMPELVAEPTSARSMSFVGTHEYLAPEIIKGEGHGSAVDWWTFGIFLHELLYGKTPFKGSGNRATLFNVVGQQLRFPESPSTSYASRDLIKGLLVKEPQHRLGVKRGATEIKQHPFFEGVNWALIRCSTPPDVPRPVEAELPVKYGVAEAIGSNSKRMVGADMKSGGKYLDFEFF

SEQ ID NO: 139684 - protein, 799 aa, Oryza sativa
  Clone ID: PAT_MRT4530_40951C.1.pep
MDPGVEKKKQQMELVDVESGGLPVERQDSLFREAVRAEHAGAAHWDEQDSWGRTMSLAFQCVGILYGDIGTSSLYVYSSTFEHGIGHPDDVVGVLSLIVYSFMLFTVIKIVFVALHANDHGDGGTFALYSLISRHAKVSLIPNHQAEDELISGYSSSGKPSATLRRAHWLKQLLEASKAAKISLFLLTILAIAMVISDAVLTPPISVLSAVGGLREKVPHLTTDQIVWITVAILVVLFAIQRYGTDKVGYSFAPIILLWLLLIGATGLYNLIKHDISVLRAFNPKYIIDYFRRNKKEGWVSLGSILLCFTGSEALFANLGYFSIRSIQLSFSFALLPSVLLTYIGQAAFLSKNPKNVANTFFAATPISLFWPTFIMAIAASIIGSQAMISCAFATVSHLQSLSCFPRVKILHTSKRFPGQLYIPGVNFLLCVAACVVTVSFKTTVIIGKAHEICVILVMIITTLLMTIVMLLVWKINILWVALFFITFTSTEAVYLSSVLYKFTHGPYVPVAMSVVLMVVMIVWHYVHVKRYKYELEHTVSTDKVKEMLESHDLKRVRGVALFYTELVQGIPPIFPHLIEKIPTIHSVLVFISIKHLPVPHVDTSERFLFRQVELKDYKVFRCVARYGYRDSLEEAKDFVVTLLENLQDYIRDVNLYTDEPHTISAHSSCNHSFSREKPSGRYAVHAEDMLTPIESFSEITALSNYGSDRLPHFKASKMNMEELAKIEQEQMFIEKEMEKGVVYILGETEVVVRPHSSLLKKIVVNYVYSFLRKNFVQGQKMLFIPHRQLLKVGISYEI

SEQ ID NO: 139685 - protein, 70 aa, Oryza sativa
  unsure (1)..(70): unsure at all Xaa locations
  Clone ID: PAT_MRT4530_40952C.1.pep
MEMKKIVGDDKCNXHDEDDDVGDPVNSSVATNDNDEDAHQHLHTVVDASLGGELMLLSNSSKPKYLKLLK

SEQ ID NO: 139686 - protein, 174 aa, Oryza sativa
  Clone ID: PAT_MRT4530_40953C.1.pep
MDSDSREGKKTTDRYKQSPDIIIHSSSLQFSSAASITMSSSIKDEIDAAFAAGAMPPEWRPRLLASPRLGERDVDRIAASIAEIHWNLQLDGSTQLSVACVAFWFVVGVLVLCVAGLFFLENDYMSGPFAVVGAVPCVVITPIVTVAYERRRRRAKMLMVRTRTVLEHFLLPPI

SEQ ID NO: 139687 - protein, 152 aa, Oryza sativa
  unsure (1)..(152): unsure at all Xaa locations
  Clone ID: PAT_MRT4530_40954C.1.pep
MVLSNYIEEIIVSAVSYHMIHNKDPEYKNGKLVLSSKSLSHGLSIFQESGFGGKETLKLEDDLKGATGPKKSETEKSATVPLKDGDGPLPPPKPEIPDNEFEKRIRPEVIPASEKXVTFDDIGALADIKESLQELVMLPLRRPDLFKGGLLK

SEQ ID NO: 139688 - protein, 99 aa, Oryza sativa
  unsure (1)..(99): unsure at all Xaa locations
  Clone ID: PAT_MRT4530_40955C.1.pep
CAQELETTNHILLDCVFTQQVXLRVLSPLGWVALSPPRGNWLQDWWPSSRACLPEHLRAGFDSLVLLVSWXKERNSKIFDSTLSSVSVILESILSEGHL

SEQ ID NO: 139689 - protein, 612 aa, Oryza sativa
  Clone ID: PAT_MRT4530_40956C.1.pep
MGNVCIGPRRNFAKNGLLGILRPRHAAPSSPSQPTTTSRSIPVVLPSAPSSKPPPPTQTAPPVPVVISEPPPPQPQPEPQPAAPSQPPPPQEQPSPPPPASSNTTQQPPPPQQRQQSRAKKPAHIKRISSAGLQVESVLRRKTENLKDKYSLGRKLGQGQFGTTYLCVDKANGGEYACKSIAKRKLLTDEDVEDVRREIQIMHHLAGHPNIISIRGAYEDAVAVHVVMELCAGGELFDRIVRKGHYTERQAAGLARVIVAVVESCHSLGVMHRDLKPENFLFVGNEEDAPLKTIDFGLSMFFRPGEVFTDVVGSPYYVAPEVLKKSYGQEADVWSAGVIIYILLCGVPPFWAETEQGIFEQVLHGTLDFESDPWPNVSDGAKDLLRKVLVRDPKKRLTAHEVLCHPWLQMSGSAPDKPLDSAVLSRLRQFSAMNKLKKMALRVIAENLSEEEIAGLKEMFKMMDTDNSGQINYEELKAGLERVGANMKESEIYQLMQAADIDNSGTIDYGEFIAATLHLNKVEREDHLYAAFQYFDKDGSGYITSDELQQACDEFGIEDVRLEDMIGEVDQDNDGRIDYNEFVAMMQKTTTGFGKKGGHNFSGFRDALKSHS

SEQ ID NO: 139690 - protein, 52 aa, Oryza sativa
  Clone ID: PAT_MRT4530_40957C.1.pep
YLPRLDVCAGQSQIQQANLAAMAVMGSRRPRAQGFFRFISDGAFSQFSDSVG

SEQ ID NO: 139691 - protein, 86 aa, Oryza sativa
  unsure (1)..(86): unsure at all Xaa locations
  Clone ID: PAT_MRT4530_40958C.1.pep
MWRGERAGRRLRLNPHQCAAPQPXVTSPSPVTSGRTGSRVPTFAPVPGGVEAGLSPVSGGRWRWVPLEDGRPLSFWAKAQIVVRSE

SEQ ID NO: 139692 - protein, 122 aa, Oryza sativa
  Clone ID: PAT_MRT4530_40959C.1.pep
MAAVVGLAMVSLVAGISGTATFYTPPYTPSACFGFQEQGTMIAAASDVFWNGGAACGKRYVVTCTGATNQGVPRPCTGRSVTVKIVDHCPSGCQGTIDLSQEAFAIIANPDAGKIKIDYRQV

SEQ ID NO: 139693 - protein, 61 aa, Oryza sativa
  Clone ID: PAT_MRT4530_4095C.1.pep
VLWPGTLSDHISSRCIFGPIDKVMKASSRGQSLLGRVLRALLLFCIASNHSVIDIVCSMMD

SEQ ID NO: 139694 - protein, 128 aa, Oryza sativa
  Clone ID: PAT_MRT4530_40960C.1.pep
MASSSGESPGFQEASPRRASSSSDAMPSPTTTSSSRLSVGFIRTTVKWSSEISLYVRLSMMITGVSLKDDGKDRWSVMYRPLQTFRNKMGEMVYEMTKPSCNDYLSSADSEQDFDMKQIKFRGEYGNV

SEQ ID NO: 139695 - protein, 755 aa, Oryza sativa
  Clone ID: PAT_MRT4530_40961C.1.pep
MNMNPTSKPLLLLGSLLLLAASTLPLQATTACVPREWDALLAFKRGITSDPLGLLTSWKEDDHDCCRWRGVTCSNLTGHVLRLHLNGGYDLDRFELVGLVGEISPQLLHLDHIEHLDLSINSLEGPSGQIPKFLGSMNSLRYLNLSSIPFTGTVPPQLGNLSNLRYLDLSDMEGGVHLTDISWLPRLGSLKFLNLTYIDLSAASDWPYVMNMIPSLRVLSLSFCRLQRANQSLTHFNLTKLEKLDLSMNYFDHPYASCWFWNLTILKFLDLSQNRLYDQLPIALGDMTSLRVLRISNNDLGSMAPNLLRNLCNLEVLDLDESLSGGNMTELFGSLPQCSSSKLSELKMSYNNINGSLPAGLFRQFPNLVTLDMSINLITGPLPVEIANMETMAMEYLDIRSNKLSGQIPLLPRNLSALDIHNNSLSGPLPSEFGVNIYMLILSHNHLSGHIPGSFCKMQYLDTIDLANNLFEGDFPQQCFSMKNIKVLLLSNNRFAGTFPAFLEGCIQLQIIDLSRNNFSSKLPKWIGDKKDLVLLRLSYNAFSGVIPDNITNLPNLRQLDLAANSLSGNLPRSFTKLEGMKREDGYNASGSVPEDGLSSNCLIGGIPEQIASLAALKNLNLSRNNLNGKIPYKIGSLQSLESLELSRNNLSGEIPSTLSNLSYLSNLDLSYNNLSGTIPSGSQLGTLYMEHPDMYNGNNGLCGPPLRRNCSGDIEPRQHGYGDDNYCSIWGIFLGLAYSAHPFLIYSISITLYR

SEQ ID NO: 139696 - protein, 92 aa, Oryza sativa
  Clone ID: PAT_MRT4530_40962C.1.pep
LQRYRMIMSRPCFGTYQPSPFSPSCLGMARSAMSHAGSAAGVPPAGGYGAVGSVYCSNLAILSLFYERSLLTCFTYRREKGEAEERPHPHKR

SEQ ID NO: 139697 - protein, 72 aa, Oryza sativa
  Clone ID: PAT_MRT4530_40963C.1.pep
HSILHSGVVIPAKIKRERERERVNDNHINIALHSTFRGSYSCKNKERERERVNDNHINFLAGITILLLCIKV

SEQ ID NO: 139698 - protein, 47 aa, Oryza sativa
  Clone ID: PAT_MRT4530_40964C.1.pep
VNMNYLIELGSASQIIPCPQFDTTLCSVVETIQVCSFPIMMIKLLFS

SEQ ID NO: 139699 - protein, 438 aa, Oryza sativa
  Clone ID: PAT_MRT4530_40965C.1.pep
GRSTLSVSRVSSASASMLSTVATCTTSVKTFSLSQLEKATDGFDSKRVLGQGGFGRVYHGTMDGGDEIAVKLLTREDRSGDREFIAEVEMLSRLHHRNLVKLIGICIEHNKRCLVYELIRNGSVESHLHGADKAKGMLNWDVRMKIALGAARGLAYLHEDSNPHVIHRDFKGSNILLEEDFTPKVTDFGLAREATNGIQPISTRVMGTFGYVAPEYAMTGHLLVKSDVYSYGVVLLELLSGRKPVCMSDTNGPQNLVTWARPLLCHKEGLERLIDPSLNGNFNFDDVAKVASIASMCVHNDPSQRPFMGEVVQALKLIYNDAEAACDDSYSHRDSSCDQYDDYHGALALDSGSGSWWNRSSNPSGFFDNRNPLPVITMEYSSGRIEGARDPRFALSTGGHAQSPALQNRSGPIRMKKKLASFYRSRGSFSEHGQLPRH

SEQ ID NO: 139700 - protein, 104 aa, Oryza sativa
  Clone ID: PAT_MRT4530_40966C.1.pep
MATPHLRRGGKSKCTALSVGLCAVRCACTQPASRPAYDAGRLIHHRRLPRYLLLLLPVKTFSTVAPSLSSLFAPPRLHPCLASIPNPTASLARPPAWEPPRLPS

SEQ ID NO: 139701 - protein, 145 aa, Oryza sativa
  Clone ID: PAT_MRT4530_40967C.1.pep
MRPVPTRRRRTAERRALNAPSPVGGEWRHGLGFGPGDTYAEGKGSFPFYHVAAWPGSPIGGSDARIVNSQGVPMSPQEARGISSYPSGPRGGVTPRPSLGRHAAWGQVEDFAGDHLRTSVYFASGPRHGQLSTQAGVGPSPRRGA

SEQ ID NO: 139702 - protein, 44 aa, Oryza sativa
  Clone ID: PAT_MRT4530_40968C.1.pep
VTPMFASGFFVAVNGASNAKCIFLLESRRNSLYLESSSLILWVC

SEQ ID NO: 139703 - protein, 78 aa, Oryza sativa
  unsure (1)..(78): unsure at all Xaa locations
  Clone ID: PAT_MRT4530_40969C.1.pep
PHVRQDFERNVEQKDEQEDQREDLRPSYAANEAVKGTPRITDQXLKHVLNQLGDDACDAKCNANKSAYDDDLDCQHYY

SEQ ID NO: 139704 - protein, 116 aa, Oryza sativa
  Clone ID: PAT_MRT4530_4096C.1.pep
EPSVLTLLGDSVDSSDHIPSRQCTSLIIQNLFHMFLKKILSRACLVRKDSITSDTLKQYIRIFTLNRSRYGVHHGPRVIDKVSCASSTNGPGPTVSPISQNRRRGIISTHLVIDRQ

SEQ ID NO: 139705 - protein, 47 aa, Oryza sativa
  Clone ID: PAT_MRT4530_40970C.1.pep
MLLMTSHQITLFKDKDIIFEVLSFYLINLEHSDVYNNEQVKLKKKKK

SEQ ID NO: 139706 - protein, 37 aa, Oryza sativa
  Clone ID: PAT_MRT4530_40971C.1.pep
VLITRSTTDTFGVGRCSPTRLSSPLSCGSTRSTAFRS

SEQ ID NO: 139707 - protein, 48 aa, Oryza sativa
  unsure (1)..(48): unsure at all Xaa locations
  Clone ID: PAT_MRT4530_40972C.1.pep
CPIVKNHSGVPLPXLYHNLLKGXGXFLRDCMQXXFAWVTLSNSKXCDN

SEQ ID NO: 139708 - protein, 49 aa, Oryza sativa
  Clone ID: PAT_MRT4530_40973C.1.pep
MTRLGDDQTVMGRPVRPALARSDRHRLGLTDLGSGGSGSATLEHTTQGI

SEQ ID NO: 139709 - protein, 175 aa, Oryza sativa
  Clone ID: PAT_MRT4530_40974C.1.pep
MRMFHAPRDSRQPRRDPSDKDPETGGTVTRQPGGGAHPPRHETARSGGVVISYSPRGAYGGCLSPSWQIDRAARQQTLETLELAVPTVQWTEFYTGGGGTARFSRRPPGLQIHGPRRPHTPRKWTSGRCLSAPGAYHYSSLAIQAARPMPTLVEGPRYSLERRRPPAPFPRAPAA

SEQ ID NO: 139710 - protein, 198 aa, Oryza sativa
  Clone ID: PAT_MRT4530_40975C.1.pep
MARTPVAAESGSDLRFGLLEEGRPHPPVVAAAAAALVGGAQRRRNSTPPWLHALRLFCIIAATAMVAVFAAWVFPRCKGKQDVLLCVVALAGAVFTGPILGFLLTTCAADADDHEAAARVASRYTRCEENVGRSVILAVALLGLYAIYLAAVSCGGEVDRFLLAAYYGVMGVGVIVGHSVSWIMVNANCFFSVVAIGF

SEQ ID NO: 139711 - protein, 112 aa, Oryza sativa
  unsure (1)..(112): unsure at all Xaa locations
  Clone ID: PAT_MRT4530_40976C.1.pep
KQRXGTASXPAESNTKTSRDPAAGGVLLPLPPPQPTALIPSAISVHLRLKKLSDVGGVRRDGERRRRRRRRSREGAGPGSCRSSTSAHHAPGRCRRIGKIVKGXPXSXVPGC

SEQ ID NO: 139712 - protein, 376 aa, Oryza sativa
  Clone ID: PAT_MRT4530_40977C.1.pep
MATAAASDLESKAKAAFVDDDFELAAELYTQAIEASPATAELYADRAQAHIKLGNYTEAVADANKAIELDPSMHKAYLRKGAACIRLEEYQTAKAALELGYSFASGDSRFTRLMKECDERIAEELSEVPVKKAEDGAAAPSVASFVEEKDDAANMDNTPPMVEVKPKYRHDFYNSATEVVLTIFAKGVPAENVVVDFGEQMLSVSIEVPGEEPYHFQPRLFSKIIPEKSRYQVLSTKVEIRLAKAEQITWTSLDYDKKPKAVPQKIIPPVLLIALLLSAESAQRPSYPSSKSKKDWDKLEAEVKKEEKEEKLEGDAALNKFFRDIYSDADEDMRRAMMKSFVESNGTVLSTNWKDVGSKKVEGSPPDGMELKKWEY

SEQ ID NO: 139713 - protein, 348 aa, Oryza sativa
  Clone ID: PAT_MRT4530_40978C.1.pep
MDVLRKQASKFKEQVAKQQQAVIKQFSTTGYEHSDAVVIDEVELQRHQQLEKLYTSTRSGRDFQKDIVRAAEGLVSIGIRHVEVGTKFSEDCYRYGGESSASDEALAKAASLYGGALRNVEKEYEEFNRILSSQTIDPLRAMAAGAPLEDARGLAQRYSRMRHEAEILSAEIARRKQRVREAPLAEHTTKLQQSESKMIEHKASMAVLGKEAAAALAAVESQQQRITLQRLVGMVEAEKLFHLRLAAILDDVEAEMSSEKQKRESAPPTIHSHKRAEKAQYFLAEAVHNFNGTTEKELSLIVGDYVVVRQIAPNGWAEGECKGVAGWFPAAYVERRENIPPNKVFPQA

SEQ ID NO: 139714 - protein, 99 aa, Oryza sativa
  Clone ID: PAT_MRT4530_40979C.1.pep
FLFKWAPNPARGGGPPPLPRCRPSRLINPALPLKKAPYGLPLSSPPPGFPSSRLWAFPNFLFPRPFLPLKTNLRVCPKNFSLGRLGGGAFPSPPWDFSK

SEQ ID NO: 139715 - protein, 136 aa, Oryza sativa
  unsure (1)..(136): unsure at all Xaa locations
  Clone ID: PAT_MRT4530_4097C.1.pep
SDGGRRGLKRRRLRELAGGTSFPMSKLLHCATVSFPHHARAAEILFEHFTPRPNLYIYKTTISCSLRRRRXASSSPSRRPAALYMSMMASSIPPDEQTFLSMLKSERRSVGKQVHVHVEVSGLHSSVYXRNSLIKM

SEQ ID NO: 139716 - protein, 1370 aa, Oryza sativa
  Clone ID: PAT_MRT4530_40980C.1.pep
MEAMEGRLVDMIQSLVKKVEEVNVMGSKLEIIDKKLEQYGEQLGKVQAKVDLSMDSLGQVQMEQAFVTKALKEGNPHAAPTSTRPGKAPILQTPSTASTSSTPPTPPPLPNLNGYASVQPIHSAARDHAEVEHKRNWTPKMDFPKFDGLKDELHYSVAAQLPENVHQAFQVALIFESAHRMKKGVHKKEGYLTKGIDTPAKVPGDIWKAQQLKEYHKTHGLCFKCGDKYAPRHVCAKQEGPQLKAMEVEQNSEMLTDEMLDVVACLETQPENMLLSIQAISGSVAPKTIQLRALVKDQVVLILVDSGSSHSFINEALCQKLQLSTVPHPSYDVKVANGALLTCASHVPHFRWLLQGQTFQFPVKVLALGGYDMVLGMDWLEQHSPIQCDWNLKTISFNHQGSWVTLQGIQASAMHSLTAATPDQIMNWFQGNDIWAMAVVQQITPPLNSVIPSTVQALLDKYQFVFSAPDSLPPHRAVDHALPLLPGAVPVNCRPYRYSPAQKDEIEKQVCEMLEAGLITHSCSPFASPVLLVKKKDNTWRFCVDYRRLNTLTVKNKFPLPIVDELLDELTGAQYFSKLDLRSGYHQIRMLPEDEYKTAFKTHHGHFQSRVMPFGLTNAPATFQYLMNSIFAPFMRKFVLVFMDDILVYSHSWAEHLSHLELVFQTLQNHQLFAKLSKCSFATPTLEYLGHTISKDGVATDPAKTACMQQWPVPANITELRGFLGLTGYYRKFVHHYGIIAKPLTKLLQKNVKFVWTPEADSAFHALKQAMCSTLVLALPDFSKPFALETDACDIGIGAVLLQDGHPIAFYSKAIGTQNTIGGHSGGQATYQRLKKLFMWAGLKQQVEEFVQQCAVCQQAKHEHCKYPGLLQPLPIPEGAWQEVCMDFIKGLPLSRGFDVILVVVDRFTKYAHFIPLKHPFTALQVAEVFLNNVTKLYGLPKIIVSDRDKVFTSAFWQALFKRFEVHLHLSSAYHPQSDGQTERVNQCLEMYLRCAVSNTPSKWCYWLPLAQYWYNTTFHTAIQCSPHKALYGVDPHHGILPSFALEDVDTSTSSSEADNLLKDRTFYASLLRHHLTRAQHRMKQAANANRTLRSFQVGDMVYLKLQPYAQHSVVSRPCPKLAMKYFGPFSIVSKIGSVAYKLQLPEASRIHPVFHVSQLKQVIPNNAPVFSTLPMSLELDVQSLSPSAILDRRMVKRGNAAVVQVKVRWGSLPEDFSTWEDYDVLCVRFPEVKSWGQDSSHGGGTVIAAAMTESKSKAEEKKKGKAERLVWFDDSRPYVVLMCTISQGIGGFVFGNERSESKEDSYVERFLDCISNGTIPDDSRPVLLNVLKEDHEDAELVRGALETFVSAVTPIETSKNRGSACISEL

SEQ ID NO: 139717 - protein, 66 aa, Oryza sativa
  Clone ID: PAT_MRT4530_40981C.1.pep
HVSLPVGMLRLPVHLLLNKELSDVVEYHFHKVVKYPTNLIAVTRGILVSFFSSGLFICLNSAGSPA

SEQ ID NO: 139718 - protein, 82 aa, Oryza sativa
  Clone ID: PAT_MRT4530_40982C.1.pep
INTASLIPNILMINTVCNKNSLPFNILTYNLFTCLLSLPSHKHKYNVVLPPFHSIKPSNIIQIHINVNESRHIYKIYILING

SEQ ID NO: 139719 - protein, 70 aa, Oryza sativa
  Clone ID: PAT_MRT4530_40983C.1.pep
MAYWHGGPAGTTPRVLKAKYTLSSPPARDDLLEDSETPGGPPGGEEEAGIRGKGHLTFNGTAGWIAGAQI

SEQ ID NO: 139720 - protein, 373 aa, Oryza sativa
  Clone ID: PAT_MRT4530_40984C.1.pep
MARAWRLPGDFEPSGVAEFLVSVKPPGRSRAGQVRAQPLREAKPLSIVIVPRAESCQSGEGGAPGHSCHAQGGVVPAGRSSQACGVRCRAQATREVKPPEPVGRLVKRASWVKDEASQRGEVGEALEPVARSAKCASRVSDEAPGVWRSAQAERVVPVARSAKRACRTFVDVANHVVVVVMVVMMSEDERMPLGTSCIFVVVVDDVIDAVIGDAVVAVVEDAVDVVDEASCRLICQRTRGVHLCGRVGGGALVPMLMKTIGDVVSEKTNIGHAASPAVPPASSARLAGLPAEEQADALPRCPGAEDVGELGVEWQQLAAFLGRRMWFLFCILILRRCRCGAVVLLEQQVVDGVGDDICRKGTGGSCRPSRTAK

SEQ ID NO: 139721 - protein, 147 aa, Oryza sativa
  unsure (1)..(147): unsure at all Xaa locations
  Clone ID: PAT_MRT4530_40985C.1.pep
QFPGPIPGSLSQMPKLEAIEIHXDNKLTGSIPNSFGSFVGNVPELDLSNNQLSGKIPESLSKHDFNAVFLSGNSLTGDGSMFFGRNKTTRQLDLSRNMFQFDISKIEFARSVLTLDLSQNRIFGKIPRVLTTLRSCQRVSVKDNSLW

SEQ ID NO: 139722 - protein, 117 aa, Oryza sativa
  Clone ID: PAT_MRT4530_40986C.1.pep
WWNGFDGGGQACSRATRTRGSRWLAERGRSWPERRVEELGFGRYRGRRWWLNSEGKRKGKVREWICLVEAKVVARGLGRKCSDEGDRPMAGIWKRERREKLGARLGVEKMGGVAGYL

SEQ ID NO: 139723 - protein, 121 aa, Oryza sativa
  Clone ID: PAT_MRT4530_40987C.1.pep
MARRYETVTMVIRHKHQDAAIVSEECGGVSLYGVTWAFGGIIQDHHLASTAALASHFASQPHDPMVCLGPGPVPYPGLTLALADSTILGKRASGLVGPTTHHVVSTLAEAQLSQTKPGSPG

SEQ ID NO: 139724 - protein, 64 aa, Oryza sativa
  unsure (1)..(64): unsure at all Xaa locations
  Clone ID: PAT_MRT4530_40988C.1.pep
NDAKLFPETYRRYMEKKLRSDAGFPGTPIRLLWRSXRKRPDKKGKSADNSLQSSVIPSRMALAT

SEQ ID NO: 139725 - protein, 45 aa, Oryza sativa
  Clone ID: PAT_MRT4530_40989C.1.pep
MAADRDELDVSGSGTEPVNWELESRDATAAAGRLLSVSPSSLLRC

SEQ ID NO: 139726 - protein, 63 aa, Oryza sativa
  Clone ID: PAT_MRT4530_4098C.1.pep
MRGGNLRMMVGRMQDQRSYDGGLLVELVDRTNTNIYVAKGKNPTVATEALIPDDEVVVPIFTT

SEQ ID NO: 139727 - protein, 44 aa, Oryza sativa
  Clone ID: PAT_MRT4530_40990C.1.pep
MEMQTMAMRRRLGKTVATTGYGQAKPGHCLHAALVVGVVGGVGR

SEQ ID NO: 139728 - protein, 68 aa, Oryza sativa
  Clone ID: PAT_MRT4530_40991C.1.pep
MLSVTLKRAVGHILPSGGGGTVIPPGNPKISKQCGSPKTDDVKDKFDCSSKESVLTRKYPRVIIRDGF

SEQ ID NO: 139729 - protein, 148 aa, Oryza sativa
  Clone ID: PAT_MRT4530_40992C.1.pep
FFFFFTQCLLLQEKLQNSTELTAARLCEKGNLYACFRFFFGYNSRKKHAKCTAKTSTLHIMIKVKAFSRTPNGGAKPYRVYMGVASPPRRVRDWQRLCSLLTARISRHQLAEAETEARQTGQAAALFFFFFLRQTTNLDIKDATKKVH

SEQ ID NO: 139730 - protein, 166 aa, Oryza sativa
  Clone ID: PAT_MRT4530_40993C.1.pep
MESSSRWRQERRTASDGDLVEVSGAGGERGDAVVDDEAVPERSMNVGSATLFARRSHLRARREMAGKPRARPSPARIPGSTAWNRTSQSTGVAVPWSCSVVPINRRGLMKGRTVGLARAAPVAGGAWPDQGEREKGEFVRLTGGSHIDIYTALPRWHTTWAKVANS

SEQ ID NO: 139731 - protein, 86 aa, Oryza sativa
  Clone ID: PAT_MRT4530_40994C.1.pep
MCCKAIKLGFASDGLLKACCGTGGTYNFNVSSACALPGVVACKDPSASISWDGIHYTEAINRFVAKGWLYGPYADPPILTAIHHHH

SEQ ID NO: 139732 - protein, 500 aa, Oryza sativa
  unsure (1)..(500): unsure at all Xaa locations
  Clone ID: PAT_MRT4530_40995C.1.pep
RTPRPIPSGREPPSTPPAPVWSFGALPPLIEPAVVEPPTAVAPVHAVAVGEAPPPLKEESGSGHVKKSKHKDEERAPPPKKHHEKAPPKSKHHGRHAPPDQPELSPPAPPPESYTPDAPPAPEAASPHHGGGENPAWPRPGNNQWPPLPPFNQPPTPEWPHPGNKWPPLPPFHPPPTPAWPHPGGNKWPPLPPFPSHPPPTPAWPQPGNKWPPLPPFPSHPPPTPAWPHPGNQWPPLPPFPFHPPPMPAWPHPGNQWPPLPPFHGSDVPPPQLRCPPSGLPVGPTRSRRPQQLASQQDEQHAARTSRPPRVSQLPGPRRSPAPPVIHTRRPPPNTPRPPPPPTPRPPKPQPXSPPQPPQQQPPLAGVXPPPPQPSXDPRFPPPAPSGGAPPXGAPPAGALGDVHPAARCRPAARPGRRVRILRPRLPFPLRRLPRGVRPDPXPPPPALPQAAPRPPGGAXPEEPLPPSPRRPTTPRRPCPPIGSPSSRPIPDYTPYNTNP

SEQ ID NO: 139733 - protein, 67 aa, Oryza sativa
  Clone ID: PAT_MRT4530_40996C.1.pep
MEETQDTGDVYRFGPLRSPQSSSILRILRIPFLSGQGGNTPAPARDECLEALILTGWGEACVRPPTG

SEQ ID NO: 139734 - protein, 90 aa, Oryza sativa
  Clone ID: PAT_MRT4530_40997C.1.pep
EIDYKDLYSKQLAVLLSLLLERIKPYSCFSRLLLSLSKQNSHFQKKKKRWASLHKFFSNSDSEVLSTQKADVLVALSRVLLKCSLAMGTN

SEQ ID NO: 139735 - protein, 368 aa, Oryza sativa
  Clone ID: PAT_MRT4530_40998C.1.pep
MDPRFPPPAPSGGAPPRGHHRRAHSETFIRLPDADLLLDPDGEFGFSDLDFPSLSDDSPAASDPTPPPPPPALPQAAPRPPGGAHLRSLSLDAAFFDGLAFQGGGGGGGAGSGSSGGGAGHKRSGSMDGESSLFEGESAPPDYAKKAMPADRLAELALLDPKRAKRILANRQSAARSKERKIKYTGELERKVQTLQTEATTLSTQLTLLQAYWDAMIIKSVSLCLVVFILNCEYRYSSVLANCTFQDKQGHYKAIEIKESKYIYPDKQSNLLRKPSLFNAALNDALREEVQRLKIAAGQVPNMNGNSFNGGLQQQQQQQMPTYFSQQQQMHYLSGHQGRHHHPNNPHNSLNGGQSMSGQTLNDSMDFM

SEQ ID NO: 139736 - protein, 126 aa, Oryza sativa
  Clone ID: PAT_MRT4530_40999C.1.pep
LAVVNDDEGTNRPQQKREGSQILFTLSLPRCSSLYKREKKITNSIGDTIGDSNGRSTLVAVPRPAASAAHSGHEAGGWRRPSPIPKALPSGHLVRVAGFLIMLRGRDGSSGWSDVMGNKGGGQHQG

SEQ ID NO: 139737 - protein, 68 aa, Oryza sativa
  unsure (1)..(68): unsure at all Xaa locations
  Clone ID: PAT_MRT4530_4099C.1.pep
GKKNPFPMFPFETPXPGIWWFFKNPFLSGVPVSRGHFFFFGFPPGGENFFFFPVKNFLXALGLKFPVP

SEQ ID NO: 139738 - protein, 67 aa, Oryza sativa
  Clone ID: PAT_MRT4530_409C.1.pep
MGATGGVQKARAGGGMQVQACSVAVGCRLRRAATLVAEFLDLDVSSGGGANASDVEHSNDKGHAMEW

SEQ ID NO: 139739 - protein, 74 aa, Oryza sativa
  Clone ID: PAT_MRT4530_40C.1.pep
AVTAPAGATNRHERSLIGPHSRLWPLPPREPCAAARVPYSADALGRSPYRCPSSTSCDIPSSHISFTFKRTVLE

SEQ ID NO: 139740 - protein, 138 aa, Oryza sativa
  unsure (1)..(138): unsure at all Xaa locations
  Clone ID: PAT_MRT4530_41000C.1.pep
MAATVTQNVDCKAFNDALLFFDAAKXPPFRIGDLQAVIPVHCXRKTPLRYLYYVGRYLLIXPASSAHHDSSISTRMVSGQWTLYCSAHGTMTWALLRTRHHCRHWSVSDSAMLNSALXQLHDCFMLARYHGWRIRHRT

SEQ ID NO: 139741 - protein, 91 aa, Oryza sativa
  Clone ID: PAT_MRT4530_41001C.1.pep
MANCRRARGGGRTNLVFLSLRGGASYRESGWLVTTVAYTNTVDRETTDETPCMFAAARRPVLAVAGDRVSEILSDLLGNRSPMREHEHHNV

SEQ ID NO: 139742 - protein, 65 aa, Oryza sativa
  Clone ID: PAT_MRT4530_41002C.1.pep
MTMKTRSDDERTTKLVAAVGARSGDNIHCNEAHLVFFDVSHVGLADADYISGYLLNNRKYFIHIV

SEQ ID NO: 139743 - protein, 119 aa, Oryza sativa
  unsure (1)..(119): unsure at all Xaa locations
  Clone ID: PAT_MRT4530_41003C.1.pep
FWYKVDYGMFLFCIAYWERDWREGXTDHYKFIDQCLSTVDLKHQPWFRVSALPFSGLFLQLGGSPTRAFSMIPYGCRASIGLLYFLSFLFSTFFFFFFYFPFLSFSTFISSFFPIPFSF

SEQ ID NO: 139744 - protein, 168 aa, Oryza sativa
  Clone ID: PAT_MRT4530_41004C.1.pep
MTIDEHNAMCPFSIRCHNQRQIGAPSWLPVQKWWERTGWGGQQLGANKMASTTVHKSTAIYRHCKRRGNKGEHANQEVHMTIAPYALVRFVVRVDGSKTSFTTRKEETTMLIRDILALLTAQQRGDKVVGKRRDREPDTRKKNRAPPTCPHHSLPVTTNPSHITEMLY

SEQ ID NO: 139745 - protein, 120 aa, Oryza sativa
  Clone ID: PAT_MRT4530_41005C.1.pep
DQQVAGLQVLKEGRWIAPAGQPNALVINIGDQLQALSNGRYKSVWHRAVVNSDKARMSVASFLCPCNDVLIGPAQKLITDGSPAVYRNYTYDEYYKKFWSRNLDQEHCLELFRTTPTDTS

SEQ ID NO: 139746 - protein, 385 aa, Oryza sativa
  Clone ID: PAT_MRT4530_41006C.1.pep
MAWSQSARKPMIGLLFRAQQHSARGYSYSAFQAHLSSSNVDQSATLLRRFSSEVPASEQMNLIKQLRERTSAPIKDVKASLVSCNWDIDVAQKDLRKRGVVLAAKKSSRTAAEGLLAIAQDEKRAAVVELNCETDFVARNDVFQYLASSLAKLALSARDPGELVFPFGPDYLENLNVNLDHPKLSGETTVQSAVTEVAAMVGENVKFRRGFIMSTTAHGVVCSYMHTCPQPGLGRLAGLITLEAEDSNAPLDALQRVGKSIAMHIVATKPLFLSKELVSASAVENERDILRTQAESSGKSQMAMEKMVEGRLRKYFEEVVLLEQKYVVNDSTNIKSVLNDLSKEVGSKVTVGNFARMEVGEGVSKVQYICHSNNGLSIFIVFKLT

SEQ ID NO: 139747 - protein, 111 aa, Oryza sativa
  Clone ID: PAT_MRT4530_41007C.1.pep
SLFGAPETPGGELPFSCRVGSCSTCAGKMSSGEFYQSEGSFLAENQMGGGYVLTCILSPKGGWVFPPPKEEELFWVALFMLLGAPLLFSKWAPCSVSFPYPKNGHFFVLVF

SEQ ID NO: 139748 - protein, 68 aa, Oryza sativa
  unsure (1)..(68): unsure at all Xaa locations
  Clone ID: PAT_MRT4530_41008C.1.pep
VLVLVSHGASGSPRLYDSSICMRRPARQMHTXRPLLMTTRLTCSYRYEGVEITDCPLLEVPMLSMLCR

SEQ ID NO: 139749 - protein, 119 aa, Oryza sativa
  unsure (1)..(119): unsure at all Xaa locations
  Clone ID: PAT_MRT4530_41009C.1.pep
NXNPDVGXXQLRELXXPVXNXXQVXWXHLXXHXALEXLXPSXRXCQCSXXXXSXXXXITWLXYDXXXXXXWXXXALXRVXXXPLXXDXXASVGLREXRSCGLRLDGXXXXXXXXXXAXX

SEQ ID NO: 139750 - protein, 117 aa, Oryza sativa
  unsure (1)..(117): unsure at all Xaa locations
  Clone ID: PAT_MRT4530_4100C.1.pep
CAQSFGLKVNSYPPIQGPDLESDAPRPSHAGGIIQLFQXPQVSGIKLLKENXWVYVPXIRQTIVANIDDQLEVITIGRYKRVMHSVLTSPSVNRMSIASFYNPGTXSVIFPASALST

SEQ ID NO: 139751 - protein, 124 aa, Oryza sativa
  Clone ID: PAT_MRT4530_41011C.1.pep
MVDPTETYNVCLFKVSKGVSRSTESTSSRKSVETYKIIFKVLKQTLTDTGVLSKAMPTMNSFFINIFEKLIQNNNKIYLWQYERARVQPSVWFGLNNYGGGALRIRGDPSTVASRTQVFNPLGT

SEQ ID NO: 139752 - protein, 41 aa, Oryza sativa
  unsure (1)..(41): unsure at all Xaa locations
  Clone ID: PAT_MRT4530_41012C.1.pep
FFFFFFYLSFFIHKILALRFGLWXIQLVVILALIFNYRDHT

SEQ ID NO: 139753 - protein, 135 aa, Oryza sativa
  Clone ID: PAT_MRT4530_41013C.1.pep
MVDPTETYNVCLFKVSKGVSRSTESTSSRKSVETYKIIFKVLKQTLTDTGVLSKAMPTMNSFFINIFEKLIQNTIKSIFGNMSALEWARVIVIETGLVQPSVWFGLNNYGGGALRIRGDPSTVASRTQVFNPLGT

SEQ ID NO: 139754 - protein, 42 aa, Oryza sativa
  Clone ID: PAT_MRT4530_41014C.1.pep
MASESDPKKGVDKNILADILIIESFIVANGSIQEAKSREKGI

SEQ ID NO: 139755 - protein, 68 aa, Oryza sativa
  unsure (1)..(68): unsure at all Xaa locations
  Clone ID: PAT_MRT4530_41015C.1.pep
NLEEFSNXGQGVGXKAYTFKGLFSESHPLWFPWAFSAKSFSAYRKVRVLLHLQSFSHKFCIDTFSFRK

SEQ ID NO: 139756 - protein, 171 aa, Oryza sativa
  Clone ID: PAT_MRT4530_41016C.1.pep
AARTGMSMSGEEARTVSLSFPRLSSAPSLKREKQEARRLRQGCRRGLHQPHPRYLPTPTPPLDPYCCIVLLGEVGTSLGFGDWGIYRVPLPSLFFWIWRGTLPRRRRSSSPRLYRPPSTDADVREPAPFFPCMALPAPRPAIHIGRGRCGAEPASTSRRPRLRPSSSGAST

SEQ ID NO: 139757 - protein, 353 aa, Oryza sativa
  Clone ID: PAT_MRT4530_41017C.1.pep
MMGASPPEEQHSTVEEVVVVRRNQKRTKNFSGKEDEGLVSAWLNVSKDVVQGIEQSRCAYWKRIYDYFHANKDFTSDRSQNSLMHRWSTIQENVTKFEGCLSRIGDRKQSWVSSQDKIMHACALYKAEDENHRPFHMMHCWNLLRNQQKWIDRSSQLPSHKKQKITNNSSLGMSTTTTDDTAAAPPPPPGFELSKTPESINAPPRCELSERPESRNAPPRCELSERPENRKGEKEKLRRGGDVVFVEDLDDLLAKKKEADVEKELKKDERYIQSHALEQEKVALEQAKVANETKNLEMRSKELELKTKEIDLKRMLEEERIMTMDISAMSGLQQQYYKSLQEEIVTRRFNSSG

SEQ ID NO: 139758 - protein, 99 aa, Oryza sativa
  Clone ID: PAT_MRT4530_41018C.1.pep
MGTNSPYPPKSNACVMLPYYYGPVKGRCRGGGVLAGGGADTVEVGGGGWKRCSGGRGRAAGMSNVGGMQRARLVRMRRERSSDFSGDDDNHVRAGLAAC

SEQ ID NO: 139759 - protein, 215 aa, Oryza sativa
  unsure (1)..(215): unsure at all Xaa locations
  Clone ID: PAT_MRT4530_41019C.1.pep
PPSRLRPARPAPARRTHRPPPHLRLLPGTATATSPPPPPRPRPTPATSSPPXATSPAPTTSPPPAAATSPSPALPPPAAAPAPTTVSPSPPAPAPVLGAPPPTLPPPVAAPPVALAPAPALSSSPPPTPAPLAPAPVIAAAPAPSDDVPAPAPATKKPKKKRISPXGSPLAAASPGTTAXFAPGPAPSXXICRATRREGRGGKRAGPAADAAAGA

SEQ ID NO: 139760 - protein, 115 aa, Oryza sativa
  Clone ID: PAT_MRT4530_4101C.1.pep
MATGSRRRRTRTSSSQPPPPFSLSSATPSNVDSIIAMGGNATAAEDDDDGDGFEEQEEENTQLRYGLSPGGHHCGLLLARSAPPASCAATLPTPPRRLRMREREGDRIQRKEESG

SEQ ID NO: 139761 - protein, 30 aa, Oryza sativa
  unsure (1)..(30): unsure at all Xaa locations
  Clone ID: PAT_MRT4530_41020C.1.pep
YNWQXXCNSVXXXDHLGFTFRYXXLHGCVD

SEQ ID NO: 139762 - protein, 420 aa, Oryza sativa
  Clone ID: PAT_MRT4530_41021C.1.pep
MAEDEATAARARQQRQPPSWADIPRDLAVQVLRFLPAQVDRACFAAVCPQWRGAARNALLPAPLPLLALPDGAFYCLPYGKPFRFPRAGCAGYKTAACGRWLVFPHDDGCFLVDPFAGATVTLPALSRVRLRPPNAVASYVNVGIAGRNAHVSMFYPHATWMHIKTSDKMPINKLLLCSQNLVAAFIGSSLANAGRNSQILVCQPGASSWSVRAYDKCKLFEDMAFYRGKLYALAHDENLLVVNISQDPNTGDPQISQIGQVIKGDPTWSSVLITDDDDTSTTDKKKLYLVESCGVLLMVRRKVCCRVVGKTVVPGQNEFEVFKADLENSRWVNVTTLGVDQMVFLGRPCSKAVSASQYGMPNDQIFFLDDVMENNKEYSYEEETTSVNVYDMRSAEVSSPLPMAWKHEMISATWLFPWD

SEQ ID NO: 139763 - protein, 345 aa, Oryza sativa
  unsure (1)..(345): unsure at all Xaa locations
  Clone ID: PAT_MRT4530_41022C.1.pep
PLSSSSQIQSSSSXPSPLFSSSPSSSPPPLSSLPSAGPSSSPQLPLPSAGRRPSSPSSRRSGRSSSGPSPRHPPRTTPRRSSSSSPTSASGSTLPSTPGTSARASPGASWRSQRATSSTATGISSSEIPXSIPHHGRPSWNPWRCGVSPSPAASSSTVWNPFHLRARRSRSSPPNPAATSSAASPPPLPPHRTSWSSTSSPSAASRRRPPPRPPRGSPTSTRRPGPTPRSPSSGLRASPARRSARSCRGSRSCCSATSTPPSTPSSAPSARSASAAPTSRASSPSTRRRSPTASTPTSSRASSSGSTSRGCSGTASTPSSATSPRSDPSASSRAASPPRCGCSRR

SEQ ID NO: 139764 - protein, 132 aa, Oryza sativa
  Clone ID: PAT_MRT4530_41023C.1.pep
PRIFLWVVLLCTLLCSRSAREGARELVGLGLGRRSSRGGRGGEWGGAEGARRRQNGGVASTPPCLPFPGRRSPGRSQAPRQPADGYGRRRWATTNRTGGAELGRGGEEAVPRRRLSQEARGETGAGEAARRR

SEQ ID NO: 139765 - protein, 117 aa, Oryza sativa
  Clone ID: PAT_MRT4530_41024C.1.pep
FVCIENIHQFGSLPDDPDTPYFSLDACCFINDIQEVVVDHCDKRCLTLVLDNHAHEGRFCSNGSITNSQSKQPDEIYTVHTWKLKWFSEETVVKFISLLKALYSVSSSSSLPVKCTS

SEQ ID NO: 139766 - protein, 74 aa, Oryza sativa
  Clone ID: PAT_MRT4530_41025C.1.pep
PRGRGHPTRFPSGGGLEAPLVGWFLGPPSCKNEQGPPQQNLVLVFNFPGFPPDPRVMVFMGQGINPFSTPGFVF

SEQ ID NO: 139767 - protein, 1130 aa, Oryza sativa
  Clone ID: PAT_MRT4530_41026C.1.pep
MAAGRAGGAPPVTGDRYLDLLVRFVGRNAGALLDGSVTLRLHPVGLHYVASRLEALRELEAVGAGAPVDYLRAYVADLGDHRALEQLRRILRLLTSLKVVAPGPGRDPAPLSLVPFARLRVLELRGCDLSTSSAARGLLDLRHTLEKLICYNSTDALRHIFTSRIMDIKDSPVWGRLLYVSCASNGLVLMDESLQLLPAVETLDLSRNQFAKVDNLRKCTKLRNLDLGFNHLRSISSLSEACGRIVQLVLRNNALTTLHGIKNLKSLMDLDLSYNIISNFSELEILGSLFLLQNLWLEGNPICCARWYRARVFSFLHNSESLKLDDKGMNTQEYWEKQVLFSSRQKQPAGYGFYFPAKDDHEDEDTSNSKMKKISRLALIVEEERSLCDEGVDQQTTPHESDSSKKDEVAGADNDIKITSLINTAELLKKEKSTDWLREFKEWMDENMENTEPDNLYIEFNSSNGRYEEQKKMQKAQKNSKDISDLVQTSEGGSSSNILESDLSFTDGACYSANGVTTESSHEGNIYQAPLKLHLNSSQQLPPLNFVAISHADSFCEMEDGTGNLHTNGVSSNLMNKLVEPSLSFTNSSPQSPPQYKEDILHRRLCMEEEVLQTSGDFNCAGSLGSGSSCSDDSSGDLCSCNSEDDCVAIRTKMELSPNGQIARFSSVGDYEEKDGMEYFSGKKGLPDYSAEDVPNFTDSVEFGIKQLHDRYKSNGHLGEGSDHLVRQQSNQKFKMRIPPLFKNHNGTKLVFPKVNGDEMDNGVSVAGNGHLGCNLNNCTLCREHSLENHNSSILHKDNLCASANTVSCNTEKYKLIEDFFNLEIASDASEICEKTAFCGYIFQNGTGSDLVQREVALLRCSQNKLHVVLVDMAQDGQDTMLRVLGSYWMEDLENILIGLGLQALRVHMADNTTHLFLTRTSKEAEDILWLLTASNFPQLTSSISLQSWEKVQLKLLENCIHPSLEMGIFLYSLLMFWKNDTEEGSFVIRSLAVTEGSLFVCIENIHQFGSLPDDPDTPYFSLDACCFINDIQEVLVKLCPTKISCDIIVVDHCDKRCLTLVLDNHAHEGRFCSNGSITNSQSKQPDEIYTVHTWKLKWFSEETVVKFISLLKALYSVSSSSSLPVKCTS

SEQ ID NO: 139768 - protein, 172 aa, Oryza sativa
  Clone ID: PAT_MRT4530_41027C.1.pep
MAHTSIHELQSDLWLLKMKKKSCHGRATHDPQHGLSKIAGESTKHQQGNISGSQAAAAVKSKPWKKRYLTFLSKFQNKMKKHKKPDNIKAHHTRSHKTRSILLSSSQIMEECSNLVQVIRHTAADCFAAAATAVAAAVDYEEDDHHQPYMQLDQVNYGVMKREAFGPVYLVT

SEQ ID NO: 139769 - protein, 605 aa, Oryza sativa
  Clone ID: PAT_MRT4530_41028C.1.pep
MEHPPFFLLLVSLGFNLIALCAGQNQFIYHGFTGKNLTIDGTTKITPEGLLELTSDKNDLNGHAFFPTPMHFRSSPNSTVQSFSVNFMFAIQSFYSDRSYDGMAFLIAPSNNLSTAWPDGYLGLFNISNRGNSSNRILAVELDTFQNNEFGDISNSHVGIDINDVRSVNSSFAGFYDDKNGIFTNLTLYNGRAMQVWMEYSEEATQITVTMAPIDTPKPKRPLLYATYDLSTVLTDPVYIGFSAATGVISTRHIVLGWSFGMGVPAPDIDITKLPKLPRVGTKPRSNVLEIVLPIASAMFIIIVGTMVILIVRRKLLYAELREDWEIDFGPQRFSYKDLFHATQGFKNKNMIGVGGFGKVYKGVLATSKLEIAVKKISHESRQGMKEFITEIVSIGRLRHRNLVPLLGYCRRKSELLLVYNYMPKGDFGLARLYDHGTDLQTTHVVRTMGYLAPEMVQTGKASPLTDVFAFGAFLLETTCGQRPVKQNSQGNQLMLVDWVLKHWHDGSLTEAVDMRLQGDYNIEEACLVLKLALVCLHPFHASRPNMRQVMQYLDKDLPQPELAPTRLGFSKLPLMQSKGFNPSAMSYPEFRTSIGTFSGLSGGR

SEQ ID NO: 139770 - protein, 99 aa, Oryza sativa
  unsure (1)..(99): unsure at all Xaa locations
  Clone ID: PAT_MRT4530_41029C.1.pep
WFAGKGALLSLSRIDGSRAARTXHRGVARRQREGPAAGCSDTADRDVSDTQAEAALGQASQDKASHLFFXCVFTTSKCFGFGALIDQSITSSSRLVIKS

SEQ ID NO: 139771 - protein, 599 aa, Oryza sativa
  unsure (1)..(599): unsure at all Xaa locations
  Clone ID: PAT_MRT4530_4102C.1.pep
MFNREKGKNVSGYASSNSSFQLNPPLASRELTRAHPRSIPSMLLSSQLPLVGSQDQNQYVFDRAFATQVNELPMLEEDVPFCHDCREQGHYALNCPWVYVKEAPSFGSAGQTSLNQPPRTKSSLQPSVQSEEPNGDNPLNPRKCFPPSLSYHVGSRTKQAKGKKSKNQKRKAPMRTEEEVRKMTITSTEWPPPGMTRRQRRNTFRGAPQLTEHLLANGGRVSDSEDSDQVSSDDEDEMERKACSRCGEIGHVASSCATICVHCEEDHPPDRCPTSRITCFFCEGTDHVPKNCQFSFLLTKKMANQPASSNGEKPQGNTNPRQDYSLSLKPVPGQRNQNEKRKCRVREDICCFNCQGMGHFADKCPKLRNIAASTSVHTTPCNQKLAPQRIVIHASRSSPIARVATAPTPAGALPQGVNAQFQPQPAVDKTEAXSASYLWMFQHSSQXNQVQDEEPEQDHPPGECPTRKVTCFLCEGTNHVPKDCQLSVLLTKTAEIQRTTLRLSRQLVSSNNNIDDIIHSTNAPLAPPNSAINHGNNTYSTNHSLHRQPQQRIVVDGRSCVSPRPTPGQAKGNRPPEGDTKQKTVIRFNQQSEGSFSCE

SEQ ID NO: 139772 - protein, 847 aa, Oryza sativa
  Clone ID: PAT_MRT4530_41030C.1.pep
MGGRGRGNDDDGGVVVVDGFVAILRQLGDLAQLAAEVFQGMHDQVMALSTRRRQLALRLNHLDHAAPPAVAAPQDSSSSFFCHKDYYLFVASNIGRVHWRANLILKQGLVAGGNNSLPTIIFDRIHRCRGPPNLSLLDKYDADGEGACLKRYTNPSFFTSHSACSTKLIHQRIHMAKQPPKLLLETKPTFQCSDSDNSRPQKASQCSDSMPEMDASHGFLSMFRQLKYRQTNGSPMPQMHNFQNETSSSELNISSNCSPESSIKVTQDIGASTTGTDSVSEERNLELERTSSFEAWLSPNAHNIQHDQIAEEMPHYSCNNNNGFVNHVTPNDAIGATNNGNCKDDSNTYKKAVRSKYRGGMEFIASRVSSFPRKLFRKKQDPHPLSVADSFRNMTSKILELKCNNIRDNDSNGMGSINREELLASENGEHPSPDAPFRHVSTERRYMHATRASSEDVPALAEVASDKKSKQEHSDDASEASYDKLLDEELHQSVVRQERNGSPVPQVCSTTRFSQLEREGPGKDMVPPLPPMQWLSSIKVHSGSRVASSPRLKTLRPQSPAVPNHAAGRSYSHPVRKQLETDNVQARGHFGILASHAEIAQTSASDIKSAAVISIRNGICRYGFPGKDSEEINHQEKDIIQPSEGEILKTTEEVCEPTVQSDESPPEQHSEIQPQREEIHQTGNGDSDCNNKNNLRATTEGPIYSNGPQIDVHNSLDHPTDRESNTNVHVESVFFSAVEQLTKMNPPPVPRPKYSILQVGVQDRSTVRTAPGLIYPSRRLSGEIRKLPEQINAKSCDLKPALERGSNVTVDHRNTKVATILQRVDHIRQAHAENYDIDSEVSWSDSD

SEQ ID NO: 139773 - protein, 70 aa, Oryza sativa
  Clone ID: PAT_MRT4530_41031C.1.pep
KPDPEKGLNTVNKLTQDKKEVIYCFHKIFTRVPTFWQVVRIITLTLPHLHNMNNLVANVSNGDRIKKPIH

SEQ ID NO: 139774 - protein, 36 aa, Oryza sativa
  Clone ID: PAT_MRT4530_41032C.1.pep
SAVAGHIPYMRKSILTYYMSGLMNNGFSSARPTYAP

SEQ ID NO: 139775 - protein, 336 aa, Oryza sativa
  Clone ID: PAT_MRT4530_41033C.1.pep
MGILSLITGKAGASGFGSGSTAEQVTAGVDATGLTVIVTDFWNFLDYREFIIQSGGASGIGLETSRVFAMRGAHVIIAARNTEAASVVRKKIIEENPKAHIDVLKLDLSSLKSVRAFADQFNSMNLPLNILINNAGVMFCPFGLSEDGVEMQFATNHLGHFLLTNLLLDNMKATAKSTGIEGRIVNLSSVAHLHTYPKGIEFDKLNDEKTYDDKMAYGQSKLANILHAKELSRRLKEEGANITINCVHPGLIMTNLMRHSFFLMRVLQFATYILWKSVPQGAATTCYVGLNPQLKGVTGQYFADCNVEKTSRFARNDALAKQLWEFSEKLIKSSSK

SEQ ID NO: 139776 - protein, 256 aa, Oryza sativa
  Clone ID: PAT_MRT4530_41034C.1.pep
MAAAAAIAQWLSDMAGLVMRCCNPIPSYTNEDGPKNPEALTTQTIFTVNEIEALYELFKRIDGAIIEYGKINKALSPHHEEKLQRKIKSSEAPAPLPQAAQLGYKPNVFSFWILFLQLRLIDYCKEEFNLRVFGPEKGGTMFTDQVFDLFDLKLEQALGFEEFAVALSIFHPDTPMEDKIDFSFQLYDIKNQGFIERAELKQMMVATLAESDLNLTDQTFEEADTNKDGKIDFEEWQALVNAHPCLLKNMTLAYLG

SEQ ID NO: 139777 - protein, 92 aa, Oryza sativa
  Clone ID: PAT_MRT4530_41035C.1.pep
MAADWEGRWSYGDGGGKGLFVTYSNLCFHSASTYGLRLTVSAAAAGVRPMGAGVEEATPLHVVLICAGERREQRGDIERGEEEEGIENDSHT

SEQ ID NO: 139778 - protein, 81 aa, Oryza sativa
  unsure (1)..(81): unsure at all Xaa locations
  Clone ID: PAT_MRT4530_41036C.1.pep
QVLGSGNIVLERSLSPKHNGEDNDXQYNQTVAYICFFVLVMMLPRMMGSCPSFSLVICIITGRLFLDLLTKITVVTVYLAG

SEQ ID NO: 139779 - protein, 237 aa, Oryza sativa
  unsure (1)..(237): unsure at all Xaa locations
  Clone ID: PAT_MRT4530_41037C.1.pep
MDISRINEGYTSCGPVVEMSWHRAGYPGRRRRRNEGRGDGLPTVAVATAAQGEATLGAAHGAARRHRGRQRGGTRTAAQWHESGGAGRGGEGEGKGRRLNGDXDGGARGSGRRRRAGGDAXWRRGARSGDATGSGVGLKTGDATGGVGLDVATTTARGVGDGEGARRWDGDAAATGDATATAERGSRRRRRARRGSGTGDATRQRRHGSGDATGERHGGARGARRLGDGRAACGRGA

SEQ ID NO: 139780 - protein, 118 aa, Oryza sativa
  unsure (1)..(118): unsure at all Xaa locations
  Clone ID: PAT_MRT4530_41038C.1.pep
MAVVKTVPAGVRTVLVTCGAVFIGSHAVLHLLLAVFRAVVVLTLTSFPXLALLRVASLAFDHSCILAFHTVDLRXRDLCKMFLVEQDFXARINFVGLIAVVDSVHTPLVYYYIYVNVT

SEQ ID NO: 139781 - protein, 129 aa, Oryza sativa
  Clone ID: PAT_MRT4530_41039C.1.pep
PPPIHLRQKLQIWCPSIFFAPYSSQWGRSTPLPPFVLVTPMLLPVSIPNSPLGGTVKQRQKGDAEGNMAADWEGRWSYGDGGGKGLFVTYSNLCFHSASTYGLRLTVSTFYRTCLASCSTLVDNHILFI

SEQ ID NO: 139782 - protein, 176 aa, Oryza sativa
  unsure (1)..(176): unsure at all Xaa locations
  Clone ID: PAT_MRT4530_4103C.1.pep
MVLADVSKGAAGADMRGPPVSGIRAPVHRGQGPPRRSTAGPREPTARIGPKPIGRPRGGTAGAWTRXEPWCWAXXGLWRQQPAAPNGGEQPEDGGAHGQWRCTRKGRGAGGGAHXACGPTRQSGRSPAAGRGGGAPRGGNGDGGSAAFREQEPAADAHREARGDESGDDRRTRRDC

SEQ ID NO: 139783 - protein, 296 aa, Oryza sativa
  Clone ID: PAT_MRT4530_41040C.1.pep
MAPAAQVASNPRTVEDIFKDYSARRGALVRALTSDVDEFFGLCDPDKENLCLYGLANGSWEVALPAEEVPPELPEPALGINFARDGMNRRDWLSLVAVHSDSWLVSVAFFFAARLNGNERWRMCLHVHMYPVLFFLFPFFALSELESCVLDVLAVVYWPFYFKKSAYAMSWKRLFNMINDLPTVYEALVDRKHVRDRSGVDSSGKSKHSTKRTGEGQVKRSRVVAEEYEDDDEEHNETFCGTCGGLYNANEFWIGCDICERWFHGKCVRITPAKAEHIKHYKCPDCSSSSSKKTRL

SEQ ID NO: 139784 - protein, 50 aa, Oryza sativa
  Clone ID: PAT_MRT4530_41041C.1.pep
SVMEKVRWCQLVAKAADDDDCGGDYLGTPTMAILEAEDDEDMPLLPESLT

SEQ ID NO: 139785 - protein, 86 aa, Oryza sativa
  Clone ID: PAT_MRT4530_41042C.1.pep
MELEGRNERRGWWWMHASVVSVMEKVRWCQLVAKAADDDDCGGDYLGTPTMAILEAEDDEDMPLLPESLTCRGGELPPYHRDSLRG

SEQ ID NO: 139786 - protein, 168 aa, Oryza sativa
  Clone ID: PAT_MRT4530_41043C.1.pep
MRKLMGEEAHYRPRFEITIYILCFADIEDEDFQCWLNIGLWEYQPRWCKRIKEEDNELVEMESGWAEHHLESFDTKQNLAAYVRALRSCWGFSYEDRLKPHIPVATDRVLPLSLASSYKGMRLVTLQSKEKAARLKSLRAMNKTVENMRTKIGMKNNVIRKLPKNCPY

SEQ ID NO: 139787 - protein, 246 aa, Oryza sativa
  unsure (1)..(246): unsure at all Xaa locations
  Clone ID: PAT_MRT4530_41044C.1.pep
QHHFTQGLFPTPHTTHTLNDIPWDRPIPLSSAPLTSYPISRXFSSPSPSLDTPGGLPSLKPPPPSLYRVSPPPNPTLTLXAPHXTSGPPSRVIPRPXPTYGYDLPPPYSPTHSGRRAESRPPGGFHXDPFWPSPPXIXHPYPPNCPTGYXFWSHPRTLSIXTLPGPSWVTSPHTQSXPGPWXSHPPTGQQVPXLGHSNFPPXPXPNPHPPPTPHTFPHNHIPFGPLXTXPPNTPQPPPTHNFPGGI

SEQ ID NO: 139788 - protein, 80 aa, Oryza sativa
  Clone ID: PAT_MRT4530_41045C.1.pep
AWGWDAVYARVRGEHRLDGLGVLSLRRGTCKICLTADLQKGAVHLHCDNGQKIPDLNFVSSGTPQASCGSYTERCCHAHN

SEQ ID NO: 139789 - protein, 105 aa, Oryza sativa
  unsure (1)..(105): unsure at all Xaa locations
  Clone ID: PAT_MRT4530_41046C.1.pep
SLPFHSQPWPPPSPCPPLPRRHRLPSSPCPPPPPPXPPPPLPVHPAPPPPPPPPAPPAASLLCCLLCLGPDSFESASVLLLPAVLDFAEPGACEESDVPEESDQE

SEQ ID NO: 139790 - protein, 386 aa, Oryza sativa
  Clone ID: PAT_MRT4530_41047C.1.pep
METRPPRAAAPAPARVSRFRRLLVRVSAEPERAGGGGGGEVREKEEKAAEMEVGSVGLDRMVLSFMEDSAAAAVERPPRGRCGSCFNGGGDGSDDEEFDFLPSDSSATAAASAAAAAGDALDALKGLVQSASMAERNLLADASRIAERCRKGGKKKADVRCAVADGLAALGYDAAVCKSRWDKTPSYPAGEHEYIDAVVAAETRLVVEVDFRSEFEVARSTKAYRAALQALPPLFVGTPDRLGQIVAVVAEAARQSLRKKGLHVPPWRKPEYMRAKWLSPQVLRCSDKPPPPPPSPPPTPVSLSSFSGEFELRFDAKTPPNLSATAAGDDNDNDNDDEVEAKKITMVVSPSPWRPVEPEAASKKRSPPPPPRRPEGKVVTGLAAVL

SEQ ID NO: 139791 - protein, 205 aa, Oryza sativa
  Clone ID: PAT_MRT4530_41048C.1.pep
MENQFQDGKEEVIEAWYMDDSEEDQRLPHHREPKEFIPLSKLSELGILSWRLNADDWENDENLKKIREARGYSYMVCISELVDICDVCPEKLPNYEAKLKNFFEEHLHTDEEIRYCLEGSGYFDVRDQNDQWIRVAVKKGGMIVLPAGMYHRFTLDSDNYIKAMRLFVGEPVWTPYNRPHDHLPARKEYVEKIINRGGTQAVEAR

SEQ ID NO: 139792 - protein, 171 aa, Oryza sativa
  unsure (1)..(171): unsure at all Xaa locations
  Clone ID: PAT_MRT4530_41049C.1.pep
AGIRHEGRRRYRLRILNASNARFFRLSLSGGLRFVHVASDSVYLARPVPTRAFLLAPSEIADVVVDFVESGNATAIVLRSDAPAPYPVRTQSDNGGDRAGDERSXIDDDDDALSTEPDTSSVPARLTSPSQYAKPDAREAVLMRRIAMYEYTXEGTDEPTHLYLNARSYMD

SEQ ID NO: 139793 - protein, 1347 aa, Oryza sativa
  Clone ID: PAT_MRT4530_4104C.1.pep
MGRGGGGRWTKEEEEELKAAKRGYREAVAEGNREEEARWANVIGDIHKRRGEYVEALRWLRIDYKVSVKYLPQRHLLPSCQSLGEVHLRLGNFSEALTYQEVTAVFLLPYPRSKGGNHGNRAVTDGNKKHLQLAKEADDLVEQQRASTQLGRTYYEILLRSENDHSAIRNAKKYFKSSMKLARVLKENPSSQKSLFLKELIDAYNNMGMLELELDNYEEAEKLLVQGLKICDEEEVHQYDDARSRLHHNLGNVYIELRNWNRAKGHIEKDIEICRKIRHTQGEAKGFINLGEVHSRVQKYEDAKLCYNKALQITKCLEDEDALMDQIHQNIETVTKAAKVLEEMKIYEQKLKKLVRDTSNARGTSKERKLLLEQYAWLDNLMEKARMITAWPKLKEFSKGQKRVANELHDKEKQSNSLLVIGESYQKLRNFSKARKWCMKSWNMYRSIGNLEGQALAKVNIGNVLDSCGDWAGALQAYEEAYRQCLYAMLLISVEGGLSNVQLDALENMHYSHMVRFDNIEEAKKLQQEIDSLKRMSDQHEARDTVSDYCSETESEDGNVSDNILNTEDNDGNIANNISEEFDDDVVLASLVHKSKSSKTKASKIHSSPKNVDESCDMDGSPEEVVSKSFSNHSGRKRVRVVISDDEAEEAPEIDQSKRTLTGRADSLSTSERIANAANRNRNQHTSHPIETKEVDSVCTPCPAEESICSFKSGSPVCHGNDGPDLGASSIGKLSVSKPAASGSKVGTHASNSRPQCQNAVGLQSSDADHKFWVFKIGELLVYLDANACTCEGAFSIECLKVEVACVYYLQIPDEKRSKGLLPIIGELKCCGKVLDDTDSRDYIDQLASEQKCIDVVIDDWVPKRLMKLYVDFCTKLSEAPNKKLLKKLYNLEVSEDEVIVSDCGLQDLSITPFLDALRLHKTIAVLDLSHNMLGNQTIERLQQIFSSSSQTYGGLTLDLHCNRFGPTALFQICECAVMTNRLEVLNLSGNRLTDACGSYLFTILQKCKECVLCLHIVTALYSLNVEQCSITSRTVQKMADALHEGSALSHLSLGNNNPISGNTMLSLLSKLASLKRFSELSLTGIKLSKLMVDKLISARWNLHWISESASHAFFLENGLKSGLYIHNGCTQPCFPRMECDAIRALLSNPQCSLRSLTLDRCNLGLAGTVGIIQALAGNDQLEELRVAENTNLALQRTLQYDEDAQDVSPGTDQNQRTNAEANDHIDPDKMEVPDSEDEEAVHEDTRAATGPDGSCASSCQRNSSSGCHAIQELADAIISAKQLKVLDLSRNGLSEEDIQSLYSAWASGPRGDGMARKHVAKEVVHFAVDGMNCCGLKPCCRRDLQM

SEQ ID NO: 139794 - protein, 60 aa, Oryza sativa
  Clone ID: PAT_MRT4530_41050C.1.pep
LLINHILIFFYIHLLFIYTTRPDFLIFLLNHKQFLTYLLKFTFLHSITNVRVNKHTLIIH

SEQ ID NO: 139795 - protein, 59 aa, Oryza sativa
  Clone ID: PAT_MRT4530_41051C.1.pep
PQTKSDSRTPKCNRAYFFKENVQSGGMRSILKYLSFLFICETREWRQSKQAAMLYSCRV

SEQ ID NO: 139796 - protein, 611 aa, Oryza sativa
  Clone ID: PAT_MRT4530_41052C.1.pep
MGRWWPPTSAAAATAEPRSVQLLLLGVALVAASFYAGTVFRSPSAPALLLPPSASRSPDPSRTPVCIDGAPKFTNRVSLSYRTKPISVPDYGVDVCPLKYNEYIPCHDASYISQLKKLDRSRHEDLESICPPQEKHLFCLVPPPNDYKIPIRWPTSRDYVWRSNVNHSRLAEVKGGQNWVHEKGKLRWFPGGMGVAAWKAEVEETRLGNMTTNSTGDLRSAGVVQVLDVGCGVASFSAYLLPLDIHTMSFAPKDGHENQIQFALERGIGAMISVLATKQLPYPENAFEMVHCSRCRVDWHENDGILLKEVDRLLRPNGYFVYSAPPAYRKDKDFPVIWEKLMNITTSMCWKLIAKHVQTAIWIKPEDQSCRQKNADTKLLNICDSYDNSPPSWKIPLMNCVRLNKDQSNMQKLPSRPDRLSFYSRSLEMIGVTPEKFAKNNKFWRDQVSMYWSFLGVEKTSIRNVMDMNANIGGFAVALSNDPVWIMNVVPHTMSNTLPVIYDRGLIGSYHDWCEPFSTYPRTYDLLHAFHIFSHYQSRKEDCSLEDIMLEMDRIIRPEGFIIIRDENAILSGINDLAPKFLWDVTTHMLENEESKPEKVLVCRKKFWSIV

SEQ ID NO: 139797 - protein, 108 aa, Oryza sativa
  unsure (1)..(108): unsure at all Xaa locations
  Clone ID: PAT_MRT4530_41053C.1.pep
MGGWRVSVAAGPRGSQATTGGGRRARPAGRTETGXSGAGMRAEMGGGGKAEVKRGGLRAEWPRSSTAAGERTSTAGGGGGHNGGGGRRRSVVAVGELRRPTQPTTLPK

SEQ ID NO: 139798 - protein, 356 aa, Oryza sativa
  Clone ID: PAT_MRT4530_41054C.1.pep
MGVATPTVNTRVQGDGKNAEMESGLHSPSSPFVRATNGGGGGKRIRIASSSSCFANRTYDMAGVISARAGLSHSLSVTQTVPNRPLQASQLATRCTSPSFLSAKLCKTRPLVVVAAMEVSKEAPSADFANRQPSKGVLETWCNADAVCFDVDSTVCLDEGIDELADFCGAGKAVAEWTAKAMTGTVPFEEALAARLSLIKPYLSQVDDCLVKRPPRISPGIADLIKKLKANNTDVFLVSGGFRQMIKPVASELGIPPENIIANQLLFGTSGEYAGFDPTEPTSRSGGKALAVQQIRQNHGYKTLVMIGDGATDLEARQPGGADLFICYAGVQMREAVAAKADWVVIDFQELISELP

SEQ ID NO: 139799 - protein, 1531 aa, Oryza sativa
  Clone ID: PAT_MRT4530_41056C.1.pep
MVASGNQSCLAIDSYAEDIRNQSARNVDEAELVGFSDSKKRLLEMIDTNANDGPAKVICVVGMGGLGKTALSRKIFESEEDIRKNFPCNAWITVSQSFHRIELLKDMIRQLLGPSSLDQLLQELQGKVVVQVHHLSEYLIEELKEKRYFVVLDDLWILHDWNWINEIAFPKNNKKGSQIVITTRNVDLAEKCATASLVYHLDFLQMNDAITLLLRKTNKNHEDMESNKNMQKMVERIVNKCGRLPLAILTIGAVLATKQVSEWEKFYEHLPSELEINPSLEALRRMVTLGYNHLPSHLKPCFLYLSIFPEDFEIKRNRLVGRWIAEGFVRPKVGMTTKDVGESYFNELINRSMIQRSRVGIAGKIKTCRIHDIIRDITVSISRQENFVLLPMGDGSDLVQENTRHIAFHGSMSCKTGLDWSIIRSLAIFGDRPKSLAHAVCPDQLRMLRVLDLEDVTFLITQKDFDHIALLCHLKYLSIGYSSSIYSLPRSIGKLQGLQTLNMPSTYIAALPSEISKLQCLHTLRCIGQFHYDNFSLNHPMKCITNTICLPKVFTPLVSRDDRAKQIAELHMATKSCWSESFGVKVPKGIGKLRDLQVLEYVDIRRTSSRAIKELGQLSKLRKLGVTTNGSTKEKCKILYAAIEKLSSLQSLHVDAVLFSGIIGTLECLDSISSPPPLLRTLRLNGSLEEMPNWIEQLTHLKKFDLRRSKLKEGKTMLILGALPNLMVLYLYRNAYLGEKLVFKTGAFPNLRTLCIYELDQLREIRFEDGSSPLLEKIEIGKCRLESGIIGIIHLPKLKEIPITYGSKVAGLGQLEGEVNTHPNRPVLLMYSDRRYHDLGAEAEGSSIEVQTADPVPDAEGSVTVAVEATDPLPEQEGESSQSQVITLTTNDRNRLVGRWIAEGFVRPKVGMTTKDVGESYFNELINRSMIQRSRVGIAGKIKTCRIHDIIRDITVSISRQENFVLLPMGDGSDLVQENTRHIAFHGSMSCKTGLDWSIIRSLAIFGDRPKSLAHAVCPDQLRMLRVLDLEDVTFLITQKDFDRIALLCHLKYLSIGYLSSIYSLPRSIGKLQGLQTLNMPSTYIAALPSEISKLQCLHTLRCSRKFVSDNFSLDHPMKCITNTICLPKVFTPLVSRDDRAIQIAELHMATKSCWYKSFGVKVPKGIGKLRDLQVLEYVDIRRTSSRAIKELGQLSKLRKLGVMTNGSTKEKYSISSPPPLLRTLVLYGSLEEMPNWIEQLTHLKKIYLLRSKLKEGKTMLILGALPNLMVLDLYRKAYLGEKLVFKTGAFPNLRTLSIYDLDQLREIRFEDGSSPQLEKIEIRFCRLESGIIGIIHLPRLKEISLGYESKVAGLAQLEGEVRTHPNHPVLRMREDRSDHDLACDAEGSPVEVEATDPLPEQEGESSQVITLTSNNRWITKTGFRAVTTCYLPLTNPWDTEQTKVWEMTKLPSNHHWDEIKTVQVWTVKCYDLRTVNSWQQWPSSGDVSNEVDCEREASVNASSSEADHERAGTAWPLPDPLPPPLIFDTM

SEQ ID NO: 139800 - protein, 56 aa, Oryza sativa
  unsure (1)..(56): unsure at all Xaa locations
  Clone ID: PAT_MRT4530_41057C.1.pep
WGRRILTGAAFGGVKIGALCVLNDFMGAIGXRSWYIDRLLQSWFQYFETCEKERAT

SEQ ID NO: 139801 - protein, 81 aa, Oryza sativa
  Clone ID: PAT_MRT4530_41058C.1.pep
MSGSGLVMAEKAIFELSSPPHGGLAAATTTSGGGNVRGGAGTPFLSRTDPATPTPDDEKEDEDEDGGDDDDNEDGGSGLEK

SEQ ID NO: 139802 - protein, 69 aa, Oryza sativa
  Clone ID: PAT_MRT4530_41059C.1.pep
PGPSAAVGWTRRRRCPGARRWCRPSDAWRTVGAGTRRPSSPRRMPLIMRYLACWVLACVSCSVVQQLWC

SEQ ID NO: 139803 - protein, 80 aa, Oryza sativa
  Clone ID: PAT_MRT4530_4105C.1.pep
SLYFIIFFSPFFYPQGENPSTKNRHPFNESTFKYLSITSSGRGGKKGPHTTGDTQSSPGRGKTHPPVFFFSSTSKKKKRG

SEQ ID NO: 139804 - protein, 181 aa, Oryza sativa
  Clone ID: PAT_MRT4530_41060C.1.pep
MEGGPLQAKGLKGRNMQPCVELWASSTSGTPCAGSSIAAGFGPVGWLQRPAWLDHGPASSSGRRRRPGPPEISSRPKVRANLPSPQRLGDREESGKLRRRMNPGLTPGATVGDMGPGISCLEEGGCPPMPRGPPQGELGLRWGGGHSLAETRGRRLPQAPHGPPPRRDRARGQTAAAPSRD

SEQ ID NO: 139805 - protein, 1024 aa, Oryza sativa
  Clone ID: PAT_MRT4530_41061C.1.pep
MIRRRAAAVATLRASLRRTCSHAAGDSEDPLLGLVEPPAPPQPPPRSRLGPRDFEFLREPAAAAAAGALPPPEAVLISKAIRAFGADFDGKAERVLRRCRGFLTDSVVVAVLGAVRDAPELCARFFLWAERQVGYSHTGACYDALADALGFDGRARDAERLLREIGEEDREVLGRLLNVLVRRCCRGGMWNEALEELGRLKDFGYRPSKVTYNALVQVLSSAGQVDLGFRVQKEMSESGFCMDRFTVGCFAHALCKEGRWADALDMIEREDFKLDTVLCTHMISGLMEASYFDEAMSFLHRMRCNSCIPNVVTYRTLLSGFLKKKQLGWCKRIINMMMTEGCNPNPSLFNSLVHSYCNEKDYAYAYKLLNRMTTCGCPPGYVVYNIFIGSICGQEKLPSPDLLDLAEKIYGEMLAANCVLNKVNVANFARCLCGVGKFDKAFQLIKEMMRKGFVPDTSTYSKVITFLCHATKVEKAFLLFQEMKMVGVTPDVYTYTILIDSFCKAGLIEQAQWLFEEMRSVGCSPTVVTYTALIHAYLKAKQVPQANDIFHRMVDAGCRPNDVTYGALVDGLCKAGNISKAFEVYAKLIGTSDSADSDFYFPCEDRHTLAPNVVTYGALVDGLCKAHKVDHAHELLDAMLSSGCEPNHIVYDALIDGFCKAGKIDSAQEVFLQMTKCGYLPSVHTYTSLIDRMFKDGRLDLAMKVLSQMLKDSCTPNVVTYTAMIDGLCRIGESEKALKLLSLMEEKGCSPNVVTYTALIDGLGKAGKIDLSLDLFTQMSRKGCSPNYVTYRVLINHLCAAGLLDKARLLLGEMKQTYWPKYLQGYRCAIQGFSKSFIASLGILEEMESYGTVPIAPVYGMLIDCFSKAGRLEIAMELHKEMMEVPSSVKTDNDMYASLIQALCLASQVEEAFRLYSEMTRRGFVPELSVFVCLIKGLVEVKKWDEALQLCYGICHEVGLLLSYTTQIFLFTFVVIVVGYGKNIEPQVDLGDSFSSFTVSASASNLKTAVICRHSPIKFDSVIL

SEQ ID NO: 139806 - protein, 276 aa, Oryza sativa
  Clone ID: PAT_MRT4530_41062C.1.pep
RRCLLLLPCTCTCSGDLPRRRGPGYRFRLGLRRPPPCRRRRQLVLRLRLCRLARRRRQRARHPGQDPPAQFHGEGVAGGRLPATGEGEGKGEVAMANKAAAGRPYGAHRRRSPASGSDEVDVELVITNTIIAGRRASAGFAIRGMNQGGMGLPEQSRSGEAGGDEEGCNRGVHDFLADGMAAARVVGDPDGGRHLCHSGEEGSHESEVIDGQRGCGEAERPQRARRGDLGRSADCAVGLIQASNVHHDQRLYGAGGGRVVDAVGGGELGGGGGGGA

SEQ ID NO: 139807 - protein, 588 aa, Oryza sativa
  Clone ID: PAT_MRT4530_41063C.1.pep
MAATSSAAAAAPPPCRLLGSGQAHLRLPPSAAAAAASARRRLLLRCAASGGNGKGGGGDGSGSDPVLEERRRRRQAELAARIASGEFTAQGPAWIAPLAVGLAKLGPPGELAAALLTKVAGGGGPEIPQAVGSMSAVTGQAFFIPLYDLFLTYGGIFRLNFGPKSFLIVSDPAIAKHILRDNSKAYSKGILAEILEFVMGTGLIPADGEIWRVRRRAIVPAMHQKYVTAMISLFGYASDRLCQKLDKAATDGEDVEMESLFSRLTLDVIGKAVFNYDFDSLSYDNGIVEAVYVTLREAEMRSTSPIPTWEIPIWKDISPRQKKVNEALALINKTLDELIDICKRLVEEEDLQFHEEYMNEQDPSILHFLLASGDDVSSKQLRDDLMTMLIAGHETSAAVLTWTFYLLSKYPNVMAKLQDEADTVLGDRLPTIEDVKKLKYTTRVINESLRLYPQPPVLIRRSIEEDMLGGYPIGRYLPFGGGPRKCVGDMFATFETVVATAMLVRRFDFQMAPGAPPVEMTTGATIHTTEGLKMTVTRRTKPPVIPNLEMKVISDSPENMSTTTSMPVSAASIASGEDQQGQVSATRI

SEQ ID NO: 139808 - protein, 279 aa, Oryza sativa
  Clone ID: PAT_MRT4530_41064C.1.pep
MAGMKINYHKSEVFTVGLEENETIRVAKMLNCPIGKFPMKYLGLPISPDKILKQDLMFLPHKMEKRLGNWAGPLSYAGRVVHINSCLSSIPSYAMGFYQLPEGRYYWAGNKQGRKYHMVKWADLALPKDFGGLGFTETRLFNTALLAKWLTKIESEDKSLCVELLRKKYLLQGGVFQCSTEGVSQFWTGVLNTRKWMKFGSVWQLGNGTHFYFWLDLWVGSYPLNIAFFEIFKICNQQKVTIAEWRGLSHANEAALMEALTEKLKSAVTNVGATRAGIG

SEQ ID NO: 139809 - protein, 474 aa, Oryza sativa
  Clone ID: PAT_MRT4530_41065C.1.pep
METIDRSPLLLCFSSQISLPHPTAASDARRDQAMDGGGGGGGGGFGLGGLQWTAEEASTIGGIATVSLLHSFIPTHWLPFSIVARAQRWPLSRTLLVTAFGGVLHVVSTALLGITAVTMANTIAGEETVHKLASLLLIVLGGSYILLFALGKGGHGHAHNHPMEKMAVAGLVLVPALSPCATTLPVFLAVGNSSSMMILAIIVLLFSTITVMTSLVALSFYGASQIKFHWVERYDKILVGSVLCLVGVLTYVFHHHDGDEHSLHEHVHRKLLRLRRRHRSMAPGGDGDYYRTLGIERGASKAEVKAAFYRLAPLHHPDRHAASDAAARAAAGGRFRRVYDAYTVLHSDATRAAYDHLPRTATSPPTSRGSGGAAASGSSYGRCFSRPQPPSMKLPVILFFSLVTGSALLVALSRGKNKAANELKSSAEPEILPEARFSWSLIMNDTLRFWERNRRRQSGTLDQTEMISIVEFDK

SEQ ID NO: 139810 - protein, 133 aa, Oryza sativa
  unsure (1)..(133): unsure at all Xaa locations
  Clone ID: PAT_MRT4530_41066C.1.pep
HEKPAWHPRHHGGRSAAPRQGSRPQKLHHWIHEQQTKPPAGAPRAASHPTNKKNQERRRQERQGGVRLPPGRRRAPPPRASXRQAPPWPGRRRARPPRSRAGLAPPRPWPRRPLPASAPPGRRSGVGGETKEA

SEQ ID NO: 139811 - protein, 141 aa, Oryza sativa
  Clone ID: PAT_MRT4530_41067C.1.pep
ERWEGRRWGRKGDNAYERAMVILKGLRKQVEDIPHEVQVVVGGPSQDDPARRVPLVEISCQPPPKSQTKGRTRGPDEEIKLGAKGKKMCTRECGWCGLMDGHYANTCPTNPANFEKIRKASNRGKGKRGRPRGSGRGRGRG

SEQ ID NO: 139812 - protein, 167 aa, Oryza sativa
  Clone ID: PAT_MRT4530_41068C.1.pep
MWDEDQVSQFVIESEIRPWSANLLQRIPQLIKPLQTRSFTYSRGWPPPCTTQPSIVVGVVSAAVRTNANNCSRDKGSGGFGDVPLIVPKLRGGHLLVVVGGGGSGVRANPGWRPLCCRPSSRCSPPAPPTSATHLAKLKEDHAAHLFVHTRDALEAKAAETVQRVAE

SEQ ID NO: 139813 - protein, 41 aa, Oryza sativa
  Clone ID: PAT_MRT4530_41069C.1.pep
SRNIRTGPFHQLKLLLLLHSHYCHQPYLQIKTLKASYSSNH

SEQ ID NO: 139814 - protein, 184 aa, Oryza sativa
  Clone ID: PAT_MRT4530_4106C.1.pep
MASQARWLILCTLQSALRLVMHPLIMHPRINQCKFDREFWVGPCVDLPVVSTPQREDHKSREKALASHAQIAADHHALASFALQVADLQPVFMSFCMDKELMEGTFGNLLRQKPSGNWQKSNSPPTVEYYSRNPHQNSHHDHEQHGVLKYLDLNNLCLVIRAPLFLLPDLLLRLCIVALPLCLG

SEQ ID NO: 139815 - protein, 89 aa, Oryza sativa
  Clone ID: PAT_MRT4530_41070C.1.pep
MGPGSGASNVLGGQAQQSLMDTTSAVAKCRESMVATCLGGGELMVVGLGSSSIYHGRWDRRNDDDLAVPPVPTGLGGSNHDTRLSWQRR

SEQ ID NO: 139816 - protein, 67 aa, Oryza sativa
  Clone ID: PAT_MRT4530_41071C.1.pep
THTRFCHHLKHNKKGIKNFFKKFHPLCLPRIIATLPQPDTPYIIFFVKNHPRDNTQKFFPCDKGFPS

SEQ ID NO: 139817 - protein, 125 aa, Oryza sativa
  Clone ID: PAT_MRT4530_41072C.1.pep
HEARFIRSQTLQSSIPHSKFRVPEIPTFPDASAPSASAPRSSSGEAIRARRPGPTASPSSSSSAASSSSARLRLRLRRDLQRLVAPTRTRSPGAPGTSSRRARRPRGSSPRLTISPASAPSTAAG

SEQ ID NO: 139818 - protein, 59 aa, Oryza sativa
  Clone ID: PAT_MRT4530_41073C.1.pep
SSSSAAAAAGDIWDELKGICSLPPLSPLSPHPHMAFPQLFVIDLAFGQILNSFVLLLLR

SEQ ID NO: 139819 - protein, 210 aa, Oryza sativa
  unsure (1)..(210): unsure at all Xaa locations
  Clone ID: PAT_MRT4530_41074C.1.pep
MARAMYGEWAQQLVVLSVFQAIVXVHAAAVRARGQEGRHRNVRRRRLVLRRVVGGAGGQQRASRGQRWHRRIHASTVIVVTAASGAGKPSLWGAGESGGAAPSSPVDAAARRSLLXAGGHRGEGWRTAAIGDKGDERADSKRNMCMTAYPPPAMAPLQQPTGQAPYTAPPQGNYAPPPPPGYPGNFDVGMNPPQPAQTQSRGDKAFLEGW

SEQ ID NO: 139820 - protein, 271 aa, Oryza sativa
  unsure (1)..(271): unsure at all Xaa locations
  Clone ID: PAT_MRT4530_41075C.1.pep
MILGISSTFSPLESLAKSLWKASESTVAVAREDRRCARQVVAVLVRPFAAVGTRRSIVAVDNPKAGAPRRCLLVADLAARLRAARASPDPLAAAAELKPLLVDPEGSGSSQDEPVAVIGVWARFMSKGGCAIAALAKDLSVSQLSVFQAIVXVHAAAIRAQGXEGRHRNVRXRHLVLQRVVVDDAXASAGAATSTVIVVTAASGAGKPSLWGAGRRTAAIGDKGDDRAPPVAAASGGGGRSKRWTDIFTKKQQLATVAEEKDQPRQKDVGD

SEQ ID NO: 139821 - protein, 157 aa, Oryza sativa
  unsure (1)..(157): unsure at all Xaa locations
  Clone ID: PAT_MRT4530_41076C.1.pep
MASEVVRGRDAXLLKAQADIWRLSLSYLTPLSLRCAVELGIPTAIYRHGGAASAAELVTALSLPSTKLPFLRRLLRLLAASGVFTVDKQSTEEERYRISPVSYLLVDGIPHEDHMNHTALVLTCTSTRYIEAGIGLAEWXKRDLVTSPFEELHGRLC

SEQ ID NO: 139822 - protein, 128 aa, Oryza sativa
  Clone ID: PAT_MRT4530_41077C.1.pep
SGGEGRRGSRAGAGGGLEPEVGAEAEGGPEPELEAEAEVGPEPEVGLEPEVEAEAGPEPEVEAEAESTRGPEAGGERDSHSPAAFSSPTPASMEPLLQVLAAADSTVREGLNTQVQALAEERTTLDAK

SEQ ID NO: 139823 - protein, 379 aa, Oryza sativa
  Clone ID: PAT_MRT4530_41078C.1.pep
MSTSAPTSSPEPPEFIRGSLIPALPDDLAIHCVALLPRAAHPSLALVSRAFHTLLCRDPGPLLAARRRLRLSDPHVILSLRPPASASPLFFLLLPHPGWPPLPLPSPPVPVSSSSSVAVDGNRVFLFGGSVSGVPSPSVQILDPRTRSWSVGPRLSSPREFAAAVAHSGVLFVAGGCVPSSPFWAESLNLSSPDAKWSPVPSPPHFREKWMHGSASLAGKVLAVADRGGLAYDPAAPPTEAWAPVSPILDMGWKGRAAVVGGILYSYDYLGQVKGYDPDTDCWSKVEGLEQELPKFLCGATLANVGELLYLVWEGKWKGKGKAKGKGEARSMVVIDWAAIAVTKAEEGRLTGKVLSRDTIVFKDMPKGSAITHCIALEL

SEQ ID NO: 139824 - protein, 112 aa, Oryza sativa
  Clone ID: PAT_MRT4530_41079C.1.pep
MAWFLASHCRKGHETEPSLLQEQLNDCDLATTNPTTPIPQDATQILIVIATSDTLIIPGSNTCAMDKSLLKTKVDVTLDGTTNGTLFIETIIRQYEKGNAQEKSGWVMRLRV

SEQ ID NO: 139825 - protein, 482 aa, Oryza sativa
  Clone ID: PAT_MRT4530_4107C.1.pep
MDNTGNKGYGNDGSDDSRTQANGNERSINETSPELIQIVVNQTNMLATAFQLLQNWNNPAGATNVQVPTVQQQCKLSEFLKTGPPTFAMAVDPMEASDWLRTVEKKLGLIQCTDQERVGFATHQLVGPASEWWDSYEASRPEGHTITWNEFSSVFRRSHVPAGMITLRKREFRYLKQGDLTVTEYLHEFYRLAHYAPEDVETDEDKQEKFLQGLKDELAVQLLLEDYEDFEKLVDKAMQLESEHNRMTNCKRRIVNIPVIPGGNQRQRTEPLQITGSSVVYQEFLPQEDERNADNNTSNTNADDTTNNHGSCPISDHSNKACNVSSIHQDVNDSINVGTQNDNLSNFDSEKDSNGDSNNGTTDANVSKDFQPPIPTPSQNDRSQTDNSAKKTLICYNCKEPGHFSRDCPQPKRNLRHHSGHYARRRQVTRLVVTGANAVPVSRKGSKPKDLIVTRSIHNSRSEEYLVDKVDSKDMNYAKFWN

SEQ ID NO: 139826 - protein, 1093 aa, Oryza sativa
  Clone ID: PAT_MRT4530_41080C.1.pep
MEAAGSTRTASEEGAAAAMEAAGSTRTASEEDSGASARVTALTNDPDTDELTVKWLHENMEPLRGGDQARYRLNQFADLKKTLSDTATKTIDRLGFGSFLGINMEMLPDKQFAIWTASLCKPAKVQNKDVVVLDLDPKHPLVISQEALHILTGLPMGQEDVPENLPASTTTVKEALSAASGKSNNFVLADAIKASENARDNNDHMLQVKLFIGVVFNFAIFTTTSLYFTAESMTAVSEINKLVKTNWCEKLIAHMNKCLKTFHSGQKVSSPVSFVLFFLENINFTATTEENDIETPRLNHYTEEKVISMIDAIKKGVKLKDWKDTVFGQQEILEVQANDIEYIENYKQSVKKRRGNEDQDQGPWKKISKGHLKKTTSKDQGLLKKGIATKKRKVEDQGPLKKTIRSNKESNDEINIRADVGRDVLRHTRSMFSTELKTKIKINILDHEVSERNYVECFKQQGYMNTSIMFIQCALWNQEWKGQAMDKVILSQKAMYELLDPEHGTSTLADELGQQANLCKIIVHRTDKIFIPVLHEKHWFLIVISRKKDTIYILDSLPCKSREAVICGILETLQKLGKESIAGSQYICEVLDVQRQGNNYDCGFHVLLYIKEFDDTQAVQICEINKDMVEKIRIETAVDLVNHKLNKRDEEEKISYDDDDDVELVDEKFSYSNFVLSSFLHRDRDDAGLDDAGFDGGEIFGGSSSPVVDPSENQQERAASREDSKADMNENQQERAASSPGAASRENSQAGASAVYSTPKLDGSGNSEPASGEAADMKRTAKPDKLYCRQPKEKAEEEPVSSAVQEEPKEKPEELVSSAVQPSSTQRPRRTADPFGHYKPTRQLLKGEILELVHQLAIGCKEQVILEFEEISMTGSRLEQSLQGGADARDLIILLMKVLDKYPYNQRKRIFLSPVEKDGQDLEKMIVDALPVLRSGSRTTTLKETTIYCPVLFQGEWIVACCVFSSSNQVHVFCHKDTLASVKPFCIDLGAKANSALKRCGYNQVKFPDRKVAYTGTNIKVNDSAFASMYFIENFGTSGEIHFNRFLEKNDEVKDEFIKDVKLGLLPYLLNHKNNTGTVPNEISELIKKNKRT

SEQ ID NO: 139827 - protein, 682 aa, Oryza sativa
  unsure (1)..(682): unsure at all Xaa locations
  Clone ID: PAT_MRT4530_41081C.1.pep
GFCRRNTCKCTVLGNPEIKSVASRRGYSRPPSPPRGGGAECATDHSPAGHKRPAEPEAGRKKKRLRKIGQTEPCRGSFIEPPKWTFNRPPXEIPSQGISGSDPSHGQSGSGQSKATGSSQPRGGAQKSHTRPNLKRPSGGTRPTAGVRSGDAPPEGGSGTRAHAEHYPGSGGEGRRGSRAGAGGGLEPEVGAEAEGGPEPELEAEAEVGPEPEVGLEPEVEAEAGPEPEVEAEAESTRGPEAGGERDSHSPWRLGRPRGWSXQKGGREQPRVSRRIQQYPVVPGADRGLFLPDSGEHGATSAGARRRXSTEGHRAVDDMVKVGRKMRQAQLAKIQAREEVLDSIMRETEEERQAALIASSVLNEALGDIRLQYEAHAEDLAKRIRDACGVLDAAAAHERRASEAEASLQARTTALGAERKALDDRARSAQELEATIRRWIEVLDRNQREQKTCGEEQTGRAQELEERARLLDQRESTLAAHERTAAKVEASLRLREEAAAERDRITLAAKASADRRAEELRLREEACREQDAALAEREAEVSHRDVASFWLSEQLASREEAVAGCEARHLESARAERAAIAAKASELEAREKDLTASGPDXDAELASQLATVRSTLADLERLVQDQAGEIAALRLTNELGPRQLSDAVNRLERAGRRVGISARRDSKLPPTXPALALLLDGL

SEQ ID NO: 139828 - protein, 60 aa, Oryza sativa
  Clone ID: PAT_MRT4530_41082C.1.pep
SVVSNIVKCLYHLVAQLLCILVLGLQDHFHVNSVLRVDFMVRTTVRLGPRVRLSVRLRVL

SEQ ID NO: 139829 - protein, 79 aa, Oryza sativa
  Clone ID: PAT_MRT4530_41083C.1.pep
MKMKKIVGDDKRNQHDEDDDVSDPVNSSVATNDNDEDAHQRLHSRDVRANEVEVLVMKSVTIIHQIGVIAVVDASLGGK

SEQ ID NO: 139830 - protein, 136 aa, Oryza sativa
  unsure (1)..(136): unsure at all Xaa locations
  Clone ID: PAT_MRT4530_41084C.1.pep
FILRGGQAPPAPAPLPPGGAASRRHRRFLPTALPQVPPLPPHAAPTFFVPPPPPLRFAAPAPTPPQYAITSRPSPHVHLNSRPSPXPPPPAPATLAPSPPPPPPPPSPTPPHTXDACSSSRQPQPLHPQSLPKKSG

SEQ ID NO: 139831 - protein, 473 aa, Oryza sativa
  Clone ID: PAT_MRT4530_41085C.1.pep
TRPRPRAAACPPARRRPGPAPTASPPAMEGAEAEERRLAASLTARYSDWVVEALDELPGSFILTDPAMPGHPIVYASRGLASLTGYPPREVLGRNARLFQGADTDRAAVAGVREAVRGQRPHQVSILNYRRDGEAHWVLLHLAPVFHASDGRVLHFLAVQVPIAPPASRRRTPPCRAARPFVVFAACREEARVEEECPCASHAGEVFVDVDKRGQDAEEPRVASEHEKEKALSTANSIFSALNRYSKLTGLVVCGKRCDSVGIPALSSSLNLSLGRIKQSFVLTDPHLPDMPIIYASDAFLSLTGYSREEILGCNCRFLNGPGTSVEVLEQINQHICSEQACTVHLLNYRKGGSSFRDLLHISPIRNASGKVAFHVWVHLDEGAKYDFNGLTPEVWQLGAVGAVRRTVASRMSCQDGHTTRRSINISIAPLGEQRTDMTDEQKLPRRANLPSTHVHVVVAPPLTPREGKMMGK

SEQ ID NO: 139832 - protein, 403 aa, Oryza sativa
  Clone ID: PAT_MRT4530_41086C.1.pep
MASRVHPLLVAFLVVLLVGTCQARPAPGKAASSSSSGVVDGITAIYNFGDSISDTGNYLREGAAAGAMMEHTVAPPYGAAIGGATGRCSDGYLMIDYLAKDLGLPLLNPYLDKGADFTHGVNFAVTGATALDAAALARIGVAAPHTNSSLSVQLQWFRDFMSATTKSPAEVRDKLASSLVMVGEIGGNDYNYAFAANRPRPGGRSAADVGRMVTGVVESVVLVPEVVRSVVGAAREVLEMGATRVVIPGNFPLGCAPSYLAAVDETERAAYDGNGCLVGLNLFAQMHNVLLQQGIRELRRSYPEATVAYADYFGAYVRMLERAREMGFDGTALTNACCGAGGGKYNFEMERMCGAGGTAVCARPEERISWDGVHLTQRAYSVMAELLYHKGFASPAPVKFPHQ

SEQ ID NO: 139833 - protein, 153 aa, Oryza sativa
  Clone ID: PAT_MRT4530_41087C.1.pep
MASRPVHPILVAFLALLLVGTCQARPAPGKAASSSLSSAAKGAVVDGITDIYNFGDSISDTGNFLALMEHTVAPPYRWCGRVVSAAREVLEMSATRVVIPGNFPLGCAPSYLAAVDETERAAYDGNGCLVGLNLFAQMHNVLLQQGIRELRRS

SEQ ID NO: 139834 - protein, 77 aa, Oryza sativa
  unsure (1)..(77): unsure at all Xaa locations
  Clone ID: PAT_MRT4530_41088C.1.pep
PNXXTDSAYIKAICPNIIPDSAYITDITNKGRLVISCAWSMLACICGTEQCRKRQKITKASLSSGEFLSANLRRVFG

SEQ ID NO: 139835 - protein, 52 aa, Oryza sativa
  Clone ID: PAT_MRT4530_41089C.1.pep
MAFNKMRGLLQQVDPTTISGEVWRPKDKQSELEIETTKTSFYRKESMTLWPC

SEQ ID NO: 139836 - protein, 226 aa, Oryza sativa
  unsure (1)..(226): unsure at all Xaa locations
  Clone ID: PAT_MRT4530_4108C.1.pep
TGGEIHSQVGVETSRDEPGLARLVKAWCKGSSAWLGSHSLCDFVEWVDTMNPQRDRARPYPCSEPLSDYLRRKDEYERXKTAKSLQWQVNPLGLPTXRERPECRCGDRCQVIRSVRQRTLGQRCFVCLSLLLSYTYICQRSLISEWSDHPKCSCRDRCQVATSFSQDTYGRRYFVFPPSFPLPRERRRPPRVRRRLRLPPPPSRRSPPSPRAAGHRRRSCAVVASP

SEQ ID NO: 139837 - protein, 202 aa, Oryza sativa
  unsure (1)..(202): unsure at all Xaa locations
  Clone ID: PAT_MRT4530_41090C.1.pep
MAAARPCLSSPAPTPPPPPLLPGADAAGHGRRRPRRSFPPPPPPPAPLLPGADAAGRGRRRSRRSSPAPTPPPPPLLPGADAAGHGRRRPRRSSPAPXLGSSPCSLSLLSPKLTSLTSWLELSNEPSRAGMGVRRGRRIPSIRRRRRWARRCAARSAAPVDLAAAQWRCCRRRVSRVGGSRRNGCGMEGPRWVGMLAEGADQ

SEQ ID NO: 139838 - protein, 138 aa, Oryza sativa
  Clone ID: PAT_MRT4530_41091C.1.pep
MAAARPCLSSPAPTPPPPPLLPGADAAGHGRRRPRRSFPPPPPPPAPLLPGADAAGRGRRRSRRSSPALTQPTVDAAARAGPPRRRHRRGRRWPRRSSPAPLLGSSPCSLSLLSPKLTSLTSWLELSNEPSRAGFLAR

SEQ ID NO: 139839 - protein, 81 aa, Oryza sativa
  unsure (1)..(81): unsure at all Xaa locations
  Clone ID: PAT_MRT4530_41092C.1.pep
RIHSHISSCSTDGADTHMYIVHPDDQKLGPAWXACIGIGXGTGIRSACTAQGQVTQHGMHSLGPDLGRSLXARGXRIGTGS

SEQ ID NO: 139840 - protein, 198 aa, Oryza sativa
  Clone ID: PAT_MRT4530_41093C.1.pep
MAAAAMILPLLLLLCWFLLLSVGDAMCWFNDDASASAPAGWLVSWTNGMGWYKGMPREFVDGHNQLRARYGLQPMRWDNKLARQARRWSDAMRGDCQIRHSTGNSFAESLYIGRNGWNARASDAVRCWGDEEHLYDRDTGKCTAGVDFHECGHFAFMVRPNFTRIGCARAECFNGGVFITCNYFKDEQHQPATPPTYS

SEQ ID NO: 139841 - protein, 37 aa, Oryza sativa
  Clone ID: PAT_MRT4530_41094C.1.pep
LRLCPVKMGGDWLITRNFTMRMSRCDSFFTTKSGAGF

SEQ ID NO: 139842 - protein, 64 aa, Oryza sativa
  Clone ID: PAT_MRT4530_41095C.1.pep
AERICSHALRPAVVVYLIELPSSSSDGYHSQCCVKARSRARHTDACNMMPRAYLHPSTMKFWFC

SEQ ID NO: 139843 - protein, 238 aa, Oryza sativa
  unsure (1)..(238): unsure at all Xaa locations
  Clone ID: PAT_MRT4530_41096C.1.pep
PTRVIVAKLATQATQQLRLHCDVTRTPKXTNRFDTNEGHQPKLPRSHFXHTASTNNPIXRLQCAIVLLGNNQKXWSPAAEQDTKPTTKASSNSLGXRASEPLQESTNGHRCTRKVLGARRAQRXITPPRSGTVPNGVVVVKMAHGLARLSPTIPNQSPKQPSCTMKRPSLDHRANPSTSKPNPPPRSSTWLAPPSPRPKLKHSGEGRGGGRRRRGCLAGNREQTLHLLTASLLAAISR

SEQ ID NO: 139844 - protein, 73 aa, Oryza sativa
  unsure (1)..(73): unsure at all Xaa locations
  Clone ID: PAT_MRT4530_41097C.1.pep
LLDSKAMYDMCARSLDMERQTYTNLTRLSIPGHTXLTACLRLDDALNVVVNEVQTNLVPYLRIQYMLSCLRSR

SEQ ID NO: 139845 - protein, 1817 aa, Oryza sativa
  Clone ID: PAT_MRT4530_41098C.1.pep
MEKSGRRPSRSCTRSPVRLGSSPSSFPPVVALVPDGCRVRDSPLSTVEGGAIGGKDLNAEEEEDVQTSQSDISTGNGHRPVRERRPNPRVLGPEWVARRRRRLDPVGSERKYHIVATISHISELFLRVPNNLVSEPFALQNPLGLAVKFPGERWDPATLVACDPQKLRLPQSENERKREEAEVRTRAEYLDLKKSVESRIPAVEKRVEDLGASLQSLSTKVEHLEGSLMRHTKLEPDASTAKTGGSGIIKEEQNQPNTDLTSPSFGMNENFSLSRAPFGFEPRTPSLDSGIASYNLSSTIPPMTCPQFCGDNPQMWKVNCEQYFDVFGIQQIHWVKIATLNFCGNAAFWLQSVRNQLGGITWVGLCDLVCSRFSKDRQQALIRQWFHIRQDGSVAEYVEKFDSLMHQLLAYDNSLLPVYFVTKFVEGLRSDIRVVVLVQRPQDMDSACAVALLQEEALEGVQSTQYKKPDTSIPIRNSHKGAGVLPSTLPPKQLLSPQSEDRRGTESARARDDKLSALKAYRRSKGLCFTCGERWSRDHKCSTAVQLHVVQELLDALQDVKTVEVSDGEQFLHCEDTSDLMAISQQAIWGTESPNSFRLRGWVQGTELLMLVDSGSTHSFMEESIGLKLAGVKPLRSKLSVKLADGETLSCSYEVTNCRWWMQGHNFINNFRLLNLGGYDIILGMDWLEQFSPMQVNWVDKWMDITISGQPVRLQGIVSQVSHCSPISTEQCLGMVRQGSLMYLVQLTSSDPVTKEPIPAAVQQLIDSFQAVFAEPNGLPPKRYCDHTIPLVPGAAPVNLRPYRFNPALKDEIEQQISDMLKSGVIQPSHSAFSSPALLVKKKDGTWRLVIDYRKLNAITVKGTYPMPVIDELLDELAHAKWFTKLDLRAGYHQIRMAPGEEYKTAFQTHTGHYEYTVMSFGLTGAPATFQGAMNETLSPVLRKFALVFFDDILIYSPDFSSHLDHIAQVLSLLSKHQWYVKLSKCSFAQKQLTYLGHTISAAGVHTDQGKIQEVVNWKVPTTVKKLRGFLGLAGYYRKFVKGFGVISKPLTNLLRKGVPFIWTPETDAAFHNLKQALVSAPVLALPDFQKVFTVETDASDSGIGAVLSQDGHPVAYISKALGPRTKGLSTYEKECMAVLLAVDQWRSYLQLGDFIILTDHHSLMHLSDQRLHTPWQHKAFTKLLGLSYKICYRRGSHNGAADALSRKFQHDEEELCHISACTPTWLQEVTTGYASDSYSSQLLTELTVQPNARKHFSLHAGLLKYKGRIWIGNNRQLQLKLLTEVHSNPIGGHSGFPVTYRKLKQLFAWPSMKKMTKLFVQQCQICLQAKPDRAKYPGLLQPLPVPEGAWQVVSLDFIEDGQTERVNQCLEIYLRCFVHSAPSKWAAWLHLAEYWYNTSYHSAVQSTPFEVLYGHSPCHFGISLQDCAIPDLHVWLKERQLMQKLVQQHLHRAQQQMKHFADKKRSFRTFAIGDWVYLKLQPYVQTSVAVRANHKLAFKYFGPFQITAQIGTVAYKLQLPPTSSIHPVFHVSQLKSATGFTGHVQSHLPSSISALQVPWRILDRRLAKKGNSTISQVLVQWSESPPEDATWEDYEELHARFPAALAWGQANSQGVGLVRDSPLSTVEGGAIGGKDLNAEEEEDVQTSQSDISTGNGHRPVRERRPNPRVLGPEWVAADNDKLLRPLAVHGARHGHADDERVGQRGQREAGDGPATAQPPLLMNRAQTPMTAMGSSGLDSDPLGSTKRGLSSAEAARGSGEARAARSRAARSGYEEAAARCSCRSWSSSRAARRRSERPGDEESGASAKAREERGER

SEQ ID NO: 139846 - protein, 167 aa, Oryza sativa
  Clone ID: PAT_MRT4530_41099C.1.pep
GDECVFVHLPPPTGGCSLRRPPSRKSPAAAPSSSWADVVRAPRAGPPTLSQRDIEAGWCVVKRRSKSSSAGPTTAISPPASARPIPRWLQGRCFCCLGLGHLKAACKEPRRCYRCWYPGHLERDCKEGSSPKRAAGTAAATLAKAAQIATAKKGGAPLTARLAKKGG

SEQ ID NO: 139847 - protein, 137 aa, Oryza sativa
  Clone ID: PAT_MRT4530_4109C.1.pep
MDDMYAIRGEAIDRSKLRPRPDVDDDAAGRRRRRLVEELDAVGDGLVVVRVQRVQVRAARPLRRVAAAASTVVVVVVVVDGGGGEGDRRRPRREGEEADEHLPESVHDPGRPPHLGLAVMRMRCFPPKALCLKPRHE

SEQ ID NO: 139848 - protein, 232 aa, Oryza sativa
  Clone ID: PAT_MRT4530_410C.1.pep
KNKVLVLIDFIFIFIIINNNKTNYITTYRTITHELSSSSSLSRLPSVTVKVQCSSWPEEGWVRAAGALEGGVLEVLRCALERVLPRQREDLLVGGDEVCHPSRRADDQRLTRRVDVGLRPWQHPHARQRWDGGCHRRHRRSLGSGERRLSGAALGECELLIQVGTSHRRHLLLLLLLQQQPTKNNEKQRGISYNCLNLFLSSFSWLALPREQEAVYFIGVRGDRGVDGIPAG

SEQ ID NO: 139849 - protein, 374 aa, Oryza sativa
  Clone ID: PAT_MRT4530_41100C.1.pep
MDTSSRSLKPFAASSIDGGVASTKPAAAPVVARFGMLTRFHAGYFRISLALSGQALLWRTLSDASTDPRALGPVVRSLPSAAFVLLWSLALLTLVALCALYAARCLLRFPAVRAEFRHHVAMNYLFAPWISWLLLLQAAPPLLLRPDARPYRALWWAFSLPILALDVKVYGQWFTRGRKFLSMVANPASHITVIGNLVTARAAARMGWHEGAVAMFAVGAAHYLVLFVTLYQRFLGSDSLPAMLRPVFFLFFAAPSMASLAWDAISASFDTCCKMLFFLSLFLFASLVSRPTLFKRAMRRFSVAWWAYSFPLTVLALAAAEYAQEVREVAASVLMLALAILSVAVTLALMVFTVLRTNDLLPHDDPFSCPPLAR

SEQ ID NO: 139850 - protein, 90 aa, Oryza sativa
  unsure (1)..(90): unsure at all Xaa locations
  Clone ID: PAT_MRT4530_41101C.1.pep
EDATWEDYEELHARFPAALAWGQANSQGVGLVRDSPLSTVXGGAIGGKDLNAEEEEDVQTSQSDISTGNGHRPVRERRPNPRVLGPEWVA

SEQ ID NO: 139851 - protein, 394 aa, Oryza sativa
  Clone ID: PAT_MRT4530_41102C.1.pep
MHASILIKEMKGNIEREFTCVYAHVKYIDVKSESYLLGPKGRSLWHRQHDHGVFEHGPRAFGLPHRCGRNCGSEALEMGINTRGDFLESPSQTKGISSSKASPTASSPPATSSKAAGAPRRCLLVADLAARLRAARALPDPLVAAAELKPLLVDPEGSGSSQDEPVAVIGVWARFMSKGGCAVRRCSITSFSLSTLTNSLVVGVRHPLASRMHEANCHTKIMLTVVQLSVFQAIVCFTLHAAAVRARGQEGRHRNVRRRRLILRRAKDVEASAGAAASTVIVVTAVSGAGKPSLWGAGESGGAAPSSPAGGHQGEGQRMAAIGDKGDDRWEGARRALWSTGERVQERDGRRPLFAISAAAVVAREIKGGEMGRERKQKRMGRHVGPTWAPPFFY

SEQ ID NO: 139852 - protein, 175 aa, Oryza sativa
  Clone ID: PAT_MRT4530_41103C.1.pep
METPGPEPKAATTVEVSDEEEVKAIAADAGSVTGEGKRLDAAAAATASTAGGDGGEEEKPPVMVQMPLNTIAAILSLKREPRPMPEDLARLSPEERDERLAFFDSWEEVNDEFEEFQKEILREVKETGRYMVHQSYFTEQAEMQARMEKEWAEIDWTGVKFGDWDYDDPTCCQPL

SEQ ID NO: 139853 - protein, 53 aa, Oryza sativa
  Clone ID: PAT_MRT4530_41104C.1.pep
SILFVLNNFVGLTVPNKNCQEFPLPISFLLINVSPLVAPIMMQLAVKGIAKPE

SEQ ID NO: 139854 - protein, 60 aa, Oryza sativa
  Clone ID: PAT_MRT4530_41105C.1.pep
YRQKQICLDSPLWLRWKLDQRVIGLREVLIEVQYESLGTYREIYAHYLVVGNRKKEIRVD

SEQ ID NO: 139855 - protein, 104 aa, Oryza sativa
  unsure (1)..(104): unsure at all Xaa locations
  Clone ID: PAT_MRT4530_41106C.1.pep
MVADGCQWQLVEAGKVTGGGEETGGGCGHGVDDLKWATATARGGTDGHGRLAGEAWQKTAFGRRGSDGRSDRRPARRVEARPVAAEAGTARXEARPAGEAGLAR

SEQ ID NO: 139856 - protein, 390 aa, Oryza sativa
  Clone ID: PAT_MRT4530_41107C.1.pep
MGPTCQSSSSSLSPFSLFLSISPLLPIRPVGERAARASGQPSSTSVGRRRRTAGVHRRSQRRTDEGSGGGHWGAVEPERRRPSELLGRRQHRVGGGQAVERRGAHEQDDPRPSPAASSSPPVPVASSLTTTPRAVRDHAGNREDGDDERRQVAAAVPLVLPLPRATAVLAADCLPRSGSDAVSRPLARRPKGKKGKERERREIERRKRTDMWAPHAPRGATSAKLPPKTGEGVKLHRFCKFGGSRFLAVEGYNLDSVADLYGPPGEEKAEELGIVIRVHIGSLLMLGSNIPKRQSSSHYQYLIIVLISLPVPYHLIRSHLLSSPAFPLTIYRPTALLLLLLNTTTSYCPLYLEYSSLMILESSANSAAYRWLHQCGWMLIVVIRIILFGC

SEQ ID NO: 139857 - protein, 314 aa, Oryza sativa
  unsure (1)..(314): unsure at all Xaa locations
  Clone ID: PAT_MRT4530_41108C.1.pep
WPASCSPTSSAPRRGSGGGAGSAARSWCGATPAAAAAAAEVEVENTRTATSCSTPRGRTWRRGSTRATCAAWGSRCPRPREEGDGGRDGWRARLFIEPGDSTTDVFDGVEFTWQSVPLAAATGGAEKKAKGGDREFLLELSFDADAEHTATAMDRYVPFVMETARETQRNSTASTDQHQASTTIIXLDRCKVTLSGLLNLIDGLWSATSDERVIVFTTNYKERLLRPGRMDMHVYMGYCGWEAFKTLAHNYFLVDDHPLFPEIRQLLAGVEATPAEVSEMLLRCEDAGVALRGLAELLKEKKKQEARRDGQQQQ

SEQ ID NO: 139858 - protein, 41 aa, Oryza sativa
  unsure (1)..(41): unsure at all Xaa locations
  Clone ID: PAT_MRT4530_41109C.1.pep
HLLLMVLFVFXSLANISRCLSWSSITGPGXFNCGMRFQEKK

SEQ ID NO: 139859 - protein, 104 aa, Oryza sativa
  unsure (1)..(104): unsure at all Xaa locations
  Clone ID: PAT_MRT4530_4110C.1.pep
DLRPVLSAHRDRFPPRRRLLRLRRTVAVAVHPLVELVDRRSAAVPVDPSRAAAFLRFGRLFRRRRRPRLRRAQARRLPPTAXRGCLRARRAAAAWGPAVSRPRP

SEQ ID NO: 139860 - protein, 188 aa, Oryza sativa
  unsure (1)..(188): unsure at all Xaa locations
  Clone ID: PAT_MRT4530_41110C.1.pep
MADLFPGFDLNEPAAEHGNGFDLNLPLXEYGAFDFDFVQNIAVFFFLLLEPNHRKKEMTEEVRKQVYQVLLAKSKNGTLGNTDTRIVANQFGLHIRSVQLWLXSRKKGRCGHKAIPLDLKQLRNIPLKXRMTIEDVSSKLGINKARIQRYLKKGLLRRHSSPVRPRLSPDPPKKGRKKTGRKKKTKIV

SEQ ID NO: 139861 - protein, 225 aa, Oryza sativa
  unsure (1)..(225): unsure at all Xaa locations
  Clone ID: PAT_MRT4530_41111C.1.pep
MCPLSGAVLLLGVRGEHGELEDGLRQSTDVLIVAVRSVRYVRYCCAAVPFTISSCSGCGPHLLCPQKTLXRIAPVSCNKFDSDYAKFLRETSKDRCDYGPPEYRCRLCAAQFWYQERCKKDSAITKRRHIRQYNSLFTFTSMGADIDDSLNQGGGPYVFKINGQVYHRIGSLLPNEDNPPKFAQLYIYDTQNEVQNRMLAVLGEENGSCDLDPEIAAELLDMLDN

SEQ ID NO: 139862 - protein, 87 aa, Oryza sativa
  unsure (1)..(87): unsure at all Xaa locations
  Clone ID: PAT_MRT4530_41112C.1.pep
TRVLVLIVAVRSVRYVRYCCAAVPFTISSCSGCGPHLLCPYMSAKMAXRLLCDISXASRGWKIRAKIARMWDYTGTADDLPXIHXDL

SEQ ID NO: 139863 - protein, 1827 aa, Oryza sativa
  Clone ID: PAT_MRT4530_41113C.1.pep
MARHGWATAMHRGYGIHPRRGSPSLPSRCGQRGRGGRWWLRFHYLPDPAGGKGEGGGGGSPPSPGLARRRGEGGGGSPSSQARVFECVRGSLGGASVGACSHHSRCSDWAIVVYASRVSSLREGPTSAASVRCTHHHSSFEGGTENSSMPSQWQPVIGAARCLLSRSGCGPHLLCPYMSAKILYLFLGGKIKSSVACLASSSNSAASEYVWETVAPPHQETSKDRCDYGPPEYRCRMCAAQFWYQEQCKKDSAITKRRVCYNLCCKGGKIFVPPFAQPPEPLNSLLKFDGDARSKHFLQHIRQYNSLFSFTSMGADIDDSLNQGGGPYVFKINGQVYHRIGSLLPNEDNPPKFAQLYIYDTQNEVQNRMLAVLGEENGSCDLDPEIAAELLDMLDNCNPLVKQFRLTRDRLAEHGDEQVAIKISIPGPLHHVSSLHPAYMALQYPLLFPYGERGFQLGINLRGVDLNRTDIRTKASMQEHYCYCCHYRRDQFNPYLCCGRLSSQSQVDGFVCFEEGRLTFIDEHQGDFRCEHVQGIADAVAKGCLDGNSVGKRRILPASFTGGRRYMYQNYQDAAAICRVYGAPDVFTTFTCNPKWPEIEEALRIEPGQRSTDCSDIVCRVFKMKLDEMVSDIMAGVPFGRRDAPSTDATPFVVDTYISAELPDPNENELDYLLVEEFMMHGPCGDANRKCACMKNGVCSKKYPKDFASETTVDDKGFIVYRRRDNGRFAYKNNVKLDNRSVVPYNIALLRKFEAHINVEWCNKSKMIKYLFKYVTKGSDHANIKFTKSEAYFMRMLIMYVKGTRSYEDIRTYDGVVYDTFKEACAARGLLVDDREWSYAFDEADSWASSGQLRSLFVLMIVIVQALNNSSYSVPDAQLRNMVLQELHTLFVRNGVSMSSFNLPSINCDSSFQSANRLIDDEMSYDIDNLCVNAPLLYDQLNVDQRNAYDRIVQSVMTKSPAFYFVSGYGGTGKTFLWNCIVTYLRSQKKIVLAVASSGVAPLLLPGGRTAHSRFKIPIEVDESTICHIKRVVVLGGDFRQILPVVEGGIRSKTIDAAISRSPLWSHVSILELSINMRLRSSSLSPEVQHEIADFSDWILCIGDGTTAASARDTDTEPTWVDIPHDLLVMDNDDKIGAIISAVYTDFAEHYSDPIYLQDRAIVSPTNDICGTINSRVLELVPDEMKEYLNFDSLAKTNEKCDDLDVLYPIEFLNSIKVNNYPDHQLCLKKGVPIMLLRNLDQSAGLCNGTRMIVTNLGDRVIEARIITGSNIGQTVYIPRITLSANNKKWPFTLQRRQFPVRVCYAMTINKSQGQSLCSVGIYLKSPIFSHGQLYVALSRVTSRAGLKMAFDLLCDISLASRGWKIRARIARMWDYTGTANDVPPMHVDLVLVDEKGNAMYAEIPGVEADKFRPLLQESKVYTFSKFLVLPSKPAYKPFPNKYMIKLTPWTNVEQVNEVPADFPSHVFNLVQFSDLSQRVGMQEYFTDVIGMIIGVSKLAYVRMASKTSDTPKRVIALRDLANCEVKLVLWGEHALDFDADAVHSVGQDNVVVGIFVGTLMKAYNKTLSGGSACKWYLNEDIPEINQFFDSLGDSAPKIQWISAGAKSFGSSQRPAQLEHKSVADLKKIDPWEAAKFTFAVSVTERSLMHRNISFQVNGIETFFGRQGSIPQPREQGPSAGPSTPLALVASGMNKDDASQSHELTPVNSSTSTADPVDELPGDSKKRKSIVRHPLAAQKKLTFETAPSSKENTSPVDPPASSSRTDDQAADKQHAVPHEVDVSQIAAASAEPNTQVKDILPTEAKKKSVDPGSTGTRKTKPPVPKGN

SEQ ID NO: 139864 - protein, 77 aa, Oryza sativa
  unsure (1)..(77): unsure at all Xaa locations
  Clone ID: PAT_MRT4530_41114C.1.pep
SSPTNTKIVTNLYTPIKNPYDQREKEKLFLRKDRTNTAPIRAHCQGGKKKERPKKQRXFQERMGFFFFWPPIXPGLF

SEQ ID NO: 139865 - protein, 1802 aa, Oryza sativa
  unsure (1)..(1802): unsure at all Xaa locations
  Clone ID: PAT_MRT4530_41115C.1.pep
MWFICIFESFLKCISVLIVAVRSVRYVRYCCAAVPFTISSCSGCGPHLLCPYMSAKILYLFLGGKIKSSVACLASSSNSAASEYVWETVAPPRQETSKDRCDYGPPEYRCRLCAAQFWYQERCKKDSAITKRRVCYNLCCKGGKIFVPPFAQPPEPLNSLLKFDGDARSKHFLQHIRQYNSLFTFTSMGADIDDSLNQGGGPYVFKINGQVYHRIGSLLPNEDNPPKFAQLYIYDTQNEVQNRMLAVLGEENGSCDLDPEIAAELLDMLDNCNPLVKQFRLARDRLAEHGDEQLAIKIVGGRACSSIPGPLHHVSSLHPAYMALQYPLLFPYGERGFQLGINLRGVDLNRTDIRTKASMQEHYCYCCHYRRDQFNPYLCCGRLSSQSQVDGFACVDEGRLTFIDEHQGDFRCEHVQGIADAVAKGCLDGNSVGKRRILPASFTGGRRYMYQNYQDAVAICRVYGAPDVFTTFTCNPKWPEIEEALRFEPGQRSTDRSDIVCRVFKMKLDEMVSDIMAGVPFGXLLYSVEFQKRGLPHVHIXWRDAPSTDATPSVVDTYISAELPDPNENELDYLLVEEFMMHGPCGDANRKCACMKNGVCSKKYPKDFASETTVDDKGFIVYRRRDNGRFAYKNNVKLDNRSVVPYNIALLRKFEAHINVEWCNKSKMIKYLFKYVTKGSDHANIKFTKVRKRKLGRVAVDDSGTPSSSKKMRGADFTVKPPRDEMAEFIACRYLCDKQSMWRLYAYDIHFRNPSVEREGYFMRMLLMYVKGARSYEDIRTYDGVVYDTFKEACAARGLLGDDREWSYAFDEADSWASGGQLRSLFVLMIVHCGIADESAFFEKHWHAMVDDILFNLQQALNNSSYSVPDTQLRNMVLQELHTLFVRNGVSMSSFNLPSINCDSSFQSANRLIDDEMSYDIDDLYVNAPLLYDQLNVDQRNAYDRIVQSVMTESPAFYFVSGYGGTGKTTAHSRFKIPIEVDESTICHIKRGTMLADLIKSTSLIIWDEALMTHRRCFEALDRTLRDIFAEDDPSAASLPFGGMVVVLGGDFRQILPVVEGGVRSKTIDAAISRSPLWSHVSILELSINMRLRSSSLSPEVQHEIADFSDWILSIGDGTTAASARDTDTEPTWVDIPHDLLVMDNDDKIGAIISAVYTDFAEHYSDPIYLQDRAIVSPTNDICGTINSRVLELVPDEMKEYLSFDSLAKTNEKCDDLDVLYPIEFLNSIKVNNYPDHQLCLKKGDRVIEARIITGSNIGQTIYIPRITLSANNKKWPFTLQRRQFPVRVCYAMTINKSQGQSLRSVGIYLKSPVFSHGQLYVALSRVTSRAGLKMAFDLLCDISPASRGWKIRAKIARMWDYTGTADDLPPIHVDLVLIDEKGNAMYAEIPGVEADKFRPLLQESKVYTFSKFLILPSKPAYKPFPNKYMIKLTPWTNVEQVNEVPADFPSHVFNLVQFSYLSLRVGMQEYFTDVIGMIIGVSKLAYVRMASKTSDTPKRVIALRDLANCEVKLVLWGEHAPDFDADAVHSVGQDNAVVGIFVDTLMKAYNNEETLSGGSACKWYLNEDIPEINQFFDSLGDSAPKIQWISTGAESFGSSQRPARLEHKSVADLKKIDPWEAAGRSDNIPKEIAAVVSQKFTFAVSVTERSLMHRNISFQVNGIETFFGRQGPSTPLALAASGMDKDDASQSHESTPVDSSTSTADPVDELPGDSKKRKSIVRHPLAAQKKLTFETAPSSKENTSPVDPPTSSSRTDDQAADKQHVVPHEVKDILPTEAKKKSVDPGSTGTRKTKPPVPKGN

SEQ ID NO: 139866 - protein, 262 aa, Oryza sativa
  Clone ID: PAT_MRT4530_41116C.1.pep
MLGSDQLEHRPAPSAPRAEPDDVADDVEVEAFRDIHPEPSPPHLPPPPLRQPSWDAASHRSLSSSGAGGGGDVELFATMSREFTAMVAAGSSSAPSPDVPGDAPAAADLNLLQLARIGENEPAAEANALAIVPAAAGSGPPAPVEQVKKEEVEAKVAAWQAEEVAKINNKFKREEVVINGWESQQVDKATAWLAKIERKLEEERAKATEKARNEAAAARRKAEERRASAEARRGRKTAEVLDRANFCKAAGRVPSKRSFFSF

SEQ ID NO: 139867 - protein, 51 aa, Oryza sativa
  Clone ID: PAT_MRT4530_41117C.1.pep
MEPGGQPVCALEQMHFIYTSGRHLNQPPHEHTHVPSSIELHMHDPVMHLQT

SEQ ID NO: 139868 - protein, 953 aa, Oryza sativa
  Clone ID: PAT_MRT4530_41118C.1.pep
MARHGWATAMHRGYGIHPRRGSPSLPSRCGQRGRGGRWWLRFHYLPDPAGGKGEGGGGGSPPSPGLARRRGEGGGGSPSSQARVFECVRGSLGGASVGACSHHSRCSDWAIVVYASRVSSLREGPTSAASVRCTHHHSSFEGGTENSSMPSQWQPVIGAARCLLSRSGCGPHLLCPYMSAKILYLFLGGKIKSSVACLASSSNSAASEYVWETVAPPHQETSKDRCDYGPPEYRCRMCAAQFWYQEQCKKDSAITKRRVCYNLCCKGGKIFVPPFAQPPEPLNSLLKFDGDARSKHFLQHIRQYNSLFSFTSMGADIDDSLNQGGGPYVFKINGQVYHRIGSLLPNEDNPPKFAQLYIYDTQNEVQNRMLAVLGEENGSCDLDPEIAAELLDMLDNCNPLVKQFRLTRDRLAEHGDEQLAIKISIPGPLHHVSSLHPAYMALQYPLLFPYGERGFQLGINLRGVDLNRTDIRTKASMQEHYCYCCHYRRDQFNPYLCCGRLSSQSQVDGFVCFEEGRLTFIDEHQGDFRCEHVQGIADAVAKGCLDGNSVGKRRILPASFTGGRRYMYQNYQDAAAICRVYGAPDVFTTFTCNPKWPEIEEALRIEPGQRSTDCSDIVCRVFKMKLDEMVSDIMAGVPFGRRDAPSTDATPFVVDTYISAELPDPNENELDYLLVEEFMMHGPCGDANRKCACMKNGVCSKKYPKDFASETTVDDKGFIVYRRRDNGRFAYKNNVKLDNRSVVPYNIALLRKFEAHINVEWCNKSKMIKYLFKYVTKGSDHANIKFTKVRKRKLGRVAVDDSGTPSSSKKMRGADFTVKPPRDEIAEFIACRYLCDKQSMWRLYAYDIHFRNPSVERLACHLPNMNVVSFRLDTNLASMVSNTFLQKTTLTEWFVANDLFPQGRHLTYCKYPTMFTWEDDLKSWKIRQHGYKIGRMYYIHPSAAEAYFMRMLI

SEQ ID NO: 139869 - protein, 191 aa, Oryza sativa
  unsure (1)..(191): unsure at all Xaa locations
  Clone ID: PAT_MRT4530_41119C.1.pep
KKNRKKKKHIGKKLQKKEKRNDNWWFYGMLTLAMAEALVLCTVFKDEVRLPWWALLCAMAVAFFFTLPIGVIFGXTNXMGLKIFSPYHIRCLWDPNTTLAVNLEIWRYWSMNQAVSFITDFKLGHYIKAPPRSMFLFQVISSTMNKTVNMSVAWWLLSTVLHICESQSLPDGSPWTCPGSSVFFDASLIWG

SEQ ID NO: 139870 - protein, 2089 aa, Oryza sativa
  unsure (1)..(2089): unsure at all Xaa locations
  Clone ID: PAT_MRT4530_4111C.1.pep
MSRLRVRHTLYPSIYVTYRFGIPTRIQMFPAYCKEILHRVYGWEESYSDKIGSLMYPCTNVPQYPLYPVYGYHPLTVARQVXGLGTQGSTTMSSSFVDNNVSTSLSQVLPASTMLVWTQVGEIVFPVYTTTPISTGPPMTGDENVVATNQGDSMSKNPPVETENGISTTSKLKKDFDTAKPCPSDMNHELTKMTSEATRSWCLIHKTKKHTLQDCWVFLNVRAKIRACKERGIQRTSPTRDVYCPIYKTKNHDLLSCKVFLGAMKAQSPKSYIPIRDNGKEQGATPTSDRFIGVIDIDPHEPSVLHLLEDYGSSTTSAPREVLAIDDVGTSAHANTEAGNQSTTPVQHIRAVQAILRETPYDPVLNLDLERWTERLRESVTNLSNAFKEAATAAHQEQPPTGEANGVTPERRESPQQATPLPRGTGDLRDQINGRREARRTRDNVNRSRSHVSSRRHDNGNRGDRSNEDRDHDNHHDHNDRERRVPDNTGHGRRRIDDDDGDRRRDNSGRRRQDSRDPGRHPRNRTPEPSDLSSSSSSASSSSSDRHPRRTHDRRQPTAPNAGCRAFGRSLRDVRWPERFRPGAIEKYDGSTDPKEFLQVYSTVLYAAGADDNALANYLPTALKGSTRSWLMHLPPYSISSWADLWQQFIANFQGTYKRHTIEDDLHALTQNLGESLREYVRRFNECRNTIPEINASVIHAFKSGVRDRYTTQELATRCITTTRRLFKIVERCAHADDALRRKNDRPKTGGEKKPATDTSESSKKKNRKNGXRKAQAEVLAVEYANPPKRPDPQSSDIKKSWCSIHKTDRHSLEDCLVFKKSLEKHMAFEKGKRVRVVETNEETAPHEPDSAYPDSDLHVSHIXAVPQRRYPIVVEPAIRNIKVARVLIDDGSLINLLFASTLDARGIPQNELTPTNQPFHGITPQSSSRPLGKITLPVTFGQANNFRTEQITFDVAEFDTAYNAIIGRTALAKFMAASHYAYQVLKMPGPKGTITIQGNAKLAVECDKRSLDMVEQTPSPHATTEPPKKVTKTNKTPKPDGVIKIVPLSSANPDKTELTLITFLRDNADVFAWQPSDMPGVPREVIEHKLMVRPDAKPIKQRLRRFAPDRKQAIREELDKLLKAGFIREVLHPEWLANPVMVRKANGKWRMCVDFTDLNKACPKDHFPLPRIDQLVDSTAGCELLSFLDAYSGYHQISMAKEDEEKTTFITPFGVFCYVKMPFGLITAGNTFQRTVQGALSNQFGNNVEAYVDDIVVKTKTGDSLIDDLQEMFDNLRRYRLMLNPEKCTFGVPSGKLLGFLVSGRGIEANPEKIKAIDNMKSLTRLKEVQKLTGCMAALSRFVARMGERGQPFFALLKKQDKFVWTREAEEAFIALKRYLSNPPVLVAPQTNEELFLYIAATPHSVSTVIVVEREKVQRPVYYVSEALHDAKTRYPQIQKLLYAIIMTSRKLRHYFQAHRVIVVSSSPLGEVVRNKDVVGRIARWVIELSQFDVHFVPRTAIKSQVLADFVANWTMPDNKSDNQGDNETWTMAFDEALNSQGTRAGFILTSPSEDQFKHAIHLNFRATNNTAEYEGLLAGIRAATTLGAKRLIVKGDSELVANQVHKDYKCSNSELSKYLTEVRKLEKKFDGIEVRHVYSKDNIEPDDLARRASRRKSLEPGTFLDILMKPSVKEVSGEVSPNTPDISSEVTEAERAVADIETTDDWRVPLIKFISSEELPEDDTEAEKITRKAKIYSMVSNDLYKKALNGVLLKCVSTDDDRHLLLDIHEGICGSHATGRTLVGKAFRQGFFWPTALKDACDMXTHKATCASAPDYPSDLAILVLGARYTWAIPMRTGRLQIPIXVAIDKFTKWIEAVPTGEIKADNAIKFIKGIFCRYGLPHRIITDNGSQFISADFQDYYIGLGVKVCFASVSHPQSNGQIERANGIVLQGMKTILWAVRTTPTTSNKETPFFLVYGSEAMLPGELQHQSTRVQKYSDENQEEQRDIDVNLLEEHRERVAVXAASYQQTLRCYHEKRIRARILSIGDYVLRXVQSQAGRNKLSPKWEGTYTITQVLRPSAFKIADGDGRELANSWNIDQLRKFYV

SEQ ID NO: 139871 - protein, 277 aa, Oryza sativa
  Clone ID: PAT_MRT4530_41120C.1.pep
MTRKPKRKPPPSPEPYHDHPSPSPAQCLAVRDALLAFHGFPDEFAPFRRRRRRLGLDTSPDPEEDTDGDPSPPPTVLDGLVTTLLSQNTTDAISRRAFAALKAAFPTWDQVVDEEEGKRLEDAIRCGGLAATKAARIRAMLRGVRERRGKICLEYLRDLSVDEVKTELSRFKGIGPKTVACVLMFYLQKDDFPVDTHVLRITNAIGWVPATASRERAYLHLNSKIPDDLKFDLNCLFVTHGKLCQSCSKKLGGQKTTGSNSMCPLASYCCTEEKMKQ

SEQ ID NO: 139872 - protein, 86 aa, Oryza sativa
  Clone ID: PAT_MRT4530_41121C.1.pep
RTNLEEGILHVPLFIQGTKKVNLKKRGKKIFSFFTKMTSLPWTDQSKLDNRVHFPRKYSSREVFPTIKSLLLTKAKSSSTSNAKLM

SEQ ID NO: 139873 - protein, 99 aa, Oryza sativa
  Clone ID: PAT_MRT4530_41122C.1.pep
MSARELRQTRPRVPGTPGLPLNLHAPHRHTFAERAQHKEHPALPSPASVRAPRASGGYLGWMGEEKWRRLGETVRWIWEEKCQIWGEKRQIWEEKRVVW

SEQ ID NO: 139874 - protein, 90 aa, Oryza sativa
  unsure (1)..(90): unsure at all Xaa locations
  Clone ID: PAT_MRT4530_41123C.1.pep
GVESSVSKRFVGAFSLFSSLLVCWNRIPVLNLLLLQVNCLVGWLPSCHSTLTAKVLLYCSIKVPTLTTIFTIYLYILFSXXKNKKKKKKN

SEQ ID NO: 139875 - protein, 277 aa, Oryza sativa
  Clone ID: PAT_MRT4530_41124C.1.pep
MGVHAMSCMSCHGGGGGGGEGALSRQGSVYSLTLNEVESHLGEPLRSMNLDDLLRTVLPAAAAAAETAGRKTVDEVWRDIQGASTGRHHATPMGEMTLEDFLSRAGVAVDGAASAAGAHWLRGHYPPPPPPTTTTLQYVGGSGAVVDGVYNRVDGHGVAGFLSQVGVAGRKRGGGVDGVVEKTVERRQKRMIKNRESAARSRARKQAYTNELENKISRLEEENQRLREHKAVADFSTFPSCVDFLKAFLTQKLEPVMQIVPQPEPKQQLRRTTSASF

SEQ ID NO: 139876 - protein, 67 aa, Oryza sativa
  unsure (1)..(67): unsure at all Xaa locations
  Clone ID: PAT_MRT4530_41125C.1.pep
XRNSXXVAEXGNQVXXHXMXXVXDLXXXRVLEQXVRYRXRPVGXGDXLTXSXPRNPGRXEVDLRGVA

SEQ ID NO: 139877 - protein, 209 aa, Oryza sativa
  Clone ID: PAT_MRT4530_41127C.1.pep
MFTCRPLVSPPLPRRLAVASPLAPARPPPSSASSLRVVRCMAKERRVRMVAKQIQRELADMLTRDPVLQRAVLPEAALGADQYLSSLTTIADVELSNDLQVCKVYVSVFGDERGKKVAIAGLKAKTKYVRSQIGKRMKLRLTPEIRFIEDESMERGSRILAILDKLKEEREQQEGNEEEEDGEGANLSEEEEGDWDADEPDEEDIIYVK

SEQ ID NO: 139878 - protein, 71 aa, Oryza sativa
  Clone ID: PAT_MRT4530_41128C.1.pep
TVFISPFLRSPRPPMALSISTPPTSSYLLPASLQVGRRSSSAAMAARPVAFSLRRPVLAARACCAGNLPKS

SEQ ID NO: 139879 - protein, 175 aa, Oryza sativa
  unsure (1)..(175): unsure at all Xaa locations
  Clone ID: PAT_MRT4530_41129C.1.pep
PPPPPRNFLFLFYLIFPLLSSLRTSAEERDVQLFYFYFIFLILGGASMADCIKXPGLGIAARYMFTMAVGRSLRTVTFLATILPSARPWCAEARYQIPDHPHPWAQKYYAPYASDPDAIRRVIQEDMPYGQPIQLYSEYRPKGGHIAFLXTFLRATVEKGALWVLFFKKAKGGCP

SEQ ID NO: 139880 - protein, 383 aa, Oryza sativa
  unsure (1)..(383): unsure at all Xaa locations
  Clone ID: PAT_MRT4530_4112C.1.pep
MSRVSTSWGFVGSRVNKPGERSARTGSTGVGPTWQPHGPRWTGCTRLTPAGAVGPTRQPHPRARAADGRAPHGSRGARPKAATPAEPTGGGAPAPRWSPPATTGAAERRPREGREGGSETAVHGSPRVDGDNGNGDRSGERRRRGSGRRGRRRSGGRRAKRGGGGGXRGRRGRGGAEGGDAETGEGPGRRRRRTGARRRRRRERTTARARFRRGERAASGGNGGGRHGERLNSVGRGRERTDEGESAAEDPAAIDXAGEVCGSXFQTNPREREREKWGERERESRGVISPSLLRAGAAGCGGIRGGGGARARARRRLRREVGDDGWAPPVSEGGGRARPSAARARGKAGWAAGERREREGAGPSRPKRGKGGXKRLFRVFFFL

SEQ ID NO: 139881 - protein, 84 aa, Oryza sativa
  Clone ID: PAT_MRT4530_41130C.1.pep
STKRPRTNNSNKRKETRNYRGCNPSWPVTTGCTTIYILHPHHQSLHKNITLRVTDIYILHLIFSILLLQAYATPKTPRFGLDVS

SEQ ID NO: 139882 - protein, 341 aa, Oryza sativa
  Clone ID: PAT_MRT4530_41132C.1.pep
MRGSEDEPQTEDAGAEPEPVTRNRDARPSRSRTTGLRDRVGTATPLRGSDGAHGIASRCRRTAARDRGCPEEIGSNSGTEMAGGMWERRSRTSGMRERCSAHPARGTGAPVVGESCAPAACGGLTIKYPFWLRGRQPAYCGHPTFAVTCDDDPTGATATPPSLNGSYLRVLAIHYGNSSVMAFHANLVDSSACAATRFNMSSILVLSLLAVSRANSELLFSANCSRTPPTGSLPVNCTGFSGGGEWFMSLNRMYDPGGPKRAVDTVGCLYSVVPVLPWSELRSAGDYAGFVRRGFLLEWAAVPGDCAACNGSGGECRYDAGAMAFGCFCPGGRLQPATCGE

SEQ ID NO: 139883 - protein, 644 aa, Oryza sativa
  Clone ID: PAT_MRT4530_41133C.1.pep
MSPNFSRRARGELQSTRDPNSPPNLLVVLLLPRPDTEQEHARTYGARSPHCISIPAIGPAVTMRRRVALCLVLFAFAGLHAAAVEAVTLSTSSRWIVDDEAGGRRVKLACVNWPSHLEPVVTEGLGMQPVDAISKKVASLGFNCVRLTYPIALATNASLSSLTVRRSLLAHGLAGAVAGVEANNPGLLDLTLIESFRAVVDSLGESGVMVILDNHVSRPGWCCADDDGNGFFGDRHFDPDAWVRGLGAMAALFAGVPNVVGMSLRNELRGPRQNADDWYRYMQMGAEAVHAANPAALVIMGGLGYDTDLSFLAARPVDVSFAAAERGKLVFELHWYSFADARAWESEDANEVCGRVARGVARRGGFLLDAGFPLFLSEFGADTRGGSRKDDRYLPCAAAVAAELDLDWALWALQGSYALRQGVAGADEVYGVLDWSWSKPRNATALSRIQSLQRPLRGPGYDEARPYTVLFHPLTGRCVVRRAADDAAAAAATLELGRCEDTDAWAYTQPASTLAMRGAGRGSPPLCLRAEGSGRPARLATSDAGGCRGDALSTWRLVSGSTMHVAVNATTTTTPSRDGGGGLLCLDVGDDGRSVVTNPCRCLDDAAAGECDPETQWFKLVTSTRSPATGAAAAATVARGLIAA

SEQ ID NO: 139884 - protein, 75 aa, Oryza sativa
  unsure (1)..(75): unsure at all Xaa locations
  Clone ID: PAT_MRT4530_41134C.1.pep
MQSWKMVCGADYEFPLNIDLKMXEVHVHGDLGYVTCLEVVKTKGRTWGKQVATNVFEKVDGTWRMCVHHASHIEE

SEQ ID NO: 139885 - protein, 81 aa, Oryza sativa
  Clone ID: PAT_MRT4530_41135C.1.pep
GTRCNECDEAKEAVSRSSSRDNLSVDLNTVSEQLPDNFQRHFSSSNYDSGVDIENALSASELFSSSAFGRQQASRSFRRHS

SEQ ID NO: 139886 - protein, 83 aa, Oryza sativa
  unsure (1)..(83): unsure at all Xaa locations
  Clone ID: PAT_MRT4530_41136C.1.pep
GVNRFMHPPWSSPAFLPQYAHCRLLFVGLSLEEESLRRRSDADAERXRPSTRRGCYARSRARGERHXXXXGXAGEGLGGPTRP

SEQ ID NO: 139887 - protein, 75 aa, Oryza sativa
  Clone ID: PAT_MRT4530_41137C.1.pep
MAERGEPMSLMGERRGGNGGVEEPFLKEAMAMRKPDSATTVMHGAAPPPKVPNGHPVRAPPLRYTHNMRLGGDPC

SEQ ID NO: 139888 - protein, 76 aa, Oryza sativa
  Clone ID: PAT_MRT4530_41138C.1.pep
ELPPTNTSLCTVIGYGVPPPPLCSMVGLLSFLPPGFCSLPIFCCSSFPPSVYITIQPPILCDSGSQPFPSYLCDPV

SEQ ID NO: 139889 - protein, 46 aa, Oryza sativa
  Clone ID: PAT_MRT4530_41139C.1.pep
PLPAIVTYRSEPRPSPALATLPYVVLSQAATAHRALDWFDTGFASI

SEQ ID NO: 139890 - protein, 778 aa, Oryza sativa
  Clone ID: PAT_MRT4530_4113C.1.pep
MPHRRRLLNPAPSLPPPPAAAPAGFHHHLLAVDDTRLPLLADYALLQGDAAAAPASAEWSAGSGFTGISTDPATATTATTASTATAPGSASNLTAATAGGGGRETWVRRAREGYYLQLSLAIRLTSEAFLAGVPPELLIGCGGGGEAENHADVAADAAAVSYRLWVNGCLSWGDKIAHGFYNILGVDPHVWAMCNAAAEDGRRLPTLVALRAVDSGESSVLEVVLVDKCGDPALADLERRALDLYRAAGVSLDLVRHLAVLVSDHMGGALRSEDGDLFMRWKAVSKQLRKRHRCVVVPIGSLSIGFCRHRAILFKSLADFIGLPCRIAQGCKYCSAPHRSSCLVKIDNERRFVREYVVDLVVEPGRLSSPDSSINGQLLSSVPSPFKTSCTMSSANYATPAASWNRAISGDRRNSILSNPQYSVAKYCVAEEKSSVQVATKEAMLPKCGQITQNGNCNKNSMAVFEVSKQMKAMEISSESGDKDNISSATPLKRLSIEPSFCADWLEISWDEIELKERVGAGSFGTVYRADWHGSDVAVKVLTDQDVGEAQLKEFLREIAIMKRVRHPNVVLFMGAVTKCPHLSIVTEYLPRGSLFRLINKASAGEMLDLRRRLRMALDVAKGINYLHCLNPPIVHWDLKTPNMLVDKNWSVKVGDFGLSRFKANTFISSKSVAGTPEWMAPEFLRGEPSNEKCDVYSFGVILWELMTMQQPWNGLSPAQVVGAVAFQNRRLPIPQETVPELAALVESCWDDDPRQRPSFSSIVDTLKKLLKSMLGGS

SEQ ID NO: 139891 - protein, 112 aa, Oryza sativa
  Clone ID: PAT_MRT4530_41140C.1.pep
QKNSSEGLILFFKPRVTIYRAPIPLVLNTQGHLFIFSFGPSPFNLLFQILLKINAPPRLPKTLLLLHKIYSFLPLIPNPPPPPWRERVKIYLSSPPAAALALPPAFLGRTRL

SEQ ID NO: 139892 - protein, 436 aa, Oryza sativa
  Clone ID: PAT_MRT4530_41141C.1.pep
MEDNNDEILDGQNEEVQSQVSLPQDIQRIIIGFLPGRTVLKFCSVCKFWRDCIVEPAFVDHHLNCALRFRQAIACFTSVDNGLVQMYMFDPITVNFKRTEPVFSSRFHMSQPCNGMVCAYDLKGAAEVLNPTTRKHLTLPASESVYQAQYSEYFLGYVHSTKEYKVVALRHWIKHLTFEVCTIGTLSWRTVRGSEEEELLKTTKPVVVNDEMHWLLLDDESSHFTRKILSFNLTDEKFSYLDVPDSVRDRDLELVEGEGKLHLWSMPCKGAAYTESEIWLADSTRQFWVHLHNIAHPSVLGTKPFFMYKSKLFLGSQKRFIYIDILDGTVCYVDIPSGENIISSGMFVESFVPALTGTGLVNSMTLLTGSRYAGSSSRGSGPSSRAAGSSSTRTRRSPAASRWSSAVVQSSKRAKRTINLVWKMYTEGTSKIQQGL

SEQ ID NO: 139893 - protein, 129 aa, Oryza sativa
  Clone ID: PAT_MRT4530_41142C.1.pep
MALRATGKSGSHGDAGECSGANDGEERQLRWMPLARMREMQRAMVAAAYGTEVAEVASGHRAAQAMTADAEAGGWHRLPAGVVTRRRRRRMLRRVGDRIGSGGNGYSERAQKWLRQPAGDDNDEGEVDP

SEQ ID NO: 139894 - protein, 598 aa, Oryza sativa
  Clone ID: PAT_MRT4530_41143C.1.pep
MAAMSSRCAASSSSSAFLRAPLPGGRHHQGSCGFVAAGGGAKTTVRVAAALDTEATAKAGKSSSRARRARKDGGEPGGSSSTALLAPTHPDGGGGGGVALDDVIVNPVGLGRRSRQIFDEVWRKFSRLGQMSTVASPEQEEQEGVLFRGGGPMCDFAVPGAQDTTVLVVGATSRIGRIVVRKLMLRGYNVKALVRRNDQEVIDMLPRSVDIVVGDVGDASSVQAAVSGCNKVIYCATARSTITGDLNRVDNQGVRNVTKAFQDYYNQLAQSRAGKSSKSKLSIAKFKSAKSLQGWEVNQGSYFQDIYPSRFDEGTDASFEISENGQAVFSGFVFTRGGYVEVSKRLSLPLGSTLDRYDGLLLSVGGNGRSYVIILETGPLADTSQSKKYFARMNTKVGFCRVRVPFSDFRPVNPQDPPLDPFLVHTLTIRFEPKKQRPGDSSQGASDPRNFQLIMEFIKALPTGQETDIVLVSCTGSGIEPNRREQVLKAKKAGEDALRRSGLGYTIVCPGPLQEEPGGQRALIFDQGNRISQGISCADVADICVKALHDSTARNKSFDVCYEHVSKQGDELYELVAHLPDKANNYLAPALSVLEKNT

SEQ ID NO: 139895 - protein, 117 aa, Oryza sativa
  Clone ID: PAT_MRT4530_41144C.1.pep
AVVPASGVGRVGLGKQHPFSVRSYSSSRYPPNASRRQGPLQWPGGQGASRGPAVSGDFRCRRRRWLGGGLVPISPSEVGGGARLWALPVTVVASCVIIRGVAGGRGRHSVEARFAPS

SEQ ID NO: 139896 - protein, 544 aa, Oryza sativa
  Clone ID: PAT_MRT4530_41145C.1.pep
MASSKEAYRVELRAAARQLGERGLYSAAKWAAELLVGIDPDATPAPSSAMDTPSSSGSGGHLLHLHRSGGSSFRRRLRPGAAGEAGTPLGGVSYVSTPIPDDDDAFDVGADRLETLYSNIEMNGQYKVLTYSSNTIALMQQGGLRIQAGEKRKEEETVELEGSLGKSNAVNQELVALERELATHRRTGAIDSFCLYLYGIVLRDKGSEALARTVLVESVNSYPWNWSAWLELQSLCTSSDILNNLNLKNHWMKDFFLASAHLELKMHEEALKRYERLMGVFRCSDYIQAQIATVQYSMRDLDEADMIFEELLRTDPFRVDSMDVYSNLLRAVDINPRDYRAWYGLGQIYEMMGMPFYAVYYFRKSSYLQPNDARLWNAMAQCYESDQLQMIEEAIKCYERSANNNDTEGIALHQLAKLHGMLGQSEEAAFYYKKDLERMEVEERQGQNFVEALLFLAKHCKSIGRFEEAEHYCTRLLDYTGPERETAKSILQGLKRSQSVLPLMDIDHFAMRFKQVILIVCILARRLHSAGDVDFVCVMIASSC

SEQ ID NO: 139897 - protein, 616 aa, Oryza sativa
  unsure (1)..(616): unsure at all Xaa locations
  Clone ID: PAT_MRT4530_41146C.1.pep
MASSNESYRVELRAAARQLGERGLYSAAKWAAELLVGIEPDATPAPSSVMDTPSSSGSAASGGRLLHLHRSGGSSFRRRLRPGAAEAGTPLGGVSYVSTPIPDDDAFDVGGDRYLLAKTYFDCREYRRAAHVLRGQTGRKAVFLRCYALYTAGEKRKEEETVELEGSLGKSNAVNQELVALERELATHRRTGAIDSFCLYLYGIVLRDKGSEALAXTVVSVSIKSYPWRWSDWLEXQYLCTSSEILNNXNINNHWMKNFFRASAHHELLMQEEALKRYERLMGVFRCSDYIQAQIATVQYSMRDLDEADMIFEELLRTDPFRVDSMDVYSNLLYAKESSTALSFLAHRVFLTDKYRPESCCIIANYYSLKGQHEKSVLYFQRALKLNRKYLSAWTLMGHEFVELKNTPAAIDAYRRAVDINPRDYRAWYGLGQIYEMMGMPFYAVYYFRKSSYLQPNDARLWNAMAQCYESDQLQMIEEAIKCYERSANNNDTEGIALHQLAKLHGMLGQSEEAAFYYKKDLERMEVEERQGQNFVEALLFLAKHCKSIGRFEEAEHYCTRLLDYTGPERETAKSILQGLKRAQSVLPLMDIDHFAIKLHIAGDVDLVCMMISSSC

SEQ ID NO: 139898 - protein, 110 aa, Oryza sativa
  Clone ID: PAT_MRT4530_41147C.1.pep
MRPSSSPFSPCSMAAGCSLLLASSPPPSARVQLDHRSREASPPPAHHPHPHLLPAASPARESPCYRRASTTTAAEAAPSSNSSATSSAEHYHGPHHDRRKALAAAFSRGG

SEQ ID NO: 139899 - protein, 553 aa, Oryza sativa
  Clone ID: PAT_MRT4530_41148C.1.pep
MPIRLHIFVNSARHAINSSAFICRFIAYHLSPLLIHLSYFLIIDVLGFVALVVLRPSNHKYNPRYVDMFFLSTSAVTVTGLATTQMEDLSSSQIAILTLLMFLDSKMFLSFLGLVLESSKQNKHDPENRRVSSVTVCKQSQLEEATPQTPSMNSIDIKKRCLKYLVFVVLAYMIIILVTGSLLVFMYIAHVSSARDVLTRKSINKALFSISVTVSSFTNGGLLPTNESMVVFSSNNGLLLLLIGQILAGSTLFPVFLRLVIWALRGLRLAKAEEPDFMMNNSSAVGFSHLLPNLQTIFLAVVEVAFVAMTVILFCCLNWDSVVFAGLSSLQKITNALFMAVNARQAGENSIDCSLVAPAALVLFMVMMYTPSLTKLFSACQDHKRIGPESDDRTSKGKPFLKMMAFSPLGFNTTVIMLVCITERRSLSTDPLNLSTFNIIFEVISAYGNIGLSTGYSCSRQLQHQEGIACHEKAYNFSGWWSEPGKLILVLAMLCGRLNSKDSTSARTSQDHVACKYLDDEQGNMFSNELIDERTGPSITNQVELLAKIPEIS

SEQ ID NO: 139900 - protein, 460 aa, Oryza sativa
  Clone ID: PAT_MRT4530_41149C.1.pep
MEKATRCLARATGLAAAAAAGDGPRKRLAVAMVDCLARRLLRPVQAITDALIDPSVYLDRRSVRAARRGFFELSPFPKVAFVVGNRAIVEAVENESLVHVVGMSGPFTQPCQWIQLLHELRRRPEGPPRVVRLTVVHDDGELLAKMEELVSDEAEELGMEFQFHGVVGQLEDLDFSNLRNVLEIKSGEALVVSCTLQLHRLLAADDDAMYSSRSAHLNQMASIAQLQHMAVNSCPSSSGGGSVQYKDDDPYRSPATPLTFVSPPVSTPHFQTPAALASFLSAVRALSPKILVVAEQDADHNGVSFRKRFCEALHHYAAVFDSLDAAAATTSAASRLWSPDERAQVERVVVGEEIKGVLLRDGAHRREWHDRLRQWAARMEMAGFTGVPLSYAAIKKGNDMVRRCGLRRCENKECGGCLLLCWSSRPLYSISAWRPAASRGSGSGSERSEYVHVGAEPDDR

SEQ ID NO: 139901 - protein, 124 aa, Oryza sativa
  unsure (1)..(124): unsure at all Xaa locations
  Clone ID: PAT_MRT4530_4114C.1.pep
IWSTAHNRGHGYSNSFTLIRGVQLPTRHSPTTCYRALTCHHDIPERGHDRTFRITPSNQAHHTLGFNPTPRKAAGSPLSCLGESGSCIGRRRAHPNSITPTLAWMRXLEESYTTSPAVAHADLG

SEQ ID NO: 139902 - protein, 105 aa, Oryza sativa
  Clone ID: PAT_MRT4530_41150C.1.pep
MATRYLRPVVAALRRPAVAASRSLSANATQGVGRTGTTGITSSLKAGKNVDEEIRLLLVEVAKLEVASRRMEETIRNSRFHRRKVLREYIAGLEIQQKYTPPTPN

SEQ ID NO: 139903 - protein, 56 aa, Oryza sativa
  Clone ID: PAT_MRT4530_41151C.1.pep
MEPKLKLLLLLVMRQAGVRLEKETGEKKRDVAHSRLSDTPTTPKVPNRCNSRKNET

SEQ ID NO: 139904 - protein, 60 aa, Oryza sativa
  Clone ID: PAT_MRT4530_41152C.1.pep
HFVWIYDKVWMYKKIKINCIPFHSLTSFTFKNSAYPFRGLVKQLHVIPSLILKLPFLRKV

SEQ ID NO: 139905 - protein, 129 aa, Oryza sativa
  Clone ID: PAT_MRT4530_41153C.1.pep
MAAPPSLPYPPSDGSAAELARSVLAIFVSPRLLTPPRRARVVDSPATTAAPLHGVCGGIAWGLVLSGDALLYLAASGGGSEEGSVGVTCRRVWAHLRKTDEELVAKDGYANLRRPNGLSTWTRIFGSWE

SEQ ID NO: 139906 - protein, 53 aa, Oryza sativa
  unsure (1)..(53): unsure at all Xaa locations
  Clone ID: PAT_MRT4530_41154C.1.pep
LNPGFGPERMCVQVQNPGLXFFWDGESMSQVDGQVANIILQYPNKLQLWFLHC

SEQ ID NO: 139907 - protein, 57 aa, Oryza sativa
  unsure (1)..(57): unsure at all Xaa locations
  Clone ID: PAT_MRT4530_41155C.1.pep
PRVLKKKKKKKKKKKKKXKKKKKKKKKKKKKKKKKKKKKKRKNKKKKKLNKKKINKI

SEQ ID NO: 139908 - protein, 112 aa, Oryza sativa
  unsure (1)..(112): unsure at all Xaa locations
  Clone ID: PAT_MRT4530_41156C.1.pep
MMFAPRDHTAHQGGRWIGMEEVVPSIQICASPASWRSDPAGSAVGGGGEGGVSGVGGREAGGGVGGGGGLSGGRLTRAEARRXVETLTPTNARTRSPSSPPLPLLVPADAKF

SEQ ID NO: 139909 - protein, 688 aa, Oryza sativa
  Clone ID: PAT_MRT4530_41157C.1.pep
MAIPAEVRRYWLPILLAAVGFLFQLLVLPISFPPTHYYALGIERFAPVERVVEAYEQLSKEWLAETNQQTTVDIIKIRYAYELLTNPILKRDYDLFGLDHHKDVLEKVKEQYQKEHFLKIDLPLLKDSSVQSTDYAFNVLGYESFMHTIADEHPLLIMVYSKGSPRCAQFIEKWKQIGSRLDGVANTAMVELGDVQLTGHFAEQRFSKQPFFRNGLPTLVAYPADCRSPSCYMRYPGELFVDSVVDWVATSVVGLPRILYYSKETLGPEFIGKSGHHKVKVIFFSSTGERAAPFLRQAAQEYSTYASFAFVLWKEDESQIWWNSLGVESAPSLVFLKGPGAKPIVYHGTFTKSEFTKIMEEHKHQELPQLRSDTSLELGCDARGYSRAGNDIAIWYCVIVAGRPGIELSKRRQILRKAQDQLFSDVDASTSENVDSSVVVSSAAAALKDDRLTFVWLDGEVQKKLCAFYLATDYSGACGPGGFGDDNDKSELFIVRFQRNATFEALKAEKTNNLMEALQRQHTADASQLVARYKGPDEIEEINKWISQIIKDGDTREIPYFTSKVPDLVPEETSKEWIKSTKSIRSAGNSVKQRIQSSGFHFGDYLTDPRIGPALLMSACISMGIIWYKSNQRTQTTEDGAPPKDKTKKRRPRPKLSTSLFGQPEYPADADPEPKDARQWEMTDSDSD

SEQ ID NO: 139910 - protein, 145 aa, Oryza sativa; identical to SEQ ID NO: 107084
  Clone ID: PAT_MRT4530_41158C.1.pep

SEQ ID NO: 139911 - protein, 470 aa, Oryza sativa
  Clone ID: PAT_MRT4530_41159C.1.pep
MRPYPPNPPSPVSIAPARPRRSSLTGTPHRPPPLAVAAEKRDTAAVRVRVDVPPNPSPSPVSIAPARPRRSSLTGTPHRFYRPLSPLRRGTQLSCAAEWMWCEAVRRRERGELGARRFETAARARRTASLALSNRKEFTTPHNGAVNSLQVDLIERRYLLSGASDGSAAIFDVQNAIEYEAGFIAKHRSILLVDKQHENGHKFAVSMAVWYPVDTGLFVTASFDQYVKVWDTNSTQVVMDFKMPGKVYSAAMSPIATTHMLIATGSADVQWSTSSEWILMSGGCDGAIRFWDIRRAGCFLVLDQSRSQLGRRPPFLEGTSDKDPLNSLQPSSSSKIYSAQQRTGKSSDSRLRLWDIDSGCNTLVNFEAMRLQTSKPLQLAVTEDPSLVFIPCMASIKAYNLWSGMTFQTFRGHYEPVNCCYYSAQEQELYTGSNDRQILVWSPSTPAFTEMEDDGKRQMDFVVDEDNWSD

SEQ ID NO: 139912 - protein, 72 aa, Oryza sativa
  unsure (1)..(72): unsure at all Xaa locations
  Clone ID: PAT_MRT4530_4115C.1.pep
VVEDVAWHLKDENLFGSXGDDCKLMMWDLRTNKPGQSIVAHQKEVNSLCFNPFNEWILASASGDATIKLFDL

SEQ ID NO: 139913 - protein, 956 aa, Oryza sativa
  unsure (1)..(956): unsure at all Xaa locations
  Clone ID: PAT_MRT4530_41160C.1.pep
MPKIKTSRVKYPGGWELIEPTIRELDAKMREAENDTHDGKRKCEALWPIFRISHQRSRYIYNLYYRRKEISKELYEFCLDQGYADRNLIAKWKKPGYERLCCLRCIQTRDHNFATTCVCRVPKHLREEKVAYSLALAVGAPCARGRDYDARCVCAVRGSRETKPFLIPAPVKPHRRHVTQRHSRLGLGECVSASNTARACMADSTAMTVDFLRARLLSERSVSRAAKERADQLAKRVAELEEQVQAVTAQRRQAERAATEVLGILESHGFGGNLSDVLDSGSEHDGEEDDDPRDGRSDGDTAGSRGEEQPPAQCEAAEDALSGTAEPGGGLSWKGRSPKYRMGQSCRKNKRKELSQKGQQDGSDCTDDGQADMDGEDTGGQYVIRYEKDGEMERVLERQAELIGQYEAEEEAQRQWEKQFNENRSSAKVHVEAENKACQIENGWEQSKEHARLADQAVHCNEEAKPGVKNHPSASNNRSAGLLLNDSLPESHASGQEAAADQRDAHEEHHDHCHAQSQGSSNVAGTMTGKNQEQGNENPDGCSSYCDIKAPSDGSPSMSDATLNSKVSDWSSSSFHDHGDNQVDAGPDQQPTSNMDIESVLQALQLARISLSQKLSKPVPPSQVTLALPAPGDDEHSEDDGYSPVDDEFTSARDELCSSSQSPEQEILALPAPEDYHDRENLPVNDDATISLTEEQTSSSPHRQEILALPAPVDDYHREIVDDIKIPICIAGLFRLPTDSFPKDETLSTCSICLISLHKPEEDRIIHVLLDSIPLEYSVGEVLHRYIRALVDFICDCXEIPTAPYSSSLPVAANPSPNATAAPTAAYMPRCGTRCLVRLGDDVGERPFIGVVVAVSASSATSLSLLLVAADLSPGVAANPTATSMPKHRIKPLASALHLATSFSPFAAAHGGSSATLASSPASRGSDTTRRAAPSASSSSGRGDSLSTGASSSPDE

SEQ ID NO: 139914 - protein, 48 aa, Oryza sativa
  Clone ID: PAT_MRT4530_41162C.1.pep
MEIEGPGHFLGIVTEEVKKLLQVFSCSRQKDCGWMRDRRMFRGGRRKV

SEQ ID NO: 139915 - protein, 512 aa, Oryza sativa
  Clone ID: PAT_MRT4530_41163C.1.pep
MLAAAIELVVIATSCMVRDAHGHDYRAALAMSLLYFEGQRSGRLPPAQRVQWRADSALADGADHRVPDLASPPSSNVSVCARTDAMQCDMQVDLTGGYYDSGDNVKFGFPMAFTVAALSWSVVEYGDRLDAAGELGHALDAVRWGADYLTRAHASAGGGEALYVQVGDGDSDHSCWQRPENMDTPRTAYMVNASSPGSDIAAETAAALASAADANFSSTLLLHAKQLFEFAKNHRGLYHNSVPSAAKFYASSGDEDELLWAAAWLYIATGGEEEYSAYIAGATNVGGVRSMFSWDDKFVGAQALLVLQGKLPADGSHAEMKTNLEQFICNLVQHSGGNGGGGGGARLSPGGMLWWDSWNNMQYVTLASLVLAVHADHLTAARSASLQCGGGASRSPAQLTAFVRSQVDYILGSNPETMSYMVGYGSRYPAEVHHRAASLPSIKSSPAKVTCKGGFDYLNKGSPDPNVIAGAIVGGPDADDRYDDSRQNFRQAEPSTVTVAPIVGILARLLPS

SEQ ID NO: 139916 - protein, 116 aa, Oryza sativa
  Clone ID: PAT_MRT4530_41164C.1.pep
PCMLNPRFVGSPAPFSKAEIRGPRVAAVFSKLVCPLTCSPFPLFALPPCRGSGDDPCDALETQDGSGGQFPQPSPWASMEMAQRGPQVFGRASCSGMFWSPKSSPRGGPCYAETNA

SEQ ID NO: 139917 - protein, 121 aa, Oryza sativa
  unsure (1)..(121): unsure at all Xaa locations
  Clone ID: PAT_MRT4530_41165C.1.pep
KKKKKKKFEPLRRVRPEAPPPEDFDANNEQFQCTGTFDLRRVFEPQGLLAPRYRNTPAMIYIIQGRGSMRLTFPGCPASYQQPYXQLLPEPHSQIHXFTYDPPKTHHFTPRNLVPLPTCRF

SEQ ID NO: 139918 - protein, 572 aa, Oryza sativa
  Clone ID: PAT_MRT4530_41166C.1.pep
MELEGDPRLVGVALGEYLTDGEEVMVVGGAGEVAVAARVVKVDGGKVVVAMDEDAAAGGGVGVGVVSDLLYATGSAAVGEGYGGECTDNMQELLDGGGAEERMLGVELGGFRGEAGWTLMPVGDAAIETSEEMSDPVTLQYSETGLTGDDQRAKYRLPPLDGYGFRASGLVWSKLKGHPWWPGEIFDTSDASELALKHQKKKGSHLVAYFGSNTFAWCDESQLKPFMSNYSQMANQSNSDAFISSVNLALEEISRRILSGMCCFCLPEDLSDNCMSYMVENSGLRDGVTCSKVTRSEILECFNAENFLSYLRSLALFPGQGGELLDLVIACSQLTSFFQSKGCHELASFGSGSELVDDGMDSSSTKNVLLPEAVTYEQKPSEGKPKRRRIKTCVKKPQNDLELTEENPISSLNNECTFVDCMGLNIIGKVKGKRSEKRRKYVPSPERIDEIMPSALVLSFGRSAALPSKLDLIRLFSRYGPLKENETEVHQNTNTVKVAFKRRFDAANAFSVVGKYSYFGPSLCSFRLVNLPFSLSKLSPEDPGTEVPACRESGVDIVHVGIISKVDKAQNL

SEQ ID NO: 139919 - protein, 72 aa, Oryza sativa
  Clone ID: PAT_MRT4530_41167C.1.pep
TCLGESVFKLLDARNKHQTRRPLLFCLVAGALFSANLFFNLNESISVQSPFRRKDKTRKQTSKHVSDLFPSL

SEQ ID NO: 139920 - protein, 127 aa, Oryza sativa
  Clone ID: PAT_MRT4530_41168C.1.pep
MDRRVSRPTTASSGAAPQAWIPALDLHQPLREVAAGGAEQQEMLCARCPDALRWRACCRGSGGDAPRACVQGLFEIRELVDKAGDGVLAVEIGGGAEDGRRQPRRATRSGDGQRCLAVEIRQAERQG

SEQ ID NO: 139921 - protein, 56 aa, Oryza sativa
  Clone ID: PAT_MRT4530_41169C.1.pep
MTRKGKIWPPLQSSSWLGGTRSGLSEVGGGELQVFRVSLSLVMLLENWNLNIAVLK

SEQ ID NO: 139922 - protein, 302 aa, Oryza sativa
  Clone ID: PAT_MRT4530_4116C.1.pep
MDISSLMNANRDDAWTDCSRENFSGLLVSFMIDILKSKAGPPAALADGWDPPVISLLPPRRRRARALAPPPPRIAPHPAVPARIKERGITPRVSLSRFPLFSLSLSLGFVRIHPAKFAGVFNGARDLRARFPLSPAALSPSRCYIFDPRASLFRFRRSPLALAVGFVLAPCSSLSAVAVDLRFAADVAPVLRPTRRHPHRLRRVVADPVRRSASPADCRSTVALGIPNRAVAFLRSGSPPPSLRSSSRLGATSLGIAASPSTSSAPPFRSPTVGAPPSSSSRAAPPSSSAPSAVSAAFAASG

SEQ ID NO: 139923 - protein, 113 aa, Oryza sativa
  unsure (1)..(113): unsure at all Xaa locations
  Clone ID: PAT_MRT4530_41170C.1.pep
TQIPLQWNRRQTSTFKYPFIILQILQFRQAEKKIRDHLSIICLFCEKKINRFSIDLHRASEFLHVYPNGIDWPMAXIAYKRTYTHYITLNKWHNMNLFFFDLIRINSLISSMC

SEQ ID NO: 139924 - protein, 312 aa, Oryza sativa
  Clone ID: PAT_MRT4530_41171C.1.pep
MEVLIVLKNSFFSYITSNATLLPSGTLECCVDHQHVLNLNPLCKPSEVAYTLIPTVFYFEFLLINSGNDVATPEPDHCDLVDVKLGHEYELVVTTYSGLYRYCVGDETSSQFGGPFSYCLSPTSGGTGFLALGAPNGSNTAAGFSFTPMRCIPSVPTFYVMTLTGISVGGAPLAIPPSAFSSGMVIDSGTLITGLLTTAYAAVTAASDAAATSDLLHDLTPESYVNDTALRQKAEDDHGIGLLGGDDDLPTFDRLWNGFCYINNTLIAINELLPYPCRPGRHCAAAELPESSVPPCIAAPCAGMPPCILVVG

SEQ ID NO: 139925 - protein, 124 aa, Oryza sativa
  unsure (1)..(124): unsure at all Xaa locations
  Clone ID: PAT_MRT4530_41172C.1.pep
MEQPLFEVSAPRGEFYEPPPSSEPIYTTSYEIRAELISMVKEXNPFSGLDLENLHHHLRDFEQVYSCLKIRGMRQEIVWWKLFPFTLQERAKQWYTSTVGCVNGSWEKLRDRFCLAIFPVTRIT

SEQ ID NO: 139926 - protein, 713 aa, Oryza sativa
  Clone ID: PAT_MRT4530_41173C.1.pep
MQRIGVNEKPAAVLLPLGAPRARNPVPPLVGERQYEKGPPNWEDVSCLRHEQLRRATETEEAVEGEHRRRVLEPGHTQHVAHAVAVQAGVGGDDELVLVSELDVDEVTVVGLRGGDVVAGVDEEELEVEHCWDEGVGDLAGLAQGVEVENVLVSVNKLHPPSPQTFQVHERQKHINIENMKMYDFEIWKPENSAKVPKNSILRKHTKRSSFTVSINKEKCSNLKGSEAIELSHKLGKHVTFSGVDDIHIRNKLSSTLPQLQNHCNVYSDKSNEADRLVSAKISSHENKEASGRDIYDRWTSESSGAKDPINLIDLNRTLPCIPDFNGAFISGSEVPDLEHTENATSDLQIPGDVREEAVLKHNQDLHSKSPRSQCELNSCDLGRIINLRSIASLLPDEAINISDRGMIGHPLNSTEVNKFYADYERSSVRDDTMEGKAPYILPQHTVQYTSQFTENWYTNMNLGNFHHAGREFSSCPCENQLNSEKPMLHSEINVQHEHAVMSQRTMRLMGKDLTVSTTGGKCIGETAKVHVNSSVSCHHTTNIFLELPRQGHPFLSLQSRSFSNIQVDAPSTSHDYVGYKMHNLKRRFPEADVFSGNGIECEDRLRDFSYLHCGQNALAGFSPQGGKYNTRSDQNSLSATTFLPTLIPHAKQSAVYRANSTWKHNPYPANLLVHPPDGTNFRKDQNQIIRGVAEIPSSVNPCQEILFGRREK

SEQ ID NO: 139927 - protein, 150 aa, Oryza sativa
  Clone ID: PAT_MRT4530_41174C.1.pep
MKKRRLPPQYRPTWIREQRKLSNRSRRSVAAAGDHLRPQASFDSDLAAVLNDDGDLSFDDLILSVLLFCPKRPWKNMARGRKPECSSNRYELISISEDTNIQEIISIIKEPKVVGDNCTCSYHTWANIGGAKLPLSFNPTTRSWAPGMPH

SEQ ID NO: 139928 - protein, 185 aa, Oryza sativa
  Clone ID: PAT_MRT4530_41175C.1.pep
MEGWDKGTKSVVGEIPLLSTRAGPRDGEAWRQRLKEEYRALIAYTSVNKSKDNDWFRISAANPEGTRWEGTCWYVHNLRRYEFPLQFDIPVAYPQVAPEIELPTLDGKTHKMYRGGKICLTVHFKPLWAKNCPRFGIAHALCLGLAPWLAAEVPILVDSGMVKHKDDEAAPADAAAAASGSAAAS

SEQ ID NO: 139929 - protein, 54 aa, Oryza sativa
  Clone ID: PAT_MRT4530_41176C.1.pep
EPVRWRVQRRKVRPSVGRIGVMLAKSCLTIQKMLGVCNIKWCGVTGHTLVRKVV

SEQ ID NO: 139930 - protein, 83 aa, Oryza sativa
  Clone ID: PAT_MRT4530_41177C.1.pep
AQPTPLPRRQAPGPQTNWGQGRGAFAPNFPPQSSPGFSYGSESDLPSNGTGTQFWHFPPSPPPGLILVGFFLSPFIRVPFSSF

SEQ ID NO: 139931 - protein, 59 aa, Oryza sativa
  Clone ID: PAT_MRT4530_41178C.1.pep
PLASEDDDNRGLLLLFVVAPAIAWVLYNILQQAFNQLTRMRSVLELQLEDCISTCVYVV

SEQ ID NO: 139932 - protein, 72 aa, Oryza sativa
  unsure (1)..(72): unsure at all Xaa locations
  Clone ID: PAT_MRT4530_41179C.1.pep
GRRGRGPRAEVRRGAPAGASGRRTAGDHRSYKPXPRLLGFLDDKNKPTXFYGKVSNNXGCXRSGLTKXXXYX

SEQ ID NO: 139933 - protein, 253 aa, Oryza sativa
  unsure (1)..(253): unsure at all Xaa locations
  Clone ID: PAT_MRT4530_4117C.1.pep
YHHATRHGNDNDERARRRQTGXNGDERQGDGFGGDPWTKARRGRHEAXRRGAEDEDEDGXAAAAHLTNADDGRERLDGGTNATTTGNDERTTTTTMTGAGEETTRTAGSGCTGTRTAWNTPQRCXXRRRRRETTSRATDGTSIGEDERXRGNDDGRQQRLSGDGRGTRATSTEETATSVGVPATYRSRPKTGRYWMPTRRPLRRASGEEEVMPGMRAASRSRGRWWRRRPALRQGDRGGTGRLGRGLKRENGG

SEQ ID NO: 139934 - protein, 390 aa, Oryza sativa
  Clone ID: PAT_MRT4530_41180C.1.pep
MAAAVRRLLRRGLSTATAPPPTPGSILNPSSPSTPLTSRQKSRLAISLLKSTPPPPPDQILSICRAAALSPDSHLDRVALSLAASKLSSAPDSVRDLASSLLTPHHAPHAIALFGQAGLLPDAVSTFKSSPSTRSLNALLFACLVSGNHAEAARVFQTFPDAYSVKPNTDTFNAIIKSFAESGTTRSFYSVLDEMCQKGVKPNATTFTTAIAGFYKEERFDDVGKVIELMKKHGCGESLPVFNVRVQGLCKLGRSGDAKALLNEMVKKGTKPSWLTYNHLIHGFCKEGDLEEAKRLYKEMAKKGLVGDSSFYYMLIYYLCKGGDFDTAVGVYNEIAARNWVPCFSTMKMLVNGLAGSSRVDEAKGIIEKMKEKFPDKAEGWKEVEDALPQ

SEQ ID NO: 139935 - protein, 91 aa, Oryza sativa
  unsure (1)..(91): unsure at all Xaa locations
  Clone ID: PAT_MRT4530_41181C.1.pep
MGMPSMQDALRCLPPLIRSHYATANPVAFRCILLLISPPRTPQPCAKVYMEGADHKSVAXVVCHFGGQTWSKNGWTELGAVRRHLTGACRR

SEQ ID NO: 139936 - protein, 885 aa, Oryza sativa
  Clone ID: PAT_MRT4530_41182C.1.pep
MATRGEAAAAAAADRDMELFRSGSAPPTVEGAMASAAAAAGDVFLDDELRADPVYQSYYYSNAHLNPRLPPPLLSKEDWRSAQHRLRSSALGGIGDGRRQPAAAAQGDGLVGLPGIDLDRQGSFSSIFQFHLIQSKESSYQLDMGKQGADRNISDFLDSSRPQYALHRETSRAMGGLQSDSNIQSLAEVQNNDSSAHTYASLLGSSLSRSASPDPELVRRVPSPCLPPIGVKVSADDKKNNGGSSSFRRSSSAIGESDNLIAALSGMNLSSSGAASGQQTVTQSELYQDVDNVRKFLFDRQGDQSNGNQQHSYMKHPEQGHFKAPDGYSANSPNSSMIRNQINAASFTSFDNLSAGSGFASPRIGSRSPGGTLSSRQNLVGGSNFLNYNGIGSPNAATSLQTAIDPSYIQYLQAAEIAAQLAASCDDPLMASGHLGSSYMDLLGPQKAYASPLLQSQKNCGYYGNLGFGLGYSGSPLMSPVLPSSPAAPGSPLRHGERSMRMQSGIRNFGGSFGSWNPDLGGKMNINMMPSLLEEFKSNKSKSYELSEIAGHVVEFSADQYGSRFIQQKLETASTEEKDMVFSEIMPQALTLMTDVFGNYVVQKFFEHGSPTQIKELADQLIGRVLALSLQMYGCRVIQKAIEVVGLDQQTKMVAELDGHVMRCVRDQNGNHVIQKCIECIPQHAIQFIVSTFYGQVVMLSTHPYGCRVIQRVLEHCDDPTTQQIMMDEILQSVCLLAQDQYGNYVVQHVLEHGKPHERSAIIEKLIGQIVQMSQQKFASNVIEKCLAFGNPVERQILISEMLGSTNESEHLEVMMKDQFANYVVQKVLETCDDQQREAILTRIKAHLNTLKKYTYGKHIVARVEKLVAAGEKRLGLQPACTSAA

SEQ ID NO: 139937 - protein, 92 aa, Oryza sativa
  Clone ID: PAT_MRT4530_41183C.1.pep
ARASSGPGVVLFFLWFRSQYFSRSRRHVQFFRTYPATRAKFNSQLAMLQSTHVNMVIVNPKKTMVIVKKLHLWNDEAQKKKETTFNLLTVKN

SEQ ID NO: 139938 - protein, 99 aa, Oryza sativa
  unsure (1)..(99): unsure at all Xaa locations
  Clone ID: PAT_MRT4530_41184C.1.pep
QVAHPARRAEGGRAPRDGAWTRGRRGPRRLGSGGLGXPPKKRGAAPGDQGSRVGRNGSRLRLXVAEWKRNGRRRGGERRGGRRAAAGSPTARSGAAVAD

SEQ ID NO: 139939 - protein, 423 aa, Oryza sativa
  Clone ID: PAT_MRT4530_41185C.1.pep
MAGRIRSRIPPSRILPCTLFDLVRGAERRTTTMPTAAAMAGGMATGPGSRVTRYAKSTAASVTPVRPGKTHALSALDNAMERHAVYLVLYYRAAPGLDREPLKESLSDVLSQYPAMTGRLTRPEFADDGGGGGLSCTHLHNDPTAAVLFLNAWAAAHRRDSPYPPFLHSPALAAKSAAPPPEHPLLAAKSRGSPDTGGEMSSATFRFSAAAMRALLSAVEPGTTPFAALAALFWLRVAAAAADAAAGGGAAEERELTLALDFRKRMQAPLPTGYYGTAVHFATARADLSSGLASVAAAVERRAAAVPEEELWPAIEWLHTRQAAGGEPFQMYGPELTCMALDHVPLYGAEFAAGAAPARAACRVGGASGEGLVIVLPSAEGESARDVAVTLPAAVTARICRDGEVLRYGADVVFGPKVDTQAS

SEQ ID NO: 139940 - protein, 108 aa, Oryza sativa
  unsure (1)..(108): unsure at all Xaa locations
  Clone ID: PAT_MRT4530_41186C.1.pep
CSPASGAKFRRNVWLRVLLPLGWAALSPPXAAGSRTGGRAPGPALPEHLLAGFDSLVLLVSWQLWKEQNARVFDSALSSVSVVLESIHSEGRLWSLAGIAAFGDLLGV

SEQ ID NO: 139941 - protein, 287 aa, Oryza sativa
  unsure (1)..(287): unsure at all Xaa locations
  Clone ID: PAT_MRT4530_41187C.1.pep
MPTAAAMAGGMATGPGSRVTRYAKSTAASVTPVRPGKTHALSALDNAMERHAVYLVLYYRAAPGLDREPLKESLSDVLSQYPAMTGRLTPPPPPPPAAVEXAXEGXXXXXXVVHHGWIVKCNDAGVRTVDATAAATLDEWLATASGEEEMDLAYFEPMGPDPYIWSPFYVQLTEFADKSYALGLSCTHLHNDPTAAVLFLNAWAAAHRRDSPYPPFLHSPALAAKSAAPPPEHPLLAAKSRGSPDTGGEMSSATFRFSAAAMRALLSAVEPGTTPFAALAALFWLRV

SEQ ID NO: 139942 - protein, 52 aa, Oryza sativa
  Clone ID: PAT_MRT4530_41188C.1.pep
SFQLFNMWIIFKLITNRLLMKQSSLALKECSIPCHLVSLALQLSQFHNYSFM

SEQ ID NO: 139943 - protein, 56 aa, Oryza sativa
  Clone ID: PAT_MRT4530_41189C.1.pep
IIKKSMEHALFVVYPTQESNSRCSLYTTLLQQPPFTRYRAKQRSNDYLFFKKKGEK

SEQ ID NO: 139944 - protein, 88 aa, Oryza sativa
  Clone ID: PAT_MRT4530_4118C.1.pep
MASRRRCPVVANRKERHPPLHYSTASEERMRRPDTPSSRRAAAGCGCRRRCPWEGEAATGVVGKSTAVPAVGPATTLGIGMGHRRRHA

SEQ ID NO: 139945 - protein, 136 aa, Oryza sativa
  unsure (1)..(136): unsure at all Xaa locations
  Clone ID: PAT_MRT4530_41190C.1.pep
GRPLRLFCIRTPCRPTKGRQGFSCKKNHPPSPSVPPPFATPADLINPDXPQPFSADISWQMTSGSSHGHGHCNGSHCPPLMKALMLLVVVTLILLAVTANGLFMFSWHRWHKEKGHRLAADRHGLHPEILLCLSPD

SEQ ID NO: 139946 - protein, 900 aa, Oryza sativa
  Clone ID: PAT_MRT4530_41191C.1.pep
MVPPPRRRGRLETGSAPAATNVASSPVLALPPADRFPPPLPSNAMSLHSLKETLQSSSFSQPQSESQPRSPPPLLARRPPKTSLSQQLLRLDASSSSSSFSVSPPPPPRTSPTSDAAADDAPPLPEEEDEVPCIRPRASLPPAASLDSRGPYEPLALSPPGERPVVQVPSSINCRLLVHQRDGVRFLYNLYRNNHGGVLGDDMGLGKTIQTIAFLSAVIGKDNDHGDQLVEGRKIAPILILCPTSVIRNWENEFAEWARCSVAVYHGPNRDLVLQKVETQRLEIVITSFDTFRIHGKILCGISWDLVVVDEAHRLKNEKSKLYTACLEITTRKRFGLTGTIMQNKIMELFNLFDWIVPGCLGDREHFRVYYDEPLKHGQRFSAPERFVQVADKRKKHLVSVLSKFLLRRTKEETIGHLMLGKEDNIVFCRMSDVQKRVYRRMLQQPDVQILINKDLPCSCGSPLTQVECCKRTEPHGIIWSYLHRDNPEGCSLCPFCLVLPCLGKLQQISNHLELIKPNLKDEIEKQKKDAELAAAVFDTDIELVGGGAKSENFMGLSDAEHCGKMRALERLLSLWTLQGDKILLFSYSVRMLDILEKFLIRKGYCFSRFDGTTPMNARQLLIDEFNRCPSKQVFLISTRAGNLGVNLVSANRVVIFDPSWNPAQDLQAQDRSFRFGQRRHVTVFRLLGAGSLEELIYSRQIYKQQLSNIAVSGKIEKRYFEGVQDDKKFQGELFGICNLFRDLSDKLFTSEIIEMHGEHGKGNTAETIGIREIVDTNIFGTQDQMKSSMTAIHNENKNLYHCGIVYAHRNEDVVNTRTNEASNCAEDKTVPRHLEELQSKKNETMHTIKAKSYSLVQKKKEFSRIASFMGMNDLEFSKWLLSVSPLQRHEVLDRYRNAK

SEQ ID NO: 139947 - protein, 460 aa, Oryza sativa
  Clone ID: PAT_MRT4530_41192C.1.pep
MAAPPHDHGGRLRVLRTEHVTPSSTGDDADALSERALPLKPVEPVERLFLYRLAPGAAVHGALSHLADSLSRALRAFYPLAGRIRLAPGKTDRYELFYQPGDAVAFTVAEHDGAGVDELATDDPREVATIAPLVPALPRGGAVLAVQATVLLGLRPAAPRVLALGVTVHHAACDGASSTHFLHTWAASACAAAGNVPPEPPVMDHSFIVDRKDIHDLFAAPRAQKGFDSPDAMDRLVATYALSSAQLQSIKDAVAGEAARRGVVPPPRCTSIVATYGVMWLCHLRATHGHNNDGGHDDGGGRAYFLFVTDHRRRMEGRVPSRYFGNCVGPCYASMPRKAAATATVTDGVFTACSAVAAAIDEAVHGETGYWERYPERIVEARRDGAPFSVAGSPRFRVYDVDFGFGTPAKVEIASVAKTGAMSVAEGRGGSGGIEVGIALPPEHMGRFRTYLADVIAGVI

SEQ ID NO: 139948 - protein, 174 aa, Oryza sativa
  unsure (1)..(174): unsure at all Xaa locations
  Clone ID: PAT_MRT4530_41193C.1.pep
MAGPCGSFAFGPLAAPPKGGKGFHAKKTTLRHRPFLPRLPRQLAAHHWGGRGGLQGANNTHLNMXLPALRLCSPADLINPDXPQPFSADISWQMTSGSSHGHGHCNGSHCPPLMKALMLLVVVTLILLAVTANGLFMFSWHRWHKEKGHRLAAGGRRLHNTLTDDKSPKSLIIF

SEQ ID NO: 139949 - protein, 102 aa, Oryza sativa
  unsure (1)..(102): unsure at all Xaa locations
  Clone ID: PAT_MRT4530_41194C.1.pep
LQYXIPXXAEPTXXFPCHYRWDTVGLSFDPETGAKNRELEVIHSRWAILGALGCVFPELLARNGVKFGEAVWFKAGSHIFIEGRLDYLCNPSLIHAHSILIH

SEQ ID NO: 139950 - protein, 90 aa, Oryza sativa
  Clone ID: PAT_MRT4530_41195C.1.pep
SITPPREPASRGVLCHRSPATPRAPSSSSAPPPPGDPPGCLPPPRRVLPAPTGLAPRWGLPCSPQTLTLALAHPRRGGCLGNRLHIWRTF

SEQ ID NO: 139951 - protein, 790 aa, Oryza sativa
  unsure (1)..(790): unsure at all Xaa locations
  Clone ID: PAT_MRT4530_41196C.1.pep
DDSTAFXGVSLVDDVELAKLVSSGALVEGQAFAPGKTVVPKPVDNRTVVFAVFFEAGLRFPCNVLLPEILRLFEVELPQLSPSALVRIAIFDWACRTSGFEPNAELFGAIFFATVNSKMVITPAGTKKTVFGSVNFNVRPERSDLWPVNAAMSKWDRHWMARWFYHTIPFEVGSKSAKALRCRRRAIAPNRRPKIAVDGTMEARFVLLRKVCSRLSCRDLVEEFCMLQIFPLSQSWQVAVEQGEEVDGLPNLILPKGANMLTLDQAEAEARRMIGDVSVVEYSQLLTRQAARRANRVYNGELPPRANPQKAVDEAGPSRKWMRGQVKLAPKKRRVPASFDSDADDEDDAKERDGEEEGEEEEEVEAVADKAAGEAVEDRADTPRYTPTPSPGHNENGVESNSSPLRRKDLEGAKALVAFSSGAAAKGGPVKKVAKKKGLVDVARVFSDDESSDGTPTSPTGRSLDLSAAPIPPLGAAGVDGSTAAGASASAERIVMAAAKVFGSPPHQPVASPLMEAKGKKAVAETFASEYSLSVPRFAPGDFETRVDLLPFVEGVSNLVLPASAPSLFTELNEFDEGCSAIKSLAVRILVAHCSTERIVRARLDGFKSRLRAKDDELGRKNLEMEALANTLKEAKEVRKAEASAAEESRRFSQEMVKTTESARTACQMLRLALIDMGAKVRGVPSEDASAFDFSEWTQQAGGSVSDSTTAYGDCCARVSAAFTMGLLQQFGCEHIAEFPKYAKGDWEISAQDISPALRAWRKQFWQKDGRSAAKAHLLEQLAKAEAADI

SEQ ID NO: 139952 - protein, 665 aa, Oryza sativa
  Clone ID: PAT_MRT4530_41197C.1.pep
MNSPKPPPASSSPSCRLPPPQAESDNVSKIDWDTVDFRGLVACVLYMRLPRRQMFSVYVPQGRCRCLGLTIRVPPETCSHFRYVKIHVSSDSDNGGNVERDMDDSDNGGNVEWDADGLPEGADGWVYGRARPAGDLACRIGRGNRPAVWSKGLMPSANKPLTDKGEIGASAETVQTMWYGVSLVDDVELAKLVSSGALVEGQAFTPGKTVVPKPVDNRTVVYAVFFEAGLRFPYNVLLPEILRLFQVELPQLSPSALVRIAIFDWACRISGFEPNAELFGAIFFATVNSKTVITLAGTKKTVFGSVNFNPVASPLIEAKGKRAVAETSASEYSLSVPHFAPGDFETRADLLPFVEGVSNLVLPASAPSLFTELNEFDEGCSGIKSLAARILAAHCSTERTVRARLDGFKSLLRAKDDELGRKNLEMEALANTLKEAKAENKRLQSELEKWKEARAEVDRLKAELEKEKAHSAVLIDYYNLTEPKMESLRQKASRAEASAAEESRRFSREMAKTTESARTACQTLRLALTDMGAKMRGVTTEDASAFDFSEWTQQAGGSVSDCPTVYGDCCARVSAAFTMGLLQQFGCEHIAEFPKYTKGDWEISTQDISPALRAWRKQFWQKDGRSAAKARLLEQLAKAEAADLCEEEDVAAGGGGGDAQDHPEV

SEQ ID NO: 139953 - protein, 919 aa, Oryza sativa
  unsure (1)..(919): unsure at all Xaa locations
  Clone ID: PAT_MRT4530_41198C.1.pep
MGRLAIAGLMGRRGFLSPCGSELVKAKSSSFGRQSSPCTLRLRRLWPGATLRLAPFCSIAFAMGFGRFGRRASCHPPTSPSRARHLSTPQAFRRISFFATANTPFVMAPRKPNPTSAKGPDPGRVDDDSTAFLGVSLVDDVKLAKLVSSGAKLVEGQAFAPGKIVVPKPIDNRTVVFAVFFEAGLRFPCNVLLPEILRLFEVELPQLSPLALVRIAIFDWACRTSGFEPNAELFGAILFATVNSKMVITPAGMKKTVFGSVNFNVRPEWSDLWPVNAAMSKWDRHWMARWFYHTIPFEAGSESAKALRCRRRAIAPNRRPKIAVDGAMEARFILLRKVCSRLSCRDLVEEFLLTLDQAEAEARRIIGDVSVVEYSQLLTRPAAGRANRVYNGELPPRANPQKADDEAGPSRKRMRGQVKLAPKKRRVPASSNSDADDEDDAEERDGEEEGEEEEEVEAVADKAAGEAVEDRADTPGYTPTPSPGHNETGVESNSSPLRRKDLEGAKALVAFSSGTAVKGGPVKKVAKKRGLVDVARVFSDDESSDGTPTSPAGRSLDLSAAPIPPLGAAGVDGSTAAGASASAERIVMAAAKVFGSPPHQPVASPLMEAKGKRAVAETSASEYSLSVPRFAPGDFETLADLLPFVEGVSNLVLPASAPSLFTELNKFDEGCSAIKSLAVRILVAHCSTERTVRARLDGFKSRLQAKDDELGRKNLEMEALANSLKEAKAENKRLQSELEKGKEARAEVDCLKAELEKEKGHTAVLIDYYNLTEPKMEALRQEVRKAEASAAEESRRFSREMVKTTESARTACQTLRLALTDMGAKVRGVPSEDASAFDFSEWTQQAGGSVSDCATAYGDCCARVSAAFTMGLLQQFGCEHIAEFPKYAXGDWEISAQDISPALRAWRKQFWQKDGRSAA

SEQ ID NO: 139954 - protein, 321 aa, Oryza sativa
  Clone ID: PAT_MRT4530_41199C.1.pep
MAPRKPNPTSAKGPDPGRVDDNSTAFLGVSLVDDVELAKLVSSGALVKGQAFAPGKTVVPKPVDNQTVVELPQLSPSALVRIAIFDWACRTSGFEPNAELFGAIFFATVNSKTVITPAGTKKTVFGSVNFNVRPERSDLWPMNAAMSKWDRHWMARAIAPNRRPKIAVDGTMEARFVLLRKVCSRLSYRDLVEEFCMLRIFPISQSWQVAVEQGEEVNGLPNLILPKGANTAFTMGLLQQFGCEHIAEFPKYTKGDWEISAQDISPALRAWRKQFWQKDGSSAAKARLLEQLAKAEAADLCLEEGATAGGGGGDAQNHQEV

SEQ ID NO: 139955 - protein, 41 aa, Oryza sativa
  Clone ID: PAT_MRT4530_4119C.1.pep
IRRPDIPLPSPPESRRPTLPAASAAAPSRQPPRPASGQRHS

SEQ ID NO: 139956 - protein, 57 aa, Oryza sativa
  Clone ID: PAT_MRT4530_411C.1.pep
RPFLVQMGKKAFVARMSPLGDDRPRFGFFLINWEWDQGGPSWIKCMFKIDPFCWVSL

SEQ ID NO: 139957 - protein, 593 aa, Oryza sativa
  Clone ID: PAT_MRT4530_41200C.1.pep
MEEQQRPVQPAGGGGGGGAPPEEQWRGAVEAALPGTPASAAWPHVASFYAAHRYLPGIDVCERVGDGGEDGGLLLVPGCVRHVASSAAGLWAREELLEAPDHAARRLRYAVVDSNMGFGRYVATLRVLDGGSGCRIAWAFECDAVCGEGWSEAALVARLAASVDGMAERVQQAVAAEAEARAGEEEEDGVAGTSRVRCVQDKPGGRAAIRGGGGGGADHVRHREGGYVQPRRRGLGRVAARCRLPALIYVLDSAMSAPRHEWDRPAGMLVVLEWTLKCGGGGGPALISLPAASFFAGNLAGSFLLTTLADTHLGRRKMLVMSLANMSVAVVITAFSPNVWVNAALRFVCRFGRSMAGTSAMVLSTELVGKWWRNTESPRWLLVHGRKQEAIEALRQIASLNDGEGITMSSFTMLDMCAVEVGDGVAGGEGMLAMLRSICEWWWALQRLATITTASFSIGVVYYGMPLSVGSLSFDLYSVAYNAAAELPSSFLSWLLMGRFNQRSSVVELTAVSGLCSLACVVIPADPEAGTGGLRLAAELSSFFASCATTRSSRTTASRRGLGRAASTCAAAPGRRPAPPRASRLPLRCTLAW

SEQ ID NO: 139958 - protein, 785 aa, Oryza sativa
  Clone ID: PAT_MRT4530_41201C.1.pep
MAPRKPNPGSAKGPDPGRVDDDSTAFLGVSLVDDVELAKLVSSGALVEGQAFAPGKAVVPKPIDNRTVVFAVFFEAGLRFPCNVLLPEILRLFQVELPQLSPLALVRIAIFDWACRTSGFEPNAELFGAIFFATVNSKTVITPAGTKKTVFGSVNFNVRPERSDLWSVNAAMSKWDRHWMARWFYHTIPFEAGSESVKALRCRRRAIAPNRRPKIAVDGAMEARFVLLRKVCSRLSCRDLVEEFCMLRIFPLSQSWQVAVDQGEEVDGLPNLILPEGANMLTLDQAETEARRMIGDVSVVEYSQLLTRQSAGRANWVYNGELPPRANLHKADDDAGPSRKRMRGQVKLAPRKRRAPASSDSDADDEDDAEERDGEDEGEEEEEDVADKAANEAVEYRVDTPGYIPTPSPGHNETRVESNSSPLRRKDLEGAKALIAFSSGAALKEAKVFGSPPHQPVASLLIEAKGKRAVAETSASEYSLSVPRFALGDFETRADLLPFVEGVSNLVLPASAPSLFTELNEFDEGCSAIKSLAVRDDELGRKNLEMEALANTLKEAKVENKRLQSELEKGKEARAKVDRLKAELEKEKAHTAVLIDYYNLTEPKMETLRQEVRKAEASAAEKSRRFLREMVKTAESARTACQTLRLALTDMGAKVRGVPSEDASAFDFSEWTQQAGGSVSDCATAYGDCCARVSAAFTMGLLQQFGCEHIAEFPKYARGDWEISAQDISPALRAWRKQFWQKDDRSAAKARLLEQLAKAEAADLCEDEGAAAGGGGGDARDHPEV

SEQ ID NO: 139959 - protein, 724 aa, Oryza sativa
  unsure (1)..(724): unsure at all Xaa locations
  Clone ID: PAT_MRT4530_41202C.1.pep
MAPRRPNPASAKGLDPGRVDDDSTAFLGVSLMDDVELAKLVSSGALVEGQAFALGKAMVLKPIDNRTVVFAIFFEAGLRYPYNVLLPEILRLFQVELPQPSPSALVRTAIFDWACRTSGFEPNAELFGAIFFATVNSKTVITPAGTRKTVFGSVNFNVRPERSDLWPVNAAMSKWDRHWMARWFYHTIPFEAGSESAKALRCRRRAIAPNRKPKIAVDGATEARFVLLRKACSRLSCRDLVEEFCMLRIFPLSQSWQVTVEQSEEVDSLPNLVLPKGTNMLTLDQAEAESRKMIGDVSVVEFSQLLTRQAAGRANRVCNGELPPRANLHKTDDETGPSRKRMRGQNIMAKRRGGEEEVEIMVEKTTGEAVGGRAETPGYTPTLSPGHNETGVERGEGPSCILFGCSGEGRXVKKVAKKKGLVDVARVFRDDESSDGTPTSPAGRSLDLSAAPVPPLGAAGAGGSTAAGASASAERIVTAAAKVFGSPSRQPVASPLIEAKGKRAVVETSASEYSLPLPRFAPGDFETRADLLPFVEGVSNLVLPASAPRLFTELNEFDEGCSAIKSLAVRAELEKEKAHTAVLIDYYNLTEPKMEALRQEVRKAKASAAVESRWFSREMVKTTESARTACQTLRLALTDMGMKVRDVPSEDASAFDFSEWTQQAGGSVSDCATAYGDCCARVSAAFTMGLLQQFGCEHIAEFPKYAKGDWEISAQDISPALRAW

SEQ ID NO: 139960 - protein, 829 aa, Oryza sativa
  Clone ID: PAT_MRT4530_41203C.1.pep
MAPRKPNPTSAKGPDPGRVDDDSTAFLGVSLVDDVELAKLVSSGALVEGQAFAPGKTVVPKPVDNRMVLSPSALVWIAIFDWACRTSGFEPNAELFGAIFFATVNSKTVITPAGTKKTVFGSVNFNVRPKRFDLWLVNAAMSKWDRHWMARWFYHTIPFEAGSESAKALWCQRRAIAPNRRPKIAVDGAMEARFVLLWKSWQVAVEQGEEVDSLPNLILPEGANMLTLDQAETEARRMIGDVSVVEYSQLLMRQAAGRVNRVYNGELPPRTNPQKADDEAGPSRKRMRGQVKLAPKKRRVPASSDSDADDEDDAEERDGEEEGEEEEEVEAVADKAAGEAVEDRADTPGYTPTPSPGHNETRVESNSSPLHRKDLEGAKALVAFSSGAAAKGGPVKKVAKKKGLVDVARVFSDNESSDGTPTSPAGCSLDLSAAPIPPLGAAGVDGSSATGASASAERIVMAAAKVFGSTPYQPVASPLMEAKGKRAVAETSASEYSLSVPRFAPGDFETRADLLPFVEGVSNLVLPASAPSLFTELNEFDEGCSAIKSLAVRILAAHCSMERTVRARLDGFKSRLRAKDDELGRKNLEMEALANTLKEAKAENKRLQLELEKGKEARAKVDRLKAEQEKEKAHTAVLIDYYNLTEPKMEALRQEVRKAEASAAEESRRFSWEMVKTTESARTVCQTLRLALTDMGAKVRGVPSEDALAFDFSEWTQQAGGSVSDCATAYGDCCARVSAAFTMGLLQQFGYEHIAEFPKYAKGDWEISAQDISPALRAWRKQFWQKDGRSAAKARLLEQLAKAEAADICEEEGAAAGWGGGDAQDHPEV

SEQ ID NO: 139961 - protein, 53 aa, Oryza sativa
  Clone ID: PAT_MRT4530_41204C.1.pep
FGFLIFLVFFFFFFFFFFFFFFFLAPGPQKKIHFFPGAGYSPRPDFWPKGNLF

SEQ ID NO: 139962 - protein, 823 aa, Oryza sativa
  Clone ID: PAT_MRT4530_41205C.1.pep
MGRLAIAGLMGWKGFLSPRGGELVKAKSSSFGRQSSPCTLRLRRLWPGATLRLAPLLLHSLRHGFRQVWSKSLMPSANKPLTGKGETGASAETVQTMWFEPNAELFGAIFFATVNSKTVITPAGTKKTVFGSVNFNVRPERSDLWPVNAAMSKWDRHWMARWFYHTIPFEASSESAKALRCRRRAIAPNRRPKIAVDGAMEARFVLLRKVCSRLSCRDLVEEFCMLRIFPLSQSWQVAVEQGEEVDGLPNLILPEGANVLTLDQAEAEARRMIGDVSVVEYSQLLTRQAAGRANRVYNGELPPRANPQKADDEAGPSRKRMRGQVKLAPKKRRVPASSDSDADDEDDAEERDGEEEGEEEEEVEAVADKAAGEAVEDRADTPGYTPTPSPGHNETRVESNSSPLCRKDLEGVKALVAFSSGAAAKGGPVKKVAKKKGLVDVTRVFSDDESSDGTPTSPAGRSVDLSAAPIPPLGAAGVDVFGSPPHQPVDSPLMEAKGKRAVAETSTSEYSLPVPRFALGDFETRADLLPFVEGVSNLVLPASALSLFTELNEFDEGCSAIKSLAVRILAAHCSTERTVRARLDGFKSHLRAKDDELGRKNLEMEALANTLKEAKAENKRLQSKLEKGKEARAEVDRLKAELEKEKAHTAVLIDYYNLTEPKMEALRQEVRKAKASAVEESRRFSQEMVKTTESARTACQTLRLALTDMGAKAGGSVSDYATAYGDCCARVSAAFTMGLLQQFGYEHIAEFPKYAKGDWEISGQDISPALRAWRKQFWQKDGRSAAKARLLEQLAKAEAADICEEEGAAAGGGGGDAQDHPEV

SEQ ID NO: 139963 - protein, 686 aa, Oryza sativa
  Clone ID: PAT_MRT4530_41206C.1.pep
MGRLAIAGLMGRKGFLGPRGGELVKAKSSSFGRQSSPCTLRLRRLWPGATLRLAPFLLHSLRHGFRQVWSKGLMPSANKPLMGKGETGASAETVQTMWYAQRRALWAIFFATVNSKTVITPAGTKKTVFGSVNFNVRPERSDLWPVNATMSKWDRHWMARWFYHTIPFEAGSESAKALRCRRRAIALNRRSKIAVDGAMEARPKDKARRMIGDVSVVEYSQLLTRQATGRANRVYNGELPPRANPQKVDDEAGPSRKRMRGQVKLAPKKRRVPASSDSDADDEDDAEERDGEEEGEEEEEVEVVADKAAVAKALVAFSSGASAKGGLVKKVAKKKGLVDVARVFSDDESSDRTPTSPAGRSLDLSAAPIPPLGATGVDGSTTAGASASAERIVMAAAKVFGSPPHQPVASPLMEAKGKRAVAETSASEYSLSVPRFAPGDFEMRADLLSFVEGVSNLVLPASAPSLFTELNEFDEECSAIKSLAVRDDELGRKNLEMEALANTLKEAKAENKQLQSELEKGKEARAEVDRLKAELEKEKAHTAVLIDYYNLTEPKMEALRQEVRKAEASAAEESRRFSREMVKSTESARTACQTLRLALTDMGAKVRGVPSEDASAFDFSEWTQQAGGSVSDCATAYGDCCARVSAAFTMGLLQQFGCEHIAEFPKYAKGDWEISAQDISPALRAW

SEQ ID NO: 139964 - protein, 74 aa, Oryza sativa
  Clone ID: PAT_MRT4530_41207C.1.pep
PLPCYTVKPFPLNRSVWRLSVKYARLPLLLLHHRRRHHRDIGVHLGHGRSLYGSAEQGRSSTRTLEGLARADAW

SEQ ID NO: 139965 - protein, 479 aa, Oryza sativa
  Clone ID: PAT_MRT4530_41208C.1.pep
MAALCTIITAMVTTKLARVRRPITLNPKSKRPLPPVVNVIALLEHLPRLCTKGVIPVYKGSVFTVSLFGLKATFLVGPEVSAHFYQGMDSEISQGDLYEFTVPLFGKGVGFDIDNATRTEHLRFFIDAIKTSKLRNHVNSMVQEVEDYFAKWGENGIVDIKHEFEKLLMLISGHCLLGKEVRDNMFDEVFSLFHELDSGVGLGSVIFPYIPIPSHIRCDKAHAKLAKIFSKIVRSRRDSNRPAEQDVLQYLIDSKHRDGNSTTEQEVTGWIISMVFAGKHTSTNSTTWTGACLLTHDKFLTEALDEQKHMIQKHGDHIDYNVLLDMDILHCCIKEALRMHPVAPIIYRKAQKSFVVRTREGDAYDIPEGHNLLSPMIFNNRLPYIYKDPHMYDPDRFAPKREEDKVGGMFSYTSFGGGRHICIGEAYAYMQIKVIWSHLLRNFELKLESPFPKTNWSKILLEPWGKVMVSYKRRRLPTA

SEQ ID NO: 139966 - protein, 345 aa, Oryza sativa
  Clone ID: PAT_MRT4530_41209C.1.pep
MPSFPSIFFCCLALLLSFFLSFFPASSSPSRSSPLLSAADLLLREPELLLLPRAAGKNQQAELAVSVKKKKIGDSVELPCSNVRSTHHLYNFFCLVVPGKMGVRSKLQAQIHGFIGTVFVWYNSWTDHASKSSCSSLSTSTQESEEDVTVGTLLTEAKNSGRSLGKRLSHLDSIPHTPRVNGQIPDVNNATIDHETLLERLGTYGLAEFQIEGDGNCQFRALADQIFRNPDYHKHVRKSVVKQLKEFRKHYEGYVPMEYKVYLKKMKRSGEWGDHVTLQAAADRFAAKICLLTSFRDTCLIEIVPRGATPTKELWLSFWSEVHYNSLYATEDLPNRKTRKKHWLF

SEQ ID NO: 139967 - protein, 121 aa, Oryza sativa
  Clone ID: PAT_MRT4530_4120C.1.pep
MAPGDCYLIKEALYTGLNFSSLARKRNAMIKVTNTPHSSCRAVPARPLQDAAQAQPNGPTGLFVPGRHKHGPKDGSRPAALRRNSGGDAAAVACGFVVPSRRRGSDSHTHPAPPRRLVAAT

SEQ ID NO: 139968 - protein, 61 aa, Oryza sativa
  Clone ID: PAT_MRT4530_41210C.1.pep
FAAKICLLTSLRDTCLIEIVPRGATPTKELWLSFWSEVHYNSLYATEDLPNRKTRKKHWLF

SEQ ID NO: 139969 - protein, 78 aa, Oryza sativa
  Clone ID: PAT_MRT4530_41211C.1.pep
MENIYTSRVIFKVLLGGDRVFVISYKIQCLRVLLGDQDDPWYKRDPQGRILVPTYPNTLIIRYTSITRRQLYTPQTCY

SEQ ID NO: 139970 - protein, 165 aa, Oryza sativa
  unsure (1)..(165): unsure at all Xaa locations
  Clone ID: PAT_MRT4530_41212C.1.pep
MSEQQDHASKSSCSSLSTSTQESEEDVTVGTLLTEAKNSGRSLGKRLSHLDSIPHTPRVNGQIPDVNNATIDHETLLERLGTYGLAEFQIEGDGNCQFRALADQIFRNPDYHKHVRKSVVKQLKEFRKHYEGYVPMEYKVYLKKMKRSGDXGDHVTLQAAADRVT

SEQ ID NO: 139971 - protein, 51 aa, Oryza sativa
  Clone ID: PAT_MRT4530_41213C.1.pep
AIVKAHYGIDLPSLSVLLHREVGSHVPSGFLINPPERIAPTRSRPRMVIRT

SEQ ID NO: 139972 - protein, 294 aa, Oryza sativa
  unsure (1)..(294): unsure at all Xaa locations
  Clone ID: PAT_MRT4530_41214C.1.pep
LFLKRKRGLLRQRLGFKVDRVHGGGSRERTVEIXLTKXNGRDLAVHGRSTRHGDDDIGDDVITGDGSDGASSPANYGTTALTKGIYRLRTARRTHRXPKQRRRRPSARRRRRCSGGPRRKRRGRRGRRRLGDHDGDLPEWRRRPERRRRTAGPAAVTAAHGCTVLGLYRRRETKARVATGARGRRRRPTAVGGGDGKLGLGGERSIRIKLESTDFQTELADDSKREKIEEIEKIVSPQLIQPETERHGGPHLSAGERARAGGLAAGRLGPRERERFGPTFGPKPKENFLKPFSI

SEQ ID NO: 139973 - protein, 93 aa, Oryza sativa
  Clone ID: PAT_MRT4530_41215C.1.pep
STKLCYQMLQLGACTAAAQTIASHIHIHPLPSLPACLRSSLFHHLHIPLRPVVLVIKITATKIQTKLTCIHITPLGVLSHQAQALQVVGSLHP

SEQ ID NO: 139974 - protein, 158 aa, Oryza sativa
  Clone ID: PAT_MRT4530_41216C.1.pep
MAQKYSWGKGGAGKRAPPVSGTRASVHRGPGPPRRSTAGPREPTAQIGPSRSDGHGRCCWGMAWLKAGRSSDGDGWRAVEQPAAAHGTGEASEGGRRKKGGGVLTERHGGSMRPAARNGDGGAPREDSVMELWRRVSLGKGVDRLGLDLRKMKEGLGK

SEQ ID NO: 139975 - protein, 50 aa, Oryza sativa
  Clone ID: PAT_MRT4530_41217C.1.pep
EAAGECINERIAVKSWRRRDTFLVHSPRPLSRLSRDGSGDGDRRWIRPQW

SEQ ID NO: 139976 - protein, 1772 aa, Oryza sativa
  Clone ID: PAT_MRT4530_41218C.1.pep
MAERAVAHNLSPSASGDDGEQNPRRRARTPPSPSRRNLGREEALEEVERSVTSPPAGNGEGRQDGERRLLVYGDGGTPQGALQAAGALLRHPPVVSDPETPARRWLDDVADLVMTTQQRLGAGGRSSATGTSGAAAAGSRSSRRRARRAAAVTRRSSAIPSSTPPTQEDVRGGPDARLNIERRRNGRRAAHATKGASSSGAPLRSGHGGQPPVSPVGGAGCRAFVASLRNVRWPPRFRPTITEKYDGSVNPAEFLQIYTTGIEAAGGDDRVMANFFPMALKGQARGWLMNLPPASVHSWEDLCQQFTMNFQGTYPRPGEEADLHAVQRGDDESLRSYIQRFCQVRNTIPCIPAHAVIYAFRGGVRHNRMLEKIASKEPQTTAELFQLADRVARKEEAWTWNSSGSGVAAPAAPGSAARSERRDRRRKKRAHRGPPERGGLRATKRRRPALPAGSARPASGVPCTTPPSTTSRTAVVKSLAERTRKWEEERRQERREGKAPAAPAGNRRGEAKQKATAEDVDDGDDDLGFQEPGATVATVDGGACAHASRWSLKAMKRELLAAAPTHKATRRARWSEVALTFDQTDHPPCVARGGQIAMMVSPTVCNVKLGRVLRDGGAALNILSPAAFDAIKAPGMVLRPSQPIIGVTPGHTWPLGHIDLPVTFGGPANFRTERVDFDVADLSLPYNAVLGRPTLVKFMVAVHYAYLQMKMPGPGGPITVHGDLKVALACMEQRADHLAAASKPAGSDERLSTSVPAAPRQRMVTCDEVPEDALVSFLRANADVFAWRPADMPGVPREVIEHRLAVRPGARPVRHQLGRNVEAYVDDLVVKTRNQETLLSDLAETFESLRSTRIKLNPDKCVFGVPTGKLLGFLVSARGIEANPEKIRAIERMRPPSKLRDVQCVTGCMAALSRFISRLGEKALSLFKLLKRSGPFTWTEEAEQAFTQLKAYLSSPPVLVAPEPDEPLLLYLAATPQVVSAALVVERNEDNPHSAHPHPVSTRPGREQGGEAPEPNGGPRPPTAGAGPPPACLMVPGAPDPHDGPGATAGRPHLSPSDPEVVGTEAECAPRGLSDEERPGDAAPGEEDRPCRKVQRPVYFISKALRDAKTRYPQAQKMLYAILMASRKLRHYFQAHRVTVVTSYPLGQILHNREGTGRVVKWAIELSEFDLHFEPRHAIKSQALADFVAEWTPAPEPVSVPEASSSPSQLPHTAYWVMQFDGSLSLQGAGAGVTLTSPSGDVLRYLVRLDFRATNNMAEYEGLLAGLRVAAGLGIRRLLVLGDSQLVVNQMDAYVRQVRRMERHFDGIELRHVPRRDNAVADELSRLASSRAQTPPGAFEERLVQPSARPNPLGETDAPERPPRPVGVQASGPEGSAPSSLRLIAWIAEIQAYLADKTLPEDREGSERVQRISKRYVLVEGTLYRRAASGVLLKCIPREQGVELLADIHEGECGAHSASRTLVGKAFRQGFYWPTALNDAVDLFRRCRACQFHARQTHQPAQALQIIPLSWPFAVWGLDILGPFRRAPGGFEYLYVAVDKFTKWPEAYPVIKIDKHSALKFIRGITARFGVPNRIITDNGTQFTKAMAKWSANVEILKGLKTKTFNILKKHGDSWIEELPAVLWANRTTPSRATGETPFFLVYGAEAVLPSELTLRSPRATMYCEADQDQLRRDDLDYLEERRRRAALRAARYQQSLRRYHQRHVRARSLCVDDLVLRRVQTRAGLSKLSPMWEGPYRVIGVPRPGSVRLATGDGTELPNPWNIEHLRRFYP

SEQ ID NO: 139977 - protein, 127 aa, Oryza sativa
  unsure (1)..(127): unsure at all Xaa locations
  Clone ID: PAT_MRT4530_41219C.1.pep
MVWRWQAAASSTHINSRGPEGQWYSFRLVVIVRWENDPQIVASAKETHVMEVEVIDFPNCSSFSLSPLSASHLVSAXSFFSAANPPTMGNEIETGTFPMIGQIEGLKHRGGAVACYVRSSTIFLNKA

SEQ ID NO: 139978 - protein, 94 aa, Oryza sativa
  Clone ID: PAT_MRT4530_4121C.1.pep
GKSPAGYVDPEYLSTYELTDKSDVYSLGVLLVELVTGRPPIERRRDLDPRPTTKWALQRFRGGEVVVAMDPRIRRSPPPSPRRRLKTGAPIGLR

SEQ ID NO: 139979 - protein, 124 aa, Oryza sativa
  Clone ID: PAT_MRT4530_41220C.1.pep
MSKDAEEDSGRALFFLFPGPRPERLLPRCRPLVTAPLLIAGGVGEDPLGFLAQYGLGPNLLLVWDPSRRHMVNLCRLWKCLVMKAWRSPDVADPHGLGDPVAEEDEADPADEEFFQEQAGYDEF

SEQ ID NO: 139980 - protein, 441 aa, Oryza sativa
  Clone ID: PAT_MRT4530_41221C.1.pep
MDHSSSEESDVSDSDIGVHEEKTYNQLRAEKVKVKHGNNTFRCPFCPGKKKQDYSSKDLLQHASGVGAASKRKAKVKATHLALARYLKVDLAGSLESSPQLATVEHQPPGSEEKYVWPWMGILVNLPTELKGKGFVGESEERLRAQFSRFKPLQVTILWNSTDNADYAIVKFAENWNGMKDALAFEKHFNVERYGKTDWNKINCRRDDLFGWVARSDDYNSLEPTGKYLRKNGELKGVCDLEHEGQRKMGRHVGHYACQIEEKNKYLEELKLMNNQNGLKLERMMEEKDQLFEEHNRNIIELQQHACKDSKRIIDENLNLYEELQAKKHEIDRRSNLKQKEADEELLRLVEKHKPEMTSDKQYTHLLLRSSALPVDARFNLHSMASDFLAMLALKPGMDLTGTDIPTPGVSTPAPARDESQEALIIPTGRGEACDRPPVAT

SEQ ID NO: 139981 - protein, 140 aa, Oryza sativa
  unsure (1)..(140): unsure at all Xaa locations
  Clone ID: PAT_MRT4530_41222C.1.pep
WKEQCLRVLQSKFDSQAXSFAPDEEITEALKNCSIGQETNFKQVQKLCMPFIKSKKDEAKSVGPHALNLKLPFGEMNVLEENLELIKRQVGLDHVEVLSASDEATRAKAGAHVSMLDKTPPSPGEPVAIFISKQEFEAQH

SEQ ID NO: 139982 - protein, 259 aa, Oryza sativa
  Clone ID: PAT_MRT4530_41223C.1.pep
MAERAVAHSLSPNASGDDGEQNPRRRARTPPSPSRRNLGRGEALGEVEGSATSPPAGNGGGRRDGARRRLVYGDGGTPQGALQAAGALLRHPPVVPDPETPARRWLDDVADLVMTAQQRLGAGRRSSATGTSGAAAAGSMSSRRRARFRPTITEKYDGSVNPAEFLQIYTTGIEAAGGDDRRFCQVRNTIPCIPAHAVIYAFRGGVRHNRMLEKIASKEPQTTAQLFELADRVARKEEAWTWNSSGSGVAVRPPPSQPL

SEQ ID NO: 139983 - protein, 34 aa, Oryza sativa
  Clone ID: PAT_MRT4530_41224C.1.pep
MAASAFLHGVAWHGTQPIEDVAGTAIAYAYGLRS

SEQ ID NO: 139984 - protein, 119 aa, Oryza sativa
  Clone ID: PAT_MRT4530_41225C.1.pep
MLTTYRRSPYYANTRIATSNVNNGTPGRRILVLQDFDEMGLRDGFPDKKLSTSALGDTAEDIGSASSATRSCSVPTTSEPTSTAEILKSIVNRVVASNLPTKIDDLSHSTGHGWTTREK

SEQ ID NO: 139985 - protein, 65 aa, Oryza sativa
  Clone ID: PAT_MRT4530_41226C.1.pep
SGTQLSFPPPLPPATPAPLHRPPPRPPPPPTHPFASLPSPLDRTSTRSAPAPSSRPQTLTLAPRA

SEQ ID NO: 139986 - protein, 231 aa, Oryza sativa
  Clone ID: PAT_MRT4530_41227C.1.pep
MDSPITSYSTTSAEREIQPNHIGTIIVIDNLVYRDHPSLKLRGVPKDVRSYDVERVRNKRCSDSPITSTSTKLISGTQYRQVFYPEIRYHKRHLALKPILMSLYAVLTRPPRNLRELRLGTPRADKALSDPVETKDHENSIRHYRRLHVSMVLHQDRLRRVRQMLTRLRRRLYAYSITQERLVDVDKEYGMKRWRDESAISDLAGHELEEEDYPVVDYESDLQTAMSTTVR

SEQ ID NO: 139987 - protein, 68 aa, Oryza sativa
  Clone ID: PAT_MRT4530_41228C.1.pep
MHGTPFLDGSGHGETTTAAAGGGSGRRARCGLGTGGGGLPSSTARRIPPPQRRGSGGGSTASGGASPP

SEQ ID NO: 139988 - protein, 419 aa, Oryza sativa
  Clone ID: PAT_MRT4530_41229C.1.pep
PSSSSSHPTESETVLDPNLHSAGSRCNVEARLFADDVTGVRPVTNRSFLSTTCQFSMLHVCPSSYNDFLAMIAMKPGMYLAGVDVSTPGVPTPAPARDECLEALIIPTGRGEAGGWRRRRESGAAPPPFDVDAATSACVSREDDGVAMGEAVQWVVGRRCQRRRTCRRTAVEMSPSAAAQRRAAGSEALRSRQSLARPVVEEADGGGVLHIGANEARGSRQRRRGRTAVGSLGPRQKEGAEAVGTGAERWAVGGLYLGEEDGDSLMTPFGGRSRRREHGGHQIGDDGWRWCVGEAVVIAAGDPELLGERHLLDHPRGHFPGQRKEQRQQQELVPGSTATDLGATKRRSPPSDGGSGSRSGGVNDVEAGGAAVPAWKREAATWGRCETSRTVAAATSSNPPRWSRAEQPTRHRRRRRSGL

SEQ ID NO: 139989 - protein, 1177 aa, Oryza sativa
  Clone ID: PAT_MRT4530_4122C.1.pep
MEDYPEELRTPPLSLVSIVGCPELHPAISAALSSRQPPMNLLALPDFSKASILARTAKARDPLAPPQAPAGILKKDWLLKHRTRVPAAVAAMFRADQVSGDPAQWLQACSDLENLKSVIQGRNTKLVVILVQSQAGDELSEDVTVALRKRAEIDSKHLVVLVERDEMEWTKSLNKLTTVFAELCTTYYKDEGRRVKARIEKRNFSSVELSIRYCFKVAVYAEFRRDWPEALKFYEEGIRVLREMIGTSTRLPPTQRLVEVKAVAEQFHFKISTILLHGGKVVGAITWFRKHIRSYERVVGSPEVAFLHWEWFSRQFLVFGELIETTSTTVPDTLSPRFGTADNALTEWEFQPAYYYQLAANYLREKRYALEFSSSSVSLTKGVNGLPESVMPSVYVGQYVRLFEQGDTVAVLPLSDTEYTSYALSEAERFQDSYEIIALFRKAYESFRSLGATRMASACSGGMAIEYYAAGDFSNAKQLFDGVAGLYRQEGWATLLWENLGYLRECARKLKSLKDFISYSLEMAALPLFSGSGQGNSENKRKNGPAGSPTISSRELIQQEVINILEGKHASENTDDEFDLHLMEESTHLDIDQISPLRIVFLASVAFHDQSVKPDSPMLVSVSLQSHLPCPVMIDKLEVQFNQSDCNFVIVSAQEDCSASNSHVHDGAVQTPLTLFTDKWMRLTHEVKPGQSGKLECLAVKATISKRLVVCCQAESPVSMGEFSLWKFEDQVEALPMKDNVLAFSGQKLIQVEEPDAQVDLVLDCPGPALVGELFTVPVTILSKGHAVHSGELKINLVDAKGGGLLMSPREAEESESHHVELLGVSDVTTENGSKEEVDSIRKIQHSFGVVSVPTLYAGDSWSCKLEIKWHQAMSVMFYVSLGYSLDSTEEAALHRLNVHRSLQIEGKIPMIVSQQFLRPFRREPLLLSRIRSSSDDDKKSSLAFNESNMLILSARNCTEVPLRLHTMTIVSNDDGKQLCSVQQISGISNEYAVIAPSEEYKGIFSVNPHTISPSFFLGEICLSWSRDSSIGESQDSRVIMKERLPEVHIEEPPLVVTMECPPYAILGIPFTFHVKIYNSTSLLQEIKYSLVDSQNFVFSGAHNHAASILPKTEHIVSHKLVPLGSGSQQLPRITITSVRYSAALTPSASAATVFVYPSEPKFNLEKGYSSTDPCVS

SEQ ID NO: 139990 - protein, 454 aa, Oryza sativa
  Clone ID: PAT_MRT4530_41230C.1.pep
MDSSSSFVLVVLILQAVVIGCSSLDELPVQLSNRRLLHDRNHAALLYKDHFPTVGNMTFPTSHQLQNDPNYKPLDSSSHPAEASANKGSSKGFKKWLYIVVIPVAGLIMLAGMAWMFLPCRKKSVATIGPWRTGLSGQLQKAFVSGVPQLQRPELERACEDFSNIVASHPYYTVYKGTLSSGVEIAVVSTTIKSSKDWSKHCEDCFRKKIESLSRINHKNFINLLGFCEEEEPFTRVMVFEYAPNGTLYENLHDEAFDHIDWRSRMRIIMGIAYCIQHMHELNPANVHPDLHSSAVFLSEDCAAKIADLSVWQEVVSDGKKSTANNDHHEPISARLAGNVYSFGILLLEIISGKPPYSENEGSLANLALGCIIKGRSIASMLDSVLESHKENELDVICQIIMECIQSDPTKRPGMREITTRLRETIAISPDAATPRLSPLWWAEVEVLSPVEPR

SEQ ID NO: 139991 - protein, 43 aa, Oryza sativa
  Clone ID: PAT_MRT4530_41231C.1.pep
FFFFFFFFIKSRVTTSYYYHETTTIHTYASRCPAISSVIYKFH

SEQ ID NO: 139992 - protein, 65 aa, Oryza sativa
  Clone ID: PAT_MRT4530_41232C.1.pep
LSEVLRPRSEERQRERKCARHGRRRQVRAATPGVGTPALARDESQEALIIPTGRGEACDRPPVAT

SEQ ID NO: 139993 - protein, 139 aa, Oryza sativa
  Clone ID: PAT_MRT4530_41233C.1.pep
MSGCPSLNLSCDNTSCNLFCCHPKQHEPPPAPHAAATKPPPSPPHDDPPLKPPPQQQFITAQPPPPDEPPLKPPPSFYPAVLPPEPPPPRRPAATPYSNREGVDDDDSHHVAPPSRRSPAARPPSAPETPLPLPCCEKP

SEQ ID NO: 139994 - protein, 79 aa, Oryza sativa
  unsure (1)..(79): unsure at all Xaa locations
  Clone ID: PAT_MRT4530_41234C.1.pep
YCPERPLPLXXRGGILXTXXGGXDVSHGPSRPXAXGXXTGDGGGSGPXXEDKVMEVSLLRGVXXLCFFFLFWVRARVIC

SEQ ID NO: 139995 - protein, 80 aa, Oryza sativa
  Clone ID: PAT_MRT4530_41235C.1.pep
SQPEVTSDKQSTRLLPRSPAFPVDAHFNQLRLGTRARKLLSFRRDGARRVTGRLLPPNPRSDRWLAGVVNARTICPISTA

SEQ ID NO: 139996 - protein, 52 aa, Oryza sativa
  Clone ID: PAT_MRT4530_41236C.1.pep
MTSQPCRIYCRLALFSSSTPLYRYVKWLPNAMRLRKKARTWPIDLLFKPVIE

SEQ ID NO: 139997 - protein, 522 aa, Oryza sativa
  unsure (1)..(522): unsure at all Xaa locations
  Clone ID: PAT_MRT4530_41237C.1.pep
VTRRHVTRPATFLRPLRGSSRSPWCPRRRRRAVARARTLLCVPATALAPREMAAELAAAAALGADVAELRLDRLAGFAPRRDLPVLLAQPRPLPALVTYRPKWEGGEYEGDDEPRFEALLLAMEMGAEYVDIELKVADKFMKLISGKKPETCKLIVSSHNFENTPSTEELENLVAQIQATGADIVKIATTATEIVDVAKMFQILVHCQEKQVPIIGLVMNDRGFISRVLCPKFGGYLTFGSLEKGKESAPAQPTVTDLINVYNIKQIGPDTKVYGIIGKPVGHSKSPILHNEAFRSVGLNAVYVPFLXAKDIGAVNTIIRKPNGKLVGYNTDYPDYVGAISAIEDGIRASQPTDTTTSPLAGRLFVVIGAGGAGKALAYGAKEKGARVVIANRTFARAQELGNLLGAPALTLAELENYHPEEEMILANTTAIGMHPNVNETPLSKQALKSYAVVFDAVYTPKETRLLREAAECGATVVSGLEMFIRQAMGQFEHFTGMPVVDCSIGQLFLFLPHRWLSMKDR

SEQ ID NO: 139998 - protein, 152 aa, Oryza sativa
  unsure (1)..(152): unsure at all Xaa locations
  Clone ID: PAT_MRT4530_41238C.1.pep
VMNDRGFISRVLCPKFGGYLTFGSLEKGKESAPAQPTVTDLINVYNIKQIGPDTKVYGIIXGKPVGHSKSPILHNEAFRSVGLNAVYVPFLVDDLANFLNTYSSPEFAGFSCTIPHKEAAVRCCDEVDPIAKDIGAVNTIIRKPNGKLVGYN

SEQ ID NO: 139999 - protein, 71 aa, Oryza sativa
  Clone ID: PAT_MRT4530_41239C.1.pep
GATTLKIGQKNTFWGQPTRELFPGENNSAQTGHLSPKAKKLGKKYNGPGTPLFKTPIKIKREGVALGKKNI

SEQ ID NO: 140000 - protein, 191 aa, Oryza sativa
  Clone ID: PAT_MRT4530_4123C.1.pep
MADMLRFPVDPDLRSPPPPPPPPPPPPRDDGHRTRVDLPLFHPPPPPSPTPGLKRDRSPEGELLPLPPPLGSSRPDRLSDHLEGAAAPPRAEMRSASPTPTSERSPSPPLRLDDPVGCRSPPRGERFATIGLEKERAREMDRDTSCYAQYCFNYGYDGLCNGQGNAQSDPNAKGGMTVEEQPVPVYIALDY

SEQ ID NO: 140001 - protein, 235 aa, Oryza sativa
  Clone ID: PAT_MRT4530_41240C.1.pep
MAHTLRLLHDSPLLWIVVQAGNPTPEAAAALRRTAVLHRYVGCCHNINASAPDFRPHQINAALDIVDNHRLDGVLYFADEEGVYSLHLFHHLRQIRRFATWPVPEISQHTNEVVLQGPVCKQGQVVGWHTTHDGNKLRRFHLAMSGFAFNSTMLWDPKLRSHLAWNSIRHPEMVKESLQGSAFVEQLVEDESQMEGIPADCSQIMNWHVPFGSESVVYPKGWRVATDLDVIIPLK

SEQ ID NO: 140002 - protein, 94 aa, Oryza sativa
  unsure (1)..(94): unsure at all Xaa locations
  Clone ID: PAT_MRT4530_41241C.1.pep
MELLPEWSNAESKPVDMGCDNGRDGXLSDKCGARMTKPPATSSGVTWTVEDXTDDDLRRGAWTTEDATAGDKLQHGVWRVGPLAMTPQCSTPNT

SEQ ID NO: 140003 - protein, 101 aa, Oryza sativa
  Clone ID: PAT_MRT4530_41242C.1.pep
VSPSHTSPGSGVLFVACAVVTTALQDVTLAMASFAYAAAGVCHHALRSGQYQAYGRPRLLHEHHHFQAVGAHQAWGRRWPHLRGWAEARGVAAACGGHADV

SEQ ID NO: 140004 - protein, 206 aa, Oryza sativa
  unsure (1)..(206): unsure at all Xaa locations
  Clone ID: PAT_MRT4530_41243C.1.pep
STLKIKFSSYNSIQENLQEEQRGRGPGRLPDGTRCYIDAAWENGITGMEIFFHMPSTHNAIFLKASSEVPCSSLQAELMALQLALEXDCLLNIEGVTLLSDNSTIVETLRKGRFQTEPGHWSLRPIWSQIVATIPESLLQVMWIPRGINKLADQLAKETKSSVNTAPVYVCQNISHLAYPTRRCHANDIRDNFNSRNFVIRHVLCF

SEQ ID NO: 140005 - protein, 128 aa, Oryza sativa
  Clone ID: PAT_MRT4530_41244C.1.pep
STKRLHERRRPALRLKLDIAEAFDSISWQFIILEVLEHKGFGQRWNSWIAMLLRTASMKILLNGMPGDGVVHRRGIRRDDPIISPLFFILVIDSLSSLFVKAQNEGLLQPLSVPHRVSFYVDDVVAFI

SEQ ID NO: 140006 - protein, 74 aa, Oryza sativa
  Clone ID: PAT_MRT4530_41245C.1.pep
MLQHNKFCVFSFAEVLAWVKEKRLSVRNAWMIEEIDWGPNQDLLQVFFHLTMSLLAHRRQEIKLYTFWIRIRAS

SEQ ID NO: 140007 - protein, 2068 aa, Oryza sativa
  unsure (1)..(2068): unsure at all Xaa locations
  Clone ID: PAT_MRT4530_41246C.1.pep
VLHEGQGITRYKRDPXGEAKGIASHRPHTHQSLRNPRSNIPQXLTHPVREYPTSTVVRQVGGLGAQGSTSMTSGLPDNSVIASVDQGVSTSTPLVWTXVGSIVFLVYTVTPISAGPIIIGNERGTATTERNDAPPTIPPTQVENGTSTAPTSGRNPQAAEIHPSCERSKPTRMTTLRPRSWCPVHKTTKHTLEDCPVILHVQAELYACWERGIQHTSPTGTTYCPIHRSRSHDFTNCRIFLWTLKPAHHRVQQPXSSNPVXAKEPDVAPIPDRFVGSVGTNEPSVLHLLEGNEPSSQSPRDVNVVDNTKTSASAAARMPAHQLRNLDAILRESPFDPVTNPDASQLAERLRETVTNLNAAFAEAAGGPEPHRNGERPTKDADGEDLAGRHATGDHSPRERHDPTPPRREDSDLREHLNRRQQSRRDRNEDDHRRHHSPSRREDRGNTPNEDRDHRPHNDRCDNDNNRGQENNRRRQERDGDNRRDRNSQSPYPSRDRGRDHRSRSQAPEPSDPSSSSSSSSSDRPPRRCRDHGPHPIPGNGCRAFTPALRNVRWPEKFLPGSIEKYDGGTDPEEFLQVYSTVLYAAGADDNTLANYLLAALKGSARSWFVHLSPNSISSWEDLWXQFIANFQGTYKRHAIEDDLHALTXNPSESLRDYIRHFNKCKNTIPEITDASVIRAFRSGVRDRYTTQELATRRITSARKLFEIIDRCAHADDALRRKEGKSKAGDEKKKSTDKDAPESSKKRSRKSGXRKSSIEVLATEQVEPSRRPNPQSDDSRKAXCPIHKTSNHAMEDFYVIKKELARQLAIERGKRVRVVETAEEAAAANSDSAFPEYDLHVSHIXADPRRRYPTVVEPTIRNIKVARVLIDGRSSINLLFASTLDAMGIPRSELTPTDXPFHRITPESSSKPLGKIMLPVTFGHAENFRTEQITFDAAEFDTAYNAIIGRTALAKFMAALHYAYQVLKMPGPKGTITIQGNTKLAVQCDKRSLDMVEHTPNPPATTENPKKVSKPKKTPKPDGAIKIIPLSSSNPDKTELVLITFLRDNADVFAWQPLDMPGVPXEVIEHKLMLRPDAKPVKQKLRRFAPDQKQAIRKELDKLLKAGFIREVLHPEXLVNPVIVRKANRKWRMCVDFTDLNKACPKDHFPXPRIDQLVDSTVGCELLSFLDAYSGYHQISMAKEDEEKTTFITPFGVFCYTKMSFGLISAGNTYQRRIQGAVGTQLGQNVEAYVDDIIVKTKKSDSLTDDLRETFDNLRRYQMKLNSEKCTFGVPSGKLLGFLVSGRGIXANLEKIKAIENMKSPTRLKEVQRLTGCMASLSRFIARMGERGQPFFALLKKQDQFEWNQEAENAFIALKRYLSNPLVLVAPHINEELFLYIATTPYSVSTVIVVEREKEQHPVYYVSEALHDAKIRYPQIQKLLYAVVMTSRKLRHYFQAHKVTVVSSFPLGEVIRNKDVVGXIAKWVVELSQFDIHFVPRTTIKSQVLANFVAIWTIPEDSPAAQTDNETWIMAFDGALNSQGAGTGLTSPTGDQFKHAIHLNFRATNNTAEYEGLLAGIKAAAALGVKRLIVKGDSELVANQVHKDYKCSNPELAKYLAEVRKLERKFNDIEVRHVYRKDNVEPDDLARRASRREPLEPGTFLDVLTKPSIKDTHDESTTANTSISQGAAEVTIHKXVANIETTDDWRTPLIRFLESDELPDDDTEVEKLSRQAKIYCMISNDLYKKAPNGILLKCVSSDDGKTLLLDIHEGICGSHAGARTLVGKAFRQGFFWPTTLKDACELKTHQIASTSAPDYPFDMAILMLGARHTRAIPTRTRGLQIPXVPIDNFTKWIEAKPTREIKAENAIKFIKGIFCRYGLPHRILTDNGSQFTNGDFQDYCIELGVKICFASVSHPQSNCNILKISILKYGIKNYLDXILSPKGTPSVQRPFLPLTSRSDLLSASTRVQSTRVQKYTDEEQDERRSDNVNLLEEHRERVAIRAAAYQQALRRYHEKRIRARTLTIGDYVLRRVQNQAGRNKLLPKWEGPYTVVQVLRPGAFKIVDGDGRELSNSWNIDQLRKFYV

SEQ ID NO: 140008 - protein, 241 aa, Oryza sativa
  Clone ID: PAT_MRT4530_41247C.1.pep
DRDLGVLNAAFAEAAGGPEPHRNGERPTKDADGEDLAGRHATDASRVGGIVTKTTIVAITLLLVGRTVLHIDNIIIALPRGEKETTAEEIPQMKIEIIGPIMIDAITTTTEVRRIIAEDRRGTATTDVIETPNLLIRVEIEDAIIAREAKLLSQVTPHPRLRRPLRIGLQDDVATTGHTLSQETDAGRSHQRSAMCDGPRSSYRDRLRNMMEVQTQKNFCKSTPQFSMPLVQTTTLWLIIC

SEQ ID NO: 140009 - protein, 64 aa, Oryza sativa
  Clone ID: PAT_MRT4530_41248C.1.pep
ASQRQGNFKVSTNNEDRFSDLQFTASGNVNIQPNIFLLSGGSVLLSGSNLSMKSNSDISFTADS

SEQ ID NO: 140010 - protein, 367 aa, Oryza sativa
  Clone ID: PAT_MRT4530_41249C.1.pep
MTVMVVGKKQDKFEWNQEAENAFIALKGYLSNSPVLVAPHINEELFLYIATTPYSMSTVNVVEREKVQHPVYYAHKDTIVSSFPLGEVVWNKDVVGRIAKWVVELSQFDVHFVPRIAIKSQVLADFVADWTIPEDRPAAQTDNKTWTMAFDGALDSQGAGVGFILTSSTGNQFKHAIHLNIRATNNMAEYEVLLVGIRAAAALGVKRLIVKGDSELVANQVHKDYKCSSPELAKYLDEVRKLEHKFDGIEVQHVYRKDNVEPDDALPDNGSQFTSGDFQDYCIELGVKICFALVSHPQSNGQVEWANRIVLQGIKTRVHDRLMAYDKTWVEELPSVLWVVRTMPTTCNKETPFLLVYGSEAMLLTEL

SEQ ID NO: 140011 - protein, 252 aa, Oryza sativa
  unsure (1)..(252): unsure at all Xaa locations
  Clone ID: PAT_MRT4530_4124C.1.pep
KTICIDFILKHIILRVSIPLTLTTDQCSSFMSKEVKGFAESYGMKLLSSPYYAHANGHAESSNKVLLKLVKEKVLTNITKIRHEVLSEALWAHRISKHDATKVTTFELVYGHEAVFXVEVNLGSLRYIKHGDLLVKEYNTLMGGNPDDVTDKRLKALEXEKNKQKIAKANNKRAKAKSFEVGDLVWKTILPLGSVSREFGRWSPCWGDPYRLYGIVXGNTYFLETLQGERFQTTINGKYLKXKYLPSVWRDA

SEQ ID NO: 140012 - protein, 76 aa, Oryza sativa
  unsure (1)..(76): unsure at all Xaa locations
  Clone ID: PAT_MRT4530_41250C.1.pep
LYIEDGKRXKSFKHLIYRNKXGAFIEQLTEKLLIXQEGENLQIVDVRNXQSIEVCRSELGTPSALIFLDEMHLFLT

SEQ ID NO: 140013 - protein, 23 aa, Oryza sativa
  Clone ID: PAT_MRT4530_41251C.1.pep
CGLALVVGCQLEMLLLRPPHVII

SEQ ID NO: 140014 - protein, 1065 aa, Oryza sativa
  Clone ID: PAT_MRT4530_41252C.1.pep
MAKAARRGVNPPSSASPSLTNPAIAARGGADPLSLACPSLTDPATAAGGGADRWSPTFPSLMHLAVGVAAVARLPLPHGSGGGGGMGRCGCAVARLSLPHRSSSDGSGRRGSTVAGLPLLMNPTMKMMVASCLVADPKTLILGVASTAPVSSSREKGRREELGGGGGGLVGRRSEHVDGGCSAKKAKKPPVMPPPAAFLFLACVLGASVAVAAAVAADGDGDAMRELRRALAPPDWGAAGEDGKGSYYCAWRGVTCAGGGGGAVVAIDLPRRGLRGDFSAVAGLRALARLDLSFNALRGGVPGEALGGLPGLEFLDLSMNHLSGGVPPSLAGAVGLRFLNLSNNALSGGIPDELRSLRALTELQISGNNLTGAIPPWLAALPALRILSAYENSLSGPIPSGLGLSSKLQVLNLHSNALEGAIPSSLFDLGNLQVLILTVNRLNGTIPDTIGRCSALSNVRIGNNRLAGAIPASIGDATSLTYFEADSNELTGGIPAQLARCANLTLLNLAYNRLAGEVPDVLGELRSLQELIVSSNGLSGEFPRSILRCRNLSKLDLSYNAFRGGLPESVCNGSRLQFLLLDHNEFSGGIPVGIGGCGRLLELQLGNNNLTGEIPAEIGRVKSLQIALNLSFNHLVGPLPRELGRLDKLVALDLSSNEISGEIPGDMRGMLSLIEVNLSNNRLSGAIPVFAPFQKSAASSFSGNTKLCGNPLVVDCGPIYGSSYGMDHRKISYRVALAVVGSCVLIFSVVSLVVALFMWRERQEKEAEAKMAEAGEVVVAAPQVMASNMFIDSLQQAIDFQSCVKATFKDANVVSNGTFSITYKAVMPSGMTKMIWELECLSHINHPNLVRPIGYVIYEDVALLLHHHMPNGTLLQLLHNVDNPDGDNQKPDWPRLLSIAIDVAEGLAFLHHVATIHLDISSGNVFLDSHYNALLGEVEISKLLDPLKGTASISAVAEYAYTMQVTVPGNVYSFGVVLLEILTSKLPVDEEFGEGMDLVKWVHSAPARGETPEQIMDPKLSTVSFAWRKQMLAVLKVAMLCTERAPAKRPKMKKVVEMLQEAKNS

SEQ ID NO: 140015 - protein, 128 aa, Oryza sativa
  unsure (1)..(128): unsure at all Xaa locations
  Clone ID: PAT_MRT4530_41253C.1.pep
MRWWPALPLLLLAVAVAGAGDAAPVCTRPSAAEAIVGSPEACRSPLRRPLGVTEGDDAILARAVNLLHANKEDFAAVLFYASWCPFSQECRLRXEKLACIFPTIRHLAIEESTVRLRTRYRYGIHGYP

SEQ ID NO: 140016 - protein, 178 aa, Oryza sativa
  Clone ID: PAT_MRT4530_41254C.1.pep
MRWWPALPLLLLAVAVAGAGDAAPVCTRPSAAEAIVGSPEACRSPLRRPLGVTEVSRRTTSEFGAVKFSWYRGDDAILARAVNLLHANKEDFAAVLFYASWCPFSQECRLRFEKLACIFPTIRHLAIEESTVRLRTRYRYGIHGYPTLFLINSTVRVRYHGPRTVKSLAAFYNDVSGV

SEQ ID NO: 140017 - protein, 81 aa, Oryza sativa
  Clone ID: PAT_MRT4530_41255C.1.pep
MRHVTFFAAVLVAIFLTSGGGRMSSTAARPTAVGGAGAPPAAVAVELAGTGTGTNASSQPSNCTYGNNVGGQCPPTPGAGH

SEQ ID NO: 140018 - protein, 114 aa, Oryza sativa
  Clone ID: PAT_MRT4530_41256C.1.pep
MARQQLLGLFLVLAIMVAVVWGDPSGGCDQDRQDMIRECKKYEGWPAEPKIEPSEACCAVWQRANIPCLCAGVTKEKEKVWCMEKVVYVAKFCKKPFQPGYQCGSYTVPSSLGQ

SEQ ID NO: 140019 - protein, 101 aa, Oryza sativa
  Clone ID: PAT_MRT4530_41257C.1.pep
TLRFGAGCCGNGMHQQAGRHESRVDRWSIRACDSTELWTGTLLPQRTTITTVPGHTPFTGTEATAVLGRRTSPYDMSFRRMKGRLKIMDRNWCQCKSTLME

SEQ ID NO: 140020 - protein, 144 aa, Oryza sativa
  unsure (1)..(144): unsure at all Xaa locations
  Clone ID: PAT_MRT4530_41258C.1.pep
ARGAGAARRQAVRLRVYMHDIVGGAGQTSVVVVKGPGPANPSMSPGNNFGDTVIIDDVVTEGPSLASSEVGRAXQGTYMLASMARPVFIVDITLVLTDGPYNGSTIVVAGRDDTSEEVRELAVVGGSGMLRERRAVLGGRQWSQ

SEQ ID NO: 140021 - protein, 97 aa, Oryza sativa
  Clone ID: PAT_MRT4530_41259C.1.pep
TNLAKKKKYTESSTILFAMLPPTSKMYHSLQQYTNKCPAWHGTNVLQLQQWFHIAVDKSAVAAHGVCSCTSMRRVKKRKRLQNTKETLNSIKSQPSY

SEQ ID NO: 140022 - protein, 144 aa, Oryza sativa
  Clone ID: PAT_MRT4530_4125C.1.pep
QRPPVAPPRGDAGGEPPPPSPALPSIVAARAAAGKAGWKQGRRRRGFPSPSLVVKAAGAPTRPDDGSEARATASSSGATEHGSGPLLAGSGAPTGGSRGGRQDPPPSRPEATTPRPAKERWGLARPRQCGDDSRGGRPVTVCDA

SEQ ID NO: 140023 - protein, 90 aa, Oryza sativa
  Clone ID: PAT_MRT4530_41260C.1.pep
QRSAKQAVENTNWSSQSDFPDTLYTTVTAVNWSSAHKWSSTREYDSSAIQHGQKVWIILQTTQPQNIQREARILYLLFLMQASTETQIFQ

SEQ ID NO: 140024 - protein, 141 aa, Oryza sativa
  Clone ID: PAT_MRT4530_41261C.1.pep
TKKRSKALKIQKISQKAKGPLKKIIWGVFSPGGGPQEKIGGPGFSKPKTGVTNLPGKISRGGGGKNFLKKIFKTVFIFFKKTFGPNLGVNRLGPKPKNPDPEKKIFCCGQKKKKGGKPPEKKILKTLQTWYLGGGKQKNPR

SEQ ID NO: 140025 - protein, 56 aa, Oryza sativa
  Clone ID: PAT_MRT4530_41262C.1.pep
MGTQHLQASENSKIRSKIRVNHVIIRVVVVTTRSEDLDGTKSARAEVDELRLKRQP

SEQ ID NO: 140026 - protein, 143 aa, Oryza sativa
  unsure (1)..(143): unsure at all Xaa locations
  Clone ID: PAT_MRT4530_41263C.1.pep
EPASRPGKPPPGKPATEQTAPPPAAKATAARQPAPRKTQPAANGAARGTERAGAGGGGGSHTAKXXQDTSKKXPXEXXNAXXPXKXEGRXXAXEGXQEKXXEXXXXGQPXEXXXXDXDQXXXXKNXXXXXXQEHXHEDKQTTP

SEQ ID NO: 140027 - protein, 125 aa, Oryza sativa
  Clone ID: PAT_MRT4530_41264C.1.pep
TSLLLAAPPSVTSRSAMLVARTPARKSSSSSSSSSPSPPSLSLLQPQRRRVVVVMAAAVGGLDEDGPEYLHVLARARLHVLVQDVDPSLLPLGGMHADPELLERREERLEPAHGPSYYHSPTSAP

SEQ ID NO: 140028 - protein, 445 aa, Oryza sativa
  Clone ID: PAT_MRT4530_41265C.1.pep
MELAGSNNKRGRVRGPNDDDDDAGEPDAKRHHHQLLLPWPQQQQQQHPASRIYRVSRASGGKDRHSKVYTAKGIRDRRVRLSVSTAIQFYDLQDRLGYDQPSKAIEWLIKAAAAAIDKLPSLDTASFPTNPASSAAVAAAAAPPLPHAEREQQQQLTKSGCSSTSETSKGSVLSLSRSESRVKARERARERSSAAAAAASKDAGDDAATPTAPTAAPASSQAASFTELLTGMAAANASPADHKQQQAWQPMTVAAATADYIGFAAAAAPHTQPRKSAAGHHSAMPHTFASPAPHLANITPIAMAPAQHFTLTPAAAEHHAEMTHYSFDHFMPVHAAAAAAAAASTPAGGDYNLNFSMSSGLVGVHSRGTLQSNSQSHLSSHHHHHHQQQQQQQQLQRLSAPLDAPNIPFLFSPAAAPTAADTQFAAALQLWDGFRHADIKEKGKH

SEQ ID NO: 140029 - protein, 518 aa, Oryza sativa
  unsure (1)..(518): unsure at all Xaa locations
  Clone ID: PAT_MRT4530_41266C.1.pep
MAQALSLGLLLAFLAIQSCIAIELTDHIDLWPMPTSVSHGTQRLYVSKDITMSMEGSTYPDGKGILKDAFQRVVDLMKLNHVVDGANPSSFVLTGVNVVVHSPEDELKFGVDESYNLSVPTAGYPLRVQIEAQTVFGALHALQNSSRLLGEFLTHQDFLTEDFLLDQMRLHADTSRHYLPVTVIKKVIDTMAYSKLNVLHWHIVDAQSFPIEIPSYPKLWNGSYSFSERYTTSDAVDIVRYAEXEPWEHKDFMSAKISQCQWREARILTWKGILKDAFQRVVDLMKLNHVVDGANPSSFVLTGKFVHLGGDEVNTSCWADESYNLSVPTAGYPLRVQIEGQTVFRSLKLAISLGHDVINGEXTFNNFGDKLDRRTVVHNWLGEDVAPKVVAAGLRCIVSNQDKWYLDHLDATWEGFYTNEPLKGIDDPEQQSLVIGGEDSIWDEEIDASDIEQTIWPRAAAAAERLWTPIEKIAEDPRLVTSRLARFRCLLNQRGVAAAPVAGYGRTAPYEPGPCVRQ

SEQ ID NO: 140030 - protein, 285 aa, Oryza sativa
  Clone ID: PAT_MRT4530_41267C.1.pep
MDPTPHRGGSPSPRFTLQPSRLPPEDMLFCVDVDLETRSEMRIAPGPAAAAAASPGAAGASSGAAAASRQAARPPVKRMDAVKQALLLFVHSKLTMCPDHRFAFASLGDTVSLVKKDFSSDAGSAVEAIQSLDASETRYAMADLTQLFKIAYQEGKRAELQGRLLRVVLIYCRSSTKPQHQWPIKQKNFTLDIIYLHDKPTADNCPQKVYDALVDALEHVSQYEGYILETGQGLARILFRQTCILLSHPLQRCIQDDLDIPKPLAKKNMVTEAAQNEDGMPVSTQ

SEQ ID NO: 140031 - protein, 92 aa, Oryza sativa
  Clone ID: PAT_MRT4530_41268C.1.pep
MSSSDRRRGGNGGGGGGPVAVPLPAPYGDPALPPLIFPHRPAPPPPHPIASARSCPPPIRLGGSTAAAATSPAPEESWGWRPAPRPAAGEAF

SEQ ID NO: 140032 - protein, 42 aa, Oryza sativa
  Clone ID: PAT_MRT4530_41269C.1.pep
RHHRDVRVHLGHGRSICGETKQGRSRTSIAESEARTHAARTV

SEQ ID NO: 140033 - protein, 112 aa, Oryza sativa
  unsure (1)..(112): unsure at all Xaa locations
  Clone ID: PAT_MRT4530_4126C.1.pep
TPAFXPSPNEXPRGDGPGGPRSVRGVGAMHRRVREQLPQGVQGHSSHKGCTAQHSDSNHSRNQLKMYILLTAXGDELIDHVPHYHTILYIENRVQRLIQRGKFCHKKKXXXX

SEQ ID NO: 140034 - protein, 110 aa, Oryza sativa
  unsure (1)..(110): unsure at all Xaa locations
  Clone ID: PAT_MRT4530_41270C.1.pep
QGDHNMGGWDNLVSTFGGLSKLVLVSTAGEHSLHQLNNSDFSSTAGVITISGRCQLYNHVNRPXDLRTTSGXNHMNRNWRYEIGVXAPEIQTRGAPQSLXGSQTKLPTRG

SEQ ID NO: 140035 - protein, 54 aa, Oryza sativa
  unsure (1)..(54): unsure at all Xaa locations
  Clone ID: PAT_MRT4530_41271C.1.pep
YLFFSPQGTINGGTRNRVERGXGNFPGRINPLIKLRGVSXGLYKXFFYTLVWGG

SEQ ID NO: 140036 - protein, 359 aa, Oryza sativa
  Clone ID: PAT_MRT4530_41272C.1.pep
MGHGKEVKTRPDPKVEIQEKGEIFFFYRPKVGKDEARGPDDVQRMYIVLRPEATGDGGDRAVEDKQAPDSGKEGHKNQQPQNSDGDGGGEGGHGKEVVSVTESCRFFRDFQEVNVEEQALLRLIVMGKKSLPDPAAKRGRPYWGYVELVTTDVEHIKDALKEEEYSTATRGTRRRPPARALGEGVYRILKHDSGRRVHTHLVYKLELPLPARRREHDAEADEAGEPQEAMNVEPEASYLIQIKNPEQPPPSGGGGDGGFRGLQSKRRAAFPAHLQGRFGSNHRYAPADPPDLLNYEGCEFLLIAASDDVEEELGLELETETDAEADLEGDGAAAAKCSDLVKMFGEVADVKPLLSGSWD

SEQ ID NO: 140037 - protein, 107 aa, Oryza sativa
  unsure (1)..(107): unsure at all Xaa locations
  Clone ID: PAT_MRT4530_41273C.1.pep
SPPYRSPPRRGYGGRGRSPPRRGYGGRREQGSGSLLVRNIPLSCRGEDLRVPFERFGPVRDVYLPKDYYSGVXXVDPYDASEAQYHMXRQVFFGREITXVVLAAESR

SEQ ID NO: 140038 - protein, 649 aa, Oryza sativa
  Clone ID: PAT_MRT4530_41274C.1.pep
MSTENYDPCYPDQPVVHRYLPVWAKLPAFAAKPAFVWADDGDTAMSYATLTYSQLDAAVERMSSGLLGALRRADTVLVLASPGLRLVKLLFACQRAVLTAVPIIPPDPSRPGAGGAAHSHLLRAVSQTRPRAAVADARYIDAIKKSNAVVDVAGEPDRLAAMLRSLRWLSVDELEQGGANGAAPVTPFVGGEPEDAYLIQYTSGATGAQKPVVITAGAAAHNARAARRAYELHPGSVVVSWLPQYHDCGLMFLLLTVVAGATCVLASPDAFVRRPRLWLELVTEFRATCTPVPSFALPLVLRRGRSPDGRRRRPLELGSLENLILINEPIYKSCVDEFVAEFRGDGLLPASISPSYGLAENCTFVSTAWRSRRCVDLPSYKKLLPSARLSFHMADEEPEIEIIMVDEETGEPVEDGVEGEIWVSSPSNASGYLGHPSATREVFCATLPGKGSCYVRTGDRGVVVVRGAERYLYVVGRSADVLALDVDGGQRSVCAHYIETAAFGGAPDRLRGGCIAAFATSPVPSTSLVVVVAELLKGSGGGGGGGDHKDICEGIKRAVWEEEGVRVGWIVLVDSGVVPKTTSGKLRRGAAREKLLAGKLPILLEARYDGDESSSSVPWDGGEEEMEKCPGMDAAYGSASRRLRLQSFL

SEQ ID NO: 140039 - protein, 200 aa, Oryza sativa
  Clone ID: PAT_MRT4530_41275C.1.pep
MDAGGISNHPHRGTQGLAGGACVMDTGECVGEDLRVPFERFGPVRDVYLPKDYYSGEPRGFAFVEFVDPYDASEAQYHMNRQVFFGREITVVLAAESRKRPEEMRSRARVREVSFPFSLSPLSRSSTVKPKEHDEEKKRRSYSPASRDGDPRDADNGYEKRSPPPDSDGSPPHRRSPRHSSGSPPGSRSRSADVSPARSD

SEQ ID NO: 140040 - protein, 69 aa, Oryza sativa
  Clone ID: PAT_MRT4530_41276C.1.pep
EVMIVLQINFTSYLSSHGPPSTTLLSSLRETNFLNETNLVFIEELRTEKTLSAVIILWQVNRTRGRTRG

SEQ ID NO: 140041 - protein, 80 aa, Oryza sativa
  Clone ID: PAT_MRT4530_41277C.1.pep
AWSIVRATSFEYLDAPVERYCWMLIVPMPYRSPTWERMGWLPTGSRTIGCVAANASLANRRQLPQWASQQPECPSGLVLL

SEQ ID NO: 140042 - protein, 263 aa, Oryza sativa
  Clone ID: PAT_MRT4530_41278C.1.pep
MRRYSPPYRSPPRRGYGGRGRSPPRRGYGGRREQGSGSLLVRNIPLSCRGEDLRVPFERFGPVRDVYLPKDYYSGEPRGFAFVEFVDPYDASEAQYHMNRQVFFGREITVVLAAESRKRPEEMRSRARVRGYSGNEGRRSSYYGRSRSRSRSPHYRGRPRSRSYSPAPRRRDDYSASPPRKDTHPTKSPRRQPKEHDEEKKRRSYSPASRDGDPRDADNGYEKRSPPPDSDGSPPHRRSPRHSSGSPPGSRSRSADVSPARSD

SEQ ID NO: 140043 - protein, 103 aa, Oryza sativa
  Clone ID: PAT_MRT4530_41279C.1.pep
KKFIFLFYYHPKVSQLSTIMAVHHLTASFYNFRKPTYQRVTHTLFTTAPPPRGWVQWVTWGATHRYPQRVRHHPYILQTLAPVSNNAQSAALQLCSPAFRIQK

SEQ ID NO: 140044 - protein, 139 aa, Oryza sativa
  Clone ID: PAT_MRT4530_4127C.1.pep
MAKRPAWPGPAQARPTSHRASTARSALHAGPWAAPPAQARPTSHRAVSGRPEGASGPSPHCLCLGPGLWPIVPCRWRGPGTARWSGRAGTGPTPDGPCRAWAGPKRRAVGPRAFWPSIPLPNVSSVLTVDSSSPSFPAQ

SEQ ID NO: 140045 - protein, 186 aa, Oryza sativa
  Clone ID: PAT_MRT4530_41280C.1.pep
MAAAAAGGGGFEARVARIASTIRVIPDFPKPGIMFQDITTMLLKPDAFRDTIELFVERYKDKGITVIAGVEARGFIFGPPIALALGAKFVPLRKPKKLPGEVISEEYSLEYGTDKIEMHVGAVEPNGRAVVVDDLIATGGTLSAAVKLIERAGAEVVECACVIELPELKGRDKLGNKPVFVLVKAD

SEQ ID NO: 140046 - protein, 283 aa, Oryza sativa
  Clone ID: PAT_MRT4530_41281C.1.pep
MRRRSGIRSFCHGVDSTSTTMQRRLVGADAASSSFLTVPTSTASSVGVAESEAAAAVTLEQMILQLDLEEAAARKAQQQQQPRRASCVNSSDGRVLRSARDALSQYPRFSLDGGRDAMYRASFSDHHHYYYHDAALASSSSGHRRSPPPCRGMPPTVAGESVVWCKPGVVAKLMGLDAVPVPVRGGGQRRGGAAATAGGRRKASGAPPLASVIAGGGGRKRRGRRTGREEEELEKERLFMALHGYDVAVARACHAGALHPSVAPNVSGMGRGAEDGWGFRLPH

SEQ ID NO: 140047 - protein, 105 aa, Oryza sativa
  Clone ID: PAT_MRT4530_41282C.1.pep
LGLSDAFIALPGGFGTLEGLLKVITWAQLGIHHKPVGLLNVDGYYNSLLTFIDKAVEEGFINTSARGIIVMAPPTRQPTRPLTRPVPYHDRVASKLNWEMGHLGY

SEQ ID NO: 140048 - protein, 169 aa, Oryza sativa
  unsure (1)..(169): unsure at all Xaa locations
  Clone ID: PAT_MRT4530_41283C.1.pep
RGDLPCSRSSRSFTNLRENPRSAKIRVEGGSAEPLGRARPRGGGPTEGARGRERRPGGPIPPRGVPVGPTWFGGEAVHARPAGGRGVRRAHAQHVGSPWTAREGGGRREAADRGXFDPVAXEVAPTWRLRGSHAGRERGGRRTGAPTNGGRRRGFTGARRSDSIEREFT

SEQ ID NO: 140049 - protein, 232 aa, Oryza sativa
  unsure (1)..(232): unsure at all Xaa locations
  Clone ID: PAT_MRT4530_41284C.1.pep
PGRVEVAPTWRLRGSHAGRARGGRRTGAPTNGGRRRGFTGARRGDLIEREFTGTKGSTRGVEPTARILRRGADDDESRRRTPAARKGGNGGGVTGIQFKAVGACPGFKKSVSGIGWGGGAPRRASDGGGLRKRAAMAARPCRAAAKLGAVSTREGEGERGRRTEGVTTESGRHGDEWPTARXSEFSVLRPGKGKKGGARSPASRVLARTGLPGAWRRTATARAERATIIARR

SEQ ID NO: 140050 - protein, 42 aa, Oryza sativa
  Clone ID: PAT_MRT4530_41285C.1.pep
KKIMTLFFPQNVNLQGNIFTLLSPPTNVMWDQEFDPLLLSKC

SEQ ID NO: 140051 - protein, 492 aa, Oryza sativa
  unsure (1)..(492): unsure at all Xaa locations
  Clone ID: PAT_MRT4530_41286C.1.pep
PGRVEVAPTWRLRGSHAGRARGGRRTGAPTNGGRRRGFTGARRGDLIEREFTGTKGSTRGVEPTARILRRGADDDESRRRTPAARKGGNGGGVTGIQFKAVGACPGFKKSVSGIGWGGGAPRRASDGGGLRKRAAMAARPCRAAAKLGAVSTRVRWASRATTQAREGEGERGRRTEGVTTESGRHGDEWPTARXSEFSVLRPGKGKKEGARSPASRVLARTGLPANYQLYGNPPPSFHGFQQQGNWLKSAALSFQGFRHQESWMHSPNQVGGSASSHGSESTSPCPATSQAKSVVNIEESSGNNEEAGRKGTWVNWTEEENLRLLSSWLNNSVDPIDSNDKKSEYYWRAVAAEYNNNTRRNDRKRTVVKSRGGTTRRGGGASARRDGEDQVPRCAPARRATRRCAPAGRLTGRCAPASRPMRRCVSRRPSPATTSTTDNIELTTERFFDGHKIGRWRGKATRSGKVAAQMAGGGGADGGERQRHVFTGGGAE

SEQ ID NO: 140052 - protein, 147 aa, Oryza sativa
  Clone ID: PAT_MRT4530_41287C.1.pep
AVFFFSFRFLLSSSSSIDRSLADGDCGGLICEEESGAMAAAEGRRSAPTAIAISPFKIWKTSISVIAEWGVIGTTSPSQLKQQSRVWVTETGVLYTHERLHSGWKTKKALCALLVVYVTITDRCDCKSAMILRGACNSCSVSFTIPT

SEQ ID NO: 140053 - protein, 91 aa, Oryza sativa
  Clone ID: PAT_MRT4530_41288C.1.pep
MATADEVGGGGGGGGAGVGAGDQVRRAKTAALFLAAVALPCLVLYRAAVSPAGLFLRPAALPAPPRGDVDPVLVIHVHDHQKMQEHLFASH

SEQ ID NO: 140054 - protein, 579 aa, Oryza sativa
  unsure (1)..(579): unsure at all Xaa locations
  Clone ID: PAT_MRT4530_41289C.1.pep
FGLFSGGIGAAQRVEGGSAEPLGRARPRGGGPXRGRGGERDGPVDRFHRAGARWGPLVGDTAHGGMGACEGGARVRGGSGPRAARGWTRCAAGPRAACWLSVDRARGXGDGERRLTEVSFDPVASRWRRCGAYVAATRAGRXGGRRTGAPTNGGRRAGFHRSTTRRFDREGVHRYKGKHERGXANGSDPSERGRRRRIAAAHAGGEKRGKRRRGDGDSIQGGGSMSGVKXIRFRHRMGRRSTEEXLATAAASGSGRQWQRGHAERRRSSGRRLRAFEGLVELPRKLERARENDEGEXEGVTTESGRHGDEWPTAREXVLRSQAGEGEEGGCSESRVTRPRTHRPPRCLATNGDGESGASNNNSAAFMFSETRGGFEGRGSGFIGGRVKSFEGNEPDSRERKSRRGAGGHARGPAAGRRSRAVSGKMEKGGGKGSSVLAETGNGRGRGERVRQRDALPPRLGRTRAQGGXSGRPAWAATRRRRPGLTRRRPGGLPRAGERVRNAXGSGGIQRQRRESAPGGERAERESEDXERERTRERESSLSARLGACNARARLREEKRLKEGGGLRGENGPQHPREV

SEQ ID NO: 140055 - protein, 256 aa, Oryza sativa
  unsure (1)..(256): unsure at all Xaa locations
  Clone ID: PAT_MRT4530_4128C.1.pep
LRLQLRSTTLLKRGNNSMAEYNHSTQQATPMMXTCKEIQERVSPPPPTPEVGXPSCAAVNPATGQPDTSGDPTPXAHPRHWCLGKGRAILQIKQLPTPAYGKHYMVSXSADVSKGPAPTDXAPRVSGTRGGHTVDTVHRGRGGTMDRDHGSGPRAAMGRVAKARVWPRPARPSSGXQRQRPGRTATGGGDTAXGRPXRGDRGRGRGVLTVLTQRREGDGKAAVAPRGGTATAVRRYSVSGNRRTAAGRTWGTRREG

SEQ ID NO: 140056 - protein, 96 aa, Oryza sativa
  Clone ID: PAT_MRT4530_41290C.1.pep
PPELDGAQLGPVGWAQRNYMSSKYWAHGWGFPQGFPPECSPQLLLTNPPFMSFLIIWNCFLFLLVFVFVFFFFLNHGHFALPLFSLCFSYKNRFLV

SEQ ID NO: 140057 - protein, 723 aa, Oryza sativa
  Clone ID: PAT_MRT4530_41291C.1.pep
ILQGTMKSATHCSHHPAATGTFFTAMLLGLKFCSCQSQSNLQKCNMGLQLLEDRVYRAALGWFAYAPEWYESQNKSFAQREAQSVSIFVHCLQNERPSGSADSAPKSQGREGEPNMLDQNHPVWGSVDNYTTVREKRKQLLLMLSQNEADRLEVWAQPINTKDAATFRGKISSDKWIDHARTAFAVDPRIAFSMIMRFPTNSALSSEITQLVQTHILELRTIPEALPFFITPKAVDENSSLLQQLPHWAPCSVTQALEFLTPPYKGHPRVMAYVLRVLETYPPETVTFFMPQLVQSLRYDDDKLVEGYLLGAARRSNIFAHILIWHLQGECVPDEPGKEAAAPKATAFHSLLPAVREKIVDGFTPEARDMFEREFEFFDKVTSISGVLFPLPKEERRAGIKRELEKITVPGDDLYLPTATNKFVRGIQVDSGIPLQSAAKVPIMITFNVVDRDGDPNDVKPQACIFKVGDDCRQDVLALQVIALLRDIFQAVGLNLYLFPYGVLPTGPERGIIEVVPNTRSRNQMGETTDGGLLEIFQQDYGPVGSPSFEAVREMFMISSAGYAVASLLLQPKDRHNGNLLFDSHGRLVHIDFGFILEISPGGNMGFESAHFKLSHEMTQLLDPSGTMKSDTWNQFLRLCVKGYLAGRRHMNGIITTVNLMVDSGLPCFSRGEPIANLRKRFHPEMNEREAANFMVRTCVDAYNKWTTAGYDLIQYLQQGIEK

SEQ ID NO: 140058 - protein, 1950 aa, Oryza sativa
  unsure (1)..(1950): unsure at all Xaa locations
  Clone ID: PAT_MRT4530_41292C.1.pep
MEALNELCDLVAAHPDLLLADKLAWLASRCGAPPASASASAQRASRAHLHSLLALARLLPAGAGAGSSLPAPLLAFLASHAFLSPSFWPQSFAPAPFLSRLLPLLAAAPTCPALSSALSAALLAALDVADPASAPLARAFLSAAAASPPTLLPADAAPVASRLLLEFAGSEEAPPKAKGKGEYAAGEENGGVREVVQKFEEEEVEELERKEVAFRLIVHVLGGEGGLESDNVAKVRNAAAKQVRSLSEFLKIRKRDWREQGAQLKTRINTKLLCCQAAVVVLVRSVSAMDVDSKASKDMLQQTLAWFIEATKSCILSSWRKLKICEELFCTLLNVVKLSCEIIEFGWTKDRALVDTFIMRLAAYVRERNDYEEESGNFTPSFPVMRLNVIRLLAELCVCLKKWEVVDMILPLFIEHFEEGEAXIVRGIQVXVAFLSTRVACLGFEKSYRESIVLMTRSYLDKAKAVGSAENNTVPSEATTERIETLPAGFLLVATNLTSTKLRSDYRHRLLSLCSDVGLAAESKSGRSGADLMGPLLPAVAEICSDFDPVSTVEPSLLKLFRNLWFYIVLFGLTHRHKWQILSLXPRETSXNIEESISAIALQAVSGPYMWNSEWCVAVQRIAQGTPPLVVSSVKCQXAEIVCQRVPKXGRRHMNGIITTVNLMVDSGLPCFSRGEPIANLRKRFHPEMNEREAANFMVRTCVDAYNKWTTAGYDLIQYLQQGIEKXSISPFVNGGSCTSIVCSHXILLCRIMLLSGSLYGKNGDFKRLTXVYQCKLNSAYSFFCSFCKRXENIRDVSVKLLTQLKEKFPQVLWNSSCVDLLLISVHNELTSGPVSDPAWVATVRSLYQKIAREWITSALSYAPCTTQGLIQMFAQWSQVLQSSQPNLKRFKCLIGSFSTGILKMIMENFCKPSGAQRSQHTADVVSLLSEIRICSGKNDWNGIRTANVPAVMDSAAAASGAKKEAPDITLEVLSTAVVTATVKCNHAGEIAGMRRLFSSMGGMNTGMSPLGMQSAQPNQSFDEVFLSRFVRLLQDFVVTAEKNQIDNTVFRETCSQSTALLLDHMVSDSRANLDGFSQLIRLLCWCPAYICTPDAMETGIFIWTWLVSAAPSLGPLVLAELVDAWLWTIDTKCGLFASDMNYCGPDAKLRPHLISGEPEAPPEKDPVEAIIAHRLWLGFFIDRFEVVRHDSIEQLLLLGRMLQGTMKSATHFSHHPAATGTFFTAMLLGLKFCSCQSQSNLQKCNMGLQLLEDRVYRAALGWFAYAPEWYESQNKSFAQREAQSVSIFVHCLQNERPSGSADSAPKSQGREGEPNMYRPLVMTVIGMWMRSKYVVAWCREPMLDQNHPVWGSVDNYTTVREKRKQLLLMLSQNEADRLEVWAQPINTKDAATFRGKISSDKWIDHARTAFAVDPRIAFSMIMRFPTNSALSSEITQLVQTHILELRTIPEALPFFITPKAVDENSSLLQQLPHWAPCSVTQALEFLTPPYKGHPRVMAYVLRVLETYPPETVTFFMPQLVQSLRYDDDKLVEGYLLGAARRSNIFAHILIWHLQGECVPDEPGKEAAAPKATAFHSLLPAVREKIVDGFTPEARDMFEREFEFFDKVTSISGVLFPLPKEERRAGIKRELEKITVPGDDLYLPTATNKFVRGIQVDSGIPLQSAAKVPIMITFNVVDRDGDPNDVKPQACIFKVGDDCRQDVLALQVIALLRDIFQAVGLNLYLFPYGVLPTGPERGIIEVVPNTRSRNQMGETTDGGLLEIFQQDYGPVGSPSFEAAREMFMISSAGYAVASLLLQPKDRHNGNLLFDSHGRLVHIDFGFILEISPGGNMGFESAHFKLSHEMTQLLDPSGTMKSDTWNQFLRLCVKGYLAGRRHMNGIITTVNLMVDSGLPCFSRGEPIANLRKRFHPEMNEREAANFMVRTCVDAYNKWTTAGYDLIQYLQQGIEK

SEQ ID NO: 140059 - protein, 192 aa, Oryza sativa
  Clone ID: PAT_MRT4530_41293C.1.pep
GRVGQALQPSAPAAAAAASSSAQASAGSSKAAAPGALFEDKPQSANDAWRKLHTDPLLLIRQREQDAIARIKNNPIKMAEIKKSVEAEKKQKEEKKEKRKHKKRHHHKSKSKRHHSSENSDSEESDGSDERRKSVQASEHKREEKRSRHDKKDHGQDSEDDERRKRRHATSEDDEPKKSQKRCRRRRGKLDA

SEQ ID NO: 140060 - protein, 266 aa, Oryza sativa
  Clone ID: PAT_MRT4530_41294C.1.pep
MAAWLYPIVGGHQVAAGGWLSPEAGDDRRAAPPAPEKKQMDNMPAVASPTMNKDEASDDSGERKKKKKKASSAAGKASRHRHAAGAHNLTEKRRRFKITERFRTLQRLVPGCDNKSNQASTLDQTIQYMKSLQHQLEATSAVGSPAAAVLYPAAVHPQSYMHPPAPPPPVAGAAAPVTMAPMPAGMVLAAAPPGAAPPPGPPATMMPFGAMLPYPPYPEVLLPPPPATLYGRPPAAAPSVAARRHGSTSGGGRISKSSSSSLRKEL

SEQ ID NO: 140061 - protein, 523 aa, Oryza sativa
  Clone ID: PAT_MRT4530_41295C.1.pep
MGMKFLNKKGWHTGSLRNIERVWVAEEKEKEEQRKIQELKKQQDEEREKAAFRKLQEDAGLKPRQERLDFLYESGLAVGKGSSEGFQALQPSAPAAAAAASSSAQASAGSSKKNDKIFAFLLAAAPGALFEDKPQSANDAWRKLHTDPLLLIRQREQDAIARIKNNPIKMAEIKKSVEAEKKQKEEKKEKRKHKKRHHHKSKSKRHHSSENSDSEESDGRDERRKSVQASEHKREEKRSRHDKKDHGQDSEDDERRKRRHATSEDDEPRKSQKEKKGQREDSEDDKPKKSRKDRRRHDSEDEEPRRKHQRSEDDEPKRRQSEVSGDDEPRRRRQEMPKHDEYSRRGRSDADDRRGRHYTPSDDRRGRHYTPSDHNSAYPKHDSSDSRHRRPEYGRGNSTSELGSEGQRRQESQQGRNGPTFNRRRGVQHMSEEEREARLRQMQADAEVHEEQRWSRLKKAADDDAKEAASVNANQFRGKNFLEEEKKSIFGTEKGGSATIEESIRRRAYYSQRNAHESNAFRR

SEQ ID NO: 140062 - protein, 76 aa, Oryza sativa
  unsure (1)..(76): unsure at all Xaa locations
  Clone ID: PAT_MRT4530_41296C.1.pep
ACLQVDSRGSPQRSGHPYCDGLKALVERTVSDMFDASTFFMXGDGESVLFXTDQWIDGRSMASLAPDLLFVVPQCI

SEQ ID NO: 140063 - protein, 165 aa, Oryza sativa
  Clone ID: PAT_MRT4530_41297C.1.pep
MEPQLNNSSKFRSKQATIKPKREAFRSTREVEFEAKKKMGTMRKRMVIPTLTDKEAAGAAGKDGRAGGSWEAGDGDIGVARRRQRGGTRGWFQSILGASKQCKQLQKLRKFRDEAKPTSVERRSGAIIKEINKKFDVLVTKVSFEVFEKFNLMRKISKWSFESKE

SEQ ID NO: 140064 - protein, 440 aa, Oryza sativa
  Clone ID: PAT_MRT4530_41298C.1.pep
MAVAAADGIAALVDWSDLLPVILEDISQRVHGDDRAVFAAVCKSWRRAASAAGPRLSRHSLHLVALCSGANAVDFSSRHGDVVKTAYLGSGGARPHRIIGCSHGWLVVVDEACRASLLEPFTDGAQVPLPPVTSFDCEYFVTAVGGDGDGVPEYFAVDNHAYHHHLQGHRKIEWKPPKLVPVQSMRDEFFQKAAIAPGSHRKESYAAVMVSHSGGSGLAFARSGDDRWTSLPTQALTRYADVIWHNGAFYTLTRGDGAVEAWEPDGRALKPRLVTGPVMRWEFKRLVEFHSDTFHQPAFYEGARYLAKQADGGGGLLVVSTVAILDDSNALRARRFKVFDVDEDKGEWRSRDDVGDAAVLVGINHGECVSTREYPCLKPNCVYYVVKSFAADFEEEEKGCSRYESGVCDVKTGVASRMSVFRRAAGGHPVWFVPSAVSRR

SEQ ID NO: 140065 - protein, 102 aa, Oryza sativa
  Clone ID: PAT_MRT4530_41299C.1.pep
MANRSSGGGNILPQWSRRVVKIPDLSCLGGGRGGFGGGRRWCLACERAHAGCGGGVCAVLGVAAVVVALHRAPAVCCALACAAPGAASASVGWGLVGSSPAS

SEQ ID NO: 140066 - protein, 671 aa, Oryza sativa
  Clone ID: PAT_MRT4530_4129C.1.pep
MGREASSPPWAAATAANGVAGSSSSGQKRKAAVDDDGRGEDDNWLKLSLAPVDYGDPTGDVVDNNSSSCAPAVMTSTEERSGTAAGVASGSARAGLIPNGAVPIFPCFNFLGTSTSSSSLSHLHQQSSSTRRQSNASTSSSSGGIGGGDDDEAPNVMNGGDKNDGNALPDPPYPWATNEVAKHHSLVELARRDIININGEARCRRCDTRKMIVYNIATKFREVSDYFRQNYQHMNDRAQARWMNPVVPNCDSCGHERCMRPVIAAEKERINWLFLLLGETLGLCTLDQLKYFCAHTNRHRTGAKDRVAVIKCASIDLDSILDGVPMLQAQFPIKYLGLSLLLERMRKTAAAVQGAGSSSSGQKRKAAMDDDGSGEDDNWLKLSLAPVVYGDTTGGVNDDDDSSRAPTVMTSTEERPATAACVASRSLIPNGAVPVFPCFNFLGTSTSSSSLSHLHQQSSSTLRQSNVSMASSSGIGGGDDNEALGNIVAPNVPNGGGNDNNGGNAPPDPPYPWATNEAAKHHSLAELTRRDIKTIRGEARCRRCDTHKMIKYDIATKFQEVSNYFRQNYQHMNDRAQARWMNPVVPNCDNCGHEKCMRPVIAAEKERINWLFLLLGETLGLRMLDQLKYFCAHTNRHRTGAKDRVLFSTYEELCNQLAPGLITCHDQSRMC

SEQ ID NO: 140067 - protein, 149 aa, Oryza sativa
  Clone ID: PAT_MRT4530_412C.1.pep
MAMAAAEARMRQEKVKKFEDFVDRRLKPDLVNTIAQRDKVFQQQKTFLDLKRNIENLEKNGVTSMRSMVNLGSEVYAQAEVPDTRHIFVDIGLGFHVEFTWQEALQFISVRESRLARQIDEYTHLIASIKAQIKLVCEGIRELLELPAE

SEQ ID NO: 140068 - protein, 88 aa, Oryza sativa
  Clone ID: PAT_MRT4530_41300C.1.pep
MAERQRGHDGAREARRGAGAREGVAWERDAARRRGSVAQCDVDRTRRGVESSEGAAKKLRTPAPVVVVVAHDLASATAATIVTRNHNL

SEQ ID NO: 140069 - protein, 235 aa, Oryza sativa
  Clone ID: PAT_MRT4530_41301C.1.pep
MALVMSMLLASSLLAAASAARADHHSPAYAPYPHHHAPWPARAQSPSAPDHGAHGHHAPAPAPVHADQPAQAPEWHHHAPAPAPVRDDKPSPSHHHHHHGHHHHRHATATAPAHAPSSHHDRHAPAPVHSSWPWPAHAPAPAPAVIHGTNSHLAPAPAPSSHVQYSPAPTPGDGRHQSPPPPPSPPSADEGAQAPSYYGHYPSPAPAPAQESSSAAVAFAGGAGVLAVTAVALLL

SEQ ID NO: 140070 - protein, 151 aa, Oryza sativa
  Clone ID: PAT_MRT4530_41302C.1.pep
PVCPPPSSSSDPSPPSRALLLPGAASYSPSPQATPREPRKRGLAPPPLSTPAPLHPRRPHSPPLPPRPRRSRPSRAPQWYVPPPNPPAALSRSRLPPGSRCLGFAANGGSVWRGEPFDGRASPRRAEIRWLERRIPRGSGVFCLLRTDVIA

SEQ ID NO: 140071 - protein, 870 aa, Oryza sativa
  unsure (1)..(870): unsure at all Xaa locations
  Clone ID: PAT_MRT4530_41303C.1.pep
MLGGIIGGLTGNKNARLKGSLVLMRKNALDINDFGATVIDRISEFLGRGVTCQLVSSSLVDPNNGNRGRVGTEASLEQWLTSLPSLTTGESKFGVTFEWEVEKMGIPGAIIVKNNHAAEFFLKTITLDNVPGHGAVVFVANSWIYPASKYRYNRVFFSNDTSLPSKMPAALKPYRDDELRNLRGDDQQGPYQEHDRVYRYDVYNDLGEPDSGNPRPVLGGSPDRPYPRRGRTGRKPTKTDPTAESRLSLLENIYVPRDERFGHLKMADFLGYSIKALVDGIVPAIRTYVDLTPGEFDSFKDILKLYEGGLKLPSIPALEELRKRFPLQLVKDLIPAGGDYLLKLPMPHVIREDKKAWMTDDEFAREILAGVNPMVIARLTEFPPRSRLDPARYGDQTSTITAAHVERGLEGLTVQQAIDGNLLYVVDHHDHFMPYLLDINSLDDNFIYATRTLLFLRGDGTLAPLAIELSLPHLQDDGLITARSTVYTPAARGGTGAGAVEWWVWQLAKAYVNVNDYCWHQLISHWLNTHAVMEPFVIATNRQLSVAHPVHKLLLPHYRDTMTINALARQTLINGGGIFEMTVFPRNHALAMSSAFYKDWSFADQALPDDLVKRGVAVPDPASPYKVRLLIEDYPYANDGLAVXTPIEQWATEYLAIYYPNDGVLQGDAELQAWWKEVREVGHGDIKDATWWPEMKTVAELVKACATIIWIGSALHAAVNFGQYPYAGYLPNRPSVSRRPMPEPGTKEYDELARDPEKVFVRTITKQMQAIVGISLLEILSKHSSDEVYLGQRDTPEWTSDAKALEAFKRFGARLTEIESRVVAMNKDPHRKNRVGPTNFPYTLLYPNTSDFKGDAAGLSARGIPNSISI

SEQ ID NO: 140072 - protein, 82 aa, Oryza sativa
  Clone ID: PAT_MRT4530_41304C.1.pep
LSLSSVFSRLCIYFCVLRLCHGSMAQLFNPSTNPWHTFFYGGGGEQTFYRLQTFKPLRGVGSEADVSEDFDENNELFHGTVT

SEQ ID NO: 140073 - protein, 223 aa, Oryza sativa
  Clone ID: PAT_MRT4530_41305C.1.pep
MAKLILATFAVVFMALAATSLAGDPDMLQDVCVADYKSLKGPLRLNGFPCKRIENVTANDFFFDGLMKAGNTGNAVGSVVTAASVESLPGLNTMGVSMARIDYAPWGLNPPHTHPRATEIIFVVEGSLDVGFVTTANKLFTRTVCKGEVFVFPRGLVHFQKNNGNTPAFAIAALNSQLPGTQSIAAALFGAAPPLPSDTLARAFQVDGGMVEFIKSKFVPPKY

SEQ ID NO: 140074 - protein, 202 aa, Oryza sativa
  Clone ID: PAT_MRT4530_41306C.1.pep
MRAVAMRLHTKDQAKEGEKEPQAPPVARWEPSVDGYLRFLVDSKLVFETLETIVDRAAVPWYAEFRNTGLERSEQLKKDLEWFKEQGHTIPEPSAPGTTYASYLEELAEKDSQAFICHFYNVYFAHTAGGRMIGKKVSENILNKKELEFYKWEGNLSQLLQNVRNKLNEVASSWTREEKDHCLDETEKSFSYSGDLLRHIFT

SEQ ID NO: 140075 - protein, 59 aa, Oryza sativa
  Clone ID: PAT_MRT4530_41307C.1.pep
QLIPKGTNIITGFFNQHGRTITPGLIKPFSCVSSTNPQTRKNTHVRGTVAHMVYICLLT

SEQ ID NO: 140076 - protein, 109 aa, Oryza sativa
  unsure (1)..(109): unsure at all Xaa locations
  Clone ID: PAT_MRT4530_41308C.1.pep
QNRSTPVTAFLIPRMKRQLLQLTKITARIHHSAACWWFLWQLNATGDFRDSLLAENTSAKLGIGLFRXLGGQILPFRIFLWGLWGWGFTFFLRLRLFSFFFCFFFFXFF

SEQ ID NO: 140077 - protein, 200 aa, Oryza sativa
  Clone ID: PAT_MRT4530_41309C.1.pep
MAASPISSGESFMFPTSAVESSTSASGSSNVGSEEIDPNTCKNITEMIINIRGGHHMAAASQWHMAQREIDAMVKEIHSKAGRQHALVWSYKLRLLAFADEITKLQLSPDKLFVVLRLLKVLNPDFFLVSQCRPEEFSVAKYDDTLQKLKMAVYHMLRELKILIQTRASRRVPPGGGIHEVTRYVMNYIKLLVHHKTTLG

SEQ ID NO: 140078 - protein, 77 aa, Oryza sativa
  Clone ID: PAT_MRT4530_4130C.1.pep
SSDRTMRTGRLPSSLAHAVAAVHRVAPSDQTLDADSLVYPCEGDCPNALRLQLIELSLHLPLLGSCWAYFTRRYLGL

SEQ ID NO: 140079 - protein, 1975 aa, Oryza sativa
  Clone ID: PAT_MRT4530_41310C.1.pep
MAMTARRVQLADRWRGIQEAEEADDDGGGGEPSAPRQRRLNQAKEEWLLWADRLSPSLPKEEHIWCGYADIMGPFLETFLGYFDDQEENSPPRTIWKRISEELNVCAQCVCEHHQAQKDFDSEYRSGVDALLKVLRLLDEERVTEHLRQMNAKAQLKEYKPSCHDAEVSIMFEVLMYPILLDDLSLANQFQTFIERIDEIFEVSLSTNQQYPGVYALLFFKSCKARAIGLRLARSMGKLRKAVDLDPLQPLLQKYINFLEAEVLPSTSESPRPRVQLKRADIWLGFKSLYSLEALQDASECVHMWGPSLIGSLKDKSLHNSLRQPALDLINILIISDASALISFKMKYESFTKGDVINSVIFVDDDDELPVFCDAEEMDYGCWNDFNVLYKLTCRECKDWRCVPLLWYLIMVQLEPSELPMAFSKAVFWALSHISVLEPGVSTESSVPVNDWLSSHAEEVLPTFSWQVPNGADDGGVGKECINTLKNLRQVGRAVLELASQGRGLTSGLQFLCSSASSLTATFLGLRYAVQSDVVVQQPSVALQAKPFEGGFLRQSFSNVSISCVRLLELVPLVYERVSSYSSAKSCGVPTMVLDPTDITWLFHLINWGKSSLLVIIRHWKQCMLSLIKILKGSLGGTVQHYIEDLGSIISHDAVNIDELSEKISDLKLALSKEASAKSERRVVAGVSIEENSLTADVSGEDVLSSVKDSDGSGTSDMQKEVEHSEPRMPTEDRHVSLKQQICSPASDIVASSKPVSKDRSIIAAKEGLGRAKIPTVPVNTNDTSLLPKKIKPPASTISQPSRSNLSSGAEKFKSIFRDLSDDEDDPLEHALDSCRKPQIRLTKSCLLVPKRQVVQLPLSAEKRHTSGRPDASSRRLKPPKLDSWFKNILEMDYFAVVGLPSSEIIKKLALKEIPVCFDSQAQYVEIFQPLVLEEFKAQLQNAYVETPAEDMNCGSISILSVERVDEFLVVRGRPDKNDCLKSKNCMENDLILLSKDPLNSSGQQVHVLGKVDRRESDKTKALILVIKFFLSNENARLNKVKRLLVERILKSSYNDSQLEAVSIAIRSTSLKAKFDLSLIQGPPGLSFSYVYQQFVTIPGINKGNFTLVFSAANSSQRNESFASAEFNKPRPRLSQSVAVTRAWQDAALAKQLINDSQREVPTDRLSKGRVLVCAQSNAAVDELVSRLSEGLYDTDGKLYKPYIVRVGNAKTVHSNSVPFFIDTLVEQRLADELKKNNDSKSLSDTESSSSLRANLEKIVDRIRYYELRRKLLEADKTENDSLVPSDYETDEVSDDAIGAKLNFLYAQKRKVSAELATAHAREKKIADENRFLKHKVRKSILGEAEIVVTTLSGCGGDIYSVCSETASANKFVNFSEHALFDVVVIDEAAQALEPATLIPLQLLKSKGTKCIMVGDPKQLPATVMSGLASKFLYECSMFERLQRAGYPVIMLTKQYRMHPEISRFPSLHFYENKLLDGAQAADKSAPFHGHDCLGPYMFFDVADGREQCGKNAATQSLCNQFEAEAALEILGFLKNRYPSEFSCRKIGIITPYRSQLSLLRSRFNSFFGPEIVAEMEINTVDGFQGREVDILVLSTVRASNSSDSRHHTGEARSIGFVADVRRMNVALTRARFSLWIVGNAKTLQTNSHWASLLQNAKERNLFISVNRPYRSLFEKVRSHSEDIHGSRHTYYTSHCKKKESGKTSMTNSQKIDARPHKEHARHTVRTVETANERLPNDQAKRASRWDRKSPKAHEPFHRKSSKEKEPVIQDTDQDNAVRKEKEGEGLTIHNDNSLELANVIRQRELNKPVKPNIHTDAGKTLCNQDSLQNSEVRKDVNKKYDNGNVKGSQNHDTKATVMKIDASPPAQDMQKLIQKAKGARKFSEKPRFGNSSQVDSSVKHEATLESANKNGGACTPTNSEMKKMAGSDNGRILSHYFHQLLYHQRSLLQSVLPRNKNEILQQRGGILPFGSQYC

SEQ ID NO: 140080 - protein, 452 aa, Oryza sativa
  Clone ID: PAT_MRT4530_41311C.1.pep
PEICTGNLQQQQHNEIYHLDIYICCNCKKNSFLPLQLFCAHLNQASMLSSGGELKSSSLVQQMVWVGTGNSSSSSIMGSLRQLPCSEEQDAASSPASMLFLPQQLLLHASSNSSPCLNIPEVNLSTGLHPLGSFHGDVQQQEIISGMPDQSWRQLLLGGLVGDHEKYSVATALLSKGLDDEASMPHEASAAAYDFYGHGGGAGDGILQASPEASSCKSQLSQMLLQAAASSPRSCVTTSGLGSSMMDFSNTAAVAPAAEPELTRKHHAGQSDNSSECNSTETGSALKKARVQASSSAQSTLKVRKERLGDRITALHQIVSPFGKTDTASVLQETIGYIRFLLGQIEALSYPYLGQCCSANPMQQQTGIMAGERSTDGLFPEFPAGQDAEKDGKKQQAKKDDDLRSRGLCLVPVSCMPHLAADNDVVVGSDFWAAAGGGGGGGAPPLAGMNLR

SEQ ID NO: 140081 - protein, 737 aa, Oryza sativa
  Clone ID: PAT_MRT4530_41312C.1.pep
MFRHPDISGILRIILSEVSAEPYGNTESGDIQQLIRKITTSLKNKRYLIVIDDLWNIESWKIIRCAFSRSITGSRIITTTRINEVAESCCFPHVHRVYKLRPLHFVDSKRLFLKRIFGLEECPSHLTEVCCNILAKCDGLPLATIAISSLLATKAPTEDQWNQVEKSIGYALERNEDVNGMIRILSLSYFDLPHNLRTCLLYLCTFPEDYIIHKKRLVRRWIAEGFIHEEHGHTLYELGQRCFNELINRSLIEPRYIGKFGEVKSCRVHDTILDFIRSKSIEENFVTLLGIPNVPIDRQKKVRRLSLLVNTEEYYSSLEENNIKYVLDKKEDDSNEQEDNSNGFHILKKLNLCNARLLTIFPHSVKVPSLLQFRRLRVLDFEGCEQLENHHLANIENLLHLKYLSIKDTIVNVLPTQITRLRCLQTLNVDVRGAINIPTHIYRLRQLTYLLVDMRCQLPDKIGNMQALQELKVVNVLAQSLNTLQGLGKLTNLRKLSIFMPGHHADAAERYKGHMKAMISSICKLGRDNLHCLTIHISSVSADDFIQEPWCPPPLSLQELVINQAPMSRVPRWIGSLVNLQRLGLYLKELSQEDVSTLGGLPALLSLILYVEEVITEEGGRLRISSSYGFPSLERIRIGGESCRLELTFEIGCLPKLQQLNLECMVAEENHTSSSNVVFGIEHLSRLTTIYCCIHYKYETRLAKVAMLAALERSIISHPNQPTFTKEEYGDFVDESC

SEQ ID NO: 140082 - protein, 328 aa, Oryza sativa
  Clone ID: PAT_MRT4530_41313C.1.pep
MALTMVSLAAIAGKPTAASAQLVAEGRESAARLYALLVGSSALHGPVGLAEQILLCFDRALAKLHGVNLAGAEDDDDAAGNGNGRKRKPGRGRGLTAASAAASSKRMRVSNAGGNGARIERKATMDDKFLWRKYGQKEIKNSKHPRFYYRCSYKDDHGCTATKQVQQSETADDDTASPVYIITYFGEHTCRHGDDAAAMVVDGGEEEDQLSPAQMVISFASSNGGDASVSWPCSGDDAQNNSETSHESSPPEAPAGEEERLRPCTAAGVSDEPIMESTPPAPELLADLKPMDGCLLDGESLFGMDELVYFHELSAALGLLDRDWGAPV

SEQ ID NO: 140083 - protein, 76 aa, Oryza sativa
  Clone ID: PAT_MRT4530_41314C.1.pep
MPQYGSADLGVNQLGRPRQAPTISPEHSVTEQHNPGLEPELRESQTGAPHPPEHHISAAREGSKRGHTPDHPPRAV

SEQ ID NO: 140084 - protein, 1563 aa, Oryza sativa
  Clone ID: PAT_MRT4530_41315C.1.pep
MRAPQERTVRDLYDRTRHKDLALPEESVEGRGSGRRVEGPGHREVVAKMEMLGGDSDPTMLSTIRDKLTARKRPVPLDSPNVKTESGTCNVCCAPCSSCLHRNIALTDSNMDCGSSQTCFARSETKNSSFVRVDKGLRTKAKGGENDDEFSATSSPASYSENGENKVIARSSVAADSEVDKPAKRRRLVNHGSRSPIVECHDDSNSCVTGVSAASKLLLDKKKDKLSTSASSRDLTVNYKDNGINRLRNYCAEESTGKKRSDVHAMHRSSSDRSLPAESPFATKRLLRTQSSLSASHGLSPKRPTHEFGNAQNNLAHQPCEKASSNKTVERSLGGKSDPSVLGGERHSMMTSCGTSNRDKIKAGSLTKNLENGTSCSRNGSLEHADIQSNDAVNRNDNDKQERNQGCSMDTGSGRKLNTQNDVMTDSGNSEGLIDVNVCDICGDVGREYLLATCTRCLEGAEHTYCMRVKLEKVPDGEWLCEECCLKEDENQTRSNGGTSRNKVLDGKNQNSESTNNSKTLKVVVTDLDSQQITCGTPVNDPLAGSNQKLHLASSDLEARQVKCATPTAERLDVKNKNSGIMGNRKKLQVVTSSLEARQSSCRTPTSGSLDKKNQSLDKRSQSSEVLLKRKKLRVATDMESPLSNDGVRSPPKSCKRYAENTLSSTPRLLKADSPRNHDVFSRENSFKSSNKGSIKSPDNAPMRSQAVNSSVTLPRSYSLGNLANVKTPGPSPRGLLSKQPSFNNSSNEPKVKQLAEPVLSKLKPSKHSPRDPRESIRKVMKSGPLKHEASICKGSSSSKQKQSVHSSQNEQPRILKPVKPTILLERGASFNLQKPNISSSPRPDSSIKSGDPRNDQDSPRPGPSILKSSKKPGIVENKHSSILSKSDEQGITSTGVVCSKDTCVVKASDPLIPMDKIKNDSTDGACESPLILVNNDNEMSTKPEVLSIPRASKTCGSDFQDIAPTSSSEDLPPEEVQYEQKVVESDGNISCKSAAAIQASEDLLPESPQGCLVAQNPYSPDTKSNDLNLKQQALVDQSSTVGSSLGALVIPEQSYIWQGTFEVSRPGSSPEMYDGFQAHLSTCASLKVLEIVKQLPQRIQLVEVPRHSSWPLQFKEVKPNEDNIALYFFAKDVESYERAYGKLLENMLAGDLSLTANICGIELLIFTSDKLPERTQRWNGLLFFWGVLYARKASSSTELLVKGMNHSPLEQINGPVNQLVCSPKMPQSLGIDLNECPVDELYDPAVSVQTEMENRGASVNHETLLRSNHEAERLNLCEIHFPETAGTGKILLGTPTAVPYGVHVHTSSKRECLNIKPEYPSDIIGSEGTAGRDNMEEEESFTKNGVPCFTKQHTGATTRSVSDEILANTQARVSFQEVSPQHSVRPKLSDDPSDSVLKDFVLPDSSSIYKRQKTSEGKYSTCSFGDGQLTSKCLSKIPLPADQHTSLDDVQYIGRVPADPCSPTKPILDHVIHVLSSDDEDSPEPRNNLNKTSLKEEEGPSPLLSLSLSMASKKHNLTGSDTGDDGPLSLSLGLPGVVTSNQALEMKQFLPEKPGMNTSLLL

SEQ ID NO: 140085 - protein, 59 aa, Oryza sativa
  Clone ID: PAT_MRT4530_41316C.1.pep
ALNNTPRLFQDIRRRVSTTYRRHLHLVPGQTISSMDGQQTTDLPYRDQWPSPHTSEDTP

SEQ ID NO: 140086 - protein, 137 aa, Oryza sativa
  Clone ID: PAT_MRT4530_41317C.1.pep
PGLFGPGGDEERGTGRSRPRPHWLLPVDEERTGCLRDHGGRLLQRPARTSTSHIPHYLLHAPHGLHAHPHGGAGQGRQATDGADGHHSLDRQGEPGDGGAERVQDELHRGGQPDPHARVRQRVHRGTTGELQRNMIQ

SEQ ID NO: 140087 - protein, 298 aa, Oryza sativa
  Clone ID: PAT_MRT4530_41318C.1.pep
MDNSNKKSSDISYHGRITGTDTEVNHHVAGNSKTSDNDFGLASNQKVGESSHVGSASEKIVAEKGKSSSEPLDFDSLYPLTRLPKEGDLIVYRLVELSSSWCPELSSYRVGKVLIYDPISLRIILLPVPEYPFTAGEKNGEDESEMLVDMSPYKEDGSLEIEYSSLLDIRLLKDTDSVQPAVSTPLTETGIKGGSHAQKPANLDNHKGKIHSEKLPNNTKDPEATQEKTQNTVWEENGEVANDEPAVQENGWGTWTPNASTSAWSYRALRSSALGPTLAHLRGKNTKRGRPYNRKYGK

SEQ ID NO: 140088 - protein, 89 aa, Oryza sativa
  Clone ID: PAT_MRT4530_41319C.1.pep
GNEAVQPWQDQQQASLESKVIYPKATVKFGLNKGHGMDVWACIQAMQIEKSIQEVQISVNFLVYLLKNNCQNVRCLYLQSTMGKGYRVF

SEQ ID NO: 140089 - protein, 418 aa, Oryza sativa
  Clone ID: PAT_MRT4530_4131C.1.pep
MAAAAGVAAGTGRGSGEGEELLPNAVEGDGGCGGGGTCAGDRPWRLNFDGLRRPEAHQEKPPRRFHDRLGGLAEDIILKGGKRTHPETCFLKKLLYPFDAVLRNLDISVQSPGDDVAEYYQQQSELLEGFNEMDTLTDRGFLPGMSKVYILALEECEKVARSEALAIRLSNIANMVLFAAKVYASIRSGSLAIIASTLDSLLDLLSGFILWFTAFSKKTSNPYRYPIGKRRMQPLGILVFASVMATLGLQIILESTRSLFYDGDTFRLTKEQEKWVVDIMLSVTSVKLLLVVYCRSFTNEILAIYTIRTWSMTVLENVHSLVGQSASPEYLQKLTYLCWNHHKAVRHIDTVRAYTFGSHYFVEVDIVLPCDMPLQEAHDIGEAPQEKLESLPEIERAFVHLDYEFTHQPEHARSHDTL

SEQ ID NO: 140090 - protein, 35 aa, Oryza sativa
  Clone ID: PAT_MRT4530_41320C.1.pep
TNLGIHRYLSGGPSFQKRAIFLLSKYLAPTPSIKT

SEQ ID NO: 140091 - protein, 565 aa, Oryza sativa
  Clone ID: PAT_MRT4530_41321C.1.pep
MGRSPEMEVDARSGYCAATRTFRSRRADVPLPADPEVDVVSFLASRRHSGVVALVDAATGRRITFTELWRAVAGAASALAAHPVSLRKGHVALILSPNSVHFPVAALAAMSLGAVLTTANPLNTPAEIAKQVADARPVLAFTTRELLPKLPRAHDLRVVLLESARLPGDSSDPRIVATIEEISATTPDPARRKDRVTQDDPATLLYSSGTTGPSKGVVATHRSLISMVQIIMTRFRLEGSDKTETFLCTVPMFHVYGLVAFATGLLGCGATVVVLSKYELPEMLRSINAYGVTYLPLVPPILVAMVAHPKPLPLGQMRKVLSGGAPLGKELIEGFREKYPQVEILQGYGLTESTAIGASTDSAEESRRYGTAGLLSPNTEAKIVDPDSGEALPVNRTGELWIRGPYVMKVASIFIQNEFHGISYFKNAEATQSTLTPDGWLKTGDLCYIDEDGYLFVVDRLKELIKYKGYQVPPAELEALLLTHPEVTDVAVIPFPDREVGQFPMAYIVRKKGSNLSEREVMEFVAKQVAPYKKVRKVAFVTDIPKNASGKILRKDLIKLATSKL

SEQ ID NO: 140092 - protein, 60 aa, Oryza sativa
  unsure (1)..(60): unsure at all Xaa locations
  Clone ID: PAT_MRT4530_41322C.1.pep
IRXELNNXNNGTNKTRQDKQLGDNXVRKKXDDXSIGFLEANNRNKKLIYSFLAFVRSRCY

SEQ ID NO: 140093 - protein, 44 aa, Oryza sativa
  Clone ID: PAT_MRT4530_41324C.1.pep
STRPCCYSWCLVVCLGGGVFMLEGRSDSKEVLKASIPENLVCEF

SEQ ID NO: 140094 - protein, 188 aa, Oryza sativa
  Clone ID: PAT_MRT4530_41325C.1.pep
MSKKSMKINWPRKHMPSELLKLQNSLRGRACSNKKLAAKQINNNHKEHLSFVRDPEQMPRPQVNSNKEFETVGKSSQLLPRVQLSLHNDRSLTASTCQSSFPVTKGSTQFNDLEMPSLENIEFGTLGSFSLTLVSPKSNKNPNTHSTSKTCADAAALALQSHPTQSRSPGFYKVGDEDHFPPLRAGTR

SEQ ID NO: 140095 - protein, 88 aa, Oryza sativa
  Clone ID: PAT_MRT4530_41326C.1.pep
RRPTSPPPPPPPPRPPRTSSRARPTTSSSSTPPSFDHPPQPHQPTTTTIFSPSQLIQHNQSTNERTTHLTNANKLRDHVAHVSVNTVI

SEQ ID NO: 140096 - protein, 97 aa, Oryza sativa
  unsure (1)..(97): unsure at all Xaa locations
  Clone ID: PAT_MRT4530_41327C.1.pep
MAAGGGGGYRAEDDYYYLFKTVLIGDSGVGKSNLLTRFTKNEFCLESKSTIGDEFATRSIQVDRKVVKAQIWDNRGQERYRAXTSAYYRGAIGALLA

SEQ ID NO: 140097 - protein, 686 aa, Oryza sativa
  Clone ID: PAT_MRT4530_41328C.1.pep
MDNLDVLCIRFHFGGEFDYDGYSVVYNGGQTEMSYIERDKVALPEIKGYLGDHVLLSEEDEVIFHWLFPGAELNNGLKALSDDKECLYMAQCIIMGDHNEDDNVVLSNGVSDDSDVEDDIEEEYDSHSDAEDSSETDGIAEDDEERSEDDEEAQENRQHANKVKKNPCATITVTSDNAVLVSDPPNKQDDKGLDDDTDTPFLDSSEEASYDDAEDGEAIRRKSRFPKYDSKAHTPKFEIGMTFAGRAKFKEAVIKYGLVTNRHIRFPKDEAKKIRARCSWKDCPWFIFASNGTNCDWFQVKTFNDVHNCLKRRDNRLVTSRRIADKYEHIIKSNPSWKLQSLKKTVRLDMFADVSISKVKRAKGIVMRRIYDACRGEYSKVFEYQAEILRSNPGSTVAICLDHEYNWPVFQRMYGLVSAVEEFLPQIEHRMCTRHIYANWRKKYRDQAFQKPFWKCAKASCRPFFNFCRAKLAQLTPAGAKDMMSTEPMHWSRAWFRIGSNCDSVDNNMCESFNNWIIDIRAHPIISMFEGIRTKVYVRIQQNKSKAKGWLGRICPNILKKLNKYIDLSGNCEAIWNGKDGFEVTDKDKRYTIDLEKRTCSCRYWQLAGIPCAHAITALFVSSKQPEDYIADCYSVEVYNKIYDHCMMPMEGMMQWPITSHPKPGPPGYVKMPGRPRKERRRDPLE

SEQ ID NO: 140098 - protein, 771 aa, Oryza sativa
  Clone ID: PAT_MRT4530_41329C.1.pep
MTGKEGGLNRRVITAATEEEDEEAALASEKISMKACSARGTAAEKASWLTRYWPSRGPSTSTILEEEPNPLVPPELEEKLNEDARLTAETLYARQDKLVQCQTMIRNHWPSPREGLHHGVMDNLDVLCIRFHFGGEFDYDGYSVVYNGGQTEMSYIERDKVALPEIRGYLGDHVSLSEEDEVIFHWLFPGAELNNGLKALSDDKECLYMAQCIIMGDVAEIYAEILKHNEDDNVVLSNGVSDDSDVEDDIEEEYDSHSDAEDSSETDGIAEDDEERSEDDEEAQENREHANKVKKNPCATITVTSDNVVLVSDSPNKQDDKGLDDDTDTPFLDSSEEASYDDAEDGEAIRRKSRFPKYDSKAHTPKFEIGMTFAGRAKFKEAVIKYGLVTNRHIRFPKDEAKKIRARCSWKDCPWFIFASNGTNCDWFQGACNGELLCALGRDPNNQMYPIAWAVVEKETKDTWSWFIGLLQKDLNIDPHGAGWVIISDQQKGLVSAVEEFLPQIEHRMCTRHIYANWRKKYRDQAFQKPFWKCAKASCRPFFNFCRAKLAQLTPAGAKDMMSTEPMHWSRAWFRIGSNCDSVDNNMCESFNNWIIDIRAHPIISMFEGIRTKVYVRIQQNRSKAKGWLGRICPNILKKLNKYIDLSGNCEAIWNGKDGFEVTDKDKRYTVDLEKRTCSCRYWQLAGIPCAHAITALFVSSKQPEDYIADCYSVEVQECSRPHKRFRPSVAAGTSQQKVHVQIDLPSQSSSLSITKKGQTMKVARTNTTKK

SEQ ID NO: 140099 - protein, 59 aa, Oryza sativa
  Clone ID: PAT_MRT4530_4132C.1.pep
GAREGSRGGPRGGPGIFGGEKGGAPPKFPPSFGGFGGNPGFGPGGGGGLGVGPPSSPRG

SEQ ID NO: 140100 - protein, 31 aa, Oryza sativa
  Clone ID: PAT_MRT4530_41330C.1.pep
NFFNKFNHVVVPATGNMIKQRSKKKKKNGRN

SEQ ID NO: 140101 - protein, 590 aa, Oryza sativa
  Clone ID: PAT_MRT4530_41331C.1.pep
MWRLRSDCVMDNLDVLCIRFHFGGEFDYDGYSVVYNGGQTEMSYIERDKVALPEIRGYLGDHVSLSEEDEVIFHWLFPGAELNNGLKALSDDKECLYMAQCIIMGDVAEIYAEILKHNEDDNVVLSNGVSDDSDVEDDIEEEYDSHSDAEDSSETDGIAEDDEERSEDDEEAQENREHANKVKKNPCATITVTSDNVVLVSDSPNKQDDKGLDDDTDTPFLDSSEEASYDDAEDGEAIRRKSRFPKYDSKAHTPKFEIGMTFAGRAKFKEAVIKYGLVTNRHIRFPKDEAKKIRARCSWKDCPWFIFASNGTNCDWFQVKTFNDVHNCPKRRDNRLVTSRRIADKYEHIIKSNPSWKLQSLKKTVRLDMFADVSISKVKRAKGIVMRRIYDACRGEYSKVFEYQAEILRSNPGSTVAICLDHEYNWPVFQRMYVCFDACKKGFLAGCRKVIGLDGCFFKGACNGELLCALGRDPNNQMYPIAWAVVEKETKDTWSWFIGLLQKDLNIDPHGAGWVIISDQQKGLVSAVEEFLPQIEHRMCTRHIYANWRKKYRDQAFQKPFWKCAKASCRPFFNFCRAKLKYLSNIWWKW

SEQ ID NO: 140102 - protein, 131 aa, Oryza sativa
  unsure (1)..(131): unsure at all Xaa locations
  Clone ID: PAT_MRT4530_41332C.1.pep
GGHGRERRKEEKGGGECGDGLYGLRRGGRGREAAGFLADVGEVGRESGERIQIESRPFSGAREGGKWRDVGGDVGRGVGRRVGAGGAGKAAVAXGFGGGGGGCRRRKTGPTGGPHLLVTRGEEGGGLGRPS

SEQ ID NO: 140103 - protein, 149 aa, Oryza sativa
  unsure (1)..(149): unsure at all Xaa locations
  Clone ID: PAT_MRT4530_41333C.1.pep
GATAYPSTLPERPHAPWSTTPXPCVHDYSLAPLARSTTSMARLPQHQLPNFGYTDHGYSTHSFIDHGSIALFASATSTMVQRAIIRIEHFCWFLLQSKCPHGSRLYCGLKIQYMYSYIYRPPSLNTTXSIFIVFLSLFYATLINNIILR

SEQ ID NO: 140104 - protein, 58 aa, Oryza sativa
  Clone ID: PAT_MRT4530_41334C.1.pep
RRCYVLIKSLIIADVNAKDIPHDGVSMFECTVQCIVEIHLEMHPYERPPYGHLLPYLK

SEQ ID NO: 140105 - protein, 117 aa, Oryza sativa
  Clone ID: PAT_MRT4530_41335C.1.pep
MEKIHSQFRPRCTRKIREKRRQPSRGGAVEVAAAVTDLWASSHHQAAIVTITEQRTRRRTATPEITSNGSTPPEPIGVKFASLDLVAVVTVAIVAVVGAIVTCSRGREAGGSREGPG

SEQ ID NO: 140106 - protein, 88 aa, Oryza sativa
  Clone ID: PAT_MRT4530_41336C.1.pep
IKLKPASMQTIIETILTLEVFSLSPLLFPSSHVTKVLELASEHQPNLKHHQFPLNSSFIPSERPTKSRPTNNHTEPHHTLSRSNGTAS

SEQ ID NO: 140107 - protein, 72 aa, Oryza sativa
  Clone ID: PAT_MRT4530_41337C.1.pep
MRSPASPPPAHARCRTIVLLSRSESPIHHAWRGRAVFSLLHRFLFRGYSPLRGAARNHQVHPLVSCLRRSIR

SEQ ID NO: 140108 - protein, 81 aa, Oryza sativa
  unsure (1)..(81): unsure at all Xaa locations
  Clone ID: PAT_MRT4530_41338C.1.pep
MSCCGGNCGCGSSGQCGNGCGXCKYSEVEPTSTATXLXDATNKGXXAASXGSXDGAGERAAKHPARAPRLKAASSTVRRLP

SEQ ID NO: 140109 - protein, 111 aa, Oryza sativa
  Clone ID: PAT_MRT4530_41339C.1.pep
LKGLKKADQLTILEDFNKHSPAIKHPAVAPTVAPPVATSSAHHIAPVTTPTVSTTPSMATLTGALANREDVLARAAALGRGAATTGFKRFLALTEAAKDRKDGPFRKLFNA

SEQ ID NO: 140110 - protein, 202 aa, Oryza sativa
  unsure (1)..(202): unsure at all Xaa locations
  Clone ID: PAT_MRT4530_4133C.1.pep
MALKDRFAGCPGRTXVLTTSQPHPGKGGRDGVWMGPAAAYAASGFTXAREGTARCLARSGGETXVRRAWLXGGYAKGPVTFSLMELISSGGWLGLLQRGVALDSGWLILINYYNCFTAFNYCLXMLALCKXNCSSYPLIIPCIIPLFRYDLLSMXGCTQSCSIFPXNPRVRVCVRWWLFRGVGFVRAVEDAYGVVFPLQSKS

SEQ ID NO: 140111 - protein, 68 aa, Oryza sativa
  Clone ID: PAT_MRT4530_41340C.1.pep
PTEAHTTHDINQTACKTPGRLVYQYPRAAARESSTESQDSTNSGQSNVDGRRYGSLARKRLAFVASEA

SEQ ID NO: 140112 - protein, 447 aa, Oryza sativa
  unsure (1)..(447): unsure at all Xaa locations
  Clone ID: PAT_MRT4530_41341C.1.pep
MGPTMIEPFATKRGSKSAGKPVFPDKPHKPPTLRAPRAPRGTRPKTTLEFDPETQRRAVIYRQAVHECVLPLSRPPSSRRRRRRKRTPMALRGGHAAAAAGVSSGSPSSGKKRARAAGKLSDLNLVDEQVLRASLAEIPPKHEREVEALARSYKEQYRNWLFELRCGFGLLMYGFGSKKMLLEDFASTTLSDFTVIVVNGYLPYINLKQVIVTIAEIFXGQTKLKRKRQTALGTLWQTFDFYIKALNSAKFSALLPFQVIVTIAEIFWEQTKLKRKRQTATRSQLQPFASQSIDDIISFLNNQTSDNGDDNVCLLIHNIDGPALRDAESQQYLAQVWCCPQVHVVASVDHVNAPLLWDKKMVHTQFKWSWYHVPTFAPYKVEGMHFSSLYTKCRERFLVSSQVTLNSHLTEFKDHDLVKIRKHSDGQDCLHIPLVSDALEKLLQELT

SEQ ID NO: 140113 - protein, 109 aa, Oryza sativa
  Clone ID: PAT_MRT4530_41342C.1.pep
MRAISAAPAGMLRARLRGGGGDGAGRWTTPGHEERPKGHLFNRPPPGESRKWEDWELPCYVTSFLTVAILGVGLSAKPDLTLETWAHHKALDRLQEKDLAAAGQVPREL

SEQ ID NO: 140114 - protein, 76 aa, Oryza sativa
  unsure (1)..(76): unsure at all Xaa locations
  Clone ID: PAT_MRT4530_41343C.1.pep
TLWTSDLTKAAGNEMKKASKAHASEAPYNXKTDRSMAPRAIGSHRFTCGIWRTPLGGPFVPSYLERSVSGSSYHLV

SEQ ID NO: 140115 - protein, 76 aa, Oryza sativa
  Clone ID: PAT_MRT4530_41344C.1.pep
MGQPNRNRAEELTLKGIPRLLRYKDTMEHKEPGCLQPYCPILCISNCAFFGSADTMHVRAKSHRAMMTQEEQGLLA

SEQ ID NO: 140116 - protein, 1067 aa, Oryza sativa
  Clone ID: PAT_MRT4530_41345C.1.pep
MESGAHKSRGAAAAGGGGGGEGASGGGGGGNHMVCHLCGYQYPNAHPSAKQRRAHRKNCGNPSSPSPTAAAAHAAVEEGDGKRLLLLRDDGEEAAAGGGGGGGDVGDGASAVAADSGGVLPGSAREVGNVADDDGNAERSSSPPHVSEVQVGLSKCTEDCVVIGDHIPPSGNDSKASGTENDEIQSGVVTRLTENVPHLEDGHHSESAVSSDQCMGSTSCLVPEHGDGARLSSEFSADEINKLSVMSLETVTGLSKDGIGNNEDDFSGVERPKAVEEDRSVNDSNVVSKEQIPCEETVSSMEQSEVMFTIGNNEDDLSCVERPKAVEEDRLVNDSNVVSKEQIPCKETVSSMEQSEVMFTNSVDHVSSSTKEPVNLLEDKMSCIEKHVCLDETSSNDLFQLASGGSHSEASGIDKPRHQADCASLTPDQLVIPKEMDIDEGLHCTDADVGIKTLSSAVGHADEDITAVNLSKNVCSPHLTVGDDIQDSVRQTIDITPMPPQVDLAEVSTSSTSHEIDKVSSKDGIDERNPNVNLTSDEVNEVHGIDVEEIPHIEDIAAYNDYQEPNTVRGTRDFEEDTQNEEIIAEASSHNITAVQSTCNVEEKEQIEEFDSNSSCNKIHEISSRGVEETKLTDVNVETADEINVASSLENVEEKQSNRETIADPSVEIDVANLPSSLELSKLDVETSTYHTAYEANAVNAMENVEEMKQKEEIAVAPTSHINTISSTTNDDQKQSEELSVGPSSDEITVPHGEFNVKEKTEETVSDPTSNKTDMVSTSGGVEEENHGDEVTSGTNTHEESVILVHTTDNVEKKMNKDLTSEPADNVEEEVQSEDIATDPTSHESSTLHITDGAESKKQDAKVAADPAAGKIDVPRSADDAEEQKHEATVSTDDDLKGDDPSESNSPQIIDGAGDKEQDAETAADPPPGKTDAPPSTDDAEETKPKEEELETVGTVVDDPKEEDKEEIADKEVIVNSDKNHVSLKSLLSEKAAETKESKKPSTKDRVLSFRRRVSKDGGSPAKPGSPKAAVSGQQQDWNSPARLPVEKKPKGKKQQWVPFICCPSMS

SEQ ID NO: 140117 - protein, 33 aa, Oryza sativa
  Clone ID: PAT_MRT4530_41346C.1.pep
CKSSATYALLCSTPLLGFSSCQLPLSGSPFMYD

SEQ ID NO: 140118 - protein, 294 aa, Oryza sativa
  unsure (1)..(294): unsure at all Xaa locations
  Clone ID: PAT_MRT4530_41347C.1.pep
MLYLLPLSVSCRVPGSPPAPRSRRFLDPGGGRGVGDGLGGVRVFRRRALRGTDVRSNTSSSSSRKGRHDDARHDGGYGDDGDAGALLASVRRLLLSGSAQDDAAEGEAEVGHQGHLISAITGELSSCSHGCQHYYNQVLKFNLTESVSAEFGWNPQTVGLIQSSFFWGYLLTQIAXXIWADTVGGXTVLGFGVIWWSIATALTPFAAKLGLPFLLVTRAFMGVGEGVAMPAMNNILSKWVPVSERSRSLALVYSGMYLGSVTGLAFPPFLKHVFESIWGAVSVGDFGVLPILDR

SEQ ID NO: 140119 - protein, 104 aa, Oryza sativa
  Clone ID: PAT_MRT4530_41348C.1.pep
FFLFYLFSPAFIAFFSLAHVFIRCLFPVFVSSSSSLPICFILLLGLLCCSSALLVLGTLSSPYQPHASPASPIPVCVVPSSILHLPPFSCVPVCVCQFKNLFFF

SEQ ID NO: 140120 - protein, 96 aa, Oryza sativa
  unsure (1)..(96): unsure at all Xaa locations
  Clone ID: PAT_MRT4530_41349C.1.pep
HIRCGIRKKRRHPDGSPHGLRPXFLRTTRXMPLPPSTGRRRRSSLREPAPCGSPPSLHEPPPPPHLAVAATLPPRATATTSTXERETEYGERRRYG

SEQ ID NO: 140121 - protein, 267 aa, Oryza sativa
  Clone ID: PAT_MRT4530_4134C.1.pep
MGGMTAGESGGGGGGRARPRQAKQAGAGQRPTRAAAAAERERGRGSGGLRTTAAGGGGGIREVAAEPRRVRVPEHEVILEPAVHRARPVGRMEAGGAAARGAALDGGGRAEGKRGGLRAERTTGVERANEHCRRMRRPQRRRWPKEERGGLLRQSRRWRRRERRAKRTERTSTSFLLLVPAAAVALIGGAQRGGAPQRRERTELGEMRPAGEGERGDASPPLARRAPAPLLRPRSETPPLHLLRPRTAHPRSRRLPAVALAHRLPSP

SEQ ID NO: 140122 - protein, 47 aa, Oryza sativa
  Clone ID: PAT_MRT4530_41350C.1.pep
STTRPLRSRSFRSGGVNLWGNAHKIDANWSFEMGQKITGACCKAVVS

SEQ ID NO: 140123 - protein, 113 aa, Oryza sativa
  Clone ID: PAT_MRT4530_41351C.1.pep
LLLTPSEHSNPFLNDSTGGRSAEPGLRRRPAQRSAGVFPTEEARVDKWMASYLPNPWRLTCRAAFSPLVEPYRDRQKREPPGRARRGDVRRADNGGLGRGPRRRAMASSRRGS

SEQ ID NO: 140124 - protein, 303 aa, Oryza sativa
  unsure (1)..(303): unsure at all Xaa locations
  Clone ID: PAT_MRT4530_41352C.1.pep
KSLAAWPKVCRPKEKSGLGVIDLRIQNRALLIKHLHKFYCRADIPWVNLISSTYYPNVVPQTLFSYVKHKDDSVAQHLAREPQDQFHLPLSQQAYQEYNLMLSEIQSVTLSDINDSWQFIXGSGIYTSKRFYKLSFXSLTPPVTFKWIRQSKVXMKIKVFGWLLLMDRVNTRDLLHRKHCAPLGALISCSSCQENARETREHLFFDCDFSKGCXNKLGWYWNTSLEFNQIIHTQHSSFSQQGFIELFLLAAWNIWKERNGLIFQGIQPSVTNWLANLKLDLNLHLIRFRESDRPIVQSWIDHL

SEQ ID NO: 140125 - protein, 442 aa, Oryza sativa
  unsure (1)..(442): unsure at all Xaa locations
  Clone ID: PAT_MRT4530_41353C.1.pep
ILSCLFYFQYGFIKGKSIQDCLAXAFEYIHQCKHSRREIVLLKLDFEKSFDTIEHEVILKVMTTMGFPTKWNDWMKAIFSSASTAVLLNVVPGKFFRCKRGVRQGDPLSPLLFVLGVDLLQSIINKAHQRGVLNLPIPARGXLVLLEAFAPQLFALKALLNSFATSSGLRVNYSKSCMIPLNLSEEKASLLASTFGCSLGSLPFTYLDLPLGTTKPKVADFSPLTDKIERRFTASSSFLSYGDRLTLVNSVLSSLPTCYMCSLSLPISVVDTIDRAKRHCLWRGNDLNYTKKSLVAWPKVCRPKEKGGLGVIDLRIXNRALLIKHLHKFYCRADIPWVKLIWSTYYPNVVPQSAKSCGSFWWRDIFQYDVLFRGIAKPVLGSGNDLLFWDDQWESGVFSSKYPRLFSSVKHKDDSVAQHLARDPQDQFHLPLSQQAYQEYNL

SEQ ID NO: 140126 - protein, 92 aa, Oryza sativa
  unsure (1)..(92): unsure at all Xaa locations
  Clone ID: PAT_MRT4530_41354C.1.pep
KSPQQQEAEFKCXICGKSFNSYQALVGLMARHRVKLPTPTAAPVLAPFHMGALITSAGAPFHNLXSKKTFVDRIINRLHRTPFCQNEFNTKE

SEQ ID NO: 140127 - protein, 259 aa, Oryza sativa
  Clone ID: PAT_MRT4530_41355C.1.pep
LPDTTLIWESGVFSKYPRLFSYVKHKDDSVAQYLAREPQDQFHLPLSQQAYQEYNLMLSEIQSVTLSDINDSWQFIWGSGIYTSKRFYKLSFWSITPPVTFKWIWQNKVNMKIKVFGWLLLMDRMNTSDLLDRKHCAPLGASISCSSCQENARETREHLFFDCNFSKGCWNKLGWYWNSSLEFNQMIHTQRSSFSQQCFMELFRLASWNIWKERNGLIFQGIQPSVTNWLANLKLDLNLHLIRFRENDRPIVQSWIDQL

SEQ ID NO: 140128 - protein, 132 aa, Oryza sativa
  unsure (1)..(132): unsure at all Xaa locations
  Clone ID: PAT_MRT4530_41356C.1.pep
LLVNHRGGGRSITTGSPGLHEIRHDVTRDTSGEHLGRGTNITLYLKDDQLEYLDERRLKDLVXQHSEFISYPISLWTDNTTDNDISHHQHYETQQRSHDGNVQRSSSRITNYTLYYLLTTIPRNFSPPNWNL

SEQ ID NO: 140129 - protein, 132 aa, Oryza sativa
  unsure (1)..(132): unsure at all Xaa locations
  Clone ID: PAT_MRT4530_41357C.1.pep
GLGGESDRGSLVVWACGLHIREHLASAAAAAASGSRLLAGLLVCPARLCHRSSRFLFFVLFGGDCGGLVMGDPVVNXVXVPYGYMGDGIVMNLVLGGWLFEFLGLPLDWMGLDXFLAWCCRWRCALVLVSPS

SEQ ID NO: 140130 - protein, 160 aa, Oryza sativa
  Clone ID: PAT_MRT4530_41358C.1.pep
ELAKQIGLPRLWAPRRLAKQIGGRPLASRGIAARALSVAAVPPVARRNRTLTPAASRPHSRVLSEFLSTCVSETLSACVLCRCAAATPLRRCAAAAPPRALSRRASAPPEERGKEGTGRWRGRPERRDVLPQCRCRLLGRGARVQRCCRVELAASRRTRG

SEQ ID NO: 140131 - protein, 37 aa, Oryza sativa
  Clone ID: PAT_MRT4530_41359C.1.pep
VYSQTLELSHSIAFAVIVSHNLVNTLLFYIKKSPLEP

SEQ ID NO: 140132 - protein, 220 aa, Oryza sativa
  Clone ID: PAT_MRT4530_4135C.1.pep
MAPGAGSSSSARRGRRVAAAEPPRRALRMRASSPMYYTSDDEDLPEIVLTPPAPAPPRTGTRSLRMHASPPDYGRRRTNRPRRVARTRSPPVVQEAEREPPAPQQPAAVVVERVFYMVGSPPDVITATGEGPGGRTVAGFRCRRLTSTRTLVDGEDAAARAAAISGARALVMCSCHGAPFTHAEFLLHAGGTDLGRNVTGYPWLGDEMELTPPGAGGPHL

SEQ ID NO: 140133 - protein, 130 aa, Oryza sativa
  unsure (1)..(130): unsure at all Xaa locations
  Clone ID: PAT_MRT4530_41360C.1.pep
MSAYCGKYKDELIKNAAYIGTTGKAILADHEISATIGKRFASINVDIVEANRRSLRELLLNTPGALQHHKGXVILLEETLYQKTKDGKPSMDVLKEAGAHAGIQXDKDTVDVDRPTKETTTQGHDDLGMR

SEQ ID NO: 140134 - protein, 44 aa, Oryza sativa
  Clone ID: PAT_MRT4530_41361C.1.pep
SRALSMVILYISRAAISSTTSYLSNPARACALRRIRVTAAKSQR

SEQ ID NO: 140135 - protein, 366 aa, Oryza sativa
  Clone ID: PAT_MRT4530_41362C.1.pep
MASKAGGGGVARRGGGRMRSLGRQGSMYSLTLDEVQSQLGEPLHSMNLDELLRSVFPDGLAIADGAGATTSSQQHQPGSGLLRQGSITMPPELSKKTVDEVWKGIQAAPKRNAETGGGGGGGRRRRERQPTLGEVTLEDFLVKAGVVTQGSLKELSDVGNVDPVGRGVTATGTVDLAPGSHWIEQYKQQIASTDAHHHGQQGVQGAYFPNRLVPQPLNVGPGAILEPSYSDGQTSSGMIGGMSDSQTPGRKRGMSGDVADKLMERRQKRMIKNRESAARSRARKQAYTNELENKVSRLEEENVRLKRQKESDYLHYTRSNLVMENIEIHRSLINSNIIIWYDELYYFIGSVSSYNQEVFVMVIVCV

SEQ ID NO: 140136 - protein, 182 aa, Oryza sativa
  Clone ID: PAT_MRT4530_41363C.1.pep
MQPPRSSIGAWEASYSYHDPAVFVGGGEHFKQEAAAELDGVAAAAGANAFLRYSTRLAELPQLESPPLPSQGSQAASAVVDGEEDNADSSRRPGGGGGAAAAVTTDWRAFDKFVASQLSPEEQHTCRATDDDDMAALLLLDGGGQEDDAGRWLGSAGLLSAVAADATTDCGLGTSCVPGDIN

SEQ ID NO: 140137 - protein, 62 aa, Oryza sativa
  Clone ID: PAT_MRT4530_41364C.1.pep
GTHAAAEAGTAAGDASHAPHRRPRRPSTCATPSWLSSATRRGVAWRGERQCPGGSATQSPKE

SEQ ID NO: 140138 - protein, 141 aa, Oryza sativa
  Clone ID: PAT_MRT4530_41365C.1.pep
MHESDADVRALGRSLGSAPREYGTPGPPAVNGNSIRPRDRVSAPKTTCRRALVARLERARRETAGGYPGRNDATYGGGTARGGEKAPLYTVERRAVSDSVERFLATTVPAAGALTVEGCNQEDAPYMTQELTGRYGEAAAQ

SEQ ID NO: 140139 - protein, 71 aa, Oryza sativa
  Clone ID: PAT_MRT4530_41366C.1.pep
YTTDKHYYSLTFMNAYKDVVRVGKVILLSMCNSFWWDGIGGCGKDNPTRVDRVATLLLEDIDQRLLALQPS

SEQ ID NO: 140140 - protein, 912 aa, Oryza sativa
  Clone ID: PAT_MRT4530_41367C.1.pep
MACSGVLRFDGDKDDVPPEHEREREHLGEPPSLPELLEEAPSQAETLDTPPQDQVASPAELAKAYMGSRSSKGSPLRLRLHDPSVLSKSIEANTTQITRPPTLSLLASARNHAPTTSDRLGSNYTTPNRSAIYKMSSSPYFKSAVSSRDLFGTVSPYQAPSSLHTFGRQVLKRKSAALNNESASVGPIRKMHQRYNRVSPLLQTRSGHRGYSGSHASKLDEGLEHSVQSQKRRCLDKVGDITRSGVHDRANDSSFGQAPAQSIQMAAKILKQLDTIIPSQKEGTLATRQKHVDILDVEDPISQKTEVSAQGSLLKPSSSRVKESLPNNSNCAAKFTSAAKDSNTVDATSDKSAKLMPKDWLEMDNCRGSTKLSLNQGNDKTERKQSPIPENNDMSSGIINKEKPPTLPLRSHAPSNLVLSSEIDRCIILASSNGFSFPVPAALTGHSQAPPTPTLASPPVLSVEKQQLSASSSAPVTSVESIPRVVSPRSVEASVSNQRDTKSNTDKPPISQSSGQIVSFTSNPVFNVISSKPTTLSNGLADTTKSASAAVFPSNGSTKSVCSTNAGSSTPSFPKFSFQPGFRTSTSSVQSSGIQEPAITAPFSTVSSLAGGSSSPSSMIFAGATSQSSSITTSGSVPFQFSSQSSSESSLAGQDKSKAASSSAPFSFSPQFGSTSPFAGQGKSNSVSSQSTLLSGSQFSNSLSAQTSTSNSNLLSSEKVNPGSSPSFAFGSSAPGSSPVFSLAVGSGTTSATPASASSPIFCNRLTSTNAPPFGSPATSPFSSTSSPVFSFTSATPTIPNASPTTPLFGTPSPTVGLSTGTDQMNGGQMAGDKNPFAFSAASPFGLPSSSPSTPTLFSTPATQFASATSASPGMFQFGQHSQSSPGGFSIGTTGGNSEKSARRILKVKRKK

SEQ ID NO: 140141 - protein, 86 aa, Oryza sativa
  Clone ID: PAT_MRT4530_41368C.1.pep
LWFFFRPGDKMKVSKRLNLHYIHFGSSSKTIEIQAYAWSHDRANNLVYQPGLLLLECVRCIYIYIYNIKYMYMIINNWGPAIDACE

SEQ ID NO: 140142 - protein, 77 aa, Oryza sativa
  unsure (1)..(77): unsure at all Xaa locations
  Clone ID: PAT_MRT4530_41369C.1.pep
DECIRALEGMHSSHMYHEXKVPLHTNGAIFSKMEVDLPAMMVQKDMVEVRLTKGIXEGLSKTNKLTYVKGFGKLASL

SEQ ID NO: 140143 - protein, 238 aa, Oryza sativa
  unsure (1)..(238): unsure at all Xaa locations
  Clone ID: PAT_MRT4530_4136C.1.pep
MPTTEAAPRDDEPARMNGEDDDGHRRXFGRRGSDAKDDVAAAMPKVVEVRPTGARARRDGRPNNSGEADRGVGGDTAVFRRNRVVAGEGDDATASTKETATSADAPTRDSSRLEGVQWHQCHWLPAGTRLRWSPRETEATPVEGKQLRRCWRRRRDRMTLRRGGRSGWRQPARRKEKGDGGNVAPGVSAGNGGQAGEEEAAAMLEEATARPAGVLTRRQGRLKTAGGTGERGRRRGGG

SEQ ID NO: 140144 - protein, 102 aa, Oryza sativa
  Clone ID: PAT_MRT4530_41370C.1.pep
CFVLLRNTLHMNRRMDTISHTRTGRAVAYYEAEIKTDFYPPQLHYTVISPHSEPMFNYVHRRQTATLLILGHLAPRGIDGDDDHYHGTVPLLHGPLGEHPLV

SEQ ID NO: 140145 - protein, 170 aa, Oryza sativa
  unsure (1)..(170): unsure at all Xaa locations
  Clone ID: PAT_MRT4530_41371C.1.pep
MPRTCLTDAATRRIFRFRIRRAPSPRPSPVSADTSLGYTKSSSTPASGCFAPNPTGGCPSTXKWSTAVAAVPPAAPFVVVRRLHWIRSCEENTVHHLFFAKDRRNTVAIVDQYHVALRSSSLAISFAVRRRVSVGKNSRRLLYLMVLSICIIMLWFASNRCSRALRLRSI

SEQ ID NO: 140146 - protein, 270 aa, Oryza sativa
  Clone ID: PAT_MRT4530_41372C.1.pep
FVINTKTTSSQTSRILPDELIKLHGFTTLGGKRPAYDGRESLYTNGSLPFESKESVVKVFDPEKNAKERAQKEFKITIEIVGKTNLYHLQRFLLGKHRGIAQEIIHVFDVILSDKLSRNHVTGPRSFLCTQIGHQGYIGDGLDSWRGYHQSLRLRKIGISLNTDMSAASFMPVRIIQIIDGFLNISYTSRPLLERNRVQLKKVLCHVCIETNHHDDQIGRYKITGITPIPMSNNICPVGEEGTTMTVLQYFCDMEKTGVPSVGHWNIAEE

SEQ ID NO: 140147 - protein, 68 aa, Oryza sativa
  unsure (1)..(68): unsure at all Xaa locations
  Clone ID: PAT_MRT4530_41373C.1.pep
DRSAGRKGPSRRCIGEGHITNLQSVAISKRRRILSPXYGADRVLXLGRLSREPSSYLTEELPGNYGWD

SEQ ID NO: 140148 - protein, 86 aa, Oryza sativa
  unsure (1)..(86): unsure at all Xaa locations
  Clone ID: PAT_MRT4530_41374C.1.pep
MVRHIYIYIYIYIYIYIYIYIYIYIYIYIYIYIYIYIYIYLSHTHTHTHTHIHIHTHTHTHTPPPSLYLSPTHTYTPIYTYIYXKI

SEQ ID NO: 140149 - protein, 111 aa, Oryza sativa
  Clone ID: PAT_MRT4530_41375C.1.pep
MMEWQRLWTSEACGAAVPTKRMEHQGGDCDEDKGGEAAPPSGGRTTVAPAGEDCDLRWEEVIYTRRGVHHARKTTDVVEWPRWHRQHARCGERGWMQEWGWGHKRWGWGHG

SEQ ID NO: 140150 - protein, 249 aa, Oryza sativa
  Clone ID: PAT_MRT4530_41376C.1.pep
MDLAAGGQPGSVELVSQFATAQSTLANLERLGKIVVPREPVSGTGQTEATMTGGRGRPCVGPSEPPGFGATRGAARVWAPFRRAPGVRCNPGRGPCLGSLSAVSRLPHAPQALLVARGTQGRTPSPLFKIVEVVAAKFVLVGLIVQRDARRSQGKLRGSEVEPNDVFEDVPACRSQRDSGACTLKVEGAVEMHNPVPATNVGVWVLSISGEGGAVGQNRFVHWGPFRDEVGQDLTFDRVPWFEVQIELS

SEQ ID NO: 140151 - protein, 93 aa, Oryza sativa
  Clone ID: PAT_MRT4530_41377C.1.pep
SGSKPAQTSTVPGPILPFFQNSDIHPPGPNEFLHLYGTRTYIYWTVFTKAHFSEETRIVVNLVSLGEGYALAMAARRGGGSLSGDQKGGVGPG

SEQ ID NO: 140152 - protein, 70 aa, Oryza sativa
  unsure (1)..(70): unsure at all Xaa locations
  Clone ID: PAT_MRT4530_41378C.1.pep
PMIYAQASNYGLLTIRESLVRLQXTQVHGIPRVDXTASAHASRADFSHSHYVLVGGSRLLFCLVGFVQVH

SEQ ID NO: 140153 - protein, 50 aa, Oryza sativa
  Clone ID: PAT_MRT4530_41379C.1.pep
PRVRTGTVAYPTYGVGKAASKVYWQALVCKKLAQQLKTILLRQQLNLTAT

SEQ ID NO: 140154 - protein, 129 aa, Oryza sativa
  unsure (1)..(129): unsure at all Xaa locations
  Clone ID: PAT_MRT4530_4137C.1.pep
LEMDEVRGPWTFFRANEGYTSCGPGVEMXIWQRVGALLLGAQSCLSVPVVTGVSGIGSSLLSKAXDGLQTMLRLASVYRGGMWHVVTREEDVSCGIRGCALLSTVVVLSLAQFFPSPDEEFLEDEGFGV

SEQ ID NO: 140155 - protein, 125 aa, Oryza sativa
  unsure (1)..(125): unsure at all Xaa locations
  Clone ID: PAT_MRT4530_41380C.1.pep
TSSDFDVSGSDYVIPTFASNFNHLWDQVGAAGEEAEETLQLSAMKSIAEATEQLSKALSLQPLEGTDVPVNQTTHTLKLLGKTVNGGRVLQXVRMAYSSNXGVTTKITVRSEEEGVAALVIASVE

SEQ ID NO: 140156 - protein, 104 aa, Oryza sativa
  Clone ID: PAT_MRT4530_41381C.1.pep
MWRTTLGDLEAKLELRATANKGSVSKDSPVIRSPKQLVDVYVEEPEIIDLCDGSDDDSDYEAYMELKMDSEEECAKKDVEVDVSKGKGVTKAAGSGCKGKAMVE

SEQ ID NO: 140157 - protein, 141 aa, Oryza sativa
  Clone ID: PAT_MRT4530_41382C.1.pep
HACSHTTTLSPTFSTIALPTHSSTTKCHLLSTWAPSKPSSSTLSMPTMWTPTLIISAPKTAPRARAPGDDRSARDEQGLGVGPLHGDEDLHHQHAVPQRRVHLHDPSTIKKKIEKKTSFFFFLFYFSLSFSQTVFITRVLN

SEQ ID NO: 140158 - protein, 119 aa, Oryza sativa
  unsure (1)..(119): unsure at all Xaa locations
  Clone ID: PAT_MRT4530_41383C.1.pep
MLLTRASPTLLPWTCAASPWPXTAPSSPTLGRSAXRRGGGLEAVSFAGAGAWLCCQQGAQRSAAGGTDPAKKVENADELIVLIETCIYECNRVIRKGDKLIDGLTDTLEKLRSKGKMLL

SEQ ID NO: 140159 - protein, 165 aa, Oryza sativa
  unsure (1)..(165): unsure at all Xaa locations
  Clone ID: PAT_MRT4530_41384C.1.pep
GRVFFFAQRPPPPPFFYFGRGGPAFAPFRAFLXKMFFKEHAASKLSGRGGLFLGVPTSGTFLYREEFERMKKFAPERFRLDFPVTREQTNPAGEKMFIQTRPPENKSQLWKLPKKVNPYVSMWGLKGMEKGIXPPRVVPPAKDGPIRLASKRRFKKSEQWNVEVP

SEQ ID NO: 140160 - protein, 113 aa, Oryza sativa
  Clone ID: PAT_MRT4530_41385C.1.pep
GTLPRLTPACAVEERSSSSSSSSSSSRGRRRLLLLPPAHSKGGGARRRGRRGPPVTAAVILGGARRRRRRRGGWGGNPRFAGLRLRAGAAAGGTQRAVARGSRGGGGGVRRAA

SEQ ID NO: 140161 - protein, 101 aa, Oryza sativa
  Clone ID: PAT_MRT4530_41386C.1.pep
TRKRGENLWNQHFTIPFNMGRPRGQMVAKSLWGGPGGGKKRKGVLFLEGKGNLPKLWLTPKGGALDYYSKGNKGQIPWTGGGQFWGAQRDPPKMAPPFGKK

SEQ ID NO: 140162 - protein, 98 aa, Oryza sativa
  unsure (1)..(98): unsure at all Xaa locations
  Clone ID: PAT_MRT4530_41387C.1.pep
MAGCRGHGFGRGLAVAVAATVLLLLPLPSISSLQLQAVASSSAAPATTATATATDKSKLPFMPVPTEPFPPSPPHGHXLPVVPPPKPKSANREAAAAA

SEQ ID NO: 140163 - protein, 72 aa, Oryza sativa
  Clone ID: PAT_MRT4530_41388C.1.pep
RNWEVNYSYIIISKCSSKVKGHGSLSLDENHYLKHPKQQNKLQVPMDKKTNVSGNATNSSITKNYEVINADA

SEQ ID NO: 140164 - protein, 58 aa, Oryza sativa
  Clone ID: PAT_MRT4530_41389C.1.pep
LGFFFFFVFFFFFQKSCLKPFLARSGGEGKCWHSHYTSLVLKTRFHGLNSQGKGSHET

SEQ ID NO: 140165 - protein, 791 aa, Oryza sativa
  unsure (1)..(791): unsure at all Xaa locations
  Clone ID: PAT_MRT4530_4138C.1.pep
MGSCTLSSGGVCVVVVLLCLAACCLTCARGAVPAIYVLGDSQADVGNNNYLLHSLLKANFPHNGIDYPGGKPTGRFSNGYNFVDLIAISLGVPSPPPYLSISSKPMNSSVYLKGVNFASGGAGVSNLTNLAQCISFDEQIEGDYHRVHEALGKQLGIPGAKAHLAKSLFVVAIGGNDIINDLLLSPVSELLRSRDEIVSNLENTLKRQLQTLYDLGMRRLFFVGIAPLGCCPLIRELNPTKECDAQANYMATRLNDAAVVLLRDMSETHPDFTYSFFDTYTAVLQSIRYPEAHGYKEVKAACCGLGDNNAMFLCSPASVYCDNRTSYMFWDVVHPTQAAVEKLMKIAFDGSAPLVSPKNIKQLTEREKKLAGVLAVKQQASAPIRPPIFGSLAACVLVLSASQVRQCWLEESHQGIQAGGVEEPALFQDERVRGPMETRVKKRKQERDLLSIQEEGTIVQSPQTGEISVRGADLESGEDSSDSVTSDAGSAKAAPDDVLHIAHALYKVCAKSPRAVIDFVRRVSPATVGRSIDWDVVREEESSKMGDGRSRWTDMEVRVFLESCLEEMAAFTITSNSPKPQAWQNLIHKMYTKCKKKQNKGVLSFRNDPLKHIDLHHAVFSGRTVVGNHSAVAGAAPAAPQGAVQWQTIDMAQLAAAYRPPPPTPPPTAADRGKGKRPAANTPASGSSSKKSRSDSAGLALERIADIREQSYQSHAAQMEAEKSMGLXDACMELVENEWXKLVGSVLVSACALFRDXLTCKCXFVRPHMDAARRLEFIRTGGTGQSSGGTQ

SEQ ID NO: 140166 - protein, 72 aa, Oryza sativa
  Clone ID: PAT_MRT4530_41390C.1.pep
MVITRTLPRPAGVPYVSSSSADRALPYASRCSGEADLAPSRGCSLQYLWPTSRTCLPEPLRKGFVFLILLVS

SEQ ID NO: 140167 - protein, 59 aa, Oryza sativa
  Clone ID: PAT_MRT4530_41391C.1.pep
MGFLLRVVQLAIVIAAALVIVITSSGSHYRDSVGVTDHEMFVSAKNDDICQIVVCMVSD

SEQ ID NO: 140168 - protein, 50 aa, Oryza sativa
  Clone ID: PAT_MRT4530_41392C.1.pep
MVMLFALFSSHATSGYTQRSKAVIKKEKQHGHYSTFNMIQHKSTSYVHTI

SEQ ID NO: 140169 - protein, 65 aa, Oryza sativa
  Clone ID: PAT_MRT4530_41393C.1.pep
SFPGGNWETQSCQFPLVARKNPSKPFVFKKFGSKGTHCLGLGLDSPGWKIPQPRFTFEPIWWFLR

SEQ ID NO: 140170 - protein, 192 aa, Oryza sativa
  Clone ID: PAT_MRT4530_41394C.1.pep
MDLAWITGTSVRVSFGQWSGGSVAGSKRRQATAAGGLSGTVAARRGWRQIAAGSERRQMGAGDERRPSGADPAQGALPRADPAAAPSPTTTTTRVVAAAATPTTSTCGWRRGPRPAQSAAGDGVAAGEGDVYVEELEMMKMMGIPVGFDSTKGKHVPDADVSGVRVVTKRQPWHYMNRRGGFNRPLPPERNR

SEQ ID NO: 140171 - protein, 149 aa, Oryza sativa
  unsure (1)..(149): unsure at all Xaa locations
  Clone ID: PAT_MRT4530_41395C.1.pep
TDALLTVKFGKXQNYYRLRVSIDFKVLESADGSQVAAMSLEPXSLACSLTANKGFSXVTXDFMTSDLQPMYALTIGLVLFYHINASRLVYTGLYYYFITSSSADCLYIIIYIGHIADCLNHIAIGXYRHRLLVAIGWNYSIGMSADRMF

SEQ ID NO: 140172 - protein, 1952 aa, Oryza sativa
  Clone ID: PAT_MRT4530_41396C.1.pep
MQDFGQWLPQSQTTADLYFSSIPIPSQFDTSIETQTRTSAVVSSEKESANSFVPHNGTGLVERISNDAGLTEVVGSSAGPTECIDLNKTPARKPKKKKHRPKVLKDDKPSKTPKSATPIPSTEKVEKPSGKRKYVRKKTSPGQPPAEQAASSHCRSELKSVKRSLDFGGEVLQESTQSGSQVPVAEICTGPKRQSIPSTIQRDSQSQLACHVVSSTSSIHTSASQMVNAHLFPPDNMPNGVLLDLNNSTSQLQNEHAKFVDSPARLFGSRIRQTSGKNSLLEIYAGMSDRNVPDLNSSISQTHSMSTDFAQYLLSSSQASVRETQMANQMLNGHRMPENPITPSHCIERAALKEHLNHVPHAKAAVMNGQMPHSYRLAQNPILPPNHIEGYQVMENLSELVTTNDYLTASPFSQTGAANRQHNIGDSMHIHALDPRRESNASSGSWISLGVNFNQQNNGWASAGAADAASSHAPYFSEPHKRMRTAYLNNYPNGVVGHFSTSSTDLSNNENENVASAINSNVFTLADAQRLIAREKSRASQRMISFRSSKNDMVNRSEMVHQHGRPAPHGSACRESIEVPDKQFGLMTEELTQLPSMPNNPQREKYIPQTGSCQLQSLEHDMVKGHNLAGELHKQVTSPQVVIQSNFCVTPPDVLGRRTSGEHLRTLIAPTHASTCKDTLKALSCQLESSRDIIRPPVNPIGPSSADVPRTDNHQVKVSEETVTAKLPEKRKVGRPRKELKPGEKPKPRGRPRKGKVVGGELASKDSHTNPLQNESTSCSYGPYAGEASVGRAVKANRVGENISGAMVSLLDSLDIVIQKIKVLDINKSEDPVTAEPHGALVPYNGEFGPIVPFEGKVKRKRSRAKVDLDPVTALMWKLLMGPDMSDCAEGMDKDKEKWLNEERKIFQGRVDSFIARMHLVQGDRRFSPWKGSVVDSVVGVFLTQNVSDHLSSSAFMALAAKFPVKPEASEKPANVMFVRISENGDCSGLFGNSVKLQGEILVQEASNTAASFITTEDKEGSNSVELLGSSFGDGVDGAAGVYSNIYENLPARLHATRRPVVQTGNAVEAEDGSLEGVVSSENSTISSQNSSDYLFHMSDHMFSSMLLNFTAEDIGSRNMPKATRTTYTELLRMQELKNKSNETIESSEYHGVPVSCSNNIQVLNGIQNIGSKHQPLHSSISYHQTGQVHLPDIVHASDLEQSVYTGLNRVLDSNVTQTSYYPSPHPGIACNNETQKADSLSNMLYGIDRSDKTTSLSEPTPRIDNCFQPLSSEKMSFAREQSSSENYLSRNEAEAAFVKQHGTSNVQGDNTVRTEQNGGENSQSGYSQQDDNVGFQTATTSNLYSSNLCQNQKANSEVLHGVSSNLIENSKDDKKTSPKVPVDGSKAKRPRVGAGKKKTYDWDMLRKEVLYSHGNKERSQNAKDSIDWETIRQAEVKEISDTIRERGMNNMLAERIKDFLNRLVRDHGSIDLEWLRYVDSDKAKDYLLSIRGLGLKSVECVRLLTLHHMAFPVDTNVGRICVRLGWVPLQPLPESLQLHLLEMYPMLENIQKYLWPRLCKLDQRTLYELHYQMITFGKVFCTKSKPNCNACPMRAECKHFASAFASARLALPGPEEKSLVTSGTPIAAETFHQTYISSRPVVSQLEWNSNTCHHGMNNRQPIIEEPASPEPEHETEEMKECAIEDSFVDDPEEIPTIKLNFEEFTQNLKSYMQANNIEIEDADMSKALVAITPEVASIPTPKLKNVSRLRTEHQVYELPDSHPLLEGFNQREPDDPCPYLLSIWTPGETAQSTDAPKSVCNSQENGELCASNTCFSCNSIREAQAQKVRGTLLIPCRTAMRGSFPLNGTYFQVNEVFADHDSSRNPIDVPRSWIWNLPRRTVYFGTSIPTIFKGLTTEEIQHCFWRGFVCVRGFDRTSRAPRPLYARLHFPASKITRNKKSAGSAPGRDDE

SEQ ID NO: 140173 - protein, 83 aa, Oryza sativa
  unsure (1)..(83): unsure at all Xaa locations
  Clone ID: PAT_MRT4530_41397C.1.pep
VGKAIRCGPLSLFTPAGEKGAXRSIGIPLPADQLEVLQDNLEWEDVQWSQTGVWVAGKEYPLARSGNLSCPAEIMKSAKPPRS

SEQ ID NO: 140174 - protein, 159 aa, Oryza sativa
  Clone ID: PAT_MRT4530_41398C.1.pep
MAMRLLKNIGRRAPASMACVSSAFSPGGCGVQVLPATTAAGVAFSETNKGYSELKQMYQAFCFNHPGLYDSDTGCDEYVKRMRAIVELVCRLEKEGQDWTSCTIEWDSERDLPIVPQWTPSSRTRTMTVGDRHALLAAAIVVAGAATLVAGAAVVSRQK

SEQ ID NO: 140175 - protein, 53 aa, Oryza sativa
  Clone ID: PAT_MRT4530_41399C.1.pep
ELTWRKFFIPYFSILHSEKTVVRGKRVKDQRSNTSSSPTYVGLPLNVKTSLEE

SEQ ID NO: 140176 - protein, 79 aa, Oryza sativa
  Clone ID: PAT_MRT4530_4139C.1.pep
MAVGGARGGEGDGRKAELGTSSGTSISWQATEAEAPPLFSVPFCQSLSMHGLSLASTDARLVLGFRRCVAHDSSSASDA

SEQ ID NO: 140177 - protein, 57 aa, Oryza sativa
  Clone ID: PAT_MRT4530_413C.1.pep
MSLVHDHLTSGALSGSRQQHIRVPGFGLFLPGECGIRRVALRSTDTDPGGGMEAMSI

SEQ ID NO: 140178 - protein, 144 aa, Oryza sativa
  unsure (1)..(144): unsure at all Xaa locations
  Clone ID: PAT_MRT4530_41400C.1.pep
VXIMPEWLGQHVSLEYITIINCPKLTSLPKSLLNLTALRELRLKGCEGLETLPEWLRLLRTAKVTFTLDRLKNIXLSELLLEGCEGLEISPELFGHLASLKCIEIQGCPDLTDLPESMKNLIALDELWLGGFSSLTGWMGSSFV

SEQ ID NO: 140179 - protein, 107 aa, Oryza sativa
  unsure (1)..(107): unsure at all Xaa locations
  Clone ID: PAT_MRT4530_41401C.1.pep
MVGKELVVRKNGPVDIREIAAKATLREVRQNGHTYVELRRVGKRVIFFCTICLTECFSDTVLFDHLKGNLHSXRRYAEAKVTLFGPMPWPFNDGVLFFNNSREXTPS

SEQ ID NO: 140180 - protein, 212 aa, Oryza sativa
  Clone ID: PAT_MRT4530_41402C.1.pep
MAEVSVVQPINVSCGGINLSRSHDITERSNGNGQRRDGSGDAGQGQGVRGGSVGGGALCVGCRLPREAAPCLHPGTDADPAHGLVEEFKAAAPPVSDELEFSWAQCRELHLQSCSFSHLALASSSSSELGGAVAPNSSTSPCAGSAPTPRAKTKSSFSGWVMPVWSPSQALQPPTPYPPCRRRCHRPPPPLDLPEMLWRLERGKGERWREGR

SEQ ID NO: 140181 - protein, 121 aa, Oryza sativa
  Clone ID: PAT_MRT4530_41403C.1.pep
MAYFAVLSHRRTAAAVASHPLTTTPASLAPPLSMSPSSLPPCPGHAASLIRSSRNKLNGTKSGQPRGRQSGACRSEVSGRGGRQGDSQRGVSRNGSEHTGGGSGPPERGSSQRLSTATTAG

SEQ ID NO: 140182 - protein, 174 aa, Oryza sativa
  Clone ID: PAT_MRT4530_41404C.1.pep
MGPPNGRGEWEQISGTNDELVHASVLASLDLTVVTSVDEIILATVDNPSNAVEWALAEMVNNPKVMKKAVDELDMVVGRERLVEESDIHNLTYLKACIREAFRLHPYHPFNPPHVAIADTTVAGYMIPKAAVSGNRSLIETSADSRMGRMSNTKKRVINKITEEMIMFQMAVDL

SEQ ID NO: 140183 - protein, 287 aa, Oryza sativa
  Clone ID: PAT_MRT4530_41405C.1.pep
MGRSPCCEKAHTNKGAWTKEEDQRLIAYIKAHGEGCWRSLPKAAGLLRCGKSCRLRWMNYLRPDLKRGNFTDDDDELIIKLHALLGNKWSLIAGQLPGRTDNEIKNYWNTHIKRKLLSRGIDPQTHRPVSAGSSAAAASGLTTTASTAAFPSLAPAPPPQQHRLHNPVHAAAPSNASFARSAASPPSEDGHSSSGGSSDAPRCPDLNLDLDLDLSMSLPSSPPKTPAAASSTTASRHHHHQQQKTICLCYHLGVRNGDVCSCKAAAPSPAGPRAFRFLRPLEEGQYI

SEQ ID NO: 140184 - protein, 128 aa, Oryza sativa
  unsure (1)..(128): unsure at all Xaa locations
  Clone ID: PAT_MRT4530_41406C.1.pep
PGERAAGATLATAPAHGGGPPHERAPGGPAPRPRGGAGDGGESPRDPGARREPXAVGETPRPPPRARPGPXASPPGVPDAAASETYDGSQGTVEGSGSPPGDTRPSPNPRKKKKKKPRAAPLKEASLR

SEQ ID NO: 140185 - protein, 99 aa, Oryza sativa
  Clone ID: PAT_MRT4530_41407C.1.pep
MVSLLIDLAATGERCQLLRATNASWETALHEVVRAGSKDIVVQLMAEDCELAGFPRDGGISPLYLAVLLDEIDIARSLYVMSHGNLSYSGPGRCNEDVF

SEQ ID NO: 140186 - protein, 107 aa, Oryza sativa
  unsure (1)..(107): unsure at all Xaa locations
  Clone ID: PAT_MRT4530_41408C.1.pep
DVSSTHGLKGSIGYIPPEYGYGSKPSAKGDVYSYGMLLLEMITGXRPVDPQFGGDMNXEKWVRDGFPHRAHEVVDEAPGTIVDICHEWQQQASAEQKRQQLMLNNII

SEQ ID NO: 140187 - protein, 75 aa, Oryza sativa
  Clone ID: PAT_MRT4530_41409C.1.pep
GAPGSPPRGRSPPPSRSAPGSISTRLTRAAALMGTCVPPPPVRKENKMSLGPPNLATQFTFSKIGPLLPLGGLPV

SEQ ID NO: 140188 - protein, 277 aa, Oryza sativa
  unsure (1)..(277): unsure at all Xaa locations
  Clone ID: PAT_MRT4530_4140C.1.pep
MSRNQIVVEHLIINPSKEEKGSQTRPAPRFRHPGTPRTKKAAARSVNRGTRGSGHRRPNKKWTRSARPAKPKENGPKREXVRGDDGAEPKLGGDGXRKERRRELDSAEREXRRLAETVEGGTGSVYIGLGGEESGRMRGKRPRKIRPPLMXPARLGGKXRTNPREREREKWGKRGRESRGIFPPTLLRARTAGGGGIRGGGGVRARARRRERREEGDDGWAPPVSEGGGRARPSAARARGGGRLGRGEEEREGERWAEPAQEGEXGGKKDFLEFFFL

SEQ ID NO: 140189 - protein, 43 aa, Oryza sativa
  Clone ID: PAT_MRT4530_41410C.1.pep
VSGVPLRMKLIEVFLAMNCFVPKFLPLFSCNLNCVCNPSSLAP

SEQ ID NO: 140190 - protein, 79 aa, Oryza sativa
  Clone ID: PAT_MRT4530_41411C.1.pep
LRTNRQLGTQIRLDKDLDLGGLGIHPRPRPTELGSVPKIAKFKQALYRTMVLVKRLLNGLYLTSTCYHLGIKFVVKSSS

SEQ ID NO: 140191 - protein, 41 aa, Oryza sativa
  Clone ID: PAT_MRT4530_41412C.1.pep
KIKMKNKKYIFFEKKKINKKEIYKLVNEIKNIIQTLKANQY

SEQ ID NO: 140192 - protein, 78 aa, Oryza sativa
  Clone ID: PAT_MRT4530_41413C.1.pep
MSCCGGSCNCGSSCKCGSGCGNMYPDLAEKTTNTSATMVLGVAPAKEQFEGVGKAAESGEAAHGCSCGSSCKCNPCNC

SEQ ID NO: 140193 - protein, 54 aa, Oryza sativa
  Clone ID: PAT_MRT4530_41414C.1.pep
DMFKNIGKTLFQKNISGKNLSLPLKTKSDSICNGGCICCYSVSCSFALKSTQRL

SEQ ID NO: 140194 - protein, 74 aa, Oryza sativa
  Clone ID: PAT_MRT4530_41415C.1.pep
MAAVRMTLRWDGPYLPPLGRKQAQRGSTPGMNLAGTDMLTPGVSTSAPARDECLEALIIPTGRGEACERPPVAT

SEQ ID NO: 140195 - protein, 78 aa, Oryza sativa
  Clone ID: PAT_MRT4530_41416C.1.pep
ELKASFISVYKYWLFTTCAKKNGLNQKKQNTKPGNTNTTRWQQIKPTLSYLKKHRGKQSNGLLRLQILTSTGGHLIWG

SEQ ID NO: 140196 - protein, 306 aa, Oryza sativa
  Clone ID: PAT_MRT4530_41417C.1.pep
IVGAGGMGKTTLAQFVCQDKKVQDHFANKIIWADVSKIFDPKVLVRKISGSFNRYKASADGLDTIMTDKFLLVLDDARDDAQSERWQQFLDLIRKNAPMGGKILLTTQIRPVANAVEGQMPPDTYKCLELGGLDQENTLKLFNHHAFGDLSPSDCFELQLIGEQIARKLKGCPLLARTIGRHLQGNTDHARWNTILNHDIHKVDDVATEIKKVLRLSYESLSNEVQVCFRYCSIFPPHYKFKMEEMVEMWVSSGLILQREDGINNPEDVGEQYFAALVRKSFFCRLLETDPSNGNMKEYYVLHNLM

SEQ ID NO: 140197 - protein, 1491 aa, Oryza sativa
  Clone ID: PAT_MRT4530_41418C.1.pep
MAERAVAHRLSPNASGDDGEQNPRRRARTLPSPSRRNLGRGEALGEAGGSATSPPAGDGGGRRDGARRRLVYGDGGTPQGALQAAGALLRHPPVVPDPETPARRWLDDVADLVMTAQQRLGAGGRSSATETSGAAAAGSMSSRRRARQAAAVTRRSSAIPSSTPPTQGDVRGGPDACLDIERRRDTRRAAHATEGASSFGAPLRSGHGGRPPVSPVGGAGCRAFVASLRNVRWPPRFRPTITEKYDGSVNPAEFLQIYTTGIEAAGDDDRVMANFFPMALKGEEADLHAVQRRDDESLRSYIQRFCQVRNTIPCIPAHAVIYAFRGGVRHNRMLEKIASKEPQTTAQLFELADRVARKEEAWTWNSSGSGVAAPAAPGSAARALRGPPERGGLRATKRRRPALPAGSAQPASGVPCTTPPSTTSRTAARSKVWLIEHRLAVRPGARPVRQKVRRQAPERQAFIREEVARLLEAGFIREVIHPEWLANPVVVPKANGKLRMCIDYTDLNKACPKDPYPLPRIDQIVDSTAGCDLLCFLDAYSGYHQIRMAREDEEKTAFITPIGTYCYTTMPFGLKNAGPTFQRTTRISLGSQIGRNVEAYVDDLVVKTRNQETLLSDLAETFESLRSARIKLNPDKCVFGVPAGKLLGFLVSARGIEANPEKIRAIERMRPPASLGMLGEKALPLFKLLKRSGPFTWMEEAERAFTQLKAYLSSPPVLVAPEPDEPLLLYLAATPQVDGPGATAGRPRLSPSDPEVVGTEAECAPRGLSDEERPGDAAPGEEDRSRRKVQRPVYFVSEALRDAKTRYPQAQKMLYAILMASRKLRHYFQAHRVTVVTSYPLGQILHNREGTGRVVKWAIELSEFDLRFEPRHAIKSQALADFVAEWTPAPEPVSALEASSGPSQLRHTAYWGAGAGVTLTSPSGDVLRYLVRLDFRATNNMAEYEGLLAGLRVAAGLGIRRLLVLGDSQLVVNQVCKEYRCSDPQMDAYVRQVRRMERHFDGIELRHVPRRDNAVADELSRLASSRAQTPPDAFEERLAQPSARPDPLGETNAPERPPRPVGVQALGPEGSAPSSPRLIAWITEIQAYLADKTLPEDREGSERVRRISKRYVLVEGTLYRRAANGVLLKCIPREQGVELLADVHEGECGAHSASRTLVGKAFHQGFYWPTALNDAVDLVRRCRACQFHARQTHQPAQALQTIPLSWSFAVWGLDILGPFRRAPGGFEYLYVAVDKFTKWPEAYPVIKIDKHSALKFIRGITARFGVPNRIITDNGTQFTSELFGDYCEEIGIKLYFASPAHPRSNGQVERTNAEILKGLKTKTFNILKKHGDSWIEELPAVLWANRTTPSRATGETPFFLVYGAEAVLPSELTLRSPRVTMYCEADQDQLCRDDLDYLEERRRRAALRAARYQQSLRRYHQRHVRARSLCVDDLVLRRVQTRAGLSKLSPMWEGPYRVIGVPRPGSVRLATGDGTELPNPWNIEHLRRFYP

SEQ ID NO: 140198 - protein, 1754 aa, Oryza sativa
  Clone ID: PAT_MRT4530_41419C.1.pep
MAERAKAHNLSLSASGDDGEQNPRRRARTPPPPSRRSLRREEALEGVERSATLPPTSDGEGRRDGERRLLVYGDGSTPQGVLQAAGALLRHPPVVPDPETLARRWLDDVADLVMTAQQRLGAGGRSSATKASGAATAGSVSSRWRARRAAAVTRRSSAILSSTPPTQEDVRGGPDARLGFERRRNGRRAAHATEGASSSGAPLQYGRGGQPSVPPVGGVGCRAFVASLRNVRWPPRFRPTIAEKYDGSVNPAEFLQVYTTGIEDAGGDDRVMANFFPMALKGQARGWLMNLPPASVHSWEDLCQQFTMNFQGTYQRPAVLSSPQHHTMHPCTRGDLRVQGGVRHNRMLEKIASKEPQTTAELFQLADRVARKEEAWTWNSSGSGVAASAAPGSAARSGRRDRRRKKRSAHSDDEGHVLAVEGASRATRKGRPASDKKKEAGAPSRERPTGKWCTVHNTSLHDLADCRAVKSLAERTRKWEEERRQERREGKAPAAPSGNRRRQIAMVVSPTICNVKLGRVLIDGGAALNILSPAAFDAIKVPGMVLRPSQPIIGVTPGHTWPLGHIDLPVTFGGSANFRTERVSFDVADLSLPYNAVLGRPALVKFMVAVHYAYLQMKMPGPGGPITVHGDLKVALACMEQRADHLAAASKPAGSDERLRPSVPAAPRQRMITYDKVPEDALVSFLRANADVFAWRPADMPGVPREVIEHRLAVRPDARPVRQKVRRQAPERQAFICEEVARLLEAGFIREVIHPEWLANPVVVPKSNGKLRMCIDYTDLNKTCPKDPYPLPRIDQIVDSTAGCDLLCFLDAYSGYHQIRMAREDEEKTAFITPIGTYCYTTMPFGLKNAGPTFQRTTRISLGSQIGRNVEAYVDDLVVKTHNQETLLLDLAETFESLRSARIKLNPDKCVFGVPAGQPREDTSYRADAPPSQLRDVQCITGCMAALSRFISRLGEKALLLFKLLKRSRPFTWTEEAERAFTQLKDYLSSPPILVAPEPDEPLLLYLAATPQVVSAALVVERDEDNPHFARPHPVSTRPGREQGGEAPESNGGPRPPTAGAGPPPACPTVPGAPDPQDGLGATAGRPRLSPSDPEVIGAEAKCAPCGLSDEERPGDAALSEEDRPRRKVQRPVYFVSEALRDAKTRYPQAQKMLYAILMTSRKLRHYFQAHRVSVVTSYPLGQILHNREGTGRVVKWAIELSEFDLHFEPCHAIKSQALTDFVAEWTPALEPVSALEASLGPSQLPHTACWGAGAGVTLTSPSGDVLRYLVRLDFRATNNMADYEGLLAGLRVAAGLGIRRLLVLGDSQLVVNQVCKEYRCSDPEMDAYVRQVRRMERHFDGIELRHVPRRDNAVADELSRLASSRAQTPPGSFEERLAQPSARPDPLGETDAPERPPRPVGVQASGPEGSAPSSLRLIAWNRSDPGGFYWPTALNDAVDLVRQCKACQFHAKQTHQLAQALQTIPLSWPFAVWGLDILGPFRRAPGGFEYLYVAVDKFTKWPEAYPVVKIDKHSALKFIKGITARFGVPNRIITDNSTQFTSELFGDYCEDMGIKLCFASPAHPRSNSQVERANAEILKGLKTKTFNILKKHGDSWIEELPAVLWANRTTPSRATGETPFFLVYGAEAVLPSELTLRSPRATMYCEADQDQLRRDDLDYLEERRRRAALRAARYQQSLQRYHQRHVRARSLCVDDLVLRRVQTRAGLSKLSPMWEGPYRVIGVPRPGSVRLATGDGTELPNPWNIEHLRRFYP

SEQ ID NO: 140199 - protein, 118 aa, Oryza sativa
  Clone ID: PAT_MRT4530_4141C.1.pep
QGPRGRLLRLGPAVRYFVGGVLLFVGSAYLLGSVFLPGALARLIAGCCSLFCRGGLFVFAVCACFVFFLPLGVALCACSLSFLVLLWCLVLFVCPLYPSSSWFVEKKSRKTQKNKKTK

SEQ ID NO: 140200 - protein, 1589 aa, Oryza sativa
  Clone ID: PAT_MRT4530_41420C.1.pep
MAERAVAHNLSPSASGDDGEQNPRRRARTPPSPSRRNLGRGKALEGVEGSATSPPASDGGGRRDGARRRLVYGDGGMPQGALQAAGALLRHPPIVPDPETPARRWLDDVADLVMTAQQRLGAGGRSSATEASGAAAAGSTSSRRRARRAAAVTRRSSAIPSSTPPTQEDVRGGRMPASISSAGTTLVAPPTQRRAFPRPERHFGPGTGAGPPCPRFRPTVTEKYDGSVNPVEFLQIYTTGIEAAGGDDRVMANFFPMALKGQARGWLMNLPPASVHSWEDLCQQFTTNFQGTYPRPGEEADLHAVQRRDDESLRSYIQRFCQVRNTIPCIPAHAVIYAFRGGVRHNRMLEKIASKEPQTTAQLFELADPPAAPGSAARSGRRDRRRKKGSTRSDDEGHVLAVEGASRAPRKGRPASDKKKEAGAPSRERPTGKWCTVHNTSLHDLADCRAVKSLAERTRKWEEEKRQERREGKAPAAPAGNRRGEAKQKATAEDIDDGDDDLGFQEPEATVATVDGGACAHVSCRSLKAMKRELLAAAPTHEATRRARWSEVIEHRLAVRPGARPVRQKVRRQAPERQTFIREEVARLLEAGFIREVIHPEWLANPVVVPKANGKLRMCIDYTDLNKACPKDPYPLPRIDQIVDSTAGCDLLCFLDAYSGYHQIRMAREDEEKTAFITPIGTYCYTTMPFGLKDVQCVTGCMAALSRFISRLGEKALPLFKLLKRSGPFTWTEEAERAFAQLKAYLSSPPVLVVPEPDEPLLLYLAATPQVVSAALVVERDEDNPHSAHPHPVSTRPGREQGGEAPEPNGGPRPPTAGAGPPPACPTVPGAPDPQDGLGATAGRPRLSPSDPEVVGTEAECAPRGLSDEERPGDAAPGEEDRPRRKVQRPVYFVSEALRDTKTRYPQAQKMLYAILMASRKLRHYFQAHRVTVVTSYPLGQILHNREGTGRVVKWAIELSEFDLRFEPRHAIKSQALADFVAEWTPAPEPVFAPEATSGPSQLPHTAYWGAGAGVTLTSPSGDVLRYLVRLDFRATNNMAEYEGLLAGLRVAAGLGIRCLLVLGDSQLVVNQVCKEYRCSDPQMDAYVRHVRRMERHFDGIELRHVPRRDNAVADELSRLASSRAQTPPGAFEERLAQPSARPDPLGETDAPERPPRPVGVQASGPEGSAPSSPRLIAWITEIQAYLADKTLPEDREGSERVRRISKRYVLVEGTLYRRAANGVLLKCIPREQGVELLADVHEGECGAHSASRTLVGKAFRQGFYWPTALNNAVDLVRRCRACQFHARQTHQPAQALQTIPLSWPFAVWGLDILGPFRRAPGGFEYLYVAVDKFTKWPEAYPVIKIDRHSALKFIRGITARFGVPNRIITDNGTQFTSELFGDYCEDIGIKLCFASPAHPRRNGQVERANAEILKGLKTKTFNILKKHGDSWVEELPAVLWANRITPSRATGETPFFLIYGAEAVLPSELTLRSPRVTMYCEADQDQLRRDDLDYLEERRRRAALRAARYQQSLRRYHQRHVRARSLCVDDLVLRRVQTRAGLSKLSPMWEGPYRVIGVPRPGSVRLATGDGTELPNPWNIEHLRRFYP

SEQ ID NO: 140201 - protein, 126 aa, Oryza sativa
  Clone ID: PAT_MRT4530_41421C.1.pep
LSYLGNYMCTPAEAVMSILSIASHRHVTSVAAAEDEHLRWSSMAKFGYAPAIETRTTNAAAALSTVACHPTIILNRSPPPVPLSGRDSEVDQSSKQDQGNRQRRRRRASAGPCSNGREKREAREWD

SEQ ID NO: 140202 - protein, 1618 aa, Oryza sativa
  Clone ID: PAT_MRT4530_41422C.1.pep
MAERAVAHNLSPSASGDDGEQNPRRRARTPPSPSRRNLGRGKALEGVEGSATSPPASDGGGRRDGARRRLVYGDGGMPQGALQAAGALLRHPPIVPDPETPARPAPRRRRAVLRHRGLWRCRRRLHVVKAEGAASGGRYPPFVRHSLVNASDPRRCAWGSDARLDIERRHDARRATHATEGVSSSGAPLRSGHGGRPPVSPVGGAGCRAFVASLRNVRWPPRFRPTVTEKYDGSVNPVEFLQIYTTGIEAAGGDDRVMANFFPMALKGQARGWLMNLPPASVHSWEDLCQQFTTNFQGTYPRPGEEADLHAVQRRDDESLRSYIQRFCQVRNTIPCIPAHAVIYAFRGGVRHNRMLEKIASKEPQTTAQLFELADPPAAPGSAARSGRRDRRRKKGSTRSDDEGHVLAVEGASRAPRKGRPASDKKKEAGAPSRERPTGKWCTVHNTSLHDLADCRAVKSLAERTRKWEEEKRQERREGKAPAAPAGNRRGEAKQKATAEDIDDGDDDLGFQEPEATVATVDGGACAHVSCRSLKAMKRELLAAAPTHEATRRARWSEVTLTFDQTDHPPCVARGGQIAIVVSPTVCNVKLGRPVRQKVRRQAPERQTFIREEVARLLEAGFIREVIHPEWLANPVVVPKANGKLRMCIDYTDLNKACPKDPYPLPRIDQIVDSTAGCDLLCFLDAYSGYHQIRMAREDEEKTAFITPIGTYCYTTMPFGLKDVQCVTGCMAALSRFISRLGEKALPLFKLLKRSGPFTWTEEAERAFAQLKAYLSSPPVLVVPEPDEPLLLYLAATPQVVSAALVVERDEDNPHSAHPHPVSTRPGREQGGEAPEPNGGPRPPTAGAGPPPACPTVPGAPDPQDGLGATAGRPRLSPSDPEVVGTEAECAPRGLSDEERPGDAAPGEEDRPRRKVQRPVYFVSEALRDTKTRYPQAQKMLYAILMASRKLRHYFQAHRVTVVTSYPLGQILHNREGTGRVVKWAIELSEFDLRFEPRHAIKSQALADFVAEWTPAPEPVFAPEATSGPSQLPHTAYWGAGAGVTLTSPSGDVLRYLVRLDFRATNNMAEYEGLLAGLRVAAGLGIRCLLVLGDSQLVVNQVCKEYRCSDPQMDAYVRHVRRMERHFDGIELRHVPRRDNAVADELSRLASSRAQTPPGAFEERLAQPSARPDPLGETDAPERPPRPVGVQASGPEGSAPSSPRLIAWITEIQAYLADKTLPEDREGSERVRRISKRYVLVEGTLYRRAANGVLLKCIPREQGVELLADVHEGECGAHSASRTLVGKAFRQGFYWPTALNNAVDLVRRCRACQFHARQTHQPAQALQTIPLSWPFAVWGLDILGPFRRAPGGFEYLYVAVDKFTKWPEAYPVIKIDRHSALKFIRGITARFGVPNRIITDNGTQFTSELFGDYCEDIGIKLCFASPAHPRRNGQVERANAEILKGLKTKTFNILKKHGDSWVEELPAVLWANRITPSRATGETPFFLIYGAEAVLPSELTLRSPRVTMYCEADQDQLRRDDLDYLEERRRRAALRAARYQQSLRRYHQRHVRARSLCVDDLVLRRVQTRAGLSKLSPMWEGPYRVIGVPRPGSVRLATGDGTELPNPWNIEHLRRFYP

SEQ ID NO: 140203 - protein, 684 aa, Oryza sativa
  Clone ID: PAT_MRT4530_41423C.1.pep
MAGVVTRAVAAAVLVVVVVVAAAELVAAEPPPSERSALLAFLAATPHERRLGWNSSTSACGWVGVTCDAGNATVVQVRLPGVGLIGAIPPGTLGRLTNLQVLSLRSNRILGGIPDDVLQLPQLRLLFLQNNLLSGAIPPAVSKLAALERLVLSSNNLSGPIPFTLNNLTSLRALRLDGNKLSGNIPSISIQSLVVFNVSDNNLNGSIPASLARFPAEDFAGNLQLCGSPLPPCKSFFPSPSPSPGVSPADVPGAASSSKKRRLSGAAIAGIVVGAVVLALLLLVAAVLCAVSKRRRGASEGPKSTTAAAAGAGAAAARGVPPPGSGEGTGMTSSSKEDMGGASGSAAAAVAAVAAEPSRLVFVGKGAGYSFDLEDLLRASAEVLGKGSVGTSYKAVLEEGTTVVVKRLKDVAVARREFDAHMDALGKVEHRNVLPVRAYYFSKDEKLLVFDYLPNGSLSAMLHGSRGSGKTPLDWDARMRSALSAARGLAHLHTVHSLVHGNVKSSNVLLRPDADAAALSDFCLHPIFAPSSARPGAGGYRAPEVVDTRRPTYKADVYSLGVLLLELLTGKSPTHASLEGDGTLDLPRWVQSVVREEWTAEVFDVELVRLGASAEEEMVALLQVAMACVATVPDARPDAPDVVRMIEEIGGGHGRTTTEESEEGVRGTSEEERSRGTPPAAPTP

SEQ ID NO: 140204 - protein, 46 aa, Oryza sativa
  Clone ID: PAT_MRT4530_41424C.1.pep
GEEMITIELCIYFSMLVSPERGLEDMLADLRWNAMVLAEATMLSFC

SEQ ID NO: 140205 - protein, 487 aa, Oryza sativa
  unsure (1)..(487): unsure at all Xaa locations
  Clone ID: PAT_MRT4530_41425C.1.pep
MEGPKRSQLRVRLRVTARRRGGDGGADGGGSGGGGGGAGGRKRLLDAPAFNSAAKLQRREIGGREXRARGRGAATAVPERFRNMHLQEEFDTYDHNAHLFVKLQFLKKRSKIIEIVPAKDIIFALAHSGLCAAFSRVTNKRISFLNLSPDEVIRSLFYNKNNDSLITVSVYASDHFSTLKCRTTPIEYIRRNQLDAGFPLFETESLKWPGFVEFDDVNGKVLTYSAQDGIYKVFDLKNYSFLYSIPDTNVQEIKISPGIMLLIYERTPCHVPLKILSIEDGRPLKSFTHLLHRNKKIDFIEQFNEKLLVKQEDENLQILDVRSSELIEVSVTKFMTPSAFIFLYENNLFLTFRNRTVAVWNFRGELVTSFEDHLLWHQDCSTNNIYITSDQDLIISYCKSEAGXMMVQYTLGSINMSDIMTGKCIAKIAANDPTLRIGPRKNGNSERSSIWSTIPEALEDVTALFYDEDRNEIYTGNRHGLVHVWSN

SEQ ID NO: 140206 - protein, 39 aa, Oryza sativa
  Clone ID: PAT_MRT4530_41426C.1.pep
MVKTPIRYKGGILEMMAPTRCSNVRCDMVKIFGVGPNKA

SEQ ID NO: 140207 - protein, 77 aa, Oryza sativa
  Clone ID: PAT_MRT4530_41427C.1.pep
KRTKNIFEWGSKLTQYSVCLQSPRTTFVAGFGQGEHTAFLLGHESYLGLRPSMVMPPYNRDRLAAKCNWNPACKEKK

SEQ ID NO: 140208 - protein, 50 aa, Oryza sativa
  unsure (1)..(50): unsure at all Xaa locations
  Clone ID: PAT_MRT4530_41428C.1.pep
HSFRXLGIFKPAPSQFFYLFCSPSDFPGEALFKPTRLSELFFYARRTQFT

SEQ ID NO: 140209 - protein, 195 aa, Oryza sativa
  Clone ID: PAT_MRT4530_41429C.1.pep
MDDVSSSPEHLLLLVEDMDDVKRLDDMEQDLLLRIEDGVVAAAAGDEAWVDDLEERTAGLGDSLRLGPRQSEGLRSVGLWASVVRPDEWWGGESRARAETASRRATCATLEPNVLLRRLPCSVIPAMASRGAVLVAVAAAVAVMFASVASAQVDGGVPPAPAPVTGAAAGGAASAALAVACSAVLSILVAGGIMH

SEQ ID NO: 140210 - protein, 189 aa, Oryza sativa
  Clone ID: PAT_MRT4530_4142C.1.pep
SCSVVHGGPGAPGLAPAGAVGPTRQPHPRARAADGRAPRGSHSARPRAAKPAQPAGGSARPPMVTGGGHRHGGAVAERGEGKGENKRRSMAHPRSTAKTKKAAGAEEGGGTARVDGVDGVSAVDERNGGVDEVGEDAVKPKEATPRWAVVRGDDGGGPELGGDCGERERRRELDFGEEEGRRRGALGLH

SEQ ID NO: 140211 - protein, 217 aa, Oryza sativa
  Clone ID: PAT_MRT4530_41430C.1.pep
MVLHRDIKASNILLDAAFRGRLGDFGLARIVVGLDKNSYTDVGVAGTWGFIAPEYSVSHKATRKTDVYAFGVLLLEIVTGRRVLCKFQGTFQLLVDWVWRLHREGSLLDAVDNGVASSSSSSTEELFDADDAIRLLLLGLACSNPNPSDRPSMTEVVQVVARSAAPPDVPPVKPAFVWPPEGGVEVDSTGSDVDASLCEWDEEETSSSSDALAVRVQ

SEQ ID NO: 140212 - protein, 351 aa, Oryza sativa
  Clone ID: PAT_MRT4530_41431C.1.pep
MELVLTEALRRLPGTPREFKHAAIRKATNNFDEGRKLGNGGFGAVYRGTIRSSEVAVKRFTRDENRCYDDFLAEVDIINRLRHRNVVPLVGWSYEKGELLLIYEYMPNGSLDRQLFPKEKPGRILGWTTRYGIVTDIAAGLHYVHHEHEHMVLHRDIKASNILLDAAFRGRLADFGLARIVVGLDKNSYTDVGVAETWGFIAPEYSVSHKATRKTDVYAFGVLLLEIVTGRRALCKFQGTFQLLVDWVWRLHREGSLLDAVDNGIASSTEEFDADDAIRLLLLGLACSNPNPSDRPSMTEVVQVVARSAAPPDVPPVKPAFVWPPEGGVEVDSDDVDSSGSDVYASLCEWE

SEQ ID NO: 140213 - protein, 149 aa, Oryza sativa
  unsure (1)..(149): unsure at all Xaa locations
  Clone ID: PAT_MRT4530_41432C.1.pep
LGSLQRQRRRRRSRIRPRRRRRSSLRKRNLRRRRNPRRRRRRATRRNRRKARRKRRRRRSQRXRXXPXXRRRRRRRRNLQFTNMCGICYPWPCSDPTHWGAGFVHPQWPQFEAPAAALPLFVPGHHHHFRHWARFGAEPFGGPCTSVGS

SEQ ID NO: 140214 - protein, 440 aa, Oryza sativa
  Clone ID: PAT_MRT4530_41433C.1.pep
MGKSKKNKGGRGGGGGGGEDQFDGGSDVDSVSSVSTALSDLQLAQATEQVSSQDFVLDKYIDDLYEKRGSTREAALGALVDAFESFVLLDLVENKYATLLSQFINSIKKGSIKEVCLACHTTGLLAITLGAGSSSHEIMDESRLQLLRVLQTWPDASKMISALDCLAVVTFVGATDLSETQLSMKAIWDVIHPKSGSNVGIVRKPKPPLLAAAVSAWALLLTTIVSSKRNVDSWKESITFLSALLEAEDRAVRMAAGEALALCFELKLLDVFSNEEVEVDTAEASGSKNQLFLNMQALKAKISGLVYNLSMEAGGRGADKKNLNDQRDLFQRISDFIKTGECLEESLRIAGKHGILRVTSWRESIQLNYLRRFLGRGFLKHAQDNGLLHDIFDIKMDKTENMSTTEKKIYRSGEEKGRALKLNKERRLAQMRKQNILNEQ

SEQ ID NO: 140215 - protein, 147 aa, Oryza sativa
  unsure (1)..(147): unsure at all Xaa locations
  Clone ID: PAT_MRT4530_41434C.1.pep
LGLPPAAGDGDGLWQRRAGGCSMRRSWRGRTPGHPRPGLAALDLDSPWISMPSLDLEMRGRILPLSLADSPSCQTITTLLVTARGTHRLHQFALFLHFSHCVGSGCGERAWRVRSRCSPNAICITWFNLMRAXVRSLVESFFFFWTI

SEQ ID NO: 140216 - protein, 92 aa, Oryza sativa
  Clone ID: PAT_MRT4530_41435C.1.pep
MAVTRDSGYGSGDRQVGLARRRSAWAAQRRRHRSEHQAAVQFSTRSSRHGRVVDSGAAARQWLNGYRRLAASRLTEENEGQNILRIDYSTSV

SEQ ID NO: 140217 - protein, 745 aa, Oryza sativa
  unsure (1)..(745): unsure at all Xaa locations
  Clone ID: PAT_MRT4530_41436C.1.pep
GCPPKPFVFLKQQSNAAAAAAAXLLLLLLHLLLVAVPATSLTFSYDADSFVSEDFRQEDDAMVTAGRIELLGEEFAARARGRALYKRPVQLWDGATGEEASFAASFNFTIRSVAGRGNALAGHGMTFFLAPFMPDMPQECYEGCLGLFDQSLTRNTASATMGNASGAASFVAVEFDTHMDGWDPSGRHVGVDINNVDSRRGNYVVLPEDSLVDAGVMSATVSYDSGARRLDVALAIGGGAATATYNLSAAVHLRSVLPEQVAVGFSAATGDQFASNHTVLSFTFSSTLPTRTTNPPPPSTSSAKTAHLSAAVAAAGIALLLLVLAITILIRRARKRRRRDDGVSYDDSLDDDDEEDMESGTGPRRIPYAQLAAATGGFAEIGKLGEGGSGSVYGGHVRELGRDVAIKVFTRGASMEGRKEYRSEVTVISRLRHRNLVQLMGWCHGRRRLLLVYELVRNGSLDGHLYSNKETLTWPLRYQIINGLASAVLYLHQEWDQCVVHGDIKPSNIMLDESFNAKLGDFGLARLIDHGMSLQTMTAVAGTPGYLDPECVITGKASTESDMYSFGIVLLEVASGRRPMVVTPRAAAATAGGGKDDDDGGGQVFRLVEWAWELYGRGDDDQSSLDAIADTRLGGAFDRWEMERVVGVGLWCAHPDPKARPAIRQAAEALQSRKFRMPVLPPRMPVAVYLQPFAASTMKYYGDSMTSVGSEVVGYSSTSLATATLSSSSSLPSAMANNDSLSPRE

SEQ ID NO: 140218 - protein, 73 aa, Oryza sativa
  Clone ID: PAT_MRT4530_41437C.1.pep
QVNITASSTASPYIILSLVTTHICTPSIDSISRLHPFLPPPLPSHTRDQNRLGLKNGFSLLESSSSSSDNSAG

SEQ ID NO: 140219 - protein, 101 aa, Oryza sativa
  unsure (1)..(101): unsure at all Xaa locations
  Clone ID: PAT_MRT4530_41438C.1.pep
XMALSKXSHSTLVHXAGTHCPPLIYHCGGGXXDYWAXWKCXXTXLKSVSHLSLLLCLSVCLSLLCFHSXVCFSLYCVPFXFFQFLYVYLSLSVSLFIFSVC

SEQ ID NO: 140220 - protein, 478 aa, Oryza sativa
  Clone ID: PAT_MRT4530_41439C.1.pep
MLLLKAVYRVVVNNFLALAAAAVAAVLLRRPDELAARLRAVSSPLHAATAAVLAAGVARLVRARRARGVYLVEYGCFRPRPCYRAPFATCLEHAHLMPYLVDEESVAFAIRLLERSGLGDETCVPDAYHYMPPDRSLRASRDESELVIFSAVDDVFARSALTPADIDVLIVNCSIFTPTPVFADMVVNRYKLRAEVQNVNLSGMGCSAGLVSVGLAKNLLQVSPPGTNVLIVSTEILSSQYYVGTERAMLLPNCLFRMGAAAMILSNSPDHARFRLGRVVRTVTAARDSDYRCVFQEEDEQGNTGIRLSKDLATTAGHALKSNIAAFGPLVLPASEQLLVAISFLKRKLKQLSGHAGKVRLYRPDFRTAFEHFCIHAGGRGVIDEVQHGLGLSDDDVEASRMTLHRFGNTSSSSVLYELAYLEAKGRMKRGDRVWMISFGAGFDCNSVAWECVKPAPDADGPWVDCIHRYPVQLPEIA

SEQ ID NO: 140221 - protein, 96 aa, Oryza sativa
  Clone ID: PAT_MRT4530_4143C.1.pep
VVDKNDRSGTGRVSNGQPRSHVAPVSAGSGDPQKHRSRVLRFAAARTCIHRRVSCVLPTSNLTTYRESLRPHPKPPAEPAKGGLRGLPVRSHELRH

SEQ ID NO: 140222 - protein, 526 aa, Oryza sativa
  Clone ID: PAT_MRT4530_41440C.1.pep
MASESESNGHHHAGDEARAENSGAGCLHGGDDGGGTPRTTPEIRYTKLFINGRFVDAASGKTFETRDPRTGDVIARVAEGDKEDVDLAVKAAREAFDHGEWPRMSGSERGRVMAKYAEVVERHADELAALESLDAGKPLAAARAVDVGECVGILRYFAGAADKIHGETLKMSRQLQGYTLREPLGVAGLIVPWNFPAIMFFSKVSPALAAGCTVVVKPAEQTPLSALFLAHLSKQAGVPDGVINVVTGFGPTAGAAISSHMDVDVVAFTGSTEVGRLIMEASAKSNLKPVALELGGKSPFIVFDDADLDKAVELAIGGNFFNKGEACVAGSRVFVQEGIYDRFEQKLADTMKSWVVGDPFDPRVNQGPQVDKAQYERVLGYIEQGKAEGATVLTGGKPCGKKGYYIEPTIFTNVKDDMVIAREEIFGPVMCLMKFKTVEEAIERANGTRYGLAAGLVTRDIDVANRMARSIRAGVVWVNCYFAMDRSCPFGGRKMSGFGKDDSMHALDKFLAVKSVVTPVHGSPWF

SEQ ID NO: 140223 - protein, 53 aa, Oryza sativa
  Clone ID: PAT_MRT4530_41441C.1.pep
HCNLSCLHEIKGSPDHYKSCIHMLMYTTAIVRGHCHIISQPTTAKQVPLHSQA

SEQ ID NO: 140224 - protein, 86 aa, Oryza sativa
  Clone ID: PAT_MRT4530_41442C.1.pep
SPVLITWCFRNDLSNVGNCWCSSIFMVIVGPTFRYAGLSCCSFEVWGANLVWTNCQMYHYKFLKRKLSTMEVLDNSSVSAAEGLFS

SEQ ID NO: 140225 - protein, 135 aa, Oryza sativa
  Clone ID: PAT_MRT4530_41443C.1.pep
MAIRPARHGLAQALARHFMPTGYTSGPGTAHHPGTTLLLGRPGQITGPWAIWSSTVEGNESGWGGNARRRPASRGGAKVCDNVRDYTSDDGEAVEPVVVAGAVAGRAGATGAELAQRAGERTEKKLGGGRRSGLS

SEQ ID NO: 140226 - protein, 142 aa, Oryza sativa
  Clone ID: PAT_MRT4530_41444C.1.pep
MDLLILRRPWIYRRKLLLLLVLAFGESDLEPIPLRLHRSTIARESKRGATAQQPRNDLSNVGNCWCSSIFMVIVGPTFRYAGLSCCSFEVWGANLVWTNCQMYHYKFLRSGDPPLIVGLTLSGYGWKVVQFHQGPVKVGFVI

SEQ ID NO: 140227 - protein, 159 aa, Oryza sativa
  Clone ID: PAT_MRT4530_41445C.1.pep
SSHRSISLLSSSVAPQTPTPIPMAASASAAGAGAGKSLFQTFRKFFKKPWEITGPCASPEYRSALPGALEYRHRCPATLTKDTMAVVPTSEPETVYDIKYYTRDRRRDRPPVRRTLLRKPDLERYMAAKQFDPAKDFPVPYVNTAVEEDYDAVGGGYQK

SEQ ID NO: 140228 - protein, 349 aa, Oryza sativa
  Clone ID: PAT_MRT4530_41446C.1.pep
ERGQPGDNGTQDWGENPGLNKITPVRTPPRTQKEHLYYGGLPCERTQHGKGQSCVVTSRVLFSSLFLLTLRHKHLACYMFSYLAAFISAHGSLEQHLLDLIIIESSSNNYQYKETSSREAPMERIQATTSLLPRPAASSTPARTEHAPTGPLRADGPDEAVVLGRPGCEARGAAPLAETAGSHKDTATCGVFDVTACVICLTGSFAGANTRMRFVADARRARVRVSRAEPSPPSPLPRCRFPRAVVRVRAPAWSPPVPRLRRLRRPAPLPCRAAGRPREPARVPKPRRSNRRAARCFPRARAVVADRLVAAAVSLCRACPRLSPVSPLCSTPSPPSSPSSSPGPRHSTR

SEQ ID NO: 140229 - protein, 329 aa, Oryza sativa
  Clone ID: PAT_MRT4530_41447C.1.pep
MEIDGSGDESAAAAAAATSTDPGRGRKRPPSPSTPTPSDDGEDSDDGWAVSDSGSEEEEEEYDDEEEQEGMHRPFTVDDFPRLSSDHSVQTDALYDIPHLRLRGPSPLSLFRAFNDPLTDKRMHWGMACLPLTSPARGICITSRALFEFQLCIRTEDSPEAEDEPIGETLIERCTEFTNILRSASFTKTVRLYGEKCGLDVKFALLVNAVQATVDVEIIHSPACGLNLKLYAKTSGFSDVIRLFRGVAQSGRRIRSLVAVVRRSHLDLCIEGSPADIGLGEKLPCVRWEHKFGAGFHRTADEVVKLGDFTTISVKVTWKAVDKHPPPKG

SEQ ID NO: 140230 - protein, 49 aa, Oryza sativa
  Clone ID: PAT_MRT4530_41448C.1.pep
MVKKFFEIDYTSRDNRANITVIAVNRAIIALKPRLSRDYRDNRATAGWW

SEQ ID NO: 140231 - protein, 380 aa, Oryza sativa
  Clone ID: PAT_MRT4530_41449C.1.pep
MEVDGGGDESSAATPDPGRGKKRPPSPSTPPTPSDDGEDSDDSWAVSDEEEEEEEEDGEDQEGKHRPFTVDDFPRLSSDHSVQTDALFDIPHLRLGGPSPLSLFRAFNDPLTDKRRHWFGSYYRLDDESEISVDSAGAVDCLNGCRCLSKNLLQFIDLKISGYRHTQPGRAKIFGFFAVRDDLEPLRNYVFRHAIYNYEAVSVKPKTDSPEAEDEPKGDTLIEGCTEFTNILRSTSFTKTVRLYGEKCGLDLKFALLVNAVQATVDVEIIHSPPCGLNLKLYAKTSGFSDVIRLFQGAAQSGHRISSVVAVVRRSHLDLCIEGSPAGIGLGEKLPRVRWEHRFGAGFHGIEDEVVKLGDFSTISVKVTWKAVGKRPAPKG

SEQ ID NO: 140232 - protein, 214 aa, Oryza sativa
  unsure (1)..(214): unsure at all Xaa locations
  Clone ID: PAT_MRT4530_4144C.1.pep
LALLAFPNVGFNLHEERIFRSCSVVHGGPGAPGLAPAGAVGPTRQPHPRARAADGRAPRGSHSARPRAAKPARSAGGGXRAPMVAAGDHRRGEAAAERGXGKGERRQRSMAHLGATAATEEAAEAEGGGGAARVDGVGGAPAVGDRNGEVDEVGEDAAKPKEAAPRWEAVRGNDGSGPELGGDGRGRERRHELESGEEEGRREAETDGGGAGRV

SEQ ID NO: 140233 - protein, 148 aa, Oryza sativa
  Clone ID: PAT_MRT4530_41450C.1.pep
KHRPFTVDDFPRLSSDHSVQTDALFDIPHLRLGGPSPLSLFRAFNDPLTDKRRHWCLSKNLLQFIDLKISGYRHTQPGRAKIFGFFAVRDDLEPLRNYVFRHAIYNYEAVSVKPKTPCLRYLLTSRALFEFQLCIRTEDSPEAEDEPK

SEQ ID NO: 140234 - protein, 341 aa, Oryza sativa
  Clone ID: PAT_MRT4530_41451C.1.pep
MEIDGSGDESAAAAAAATSTDPGRGRKRPPSPSTPTPSDDGEDSDDGWAVSDSGSEEEEEEYDDEEEQEGMHRPFTVDDFPRLSSDHSVQTDALYDIPHLRLRGPSPLSLFRAFNDPLTDKRMHCTSLDCIITHLLVGMACLPLTSPARGICITSRALFEFQLCIRTEDSPEAEDEPIGETLIERCTEFTNILRSASFTKTVRLYGEKCGLDVKFALLVNAVQATVDVEIIHSPACGLNLKLYAKTSGFSDVIRLFRGVAQSGRRIRSLVAVVRRSHLDLCIEGSPADIGLGEKLPCVRWEHKFGAGFHRTADEVVKLGDFTTISVKVTWKAVDKHPPPKG

SEQ ID NO: 140235 - protein, 135 aa, Oryza sativa
  Clone ID: PAT_MRT4530_41452C.1.pep
MEVDGGGDESSAATPDPGRGKKRPPSPSTPPTPSDDGEDSDDSWAVSDEEEEEEEEDEEDQEVSALATEFLLFLMIGNIYFWFKCSGSPPFHLRLGGPSPLSLFRAFNDPLTDKRTHWFGPYYRLDDESERKCLL

SEQ ID NO: 140236 - protein, 134 aa, Oryza sativa
  Clone ID: PAT_MRT4530_41453C.1.pep
MSADGKNRTLQEHSSAAAHRIARFGETNPQKAGGKPGETPRFQSECAVHLAAVPRHMAVCIPAGPASDVGGIGATGIPKSRPPETKCRPLVNRPENICCCYGGLPVKAIQAVYTVHGLMPVSGSNAVGRCFAHE

SEQ ID NO: 140237 - protein, 382 aa, Oryza sativa
  Clone ID: PAT_MRT4530_41454C.1.pep
MEVDGGGDESAAAAMADPGRGKKRPPSPSTPPTPSDDGEDSDDSCAVSDEEEEEDEDEGEEDQEGAAQCSGCTAHLRLMIFQGLVVIILRRLKRGIDFQIFAFKALCHSFFSVPSTILSLTNAGIGLVLITDSMTNLKPGRAKIFGFFAVRDDLEPLRNYVFRHAIDNYEAVSVKPKTGMACLPLTSPARGICITSRALFEFQLCIRTEDSPEAEDEPKGGTLIEGCTEFTNILRSTSFTETVRLYGEKCGLGVKFLLLVNAVQATVDVEIIHSPACGLNLKLYAKTSGFSDVIRLFQGAAQSGHRISSVVAVVRRSHLDLCIEGSPAGIGLGEKLPRVRWEHRFGAGFHGIEDEVVKLGDFSTISVKVTWKAVGKRPAPKG

SEQ ID NO: 140238 - protein, 38 aa, Oryza sativa
  Clone ID: PAT_MRT4530_41455C.1.pep
RQIQTWHLNKSMIHLLFSNTDCLYLHVSCRQFPGSLFI

SEQ ID NO: 140239 - protein, 117 aa, Oryza sativa
  Clone ID: PAT_MRT4530_41456C.1.pep
TDWSMGSALCPCTEPEHNVSTPLTSWKDYYRWRSLPMQSPVAVLLHWPLTLYHCVQLSHLQTLKYDGQDTLCIHYLGPEKELHQLAGFGELRALFPGVHIYIELVGPAVPKSKEGEP

SEQ ID NO: 140240 - protein, 51 aa, Oryza sativa
  Clone ID: PAT_MRT4530_41457C.1.pep
ARLTILPRCSVLRSDGIGPVRCRPRRPGRRQPVPVRLSSPCRGTSHRFNTD

SEQ ID NO: 140241 - protein, 586 aa, Oryza sativa
  Clone ID: PAT_MRT4530_41458C.1.pep
MEGVTQVSKEDKVELTKPFSLEEVKKVVFEMRQNRAPGPDGFPAEFYVKFWGIIKFELLDLINDFHNGFLEVERLNYGIVTLVPKTKDAEQIQKFRPICLLNVSFKIITKVLMNRLDRIMTYIISKNQTAFLKNRFIMEGIVILHELLNSLHTKKSSGILFKVDFEKAYDMVDWGFIYRILHSKGFPDQWCDWVMKVVRGGKVAIKVNDEVGPYFNTHKGLRQGDPLSPLLFNLAAEALTLLVQRAENNSLVEGLPINENNKVTILQYADDTIFMIKDDPEQARNLKFILCLFEQLSGLKINFNKSEVFCIGKAVERQSMYSEIFTCKIDQGGMGILDLEIMNIALLGKWLWNLENKDGWWQEILRDKYLSKKTLLGMKKKPGDSHFWQGLMEIKNSFYKFCSKKLGDGKQTLFWEDNWIGGRPLALQFPTLFNITTTKQIIVSKVMLGGWDAIKFRRTLHGDRLMEWNKIKQSCVGLTLQEGVRDKIWWKLTKDGSFTVKSFYLALKMQQKLEANRRRLELGARLVAIGVSFLLVSVWKSPYKRSTLIQIVTLFGHLYGKLSLAIGVGVFSLSSPVCFQFEKLRI

SEQ ID NO: 140242 - protein, 65 aa, Oryza sativa
  Clone ID: PAT_MRT4530_41459C.1.pep
CWDSYLDVCNPRGASSSSCCQRRSDAAGLGGEYPYLCPGILCFTTLSNWVSEPTTNSKVMGLPSQ

SEQ ID NO: 140243 - protein, 343 aa, Oryza sativa
  Clone ID: PAT_MRT4530_4145C.1.pep
MPLAEGEFALADEVLAVMPRDPYEQLDLARRITALAVAGRVTGLEREAARLRESAADKDRENGELRERVALLDRALQETNSRLRAALEDNVGGAPRLSCVNIKLSKERDSLAQTSKKLARDLQKLESFKRHLMQSLRDDSPSKMSGTNLSLIFSLNIADGDSITHTTTNLLSTSLDVGSTVQEGTVSKPPIQKYALSSHITPRLTPEATPKIMSTSASPRRMSTTATPKLMSGTTSPSKTRIEGYMSMTPWYPSSKQSSAANSPPRGRPNPGRTPRIDGKEFFRQARSRLSYEQFGAFLANIKELNAHKQSREDTLKKAEEIFGPDNKDLYLSFQGLLNRSLP

SEQ ID NO: 140244 - protein, 140 aa, Oryza sativa
  Clone ID: PAT_MRT4530_41460C.1.pep
CSFGPQLQGKTLTDAEVQSLLSLADQDPALCSKPACELSVGQAQRVALARTLANDPEVLLLDEPTSSLYPISTHNIEDAIVRLKNTRGLTTVMVSHSVKQIQRIADLVCLLVPGEVGEVLPPSELSEAKHPMARRFLELS

SEQ ID NO: 140245 - protein, 121 aa, Oryza sativa
  unsure (1)..(121): unsure at all Xaa locations
  Clone ID: PAT_MRT4530_41461C.1.pep
RXLSELERRRLANIARNNEYLQELGLSAXSAXQTXRPPTGXVIQXMRIQNXXVXDXIGXXRSSRIASLXATXNYXXEILSXTRPXHSGGXGPSLTHVXTDVVSDXTVGVFVGLNPGSKGDQ

SEQ ID NO: 140246 - protein, 46 aa, Oryza sativa
  Clone ID: PAT_MRT4530_41462C.1.pep
MGRLSVRRGPVWDQNLQPPRSNWRRRASHFFTAPRYTSTAGAPWPK

SEQ ID NO: 140247 - protein, 64 aa, Oryza sativa
  Clone ID: PAT_MRT4530_41463C.1.pep
TLQHNQPYVMNIRTEQSEHTDAYRLSKMLTHLHTMALNVQNERDHERLHRSYDMGDSICTEMVY

SEQ ID NO: 140248 - protein, 125 aa, Oryza sativa
  Clone ID: PAT_MRT4530_41464C.1.pep
YFYFFFFFVFLLVFYTLLLTTCYRGGMKHGNTPKGTGKEGHFVSHRSGRSSETRDQVLTVDLAFIYTREGAWATRAQKGKKPGKCLHKTDEAGEGVQPALTPGNDVTECFEHTGAWDPHVISMFL

SEQ ID NO: 140249 - protein, 436 aa, Oryza sativa
  Clone ID: PAT_MRT4530_41465C.1.pep
MRHQQQDRRHQIEYEFFGPYGPAVLLLALPCVVLGLVYACNSEGCLQLSQLFQLPLSQWSLALLPGFPSNQPLYSHEAMAAVVAWFVLVLLLHVLLPGAEAQGVLLPTGRRLAYKLNAFKVFAVTYGTAALLSFGLGVLDLTWLASHFLPLTSAAIIFSSLLAVAVYAASFAPGRLLAHGGTSGVVPYDFWMGRELNPRLWGVDIKEFCELYPGMIGWGLLNLSFAYQQWVTLGRLTNSMLLVNAFELWYIVDGLVNERSILTTMDITTDGFGFMLAFGDLAWVPFTFCTQARYLADHPQQELSGLGLVGVIGVQLLGYRLFRGANGQKDAFRRDPGHPSVAHLQSMPTVRGTRLLISGYWGMARHINYLGDWLMGLAWCLPCGFGSVVPYFYSAYFASLLVHRERRDEAACRLKYGADWDKYCSLVPWRIVPYVY

SEQ ID NO: 140250 - protein, 73 aa, Oryza sativa
  Clone ID: PAT_MRT4530_41466C.1.pep
DVCNGNYVPIAARHPTTKHKRNNFFQKIRVQQVYHPYQKHLKTKCCYKVMVHKQRSLLYHSLLQTNFKAHLGG

SEQ ID NO: 140251 - protein, 56 aa, Oryza sativa
  Clone ID: PAT_MRT4530_41467C.1.pep
MRKDVAGLGGGQLFASVKRQATTTRKADAGRPVTDKSSVTGSKIMPDRDRLISIGL

SEQ ID NO: 140252 - protein, 704 aa, Oryza sativa
  Clone ID: PAT_MRT4530_41468C.1.pep
MAAAALAGVLLLALAAVAGADTDGGDAAALGNLYSSWNSPAQLTGWSAGGGDPCGAAWMGVSCVGSAVTSISEFGRLDPAIQANNGALLVFSVFFSCRKKGFFQAFWYGAEWHSWLPTIQSASIEDNLRCRNLAGNNFSGNLPYSISNMVSLNYLNLSHNLLFQEIGEMFGNLTALSELDVSFNNLNGNLPISLRSLSNISGIYLQNNQLSGTVNVLSNLSLTTLLGGNSFLNVPSSPPSTITSPPQGQPDFPQGPTTAPNIPEIPIDQGSDKKQRLRTGLVIGIVIGSMAAACGVLFALVLCLHNVRKSKDGGISESKDVASTFAVNIDRASNREIWDHTQQDAPVSSSVLPPMGKMTPERVYSTNSSMSKKMKVSVTANPYTVASLQVATNSFCQDSLLGEGSLGRVYKADFPNGKVLAVKKIDSASLSLYEEDNFLEVVSSISRLRHPNIVPLAGYCVEHGQRLLVYEHIGNGTLHDILHFFDDTSKILTWNHRMRIALGTARALEYLHEVCLPPVVHRNLKSANILLDKEYSPHLSDCGLAALTPNPEREVSTEVFGSFGYSAPEFAMSGIYTVKSDVYSFGVVMLELLTARKPLDSSRERSEQSLVTWATPQLHDIDALAKMVDPAMDGMYPAKSLSRFADIIALCVQPEPEFRPPMSEVVQQLVRLVQRASMVRRQSGEDVGLSYRGPDREGGTADAI

SEQ ID NO: 140253 - protein, 90 aa, Oryza sativa
  unsure (1)..(90): unsure at all Xaa locations
  Clone ID: PAT_MRT4530_41469C.1.pep
TPDPPVYFDGRYWTHVEDCPQFGCTDXPTPVLKELEEAQKAXYPDAILSRIIGFDNVRXQVPALSSVLSAYQPPGCEEFGGQLNRLSVYI

SEQ ID NO: 140254 - protein, 72 aa, Oryza sativa
  Clone ID: PAT_MRT4530_4146C.1.pep
MDKVIATIDISEANEGYTSCGSVIEMSRQMKATRVGARLAWDELGPKSGCQFGLNHRRPWVKAVREALEKKS

SEQ ID NO: 140255 - protein, 24 aa, Oryza sativa
  Clone ID: PAT_MRT4530_41470C.1.pep
PCNYVGFYVTMVGSLRISKNRIAI

SEQ ID NO: 140256 - protein, 778 aa, Oryza sativa
  Clone ID: PAT_MRT4530_41471C.1.pep
MKLLAAVALHQAEPDNLLFSPGYACKMFGRMPHRGASSSWAGCTVHRLLDGAPDRNRARRVAGEYVFRSLSALHQAESDILLFLPRLNIAIPSPPSESILIELLTINVNLVPSRRLAERHINLQRFVVAFGLVSPRAANARNGKSFRQSSSQAVGRSVSNQMRPLRDPAKLAAAASSQRHLREIHAHLLVSGRIASPSHLAAFLASLASSSSDDDDDGDLSYARLLLPRRPATLLAHNSLLRALARGRRPHLAFGAFRDLPLAPDNYSFTFLVRAATALAAAAASALDAALIAGSVHASALRHGHAGDPHVQSGAVSMYAAAGDVGAARAAFAEIASPDVVCVTAMVGALATGGEADAARELFDGMPQRDHVAWNAMIAGYVHTGRSREALRLFDEMRHAGAAVGEVTLVSALTACAQLGALERGKWVHSCAHSRGMRLSVTLGTALIDMYSKCGAVAAAMEVFDSMGERNVYTWTSAVSGLAMNGMGRDCLALFKRMESTGVEPNGVTFVVVLRGCSMAGLVDEGRACFDSMKSNHGIDPWLEHYGCMVDLYGRAGRLDDAVNFINGMPLEPHEGVWGALLNASRIHKNVELGKYAMDKLMAIESKNDAAHVLLSNIYADSQNWKGVSNVRNMMKAKGVKKVPGCSAIEVGGKVHEFFVGGKTHPRHKEIEMMLAEMNQRLRLQGYIANTKEVLFDIEEEDKEDAISLHSEKLAIAFGLVALPEDMEIRIVKNLRVCEDCHDYTKMISKVFNREIVMRDRNRFHHFKDGACSCKDYW

SEQ ID NO: 140257 - protein, 650 aa, Oryza sativa
  Clone ID: PAT_MRT4530_41472C.1.pep
MTKPCRRWSNHPLAAGQTAEASPVRPPEYLRSDRRYPNDDWDDTIATHIAFGSLGGTGYTRGRAGTLSGKLMKEISLSCLENADRLFRVQSNNNIQLSANTGGEADERGMHEVKPTEARTMGKFSIEAFMQLGVSDEINWLKGTVSSIKKTLADADYSALKDDTVRSWSRKLKDVMYEAADILDVCDEMEGEEHGGRSRNSPVALCLPIQGHKIRRQVKALRQKADAILEEGKIFDLTHVRSDEDHNVDATTACHVPIPRTNVVGRVQETRMLVDKLTGKGISGPGMTGQNVEVIAIVGMGGIGKTTLAREIFTNDMIQGKFDKRLLYKDLGVSMKVFVIAQYWSTSFPVKVKHQPKNQVLTLGEHQAKQEGFAKGLDAFTIGPKHYDRHNPSSNFDHSHLNSSYNASYDSSKHKSRSVNGTKGRDGSYATRHDEVAGHASPNARAASSIRSSPANLVNLFSKTHSIFDTRGNHSSDSSFDSSNATKFDCSIDPSFVSCGAADCDRASDSSFDSRGSNTSSFGGGRFGSPGTIPSFPSTIESTPHDSKCNPFGPRQWGIEPGRYGMAADEPAPHYQQGMALRAEGDKDITEASVINAASAGLRPSKLTRKITRKEPQIVKHLFHIIDGYARGEEDTKRRTLHLHMHCSLA

SEQ ID NO: 140258 - protein, 523 aa, Oryza sativa
  Clone ID: PAT_MRT4530_41473C.1.pep
MALLLPDDAVADVLRRLPPRGLAAARCVCKPWRDLVDVRALLRPRLLPRSAHGVLINYIDHGRPHLFSRPSSSSPSSAAAIGGEIIDGNLTFLPNDGDRDWWCVLDHCDGLLLCGIEWGSQLCACNPATRRWATLPAARQGPSRYAAAYLAFDPAASPDYEVLLIPNLPEKPSPPVPNQPRRRRRRRQDELAGPFCLHMLFSPLDAADESDLDGDVDVAVDVDVDVDDDEVATPAASSVDDDQYKLMEWPPSPYLLEVFSSRSGRWEERAFVREGEKVTTVEDMMPLGYPYRGPRRGYSVYHHGSLYAHCRGAFVTRYSLANGKYQVIETPINMANYKWEKPYLGKSEMGVLFGMIHGGQLSVWILQESAGQMGWILTYQHDLRPFAKEVSSLRYNGNLTTGSWTVEENSTGMHGNRDTLSAEDFEWDSDNDDFLAVEVRNEEYDDDCEHFDILGFHPYKEVVFLDQSFKTIAFHFNSSKIQYLGYSRPKCYYRNYTNGIYESFVYTPCMIGELHGVIGQSSS

SEQ ID NO: 140259 - protein, 123 aa, Oryza sativa
  Clone ID: PAT_MRT4530_41474C.1.pep
WTARWTRWKRSTTPSWTPWPPSSPSPSAPRGPSRTSRTASTPSMPPAIVPTTSSAPPPIGSPSTPPATPTFLLLLPLLLLRLGQAPPGSTRCCAPWRALPTTIILLSRPRPRPQPVTNTTTYL

SEQ ID NO: 140260 - protein, 108 aa, Oryza sativa
  Clone ID: PAT_MRT4530_41475C.1.pep
MVTVATTILVVSGISGEVVHGRDDDEAVTQIWANGDDVDSAKWVVQDLLLAPARAGAAAYGDLAIGLPLRGDQVPCLRMVIGDLAILKLPPSATTSPFWPLCSRTEKK

SEQ ID NO: 140261 - protein, 62 aa, Oryza sativa
  Clone ID: PAT_MRT4530_41476C.1.pep
KTPVNAKSRGKSPKPGGGAFSCQSCTQTFTSEMGFHSPPKANPPPQVKNEPPDADLKKIGVV

SEQ ID NO: 140262 - protein, 127 aa, Oryza sativa
  unsure (1)..(127): unsure at all Xaa locations
  Clone ID: PAT_MRT4530_41477C.1.pep
IPTTGNRSSDTEAVDLDSLVHTKKKIPAMVMWYLPXKDRMKSMLXNPNDAELMRWHQLNRKIDGMIRHPTDAHQWKTFDSLHPEFAKDPKNVRFAFSTDGMNPFGDLNSSYNTXASLYTMYNLPTWI

SEQ ID NO: 140263 - protein, 124 aa, Oryza sativa
  unsure (1)..(124): unsure at all Xaa locations
  Clone ID: PAT_MRT4530_41478C.1.pep
HASACFLLRFSTGGLATGTFGLTGVSVWEALVLEIVMTFGLVYTVYGTXVDPKKGSLGTIXPIXIGFIXGANXLVGGAFDXXSMNPXVXFGPGLVXXSWXVQXGVIXFXXXXGGXPCXGNLRSF

SEQ ID NO: 140264 - protein, 76 aa, Oryza sativa
  Clone ID: PAT_MRT4530_41479C.1.pep
AVLPFLSTQAWVRSLSDHIVDDWRAWHLDGQSAGFTMTYGNNVTFATVKGGGHTAPEYQPERCFAMFSRWISNRPL

SEQ ID NO: 140265 - protein, 119 aa, Oryza sativa
  Clone ID: PAT_MRT4530_4147C.1.pep
MRPPRQHLATGQPSSKSSISGPSPQPDFLHYCRLKTPIHIAIASRPLPPAAINSPEHGQLVLPCARAAVALPTTNFGLPKLGQHRHAHRQRRHHRTIVVIADHHSDWHKAHAGVDRDLG

SEQ ID NO: 140266 - protein, 635 aa, Oryza sativa
  Clone ID: PAT_MRT4530_41480C.1.pep
MARPTARDFGPAQAWHGLVAVGPVLGPMARHGGLARHGTDRDPLVFSWIREPIVFNGNSGAPAAQEDRVEVYGNTSDSPIRVNIDDDNPPVGGSGNGTPTGSSATATNKKTKTSMVWDDFEEFYETTNDGSVIPWEYSPEVARVELCRLISREDLPICFGQSPTFVNYIKAAHNPRFVYVSRQTTTIDFHKLFNDRRSIIVERLKSASSIALTSDIWSGHAKEDYLSVVAHFVNFDWQLEKRVLGLRRIDVSHTSANIAEHVIAVAEDYVKAGLDKFKPMLSDIRAAISFLNASNQRIATYKNVCIVAGYHPRMFDWDMDFYNSTVVLSGVYYPTSPLIMHHILEVAGHLNTYGNVENLANAGGPMKDKFMNYWSKIPILYSFAFILDPRAKIRGFSKVLQIMAQLIGDDYSAYLTTVRAALSDTFAKYESKFGSVRLHSSSIPGPSTGKKRTTWGKIFGSVAAGASPGVGLGAGASLGPGLGAGASPGTGLGAGSLSRMTSTTALLQTASSTTNLNASELSAYLDSDTVNQYDDDFNILSWWQQHKQTYPVLSILAKDVMTVLVSTISSESTFSLTSRIIEDRRRRLNPRLVEILVVLKDWELADAKGQHTTENVELQNAYENMYLDDEIDVNP

SEQ ID NO: 140267 - protein, 425 aa, Oryza sativa
  Clone ID: PAT_MRT4530_41481C.1.pep
MVRSYCFCLLLLSTIVAVTVAVAAEELPPAPTTFKTLNGKLDLAPLNRNAPLVIAKGGFSGVFPDSSEYAFAFASSLHISLWCDVQLTKDGVGICLRDLLMQNCTDITEIYPEGMKAYLINGAQKTGWLPVDYNMASLRNVTCIMVPKNYIWPVTSDNYIQLHTQIVQEAHNAGLEIYASDFSNDGIFPYNYSYDPLGEYLSFVSDGGFSVDGVLTDFPLTASEAIDCFSNLNTSRKTDHGNPLIISHNGGSGDYPGCTDLAYENAVRDGADVIDCSIQMTKDGIPICMSSIDLLATTDVQQSKFCSLLSVIPEIQSKKGIFTFNLTWDDINILRPKISSPLSDYVMLRNPRYTNHGKFLKLSEFLTYAKDKELSGIMITIENAAFMAASLGFDVVDLVTTALSHAGYNNTTTTTGGEVLFSPGS

SEQ ID NO: 140268 - protein, 620 aa, Oryza sativa
  Clone ID: PAT_MRT4530_41482C.1.pep
MARPTARDFGPAQAWHGLVAVGPVLGPMARHGGLARHGTERDPLVFSWIREPIVFNGNSGAPAAQEDRVEVYGNTSDSPIRVNIDDDNPPVGGSGNGTPTGSSATATNKKTKTSMVWDDFEEFYETTNGNRAAHNPRFVYVSRQTTTIDFHKLFNDRRSIIVERLKSASSIALTSDIWSGHAKEDYLSVVAHFVNFDWQLEKRVLGLRRIDVSHTSANIAEHVIAVAEDYDNASANSKAMETLTPALSGYVADLFLHQRCACHIINLIVKAGLDKFKPMLSDIRAAISFLNASNQRIATYKNVCIVAGYHPRMFDWDMDVRWNSTYIMLKHLIPHREPFTVFISTQHPFVNGHPLLTNLHWACAESVLCFLEQFYNSTVVLSGVYYPTSPLIMHHILEVAGHLNTYGNVENIANAGGPMKDKFMNYWSKIPILYSFAFILDPRAKIRGFSKVLQIMAQLIGDDYSAYLTTVRAALSDTFAKYESKFGSVRLHSSSIPGPSTGKKRTTWGKIFGSVAAGASPGVGLGAGASLGPGLGAGASPAKDVMTVLVSTISSESTFSLTSRIIEDRRRRLNPRLVEILVVLKDWELADAKGQHTTENVELQNAYENMYLDDEIDVNP

SEQ ID NO: 140269 - protein, 381 aa, Oryza sativa
  Clone ID: PAT_MRT4530_41483C.1.pep
MEGHKPVHQFVDSPKPQRSARRICGMASRIDANDHGNQQGGNPQGPVGTAERLEHLLNQPANKICADCGAPDPKWVSLTFGVFICIKCSGAHRSLGVHISKVVSVKLDEWTDEQVDILADSGGNAAVNMIYEAFIPENYMKPRQDCSSEGRNDFVRRKYELQQFLSNTQLTCYSQKSGKNHNRVQHSSSNRHGLGHAFRNSWRRKEHESKSVKKTVEIGMVEFVGLIKVNVIRGTNLAVRDMMSSDPYVILNLGHQSMKTKVIKSSLNPVWNERILLSIPDPIPMLKLQVYDKDTFTTDDRMGEAEINIQPLVAAAKAYETSVVADTAQLNRWLAKEGIWIQKDSAISIIDGKVKQEVTVRLQNVERGHLEMELECVPLTQ

SEQ ID NO: 140270 - protein, 171 aa, Oryza sativa
  unsure (1)..(171): unsure at all Xaa locations
  Clone ID: PAT_MRT4530_41484C.1.pep
KKPGVKKNPPNFPPIKNKGGPNPPKPKKALGPKKSPQGPPPGGPPXPPKGLGNGAGNPPPPPEKKNPLGKPPPLEKGNVGPPLPKKEKKEWFFPGPLXGPRGPPRGEPAQGREPRQPPEKKTGGKTAPPXGPGKEKNLLKPVEGPPQGNGENPALNREPRPGKKGNPPPPP

SEQ ID NO: 140271 - protein, 67 aa, Oryza sativa
  Clone ID: PAT_MRT4530_41485C.1.pep
IPPRCYSTSPLLSSLRVSTSSSLLLHLPLLGGMTGPTILVMPLSPPMSSPLAQPPARPTRYDFLNSK

SEQ ID NO: 140272 - protein, 82 aa, Oryza sativa
  Clone ID: PAT_MRT4530_41486C.1.pep
PFFHRSIAFSGVSAFSKFVATLIRPIKDGYPPKFMLRDRSVPARFASGVLATNKSAFHLMEGTKYAWPSRSSKSAAISSHDE

SEQ ID NO: 140273 - protein, 50 aa, Oryza sativa
  Clone ID: PAT_MRT4530_41487C.1.pep
EEKLIFVIVDMWSEQLLVYLCLDMYRGCSRLTSPTHIICGKTLGHWVNLW

SEQ ID NO: 140274 - protein, 84 aa, Oryza sativa
  Clone ID: PAT_MRT4530_41488C.1.pep
VRTEVRKLGRISFVAAGRRSSLPTVDPSRRRRLLVAGRRRSSFVVVFPTFRRRAFSLRKVPKRLRKPKANHTDPKQPFEHVEPV

SEQ ID NO: 140275 - protein, 345 aa, Oryza sativa
  Clone ID: PAT_MRT4530_41489C.1.pep
MELAVRAAAAASCSSGASLQLPRARAPLRLLGHRRLPARRVAVEAAAIAVEPENKVPQSNNSEAEVFACPVCYEPLIRKGPSGINLPSIYRSGFKCSKCNKSFTSKDIFLDLTVTSGTKEYSELKPARTELFRSPLVSFLYERGWRQNFNRSGFPGLDEEFQMAQDYFQSVAGGVLLDVSCGSGLFTRKFAKSGSYSAVIALDFSENMLCQCYEFIQQDDTLVNTNLALVRADISRLPFASSSIDAIHAGAAIHCWPSPSNAVAEISRVLRPGGVFVATTFLSSPRNNPFSVEALRPLRQIVGPVNTSYNYFTEGELEDLCKSCGLVNYSSKVQRSFIMFSGQKP

SEQ ID NO: 140276 - protein, 228 aa, Oryza sativa
  unsure (1)..(228): unsure at all Xaa locations
  Clone ID: PAT_MRT4530_4148C.1.pep
MLVKVVVQRGDXADEEEGEAGAEMTAFRRNSGDAVAWPGERTALRCRERWWRRRPVHRGRGRGGRRRRSGGDATGRRRGRVSGDFPAKRRRSRERGGGCDAGRGGGAAGGCTGEAGGAAGGGRQGGMRRATAGVRLRRSPRETEGRPGWRRWRRRWRRRRRGRPAHGRGGTGGXEGAKAIERSEWVAFYSXGKRAEHGRGRNGDGNGGRRQRKAAGLGAAVPGDWGHH

SEQ ID NO: 140277 - protein, 48 aa, Oryza sativa
  Clone ID: PAT_MRT4530_41490C.1.pep
KNWINSHHHLRLLPLTILRLNHFVRLACNDSCRVMWRISVLAPRAPRL

SEQ ID NO: 140278 - protein, 115 aa, Oryza sativa
  Clone ID: PAT_MRT4530_41491C.1.pep
MRDLEEFRGGSAPPRDGDERTVASSSSTPWWSGDPEAKRRRRVAAYKAYAVEARVKASLRRGFRWIKDRFVRRWTKLTVAPGLGPLYVMRLQKLGWFACRMNKPQTTQSIIKIIN

SEQ ID NO: 140279 - protein, 38 aa, Oryza sativa
  Clone ID: PAT_MRT4530_41492C.1.pep
CCSSLHSTTLTAQPNVPCGSRRCLISVSHNLSGQHVDR

SEQ ID NO: 140280 - protein, 117 aa, Oryza sativa
  unsure (1)..(117): unsure at all Xaa locations
  Clone ID: PAT_MRT4530_41493C.1.pep
LKDKESGEHVGSKVSMPNNGVPSNLIRSIIGQTYDYLPQDYVLTNQDVTAQDIILVSSENETLVNMGGFSVKKHHLSCLLTKDEWVNDDVISAYIHXIKEAQSKTDKKVYYENPFII

SEQ ID NO: 140281 - protein, 124 aa, Oryza sativa
  Clone ID: PAT_MRT4530_41494C.1.pep
MAQDLEVIKEILSCFGVVPRLLTNLDKCSITPIRSWKRITISWWSAYSLEQVGHKLLSKIGLAFLSPCHSLTKTICFKFCASEEENSYSADTCEMLHSHDLHFTEIACYGEIFESYIQVTLTNI

SEQ ID NO: 140282 - protein, 56 aa, Oryza sativa
  Clone ID: PAT_MRT4530_41495C.1.pep
QSGAAPHRGYQRRRCKQPHAVTSTATAARHGERDPHLLGDGSVVGVPGPGDAAASA

SEQ ID NO: 140283 - protein, 49 aa, Oryza sativa
  Clone ID: PAT_MRT4530_41496C.1.pep
MAIHQHLDTGGSMSCRISHTKDTSGAETVWLSSYSRSGEVRVEVVPNRS

SEQ ID NO: 140284 - protein, 245 aa, Oryza sativa
  Clone ID: PAT_MRT4530_41497C.1.pep
GRNSRVDPRVREIYTEKGMAQFHRKPAENDLPITWYKRYFDEPDGDDPIVVDMSSMSKGMIYVNGEGIGRYWTSFITLAGHPSQSVYHIPRAFLKPKGNLLIIFEEELGKPGGILIQTVRRDDICVFISEHNPAQIKTWESDGGQIKLIAEDTSTRGTLNCPPKRTIQEVVFASFGNPEGACGNFTAGTCHTPDAKAIVEKECLGKESCVLPVVNTVYGADINCPATTATLAVQVRCKVSGAQAA

SEQ ID NO: 140285 - protein, 71 aa, Oryza sativa
  unsure (1)..(71): unsure at all Xaa locations
  Clone ID: PAT_MRT4530_41498C.1.pep
GLAAAASLGTAAWAVTALAFGVACREIHDASAVGPAGSXRGWWMLSLDGLTVTLAFTHLLYLLFLHAFIAS

SEQ ID NO: 140286 - protein, 2841 aa, Oryza sativa
  Clone ID: PAT_MRT4530_41499C.1.pep
MAEEPRESLDSSPEPPPPGQDSDEQFSAVPLADEVRAEGSELDPDTSAGTSVAVTPARSEPSPPPPRRRRPRPLGVPPDAPQEVVRAVDDAIMVGGGAAAAAGVNRLHEMVSEEQGELPHTVVDVLLGTMGGADGLDEVEDKTGTGAPPSIMFNSRAAVVAAELLPYLPCGDEPSPRTRMAVGIHATLRACTRNRAMCSSSGLLPVLLDSAEKLLIGMGRASSWDGTPLLHCIQLLGGHSLSVKDLHSWLGLVKKALGTSWATPLMLALEKAMGSEEARGPAATFEFDGESSGLLGPGDSRWPFSNGYGFATWIYIESFSDTLSTATAAAAIAAAAAATSGKSSAMSAAAAASALAGEGTTHMPRLFSFLSSDNQGVEAYFHGQFLVVESGGGRGKKASLHFTYAFKPQRWYFVGLEHTNKHGLLGKGDSELRLYVDGSLHESRPFEFPRISKPLAFCCIGTNPPPTIAGLQRRRRQCPLFAEMGPIYIFREPIGPERMGRLASRGGDVLPSFGNGAGLPWRATNDHVKNMAEESFTLNQQIGGCLHLLYHPSLLNGRLCPDASPSGSAGTHRRPAEVLGLVHVSSRVRPAESLWALAYGGPMALLPLTISNVQMDSLEPMLGELSIATASLSAPIFRIISLAIQHPGNNEELCRTCSPEILSRVLHYQLQAFPKMEGGEGEAVTDEELVDAIVSLCQSQRNNHELKVQLFSTLLLDLKMWSSCTYGLQKKLLSSLADMIFTEAACMRDANALQMLLDSCRRCYWAIREPNSIDNFALTGTKRSLGEINALIDELLVVVELLLGSASSTAASDDVRCLIGFVVDCPQPNQVARVLHLIYRLIVQPNISRANMFAQSFISCGGVDALLVLLQREAKAGNNSILDNSDALLSENDFLRNDDSDTKAASGEAKSQDDQIQSVELEQHESILHEEHTELGSTSTNDVPCEILGSSIGRKLSSSENQLLKNLGGINFSITADNVRNNVYNVDKGDGIVVGIIHILGALVASGHLKFASRAANPNLPGGLLTTVHEEGNTMSEDRVSLLLFALQKAFQAAPRRLMTVNVYMALISAAINVSSVDENLNLYDCGHRFEHIQLLLVLLRSLPYASRSFQSRAIQDLLFLACSHPENRTTMTSISEWPEWILEVLIYNHEDVEATIHCAEWLSMVGGSSTGDQRIRREESLPILKRRLLGGLLDFSARELQVQTEVIAAAAAGVAAEGLSPEEAKTQAENAAHLSVALAENAIVILMLVEDHLRSQGQHFCTSRSLDSAVPSASMVSSAASRSNSLCRSGNEPMDAGTSRRSSLSTDAGGLPLDVLTSMADSNGQISAAVMERLTSAAAAEPYESVKHAFVSYGSCIADLAESWKYRSRLWYGVGIPSKSDTFGGGGSGWEFWKSVLEKDSNGTWVDLPLVKKSVAVLQALLLDDSGLGGGLGIGGGSGPGMGVMTALYQLLDSDQPFLCMLRMTLVSMREDDNGEGDAFTGNISIKDVISEGLGHQAGSMMPLDSNNRSSTRKPRSALLWSVLGPILNMPINESKRQRVLVASSILYSEVWHAIGRDRSPLRKQYIELILPPFIAILRRWRPLLAGIHELTSSDGQNPLIADDRALAADALPIEAALSMISPGWAAAFASPPVALALAMMAAGASGTEAIAPPRTLNRRDTSVPERKAAPKLQSFTSFQKPIETAPNKHGSTPKDKAAVKAAALAATRDLERTAKIGSGRGLSAVAMATSGQRRSAGDIERAKRWNTSEAMSAAWMECLQSVDSKSVSGRDFSALSYKYVAILVSGFALARNLQRVEMERQTQADVLNRHRVSTGVRAWRHLLHCLTEMDRLYGPFGEPLCAPDRIFWKLDFTESSSRMRRFMKRNHKGSDHLGAAADYEERKLSNVAQSNECNPEGTEPLVTDTLPSTAPIITAEAMSVDDRNEDNEQLESDTTQSSVDDRLQQADQQSVKGSIDSRGSGISADRNLVRSTVIAPGYVPSDADERIIVELPSSMVRPLKVVRGTFQVTSKRINFIIDESASESNMDDHASTSGQCDQQDKDRSWLISSLHQIYSRRYLLRRSALELFMDMEARKNAYRAIVHSKPPNLNDIFLATQRAEQILKRTQLTERWANWEISNFEYLMELNTLAGRSYNDITQYPVFPWIIADYRSEILNLDDPCTYRDLSKPIGALNPERLEKFQERYSTFEDPIIPKFHYGSHYSSAGTVLYYLFRVEPYTTLSIQLQGGKFDHADRMFSDLSGTWDSVLEDMSDVKELVPEMFYLPEVFTNINSIDFGTTQLGGKLDSVNLPPWAEDPVDFVHKHRKALESEHVSAHLHEWIDLIFGFKQRGKEAVMANNVFFYITYEGTVDIDKITDPVQRQAMQDQIAYFGQTPSQLLTIPHMRRKPLAEVLHLQTIFRNPSELKSYLLPNPDRCNVPASTMFVSNDSIVVVDVNVPAAHVALHHWQPNTPDGQGTPFLFHHGRNAANSTGGALMRIFKGSASSGEDYDFPRAIAFAASGIRSSAVVAVTCDKEIITGGHADGSVKLISPDGAKTIETATGHLAPVTCLALSHDSNYLVTGSRDTVVILWRIHQAGSLHKKNAPEPPPTTPTTPRSPSVSNLTEIRRRRIEGPMHVLRGHLEEVTSCSVSPDLGLVVSSSNMSGVLLHSLRTGRLIRKLNVAEAHAVCLSSQGVILVWNESKKRLSTFTVNGLPIATTVLSPFCGRVSCIEISTDGHFALMGTCSSSNYKCEDSTETGDHEPNEPNGKDGISKQAETRQSVHVPSVCFVDLHKLKVFHTMELGKGQDVTAIALNKENTNLLLSTADKQLIVFTDPALSLKVVDQMLRLGWEGDGLLQS

SEQ ID NO: 140287 - protein, 134 aa, Oryza sativa
  unsure (1)..(134): unsure at all Xaa locations
  Clone ID: PAT_MRT4530_4149C.1.pep
NQNSQQITQNSFILQLKNDSKXXXXRXXRXXRXXXVXXXPHDXXXXXRRXXXGXPTXTXXVTLVDASRKSSPRAXEQPXSTSALRXXAPDVAVAIRXTRPSXRRRRRRRRPPHAGPAPVVASRGSREPGRKGGG

SEQ ID NO: 140288 - protein, 379 aa, Oryza sativa
  Clone ID: PAT_MRT4530_414C.1.pep
MATPRSPSPRGDARLDSAPLLGGGGGGGGRRHGGALRRPSLRGAARFLRRSGRRAMREPSLLVREAAADQLEERQADWAYSRPVVALDLLWNLAFILVAAAVLALSREESPSMPLRLWIVGYAVQCVLHMACVAIEYRMRRGQSGESPMAADEETGTDGSSSSSDEDAGERAPRGRNGDYVRIAKHLESANTMFSFIWWIIGFYWVSAGGQVLTHDAPQLYWLCIVFLAFDVFFVVFCVALACIIGIAVCCCLPCIIAILYAVSDQEGASEDDIRQIPRYKFRRMDEPEKQSVNMTGSSGGIMIECGTNQPIEKVLAAEDAECCICLSAYDDGAELRELPCGHHFHCVCIDKWLHINATCPLCKFNVRKNSSSSGSEEV

SEQ ID NO: 140289 - protein, 130 aa, Oryza sativa
  Clone ID: PAT_MRT4530_41500C.1.pep
MCSKCHKEMIMKEEQPKLAASSIDSIVNGCDGGKEHIVAASGSTAVAVAQVEAKTLVVQPTDVAGTSEEVAVVPKEEGWLTGFNCRCGNMYCALHRYSDKHECQFDYRTAARDAIAKANPVVKAEKLDKI

SEQ ID NO: 140290 - protein, 40 aa, Oryza sativa
  Clone ID: PAT_MRT4530_41501C.1.pep
KGISSQVVSNFEHCFDVSSPGHYDHPTYALRATTSFDQHY

SEQ ID NO: 140291 - protein, 338 aa, Oryza sativa
  Clone ID: PAT_MRT4530_41502C.1.pep
MARVRGNFSRAFWFAPGFGVGGVSSNEPPAMGMEVDLRGGDGSLPWHRRGWGRIDASLLADNPNSKLTPPRNITTLAFRLEVDGAYVGPDDAAPLKGGGVGTMEVQVRLAAVAVFDRGGWRTRRRLGAAFPTHAGVVPFPVPVPSLAGVVPVHSHAIEPCCITVAMEHKEAGCQQPEGPILCINNCGFFGSAATMNMCSKCHKEMIMKEEQAKLAASSIDSIVNGCDGGKEHIVAASGSTAVAVAQVEAKTLVVQPTDVAGTSEEVAVVPKVKEGPNRCATCRKRVGLTGFNCRCGNMYCALHRYSDKHECQFDYRTAARDAIAKANPVVKAEKLDKI

SEQ ID NO: 140292 - protein, 173 aa, Oryza sativa
  Clone ID: PAT_MRT4530_41503C.1.pep
MEHKEAGCQQPEGPILCINNCGFFGSAATMNMCSKCHKEMIMKEEQAKLAASSIDSIVNGCDGGKEHIVAASGSTAVAVAQVEAKTLVVQPTDVAGTSEEVAVVPKVKEGPNRCATCRKRVGLTGFNCRCGNMYCALHRYSDKHECQFDYRTAARDAIAKANPVVKAEKLDKI

SEQ ID NO: 140293 - protein, 560 aa, Oryza sativa
  Clone ID: PAT_MRT4530_41504C.1.pep
MDTFFSAVLGDLLSRSISFMVDSYYQKHQGVEENLQCLHRLLLRIQAIVEEADSRHITNQAMLLQLRMLSNMMYRGYYFLDNFRCRIVQAHAQDEVRDHSLALSSFNPLKQFCFSTTTRKMVSEVSERKELHKMLGHLESIVSDMQEFVVFVSSYPRMSRQPYCSYLLLENCMFGRQEEQERVINFLLARHPPGGEEVIDVLPIIGPGRVGKSTLVEHVCHDERVRKYFSTIVFYGLGSIENNGDMAFLPDTGAVKYRNPVSGKQSLAIIELVDEMDDETWKKILHSLRGDHIAPVSKIIIMSRSNKIELFGTTKALQLDFLPKEVFWYFFKTIAFGSTSPVEEPKLASICMDIAALVNRSFIGLNVHGSILRSNICAQFWYSYLKRLKYYTDKHVRLFGEHPRDTNKNNGGLTYVWMHKNKHGCSGLATYKLYQASSISQNNLPTIRSIDMVSRNVKPRAKYEVLEWQSSIPPYYSYIAQYEILAQPKLMLPPKRKRSGALSEENAVSSSVIRSFNHMVLFSFLKEQQECLLFGEHLSSGEGLRLSPQHWAPGAHHGCA

SEQ ID NO: 140294 - protein, 364 aa, Oryza sativa
  Clone ID: PAT_MRT4530_41505C.1.pep
MSLPALAAGRAASVRPPRASAASGEAAAAAAADQPAGRRPVKVILPKKKPQKWSTGMAPGEYGGGPATPKPRKYWMGKEDRDPVGNTDDFIWNKDFLPHMERVIANGGADTPPTITRLTPVDEDSESGFLSINRAMSLDSVDVDLSKELQAPTRPILKTQVEAAWRGRAIGAEAVNGVASPRWRLVPTRREQAKWDRAAKAATGGSDVILRESKSRGQQGDPEVLAAKSREQYLELKQRLQLFTLGIGGIGLVSAYFSYSPEIAASFGAGLIGSVLYLRMLGTSVDSLAGGTGETVKSAAAQPRLLIPVALVMMYNRWNEILVPDYGFMHLELIPMLVGFFTYKIATFAQAIQESIPAVGNRES

SEQ ID NO: 140295 - protein, 299 aa, Oryza sativa
  unsure (1)..(299): unsure at all Xaa locations
  Clone ID: PAT_MRT4530_41506C.1.pep
PGSPRPARCRRSTSATASALAAAEPSTSSSSPPPPSRRRCPSPRSPPPXPPPSQSXLPPFRPXSSSPCPPVAXPPRCARHPPPPPLLPPPPMASPPPPSFQPREGSERGQREPPPLSPDXPPQPPPPLDPPMAAARPPPPLDLPQEGGERGRREPPAALADPPSSXPTPAPAPAPAXDIPREGGDKGLREPPPPPVTTRGPQIPSPSSQSTPSPRFTTXSPPLRCTILPLSIAPPTPCPLPPPTVTSLPSCYPAAGTVDPRSVARLHSAVATSTSGKTSSPPPPSALTPCGPPPDPGGP

SEQ ID NO: 140296 - protein, 493 aa, Oryza sativa
  Clone ID: PAT_MRT4530_41507C.1.pep
MASVRTERLASCLAAVATKPADFRRAHAILLTSGHLSSRYSVNCLIRAASAPSASALLLRFLLNHRLLPDHLSLSFSLHPCSRLPSHPVASVVHSLAVRLGHARDVYVVNAAASAYFAAADVASAERLFSEASRDVADVVTWTTMVTGHANAGDVERARWFFDAMPEKNVVSWNTMLGAYARAGMLPKARKLFDRMPSRNAATWGSMITGLLQSDHCEEALRVFSDMVASGVVPNEPALVSTVSACTQLRWMEHGTWVHGYAERELNGAMSAVLATAIVDMYGKCGSIRDAVRVFAAMPVRNIYSWNSMIAGLAMNGSERQALSLFWKMQLAGVRPNDITFIGLLSACSHSGLVDEGRWLFYKMVNHFGIQPVPEHYGLMVDLLGRSGHVREAVDFVKSMPVEPHPGLWGALAGACKIHGEVELGEEVAKKLIELEPQHGSRYILLSNIYATSNRWDDMANVRRILKDRKVPKGTGNAIVGNDSQSSGYEIDS

SEQ ID NO: 140297 - protein, 72 aa, Oryza sativa
  Clone ID: PAT_MRT4530_41508C.1.pep
MSPAHCHTALVPLHPSIASTVDHRRDGGELSPSVPLYQLGFSTTVSTAASNQWPKCTIFNGGNQPPAINHFH

SEQ ID NO: 140298 - protein, 95 aa, Oryza sativa
  Clone ID: PAT_MRT4530_41509C.1.pep
MNHQIIQMQSQIEIKNPHKINIPNQTIALWWLLNQHPKSQKSPQNIHKSNHRHAGENCHWFHVGEEDKPPSLPAHRGGGSSNYRHLGEGSIATTA

SEQ ID NO: 140299 - protein, 73 aa, Oryza sativa
  Clone ID: PAT_MRT4530_4150C.1.pep
ARATASVFAARRTRLRRRRPGTSDGVGSHAQPFTGSPAGTGASDVFHPTTSVGPGSGGEVGERGRGRSSPTRP

SEQ ID NO: 140300 - protein, 86 aa, Oryza sativa
  unsure (1)..(86): unsure at all Xaa locations
  Clone ID: PAT_MRT4530_41510C.1.pep
RSTASPPTSSRPLALRHSGPCLRXREDKMGWTGCVAARLLEAALPRPSYLETISRRLRRSGDDLDQEDDVPPRYARYISFIYHTHA

SEQ ID NO: 140301 - protein, 134 aa, Oryza sativa
  unsure (1)..(134): unsure at all Xaa locations
  Clone ID: PAT_MRT4530_41511C.1.pep
GLVTTHGYXNMYTWGHFKLSYRSIQLLSAHCHPLFRGFYLSXGGTWHLTRGCITFRSSMKGXVLRSVGPGNCIGYISVVQGXTSWIALVRLIYLPNYLSYILVNLXLVARFTYIGWDLLXGFCRYRLNCFARLD

SEQ ID NO: 140302 - protein, 279 aa, Oryza sativa
  unsure (1)..(279): unsure at all Xaa locations
  Clone ID: PAT_MRT4530_41512C.1.pep
MGGGGGHAGRHSVGPAAAAAAAAAEAASAAADRFLRSRGAGASTQVELSLSASNLGDQEFFTKSNPMVIVYSKSKEGALEELGRTEVILNSLNPSWNARINVHYQFEVLQPIVFQVYDIDPQFHDVNEKMLKLEEQQFLGEAVCLLSEVITKQNRLLTLKLGVSEHNLPNPSKFGELNVQAEESAGSKAIMEMVFRCSDLEIKDLLSKSDPFLLISRISESGVPVPICKTEVRKNDLNPKWKPXVILNLQQXGSKENPLIIECFNFSSNGKHDLIGYPL

SEQ ID NO: 140303 - protein, 282 aa, Oryza sativa
  unsure (1)..(282): unsure at all Xaa locations
  Clone ID: PAT_MRT4530_41513C.1.pep
LVATPPTPAAVASAPPPPAAPITPPDPRGGWPPPPDPRRGRPPPPSRRQIRARPPPPDPRGGRLPSPTPAAXPSSPSPRAAAVAVDAGRRPRLHPPPSPSSSPSPXQPPSPSPXPPPYIPVGPAPPPLPSQPPRPPPXPDPGQNPNLPSHTTRSFPLPSPHMRRLFLDLSPPPPRXSPLSPPRTRXPPSSRAAPPPTSHRASPQXTCAVPPSPPRAVSPPSPHTSARSRPPPRAVSPPSPHPSPPSVDSPPPPPXTPLPTRVTPPFPTSPRSLPPTSRAPGV

SEQ ID NO: 140304 - protein, 180 aa, Oryza sativa
  Clone ID: PAT_MRT4530_41514C.1.pep
MENPYYASFLKNHHRRYCFSTPSSPSPAGAYSSSASSSFPFFPTVGVTSTMAATPPTTTAPPSPPLREALPLLSLTPASRGGTTAAQEHPMDVEGSGSGCCRAADADDDADVTVALHIGLPSPTAADAVVRPKGKRKGGEEREGRERDEEEGRRNDDMCQSHNIFSCVNDICVSRIFFEF

SEQ ID NO: 140305 - protein, 67 aa, Oryza sativa
  Clone ID: PAT_MRT4530_41515C.1.pep
NKKNFSKNGGQRGTKTRGQGPEDGGNRPSGEKSGGQMANSHPKIGPNPLWGEPGPKETKEGIGICSS

SEQ ID NO: 140306 - protein, 442 aa, Oryza sativa
  Clone ID: PAT_MRT4530_41516C.1.pep
MENPYYASFLKNHHRRYCFSTPPSPSPSPAGAYSSSSFPFFPTAGVTSTTAATPPTTTAPPSPPLREALPLLSLTPASRGGTTAAQERARQRGEEDCTDDDDGAEEEGADEEDVPGSTPGGGGGGGGDRHHQLRRRRAGRLFADLNTKAAAGDPMDVEGSGSGCCAAEAAAAGDDDADVTVALHIGLPSPTAAADLISGLSSAAGRRSSTARRDEEEDEAEEAGGASRDDGDGGDAADAAAPLGFASTPIGRLNKGQYWIPTPSQILIGPTQFSCPVCFKTFNRYNNMQMHMWGHGSQYRKGPESLRGIQPTAMLRLPCYCCAAGCRNNIDHPRAKPLKDFRTLQTHYKRKHGLKPFLCRKCGKAFAVKGDWRTHEKNCGKLWYCLCGSEFKHKRSLKDHARAFGHGHGALGGAAALDDDDDGAVSDLDHDSSSTAPAARSL

SEQ ID NO: 140307 - protein, 133 aa, Oryza sativa
  Clone ID: PAT_MRT4530_41517C.1.pep
MTKIRSVHNYLAKRGLTHLILAVRLIHRRGRRGGSRHHAWTYGGRRLMWGLADKKRQRMETEGPCARPVAGSRRRARTCTGQRLGRGLVAVSAEAAAARQWSGGVWRVARMARGLVAAPRTDLRRTVGADARG

SEQ ID NO: 140308 - protein, 123 aa, Oryza sativa
  Clone ID: PAT_MRT4530_41518C.1.pep
GAAAAELAADQGRQGKRRGSLPLLPGGALHRSLSPSRRTPSPPTHQASSQTAKNSPKRRHFFRGKKLRLLPTAGGTRDGSEITQGVLGFGGNGGAMRVANSCDLGEFGGESEGRRSTELRNTG

SEQ ID NO: 140309 - protein, 82 aa, Oryza sativa
  Clone ID: PAT_MRT4530_41519C.1.pep
MNVSKCVSDQCASGGRTGEKGWRVGRRVAHWEEIAARREGAHGRIGVLGQWGNREGRRQQKAAGEEGSMGPDWTRMHDILIF

SEQ ID NO: 140310 - protein, 75 aa, Oryza sativa
  unsure (1)..(75): unsure at all Xaa locations
  Clone ID: PAT_MRT4530_4151C.1.pep
ATPAPSSXXXXIDHXNXXXQRELTDWXNXXRTDLXFDXWRXDFXKGYSXPXXRIYXXNIXXTFVVXEIWSSLIYN

SEQ ID NO: 140311 - protein, 80 aa, Oryza sativa
  Clone ID: PAT_MRT4530_41520C.1.pep
GACSGISDALLEQIFLLLVSALSLIRVAAACKLRVFSCWRDDDGWKLLNRVGLPEITRAPHADRNGNDGFSSLFGNGVTA

SEQ ID NO: 140312 - protein, 899 aa, Oryza sativa
  Clone ID: PAT_MRT4530_41521C.1.pep
MKLSPPASADMPQALPENDGEQRCLNSELWHACAGPLVSLPVVRSRVVYFPQGHSEQVAASTNKEVDAQIPNYPNLPPQLICQLHNVTMHADAETDEVYAQMTLQPLSPEEQKEPFLPMELGAASKQPTNYFCKTLTASDTSTHGGFSVPRRAAEKVFPPLDFSQQPPAQELIARDLHDNEWKFRHIFRGQPKRHLLTTGWSVFVSAKRLVAGDSVIFIWNDNNQLLLGIRRANRQQTVMPSSVLSSDSMHIGLLAAAAHAAATNSRFTIFYNPRASPSEFVIPLAKYVKAVYHTRVSVGMRFRMLFETEESSVRRYMGTITSISDLDSVRWPNSHWRSVKVGWDESTTGDKQPRVSLWEIEPLTTFPMYPSAFPLRLKRPWASGLPMHGMFNGGGNDDFARYSSLMWLRDGNRGTQSLNFQGHGVSPWLQPRIDSPLLGLKPDTYQQMAAAALEEIRYGDPSKQHPATLQYQQTHNLNSGLNSLFASHVLGQVQFQPQQSPLQVVQQGHCQNTGDSGFLQGQLPRLQLHNTQQLLKEQELQQQQRQHVLQEQSSQEMQQQLPSSDHHVADVASESGSAPQAQSSLLSGSSFYNQNLLEGNSDPPLHLHNNFHNFSNQEASNLLILPRSSQLMASDGWPSKRLTLESAVHPEAPSMHPKIEKVNHQGISHFPGAFPPQSARGCSIVQDCRADAENRLLSSSFELQDGMTSIITDANRETDTMAIPLLRYSGADLTTENTLATSNCLGESGTFNPLNNISVNPSQGATFVKVYKSGSLGRSLDISRFSSYCELRSELERLFGLEGQLEDPVRSGWQLVFVDRENDILLVGDDPWQEFANSVWCIKILSPQEVQQLVRGGDGLLSSPGARMQQSNACDDYSASHNMQNIAGNIASVAPLDY

SEQ ID NO: 140313 - protein, 642 aa, Oryza sativa
  unsure (1)..(642): unsure at all Xaa locations
  Clone ID: PAT_MRT4530_41522C.1.pep
VTQAHKVTXVSSFPLGEVVRNKDVVGRITKWXVELSQLDVHFVPRIAIKSQVLADFVADWTIPEDRPASQLDNETWTMAFDSALNSQGAGAGAGFILTSPSGDQFKHAIHLNFRXTKNTAEYEGLLEEIRAAAALGAKRLIVKGDFELVANQVHXYKCSNPELAKYLAEVXKLERRFDGIEVXHVYRKDNVEPDLARRASRXEPLEPGTFLDILMKPSVKDTHDKSIIANTDIPSGVAEVAYVVANIEITDDWRIPLIKVLESDELPDDDTEAEKLSRQAKIYAPNGILLKCVSSDDGKALLVDIHEGICGSQAGGRTLVGKAFRQGFFWPTVLKDTCDIVQRCEACQFFSKHTKLPAQVLQIIPLTWPFSCWGLDILGPFPRGQGGYRFQFAAIDKFAKWIEAEPTREIKVDNAIKFIKGIFCRYGLPHRILTDNGSQFTSGXDYCIELGVKICFASVSHPQSNGQVERANGIVLQGIKTCVYDRLMAYDTKWVEELPSVQXAVRTTPTTSNKEKPFFLVYGSEAMLSTEVRHQSTRVHKYSDEEQDERRSDDVNLLNNIVNQQALRRYHERRIRARTLAIGDYILRRVQNQEGRNKLSFKWEGPYTVVRVLRPGAFKNADGEHLELSNSWNIDQLRKFYV

SEQ ID NO: 140314 - protein, 50 aa, Oryza sativa
  Clone ID: PAT_MRT4530_41523C.1.pep
LLLRLQNKPECKSIPPSMLHLYILSLKTNMLSEFTKGTPLYSSNNFRRTY

SEQ ID NO: 140315 - protein, 60 aa, Oryza sativa
  Clone ID: PAT_MRT4530_41524C.1.pep
MTGRQRGDGREGSAGGGFGFGSHVAAGGRATRQQGNTGRFAVAAELELAGRKQQGLESDR

SEQ ID NO: 140316 - protein, 81 aa, Oryza sativa
  Clone ID: PAT_MRT4530_41525C.1.pep
DSHYHDGYFEGNHVVDEFDKSFASTLESVHRSARQYPFQHPVEPPPDFPLSGRVHDLAGPDRRAPTRPLPRRSRSSTGAAT

SEQ ID NO: 140317 - protein, 216 aa, Oryza sativa
  unsure (1)..(216): unsure at all Xaa locations
  Clone ID: PAT_MRT4530_41526C.1.pep
REGGSETAVHGSPRVDGGDGNGDRSGGRRRHGSGRRGRRRSSGRRAKRRGGRGRWPLETKSPTLCSAGQTVVVRPVKPDYFVTARKLAVTGQSLSPLNLAGLTTVXWPIRPSTARSDRHRLGGAGQTGLTTPVRPXLRPTVRPQVTFQLKRPLVKRRYLLTRVSEFGVLGLYGKLIQRAIQPMNNPSKKHNFSQGERAHTPKDTPPDITTXGYPNL

SEQ ID NO: 140318 - protein, 184 aa, Oryza sativa
  Clone ID: PAT_MRT4530_41527C.1.pep
MQQINETIDKEFFTEVRKLAGFLIPVEASPTPPLNHEATARLLCQGVGKKTSRYRAIIEPTQPGRSDHSVVAGQTVHGSVRPPSARSDWLRLWRLCIATKNQTCGAGQTGLRPTVIPQFTFQLNRPLVKRRYLLTRVSEFGVLGLYGKLIQRAIQPMNNPSKKHKFSQGERAHTPKDTPPDITT

SEQ ID NO: 140319 - protein, 195 aa, Oryza sativa
  unsure (1)..(195): unsure at all Xaa locations
  Clone ID: PAT_MRT4530_41528C.1.pep
LICDFSSSSQPLEPKSPTLCSASQTAVVRLVRPDYFVTATARKLAVTGQSLSPLNLAGLTAVXGRSDRPRLGLTGCGSGGSVSPPKTRPVQQTSGAGQTGLTTPVRPANRPGQTGLRPTVRPQVTFQLNRPLVKRRYLLTRVSEFGVLGLYGKLIQRAIQPMKNPSKKHNLSQGXWAHTPKDXPPDIPTRCHSLL

SEQ ID NO: 140320 - protein, 81 aa, Oryza sativa
  unsure (1)..(81): unsure at all Xaa locations
  Clone ID: PAT_MRT4530_41529C.1.pep
MAXXLVEXHRSGAEVHTGHXLCXRKARXLLVXLGLPDGLLPLPSLXEVGYNRAPGFVWLXQXQAGXATHTFXTIGXQVXPQ

SEQ ID NO: 140321 - protein, 116 aa, Oryza sativa
  Clone ID: PAT_MRT4530_4152C.1.pep
ALTGRLPGEIGGCARLVEIDVSRNALTGPIPATLSALSSLNSLNLSHNAITGAIPTQLVVLKLSSVDFSSNRLTGNVPPALLVIDGDVAFAGNPGLCVRGRSELGVCKVEDRPRDR

SEQ ID NO: 140322 - protein, 181 aa, Oryza sativa
  Clone ID: PAT_MRT4530_41530C.1.pep
RDKEFFTEVRKLAGFLIPVEASPTPPLNHEATARPLRQGVGKVGAGPRRGLPKPRSLGRSDRSVAAGQTVHGSVRPPWARSDRLRLWRLWIAKKRRSDRTTYFGQTAIMEAVRPQVTFQLNRPLVKRRYLLTRVSKFGVLGLYGKLIQRAIQSMNNPSKKHNFSQGERVHTPKDTPPDITT

SEQ ID NO: 140323 - protein, 253 aa, Oryza sativa
  unsure (1)..(253): unsure at all Xaa locations
  Clone ID: PAT_MRT4530_41531C.1.pep
TVLHNSKPKSTSLNVNATNKWDKRXGFFTEVRKLAGFLIPVEASPXHRSTTKPPHAPFXRGGQVLESKSPTLCSAGQTAIEWPVKPDYFVTARKLAVTGQSLSPLNLAGLTAVXWPVRPSTAWSDRRRLGLTGCGSGGSVSPPKTRPVQQTSRAGQTGLTTPVRPANSPGQTDLRPTVRPQVTFQHNQPLVKRRYLLTRISEFGVLGLYGKLIQRAIQPMNNPSNKHNFYQGEIAHTPKDTPPDITTXGYPNL

SEQ ID NO: 140324 - protein, 246 aa, Oryza sativa
  unsure (1)..(246): unsure at all Xaa locations
  Clone ID: PAT_MRT4530_41532C.1.pep
MVLHNSKPKSTSLNKFAQNKGDKRQGIFTEVRKLAGFLIPVEASPXHRSTTKPPHGPFVKGNXPLESKSPTLCSAGQTAIEWPVRPDYFVTARKLVVTGQSLSPLNLAGLTAVKRPVRPSTARSDRLGSGGSVSPPKTRPVQQTSRTGQIGLTMPVRPANSPGQTDLRPTVRPLVTFQHNXPLVRRRYLLTRISEFGVLXLYGKLIQRAIQPMNNPSKKHNFSQGEMAHTPKDTPPDITTXGYPNL

SEQ ID NO: 140325 - protein, 180 aa, Oryza sativa
  unsure (1)..(180): unsure at all Xaa locations
  Clone ID: PAT_MRT4530_41533C.1.pep
PLESKYPTLCSAGQTAIEWPVRPDYYVTARKLAVTGQSLSPLNLAGLTAVXGRSDRPRLGLTGCGSVSPPKTRPVQQTSGAGQTGLTTPVRPANRPGQTGLRPTVRSQVTFQLNRPLVKRRYLLTRVSEFGVLGLYGKLIQRAIQPMKNPSKKHNLSQGXKAHTPKDXPPDIPTRCHSLL

SEQ ID NO: 140326 - protein, 95 aa, Oryza sativa
  Clone ID: PAT_MRT4530_41534C.1.pep
GFASPPPDRISPFIKLPGVSFFLLFSASSSVGDFFFFAGAGGRSPASASACAMARISRNLWGLARRRRRDGGGEGRGSAALRCCAGGSPRLNGVG

SEQ ID NO: 140327 - protein, 145 aa, Oryza sativa
  Clone ID: PAT_MRT4530_41535C.1.pep
PTRPIDPASHPQLHVFLKQVVGLDLVDDESKPERRPTKHMPTPEQWTNVFNPAFSYYAYYCYANLYTLNKLRESKGMTTIKFRPHAGEAGDIDHLAATFLLCHNISHGINLRKSPGLQYLYYLGQIGLAMSPLSNNLLVFDYHRN

SEQ ID NO: 140328 - protein, 190 aa, Oryza sativa
  unsure (1)..(190): unsure at all Xaa locations
  Clone ID: PAT_MRT4530_41536C.1.pep
PLESKYPTLCSAGQTAIEWPVRPDYYVTARKLAITGQSLSPLNLAGLTAVXRPVRPSTARSDRHRLGLTGCGSSGSVSPPKNRPVQQTSGAGQTGLTRSVRPANSPSQTDLRPTVRPQVTFQHNQPLVKRRYLLTRVSEFDVLGLYGKLIQRAIEPMKNPSKKHNLSQGXMAHTPKDXPPDIPTRCHSLL

SEQ ID NO: 140329 - protein, 145 aa, Oryza sativa
  Clone ID: PAT_MRT4530_41537C.1.pep
PVTPRTCCSCPAHASYKDPPADPTCPLQNCHASEPEVVCESSPKLHRARTGVFPSHIMLPTPRKEVQGVQELARPRIPGFKPPHSPTLGHRFPSRYWVDPIVSRQGLPCFSPPLFHQKWNSRFCGYLSAVLSYVIPVLVYDVTCR

SEQ ID NO: 140330 - protein, 253 aa, Oryza sativa
  unsure (1)..(253): unsure at all Xaa locations
  Clone ID: PAT_MRT4530_41538C.1.pep
TVLHNSKPKSTSLNVNATNKXIRDKGFFTEVRKLVGFLIPVEASSXHRSTTKLPHAPFVKGNXPLESKSPTLCSAGQTAIEWTVRPDYFVTARKLAVTGXSLSPLNLAGLTAVXWPVRPSMARSDRHRLGLTGCGSGGSVSPPNTRPVQXTSRAGQTGLTTPVRPANSPGQTDLRPTVTPQVTFQHNQPLVKRRYLLTWISEFGVLGLYGKLIQRAIQPMNNSSKKHNLIQGERAHSPKDXPPDIPTRCHSLL

SEQ ID NO: 140331 - protein, 38 aa, Oryza sativa
  Clone ID: PAT_MRT4530_41539C.1.pep
FLKGSIYSNASNDTYGSGGRQQQQKKQQDEAAAAGDKT

SEQ ID NO: 140332 - protein, 138 aa, Oryza sativa
  Clone ID: PAT_MRT4530_4153C.1.pep
MPASNKPFKGIASMKVWAKKIIAGLMLGLETMMVVASQFDLHVTTTETNLNLSWGFRAALLFPRYEQTSEPHHRQQGSKQPHFNTAIVTPSRRHLKPTATAYSCHGCHEAMGLWTRWHNPIGAAPLPSLLVTEFEGEA

SEQ ID NO: 140333 - protein, 291 aa, Oryza sativa
  Clone ID: PAT_MRT4530_41540C.1.pep
MTIGLPVREGVSSAKLTLIVACFLLPFLVEAESRAPAPLSFSFDFSNSASYRLEDLLFEGNASEPSNKLVDLTCNEFAETIHKCKGRMSYAHAVKFYDATTGEVASFSTRFTFAIAIRSDISNPTDTKGDGLAFFLAAYPSTIPSNSDGGNLGLLATNHSKAYGTDRFIAVEFDTYNNIWDPNKTYDHMGVDISAIESANTTSLPSYSLNGTMTASISFNSSTRMLLANLHFDDHPSFQPAEVSAILPDPVTLLPQEVSVGFSAATGGSGSELHQILSWSFNSTLGLALYC

SEQ ID NO: 140334 - protein, 110 aa, Oryza sativa
  Clone ID: PAT_MRT4530_41541C.1.pep
MRFVAAYLMATIGGNASPTKDDVRAILGAVGADVDEDKLGYLFDQVAGKDLSEILAAGSEMLAFGGVGAAPAAAATAGGGAAAAGEKEKEEEKVEEEEEDDIVFSLFDDE

SEQ ID NO: 140335 - protein, 158 aa, Oryza sativa
  Clone ID: PAT_MRT4530_41542C.1.pep
MATNNGGEEMKVESGVVGEVGGEEEGDGAEEEEEVRQVPGRRVVKQRWRLPAVDPATWIPTTATDGETFYKKNTPFRSLKSVRADELEKLREEPNSNNTRPAWFRALEPRDSLGPAPLFCGTDSLSRLHRSRAMAPRYRLDPAVQSCGTGSVAHPGST

SEQ ID NO: 140336 - protein, 81 aa, Oryza sativa
  Clone ID: PAT_MRT4530_41543C.1.pep
MAASSSLDLSKTMAASGFLIFLLRGPAAPSAVTLRGRSGRGGGGLAFSASSSNWCALDFRFQEQWSHGSSLQLQKVQKKRS

SEQ ID NO: 140337 - protein, 449 aa, Oryza sativa
  unsure (1)..(449): unsure at all Xaa locations
  Clone ID: PAT_MRT4530_41544C.1.pep
PNRTYLFLYINSRCIDFKKKEIYGDFVGARQLIEKMPEFGCVTNVAVYTALLDGMCSFGEVDAALRLVEEMEGWSLGAGCVPNVAETTAYSSAREDLTLSETEEEEEEEEVRSGPCICTDCSFSPLHESSSSSDDDNAVPSPTFSLFLALAEQFFGCSLPNQCDXDVIRWELLYQGKRFEDLDNEVSYERFRRRERRGVVARDYIEVYSSMLGSYGRAVVEQRVVMVNWIMEVSMLCIVHVCCDHDFALHSQAMKLQPETVFMGIGLMDRFLTRGYVKGSRNLQLLGIACTTLATRIEENQPYNCILQKAFKVGINTYSRSEVVAMEWLVQEVLDFQCFVTTTHHFLWFYLKAANADDRVEDLAKYLALLSLLDHKHLSFWPSTVAAAVVALACLATNNESSCHLVMETHMRTKNDDLPECLMVFLFSRLLYSNLSPGCNRKGLHPGGL

SEQ ID NO: 140338 - protein, 644 aa, Oryza sativa
  Clone ID: PAT_MRT4530_41545C.1.pep
MAALLGILLAAFLAAAAVLFALRLLHSFLWVPRRLERRFRRQGIRGPPRRPLSGNAAGYRDLLAAAQSAPLASFHHAVVARVAPHHREWPERYGRPFVFWLGPRPRLVVSDPEVVKAVLTDTTGTFGKAGPGGNNPLARQLFSEGLVGLTGEAWARHRRVIAPAFNMERVKAWIPEITSITSSMLDKWELQDEVRTEFEIDVNKEFHTLIADVISCVAFGSSYEEGKRVFQLQEEQLKLVILAMRTVYIPGFRFVPTKKNQRRKIVNQEIRNSLRKLIEINGRKCEDSNNLLGMMLSASKIDSEFKMGIEEIIDECKTFYFAGKETTATLLTWATLLLALHQEWQNKARDEVLQVCGKYEHPKAENLSELKIQVILCLMFECNQVNMVLKETLRLYPPAVFLNKIANRDVKLGKLDIPAGTQLQLPILDIHHDVSIWGADADEFDPSRFAEGKSYHLGAYFPFGIGPTICVGQNLAMVEAKSHSNPSMVLKFLSIRFETSMDLCVDFWVFAITESPEDPNKANVILSLIDLLSYDRLQITGTRSRFSPTFALDKNGRQGRQIEADIPAMRRWRMARQLLATVADATAAGNVMVSGSCREPNGCRRQQVEARKESDSEGGDWVRVRARRRRRKRATVTERRHGRR

SEQ ID NO: 140339 - protein, 153 aa, Oryza sativa
  unsure (1)..(153): unsure at all Xaa locations
  Clone ID: PAT_MRT4530_41546C.1.pep
MQTAASSVVGLSAVLPAAVKGRSLQIQAPRRVALRVRAAAAAVAVEAAEVDYSSNISVFPMEACDLIGGEACNVQMYPEAKLSSSAAVAVSRAAAEEVDRDYLSYDEPTTLFPEEACDDLGGXFCKATCIPFPSLANWELLSSFLLWSITLIP

SEQ ID NO: 140340 - protein, 128 aa, Oryza sativa
  Clone ID: PAT_MRT4530_41547C.1.pep
MQTAASSVVGLSAVLPAAVKGRSLQIQAPRRVALRVRAAAAAVAVEAAEVDYSSNISVFPMEACDLIGGEACNVQMYPEAKLSSSAAVAVSRAAAEEVDRDYLSYDEPTTVFPEEACDDLGGEFCKAT

SEQ ID NO: 140341 - protein, 98 aa, Oryza sativa
  unsure (1)..(98): unsure at all Xaa locations
  Clone ID: PAT_MRT4530_41548C.1.pep
FRLAHKQKKKREIAFAKRRWXKSSFNSRSTVRPTLSSRLDRLPGPVRPQVQRRSDRPRGNFARNSNQTFMKRKEEKYEKXKEYRILXNNLDDKDVFDV

SEQ ID NO: 140342 - protein, 47 aa, Oryza sativa
  Clone ID: PAT_MRT4530_41549C.1.pep
FTFFLICACCSIASFTLKTIQIYFQRPKVQAFMVWPYDPRAILMLER

SEQ ID NO: 140343 - protein, 288 aa, Oryza sativa
  unsure (1)..(288): unsure at all Xaa locations
  Clone ID: PAT_MRT4530_4154C.1.pep
MTSPPAAAARRLGRRTLAGERRRFGTNGGHQRVERDAANSPVTKRAAEDQRTATATRLKRRRSSGRRRRWCSGDLRRRRRGGQGRRRLGDHDGGLPEQRRRLEWRRRSAGATAATAARGYTALERFRRREAKAREATGREELGGPFKGAKRRRRRPTAAGDEKERSGSEREKPIRFDFESNDFQTDLADVSKREKVEEIPKIVSPLSIRPETERIDRIXEGNGGGAKLXGFGRRRPEVDDXSDRRAPPVSDSERERRAAARARTGPTWAGEREKGFGPTFGPKPKETF

SEQ ID NO: 140344 - protein, 85 aa, Oryza sativa
  Clone ID: PAT_MRT4530_41550C.1.pep
MPTNSCDEMGGAEKGERPTEATRRPWRKVASTPPGGGREYGRWGEKKKEDETVPRFVLIHVANIYSGASWGGSCGPAPENFFPPV

SEQ ID NO: 140345 - protein, 417 aa, Oryza sativa
  unsure (1)..(417): unsure at all Xaa locations
  Clone ID: PAT_MRT4530_41551C.1.pep
MPRGRVPGGSTANFSAHLIAAQLGMQCRMGPAAAEQMRRVIASSDCDTGRVMRMFGAMEGGDSDSDSDDSAETEKVGPLHEAASAGKMDTCKHLVEQLGFDINAEASDDLGMTPLACAVSKGKAIAVRYFLDKGADPNKQDNIGFTPLHYATKEGYDGLARLLLSKGASVDVISSKGTALHLAASSWKSGIMKILLEHNADPNKVSADSETPLAATLIASDGLNEPAVLKCIKLLVKAGANLNRAIPDTPLVIATNKDFVECVEYLLEAGANANIPTNNGGKTPIEIAAKSGRRKLVEILFPCTLPIKGVSNWTVEGIITHVKSKKSKKKACAQDKESGTDKKAQLKSLGASAVQGKDYVGASKFYSEMRVRGVATGISLVRLNMEEDEKVPGSSNTSYIXTCIGLKPDWAKGYYRK

SEQ ID NO: 140346 - protein, 307 aa, Oryza sativa
  Clone ID: PAT_MRT4530_41552C.1.pep
MASMEPLNRMVRMVARAFYDNVSLARDPKSARGDNCGLAVVVLDALTRRRHWVREEDLAKALKISSKQLRRILQFFEEEKLVEVNFLGSTGAQEGVESGMESIKPQHSWMNRKRTVLAGEHKEENNNTANLDQSSEAKSDKKQLSEEDEMKSIQEAYAKAYYEAIQKRQEDEGKRAIQEESLACISDQPFASDAQFERRLGAKSKRDDGGESGDDGIELKPFFSSVSPLLNSSLRATLRGRLKSSAARRSPSSSASAAMDTMEQLNRLVRMVARGFYEDVSLEEDQSKPNGSGSCGIVVVVLDALTR

SEQ ID NO: 140347 - protein, 49 aa, Oryza sativa
  Clone ID: PAT_MRT4530_41553C.1.pep
YQNKMLTGWSEKPRFTINRCEYKCLISSLLHQESNTSLHKLGKNLIRMV

SEQ ID NO: 140348 - protein, 191 aa, Oryza sativa
  unsure (1)..(191): unsure at all Xaa locations
  Clone ID: PAT_MRT4530_41554C.1.pep
DAVPVGEVQLSPGVEDCLVWHWTADQRXSARSVHQEFFYDQHFFACADLLXHAKCPAKCRFFLWFAFQXRCXTADLLQKRGIDSHSTCLFCAKDLETANHILLDCVFARQVWLRVLLPLGWAAFSPPCGSWFQDWWPSSRACLPKHLRESFDSLVLLVSWKLWKELNSRVFDSALSSVSVILESIHSEGHL

SEQ ID NO: 140349 - protein, 44 aa, Oryza sativa
  unsure (1)..(44): unsure at all Xaa locations
  Clone ID: PAT_MRT4530_41555C.1.pep
NELHAGLGPYCVSEHFTWSPTVLLVMVNXSXDPLLSLNFLIVVS

SEQ ID NO: 140350 - protein, 365 aa, Oryza sativa
  unsure (1)..(365): unsure at all Xaa locations
  Clone ID: PAT_MRT4530_41556C.1.pep
MAGGKIQKKRHGGGAGGGGGGGGGGARLQGGIPFEKSKGQHILRNPALVDSIVEKAGLKPTDTVLEIGPGTGNLTKRLLQAGVKAVVAVELDPRMVLELNRRFQGDPLASRLKVIQGDVLKCDLPYFDICVANIPYQISSPLTFKLLSHRPIFRCAVIMFQREFAMRLVAQPGDSLYCRLSVNVQLLSRVSHLLKVGRNNFRPPPKVDSSVVRIEPRKPLPPVSFKEWGMDLVRLCFNRKNKTLGXIFKQKRVLELLEKNYKTMQSLQLTSDAEKGEEKMSPDDVALLSSMVDDMNMESSYENDDDDEMEMDDADMVVESRACFKEKIMGILQQGDFAEKRASKLSQVDFLYLLSLFNKAGIHFS

SEQ ID NO: 140351 - protein, 837 aa, Oryza sativa
  Clone ID: PAT_MRT4530_41557C.1.pep
MWGPLSALSDDTVSKERGLTPRVFELLFSRIKEIYNEQITDLLDPVQRNLQIREDVGTSSVYVESLTKESVFTINDVTQLLEKGLANRRTEATTANAESSRSHCVFTCFIKSESKNMEDGSNFTRTSRINLVDLAGSERQKLTNAAGDRLKEAGNINRSLSQLGCKSETLSTLRFAHRAKDIKNNAVVNEQREDDVNVLREQIRQLKEELQHVRSNGSLPGSNGSPSTGWNSQNSFLLKMSLSRPTAFPTIKDDSDEEMEIDDNDVEKPCNLENKSSFPHGDVETSRCKSNLAASIQKGLQVIESHRNSVTWRRSSLGLNTRLMDAHLSVPVCKVDVAIQTDPEESEPRQNTMALIPSNQPEATTDGNREISDCINLQLVTVDGSIPSNDLKQQEQVFKAVEKVLAGAIRREMLRDEQCAKQAAEIQQLKRLVQQYKHERECNAAIAQIREEKIARLETLVDGILPTEELMHAENLSLQDENKILHQKYENHPEVLSAKIELERIQEELERYRNFKDEKEVLLEEIQHLKNQLHYMLSSSMALCRPPVELVQAISTVSDRPTISALEEAGDDGHSIVDAAESRWITLTEELRVELEKSKSLSERLQLEVESEKQCSEELKGALEMAMQGHARILEQYCELQEKHASLLSMCRTINDGIEDVKKEAAKAGVRGAESKFINALARQVSILRAEREKERRFWMDENKGLQQQLSDTAEAVQAAGELLVRLNDAEEAASLAQKRAELAEQEMNKAFAEIDNLKRDHDQEVLVLNQRLAESKLPSNVVQSPEPSETGPARYDTGGSFGDEQWREEFKPFQSVEVSKSSDPSSWFYGYDKCNI

SEQ ID NO: 140352 - protein, 97 aa, Oryza sativa
  Clone ID: PAT_MRT4530_41558C.1.pep
MASWRPRLGGVTPTTQAPKQRAPLARRRRPSQPQRAEGSSAALASGPLADWDWGLILIRLQSCRFDECSLSTKFPSEGTQLQKNLGKYRLQIHKDLL

SEQ ID NO: 140353 - protein, 80 aa, Oryza sativa
  Clone ID: PAT_MRT4530_41559C.1.pep
KHNFGLYTRGELLIGGNNKCYIRSPYGPQHGPKVYKVLERSLHFTHTRCICYSISITSSVGTRHTEKSSVLMFRHHMVRW

SEQ ID NO: 140354 - protein, 341 aa, Oryza sativa
  Clone ID: PAT_MRT4530_4155C.1.pep
MAATALHLPPLLLARRLRFSSAAASTSTSRRTTRLSAQLDDTAAASTSTSTSDKPAAASSFAPPPDFKPPEPKTFEVKPGQSDDIVTASLAIPFRLGTGVFALGYSVSLVSPDEVAPDEYALDFQGRKVKESSKIGQCPRPEKPIEIYEFEGCPFCRKVREMVAVLDLDVLFYPCPKNGPTFRPKVLEMGGKQQFPYMVDPNTGVAMYESDAIIKYLADKYGDGTVPIMLSLGILTTITAGLAMSGRSGKGSKYTPAKLPPEPIELWAYEGSPFCKIVRETLVELELPHLLHSCARGSPRRQEFLKKYGIFQAPYIEDPNTGVKMFESADIIDYLRATYAA

SEQ ID NO: 140355 - protein, 858 aa, Oryza sativa
  Clone ID: PAT_MRT4530_41560C.1.pep
MTRITAPPPPSSPPSSPPPLRHSPAALGTPRSRRRHSPSPSLALTPSSSASASASASTSSRPKVRPSPRRAYAAAQWVALPSHPAFSRGDGGEGLGGGGGGAAWDASASRLYVWDPSARGVHRICVRVRDAEPGKDGDDVAVEAAVPSEMLMPETDLGYKVTHLSLNTDGSSLLLAGSHNISILYVHERVSEDGDKVICRTVPVASQILPSNNDGIKVLQTSWHPFSSSHFGVLTSDAVFRLFDLSFDLEQPEQEFYLQPILPGKCQNASSICPVAFSYGSDHLWDRFSVFILFSDGSIFVLCPIVPFGSDYNKKHIQEIYEDVNSFGLKSSNQNVVTNSRLAIAWLEATFPDLSRQPADNSALMSRAHPYASLDDSLTLQGPLCRVCEENNEPESKSNSCEGKAVGFVYSSVGKDSILVTAWGSGQLQIDALADEIQPQWSIGIPTRLNVDSHGQIKSVAMICDSNSEDSWAMRSYRPSSTGSNVKSNTDAVWMGHSPPLLRLAIVDLALAKTSNDSSLSLFLDPLVPERFYCAHGGGLDMVTLHFLPFSYPEMASTPPSVHPILTTGNNEANSPFLSGFVTIADAYGHVQLVSITCPGECFVVEMKGWKEPTPLQLDIDSKSIKDVESFTTGMISKELIAGPDPPIVPSSSSLRSLTPDSIEGKSTLHHYIKVFHEYYVEYGHKVFIELKEHGDYLKTEIEDKQKRLQAVKQSLLSIEAKDQDINNRINRAFKVYDLLEKRIEGFKILPAANKKPLSQAEQEFKAQLDRFADVELDALCSSITALSARMKRFAHPAIGSAAGTGMSTWQTPKVGRSHVSDSQMSLLKSSLEKLSLLNEENNVKLTLREPELKNQEQ

SEQ ID NO: 140356 - protein, 428 aa, Oryza sativa
  Clone ID: PAT_MRT4530_41561C.1.pep
MNWDMKLVNSSYEWVERELAFQPVVRGWQAAVRAGLLEANVTPWNGFTMDHVSGTKVGATTFDSSGRRRSAADLLAFARPGRLRVAIRATVTRIIMSPIEPVARRGRSPQPAVAASGVVYQDRLLQQHHALLRPGGEVILSAGSLGSPQLLLLSGIGPANDLTSLGIPVFADVPDVGKHMFDNPRNGISIIPSIPIDHSLIQVVGIPSANGNESYLEAASYIVPLAPILRRGGPFSPSSPLYVTVVTIMEKVPGPLSEGSLWLTSSNPLESPSVRFNYLSRREDLARCVTGMRRVAKVLESTTMDVFRSAMGSLSQDSRRREFRIVGAALPVDWRTNDTALGDFCQQTVATLWHYHGGCVAGSVVDRDFRVFRVRALRVVDGSTFRETPGTNPQATIMMMGRYIGQKMIDERHSRRQVRTSTDSSSNA

SEQ ID NO: 140357 - protein, 345 aa, Oryza sativa
  unsure (1)..(345): unsure at all Xaa locations
  Clone ID: PAT_MRT4530_41562C.1.pep
MEVLCAYGMQSRIWKESKFGMIGXVKFVSLVIYFESSSICVFSXFGGLTGETPAVRPVALRRSDRRSTCGQTSXRRQATSGTAADLXRFDRTFYFGQTDDIRAVRPVRLLRKVYNPYVILDQINIVALKTEFENNCKARNILLSGISRLDFDRVSHLETANEIWNDLKNFHQGTSNIKELHRDLFKKEYIKFEMKXEALDDYLTRFNKILSDLXSVASSYDINYTQSEVSSYFLNGLVMFIWEMKIISIQESVDISTFTLNSLYTKLKTHEMNILSRKIDSKSSALISSSTFLNIGASSSNSTILALINTISDEQLEQFEEEDLALVTNKFSRAMNNVRYWKRDG

SEQ ID NO: 140358 - protein, 40 aa, Oryza sativa
  Clone ID: PAT_MRT4530_41563C.1.pep
TEVNSFRISNILILIVNCMKFNIDFNLVLLYLSGGPRLPP

SEQ ID NO: 140359 - protein, 53 aa, Oryza sativa
  Clone ID: PAT_MRT4530_41564C.1.pep
MAVARRGRHGGGPGEAAAPSSLRICVCYVEDYGCVRCSMFPTRTMRTENGTVH

SEQ ID NO: 140360 - protein, 80 aa, Oryza sativa
  unsure (1)..(80): unsure at all Xaa locations
  Clone ID: PAT_MRT4530_41565C.1.pep
RAASLPGKNPMHMTALIXQPTQNPQAXRWQHSTYVKSTIRIPICTPDESTKLLVSQQSMKTTSTFHQHIPCGRVGGRVGR

SEQ ID NO: 140361 - protein, 70 aa, Oryza sativa
  Clone ID: PAT_MRT4530_41566C.1.pep
PKILIGGKVYLPPPKTARDAHGPFCFGGVVIASQDGKIVFDNPLDGRVEIFFKQKLPEIRKKLFSQKVSQ

SEQ ID NO: 140362 - protein, 81 aa, Oryza sativa
  Clone ID: PAT_MRT4530_41567C.1.pep
YSQYWKEVSTRWECNLYSRVAATTWALVDNHAYVFLCYWTGPYEEQFHQSITGGGKYPVALQGDCKATSNPKHGESGDQDD

SEQ ID NO: 140363 - protein, 67 aa, Oryza sativa
  Clone ID: PAT_MRT4530_41568C.1.pep
ACVVAATTSSSSTPSTISLCRHRCLHSLNKPSRRDTIAAPSPPDLPVRRLGPPGPMIPFSLSEDPAP

SEQ ID NO: 140364 - protein, 803 aa, Oryza sativa
  unsure (1)..(803): unsure at all Xaa locations
  Clone ID: PAT_MRT4530_41569C.1.pep
MSQVGSAPGLLCESPLSFSSAPTRLAHLHTTVFVDTKIKPWGGDILSFSILEYLLREKNDRPRRNNSPTKILVGKDLLKELEHRRSSPSVIAKLMGIDVLPPAYVTHNRHQDFKDVFEVSEMYSKCQXEPQEAVTKERSHNFPKGLPSLKRSALKLRKLMPSKSPYGDETFDNNVVNQDGFDRLNSLEINNPLFEKXPQSINXEPNYRYEKDSTXSSTFRKYPDDIRNSSRGKLEDFNSIVVLEPGLGKVQESGKAFCTPDPSHINKNFRREMQQADFSLQNRGRVSPNLLDTEDVDVSRIKRERYLSRNAVDSLLEGKESSFDHHNVPDTSSSGSSQNCVSGEVNSRQSNRPSSNSSPRKNRQKYEEGSVGSKTLAEMFALSDSERLKRDSDSHAQIRHNKLNRGNSNGKEGCFIVLPKHAPRLHPHSSLDKNSPHSNFIPNTSNTYHSGQSHFNSFCDISRLQQIGSPSQDNLRNACAKHQTLRQHRSASPSHDNRNHSRCSTDNFSTFDCINEKILVTTDEDLVKKPAETVHSSFESCGEEKVSASPFNCRDYESITVSDHSYVAKSHKSLKEVGQPSPVSILEPPTDEDSCCSGYFKCNLQDMPNVEKLIDDCELRYEQVSLSSDDDSGSSYRSLEAFQVEEERGFSYLLDMLINSGMIVADSQLLCKSWHSPGCPVGPQVFDRLERKYNKISAWPRPERRLLFDLANTVLSEILAPWKSSRRCCPVWGPEGPVEVVWQTMVRRQEELAVGHPDDKVLDPEWLEVGEDINTVGKQIAKMLHGDLLDEIILEFLSGCVAS

SEQ ID NO: 140365 - protein, 41 aa, Oryza sativa
  Clone ID: PAT_MRT4530_4156C.1.pep
IFLKKKKKKKKKKKKKKKKKKKKKKKKKKKKKKKKGRPVLK

SEQ ID NO: 140366 - protein, 738 aa, Oryza sativa
  Clone ID: PAT_MRT4530_41570C.1.pep
MDISRTNEGYTSRAQMANNLNRCGLDLTGFALELRGMCVVQGYPHGVDYQGKKLSQQDGDDAQPRAAWEMVTTRRSAATGEGCHPESSNHNNHGSPPPPPPLPPPPPTDTNPILTQILAQQANMMAAFLHHIQNPLQHNAPPPPPPPQHSKLAEFLRIRPPTLSSSNNPVDALDWLHAVGKKLDTVQCNDEEKVIFATHQLQGPASLWTHVPAGVMALKKREFRELKQGNRSVTEYLHEFNNLARYAQEDVREDEEKQEKFLPSQGRRDVQGQPRLCFYCFEPRHFTDKCPKPRRQQGQAPPHPNNDGKDATRGRVNHITTEDVLTTPDVIAEKKDKTKRMCVDYRALNEVTIKNKYPLPRIDDLFDQLEGATVFSKIDLRSGYHQLRICAEDIPKTAFTMQYGLYEFTVMSFGLTNAPTFFMNLMNKVFMEYLEKFVVVFIDDILVYSQSEEEHKQHLRLLLKKEEKFVWSPQCERAFQTLKEKLVSSPVLILPDNRKDFLVYYDASGQGLGCVLMQEGHVVAYASLQLRPHEGNYPSHDLELAAMVHSLKIWRHYLFGNRCEIYTNHKSLKYIFTQSDLNLQQRRWLELIKDYDVGIHYHPGKANVVADALSQKGYCSSLCVRGIPPELNQQLEALNLSVISHGFLAALEAKPTLLDQIREAQKNDPDMHGILKNMKQGKAAGFTKDEHGTLWNGNRVCILDDKELKQLILQEAHESPYSSHPGSTKMYLDLKEKY

SEQ ID NO: 140367 - protein, 317 aa, Oryza sativa
  Clone ID: PAT_MRT4530_41571C.1.pep
MSMTNLRRRLHHGDVDGRKNEHVDISSVDSLNEPLLGKSSSDTGGSEVYDPRRQDLWDDDRKKEQLHWSFLFSNLIAQWAQWLANIIVGSGSLFGRLFPFSLDNQNSSPVYLSPLQEDRLNTLRSRLQIPFDGSRVEHQDALRQLWRLAYPNRDIPPLKSELWKEMGWQGTDPSTDFRGGGFISLENLIFFARNYPGSFQALLNKVQGQRADWEYPFAVAGINISFMLIQMLDLQSSVPSSKSGVRFVELLGRDENAFDHLYCIAFRLLDAQWLVKRASYMEFNEVLKSTRTQLERELVLEDVLEVKDLPSYTMLDK

SEQ ID NO: 140368 - protein, 1378 aa, Oryza sativa
  Clone ID: PAT_MRT4530_41572C.1.pep
MVEAYDTGRINFHHMMVTTRRSAATGEGSHPEGSNHNNHGSPPPPPPPPPPPPPDTNPILTQILAQQANMMAAFLHHIQTPPQHNAPPPPPPPPQHSKLAEFLHIRPPTFSSSNNPVDALDWLHAVGKKLDTVQCNDEEKVIFATHQLQGPASLWWDHFQAMQPEGQPITWARFTAAFQRTHVPAGVMALKKREFRELKQGNRSVMEYLHEFNNLAWYALEDVREDEEKQEKFLVGMDPELSVRLVSGDYPDFQLVVDKSIRLEAKHKELESHKRRLANFRNQQGANQRIRYTNPYPGGSSSQQQQQQPRPPQQQQNQQGNRAPRPPAPAVQPSHGRRDVQEDVQTTPDVIIGTFFIHSIPATILFDSGASHSFISVQFVGRNQLGLERLRNSLLITTPGGAMTAKYYSPAVPIEIQGIPFPSDLILLDTKDLDVILGMNWLTQFQGVVDCARRTVTVYRKPDQPVVFFAHPTPTGSSVLHQLGLSEIPVVSEFGDVFPEELPGMPPKREIEFRIDLAPGTTPLYKRPYRMAANELAEVKKQLEELKEKGYIQPSTSPWGAPVIFVEKKDKTKRMCVDYRALNEVYKKQLCIREEDIPKTAFTTRYGLYEFTVMSFGLTNAPAFFMNLMNKVFMEYLDKFVVVFIDDILVYSQSEEDHHQHLRLVLGKLWEHQLYAKLSKCEFWLSEVKFLGHVISVKGVAVDPETVTAVTDWKQPKTVTQLRPHEGNYPTHDLEVAAMVHALKIWRHYLIGNRCQIYTDYKSLKYIFTQSELNFRQRRWLELIKDYDVGIHYHPGKANVVADALSRKGHCSTLCVRGIPPEFNQQLEALNLSVVSHGFLAALEAKPTLLDQIREAQKNDPDMHGILKKMKQGKAAGFTEDEHGTLLNGNRVCVTDDKELKKLILQEAHESPYSIHPGSTKMYLDLKEKYWWVSMKREIAEFVALCDVCQRVKAEHQRPAGLLQPLQVPEWKWDEIGMDFITRLPKTQGGYDSIWVVVDRLTKVARFIPVKTTYGGNKLAVKTTYGGNKLAELYFARIVSLHGNPKKIVSDRGSQFTSHFWKKLQEELATRLNFSTAYHPQTDGQTERLNQVLEVMLRACVLDFGKTWDKSLPYAEFSYNNSYQTSIQLAPYEALYGRKCRTPLLWDQVGESQVFGIDILRDVEAKSQQKSYADNRRRDLEFAVDDFVYLRVTPLWGVHRFQTKGKLAPRYVGPFCIITRRGEVAYQLELPASLGNVHDVFHVSQLKKCLRVLSEQADSEQIEVREDLTYVEKPVKILDTMERRTRNWVIRLCKVQWSNHAEEEATWEREDELPRPFLPLAALSSRRNRARAIALSLRRHRRARVRRRRRPGPLPTSASSPPASPHCHRPRPPLRFGP

SEQ ID NO: 140369 - protein, 666 aa, Oryza sativa
  unsure (1)..(666): unsure at all Xaa locations
  Clone ID: PAT_MRT4530_41573C.1.pep
SSVSCLLQREQHREGERQGAAVSVADGRNASSEDDATIMHLARMVEAYDTGRINFHHMVRRGLVEDNMKILELRXENLQLKDLDAVEAQLCQLKIAQGEICRPKRRRVCRSQKITARKSTSRPELVRQFLAWTCFVETPCVEPAPLVPXEEGASGVGSTEDVLLLTFRPGPSQKRSAATGEGSHPEGSNHNNHGSPPPPPPPPPPPPPDTNPILTQILAQQANMMAAFLHHIQTPPQHNAPPPPPPPPQHSKLAEFLHIRPPTFSSSNNPVDALDWLHAVGKKLDTVQCNDEEKVIFATHQLQGPASLWWDHFQAMQPEGQPITWARFTAAFQRTHVPAGVMALKKREFRELKQGNRSVMEYLHEFNNLAWYALEDVREDEEKQEKFLVGMDPELSVRLVSGDYPDFQLVVDKSIRLEAKHKELESHKRRLANFRNQQGANQRIRYTNPYPGGSSSQQQQQQPRPVPXPQFVVRVPQPQQQQNQQGNRAPRPPAPAVQPSHGRRDVQGQPRLCFNCLEPGHFADKFPKPRRXEGQAPPRPNNGGKDATRGRVNHVTAEDVQTTPDVIIGTFFIHSIPATILFDSGASHSFISVQFVGRNQLGLERLRNSLLITTPGGAMTAKYYSPAVPIEIQGIPFPSDLILIDTKDLDVILGMNXLTQFRGVVD

SEQ ID NO: 140370 - protein, 445 aa, Oryza sativa
  Clone ID: PAT_MRT4530_41574C.1.pep
MRKKPARAVPEWLNSPLWSAPPPSSSSPSPPVPPDPYGADLSPPPPPPPKPPPTVPPPSYEQAVGSSRRARSEAGWEEEEEEDGEVGGGAALRAHLLADFKLALSKKVVNMGELRRLACLGVPDGGAAVRPLVWKLLLGYLPTERAFWPHELEKKRSQYSAYKDEFLLNPSEKIRRFEESKLLRKKELNSDKIGLLPRAKVTNEEHPLSFGKSSLWNQYFQESEILEQIDRDVKRTHPEMPFFSAKANQESLRRVLIIFSKLNPTIRYVQGMNEVLAPLFYVFKNDPDTSNSASAEADTFFCFVELLSGFKDNYCKHLDNSQVGIRSTLSKLSQLLKRHDEELWRHMEITTKVYPQYYAFRWITLLLTMEFSFNVCIHIWDAILGDPEGPPDTLLRICCAMLILVRRRLLAGDFTANIQLLQHYPPTNIDHLLHIANRLRGSVAS

SEQ ID NO: 140371 - protein, 1047 aa, Oryza sativa
  Clone ID: PAT_MRT4530_41575C.1.pep
MKYGGVFAPKFITSGNSAPLVSDRSYAQIVISAIPVKSAFQRLQFSLGSKNSSDVSIDRPLLTVGTVCARAIEPIFVMGLFIVGHPWSHHDDPRGNLRVPRADLTIPQRLAKRHEEFCLALVELELPEQDWDHHRELILGHILGERLFEMRSVMHRDAYMFPLDFIEWEHLNLATASFGQLTYWAKFKDIDSVPRKIVLHDPVGPIGGGESWTISVFILEGGIINMPPEEDLPPAGPQPNSNNDGDGNDLDVGNIWQMGQPVGAENTRWPESSVLHQLGLSEIPVVSEFGDVFPEELPGMPPKREIEFRIDLAPGTTPLYKRPYRMAANELAEVKKQLEELKEKGKERQDKEDLKGATVFSKIDLRSGYHQLRIREEDIPKTAFTTRYGLYEFTVMSFGLTNTPAFFMNLMNMVFMEYLDKFVVVFINDILVYSQSEEDHQQLLRLVLGKLREHQLYAELSNCEFWLSEVMFLGHVISAKGVAVDPETVTAVTDWKQPKTVTQVRSFLGLAGYYRRFIKNFSKIARPMTQLLKKEEQFVWSPQCERAFQTLKEKVVSSPVLILVDTRKDFLVYCDASRQGLGCVLMQEGHVVAYASRQLRPHEGNYPTHDLELAAVVHVLKIWRHYLIGNHCEIYTDHKSLKYIFTQSDLNLRQKRYHGFLAALEAKPTLLDQIREAQKNDPDMHGILKNMKQGKAAGFMEDEHGTLWNRNRVCVPDDKEVKQLILQEAHESPYSIHLGSTKMYLDLKEKYWWVSMKRQISEFVALCDVPEWKWDEIGMDFITGLPKTQGGYDSIWVVVDRQTKLARFIPVRTTYGGNKLAELYFARIVSVHGIPKKIVSDRGSQFTSHFWKKPQEELGTRLNFSTAYHPQIDGQTERLNQTPLLWGQVGESQVFGTDIVREGEAKVRTIRDNLKVAKSLQKSYADNRRRDLEFGVDDFVYLRVTPLRGVHRFQTKGKLAPRYVGPFRIIARRGEVAYQLELPASSGNVHDVFHVSQLKKCLRVPSEQADSEQIEVREALTYVEKPVKILDTMERRTRNRVIRYCKV

SEQ ID NO: 140372 - protein, 1370 aa, Oryza sativa
  Clone ID: PAT_MRT4530_41576C.1.pep
MGWELCHVLRPYAVVMAANLNRRGLDLTGFALELRGMCVVLGYPHGVDYQGKRLPEQDGDDAEPRAAWEVTAMILTGSPKRTSLAVTAGRDSFPATCQNAALLAIGTLHQRYPDELQHSPYRYYPRRGGARDYATFQDASSEDDATIMHLARMVEAYDAARIDFYRMARRGLVENNMKILELRQENLQLKDLDAMEAQLCQLKIAQGEICRPKRRRNPPQHNAPPPPPPPPQHSKLAEFLRIRPPTFSSSNNHVDALDWLHAVGKKLDTVQCNDKEKVIFVTHQLQGPASLWWDHFQATQPEGQPITWARFTAAFQRTHVPAGVVALKKREFRELKQGNRSVMEYLHEFNNLARYAPEDVRKDEEKQEKFLAGMDPELSVRLVSGDYPDFQRLVDKSIRLEAKHKELESHKRRLANFRNQQGANQRIRYTNPYLGGSSSQQQQQQPRPVPRPQYVVRVPQPQQQRQNQQGNRAPRPPAPAMQPGQGRKDAQGQQRLCFNCFEPGHFADKCPKPRRQQGPAPKPRRQPRRQQGPAPPGPNNGGKDATRGRVNHVTAEDVLTTPDVILDTFFIHSIPATILLDSGASHSFISVQFVGRNQLRVAKLRSSLLITTPGGAMTAKYYSPTIPIEIQGISFPSDLILLDTKDLDVILGKNWPDQPVVFFAHPTPTGNSVLHQLGLSEIPVASKFSDVFPEELPGMPPKREIEFRIDLAPGTTPMYKRPYRMAANELAEVKKQLEGLKEKGYIRPSTSPWGAPVIFVEKKDKTKRMCVDYRALNEVTIKNKYPLPRIDDLFDQLKGASVFSKIDLRSGYHQLRIREEDIPKTAFTTRYGLYEFTVMSFGLTNAPAFFMNLMNKVFMEYLDKFVVVFIDDILVYSQSEKEHQQHLRLVLGKLREHQLYAKLSKCEFWLSEVKFLGHVISAKGVAVAPETVTAVTDWKQPKTVTQVHSFLGLAGYYRRFIENFSKIARPMTQLRKEEKFVWSPQCERAFQTLKEKLVSSPVLILPDTRKDFLVYCEASRQGLGCVLMQEGHVVAYASRQLRPHEGNYPTHDLELAAVRRWLELIKDYDVGIHYHPGKANVVADALSRKGHCNALCVRGIPPELNQQLEALNLSVVSHGFLAALEAKPTLLDHIRKAQKNDPDIQEILKNMKQGKATGFTEDEHGTLWNGNRVCVPDNKELKQLILQEALMLRACVLDFGRTWDKSLPYAEFSYNNSYQASIQMAPYEALYGRKCRTPLLWDQVGESQVFGTDILREAEAKVRTIRDNLKVAQSRQKMDDFVYLRVTPQRGVHRFQTKGKLAPRYVGPFRIIARRGEVAYQLELPTSLGNVHDVFHVSQLKKCLRVPSEQADSEQIDVREACEDSGHNGA

SEQ ID NO: 140373 - protein, 1322 aa, Oryza sativa
  Clone ID: PAT_MRT4530_41577C.1.pep
MRRMRGRGRRGPEKVGAWARRRLRWRLRRRLEEGDGPDRGAPPVSDPGGEEGGSRLGWASAYRPVQREEGGKGEWAGGPNEGKRKEKGKRRKKDFPGIKYCLCSFLKDGRQPQPSWSGSDWLRFVTVGHVHCPGISAWSGLPGQEASPRRLGGHCGDPHRLSREDFVGSHRGWRLFPRRLPERRAPRHALFTNAIRASCSTRPTATTLVVEEPATTPCSGMLARRMTLPSCTWCAWWRQSCGAWLYRCVSNDEEKVIFATHQLQGPASLWWDHFQAMQPEGQPITWARFTAAFRRTHVPAGVVALKKREFRELKQGNRSVMEYLHEFNNLARYAPEDVREDEEKQEKFLAGMDSELSVCLVFGDYLDFQRLVAKSIRLEAKHKELELHKRRLANFRNQQVANQRIRYNNPYPGGSSSQQQQQQPRPAPRPQFVPVHFADKCPKPRRQEGQAPPRRNNGGKDATRGRVNHVTAEDVQATPDVIIGVVDCARRTVTMYRKPDQPVVFFAPPTPTGSSVLHQLGLTEIPVVSEFGDVFPEELPSMPPNQEIEFRIDLAPGTTPLYKRPYRMAASELAEVKKQLEELKEKGYIRPSTSPWGAPVIFVEKKDKTKRMCVDYRALNEVTIKNKYPLPRIDDLFDQLKGATVFSKIDLRSGYHQLRIREEDIPKTAFTTRYGLYEFIVMSFGLTNAPAFFMNLMNKVFMEYLDKFVVVIIDNILVYSQSEEDHQQHLRLVLGKLREHQLYAKLSKCEFWLSEMKFLGHVISAKGVAVDPETVIAVTDWKQPKTVTQVRSFLGLAGYYRRFIENFSKIARPMTQLLKNEEEFVWSPQCERAFQTLKEKLVSSPVLILPDTRKDFLVYCDASRQGLGCVLIQEGHVVAYASRQLRPHEGNYPTHDLELSTVRRWLQLIKDYDVGIHYHPGKANVVADALSRQGHCSTLCVRGIPPELNQQLEALNLSIVSHGFLAALEAKPTLLDQIREAQKNDPDMHGILKNMKQGKAAGFTEDEHGTLWNGNRVCVPDNKELKQLILQEAHESPYSIHPGSTKMYLDLKEQYWWVSMKREIAEFVALCDVARFISVKTTYGGNKLAELYFARITDGQTKHLNQVLEDMLRACVLDFGKSWDKSLPYAEFSYNNSYQASVQMAPYEALYGRKCRTPLLWDQVGESQVFGTDILREAEAKVRTIRDNLKVAQSRQKSYADNRRRNLEFAVDDFVYLRVTPLRGVHRFQTKGKLAPRYVGPFRIIARRGEVAYQLELPASLGNVHDVFHVSQLKKCLRVPSEQADSEQIEVREDLTYVEKPVKILDTIERMTRNRVIRFCKL

SEQ ID NO: 140374 - protein, 54 aa, Oryza sativa
  Clone ID: PAT_MRT4530_41578C.1.pep
SKWVCLCIMGIHLSSAHSSINFIIINNFITYQNLLIFLFPFYVPKYFISLTIIL

SEQ ID NO: 140375 - protein, 1481 aa, Oryza sativa
  unsure (1)..(1481): unsure at all Xaa locations
  Clone ID: PAT_MRT4530_41579C.1.pep
MDISRTNECYTSRGPVVEMSWHRAGVLLLGAQPWLPVSGILAVARVGSMYTSDQSKSIRIAVPSVMGKPSNVXMADNLNRRGLDLTGFALELWGMCVVLGYSHGVDYQGKKLPEQDDDDAEPGAAWEVTTVILTGSPERTSLAVTAGGDSFPAACQNAALLATGTLHQRYPDGXELQHSPYRYHPRRGGARDYAAFRDASSEDDATIMHLALMVEAYDTAHIDFHHMVRRGLVEKNMKVLELRQENLXLKKDLDAVEAQLCXLKIAQGQVCHPKRRRVCRSQKITARKSTSRPELVRXSLAWTCFVETPCAEPAPLVPQEEGASGVGSTEDVLLLTFCPGPSKSAATGEGSHPEGSNHNNHGSPPPSPPPPPPPPPPPYTNPILTQILAQQANMMAAFLHHIQNPPQPNAPPPPPPPQHSKLAEFHRIRPPTFSSSNNPVDALDWLHAVGKKLDTVQCNVEEKVIFATHQLQGPASLWWDHFQATXPEGQPITWARFTAAFRRTHVPAGVMALKKREFQELKQGNRSVMEYLHEFNNLARYAPEDVHEDEEKQKKFLAGMDLELSVRLVSGDYPDFQRLVDKSIRLEAKHKELESHKRRLANFRNQXGANQRIRYTNPYPGGSSSQQQQQQQPRPAPXPQFVVRVPQPQQQQNQQGNRAPRSPAPAVQPSQGRRDVQGQPRLCFNCFEPGHFTDKCPKPRRQQGQAPPHPNNGGKDATRGRVNHVTTEDVLTTPDVIIGTFFIHSIPATILFDSGASHSFISVQFKGRNQLGVAKLRSSLLFTTPRGAMXAKYYSPAVPIENXGIPFPSNLILLDTKDLDVILGMNWLTXIXGVVDCARRTVTMYRKPDLRVVFFAHPTPTGSILRQLGLSEILVANEFGDVFPEELPGMPPXREIEFRIDLALGTTPMYKRPYRMAANELAEVKKQLEELKEKGYIRPSTSPWGAPVIFVEKKDMTNRMCVDYRALNEVTIKNKYPLPRIDDLFDQLKGATVFSKIDLRFGYHQLRIREEDIPKTAFTTRYGLYEFTVMSFGLTNAPAFFMNLMNKVFMEYLDKFVVVFIDDILVYSQSEEEHQQHLRLVLGKLREHQLYGKLSKCEFWLSEVKFLGHVISAKGVAVDLEIVTAVIGXQQPKTVTQVRSFLGLAGYYRRFIENLSKIARPMTQLLKKEQKFVWSPXCERAFQTLKEKLVSSPVLILLDTRKDFLVYCDASRQGLGCVLMQEGHVVAYASRQRXPYEGNYPIHDLELAAVVHALKIWRHYLIGNRYEIYTNHKSLEYIFTQSDLNLRKRRWLELIKDYDVGIHYHPDKANVVADALSRKGHCSTLCVRGIPPELNQQLEXNLSVVSHGFLAALEAKPTLLDQIREAQKNDPDMHGILKNMKQGKAAGFTEDEHGTLWNRNRVCVPGDKELKXLILXEAHESPYSIHPSSTKMYLDLKEKYCVLKRSSNDRPDTSNLXRYQNGNGMKSHLIYYLELLFKHYV

SEQ ID NO: 140376 - protein, 195 aa, Oryza sativa
  Clone ID: PAT_MRT4530_4157C.1.pep
MAKLHQWPVLLLAAVIVLAASFAVPASAARRRAVRLHLYMHDIAGETAVQVVKGTGPLHPSMPPGNRHFGDTTVMDDLLTEGPSLDSNPVGRAQGSYVLAGLVDPVVVVTATFKLTHGPYNGSTLVIAGRDEVLAEVRELAVVGGTGKLRRASGHVLWRTLEVLEGAHYVLELDVYASLPATAAAAASALALATN

SEQ ID NO: 140377 - protein, 285 aa, Oryza sativa
  Clone ID: PAT_MRT4530_41580C.1.pep
MMASMAALLQRLLVVVNQVDPGAPGFWREFLVGMLKPVAATAVVAMAVALSFTQRLGLEGEMLYAMARAFLQLSVIGFVLQFIFTQKSAAWILLAYLFMVTVAGYTAGQRARHVPRGKHIAAVSILAGTSVTMALLVALRVFPFTPRYIIPVAGMMVGNAMTVTGVTMKKLREDVGMQRGVVETALALGATPRQATARQVRRSLVIALSPVIDNAKTVGLIALPGAMTGLIMGGASPLEAIQLQIVVMNMLMGASTVSSILSTYLCWPAFFTGAFQLNDAVFAAD

SEQ ID NO: 140378 - protein, 901 aa, Oryza sativa
  unsure (1)..(901): unsure at all Xaa locations
  Clone ID: PAT_MRT4530_41581C.1.pep
MTAKYYSPVVPIEIQGIPFPLDLILLDTKDLDVILKMNWLTQFQGVVDCARRTVTVYQKPDQPVVFFAHPTPTGSSVLHQLGLSEIPVVSEFGMPPKREIEFRIDLAPGTTPLYKRPYRMAANELAKVKKQLEELKEKGYIRPSTSPWGAPVTFVEKKDKTKRMCVDYRALNEVTIKNKYPLPQIDDLFDQLKGATVFSKIDLRSGYHQLRIREEDIPKTAFTTRYGLYEFTVMSFGLTNAPAFFMNLMNKVFMEYLDKFVVVFIDDILVYSQSEEDHQQHLRLVLXKLREHXLYAKLSKCEFWLSEVKFLGHVISAKGVAVDPETVTAVTDLKQPKSLLKKEEKFVWSPQCERAFQTLKERLVSSLVLILPDTRKDFLVYCDASRQGLGCVLMQEGHVLTAVVHALKIWRRYLIGNHCEIYTDHKSLKYIFTQPDLNLRLRRWLELIKDYDVGIHYHPSKANVVADALSRKGHCSTLCVRGIPPELNQQLEALNLSVVSHGFLAALEAKPTLLDQIREAQKNYPDMHGILKNMKQGKAAGFMEDEHGTLWNGNTKMYLDMKEKYWWVSMKREITEFVALCEVCQHVKAEHQRPAGLLQPLQVPEWKWDEIGMDFITGLPKTQGGYDSIWVVVDRLTKVARFIPVKTTYGGNKLDELYFARITWDKSLPYAEFSYNNSYRASIQMAPYEALYGRKCRTPLLWDQVGESQVFGTDILREAEAKVRTIRDNLKVAQSRQKSYADNRRRDLEFAVHDFVYLQVTPLQGVHRFQTKGKLAPRYVGPFRIIARRREVAYQLELPASLGNVHDVFHVLQLKKCLRVPSEQADSVQIEVREDLTYVEKPVKILDTMECRTWNRVIRFCKVLWSNHAKEEATXEHEDELKAAHPDLFVSSSESQGRDSV

SEQ ID NO: 140379 - protein, 116 aa, Oryza sativa
  Clone ID: PAT_MRT4530_41582C.1.pep
RRRVGVVRAAVVVGGDEGGVAATRGVVEERLLPPPPPPAARASSSAAGCPPAPAPPQPPRELCLRRLPPTLPPSQPPAVAASARAALPAPVLARPLPVRGGRRERGGRDWDRDRVE

SEQ ID NO: 140380 - protein, 442 aa, Oryza sativa
  unsure (1)..(442): unsure at all Xaa locations
  Clone ID: PAT_MRT4530_41583C.1.pep
DDEDKDRDRQRRSRHKSRSVWDWLGRLSSSHSREPERRDGXRGRSRNRERSDPRSRSGRSREPSKVRPPLSSSFTSQNNPASDTLLPSPNRLASPCKQPSSVRKPSPDGDATATFSVNLAIPDQAVLQADNCFCSQGQEDVLTLPESHLDPMLHEAAVQYSIYSPDTNSLRAVSPVFVFSSFAEQVTQVHGASVAGQVNNQAQAALLVSQVNNVEEFIDTLSIPLQPPLLPALDANARHPSHVKVTIPAISSAQCHSERLLGMRRAGAKLETFAQEIMSKKFGIIDDHASFDDNIKKIYLQRYKKPLSPSFLKTITELAEKGGCKSIRLKAARKKAAIAPLFAGCVSRKALLLSPSTRVVVAAASVPMSQDNVYLFNWNVRVLNSKAKQDAVKVILQQYGATLVCLQETKIASINNRIILNTLGQRFVRHYVALPADGTRGC

SEQ ID NO: 140381 - protein, 122 aa, Oryza sativa
  Clone ID: PAT_MRT4530_41584C.1.pep
VVSRSCASSSGGVFDARGTPLGSFHGASDCPAVQHIRLSKSFRIARAASPARCEIQLSRALSHSLLYSGHIRLAARCSCAMPPPAPSAPQPRISVCVRRTRKRKGEVGQCIGDLGKKKVRRR

SEQ ID NO: 140382 - protein, 107 aa, Oryza sativa
  Clone ID: PAT_MRT4530_41585C.1.pep
RKGIFKTREQMLAETKDMKEEDLEADNKSRYLSAEMYEHLLVLRRTCLKVSRAGLSTTLNSVDAFCALQAIVALLQYLGGPDKEKLAAISRFPTMSKSASNMLFYTR

SEQ ID NO: 140383 - protein, 688 aa, Oryza sativa
  unsure (1)..(688): unsure at all Xaa locations
  Clone ID: PAT_MRT4530_41586C.1.pep
MALQPFTDDLLAEILLRLPSAASLQRAALASKCWLAVASGPDFLRRFRARHTSSPLLGLFVSHGSSGLPVFHPAATVRSDPDLGAAVLGGDFSLIRVGDGEDPRWQLRDCRNGRLLLCGGRSVAVYDPVSRRRVSIRRPQDDPFSDAYIADCLLHGRGDNGAASFRVVSVQRHGRRMRAAEYNSGTREWSFHPWVENMRRPRRGQAMHAAGIIFWKCEDNFVILLDTLTMEFSMLSLPVSLFQPSKYAIGEMEDGVCCLVCLDGTMDNVHMQVWLLMEEDGGGRRWELEKEMPVSEVLDRHSLVRQVRTVASGLVLVSWDDRYPQFAIDLKNMKVMAEFRCSGETYLFQTPWPPALLVDSEVQPADLAIPLQSAEYVEPLQMIATQNMMKHVNLAAERTDVVNSEGPLDLVLEPHGPLDAQQAMAAEAETLVVTADLKLVRSTEAQNQSVAEKPEIMKGPEVPVSKRSMSRLEKRRGERYESALHKAMERKARYMGGVEQLSTSLGRNYRRSEKPIVVDSSYERYYQCRQRREKPIVVDSRYGKYYQRRQRRPAAGVQGRXTGLNKESPRGLSLNLRNFNNSPVNRNCAEARQCEAAGKSAAGLSLTAWRSSTMFYASSMAMAAAVMELDIEAPMASKSMVQEAGGRRHQRVELGGLLEFELVLMSPLSPSWPTAGATIVLLHAIVSE

SEQ ID NO: 140384 - protein, 84 aa, Oryza sativa
  Clone ID: PAT_MRT4530_41587C.1.pep
MLRNWSFGYYVQDLTEMQVPLIAGSKLSLSIAGANVEPEPTTDRFVDIMLQVDKAESCKYKVSLASQQFVACHQQQGFFMWSLD

SEQ ID NO: 140385 - protein, 155 aa, Oryza sativa
  Clone ID: PAT_MRT4530_41588C.1.pep
MEWWQRAVVVPVKRAWVVVAARLRRKKQYGYACPISHNYLQTACVVTMFVLIQVNRLLISHADRRDGRGVLVKLHDDIQTCAYEDVQFQEKVPVLYFAAVFLLVSEIRTAIISLWGCRHIALTLKKQNNIFSSGEGSKQAEKTLEIPCKKKESTG

SEQ ID NO: 140386 - protein, 85 aa, Oryza sativa
  unsure (1)..(85): unsure at all Xaa locations
  Clone ID: PAT_MRT4530_41589C.1.pep
MSFVISLTPLITIKDAITGNNLFSSWFGMVYSWFGDRSVQPGXWLFRMVGPIQQGMLYSVGLILFNYYLTVLLNSEMFIKCCLCK

SEQ ID NO: 140387 - protein, 122 aa, Oryza sativa
  Clone ID: PAT_MRT4530_4158C.1.pep
MNSLDDVPKPHFVLIPFMAQGHTIPMIDMAHFLAKHGAMVSFITTPVNAVRIQSTIDRARELNIPIRFVPLRLPCAEVGMLDGCENVDQILEKDQVMKMTDAYGMLHKPLVLYSSRAKRPTF

SEQ ID NO: 140388 - protein, 71 aa, Oryza sativa
  Clone ID: PAT_MRT4530_41590C.1.pep
NIFQTSEPKKKKEKLRKRMNGLQNSFARIHVAYPQLDRAPTKSVLTSVVSCTCFPYIPCKTAIMKHTKTAP

SEQ ID NO: 140389 - protein, 248 aa, Oryza sativa
  Clone ID: PAT_MRT4530_41591C.1.pep
HLKRFYAHSVEIKIKADNTPVTEADLFLSQFIIQQLQQLTPTIPVLSEENCAIPLTERANWQEYWIIDPLDGTQQFINRTDQFSIAISLVQHNQPVIGIIYAPILAKTYFAMRTSGAFLQENGIIRPLTPHKIMANNERLRIAMGATNRTTVAQCLQQPLQADIFQYGSSSLKAGLVAEGKADCYIRLGDTGEWDTAAAEVLLNEIGGKIFDLNFQPLSYNQRQHFINPHFVMVADKQADWQKIFQFN

SEQ ID NO: 140390 - protein, 133 aa, Oryza sativa
  unsure (1)..(133): unsure at all Xaa locations
  Clone ID: PAT_MRT4530_41592C.1.pep
KTSSVLTLLFATYENATPSTCTQPMQSRSATAGCPHACRQVRRPMIPSLRHAGASWFQSSRPFVRNVFTSSSRRRRDVSSPHQHDIVTSVRDAFSSLSEDEICPSXGLFPSCQIGSSVRGAFPLLSRIEVIRS

SEQ ID NO: 140391 - protein, 80 aa, Oryza sativa
  Clone ID: PAT_MRT4530_41593C.1.pep
MAFPDTGQNMSPAEIGQCEQAASREQGAGRDSLCRCVQNGSSGLRKRWIDANAKQESEVIEYVKLPQARYHVAVEYSLRP

SEQ ID NO: 140392 - protein, 1040 aa, Oryza sativa
  unsure (1)..(1040): unsure at all Xaa locations
  Clone ID: PAT_MRT4530_41594C.1.pep
MVFVRAPDGRTHHVDLDPSTATLADLTASASRVCGGVPPEQLRLYLAHRRLLPAEPSPLLSSLRVSASSSLLLHLPLLGGMTGPTTTPAAPPPPPXPPSAQPPARPARYDFLNSKPPPNYVAGLGRGATGFTTRSDIGPARAAPDLPDRSAAAAAAPAVGRGRGKPPGDDDGDDDGGDEEKGYDENQKFDEFEGNDAGLFSNADYDDDDREADAVWESIDQRMDSRRKDRREARLKQEIEKYRASNPKITEQFADLKRKLVDLSAQEWESIPEIGDYSLRNKKKRFESFVPVPDTLLEKARQEQEHVTALDPKSRAAGGTETPWAQTPVTDLTAVGEGRGTVLSLKLDRLSDSVSGLTVVDPKGYLTDLKSMKITSDAEISDIKKARLLLKSVTQTNPKHPPGWIAAARLEEVAGKLQVARQLIQRGCEECPTNEDVWVEACRLASPDEAKAVIARGVKAIPNSVKLWLQAAKLETSDLNKSRVLRKGLEHIPDSVRLWKAVVELANEEDARLLLHRAVECCPLHVELWLALARLETYDQAKKVLNKAREKLPKEPAIWITAAKLEEANGNTQSVIKVIERSIKTLQREGLDIDREAWLKEAEAAERAGSVLTCQAIVKSTIGIGVDEEDRKRTWVADAEECKKRGSIETARAIYAHALSVFVSKKSIWLKAAQLEKSHGTKESLYNLLRKAVTYNPRAEVLWLMSAKEKWLAGDVPAARAILQEAYASLPNSEEIWLAAFKLEFENNEPERARILLSKARERGGTERVWMKSAIVERELGNVDEERKLLEEGLKLFPSFFKLWLMLGQMEDRLGHGSKAKEVYENALKHCPSCIPLWLSLANLEEKINGLSKSRAVLTMARKKNPATPELWLAAVRAELRHGNKKEADALLAKALQECPTSGILWAAAIEMVPRPQRKAKSSDAIKRCDHDPHVIAAVAKLFWHDRKVDKARSWLNRAVTLAPDIGDFWALYYKFELQHGNADTQKDVLQRCVAAEPKHGERWQAITKAVENSHLSIEALLKKAVLALGQEENPNAADP

SEQ ID NO: 140393 - protein, 36 aa, Oryza sativa
  Clone ID: PAT_MRT4530_41595C.1.pep
SSKKKLPQVDRFLPGKNPRNMYWLKHSASERLAAFI

SEQ ID NO: 140394 - protein, 29 aa, Oryza sativa
  Clone ID: PAT_MRT4530_41596C.1.pep
CLPQRGNSDLSCRVVIRGYDQLRVVSKCV

SEQ ID NO: 140395 - protein, 206 aa, Oryza sativa
  Clone ID: PAT_MRT4530_41597C.1.pep
MVSPDMIRNVVGIVGNVISFGLFLSPVPTFWQIIKNKNKNKKKMEVVLAAEALFMAAVALGVLLGVHTHQRRSLIVGILCVIFDTIMYSSPLTVMSQVVKTKSVEYMPLLLSVVSFLNGLYWTSYTLIRFDIFITIPNGLGVLFAAVQLILYVIYYRTTPKKQNKNLELPTVTPVAKDTSVGPISKDNDLNGSTASHVTIDITIQP

SEQ ID NO: 140396 - protein, 36 aa, Oryza sativa
  Clone ID: PAT_MRT4530_41598C.1.pep
MAEAIQRTRSQLADRSRRAVLDKDLVDPRTSVPQYP

SEQ ID NO: 140397 - protein, 137 aa, Oryza sativa
  Clone ID: PAT_MRT4530_41599C.1.pep
PRVRRRRRRRRRWRWRRRELARVLEPRYPRVRRVQHRDQEPPAEARRVGVPAVRRRRAAAGAGVPRPPVAPRRPAARRPRRRRRRRRRGSAGARPRPRAPAGVLVAGLRRRPRRALRLVPRALGAAHRRLPRRHLGL

SEQ ID NO: 140398 - protein, 192 aa, Oryza sativa
  Clone ID: PAT_MRT4530_4159C.1.pep
MPSSSRTETVKNALSRWARRVGETTRKAEDLSRNTWQHLRTAPSIGEAAVGRIAQGTKVLAEGGHDRIFRQAFSAPPDEQLRKSYACYLSTSAGPVMGILYLSTARVAFCSDSPLSYEAGGGSKEWSYYKVAIPLHRLRSASPSASKQRPAEKFIQLVSVDRHEFWLMGFVNYDSAVKHLQEALSGFHHLQA

SEQ ID NO: 140399 - protein, 67 aa, Oryza sativa
  Clone ID: PAT_MRT4530_415C.1.pep
MARAATVAAVAAACVLALAAGAGQAPASWERERELGIGGINNPRMNGTKYRLYLGLDPYEHRILSFD

SEQ ID NO: 140400 - protein, 95 aa, Oryza sativa
  Clone ID: PAT_MRT4530_41600C.1.pep
KKKSISSWENKKNKKEKPPPPHGGFHFRQHSGKVYSTIPKRPIIWKKGRGVKRAQKTPPRKNLGVGLKTEKGSMEAQKKQLPIFKQGDETFLPKT

SEQ ID NO: 140401 - protein, 50 aa, Oryza sativa
  unsure (1)..(50): unsure at all Xaa locations
  Clone ID: PAT_MRT4530_41601C.1.pep
MKYNALGHQKTEVRMCQDDYHYSVMGSSSPGCRMHTTITKXQLNISGRFP

SEQ ID NO: 140402 - protein, 180 aa, Oryza sativa
  Clone ID: PAT_MRT4530_41602C.1.pep
DMIAHIIEMEADYINTSHPNFIGGSKAVEQAQQQVRSSRLAAVARREGVDADKSQASDKTQKPRALLGRTGVNGVVTDHLQGLRPAAEAERPGSSGSGSTSFWGSISIFSSTSDDRTHSSAKDNSSNKSYTASTSHLEHSLSTIQLREPPVVLKPSESQSEQEALEIAITKLLLKSYYNI

SEQ ID NO: 140403 - protein, 184 aa, Oryza sativa
  unsure (1)..(184): unsure at all Xaa locations
  Clone ID: PAT_MRT4530_41603C.1.pep
MRGMGDDGMGPMAMAPPRSGHATAAAPPPPQHKMAMMMHMTFFWSDRAVVLIRGWPGERGAGMYALCLLFVLALAALTEGLSVLSRRLARRGGGAASSDGGRXRRRRRRPRXLLTAVHAARMGMAYLVMLAVMSFNVGVLLAAVAGHALGFLLARSRVRPAARDGGGGVACEHGGLPPADGSKT

SEQ ID NO: 140404 - protein, 796 aa, Oryza sativa
  unsure (1)..(796): unsure at all Xaa locations
  Clone ID: PAT_MRT4530_41604C.1.pep
MEDGIYSSSAPPSTATAAAAAAAVGSSVIPIVNKLQDIFSQLGSSSTIDLPQVAVVGSQSSGKSSVLEALVGRDFLPRGSDICTRRPLVLQLVHQPRRPADAEADEWGEFLHLPGRRFYDFREIRREIQAETDREAGGNKGVSDKQIRLKIYSPNVLNITLVDLPGITKVPVGDQPTDIEARIRTMILSYIKHKTCIILAVSPANADLSNSDALQIARNADPDGSRTIGVITKLDIMDRGTDARNFLLGNVIPLRLGYVGVVNRSQXRISNQISVSRKLWRAKKVSSVIIXAYNGLAQYCGIPQLAKKLNQILVQHIKTVLPGLKSRISSQLTTTAKELSFYGDPVESKAGQGAKLLNILAKYCEAFSSMDVDPCEDVTDEDIRMAIQNATGPRSALFVPEVPFEVLVRRQISRLLDPSLQCAGFIYDELVKMSHRCLAVELQQFPLLRRSMDEVIGRFLRDGLKPAQDMIAHIIEMEADYINTSHPNFIGGSKAVEQAQQQVRSSRLAAVARRALTPGISSFDFVIHYQGLRPAAEAERPWASGSGSTSFWGSISIFSSTSDDRTHSSAKDNSSNKSYTASTSHLEHSLSTIQLREPPVVLKPSESQSEQEALEIAITKLLLKSYYNIVRKNVEDFVPKAIMHFLVNHTKRELHNYLITKLYRDDLFADMLREPDEITIKRRQIRDTLKVLQQAYKTLDEIPLEADTVERGYSLDADATGLPRAHGLSSSFQDGSSPYSTPKQPRSRKSSHSGEQLPFNPDASVLRPNEAMTWSEFCPFAPFVQYISLPNRFIIK

SEQ ID NO: 140405 - protein, 121 aa, Oryza sativa
  Clone ID: PAT_MRT4530_41605C.1.pep
ESLKGKQSLKAAELQDGDIVCVQRKKDAGSQNFLEKRLSSDTRSTDDTSRKTENFEDAKEYYEFLVNRKTVKFNAHPTKCDPNEYPPFEMVLNSEAFAQFLCKLVVRHLSLVPNSARGREE

SEQ ID NO: 140406 - protein, 298 aa, Oryza sativa
  Clone ID: PAT_MRT4530_41606C.1.pep
MESAGSGSGHAATPVRYVALPPPRGVRDGGGWNVLVPESMASEWTVAHVRGVVRVASRGGGAPEVSVDMAALQAALNGRRRGDDDPDLHLRPERGGGRDALTPVRYVALLLPRGVRDGGWNILVPEAMASEWTVVHVPAAAGVVRVASRGGGAPEVSVNMAALQAALNGPRRGDDPDHLHLRSGHSGVGGGVAERGGGGGAGGPCYVPVVFVLNTSKEAEKKEHQARMISLLMLSTFAVYLLYAMQHISKDTFLTVELLQFVGHIVMWAVASRVARSTNRSEPRLVPRSFITVTKKNA

SEQ ID NO: 140407 - protein, 98 aa, Oryza sativa
  Clone ID: PAT_MRT4530_41607C.1.pep
MVDADGISTPALPCLRHPICSCSCSRRHLGRQDAGPRTDDARTLLLLLMSGGERKLATVGSTVKELRALGPGGDGCNALAGVGAGSTASSANGGERPK

SEQ ID NO: 140408 - protein, 109 aa, Oryza sativa
  unsure (1)..(109): unsure at all Xaa locations
  Clone ID: PAT_MRT4530_41608C.1.pep
RTVSPPPSSPPPDPSPQPSPSPDPPPPPSTPPDLLPPPSPPLDPPPPSPPPPPSSSPPPPPSSSPPPPPSPEPXPPPSSSPPPPPLPSPPPSPEEERASKAAVSRRRSS

SEQ ID NO: 140409 - protein, 288 aa, Oryza sativa
  Clone ID: PAT_MRT4530_41609C.1.pep
MEGKEEDVRLGANRYTERQPIGTAAQGAEEKDYREPPAAPVFEVEELTSWSFYRAGIAEFVATFLFLYISILTVMGVNKSASKCATVGIQGIAWSFGGMIFALVYCTAGISGGHINPAVTFGLFLARKLSLTRAVFYMAMQCLGAICGAGVVKGFQRGLYMGSGGGANAVNPGYTKGDGLGAEIVGTFVLVYTVFSATDAKRNARDSHVPILAPLPIGFAVFLVHLATIPITGTGINPARSLGAAIVYNRAHAWHDHWIFWVGPFIGAALAAIYHVVVIRAIPFKSRD

SEQ ID NO: 140410 - protein, 114 aa, Oryza sativa
  Clone ID: PAT_MRT4530_4160C.1.pep
MVVFFARNQSQAKSNQSFTLHLSSSSQDNQSTCITCCSQDFLDVIIPKTLDLRPWMTGKVTTRRVQTSGTRISFCRINSDIRDDSLAGHRSKNAHQWFTERQLHIVMELQTFSR

SEQ ID NO: 140411 - protein, 119 aa, Oryza sativa
  Clone ID: PAT_MRT4530_41610C.1.pep
NILTWLSLYYFFLYVSFYFFIFLFYFTYFIYYFFIFIFIYFPNFLLLFTIFYFFFTHLLFIFVSFFFFFYSFFFLFYIFLLYIFYHPLSFFLFFYIYYLSLFLIFYYFFIFTIFLFLYY

SEQ ID NO: 140412 - protein, 46 aa, Oryza sativa
  Clone ID: PAT_MRT4530_41611C.1.pep
LLLVHLSVTAQLLHLHARCYGNGMLAEKASRASPFVKQPERRQPWH

SEQ ID NO: 140413 - protein, 99 aa, Oryza sativa
  unsure (1)..(99): unsure at all Xaa locations
  Clone ID: PAT_MRT4530_41612C.1.pep
RDLPTYLPTLGGRDGEERGGGGRAAAAAVRRWVEAGGGRXVMDGXLATELEANGADLNDPXWSAKCXLSXXHXVRXISPSDHLCILAYDYSSLAFTFSF

SEQ ID NO: 140414 - protein, 93 aa, Oryza sativa
  Clone ID: PAT_MRT4530_41613C.1.pep
SSAAAAVSSSVAAPPPTPPDAGATSSPPTPAPPPPRPTPAPPPLDADAAPRPPCPTKSAEWSNRGSRQPKMGWFGPTHGSAEPPSPPLRPGFG

SEQ ID NO: 140415 - protein, 140 aa, Oryza sativa
  unsure (1)..(140): unsure at all Xaa locations
  Clone ID: PAT_MRT4530_41614C.1.pep
QVVPTRDLFLEPRGTSGDGAPPLPSSRPAAALPXPTPTPPPPRSTPAPPPPXPPPRLLLPVAAPPPTPPDAGATSSPPTPAPPPPRPTPAPPPLDADAAPRPPCPTKSVEWSNRGSRQPKMGWFGPAHGSVELGGSAEPP

SEQ ID NO: 140416 - protein, 176 aa, Oryza sativa
  Clone ID: PAT_MRT4530_41615C.1.pep
GRDIYKDKFVYKEGRNMKTILSYFVFFLAILQISHRLVAGQNYEFQSGINHGFVNSRKNLYKHAIPRILTELGELASREDSTTADNNVDLTPKHQSLTASKMETIHVRAKAHINPDEELTTEDYPRPRPNHPSIALSNEEFTTEDYPRPRPNHPGVTLSNEQFTTEDYPRPRPNHP

SEQ ID NO: 140417 - protein, 820 aa, Oryza sativa
  Clone ID: PAT_MRT4530_41616C.1.pep
MESREWMYHWPRFLSPYRNKVSKFIGIAKAHAEENNMSKIICPCADCKNEIAWDFGDAFKVKEHLVTREFMDKYEIWARHGEEQVDGPENVVPTQVKDMVHDDGSVEDKIDLKEMLRHAELEVLMGSARGLNNFEALQKAAKEVLYDESKGCDNMADLWKERLKVWDEYLREYFTVKAIIFVTIKDYPAMFPVSSPIKGKTGCVICLNGTYYRYLPDSNKLVYMRHRRFLRINHWYHKMKAEFDGTEETDPAAKPTSGEKVCAMTEKIVCEFGKVTKKPLKGTKRKKLEKQDDSSKPVDKLPPPFKKHSILFKYLPYWKDLEVRHVIDVMHLEKNVFDNIVGTLLDMPKKTKDGLQLRMDLVEMGIGEELHPQEVPQMVALGPLYLRQMWSYEHYMAALKGYVRNRAHPEGSMVEGYSIEEVVECCIDYLKDGYAIGVPVPRHEGRLTGRGTIGKKRFVTHDHKSFQETHFSVLHQFAIVQPYIDQHIELIQANNKGRTTEWIMKEHKRLFIDWLRDLDLPEGQTTDEITMKWLACGPSTTAIDDSGEKQSYFGFIEEIWEIDYGHTMQFPIFKCQWVKYPNGVNVDKFGLTVVDLASVGHKDDPGADGPLRSHDSKSKNENKEKFIVTIIRGGKERAKLRDDDPQKAAELAGPTYFATDDCPKKYEHGKALLPEWALNEGPWEMKRLHTFYMEASKKGLGNITARSPADCFGEEGYMWLDFSDLHAIYRRDKMDVNYVSVWCMMQYMDARKKKEPIGFLDPTWICQTQHTCHKQPRGTVLCGYYTCEFLRVNGRYWTNVEDLSRLECRTSFDDTGIKNV

SEQ ID NO: 140418 - protein, 130 aa, Oryza sativa
  Clone ID: PAT_MRT4530_41617C.1.pep
WSFFLSCCSPSPALRRWPTSSPTVSPPSEAAGRRRTALWWPPTRPSCLPPRSSSTPSCSPSSTSPTASSSSPTRSSSGAPPPPGCRRPSTRHSTRPSPSSPPPSPSSSSSTASRRWRATAAFRHRPTAAP

SEQ ID NO: 140419 - protein, 555 aa, Oryza sativa
  Clone ID: PAT_MRT4530_41618C.1.pep
MADSTKGTEEKGLGKGEPSLAVVVAPEPTVPPEDSYDSDVADEDDEYSSPINPCPSPSLKRRKKGDGEEGDKDYIPPKEGETVPWRSKWQPKKKDLSKDDEVPANTTGSKKSERPAKAMKRKGERSVNRKDEGFHVVSHVSPKGEPLAPKTARAKFSSQCGIIVREKIPITVKDWDHKKGFLKPKREKDVLSTALGTPEHGGRVREVTSKMSWKEGFKHDPHKKREAYKDKLRDEGAADFERQMILHVPIGRSGKTLEAAIAIAIPGRTYNEEFIPDAYAKVQPQVVHEGFESYDIDFPNADVRTEIEEVPGLEWDGTEPEIFEDPSTAKDPEVQETTVPEKASTSSKVPRVLRSHDSKSKDENKEKFKVTVFRGGKERAKLKDDDPQKAAELAGPTYLATDDFPEKMQYMNAKKKKEPIGFLDPTRICQTQHTVRLAQGSDQLKGKTPKEIAEYKKGLHNEKLITVAQYIGRAFLHFQNKRVVMAAYNFNLSPLPRLEHRTSFDDTGIKNVQRDLCHFIHHECCHVKGDFFDPEGALATSDEFKNLREWNTAMT

SEQ ID NO: 140420 - protein, 1307 aa, Oryza sativa
  Clone ID: PAT_MRT4530_41619C.1.pep
MASHFYGMFRQDDPAPAPAWWFQSLAFLGAAYVAGVTLRLLAYVAICLGGPKDLRRYGAWAVITGPTSGIGCAMALELARRGLNLVLVGRDPARLREISGTIRSRHGRVQTKAVVFDLSLASTPDGDQPLRRLREAVAGLDVGVVVNNASEGRPGAVYLHEADVEEWVRMARVNVSAVTEVTAAVLPGMVERGRGGAVVNLGSAASEAIPSFPLYTMYASTKRYVAQFSRSLHVEYANKGIHVQCQTPFFVETTMLAKLEEEVGLSVSPLKVSTDTYARAAVAWIGRGGPLCTPGGLLHQLMWCITAAVPESVLDWIVLRFTTWNRGRDMESREWMYHWPRFLSPYRNEVSKFIGITKAHAEKNNMRKIICPCADFLTQVEDMVHDDGSVEDKIDLEEMLRHAEPEVLMGSAKGLNNFEALQKAAKEVLYDESKGCDSEFTTLRSVLELMRLKVRHGWSDTSFDSLLELLQKMLPRPNSLPSSTYQAKKLICPLSLGVEKIHACVNHCILYRKEYASLDECPTCSASRYKSNSNTGLEPSEATEGRQRKIPQLVMWYLPVKDRIKQIYSNPRDGPRQPGIDIDVFLEPLLEDMADLWKEGLKVWDEYLREYFTVKAIIFVTINDYPAMFSVSGQIKGKTGCVICLNGTYYRYLPGSNKLVYMWHRRFLRINHKYRKMKAEFDGTEETDPAPKPTSGEKVCAITEKIVCEFGKMTKKPSKGTKRKKPEKNTKQGDSKKQDDSSKPDDKLPPPFKKHSIFFKYLPYWKDLKVRHAIDVMHLEKNVFDNIVGTLLDMPKKTKDGLQSRIDLVKMGIREELHPQEGEKNGEVYLPPACFTLTPEEKKSFCNSLRDVRVPIGFSSNISRLVSMKNLSVSGYNSHDCHVLLIVFLAIAIRAIKPELLKVAITRLCYFFNAVSQKVISLEELGNLRTFAHETQYQLEMCFSPSFFDMMEHLIVHIVPQMVALGPLYLHQMWSYERYMAVLKGYVRNRAHPEGSMVEGYSTEEVVECCIDYLKDGYAIGVPVPQHEGRLSGRGTIGKKRFVTHDHKSFQEAHFSVLHQFAIVEPYINQHIELIQANNKGRTTEWIMKEHKRLFIDWLRDLDLPEGQTTDEITMKRLACDPSTTVNSWQGYDINGYSFSTRAQDNKTCTQNSGVRVFAIDEAGEKQSYFGFIEEIWEIDYGHTMQIPIFKCQWVKYPNGVNVDKFGLTVVDLASVGHKDDPWVLANRVEQVFNVKDPSNLKKDIVLPGKQKILGVDGVEDVEDYNQYDSMPLYSQFVQKIKNVETSTQKTVKPYIRTDGVGKNVKG

SEQ ID NO: 140421 - protein, 104 aa, Oryza sativa
  Clone ID: PAT_MRT4530_4161C.1.pep
GRTVFEFTVHGRQFSSWLPPPRIADALDMDEVAASRWPTLTSPWPHWWIARLSYALAQRGVGARRTMVRRAARSSTMARLCPSAARLSKNADVPKDLQRQPLVD

SEQ ID NO: 140422 - protein, 205 aa, Oryza sativa
  Clone ID: PAT_MRT4530_41620C.1.pep
MTVVECCIDYLKDGYAIGVPVPRHEGRLSGKGTIGKKRFITHDHKSFQEAHFSVLHQFAIVEPYIEQHIELIRANNKVNSWQGYDINGYSFSTRARDNKTCTQNSGVRVEWVKYPNGVNVDKFGLTVVDLASVGYKDDSWVLANRVAQVFYVKDPSNFKKDIVLPGKQKILGVDGVEDVEDYNQYDSMPLYSQFVQKIKNVETST

SEQ ID NO: 140423 - protein, 353 aa, Oryza sativa
  Clone ID: PAT_MRT4530_41621C.1.pep
TRPEANDADEKSKESSTPSRIRKLLHSFSFNDKMQQLTCGSPAKKKSTVIRLSYKRTSCDDYEDDSELGESEKYVVRPKGGTTILYRGEKPTSGCWSRIDPSLFKLRSETFLKDKKKCAAPNYAAYYPIGVDLFASHKKVQHIAQHIELPQVKPHDKLPSLLIVNIQMPTYPAAMFLGDSNGEGLSLVLYSKISEYFDKEVSEHFKESIMRFIENESEKVKGFASESTILYRDRLKIMAGLVNPEDLQLSSTERKLVQAYNEKPVLSRPQHNFFEGENYFEVDLDIHRFSYIARKGLESFRERLNNGILDLGLTIQAQKQDELPEQVLCCVRLNKIDFINHGQIPTIVTLDDK

SEQ ID NO: 140424 - protein, 247 aa, Oryza sativa
  unsure (1)..(247): unsure at all Xaa locations
  Clone ID: PAT_MRT4530_41622C.1.pep
PGGEGCTWAATGRTCGCTRGVGLPNTGELGPKRPWLAGLLRRPAAALASGEAWXTSWLVERISVLVWSALAAAAAFAASTVFGTSPSEAGGAEGGGCGAGAEADGAAPTSTMGAEGSAPSPVAISPPASLSFRLATFSFATFFGGIRSQWFRSEVPTVGASCCRSDNCIRRRTWGIYMVALMRRVPVWASGLDMAKSSSFGMHPSPFSLRPGCIWTRGTPAWLFTLRRLCSIVFARDFAPMNLTPRA

SEQ ID NO: 140425 - protein, 168 aa, Oryza sativa
  Clone ID: PAT_MRT4530_41623C.1.pep
MESTIDNILLYRGVDRGWSWWARDYPDFGPGYPHPQKPTNLGSYSSPEKQAHKPWFPFKPRKTSPQERRKKALGLAFWESRHLTTTTPSLLVLVASATRLRRRFLATAAAAATSLARSTEAEWRSARGTSPHAALPGCRLLTPLAGAPHMAPPPAAGARSWEPRTLAA

SEQ ID NO: 140426 - protein, 1011 aa, Oryza sativa
  Clone ID: PAT_MRT4530_41624C.1.pep
MESREWMYHWPRFLSPYRNEVAKFIGIAKVHAEKNNMRKIICPCADCKNEIAWDFDDAFKVNEHLVTRGFMDKYEIWTLHGEEQVDGPENVVPTQVEDMVHNDGSVEDKIDLEEMLRHAELEVLMGLARGLNNFEALQKAAKEVLYDESKGCDSEFTTLRSVLELMKLKVRHGWSDTSFDSLLELLQKMLPRPNSLPSSTYQAKKLICPLLLGVEKIHACVNHCILYRKEYASLDECPTCGASRYKSNSNTGLEPSEAIEGRQRKIPQLVMWYLPVKDRIKQIYSNPRDAELMRWHEEGRAFKGCYHKVVLLFQRSVIEGQIEGRGTIGKKRFVTHDHKSFQEAHFSVLHQFAIVEPYIDQHIELIRANNKGRSTEWIMKEHKRLFIDWLRDLDLPEGETTDEITMKRLACGPSTTVNSWQGYDINGYSFSTRARDNKTCMQNSSVRVETIDEAGEKQSYFGFIEEIWEIDYGHTMQFPIFKCQWVKYPNGVNVDKFGLTFVDLASMGHKDDPWVLANRVAQVFYVKDPSNLKKDIVLPGKQKILGVDGVEDVEDYNQYDRYVNLSNFLDNMLEDGVSVLGDAVDLVILWHKNDISFGLGTDAGEKPVLPKPGLGKPPRPPKRKVTDKADDLEMQKENPVLEVPPDIALPEAAMEIAPPETAMEISVPDVPMEITVAEPEVEFVASVGSDKEEVPGLEWDGTEPEIFEDPSPAKDPEVPRVLRSHDSKSKDASKEKFMLTVFRGGKERAKLRDDDPQKASELAGPTYFATDDCPEKYEHGKALLPEWALKEAPWEMRRLHNFYMEASKKGLGNITARSPADCFGEEGYVWLDFSYLYAIYRRDKMDVNYVGVWCMMQYMDAKKKKEPIDFLDPTRICQTQHTVTLAPGSDQLKGKNPKEIAEYKKGLHKEKLITVAQYIGRAFLHFQNKRVVMAAYHFKVNGRYRTNAEDLPRLECRTSFDDTGITNVQRDLCHFIHHECCHVKRDFFDPEGVLAASDEFKDLREWNTAMP

SEQ ID NO: 140427 - protein, 332 aa, Oryza sativa
  Clone ID: PAT_MRT4530_41625C.1.pep
MTAAAPSSPLDLRAAMGASSSRKADTARRDMESREWMYHWPRFLSPYRNEVSKFIGIAKAHTEKNNMRKIICPCADCKNEIAWDFDDAFKVKEHIVTLGFMDKYEICTRHGEEQVEGPENVVPTQVEDMVHDDGSVEDKIDLEEMLRHAEPRVLMGSARGLNNFEALQKAAKEVLYDESKSCDINSWQVYDINGYSFSTRARDNKTCTQNSGVRVEAIDEAGEKQSYFEFIEEIWEIDYGHTMQFSIFKCQWVKYPNGVNVDKFGLTVVDLACVGHKDDPWVLANCVAQVFCVKDPSNLKKDIMLPGKQKMLGVDRVEDVEDYNQYDSMPTL

SEQ ID NO: 140428 - protein, 276 aa, Oryza sativa
  unsure (1)..(276): unsure at all Xaa locations
  Clone ID: PAT_MRT4530_41626C.1.pep
LTIIFVFACILSTILIITCSHVTMATIDTTVVNIKIKLTKFWNPIRLPATLLTSSGRQICIRAPFWVHEYLMESPPNPLSNGSSLVPRFHLSRRQSXKQGAASVRSPVCSLXESPTYHLNSIPICNSECFYLGLACFFDLLARIRFICTGKINNPQRGVSITKAQHNNVXYRCSGVVNVSSKSXIIINLTKEPANHHLELLQXTSGFIRWYQSFCCLCLVRLEFXFLVTFCTTAVAVVMCLLSSRPTKTESSFCQGSIFLVFRSFCWSVLEMISCI

SEQ ID NO: 140429 - protein, 174 aa, Oryza sativa
  unsure (1)..(174): unsure at all Xaa locations
  Clone ID: PAT_MRT4530_41627C.1.pep
GGQMQYMDTKKKKEXPIGFLDPTRICQTQHTVRLAPGSDQLKGKTAKEIGEYKKGLHKEKLITIAQYIGRAFLHFQNKRVVMCHKQPQGTVLCGYYACEFLRVNGRYRTNAKDMPRLERRTSVEDTGIRNVQRDLCDFIHHECYHVKGDFIDPEGALATSDEFKDLWEWNSAMP

SEQ ID NO: 140430 - protein, 62 aa, Oryza sativa
  Clone ID: PAT_MRT4530_41628C.1.pep
RLAIHCAELASFISLLILSLSSLYHVVGQNVDDATKTLLTVLLAKKKKKKGRPRATSCVPLV

SEQ ID NO: 140431 - protein, 90 aa, Oryza sativa
  Clone ID: PAT_MRT4530_41629C.1.pep
HLHQMWSYERYMTVLKGYVRNRAHPEGSMVEGYSTEEVVECCAPTRGPLHRSAATDRYPAGPSTAPPTSPPLPAAPQPPPPSLSLSRSRP

SEQ ID NO: 140432 - protein, 86 aa, Oryza sativa
  Clone ID: PAT_MRT4530_4162C.1.pep
MGLGSGGGLGLGGSTTRVYGTGGSAVGRPRTAEAMASSSRNDHASGGLHATVVTMEEGIRCLRPWERRIRRRCSYDTYPIVIFTDN

SEQ ID NO: 140433 - protein, 79 aa, Oryza sativa
  Clone ID: PAT_MRT4530_41630C.1.pep
TSFDFYHASSLARPFKSTSEPAAQGRTPLRRKPESKKHIPLPPQQYNVLRQERRSLTFEGGLSSLAPLYEMLIEGCCWW

SEQ ID NO: 140434 - protein, 57 aa, Oryza sativa
  Clone ID: PAT_MRT4530_41631C.1.pep
LLYRSMVSCPFLWCHFRLAKVVCVCASLIAPLLMIIYQLFYVNKIIPHYYFLKIHPL

SEQ ID NO: 140435 - protein, 71 aa, Oryza sativa
  Clone ID: PAT_MRT4530_41632C.1.pep
IRKPLSPKKIKGGERAKINSKQNWVQKNNYGKRKRGKIKEKKLANRSIETRPRGRGLAIKKGENVRGLNRT

SEQ ID NO: 140436 - protein, 179 aa, Oryza sativa
  unsure (1)..(179): unsure at all Xaa locations
  Clone ID: PAT_MRT4530_41633C.1.pep
QRRLEGFGPPPPPSPTSSTXYPPRPATARPPWLPPPPTPPPPLPPPPPDRRPALPTPXPPPDRRPALHTRPPFDRRPPDLAYEARIRPPRALPPPXPLPPLSPDRRPALPPPPSDRQPPDPLPPPRPDRRPQPPPPPNXPMASTRLGDTDPAPLPRPPVASSSATPPPPARSDAPIFIS

SEQ ID NO: 140437 - protein, 197 aa, Oryza sativa
  unsure (1)..(197): unsure at all Xaa locations
  Clone ID: PAT_MRT4530_41634C.1.pep
RPPVARATGDRRGRWLRPAVRTRRRKWPAVGAEAAVAKFAPCRPDPAAGGRKAGGRRRRPAIGRRRRKRPGVEGEAAVARSAPYRPDPAAGGRKAGEAAPAGGRETEEEVAGGGGRARGGRIRASXARSGGRRSKGGRVCSAGRRSGGGRGRQCRPAVGRRRRKRRRRRRWRERGEGRGGDGELRIQWREGERELRR

SEQ ID NO: 140438 - protein, 45 aa, Oryza sativa
  Clone ID: PAT_MRT4530_41635C.1.pep
NRYICYHRARVLLALSFYYNTTITSTEFVSKDYYYPPSPLTKDTP

SEQ ID NO: 140439 - protein, 166 aa, Oryza sativa
  Clone ID: PAT_MRT4530_41636C.1.pep
MGSGLRFSGTPGGNLVAPLTTGLEDGIRHNVMHMTSVEQFYQDCSYQVAFLCAFDEVADFYRSQLITSETRRGIVVATALEVDKASNCLSTIAAMTMMFLHNRDYQRYALLEEVRNSLLKEPTLHDAIKIVVTYRKQELLQLKEQNNDPAKPEVVIVEDDEVVYKL

SEQ ID NO: 140440 - protein, 142 aa, Oryza sativa
  Clone ID: PAT_MRT4530_41637C.1.pep
MSTWIADEDAALLLSESIRLNPCGCTTGATGTGYMSVTSPANPSNAAGAPATSSGSVSATPLCSVSCRRSSVLGQLLLEDYMTGHDNDEFDDESISNTETTKLYGHEEVVTWFARPFKGKNIVESDHSPIPSLLDPIVTLFA

SEQ ID NO: 140441 - protein, 40 aa, Oryza sativa
  unsure (1)..(40): unsure at all Xaa locations
  Clone ID: PAT_MRT4530_41638C.1.pep
ACSIIDSMWFRYPSYNGSXIAEVKXISGSHAPWFTCTMVH

SEQ ID NO: 140442 - protein, 104 aa, Oryza sativa
  Clone ID: PAT_MRT4530_41639C.1.pep
RILNSLKVTHLIRSAQNSVTMKLGAFLFVLLVFINLCTGMPRNMAKDGYHKTDLGLKVMRNLMSGTDGRTGPPSNDHQCPLGTYPNCQGVSQSNQRTEQDVGGN

SEQ ID NO: 140443 - protein, 129 aa, Oryza sativa
  Clone ID: PAT_MRT4530_4163C.1.pep
SQESSRPCRQRQAASRRTPPSPHFPQPPSRLPPRRRPPPPWPPLLRSRSSPSPSPSPSPSPPPASSWTTATPSPPPPTSTTRSPPRPTPTRSSLARAPGTSSCSTPRPPRSTPSPSRSPGAPPRGSLAA

SEQ ID NO: 140444 - protein, 86 aa, Oryza sativa
  unsure (1)..(86): unsure at all Xaa locations
  Clone ID: PAT_MRT4530_41640C.1.pep
VGAMLQGDARQRDTASHSXRGVVKPLFLSSSWAWCCQASIPLFFVGSATVVAPLYRRGGGNWEGLGRVQIRCQSECHSVFRVGHGN

SEQ ID NO: 140445 - protein, 173 aa, Oryza sativa
  Clone ID: PAT_MRT4530_41641C.1.pep
RSLISSLLILAGATSKRQKVEESADGNGCKHCACKKSRCLKLYCPCFAGGGYCSEKCGCQPCFNKALYAETVQTTRKVLLSRQKRMSLKINRRSEANAEAVEDAHHSSSSTPPRRGCNCKKSSCLKKYCDCYQDGTGCSLFCRCEDCRNPFGKNEPPFMLVIENSLKNGVCII

SEQ ID NO: 140446 - protein, 85 aa, Oryza sativa
  Clone ID: PAT_MRT4530_41642C.1.pep
TNALIYFHIITKILLRLYGQLSTLFSDKYIIYNCSDNNTYSLNCYIYKMEYPIVIKMTSPFLYLVLLNFYTIFKKKQKSKQTPLS

SEQ ID NO: 140447 - protein, 323 aa, Oryza sativa
  Clone ID: PAT_MRT4530_41643C.1.pep
TSWRSLPPPSRQKVEESADGVDSRGSPCKKSRCLKLYCPCFAGGGYCSEKCGCQPCFNKALYAETVQTTRKVLLSRQKRMSLKINRRSEANAEAVVVFLTEKAGATEDAHHSSSSTPPRRGCNCKKSSCLKKYCDCYQDGTGCSLFCRCEDCRNPFGKNEGIMAEESKRFLYTGADLDHSEDEQDFIVERSPRLQSPISKESSFQQTPPHIRATNRDTHMFPQAISQWQPRSWHCSKRQSNDRVIDDSGEYKNSNHDWQLAKPEDSYSISRCVQILNGMAELSQVEKSVAPDVFLQAGNREIFISLNGDVRALWLKRKIQNLT

SEQ ID NO: 140448 - protein, 135 aa, Oryza sativa
  unsure (1)..(135): unsure at all Xaa locations
  Clone ID: PAT_MRT4530_41644C.1.pep
ARAPTPPPLPAPLAPEPTXPPPLPVPSRRPPPEAARSTPRCPSAVRPRSPPSPSTTASARPRRPPRSPSPSSSPPSRRRLSRPFPIHRLCAPRPRACIQVRCARAPHLMEPWRSPKSVMTVLVRVQWKFTSKRNM

SEQ ID NO: 140449 - protein, 100 aa, Oryza sativa
  Clone ID: PAT_MRT4530_41645C.1.pep
TEFDLRYDLPKAIKGQTIVDFIVDHRDDSIGSAEYEAVLKGLQLLKEVEADAVEIMGDSLLHVSREQNVEANDLAQGASGYKPMMKDVKVEVATLTADDW

SEQ ID NO: 140450 - protein, 284 aa, Oryza sativa
  unsure (1)..(284): unsure at all Xaa locations
  Clone ID: PAT_MRT4530_41646C.1.pep
MHNRDSWLSKLISYASEMDQSEHHRPACLRRRRLVSPPTRLAYYATVVGRLRLHRPAXAFAAADWCFCLHGWPIMPPLLGVYVFTDRLPSSAADWCLRLHGWPIMPPLLGIYVFTDRLPSSATDWCLRLHGWPIMLPLLSVYVFNDRLAFVAADWCLRLHGRPIMPPLLGIYVFTDRPPRLLSTGVSACTASLLCRRCWASTSSPTGXPRPPPTGVYPCTAGLLCCRCWVSTSSPTGXPRPPPTGVSACTVGLLCRRCWASTSSPTGXPRPPSTDVSACTAGLL

SEQ ID NO: 140451 - protein, 581 aa, Oryza sativa
  unsure (1)..(581): unsure at all Xaa locations
  Clone ID: PAT_MRT4530_41647C.1.pep
MAGVFIAIDGRLCSHIGRLGHHQGKDQKAKIQIQICIIGIHGFQSLSPRLQEWISQNITDRLAFVAADWCLRLQGWPIMPPLLGVYVFTDRLASSAADWCLRLHGWPIMPPLLGIYVFTDRLASAAADWCFRLHGKPIMPPLLGVYVFTNRPPRPPSTGLPLPPPTGVSACTAGLLCRRCWASTSSPTGLPLPPPTGVSACMASLLCRHFWASTSSPTGHLVRRRLVSPPARLAYYATVVGHLRLHQPDCLCHRRWCLRLHGWPIMPPLLGVYVFTXRLASAAADWCLRLHGCPIMPPLLGVXGLHHRLASAAAXWCLRLHGCPIMPSLLGVYVFTXRLASAAAXCCLRLHGCPIMPPLLGVYVFTTGLPPPPPLXVSAYTAALLCCRCWASTSSPXGFPPPPPVGVSACTASLLCRCCWASTSSPTGLPPPSPTGVSACTAGLLCHHCWASTSLPTGVPPLPPTGVSTCTAGLLCRRCSTSTSSPTGHLVHRGLVSLPTRLVYYAIVVGRLYHHRPVASYDSNWCYRFHGWPXSPPPLIGIVIFNSRRSTSVTLIISPAILVSPRRYNLLQISQFSSLKF

SEQ ID NO: 140452 - protein, 29 aa, Oryza sativa
  Clone ID: PAT_MRT4530_41648C.1.pep
HVILDSAKKIQVKHYTELDNRRWVDRESD

SEQ ID NO: 140453 - protein, 50 aa, Oryza sativa
  unsure (1)..(50): unsure at all Xaa locations
  Clone ID: PAT_MRT4530_4164C.1.pep
RVNSVLKRRCSIGDNQCLPRLDQMQRRRSRLSCTPLRDELRTRGSTGNXG

SEQ ID NO: 140454 - protein, 148 aa, Oryza sativa
  unsure (1)..(148): unsure at all Xaa locations
  Clone ID: PAT_MRT4530_41650C.1.pep
VFDSYSMMNNWHMKLLVLIFGDYWRXVVLEMIGFVGDGQVLLXCLVRSNRLGKAGQTSGMRPREVIKLSSILRVLXFVFARVRQSNXRVTDGQTDGFAPVRPAAVIRGRGNFGKVRMGNLYWSDRRHRHSQTSRSISVRPIDIDSRVY

SEQ ID NO: 140455 - protein, 580 aa, Oryza sativa
  unsure (1)..(580): unsure at all Xaa locations
  Clone ID: PAT_MRT4530_41652C.1.pep
MGSGPVGIAGGGGGNVMYELVRVVDDIAIGEVIGETAGLRVIHVHERTRGLMAIELVLSTLELHSVEASPSFHGYIFXSREMRSINYCSTVPACVQTTWWYINPARLRSVVIITGGDLYAIVNENTLMKHKVALPPGAMGKISYIAPAGQYSLQDTVLELEFQGIXTWPVRSPRPVSSKLAADTPLLTGQRVLDALFPSVLGGTCAIPGAFGCGKTVISQALSKYSNSEAVVYVGCGERGNEMAEVLMDFPQLTMTLPDGREESVMKRTTLVANTSNMPVAAREASIYTGITIAEYFRDMGYNVSMMADSTSRWAEALREISGRLAEMPADSGYPAYLAARLASFYERAGKVKCLGSPDRTGSVTIVGAVSPPGGDFSDPVTSATLSIVQVFWGLDKKLAQRKHFPSVNWLISYSKYSKALESFYEKFDQDFIDIRTKAREVLQREDDLNEIVQLVGKDALAESDKITLETAKLLREDYLAQNAFTPYDKFCPFYKSVWMMRNIIHFNTLANQAVERAANADGQKITYSVIKHRMGDLFYRLVSQKFEDPAEGEDVLVAKFQKLYDDLTTGFRNLEDEAR

SEQ ID NO: 140456 - protein, 147 aa, Oryza sativa
  Clone ID: PAT_MRT4530_41653C.1.pep
DLVKSVSCVDYQCPQSTETNYQRCSNGETESNQPVSQNELEDHHQVPITASSSTNNSTDLATEQQKLSCSGDEDTKDSSNSIACEAIIDVNTVPVTCSVSSVYEIGKGIRVINLNEADNLVDVDINSSEVNSGTIDLISHTTATLHK

SEQ ID NO: 140457 - protein, 40 aa, Oryza sativa
  Clone ID: PAT_MRT4530_41654C.1.pep
SESTLVGELQGDYPRKRKHMDNDEEDNDSIDEVWMYTIGA

SEQ ID NO: 140458 - protein, 91 aa, Oryza sativa
  Clone ID: PAT_MRT4530_41655C.1.pep
MSPSSPCPMPPSSSSQLSSIENAGAGLAPPVAILLISVEPSGVWAVAAAIANPASTCCKCLKGKMATPFSERRSATTAAPRRPSPPSCLRS

SEQ ID NO: 140459 - protein, 103 aa, Oryza sativa
  Clone ID: PAT_MRT4530_41656C.1.pep
MLRPSTPTRRLLQSVGGGSNPNRIPGIPPADPPSGGVSSDVVVILAALLCALICVVGLAAVARCARNRRNSGGAGAGAGSDSPSHRPAHAGHFRGGRSGSGGV

SEQ ID NO: 140460 - protein, 121 aa, Oryza sativa
  unsure (1)..(121): unsure at all Xaa locations
  Clone ID: PAT_MRT4530_41657C.1.pep
DPQXRVHCSPTRFMHEKVRRQRHPGGAAGGGHPHEGHLLQHXQQALASRLXATTFGGFVVRPICCLVTLTTDEPCALWFAFNLSSFLFFFTFVFLHYISTMMIIINSASSSMGCAFVFQVR

SEQ ID NO: 140461 - protein, 53 aa, Oryza sativa
  Clone ID: PAT_MRT4530_41658C.1.pep
GLIRVLCLNISPRAGGGFVICNCLSVCHGERRKDVTPLSEEKMNASHVLEILS

SEQ ID NO: 140462 - protein, 128 aa, Oryza sativa
  Clone ID: PAT_MRT4530_41659C.1.pep
MGGQIGIKNILNGSLSKIITVALENPNPSQSNMLSENLAMAKGMFGIAPAPAPSLLDLELNQTVSAPPKLGVELGYPLDFRSTSYISRAMGLFGKLDYLQEVDAIPGRVLLQAYFDGVDLVQGRIVLK

SEQ ID NO: 140463 - protein, 919 aa, Oryza sativa
  Clone ID: PAT_MRT4530_4165C.1.pep
MGNIEQLNGSNYASWKEKLEITLALLDIDYALHNNPLIEPRPENENYETLKKEYDEVKAKWDISNRKFLMIIKSSIIDAIRGAVPETQTAREYLAKVEEQFKGSSKVYATTLIKRLVNEKYDFTGNLREHVMKKCHVAFKLKSMEMKISEGLLVHFIMSSLPQEFSPFTIDYNAMKIKWGIDELIAMCVQEEERLKAERVDHANLFKHSEKKRCIIMHDNKEVGLADGQEQLYQISVCDATYNVDSSLNANVSTKRKHNDNETSSKLWHYRLGHISRGRIERLIKENILYPLDFSDADIDHCIDCIKGKYSKQIKKGANRSMGVLEIIHTDICGPFNENGIKAQYSAPSEPQQNGVAERRNRTLMDMFTKFIETRHDVFLENDIIKGSMTPREVVLEEKLNYVPMPLIEEPVFSTHTRVTPSIERNNDATSAEAPATTSSSISNDENNEDTQQPQVVIDEQNNEPVRRSQRVRKSAIPSDYVTYMNKEVNEPMSEEVNEPILDIDPISFKEAMKSEHSSEWLNAMKDEMKSMSTNKVWDLIEIPEGAKTVGCKWVYKTKRDPKGNIERIIMALVAHYDLELYQMDVKTAFLNGDLYEDVYMAQPEGFVTKGKEHMGCHLNKSIYGLKQASRQWYLKFDQIIRQFGFKENKKDNCIYANFKETSPAPIMKGDKYEKFQCPKNEYEAAQMKSIPYASAVGSIMYAQVCTRPDLAFVTGMLGRYQSNPGLEHWKLAKKTLRYLQGTKDLMLTYRKSKNLEVVGCSDSDLAGCVDDKKSTSGYIFTLARGAISWKSSEQRVTASSTMQAEYVACYEATGQAIWLKNFILGLRVVDSISKPLKLYCDNKPAVYYASSNKSSASAKYIDIKYHVVKEMIQDQTISVEYINTKLMLADPLTKGLTPVVFKEHVAGMGLVEKPLILE

SEQ ID NO: 140464 - protein, 48 aa, Oryza sativa
  Clone ID: PAT_MRT4530_41660C.1.pep
RCWSYARCMRSVAILQRVASHGSESMTSDVLGPGMRVWPYRVVHACSL

SEQ ID NO: 140465 - protein, 69 aa, Oryza sativa
  Clone ID: PAT_MRT4530_41661C.1.pep
KIPPIFFFFKKKKKKIKKKKNFKNLKKKYFFFNILTKKKKINYFFPKRPQKHRSTPLFHTSYASVQPSP

SEQ ID NO: 140466 - protein, 173 aa, Oryza sativa
  Clone ID: PAT_MRT4530_41662C.1.pep
MERILEKYDRHELLSEGNNVIEEFPELEGSMSYDHIKLRGRIEALKKSQRNLMGQELDSLTLQDIQQLENQIDTSLNNIRSRKVTYPSTARRHGNFFNLKICRLSLSEEKLLMEKNTILEKLRRFRRAGNRDGATWLDQQQQWLAMVDAPVIIERQELEDVQMKWSLQPLHGC

SEQ ID NO: 140467 - protein, 1127 aa, Oryza sativa
  Clone ID: PAT_MRT4530_41663C.1.pep
MWSKLRRKRPCELYGPERVVVSPSGGGAGRRQSQEPAGRRRRGRAPTETESTLVPTAAILRNPPPAPGSLQPHLPPATTTNNERRLHSRSGGSAGLELMNAKVLPFLFQFPMEATVPVLLLVTVLSLILPSGIGAAAAGDERSALLALKAGFVDTVSALADWTDGGKASPHCKWTGVGCNAAGLVDRLELSGKNLSGKVADDVFRLPALAVLNISNNAFATTLPKSLPSLPSLKVFDVSQNSFEGGFPAGLGGCADLVAVNASGNNFAGPLPEDLANATSLETIDMRGSFFGGAIPAAYRSLTKLKFLGLSGNNITGKIPPEIGEMESLESLIIGYNELEGGIPPELGNLANLQYLDLAVGNLDGPIPPELGKLPALTSLYLYKNNLEGKIPPELGNISTLVFLDLSDNAFTGAIPDEVAQLSHLRLLNLMCNHLDGVVPAAIGDMPKLEWVDVSSNGFTGGIPAGICDGKALIKLIMFNNGFTGGIPAGLASCASLVRVRVHGNRLNGTIPVGFGKLPLLQRLELAGNDLSGEIPGDLASSASLSFIDVSRNHLQYSIPSSLFTIPTLQSFLASDNMISGELPDQFQDCPALAALDLSNNRLAGAIPSSLASCQRLVKLNLRRNKLAGEIPRSLANMPALAILDLSSNVLTGGIPENFGSSPALETLNLAYNNLTGPVPGNGVLRSINPDELAGNAGLCGGVLPPCSGSRSTAAGPRSRGSARLRHIAVGWLVGMVAVVAAFAALFGGHYAYRRWYVDGAGCCDDENLGGESGAWPWRLTAFQRLGFTCAEVLACVKEANVVGMGATGVVYKAELPRARAVIAVKKLWRPAAAAEAAAAAPELTAEVLKEVGLLGRLRHRNIVRLLGYMHNEADAMMLYEFMPNGSLWEALHGPPERRTLVDWVSRYDVAAGVAQGLAYLHHDCHPPVIHRDIKSNNILLDANMEARIADFGLARALGRAGESVSVVAGSYGYIAPEYGYTMKVDQKSDTYSYGVVLMELITGRRAVEAAFGEGQDIVGWVRNKIRSNTVEDHLDGQLVGAGCPHVREEMLLVLRIAVLCTARLPRDRPSMRDVITMLGEAKPRRKSGSSTGSASAKAPTPAPPAVAAVVDKDKPVFTTTPDSDYA

SEQ ID NO: 140468 - protein, 74 aa, Oryza sativa
  unsure (1)..(74): unsure at all Xaa locations
  Clone ID: PAT_MRT4530_41664C.1.pep
IVRXSAXKPSPTPPXNDAAPTRCSRMPRPRLAVRDRHAXXDRSXRHCNRCXXKHHRASSHRATAVAGSRDATCA

SEQ ID NO: 140469 - protein, 109 aa, Oryza sativa
  Clone ID: PAT_MRT4530_41665C.1.pep
MWSKLRRKRPCELYGPERVVVSPSGGGAGRRQSQEPAGRRRRGRAPTETESTLVPTAAILRNPPPAPGSLQPHLPPATTTNNERRLHSRCSIVGLPRSGQKRRHHLDAH

SEQ ID NO: 140470 - protein, 1040 aa, Oryza sativa
  Clone ID: PAT_MRT4530_41666C.1.pep
MEATVPVLLLVTVLSLILPSGIGAAAAGDERSALLALKAGFVDTVSALADWTDGGKASPHCKWTGVGCNAAGLVDRLELSGKNLSGKVADDVFRLPALAVLNISNNAFATTLPKSLPSLPSLKVFDVSQNSFEGGFPAGLGGCADLVAVNASGNNFAGPLPEDLANATSLETIDMRGSFFGGAIPAAYRSLTKLKFLGLSGNNITGKIPPEIGEMESLESLIIGYNELEGGIPPELGNLANLQYLDLAVGNLDGPIPPELGKLPALTSLYLYKNNLEGKIPPELGNISTLVFLDLSDNAFTGAIPDEVAQLSHLRLLNLMCNHLDGVVPAAIGDMPKLEVLELWNNSLTGSLPASLGRSSPLQWVDVSSNGFTGGIPAGICDGKALIKLIMFNNGFTGGIPAGLASCASLVRVRVHGNRLNGTIPVGFGKLPLLQRLELAGNDLSGEIPGDLASSASLSFIDVSRNHLQYSIPSSLFTIPTLQSFLASDNMISGELPDQFQDCPALAALDLSNNRLAGAIPSSLASCQRLVKLNLRRNKLAGEIPRSLANMPALAILDLSSNVLTGGIPENFGSSPALETLNLAYNNLTGPVPGNGVLRSINPDELAGNAGLCGGVLPPCSGSRSTAAGPRSRGSARLRHIAVGWLVGMVAVVAAFAALFGGHYAYRRWYVDGAGCCDDENLGGESGAWPWRLTAFQRLGFTCAEVLACVKEANVVGMGATGVVYKAELPRARAVIAVKKLWRPAAAAEAAAAAPELTAEVLKEVGLLGRLRHRNIVRLLGYMHNEADAMMLYEFMPNGSLWEALHGPPERRTLVDWVSRYDVAAGVAQGLAYLHHDCHPPVIHRDIKSNNILLDANMEARIADFGLARALGRAGESVSVVAGSYGYIAPEYGYTMKVDQKSDTYSYGVVLMELITGRRAVEAAFGEGQDIVGWVRNKIRSNTVEDHLDGQLVGAGCPHVREEMLLVLRIAVLCTARLPRDRPSMRDVITMLGEAKPRRKSGSSTGSASAKAPTPAPPAVAAVVDKDKPVFTTTPDSDYA

SEQ ID NO: 140471 - protein, 234 aa, Oryza sativa
  unsure (1)..(234): unsure at all Xaa locations
  Clone ID: PAT_MRT4530_41667C.1.pep
MPTSGWAEGWRRQRGDASDQASGREEDVQATQGTSAGGRRRKRRGRRWPMPGAARAQLADGGRTVKPGVGPSPSPRGSPRQGSSLGRSGGSPLTAWGRAAPKPTWLPPRGSIGVMSVAPPMQGKAQPPQESRATLGRGLXPPISPPSKSGGQAFMASLRNVRWPPKLRPSLTKKYDGGANPSEPLQICMTIIEAAGGDDQVTANFFPMVLKGQARVSLVNLPPASVHSWEESCR

SEQ ID NO: 140472 - protein, 80 aa, Oryza sativa
  Clone ID: PAT_MRT4530_41668C.1.pep
MAADNGGLPEESRLQPMETIPTPTVINENNEVEFIAADMAGFVPRIKISARQRWRTLATTMVVDLMGCYAPRRSDNQLAI

SEQ ID NO: 140473 - protein, 451 aa, Oryza sativa
  Clone ID: PAT_MRT4530_41669C.1.pep
MAGGNKKVKKAMETIATNINDLPNEVLQYILSFLSTREVVQTCVLSQRWCNIWKFVPTVHVTNETIQHCQKLLDHVIMQRGDVSIDTCHLEFVKYFRRENRKANKWIFHALSVCKVKELRVYIQFQDFFLTITNQAIISGYLRKLELDSVKLEANSLDFTSCPLLEELQMGYCIIYARKIVSKSLKRLKMETMFFETEDDDGWPCRLHISVPNIVSLTLLGFDGWTPLFESMPYLAFAIVTFNDECYDTCQYSSFWDCGIEDCEGCYAIGDHLNGSVFLHHLSHTTHMELTNDCRMNMNDSISTIFDRDLKWCPLFRNLKTLLLNEWFLENGLRGVLRILQHSPALEKITLKLYMEPKKIVENEESYGTMEQPFVMNHLKKISVKCQKEVMWVKKIIMTLTQFGIPHQRICVKEIPRSSIISEMTYLQTEHNLRMKPYKCVLSDLKAKAER

SEQ ID NO: 140474 - protein, 1188 aa, Oryza sativa
  unsure (1)..(1188): unsure at all Xaa locations
  Clone ID: PAT_MRT4530_4166C.1.pep
MGTPGDQASYASQIAGIIGNIEQLNGSNYAPWKEKLEITLALLDIDYALHNDPLVEPRPENENYDTLKRRYDEVKAKWDISNRKCLMIIKSSIIDAIRGAVPHTXIAREYLAKVEEEFKGSSKVYATTLIKRLVNERYDFTGNLREHIMKKCHMASKLKSMEMEISEGFLVHFIMSSLPQEFSPFTINYNAMKIKWGIDELIAMCVQEEERLKAARVDHANLFKHSEKKKYKKFKKEYLKPKPIQFKEIGQSLNQSEQNKSGGNLYTEEKGKEKDGCYFCGKSGHRQKDCIGFMRWLSKKXGFAMRRTLRRGERRIRVANGVETEVKAIGDFTLTLHTGFKLQLYDILYVPSMKRNLVLVSRLDNGGYYCTFGNNRCIIMHDNKEVGLADXEQLYQIFMCDATYNVHSSNANVSTKRKYNDNETSSKLWHYRLGHISRGRIEHLIKENILYPLDFSDADVDHCIDCIKGKYSKQIKKGANRSMGVLKIIHTDICGPFNEKSVDGFVSFITFTDDYSRYGYIYPIKERSEALDKFKIFKAEVENQHDRKIKIFTKFIETRHVVFLENDIIKGSMTPREVVLEEKRNYVPMHIIEEPVFSTHTHVAPSIERNNDATPTEAPATTSSSVSNDENNEDAQQPQIVIDEQNNEPVRRSQRVRKSAIPSDYVTYMNEEVNELMSEEVNEPILDNDPISFKEAMKSEHSSEWLKAMKDEMKSMSTNKVWDLVEIPEGAKTVGCKWVYKTKRDPKRNIERFKARLVAKGFTQREGIDYNETFSPVSTKDSFRIIMALVAYYDLELHQMDVKTAFLNGDLYKDVYMAQPEGFVMKEKEHMGCHLKKSIYGLKQESRQWYLKFDHIIRQFGFKENKKDDCIYAKFKEKFLVSKFEMKDLGEATYVLGIEIYRDRSNGVLGLSXKAYIEKVLKKYNMHNCLASPAPIMKGDKYGKFQCPKNEYEAAQMKSIPYASAVGSIMYAQVCTRPDLAFVTEMLGRYQSNPGLEHWKLAKKTLCYLQGTKDLMLTYRKSENLEVVGYLDSDLAGCVDDKKSTSGYIFTLAGGAISWKSSKQRVTASSTMQAEYVACYEATRQAIWLKNFILGLRVVDSISKPLKLYCDNKPAVYYASSNKXSASAKYIDIKYHVVKEMIQDQTISVEYMNTKLMLADPLTKGLPPVVFKEHVASMGLVEKPLILE

SEQ ID NO: 140475 - protein, 118 aa, Oryza sativa
  Clone ID: PAT_MRT4530_41670C.1.pep
TAARHGGRAARRGGAVAPPFAGARTHPRVSAPPSSGCAAAPGKPAARRRPLFSLPRRREDDRWWHDSRARRRRPAAAVGESFLFDPCGSCAVLSFALFRGSIPLFFLFGFLSPNRSKP

SEQ ID NO: 140476 - protein, 61 aa, Oryza sativa
  Clone ID: PAT_MRT4530_41671C.1.pep
WCLLSKKKQLSVGVVPQNSVGISLWVRCSSRTRAHVHGVTRANVHASLVGVTKCCCHCLGR

SEQ ID NO: 140477 - protein, 132 aa, Oryza sativa
  Clone ID: PAT_MRT4530_41672C.1.pep
MSCWLATCVSSSQLVKILNIHNVIVPLGRPHASVGQGAGLGAGLLWTESTEVAGCTVDQEHRVVHEHGHPRLARTNQTTRSEAAHRPILPTVAAHGLVVIASDHWAQRQCGKWRRRQGEEGENAHRAHTAEE

SEQ ID NO: 140478 - protein, 70 aa, Oryza sativa
  unsure (1)..(70): unsure at all Xaa locations
  Clone ID: PAT_MRT4530_41673C.1.pep
LITLSAAQTHGRVSKGCGSAAIXVXIHPPTXHMEKXKKKSRAGCSXMNIFPVKENIMLQILIDRDVPYMM

SEQ ID NO: 140479 - protein, 86 aa, Oryza sativa
  Clone ID: PAT_MRT4530_41674C.1.pep
MKYTGRGVREHILKMSGIASKLKKMDLVLRDEFLVHLKIASLPSVFEQPAESGSGLRVASGSGSPHGGRWQLGAGASSGEESLFSC

SEQ ID NO: 140480 - protein, 236 aa, Oryza sativa
  Clone ID: PAT_MRT4530_41675C.1.pep
MRVAPKVLVLVRDAAGYGAALADALRPTPGLTRESTPLELPLAKYGLDGEKASGELVNFSDSSGDPQVSFFVLPDYKPPVAACAMNEILALVSSEAPSTQPTLIVPFMTRSPNYYHGAKTGQLATLHGAEIGATTEFTQMLVDGTTKLPQSLQVRSEPILCLLEMVRVLNIPTVILFASGGQHQGKSSTDVDLEVLQCVGDHLAKHINLEFSKETVLQRGIEKSPVFQEPWRELYQ

SEQ ID NO: 140481 - protein, 76 aa, Oryza sativa
  Clone ID: PAT_MRT4530_41676C.1.pep
LPVVSILHQQFQILGVPSSYKSLGFPEGSSVLDELVYSNIPQSTHMLEPPELMRLWTSNDSDAQHFRNNIRFFNGH

SEQ ID NO: 140482 - protein, 102 aa, Oryza sativa
  unsure (1)..(102): unsure at all Xaa locations
  Clone ID: PAT_MRT4530_41677C.1.pep
QGGRTNQGYCKSLELISCSILIQITMRAFNHNEKREQKMWDSXLRRNLASQRGKMVRKPTHERGLELRHTLRFYXLIPDIYLFIKESESTQLTLICWNIIET

SEQ ID NO: 140483 - protein, 233 aa, Oryza sativa
  unsure (1)..(233): unsure at all Xaa locations
  Clone ID: PAT_MRT4530_41678C.1.pep
CRPKSLGGLGILNLEKFARALRLRWLWFEWKDESKPWFNMETPCDEIDKKLFRASTKISLGNGKKCCFWQDNWLSGCAPKDIAPAIFRLAKRKANCIHFEMEGNHWITSLRPITTISEINELVHLGSLLQEINLQANTXKWTQNGIYTAKSAYEAQFQGTIISTNFQPLWIAEAEPKQRFLGWLILHQKILTADNLLIRHXPCDWICSLCTDAFEDTNHLAKECSFTISVWNQ

SEQ ID NO: 140484 - protein, 71 aa, Oryza sativa
  Clone ID: PAT_MRT4530_41679C.1.pep
STVIASWLFLQADAAKVLPAYCRLVLEHRFPADVQKSFLGHEHTAKRSACNAGDRCFTQYFSWELLSVQER

SEQ ID NO: 140485 - protein, 1098 aa, Oryza sativa
  Clone ID: PAT_MRT4530_4167C.1.pep
MGTPGDQASYASQIARIMGNIEQLNGSNYASWKEKLEITLALLDIDYALHNDPPVEPRPENENYETLKGRYDEVKAKWYISNRKCLMIIKSSIIDAIRGAVPDTQTAREYLAKVEEQFKGSSKVYATTLIKRLVNERYDFTGNLREHIMKKCHMASKLKSMEMEISEGFLVHFIMSSLPQEFSPFTINYNAMKIKWGIDELIAMCVQEEERLKAERVDHANLFKHSEKKRYKKFKKEYLKPKPIQFKEKGQSSNQSQQNKSGGNPYTEEKGKEKDGCYFCGKSGHRQKDCIGFMRWLSKKDVDHCIDCIKGKYSKQIKKGANRSMGVLEIIHTDICGPFNEKSVDGFDSFITFTDDYSRYGYIYPIKEISEALDKFKIFKAEVENQHDRKIKIVRSDRGGEYYGRHTTYGQIPGPFARFLHESGIKAQYSAPGEPQQNGVAERRNRTLMDMGCPAEARVFNPNMGKLDLKTISCHFIGYPDKSKAYRFYCPNQFTKFIETRHAVFLENDIIKGSMTPREVVLEEKRNYVPMPIIKEPVFSTHTHVAPSIERNNDATPAEAPATTSSSVSNDENNEDAQQPQIVIDEQNNEPVRKSQRVRKSAIPSDYVTCMNEDVNEPMSEEVNEPILDNDPISFKEAMKSEHSSEWLKAMKDEMKSMSTNKVWDLVEIPEAAKTVGCKWVYKTKRDPKGNIERFKARLVAKGFTQREGIDYNETFSPVSTKDSFRIIMALVAHYDLELHQMDVKTAFLNGDLYEDVYMAQPEGFVMKGKEDMGCHLKKSIYGLKQASRQWYLKFDQIIRQFGFKENKKDDCIYTKFKESKFIFLILYVDDILLASNDKNMLLETKKFLASKFEMKDLGEATYVLGIEIYRDRSNGVLGLSQKAYIEKVLKKYNMHNCSASPAPIMKCDKYEKFQCPKNEYEAAQMKSIPYASAIGSIMYAQVCARPDLAFVTGMLGRYQSNPGGAVSWKSSKQRVTASSTMQAEYVACYEATGHAIWLKNFIPGLRVVDSISKPLKLYCDNKPAVYYSSSNKSSASAKYIDIKYHVVKEMIQDQTISVEYMNTKLMLADPLTKGLPPAVFKEHVAGMGLVEKPSILE

SEQ ID NO: 140486 - protein, 76 aa, Oryza sativa
  Clone ID: PAT_MRT4530_41680C.1.pep
NKTSLLSSPLHPRLSEYPIKKPYIPQLTYYHSPLLPCSYQENTNNLILMNSCRYILLVQIIYKTEVKVSRGATKAY

SEQ ID NO: 140487 - protein, 146 aa, Oryza sativa
  Clone ID: PAT_MRT4530_41681C.1.pep
MEVLHTAPLVVYVQGGTCAQEAIGDPIGGSDTSSGWLGLSAEDHGIATTSNRANYQSKARSDLLDFVGGGGLRCRAPAALHGFGEQQVQAAEARRCRLLEEAADTGGRGGVLSCVGAASSITGGLQRRRQQDLQACTRGRALAAGT

SEQ ID NO: 140488 - protein, 103 aa, Oryza sativa
  unsure (1)..(103): unsure at all Xaa locations
  Clone ID: PAT_MRT4530_41682C.1.pep
FSSSLHTSTVDDTLHLRPFHFPHGGVAPCTPQPRRPLPSRRRPSPGSGALPLEASASAAAPCPPAGGXFHPASSGAQRAGERRPRPTSWCRRLFXXASGNVRR

SEQ ID NO: 140489 - protein, 150 aa, Oryza sativa
  unsure (1)..(150): unsure at all Xaa locations
  Clone ID: PAT_MRT4530_41683C.1.pep
PAGKKKKKKKKKKKKKKKKKKKKKKKKNHRDLLTHRVLLEKNLKGFPSFSSLLVVALCELTSWEAIAPHPFPLPDFCAPVLNSPVGGNGFVCENPMNSFADAFFXGPMFSKPIDAPNVAGANVSLVNGLKILGLSTPGISIAPLVFAPLC

SEQ ID NO: 140490 - protein, 31 aa, Oryza sativa
  Clone ID: PAT_MRT4530_41684C.1.pep
IYTLDSKLLGRYLELHYKLMSVYRLGEEVAT

SEQ ID NO: 140491 - protein, 215 aa, Oryza sativa
  Clone ID: PAT_MRT4530_41685C.1.pep
HCAFFPFPLFLLLSTLPQSTTPSISVPPTPPTAASLPVPLSHGALSPADGALPPASSGAQRAGERRPATNSSVSAALSSRERQRASAPLRPSPPLPCHNATGGLDGGGRWQAAAPALPAGREAVGRGGALPSAGSSGREGAAAGHPGSSVRGGDGRRGGGDPADGVPAAAAPSPRRIQREGSQRRPDGDGGTLPFLCRHFFCFFRESVGIFLCSC

SEQ ID NO: 140492 - protein, 72 aa, Oryza sativa
  unsure (1)..(72): unsure at all Xaa locations
  Clone ID: PAT_MRT4530_41686C.1.pep
MGKLHVFMARFGSGNCVWRSGAPPDSNGCSARSEEGXGPSAARAVALPSPQPLHPCPPAAANRRTSPARRHY

SEQ ID NO: 140493 - protein, 89 aa, Oryza sativa
  Clone ID: PAT_MRT4530_41687C.1.pep
PSGDMALALALRTSLEPGQVESDLSLGRHQELPGGHLDDVDVVRVAAATAAAWASFTVVATCVGMVAGLATEIQANRVGSRERVVQAQA

SEQ ID NO: 140494 - protein, 155 aa, Oryza sativa
  unsure (1)..(155): unsure at all Xaa locations
  Clone ID: PAT_MRT4530_41688C.1.pep
AAAGDGRRNREEEKKEEDSKGEGMGGCRGGLRRCRRREGGRRPDXQPRKADHRCVLAPRRHADAGKPPPILRRTRRRAXRARESTCVTTPPXRTPLDAAAATASRATSASRRPTTPPSAHRPDPATAVPDLPPPGRDSSPPPLSAAGKXLHLPHA

SEQ ID NO: 140495 - protein, 811 aa, Oryza sativa
  Clone ID: PAT_MRT4530_41689C.1.pep
MFGRMRCLVGGGVEDSPRGAVRRVSPALRRVHNANASAAAAAGAEGKSGLPFRSPDVMETVHEVAIYIHRFHNLDLFQQGWYQMKISATWEEGGSKTPASPARVVQYEASDVGADDALGIWKIDDADNSFYTQPFRIKYARQDIYLSVMVSFNIFNSEEEGPAASSVILKFELIYAPTLENGSDIQASSATSSAAVHEFRVPRRALLGSHSYCPVHFDAFHSVLVDLTLHIVYLKAGATKSSLKIPDQGLGPTSHHIVKALLTSREMLLEELKKISDAIGKTVEDLDVADLSLGKYEAVQPAKSGLPNSNKVFPATTKGVGHLAGILHDFLEKPNSAVDGANDAMLYTLPKEELLELFLTVSSQLSLLWNAFLKFHRINKTKILDYLRDIWALDRKSEWSIWTVHSKIEIPHRYLRSTDDESSHRHSLLRVSGSRKFHDDPVQNSASRAELHRKSIAQMKINTLSVQDMQIYADPSRVPVVLIEQHVMVVPQHGSSKDLATNSSEQKDTIVLPKLQGDSLALKSSAGKKGRILRAVIFVHGFQGHHLDLRLVRNQWLLLDPGAECLMSEANEDKTSGDFKEMGGRLAGEVVAFLKKKVDKLAKYGGCKELKLSFVGHSIGNVIIRTALAEPALQPYLKNLYTYMSISGPHLGYWYSSNSLFNSGLWLLKKLKGAQCIHQLTFSDDQDPQNTFFYKLCKLKTLENFKNIILLSSPQDGYVPYHSARIELCPAASSDNSRKGQVFTEMLNNCLDQMRAPTSETRIFMRCDVNFDQSAQGRNLNTMIGRAAHIEFLETDIYAKFIMWSFPELFR

SEQ ID NO: 140496 - protein, 46 aa, Oryza sativa
  Clone ID: PAT_MRT4530_4168C.1.pep
MEANPISGLRSGFDSLVLLVSWQLWKERNSRIFNSALALIAVVLES

SEQ ID NO: 140497 - protein, 503 aa, Oryza sativa
  unsure (1)..(503): unsure at all Xaa locations
  Clone ID: PAT_MRT4530_41690C.1.pep
MSSVYVLEPPTKGKVVVQTTAGPLDIELWPKEAPKAVRNFVQLCLEGYYDGTLFHRVIKSFLVQGGDPTGSGTGGESIYGAPFADEFHTRLRFNHRGLVACANAGTPHSNGXSQFFISLDRCDWLDKKNTIFGKVTGDSIFNLLALXADIETDKXDRPVXPXKISFSLGTLEPYFDEYCSKANLXKTEPTAKGDIEGKSKKKAVKQLNVLSFGDEVEEEENEAASSVKDKIKSIHDVLDDPRFLKGEAPDEQLTKEQEDKKKETVQSVREALVSKKSDFRELEHDSETDDYPDDENEEDFDNRMRSQILRKRRELGDIRSSETSKKTDKAHRKDKELPVHRSDDDNDDDNEDHQLTKSRKFSMKKKGIGSEASAERMSKGDANLQLLNPAEQEKHLQKQKRRRLQGREDETLAKLQKFKASFLSKNPATGNTEKKTDEEDYTGWHSNRLTFEPDSSKDGMTRKDDPDDYVVVDPLLEKGKQKFNKMQAKLKRREREWAGRSLT

SEQ ID NO: 140498 - protein, 594 aa, Oryza sativa
  Clone ID: PAT_MRT4530_41691C.1.pep
MQSLALTSPSLPAPATASGRRRRRLERIRATAVSDEPKLNKYSARITEPKSQGASQAVLYGVGLTDADLRKPQVGVSSVWYEGNTCNMHLLRLAEAVRDGVREAGMVAFRFNTVGVSDAISMGTRGMCYSLQSRDLIADSIETVMGAQHYDANISIPGCDKNMPGTIMAMGRLNRPSIMIYGGTIKPGHFQGNSYDIVSAFQCYGEFVTGSISDEQRKNVLRNSCPGAGACGGMYTANTMASAIETMGMSLPYSSSTPAEDPLKLEECRLAGKYLLELLKMDLKPKDIITEKSLRNAMVIVMALGGSTNAVLHLIAIARSVGLQLTLDDFQKVSDQVPFLADLKPSGKYVMEDLHKIGGTPAVIHYLLEQGLLDGDCMTVTGKTLAENAKIFPPLSEGQQIIRPLDNPIKSTGHIQILYGNLAPEGSVAKITGKEGMFFSGPALVFEGEESMITAISENPANFKGKVVVIRGEGPKGGPGMPEMLTPTSAIMGAGLGKECALLTDGRFSGGSHGFVVGHICPEAQEGGPIGLVQNGDKITIDVVKRVIDVELTEAELEERRRKWTPPPHKAARGALWKYTKLVSPASRGCVTDE

SEQ ID NO: 140499 - protein, 49 aa, Oryza sativa
  Clone ID: PAT_MRT4530_41692C.1.pep
MGTYFDVFEIGIVGIVCGSPESLKGVAGELKGEYWGKFDIGIEADSVKR

SEQ ID NO: 140500 - protein, 66 aa, Oryza sativa
  unsure (1)..(66): unsure at all Xaa locations
  Clone ID: PAT_MRT4530_41693C.1.pep
GCRTNYIXLTSSCGCSGTYLLLLHVNIDNIATHTHTLNCNAWFLDLTPNMMMTQLSLHDVDGHISM

SEQ ID NO: 140501 - protein, 525 aa, Oryza sativa
  Clone ID: PAT_MRT4530_41694C.1.pep
MAKPPPAPHRANRAPPGLCALPAISYNSHRGLVLGLTFVAYALYHASRKPPSIVKRALSEAWPPFHDPALLGETDVAFLAFYSLGMFVAGHLGDRLDLRLFLAVGMIGSGTAVALFGVGYFLSLHSLAFYLAAQVIAGLLQSTGWPSVVAIVGNWFRGRRRGLIMGIWNAHTSIGNISGSLIAAAVLRYGWGWSFIVPGLLIAFGGVLVFFFLAPYPEDLGFSPTTLPKAVSEASTDEEDSSSSASAAGGAGKEERRDAVGMWKAFAIPGVITFALCLFFAKLVAYTFLYWLPFYLSQTAIGGKEMSVTSAGYLSALFDVGGIIGGILAGFISDHLNARATTAAIFMYLAIPSLYAFHAYGSTSEVANIGLMMISGLFVNGPYALITTAVSADLGTHKSLKGDSRALATVTSIIDGTGSLGAALGPFITGFISKRGWDSVFTMLIFCALAAGVLLSRIVKSEIVHIIQNRRNHTLDMHNRTAGEDLKHTNVASFSILDMSNNGLLMFSFLFLIDSGAQPLLEGDT

SEQ ID NO: 140502 - protein, 190 aa, Oryza sativa
  Clone ID: PAT_MRT4530_41695C.1.pep
MVKFSREYEASIIPEWKSAFVDYKRLKKLIKRIKVTRRDDSFAAANAAAAGDHLLPPGGAEKEAGGYGFSILDPVRAIAARFSAGQQPSASEDEECPDRGELVRSTDKHEREFMERADEELEKVNAFYTGQEAELLARGDALLEQLRILADVKRILADHAAARRARGLARSRSMPPPPPSSSQKSSVHGS

SEQ ID NO: 140503 - protein, 754 aa, Oryza sativa
  Clone ID: PAT_MRT4530_41697C.1.pep
MADQLRRRWAAADDGVLYEVARRIPCEIDRRHMGRVCNSWRVALVKLKAPAPPPPLPWLALPESDDGLPATVSCVLSGCRTHAFSVLQGARGARYFGSYDGGWLFLAVGGQAQCQALLNLKINGFQTLDLPNLAPVNSVYPNEVNPNRDREMAIVAATLSCQPTEQGCIVAGIIESSPNLVAVGHVTRSIAFWRMGDQVVLPVLWALEEDNPLMRLEEVEDLLCHHGAFHFLTRAEDVLACEEPPVFYRDSVSLVPANMFFLPRVHDENETVLARYLVGSGKKLLMVVRLASGRGQRTTSAFRVFQKKKFNTGEEDEPSQNRSAHFEYYWSELDLDELDGRMLFVGLGCSRSYKAGDGRYPDMEEGVYFLDDPSIHQMIIGDAPKPPYLCSDNGKWSRAPTDPQGQVERCFPERGPSIHSPPPVSELVEEPGQAPRLGSGGTKPQAEVSRWRSRSSAPLPRPVPPCRGRRRLARSTTAAVVIVGSSEPAAAKLATPSASSSAPSWGEEDGDVEGQPPRCGRHRPIRRARRRQARHGSGKLVRCQARHAVGEIVRAVVGEEDGDIEPSALTAAPRRRQIRRVHVRIRRARRCQARHAVGELVRRQARHAVGEIVRAVVGEEDGGVEPSALTAAPRRRQIRRCRHRYSPPSLDPPSPELGRHRSAAGGREKREGDEGRGEEKRTEQRCRDFLAILALKPGMDLTGTDIPTPGVSTPAPARDESQEALIIPTGRGEACDRPGEEAEEEPVDLLRELL

SEQ ID NO: 140504 - protein, 259 aa, Oryza sativa
  Clone ID: PAT_MRT4530_41698C.1.pep
RPAPRSLGGGPTRPAPPASPSRRWPAPSPPPCSPLPWSSPPPSRRRASSLPLSCPWPRRPCPWRPPPSPPSCPSPPSPCPAPCPPRPWRGPSRPPPCRRPRASPGPSPATPRRPRATPCPWSRPWPCRQCPPPCPWPPRPSLSPAPWRRRWPPSPPPRRPCTCPRRPFGRPPASCRTPGMISARSAGGGGSSSPPPAAAGEGGSTTASDDEAPSRRWWCYRRRGRHRAAWRPSTWTWMGSKEAEKSRPRARTLGGRGAN

SEQ ID NO: 140505 - protein, 119 aa, Oryza sativa
  Clone ID: PAT_MRT4530_41699C.1.pep
KSHQHQAEHTVQDANLGQNISNKRNAEPRRVVHPMRCIAEGREGPLGKAPRQRKKPTCHTPPPEHVPPPPRARRRQGNRRHSSSVHPTSTDHRRQRYRVHSTTRPASSKDSDILVNCLH

SEQ ID NO: 140506 - protein, 1254 aa, Oryza sativa
  Clone ID: PAT_MRT4530_4169C.1.pep
MGNIEQLNGSNYASWKEKLEITLALLDIDYALHNDPPVEPRPENENYETLKRIYDEVKAKWDISNRKCLMIIKSSIIDAIRGAVPDTQTAREYLAKVEEQFKGSSKVYATTLIKRLVNERYDFTENLREHIMKKCHMVSKLKSMEMEISEGFLVHFIMSSLPQEFSPFTINYNAMKIKWGIDELIAMCVQEEERLKAERVDHANLFKHSEKKKYKKFKKEYLKPKPIQFKEKGQSSNQSQQNKSGGNPYTEEKGKEKDGCYFCGKSGHRQKDCIGFMRWLSKKGTDVISFVDESLNIDYATNSWWIDSGATIHVANSLQGFAMRRTLRRGQRRIRVANGVETEVEAIGDFTLTLHTGFKLQLHDVLYYRLGHISRGGIERLIKENILYPLDFSDADVDHCIDCIKGKYSKQIKKGANRSMGVLEIIHTDICGPFNEKSDRGGEYYGRHTTYGQIPGPFARFLQENGIKAQYSAPGEPQQNGVAERRNRTLMDMVRSMLSHSTLPVKLWMEALKTATHILNRVPSKSVPKTPFELWTGKKPTLNYFHVWGCPAEARVFNPNMGKLDIKIISCHFIGYPDKSKAYRFYCPNQFTKFIETRHAVFLENDIIKGSMTPREVVLEEKRNYIPMPIIEEPVFSTHTHVAPSIERNNDATPAETPATTSSSVSNDENNEDAQQPQIVIDEQNNEPVRRSQRVRKSAIPSDYVTYINEEVNKPMGEEVNEPILDNDPISFKEAMKSKHSSEWLKAMKDEMKSMSTNKVWDLVEIPEGAKTVGCKWVYKTKRDPKGNIERFKARLVAKGFTQREGIDYNETFSPVSTKDSFRIIMALVAHYDLELHQMDVKTAFLNGDLYEDVYMAQPEGFVMKGKEHMGCHLKKSIYGLKQASRQWYLKFDQIIRQFGFKENKKDDCIYTKFKESKFIFLILYVDDILLASNDKNMLLETKKFLASKFEMKDLGEANYVLGIEIYRGRSNGVLGLSQKAYIEKVLKKYNMHNCSASPAPIMKGDKYGKFQCPKNEYEAAQMKSISYASAVGSIMYAQVCTRPDLAFVTGMLGRYQSNPGLEHWKLAKKTLRYLQGTKDLMLTYRKSENLEVVGYSDSDLAGCVDDKKSTSGYIFTLARGAISWKSSKQRVTTSSTMQAEYVACYEATGQAIWLKNFIPGLRVVDSISKPLKLYCDNKPAVYYASSNKSSASAKYIDIKYHVVKEMIQDQTISIEYMNTKLMLADPLTKGLPPVVFKEHVAGIGLVEKPSILE

SEQ ID NO: 140507 - protein, 90 aa, Oryza sativa
  Clone ID: PAT_MRT4530_416C.1.pep
PPVFLGCPPPPKKFKAASFVDLLVVPVTGGREKLKIWPFLPFFPAEEGGNQRTFFFYKRGLFWGGFFPKPMLPGCFPFFKPFRYCSPFSF

SEQ ID NO: 140508 - protein, 144 aa, Oryza sativa
  Clone ID: PAT_MRT4530_41700C.1.pep
MRPSVWTARPLPPLQGRGPLDFGSLGRPHGLTPLGPALCRRRLRFDCCLPILFPIDGCPPTGSWRVGGIKSGHRIQPPWVFVTNNPTTQQRGEGGGNDATMLLVRQVVDGSVSARRLPFQATLHAAMAASTPTCSLPPRHFLPQ

SEQ ID NO: 140509 - protein, 193 aa, Oryza sativa
  unsure (1)..(193): unsure at all Xaa locations
  Clone ID: PAT_MRT4530_41701C.1.pep
RSDRGGAGMTSEAKRRRREEAPKTRGGEGGSAKTSRRSKAGSGGERQNSVRYARHEERGRGERGKGKKKXNGRGRDAEKRRSRRKERGEREEKGGGGGNTQPVKRGPGTRKGEDARCTRTGGGRKREGVTERTRQREGGSDERGRKGTRSESRQETGHRREGNDTQTGMKGGGRSSVQRIRSGFRYRATRRRG

SEQ ID NO: 140510 - protein, 230 aa, Oryza sativa
  unsure (1)..(230): unsure at all Xaa locations
  Clone ID: PAT_MRT4530_41702C.1.pep
MLQCLEGVKQLCGVLLKCCDLDLKQPKGLEDPEILARETVFSVSEVEALYELFKKISSAVIDDGLINKEEFQLALFKTNKKESLFADRRMMLPHNLLSANNECISFPVXAGFEEFARALSVFHPNAPLDEKIDXYDLKQQGFIERQEVKQMVVATLAESGMNLSDEVIESIIDKKYDIFIAVLSNLTKLPQTQKLSAXHPSLLKNMTLQYLKDITTTFPSFVFHSQVDDT

SEQ ID NO: 140511 - protein, 56 aa, Oryza sativa
  Clone ID: PAT_MRT4530_41703C.1.pep
MHPRANVVYPPSSVSYRCHAGLPTVTASTSRVVSQAGLPAVARSDLLAPPVSASHS

SEQ ID NO: 140512 - protein, 573 aa, Oryza sativa
  Clone ID: PAT_MRT4530_41704C.1.pep
MWRALAAAAAAVAVAVVVAARPAAATDPYAFFDWDVGYVTAAPLGVKQQAKLASIILLGVIGINGKFPGPTVNISTNWNVVVNVLNDLDEPLLITWNGIQHRKNCWQDGVLGTNCPIPSGWNWTYEFQVKDQIGSFFYFPSTGLQRAAGGYGGVVVNNRDVIAVPFGRPDGDITIFIGDWYNKNHTDLRKMLDSGKDLGMPDGVLINGKGPYRYNDSLVPAGIEYETINVDPGKTYRIRVHNVGTSTSLNFRIQGHNMVLVETEGSYTTQQNYTNLDVHVGQSYSFLVTTDQNASSDYYVVASARMDQFDKSFSMNQARSVRWNLSAGAARPNPQGSFRYSSINVTQAYLLRSTAPVTINGRRRATLNGLSFTPPETPLRLADAYGVRGVYSLDFPERPLRGAPRMGRSIINGTYRGFMELIFQNNDTRMQSYHMDGYAFFVVGMDYGEWTEDSRGTYNKGDGVARSTVQVYPGAWAAVLVSLDNVGVWNVRSENLDSWYLGQEVYVRVVNPEDTGNKTEMAIPDNALFCGQLHKQQTPHHKMGTSAAAAAVVGSRVAAAAMLLLAGAVMISP

SEQ ID NO: 140513 - protein, 88 aa, Oryza sativa
  unsure (1)..(88): unsure at all Xaa locations
  Clone ID: PAT_MRT4530_41705C.1.pep
RRRRWWGRRHGVHGWCGPGVVTXHGTCAGTGHTHVAKRGCSWLGVDRRGRRSLKGPPDADCGWSGVDRRWARGGGRPCRGPTGRLQQV

SEQ ID NO: 140514 - protein, 482 aa, Oryza sativa
  unsure (1)..(482): unsure at all Xaa locations
  Clone ID: PAT_MRT4530_41706C.1.pep
MWRALAAAAAAVAVAVVVAARPAAATDPYAFFDWDVGYVTAAPLGVKQQVIGINGKFPGPTVNISTNWNVVVNVLNDLDEPLLITWNGIQHRKNCWQDGVLGTNCPIPSGWNWTYDXYRYNDSLVPAGIEYETINVDPGKTYRIRVHNVGTSTSLNFRIQGHNMVLVETEGSYTTQQNYTNLDVHVGQSYSFLVTTDQNASSDYYVVASARMDQFDKSFSMNQARSVRWNLSAGAARPNPQGSFRYSSINVTQAYLLRSTAPVTINGRRRATLNGLSFTPPETPLRLADAYGVRGVYSLDFPERPLRGAPRMGRSIINGTYRGFMELIFQNNDTRMQSYHMDGYAFFVVGMDYGEWTEDSRGTYNKGDGVARSTVQVYPGAWAAVLVSLDNVGVWNVRSENLDSWYLGQEVYVRVVNPEDTGNKTEMAIPDNALFCGQLHKYQKQQTPHHKMGTSAAAAAVVGSRVAAAAMLLLAGAVMISP

SEQ ID NO: 140515 - protein, 183 aa, Oryza sativa
  Clone ID: PAT_MRT4530_41707C.1.pep
NGIQHRKNCWQDGVLGTNCPIPSGWNWTYEFQDLRKMLDSGKDLGMPDGVLINGKGPYRYNDSLVPAGIEYETINVDPGKTYRIRVHNVGTSTSLNFRIQGHNMVLVETEGSYTTQQNYTNLDVHVGQSYSFLVTTDQNASSDYYVVASARMVNDTVWRRVAGVAVLRYFKSSEDPHKMRSID

SEQ ID NO: 140516 - protein, 182 aa, Oryza sativa
  Clone ID: PAT_MRT4530_41708C.1.pep
MWRALAAAAAAVAVAVVVAARPAAATDPYAFFDWDVGYVTAAPLGVKQQVIGINGKFPGPTVNISTNWNVVVNVLNDLDEPLLITWNGIQHRKNCWQDGVLGTNCPIPSGWNWTYEFQVKDQIGSFFYFPSTGLQRAAGGYGGVVVNNRDVIAVPFGRPDGDITIFIGDWYNKNHTVFDFEK

SEQ ID NO: 140517 - protein, 82 aa, Oryza sativa
  Clone ID: PAT_MRT4530_41709C.1.pep
MGSSTLTVILGLGVVAVTMNNPESRPTPNEADQVFPWAVLHGHVIHPVSQVRSRIAMPHAAVTRRHTPAAPRRACSGINMYT

SEQ ID NO: 140518 - protein, 1407 aa, Oryza sativa
  Clone ID: PAT_MRT4530_4170C.1.pep
MGTPGDQASYASQISGIMGNIEQLNGSNYASWKEKLEITLALLDIDYALHNDPPVEPRPENENYETLKRIYDEVKAKWDISNRKCLMIIKSSIIDAIRGVVPDTQTAREYLAKIEEQFKGSSKVYATTLIKRLVNERYDFTGNLREHIMKKCHMASKLKSMEMEISEGFLVHFIMSSLPQEFSSFTINYNAMKIKWGIDELIAMCVQEEERLKAERVDHANLFKHSEKKKYKKFKKEYLKHKPIQFKEKGQSSSQSQQNKSGGNPYTEEKGKEKDGCYFCGKSGHRQKDCIGFMRWLSKKGTDIISFVDESLNIDYATNSWWIDSGATFHVANSLQGFAMRRTLKRGERRIRVANGVETEVEAIGDFTLTLHTGFKLQLHDVLYVPSMKRNLVSVSRLDNDGYYCTFGNNRCIIMHDNKEVGLAVGWEQLYQISVCDATYNVDSSSNANISTKQKHNDNETSSKLWHYRLGHISRGRIERLIKENILYPLDFSDADIDHCIDCIKGKYSKQIKKGANRSMGILEIIHTDICGPFNEKSVDGFDSFITFTDDYSRYGYIYPIKERSEALDKFKIFKAEVENQHDRKIKIVRSDRGGEYYGRHTTYGQIPGPFARFLQESGIKAQYSAPGEPQQNGVAERRNRTLMDMVRSMLSHSTLPVKLWMEALKTATHILNRIPSKSVPKTPFELWTGKKPTLNYFHVWGCPAEARVFNPNMGKLDLKTISCHFIGYPDKSKAYRFYCPNQFTKFIETRHAVFLENDIIKGSMTPREVVLEEKRNYVPMPIIKEPVFSTHTHVTPSIERHNDATPAEAPATTSSSISNDENNEDAQQPQIVIDEQNNEPVRRSQRVRKSAIPSDYITYMNEEVNEPMSEEVNEPILDNDPISFKEAMKGEHSSEWLKAMKDEMKSMSTNKVWDLVEIPEGAKTVGCKWVYKTKRDPKGNIKRFKVRLVAKGFTQREGIDYNETFSPVSTKDSFRIIMALVAHYDLELHQMDVKTAFLNGDLYEDVYMAQPEGFVMKGKEHMGCYLKKSIYGLKQASRQWYLKFDQIIRQFGFKENKKDDCIYAKFKESKFIFLILYVDDILLASNNRNMLLETKKFLASKFEMKDLGEATYVLGIEIYRDRSNGVLGLSQKAYIEKVLKKYNMHNCSASPAPIMKGDKYGKFQCPKNEYEAAQMKSIPYASAVGSIMYAQVCTRPDLAFVTGMLGRYQSNPSLEHWKLAKKTLRYLQGTKDLMLTYRKSENLEVIGYSDSDLAGCVDDKKSTSGYIFTLARGAVSWKSSKQKVTASSTMQAEYVACYEATGQAIWLKNFIPGLRVVDSISKPLKLYCDNKPAVYYASSNKSSASAKYIDIKYHVVKEMIQDQTISVEYMNTKLMLADPLTKDLPPAVFKEHVAGMGLVEKPLILE

SEQ ID NO: 140519 - protein, 429 aa, Oryza sativa
  Clone ID: PAT_MRT4530_41710C.1.pep
MDAKKKRNKKKKGNQGKNTGDVTSSTAEAAIRSHNHETAPNDHHNGTDADDAMSTVGEEAPQYQNHEPDRQANHDSTNTDDVMSSVGEGIPFQNLDPAMTHENHKVSSTAHADQRSVEMSDSTVELDMHRLYEAKLILPMQDKLHDTIKKLEDEKSLWHQKMSSMEIEVEKLHNKVDYHAQNEVRLEEKLNNLQNGYDVLIKKEVALDNKVRSIEVINDALTHQETSLKERLSGLEETNKVLLVQVKVLEEASNNTVEESQRLVKGFDELASRLGVFEAKSALTEASVTKKGNELIVDRSVNSSAAITSVDNYSPINSSPSNAYVSNHLEEAPMQLPETTINDVSSEGLIDMNAHQRSKQDFDEPRTSEEILPVALDDIQIHEEDPQPPVADDEAEEVPFSDAPIVGAPFRLISFVARYVSGADLVNQK

SEQ ID NO: 140520 - protein, 113 aa, Oryza sativa
  Clone ID: PAT_MRT4530_41711C.1.pep
LKTYPPHATTRRRTTSGRQSLASLLAATAPDCRHPVGEEAALAVADGDGAALGEDVGEVGVLDKCVVAVVEGGAAEVVGDNLVVVDGEGQAVGTLGEVLTATSLLAATPGHRS

SEQ ID NO: 140521 - protein, 175 aa, Oryza sativa
  unsure (1)..(175): unsure at all Xaa locations
  Clone ID: PAT_MRT4530_41712C.1.pep
PVRSIDRIECPRRRRLLGVELDRAGGLPPSPPPPPATRRSLRELVLVLAPLNPPRRRARAGMVVIEREPAVEATPAAADEPAAXEPAAGGAAGGDAARAAGEDEEEAFEDALTDELVREIAICRAHAAQAEWNKFFGAGEYERALSHYETALQIAADLYSVDDIRSACRSNRAVC

SEQ ID NO: 140522 - protein, 78 aa, Oryza sativa
  unsure (1)..(78): unsure at all Xaa locations
  Clone ID: PAT_MRT4530_41713C.1.pep
CYPYSSIKFRYGTNGREIKLPESCWFCLILFYFLXNNLRKVFFLIIIPIFQAFFLYNHFTQLCPGEQISCRTSQDDCL

SEQ ID NO: 140523 - protein, 366 aa, Oryza sativa
  Clone ID: PAT_MRT4530_41714C.1.pep
MADCMQEWPEPVVRVQALADSGLEAIPRCYVKPPCDRPAPEADDASSGASIPVVDLGNGGDDEGGQLAEAVAAACRGWGFFQVVNHGVRPELMRAAREAWHGFFRLPLQEKQKYANSPRTYEGYGSRLGVEKGAILDWGDYYFLVLSPDAAKSPAKYWPANPGICKEVSEEYGREVIKLCERLMRLLSASLGLDETRFQEAFGGADCGAGLRANYYPRCPQPDLTLGLSAHSDPGILTVLLADDHVRGLQVRRRDGHWVTVQPLPDAFIVNVGDQIEILSNSMYKSVEHRVIVNAEEERISLALFYNPRGDVPVAPAPELVTPERPSLYYRPMTFDEYRVYVRKNGPKGKAQLEALKGQSITQNNE

SEQ ID NO: 140524 - protein, 48 aa, Oryza sativa
  Clone ID: PAT_MRT4530_41715C.1.pep
IKHIGNKFDAIYLYMYVTCYLCTLYSCLLASRLRCIHGMPFAIDQLFS

SEQ ID NO: 140525 - protein, 68 aa, Oryza sativa
  unsure (1)..(68): unsure at all Xaa locations
  Clone ID: PAT_MRT4530_41716C.1.pep
PPGKAPPRYRFFCPXKRKVFFFETLNQGGPLHPQAPKGGGWPPPILFTTFGVFFQGGSLKFFPGAHLF

SEQ ID NO: 140526 - protein, 181 aa, Oryza sativa
  unsure (1)..(181): unsure at all Xaa locations
  Clone ID: PAT_MRT4530_41717C.1.pep
GXSXXXXXLDPXSGRGCXGRXSGLXCRVXXASLFXDXXPSLXQAXXSELYXVAGEEFXSXGXKXXTLLXXLEXXTSXFQVXRRXCLGXLIAPXXPXXXRLGXSXVXXXGGWQECGPXPSKWXAXYDXXXXXEGKGXXTELCTVMRXXLHTFGXAXFGXXSGXEPSXXXAMXXSLGRFXLTX

SEQ ID NO: 140527 - protein, 78 aa, Oryza sativa
  Clone ID: PAT_MRT4530_41718C.1.pep
LCGKASCSGPSFMLLIWWESHVLGRRWQKGKLQHQPVKLYPSSNEKINQAVGPLNRIKDILVANNHPAPAIHGHARLS

SEQ ID NO: 140528 - protein, 774 aa, Oryza sativa
  Clone ID: PAT_MRT4530_41719C.1.pep
MMQRPFRPEEYSLKETSPHLGGGAAGDKLTTTYDLVEQMQYLYVRVVKAKDLPSKDITGSCDPYVEVKLGNYKGTTRHFEKKTNPEWNQVFAFSKERIQSSVVEIIVKDKDFVKDDFIGRVLFDLNEVPKRVPPDSPLAPQWYRLEERNGHKVKGELMLAVWMGTQADEAFPEAWHSDAASIPGDGLASIRSKVYLTPKLWYLRVNVIEAQDLIPNDRTRFPDVYVKAMLGNQALRTRVSPSRTLNPMWNEDLMFVAAEPFEEHLILSVEDRIAPGKDDVLGRTIISLQHVPRRLDHKLLNSQWYNLEKHVIVDGEQKKETKFSSRIHLRICLEGGYHVLDESTHYSSDLRPTAKQLWKHSIGILELGILTAQGLLPMKTKDGRGTTDAYCVAKYGQKWVRTRTIIDSFTPKWNEQYTWEVYDPCTVITIGVFDNCHLNGGEKANGARDTRIGKVRIRLSTLETDRVYTHAYPLIVLTPAGVKKMGEVQLAVRFTCSSLLNMMHLYSQPLLPKMHYVHPLSVMQVDNLRRQATNIVSTRLSRAEPPLRKEIVEYMLDVDSHMWSMRKSKANFFRIMGVLSPLIAVAKWFDQICHWRNPLTTILIHILFVILVLYPELILPTIFLYLFLIGVWYYRWRPRQPPHMDTRLSHAESAHPDELDEEFDTFPTSRPPDIVRMRYDRLRSVAGRIQTVVGDLATQGERLQSLLSWRDPRATALFVTFCFVAAIVLYVTPFRVVVFLAGLYTLRHPRFRHKMPSVPLNFFRRLPARTDSML

SEQ ID NO: 140529 - protein, 1225 aa, Oryza sativa
  Clone ID: PAT_MRT4530_4171C.1.pep
MGTPGDQASYASQISGIMGNIEQLNGSNYASWKEKLEITLAMLDIDYALHNDPPVEPRPENENYETLKRIYDEVKAKWDISNRKCLMIIKSSIIDAIRVAVPDTQTAREYLAKIEEQFKGSSKVYATTLIKRLVNERYDFSGNLREHIMKKCHMASKLKSMEMEISEGFLVHFIMSSLPQEFSPFTINYNAMKIKWGIDELIAMCVQEEERLKAERVDHANLFKHSEKKKYKKFKKEYLKPKPIQFKEKGQSSSQSQQNKSGGNPYTEEKEKEKDGCYFCGKSGHRQKDCIGFMRWLSKKGTDVISFVDESLNIDYATNSWWIDSGATIHVANSLQGFAMRRTLRRGERRIRVANGVETEVEAIGDFTLTLHTGFKLQLHDVLYVPSMKRNLVSVSRLDNGGYYCTFGNNRCIIMHDNKEVGLAVGREQLYQISVCDATYNVDSSSNANISTKRKHNDNKTFSKLWHYRLGHISRGRIERLIKENILYPLDFSDADVVHCIDCIKGKYSKQIKKGANRSMGVLEIIHTDICGPFNEKSVDGFDSFITFTNDYSRYGYIYPIKERSEALDKFKIFKVEVENQHDRKIKIFTKFIETRHAVFLENDIIKGSMTPREVVLEEKRNYVPMPIIEEPVFSTHTHVAPSIERNNDATPAEAPATTSSSVSNGENNEDAQQPQIVIDEQNNEPVRRSQRVRKSAIPSDYVIYMNEEVNEPMIEEVNEPILDNDPISFKEAMKSEHSSEWLKAMKDEMKSMSTNKVWDLVEIPKGAKTVGCKWVYKTKRDPKGNIERFKAGLVAKGFTQREGIDYNETFSPVSTKDSFRIIMALVAHYDLELHQMDVKTAFLNGDLYEDVYMAQPEGFVMKRKEHMGCHLKKSIYGLKQASRQWYLKFDQIIRQFGFKANKKDDCVYAKFKEKILASKFEMKDLGEATYVLGIEIYRDRSNGVLGLSQKAYIEKVLKKYNMHNCSASPAPIMKGDKYGKFQCPKNEYEAAQMKSIPYASAIRSIMYAQVCTRPDLAFVTGMLGRYQSNPGLEHWKLAKKTLRYLQGTKDLMLTYRKSENLEVVGYSDSDLAGCVDDKKSTSGYIFTLAKGAVSWKSSKQRVTASSTMQAEYVACYEATGQAIWLKNFIPGLRVVDSISKPLKLYCDNKPAVYYTSSNKSSASAKYIDIKYHVVKEMIQDQTISVEYMNTKLMLADPLTKGLPPIVFKEHVAGMGLVEKPLILE

SEQ ID NO: 140530 - protein, 125 aa, Oryza sativa
  Clone ID: PAT_MRT4530_41720C.1.pep
MDNGSQQESSDLHVHHLPIASIIGVEDRTEEADDAAVDYHDDSSEGQDEVSNKRMKRHTDDQIKHLESVFERCTYLGGNQRVQLAKKLGMEERQVKFWFQNRRTRKKVATWVDKIQLSVRNGGSP

SEQ ID NO: 140531 - protein, 385 aa, Oryza sativa
  Clone ID: PAT_MRT4530_41721C.1.pep
LRINKSSGNKVSLNRAPHKHFLHLEPSQYLHIINHGNTTPAINARTSSPSTSSPFRPVSRRRSSNRRRRRRRRARNAAQACHCRCTRGEQPQTTRKNTQERAEKRSDLNPARKPGIEQKNPPTPTIRKKPAATYARTQQARRFTPFSQAHFHFRKSKRKTSTHARTHTPPKIKARTEPRPLKNPQETVTQPPPRFPFPNLYRARPKPQIGENQRGGNGTGITRKAAKKKAGMDGKNGNKDIPKDSSGLTTRSLPRVRGGGTKTGSFGGEWGGEGRGRRGEARFFDFPQGFSREQKQTLWRERESGAGRGEAALEACVVVEVVVGWPVAFFFRNAKGVAVLRVAPWVLGIWQFRAGGKGWMGFFCVLDPTMGFWGFEGGGEWRQEC

SEQ ID NO: 140532 - protein, 159 aa, Oryza sativa
  Clone ID: PAT_MRT4530_41722C.1.pep
RRSGSHAGRRSRVRGRGAAPDGVELGGPSVPAAAALKRAGVPEDEMANLERQLAPGPSTAPPAPSTANRMMNFVSAGVQAQAESSSRQQQAAAANNEDIELPDESDEEEDDDQIAKKSVPAAVFGELGNRAAENREEESSGAQENGQLGALERIKRRRQ

SEQ ID NO: 140533 - protein, 48 aa, Oryza sativa
  Clone ID: PAT_MRT4530_41723C.1.pep
RSIYWSVVFMITRICLGVFLAKNKFLILDQGIHALQIMGGINKLMPLV

SEQ ID NO: 140534 - protein, 89 aa, Oryza sativa
  Clone ID: PAT_MRT4530_41724C.1.pep
MASRWIRPEVYPLFATTGVAVGICAMQLVRNITTNPEVRVTKENRAAGVLENFDEGKRYSQHGVRRFWLSKRRDYMQALDNPTNPSTKK

SEQ ID NO: 140535 - protein, 229 aa, Oryza sativa
  Clone ID: PAT_MRT4530_41725C.1.pep
MMGATSPSGLELTMAVPGLSSSGSEGAGCNNNNAGGGCNMRDLDINQPASGGEEEEFPMGSVEEDEEERGVGGPHRPKKLRLSKEQSRLLEESFRLNHTLTPKQKEALAIKLKLRPRQVEVWFQNRRARTKLKQTEMECEYLKRCFGSLTEENRRLQREVEELRAMRVAPPTVLSPHTRQPLPASALTMCPRCERITAATGPPAVRPPPSSAAAAAPSPFHPRRPSAAF

SEQ ID NO: 140536 - protein, 82 aa, Oryza sativa
  Clone ID: PAT_MRT4530_41726C.1.pep
MMLQEQEEENAVLPQAEEGKPLESARLVDRQLRHLPEAFERIQGLRVLNDWRNQVQDIPYALGGLDHVEKLHDANNAHDSYY

SEQ ID NO: 140537 - protein, 53 aa, Oryza sativa
  unsure (1)..(53): unsure at all Xaa locations
  Clone ID: PAT_MRT4530_41727C.1.pep
ALLGCTCCCAGAGRLQTDIAYNFAIKTYKPEQRTGNADNRKERKXEXDLHCMT

SEQ ID NO: 140538 - protein, 95 aa, Oryza sativa
  unsure (1)..(95): unsure at all Xaa locations
  Clone ID: PAT_MRT4530_41728C.1.pep
MERTRRTSASDVGAPHPAERIPSFQRRRVEKVDTARGSPNRSKPRLLESSMPPLPCTPPPPPPSASXPPPPPPPPTPCPPPAPAPPRRRLRLLSL

SEQ ID NO: 140539 - protein, 85 aa, Oryza sativa
  Clone ID: PAT_MRT4530_41729C.1.pep
MENCGGRPLMGRTSNDPSDGTGHTYLHSAGGRCDVGAQLSVQSDVTGDRPVTDRSFLTVARQSGMPHVCPYRIECGRGQLGRCVH

SEQ ID NO: 140540 - protein, 611 aa, Oryza sativa
  Clone ID: PAT_MRT4530_4172C.1.pep
MGNIEQLNGSNYASWKEKLEITLALLDIDYALHNDPPVEPRPENENYETLKRIYDEVKAKWDISNRKCLMIIKSSIIDAIRGAVPDTQTAREYLAKVEEQFKGSSKVYATTLIKRLVNERYDFTENLREHIMKKCHMVSKLKSMEMEISEGFLVHFIMSSLPQEFSPFTINYNAMKIKWGIDELIAMCVQEEERLKAERVDHANLFKHSEKKKYKKFKKEYLKPKPIQFKEKGQSSNQSQQNKSGGNPYTEEKGKEKDGCYFCGKSGHRQKDCIGFMRWLSKKGTDVISFVDESLNIDYATNSWWIDSGATIHVANSLQGFAMRRTLRRGQRRIRVANGVETEVEAIGDFTLTLHTGFKLQLHDVLYYRLGHISRGGIERLIKENILYPLDFSDADVDHCIDCIKGKYSKQIKKGANRSMGVLEIIHTDICGPFNEKHTTYGQIPGPFARFLQENGIKAQYSAPGEPQQNGVAERRNRTLMDMVSLGDQEHAVFLENDIIKGSMTPREVVLEEKRNYIPMPIIEEPVFSTHTHVAPSIERNNDATPAETPATTSSSVSNDENNEDAQQPQIVIDEQNNEPVRRSQRVRKSAIPSDYVTYINEEVNKPMGEE

SEQ ID NO: 140541 - protein, 108 aa, Oryza sativa
  Clone ID: PAT_MRT4530_41730C.1.pep
HHQLTRLHSPLPPWHRLHLYHLSLSFRREYHNQLHLMKKKPCLQLLCSRRSEVVQSSIQRRVRLRKPIFSCQNCRKPYILRLWHITQVLWSQGLIKSHFSFKCHAIHL

SEQ ID NO: 140542 - protein, 177 aa, Oryza sativa
  Clone ID: PAT_MRT4530_41731C.1.pep
QRCRDRAVVCCLLGGRQVGRRRGARRWPLPGGPSGVGAEPAAEGDADLGVRDGGAERRRAEGGRWGRDSGERGNPRSRRSSRPSLHGMLPSVAHSSAPSSMPWGPHLPPAGPNEARGGKDMRARHVGVLVKMCWCGRGSLTRLFGFLQEVEAVPPAPLQHLPATTPKHAPRTRLKKG

SEQ ID NO: 140543 - protein, 76 aa, Oryza sativa
  Clone ID: PAT_MRT4530_41732C.1.pep
MQLSAKIGFSPLRRCSLLLQFCFAAVSGTFVFDVLHREKVTIRFLEALRATAPSSLACCAPSSTPATASTSYQWRT

SEQ ID NO: 140544 - protein, 66 aa, Oryza sativa
  Clone ID: PAT_MRT4530_41733C.1.pep
MAYPRPSQAINRRLKDAIDGCQPELMLGRSDCLARGIICTKKISGGSHGYNASSGARDLVVGLETP

SEQ ID NO: 140545 - protein, 197 aa, Oryza sativa
  unsure (1)..(197): unsure at all Xaa locations
  Clone ID: PAT_MRT4530_41734C.1.pep
MAAAIPPEASGLAHDLGSAAVTAGVALALLRFFEELAKRGVFEQKLNRKLVHITIGMVFLLFWPLFSSGSYAPFLAAVAPGINIIRMLLLGLGVMKNEAMXLLKGPLYYATTITFATSIFWRTSPIAIALICNLCAGDXYMHYFQSFGFIEESWSLAFGFLVVSVTAALVESHPISTHLDDNLTVPLTSFLVGSLVF

SEQ ID NO: 140546 - protein, 227 aa, Oryza sativa
  Clone ID: PAT_MRT4530_41735C.1.pep
AVTAGVALALLRFFEELAKRGVFEQKLNRKLVHITIGLVFLLFWPLFSSPRYAPLREPVAPGINISGMLLGKRGVMKNEAMVKSMSRSGDPRELLKGPLYYATTITFATSIFWRTSPIAIALICNLCAGDGIADIVGRRLGQEKLPYNPNKSYAGSIAMALAGFMASIGYMHYFQSFGFIEESWSLAFGFLVVSVTAALVESHPISTHLDDNLTVPLTSFLVGSLVF

SEQ ID NO: 140547 - protein, 69 aa, Oryza sativa
  Clone ID: PAT_MRT4530_41736C.1.pep
MRKIPGSAVRMATPTVPPPWLSLKVFLLRVSTCEVYESMLNSVTWTHAPLTRDTELNESGGSITSNGHV

SEQ ID NO: 140548 - protein, 68 aa, Oryza sativa
  Clone ID: PAT_MRT4530_41737C.1.pep
VGRLAQLGIAFSIIGGIFTGKGALAQLYIEAGVPPPQIEPLGLFNVVFFFIPAVNPGTGKFVFACAQK

SEQ ID NO: 140549 - protein, 84 aa, Oryza sativa
  Clone ID: PAT_MRT4530_41738C.1.pep
PRPTSHRRFCPSSGLISLSLSLTSHLSLSLSPPGTFAGIDGLHMFLEDFRDRYKHACCRPNLSSFLELILHLNFFWIKKKVYQL

SEQ ID NO: 140550 - protein, 83 aa, Oryza sativa
  unsure (1)..(83): unsure at all Xaa locations
  Clone ID: PAT_MRT4530_41739C.1.pep
DVSGCFSXXXTHRXXRXXAKPVLAGSXXLXXAAGXNNAARRLNVXXPXPSRPXGLTLSGEDLIGSLPGHVRSAIVSRLPVADA

SEQ ID NO: 140551 - protein, 74 aa, Oryza sativa
  Clone ID: PAT_MRT4530_4173C.1.pep
YVPSYKFMTFSSGPRTCLGKDMAFVQLKAVAGAVVKCSNLETIPAHVVEPALSIVLNMKNALMVRVKRRHVLNN

SEQ ID NO: 140552 - protein, 132 aa, Oryza sativa
  unsure (1)..(132): unsure at all Xaa locations
  Clone ID: PAT_MRT4530_41740C.1.pep
VVLVHWAYMGSFITGTWHSGCSPHMIDSSTAVREATLYKDGATKQHALLVCTLAGTXTTCCWRMPDATTCTGSKARNDEXTREVSCYLDNVGYNADKNGLLPICDFAGDNTTERTTNLDWDNVPNLVDAIDQ

SEQ ID NO: 140553 - protein, 61 aa, Oryza sativa
  unsure (1)..(61): unsure at all Xaa locations
  Clone ID: PAT_MRT4530_41741C.1.pep
XKSLNKGXYPKVPYXVXXXQISREHXLXRRXFNGLXFTAVNCXAFNPQSMXNANISISLVH

SEQ ID NO: 140554 - protein, 93 aa, Oryza sativa
  Clone ID: PAT_MRT4530_41742C.1.pep
VHNLQVKERNYINYACRLPLLIKFICYNKTCMCFIVFHELISVCPSTKCYYLVIHMAGDEDGMCLINNFFYNIYKIKLLLVQHIILYNTKMIV

SEQ ID NO: 140555 - protein, 707 aa, Oryza sativa
  Clone ID: PAT_MRT4530_41743C.1.pep
MAMYREYREDRGGSATPSERSMQLDRSPERATPLPSPDMTPPAAPRPSLQLPPLETKDGGGAPAVWRLPRLSLDSRAVVDARGKLRPRDIRTSPAAPPSPGAGGGDERRSPSVVARLMGLDALPRGAPDERDAAPCGGELRRSASERVPRDPACFRFVDPSFFERPSPPVTPQQQRPSSPAVEAALRRAPDPACPRGGIQRRSRFDAHDVFPEPAKRVVDSAAAGHGEIALYGEIERRLRKRGIAEPARDLETLKQILEALQLKGLLRHTPPPPVSSLRTQPPPPPIVVMRPSSRPPQPPASRTSPTRRVRVDADNARRPRSPDRAASPARSPASPARRGPQSPQRRVSPAQSPRYQPPLRKPSTGDRSRIARRGGHGSAALSPDDDASTTFSDGTSSGSLSASSRWDFEVSPPPPPMAATISEFLSSNESFAMQQRARPDELRTDRGLLERCGKLLSSIQAFTAGDDQQPSPVSVLDAAAFLADEDSPSSSGSKRAIFFGAAAPAPHAATASASDQDDDDDQWDTWTVGPDVDPDYAYVAEVVKVFDRTTRDPSAVYAAAAKTTTGGDDDTCPHHRMLLCAAAVEALDRRRAACAWDPVSWLRGGELVDHVWAEVRRAREPVAAPDADLDLNELIRVGVVRDLAADHHRWPPSSSQLLPGAEVADAVLQIERLVFKDLVADTIRELARRRPPHCHVGNCGGRQEKQ

SEQ ID NO: 140556 - protein, 88 aa, Oryza sativa
  unsure (1)..(88): unsure at all Xaa locations
  Clone ID: PAT_MRT4530_41744C.1.pep
SNPPPSPSSRRRRQHCRAVAREARGWARXGAKRHRKXLRVNIQGFTKSAIRRLARRVGVKPFSGLIYEETRGVLKIFLEGGPGTQFAL

SEQ ID NO: 140557 - protein, 41 aa, Oryza sativa
  Clone ID: PAT_MRT4530_41745C.1.pep
DVVNHRRMVRSGDIGDGLERLRGLPPATVGSCSRAASTRSA

SEQ ID NO: 140558 - protein, 186 aa, Oryza sativa
  Clone ID: PAT_MRT4530_41746C.1.pep
MAALVISKQRSHQQQSSDRRRKPSSHFASPQSMRGFNAVNCRAFHSSVSIGILPSPPPPPARTYSSPEPKTPKSQPHHGKKRSRAISISPSTSPPSRPELWAGPAFSNSPPPSSLPIPKFSLHQKRSVSLELPPAGRSDDVVVPLHAKSAPSSPTAGSGVSFFSDSDTAIATENLRRILHLKIADH

SEQ ID NO: 140559 - protein, 154 aa, Oryza sativa
  Clone ID: PAT_MRT4530_41747C.1.pep
FFSSSSSSSSWLLLSTWQTINVPFYFLLPFLRGLLIRRDRDDWEQRRRRWRGAKAEAAERPGRQPRPLRGHHHGVVQLREVRGERRRPRDRLPRRLTVMLRRGEAHARSPETSPLSDDLHPSQQVSQSISSQGSSSGSNFEMRRSMKGLYNPMH

SEQ ID NO: 140560 - protein, 63 aa, Oryza sativa
  Clone ID: PAT_MRT4530_41748C.1.pep
IDVLAYVLPVDYEDYSNLMVATSSRDEYHEAHCDKQTCSTTAQDHISISQRDQLHKSNTTNRR

SEQ ID NO: 140561 - protein, 61 aa, Oryza sativa
  Clone ID: PAT_MRT4530_41749C.1.pep
GTNEEADTDGHLEDEDEVSRRKIPSQIQEATTARPSTLDSSPYSWIDLVLPSLPLYLNLGF

SEQ ID NO: 140562 - protein, 1296 aa, Oryza sativa
  Clone ID: PAT_MRT4530_4174C.1.pep
MGTPGDKASYASQIAGIIGNIEQLNGSNYASWKEKLEITLAQLDIDYALHNDPPVEPIPENENYETLKRRYDEVKAKWDISNRKCLMIIKSSIIDAIRGAVPDTQTAREYLAKVEEQFKGSSKVYATTLIKRLVNERYDFTGNLREHIMKKYHMASKLKSMEMEISKGFLVHFIMSSLPQEFSPFTINYNAMKIKWGIDELIAMCVQEEERLKAERVDHANLFKHSEKKRYKKFKKEYLKPKPIQFKEKGQSSNQSQQNKSGGNPYTEEKGKEKDGCYFCGKSGHRQKDCIGFMRWLSKKGTDVISFVDESLNIDYATNSWWIDSGATIHVANSLQGFAMRRTLRRGERRIRVANGVETEVEAIGDFTLTLHTGFKLQLHDVLYVPSMKRNLVSVSRLDNGGYYCTFGNNRCIIMHDNKEVGLAVGWEQLYQISVCDATYNVDSSSNANVSTKRKHNDNETSSKLWHYRLGHISKGRIERLIKENILYPLDFSDADVDHCIDCIKGKYSKQIKKGANRSMGVLEIIHTDICGPFNEKSVDGFDSFITFTDDYSRYGYIYPIKERSEALDKFKIFKAEVENQHDRKIKIVRSDRGGEYYGRHTTYGQIPGPFARFLQESGIKAQYSAPGEPQQNGVAERRNRTLMDMVRSMLSHSTLPVKLWMEALKTATHILNRVPSKSVPKTPFELWTGKKPTLNYFHVWGCPAEAQVFNPNMGKLDLKTISCHFIGYPDKSKAYRFYCPNQFTKFIETRHAVFLENDIIKGSMTPREVVLEEKRNYVPMPIIEEPVFSTHTHVAPSIERNNDATPAEAPATTSSSVSNDENNEDAQQPQIMIDEQNNEPVRRSQRVRKSAIPSDYVTYMNEEVNEPMSEEVNEPILDNDPISFKEAMKSEHSSEWLKAMKDEMKSMSTNKVWDLVEIPEGAKTVGCKWVYKTKRDPKGNIERFKSRLVAKGFTQREGIDYNETFSPVSTKDSFRIIMALVAHYDLELHQMDVKTAFLNGKEHMGCHLKKSIYGLKQASRQWYLKFDQIIRQFGFKENKKDDCIYTKFKESKFIFLILYVDDILLASNDKNMLLETKKFLASKFEMKDLGEATYVLGIEIYRDRSNGVLGLSQKAYIEKVLKKYNMHNCSASPAPIMKGDKYGKFQCPKNEYEAALMKSIPYASAVGSIMYAQVCTRPDLAFVTGMLGRYQSNPGLEHWKLAKKTLRYLQGTKDLMLTYRKSENLEVVGYSDSDLAGCVDDKKSTSGYIFTLARGAVSWKSSKQRVTTSSTMQAEYVACYEATGQAIWLKNFIPG

SEQ ID NO: 140563 - protein, 49 aa, Oryza sativa
  Clone ID: PAT_MRT4530_41751C.1.pep
MEQRRSVHSAVSRVAGADSFWAGEPSRQGFHSFTQVLNLDYERHCSSSA

SEQ ID NO: 140564 - protein, 50 aa, Oryza sativa
  Clone ID: PAT_MRT4530_41752C.1.pep
FIIPTATSYRGAGYANDYPVPPLRFLLLLIHLDGLSRLGLSISPKSNIIL

SEQ ID NO: 140565 - protein, 89 aa, Oryza sativa
  Clone ID: PAT_MRT4530_41753C.1.pep
MASSQARYVEIEVKRVDVDLTVGQAGVGIHGKDAHELADGDQFCSDSLSCLLCRLKFAIATPSSLLDPVADRVFDDSRDEEYWFRSDNN

SEQ ID NO: 140566 - protein, 223 aa, Oryza sativa
  Clone ID: PAT_MRT4530_41754C.1.pep
MEPLMLLRKVSTSTSAARAASSAASASASALAAANSAAASLAALAAAATDEDVRHPPRRVVQGGYGAYNAYITAATRYAALGTPTSYDHPGPAYGNRVAQRSHEILGQEVAVDTAEPLEGGSGGGYLEPAEAYGPYGAYGSLLPYGRFSGSLGYDYGYGPSGNSSRHGNTVYLENNIRLKPGIEHPEVSKPMQIEFHCIFVIRSAHMAGFSFGDIAMASYGVT

SEQ ID NO: 140567 - protein, 299 aa, Oryza sativa
  Clone ID: PAT_MRT4530_41755C.1.pep
MLGSLMSYSPSVDSKTENTDELIATGVLASLQNFIRKCIVAVLSYGPMPKHIAFIMDGNRRYAKFRSIQEGSGHRVGFSALIASLLYCYEMGVKYITVYAFSIDNFKRDPTEVKSLMELMEEKINELLENRNVINKVNCKINFWGNLDMLSKSVRVAAEKLMATTAENTGLVFSVCMPYNSTSEIVNAVNKVCAERRDILQREDADSVANNGVYSDISVADLDHHMYSAGCPDPDIVIRTSGETRLSNFLLWQTTFSHLQNPDPLWPEFSFKHLVWAILQYQRVHPSIEQSRNLAKKQL

SEQ ID NO: 140568 - protein, 350 aa, Oryza sativa
  Clone ID: PAT_MRT4530_41756C.1.pep
MSLQVPNVQELALTCNRPDQQIPDRYIRPEAGTEEVICGQGINTAIPVIDLAKLLNPQSSQEECAKLRSACQHWGFFQLVNHGVPDDVISDVRRDLTEFFKLPLEAKEAYAKPPDKYEGYGQHFVVSEKQKLDWGDLLHLRLRPTESRDLRFWPAHPSSFRNSMERYSLETAKVARCLLEFLAMDMGVDPESLLEVFRGQPQNMRVNYYPPCRQTGKVLGLSPHCDATSLTLLLHVNDMQGLQIRKDGKWLTIEALDGAFVVNVGDMLEILSNGRYRSVEHRAVVHPEKERISAAVFHQACRDATVGPLPELVTKDGGRPVYKSMAYEDFMKRFFSAKLDGRANVEGMKI

SEQ ID NO: 140569 - protein, 203 aa, Oryza sativa
  Clone ID: PAT_MRT4530_41757C.1.pep
NYEFFYSPTSCGGTKYEPLIGSDPKAIIRRYRQLLGMVPRRWKSKEGQADRKISSRSHGGHLAISFLHRDGEAAKSELKHADDAPPLNTDGNHWHYRRRSREDEAAPFSPSSIRGSPIRRNISIQIPSPGTRFSHQGLGSRNQTQPRPSIYRQRRRRHSRSHQGRLRWPRGAGHVAAASTAPPLPRRKDAIGPMGRAGCGGST

SEQ ID NO: 140570 - protein, 161 aa, Oryza sativa
  Clone ID: PAT_MRT4530_41758C.1.pep
MKKLVQQMQHMCLGCYSMTRQGKLIQKNKVEFPKLIEEKTDKKPDGEQDGDREESKPTLQDHIDSAVHHALINQSSVLVNTLTGMIKSVVDGSIDEEKTKGPIYFPNLVFPSYKTVRTKLGSGQHQTTPTSVPIAPGVDTILLTRQQPISGVQTSNTLALE

SEQ ID NO: 140571 - protein, 110 aa, Oryza sativa
  Clone ID: PAT_MRT4530_41759C.1.pep
FRQGGAGPPGTRRTAPGAPRRRRPCPSTTPPSAARSTASRASPRTAPRRAACPPRGRPAVSPARAPRSPARRRSRPPPRPSAPRRAPGPPARARRPAGRRGRTPAPTCRP

SEQ ID NO: 140572 - protein, 61 aa, Oryza sativa
  Clone ID: PAT_MRT4530_4175C.1.pep
CSTCLHVLIHIDRQACHGCLYAPSTKAAATCRYLLMFICKERECLILMFNPRVSVFVRQIR

SEQ ID NO: 140573 - protein, 93 aa, Oryza sativa
  unsure (1)..(93): unsure at all Xaa locations
  Clone ID: PAT_MRT4530_41760C.1.pep
PVSPXRXPVPLPTXAPMRRPHPSPRPPVRLPRPPVRRPARYRGEMEGKGRLERTGGRKGRKRXLTTARPQETERERRDLEGKSEXRGVCHLHV

SEQ ID NO: 140574 - protein, 52 aa, Oryza sativa
  unsure (1)..(52): unsure at all Xaa locations
  Clone ID: PAT_MRT4530_41761C.1.pep
AELLYHRFVKLIFGSLCGGNKADYGIIVGHDKQFTEEILMLKKKKKKKXKKK

SEQ ID NO: 140575 - protein, 75 aa, Oryza sativa
  Clone ID: PAT_MRT4530_41762C.1.pep
IGGPWFQQGLLIARSPSCLACRSRHRLGARRFQGSMPPCRSTSDAKGALWIHLLDSSSEASCSSRLFYQINRLGR

SEQ ID NO: 140576 - protein, 80 aa, Oryza sativa
  Clone ID: PAT_MRT4530_41763C.1.pep
IWKDILQEYADELQNYSMSRQYSMNLFPFFTWTEDLIRCCLCFDPLPTCLFFTFFFFCKTLLRARFGYRKTFCETMSTSC

SEQ ID NO: 140577 - protein, 70 aa, Oryza sativa
  Clone ID: PAT_MRT4530_41764C.1.pep
MSDKCGNCDCADKSQCVKKGTSYGVVIVEAEKTTSRGRRARDGVQATVSDAEARSTHHPARLYAITLGWG

SEQ ID NO: 140578 - protein, 186 aa, Oryza sativa
  unsure (1)..(186): unsure at all Xaa locations
  Clone ID: PAT_MRT4530_41765C.1.pep
MGIITTKAVYSSSQNSPALCHNGKFIWDNRAPPRVXFFAWLIAKDRLPTKVNLHKKNIVQSPKCKLCSDEDETVSHLFLHCPFADEFXRSLNIHPGISRVQDLSGLVAPRQLPAKHFQVLYLLCFWGLXIHRHDVVFRDLPKSLLRMVAKCMEDANLWAECFRREDRVVVSIWKDLLSSSVHVTRH

SEQ ID NO: 140579 - protein, 249 aa, Oryza sativa
  Clone ID: PAT_MRT4530_41766C.1.pep
LTRKLNSIHKSSKSFPRTFLFYIDPCFFDFPIAPIRSENNNPSPIHVHKHAFVKRRGRPTWRGGPRRRPGGRPPFRGGGGGGPRRGGSPCGNSPTGGPPAFLRGSCWGCTCSNSLGGGCCCSPLAHTSSTRSRGVRIHGAQVREAGGRLAVAAPHAAAALDRPLDPWEQRVQTAMVRREHHAMVRPGGGGVVVDQLRQLGKLVLQARQWRKKGRRGRRRVRAERRVERGREASRLQLAPFHARIHAATN

SEQ ID NO: 140580 - protein, 235 aa, Oryza sativa
  unsure (1)..(235): unsure at all Xaa locations
  Clone ID: PAT_MRT4530_41767C.1.pep
AEEERTALATRLKRRRSSGRRXRRCSGGQQRRRRGGQGRRRLGDPNGGLPERXRRPERRRRTAGATAATAARGLTALGRFRRREAKARVATGRGELGDPFKGVQGRRRRPTATXATTKETSGKTNPKQTRIHRFPNRFSRCFQRGKGRGDLEDHFPSIDFTGKGKERPDLEGNGGGAALGFRAAAXRGRRRXLTGGPHLTASEGARARLRTGPTWAEEREKGFGPTFGPKPKETF

SEQ ID NO: 140581 - protein, 348 aa, Oryza sativa
  Clone ID: PAT_MRT4530_41768C.1.pep
MASRILLPILLFLLCSRGGSGAPAARRGMRVPPLGGDPVKFDFSPFLIEYKSGRVKRLMGTDVVAASADVLTGVSSRDVAIDPANDVRARLYLPSFRATAKVPVLLYFHGGAFVVESAFTPIYHAYLNTLAAKAGVLAVSVNYRLAPEHPLPAAYDDSWAALKWVLANAAPGTDQWVSQYGDLSRLFLAGDSAGGNIAHNLALRAGEEGLDGGARIKGVALLDPYFQGRSPMGADAMDPAYLQSAARTWSFICAGKYPIDHPYANPLALPASSWQRLGCSRVLVTVSEQDRLSPWQRAYYATLRSSGWPGQAELYETPGEGHVYFLTKLSTPQAQAEMATLVAFINRN

SEQ ID NO: 140582 - protein, 108 aa, Oryza sativa
  unsure (1)..(108): unsure at all Xaa locations
  Clone ID: PAT_MRT4530_41769C.1.pep
MVRIETMLREEQRSSAVEIPCEKATRVRIFGGQLRSTVGSGXTREQLRCKWSMIMGDEVGYEMVHSGWTPCGRDLCNGLHEVFGLTIEQITSLGWMANARGAPSQLTS

SEQ ID NO: 140583 - protein, 1109 aa, Oryza sativa
  Clone ID: PAT_MRT4530_4176C.1.pep
MEQKIKFKEEPSAPAPATESHHCRFPLCAVAINRNRYLSANPKIRLLPDQAKPTENTGKNRNTSLSVLPNKREREKNKDREWEPLEIKGFDQYSQIAGIMGNIEQLNGSNYASWKEKLEITLALLDIDYALHNDPPVEPRPENDNYETLKRKYDEVKAKWDISNRKCLMIIKSSIIDAIRGAVPDTQTTREYLAKVEEQFKGSSKVYATTLIKRLVNERYDFTGNLREHIMKKCHRASKLKSMEMEISEGFLVHFIMSSLPQEFSPFTINYNAMKIKWGIDELIAMCVQEEERLKAERVDHANLFKHSEKKKEQLYQISVCDATYNVDSSNANVSTKRKHNDNETSSKLWHYRLGHISRGRIERLIKENILCPLDFSDADVDHCIDCIKGKYSKQIKKGANRSMGVLEIIHTNICGPFNVKSVDGFDLFITFTDDYSRYGYIYPIKERSEALDKFKIFKAEVENQHDRKIKIVRSDHGGEYYGRHTTYGQIPGPFARFLQENGIKAQYSAPGEPQQNGVAERHNRTLMYMVRSMLSHSPLPVKLWMEALKTAAHILNRVPSKSVPKTPFELWTGKKPTLNYFHVWGCPAEARFFNPNMGKLDLKTISCHFIGYPDKSKAYRFYCRNQFTKFIETRHAVFLENDIIKGSMTPREVVLEEKRNYVPMPIIEEPVFSTHTHVAPLIERNNDATPAEAPATTSSSVSNDENNENAQQPHVVIDEKNNEPVRRSRRVRKSAIPSDYVTYMNEEVNEPMSEEVNEPILDNDPISFKEAMKSEHSSEWLKAMKDKMKSMSTNKVWDLVEIPEGAKTVGCKWVYKTKRDLKGNIERFKARLVAKGFTQREGIDYNETLSPVSTKDSFRIIMALVAHYDLELHQMDVKTAFLNGDLYEDVYMAQPEGFVMKGKEHMGCHLKKSIYGLKQASRQWYLKFDQIIRQFGFKENKKDDCIYAKFKETSPAPIMKGDKYGKFQCPKNEYEVAQMKSIPYASVVRSIMYAQVCTRPDLAFVTGMLGRYQSNPGLQHWKLAKKTLYLQGTKDLMLTYRKSENLEVVGYSDSDLAGCIDDKKSTSGYIFTLAGGAISWKSSKQKVTASSTMQAEYVACYKATGQAI

SEQ ID NO: 140584 - protein, 90 aa, Oryza sativa
  unsure (1)..(90): unsure at all Xaa locations
  Clone ID: PAT_MRT4530_41770C.1.pep
GXGARARKPGXGVVTGGWAAGGDHRRQRRRXSRRGRXTXAAPSEPASGRRSGSCAXRRGGEERGHGHDHEVEARHGMAARRARVWVFEVG

SEQ ID NO: 140585 - protein, 159 aa, Oryza sativa
  unsure (1)..(159): unsure at all Xaa locations
  Clone ID: PAT_MRT4530_41771C.1.pep
MALRSVYTLHTASAAPRAATVFGILLXSWTPSSSPPQGPSSETSAAAVEENQSLPPXDSQASAAPRAATANGIRLLTANLAPALRPPPSRFDXAAPRAAAAAGEAFCPDSQAILPYAVAKDTTSTQSRYLLAKDTPATLRPPPSEGTPPSTPEHLSSRT

SEQ ID NO: 140586 - protein, 978 aa, Oryza sativa
  Clone ID: PAT_MRT4530_41772C.1.pep
MVGGSRLFLLLLLPLLLLLLGAGCRDGRRCAAAAAQTQRLPQQEVEALKGIARKLNKMDWDFSVDPCTGSKTWVNASDSNSYPKSSYPNFPVSNLTCDCSFKNNTECHVISLELMRQNLSGVLPEEVVNLTYLTNLSLQGNRISGTVPKELGRMPFLKSINLEGNQLEGHIPPEFGNIISLERFFISANDITGELPSTFSRLTNMTDLDMQGTLMSGPIPPEISLLNNLTELRVTDLSGPSMKFPPLQNAQHLTKVVLRNCSIYGEIPPYLGQMQYLILMDLSFNKLTGQIPQNFDRMVALQLQYLDVSFNNFTGNPPNECQQANVNMVSSFSSSNDNLLQPCLRKNLPCMDKPRYSSLFINCGGKSVEVNGNIYEDDSSRIGTSTFVLSNDRKWAYSSTGDFVGNPDADYIARNTSELTLDHPELYTEARLSPLSLKYYGVCMENGEYSVELHFAEIVFTEDHTFSSNGKRIFDVFIQGTKVLKDFNIQDEAGGVHRVITKTFTTNITDNTLEIHFYWAGKGTTGVPDRGVYGPLISAISVIQLAACLIVILALILCYIKFFRKKNLKGNGLQFFYHGRKTDTSDLQTRTQYFFSLKEIESATKNFDPANKIGEGGFGPVYKGTLANGTTVAVKKLSSQSSQGNREFLNEIGIISALRHPNLVRLFGCCIDGEQLLLIYEFLENNSLGRALFGRGDHQLKLDWPKRYNICLGTAKGLCYLHEESTLKIIHRDIKPSNILLDERLQPKISDFGLAKLNDDRGRMSTRIAGTVGYMAPEYATRGCLTCKADVYSFGVVTLEIVSGMSNTSSMSDDEYLHLLDWAERLKQEGRLLEIVDQRLGSHYSQEEALRMLNVALLCTNTSPVQRPRMSSVAQLLPIQSIHEQQPNGVVLRAIERSFDLAAEQYGEWLPPIFKLPFFKALGRLLFGGQVEKTCNIITVQCKLVSALVNLKKKEKVHSRSLNLSSSYNTVLEPQNRI

SEQ ID NO: 140587 - protein, 74 aa, Oryza sativa
  Clone ID: PAT_MRT4530_41773C.1.pep
GRYYVSASCHKGPCAHLAAVVVEVGPVCVSALSYVEEGGRIVVNLFLMPSYAVSDQHCSYTRPRSGSKGQPRLK

SEQ ID NO: 140588 - protein, 189 aa, Oryza sativa
  Clone ID: PAT_MRT4530_41774C.1.pep
MSTRIAGTVGYMAPEYATRGCLTCKADVYSFGVVTLEIVSGMSNTSSMSDDEYLHLLDWAERLKQEGRLLEIVDQRLGSHYSQEEALRMLNVALLCTNTSPVQRPRMSSVVSMLCGQAPLEVVPDEDLSGYIRPSYSQSNQSMNNSLTEWSYAPSSDPSILLQNSMESGYLPIFKLPFFKAVSCSTRIS

SEQ ID NO: 140589 - protein, 301 aa, Oryza sativa
  Clone ID: PAT_MRT4530_41775C.1.pep
RAAGIRHEEFGGRAVPHPTPNPRTKNPQTLAVAMDGVGDGGGGGDLATGGRAGRGGVPARRPRKSRFSVLASMEDDSAEEELEEYIDDLVPPGSAAFPSERKWRQGRAEFARRHGCTVAGARTPIRQSVLYSDRPKRSQGRRGRVKPQTESLAEKDASEVSNSELGATTTDMPKFKTLSLKDSPSALDSADRAMVSTGSMDSDLPDSAITELPLVEEALSPRSESIRKINLYLAEHTFDDLREGFAAMLNGFRDPPEDAAQPNAELPEASKPCPRELDAEPFQDSESLSPAAEDVARHNMS

SEQ ID NO: 140590 - protein, 308 aa, Oryza sativa
  Clone ID: PAT_MRT4530_41776C.1.pep
MLVIGTANPPNSLSQEEYTDWYFCVTNSDHLTNLKDKMKKICHRSGIKKRHFHHTDDTFRDHPELAVRDQPSLETRQDILATVVPELAAEAAASAITEWGRPASDRTSMYFHGCSAAAAVLRVAKDLAENNPGARVLVVSAELSLTLFRAPQEGHVDTIVGQALFGDGAGAVIVGAGGDERQLNASGLVFRPSFELPAMVRDNIEQCLAEGVGKHVAHGGWNDLFWAVHPGGRKILDVVEDRLALAPGKLDASRHVLSEYGNMSGASIIFVLDELRRRGDMPSGGLGVMLGIGPGISIETMLLRVAAA

SEQ ID NO: 140591 - protein, 314 aa, Oryza sativa
  unsure (1)..(314): unsure at all Xaa locations
  Clone ID: PAT_MRT4530_41777C.1.pep
EVASTKGVLHKSAIKVAVKRMSHESXMGDGMKEFIVEVKHATATGHHDLVQLLAKGXVLLLVYSYIPNGSMDKYLYDCSKGTLDWPXREVASGLSYXHEDWEQIVLRQDIKAGNVLLDDQMNGSLXLAKLYDHGTDMQTTHMVRTLGYVAPELGQTSKTTPSINVFAFGVFLLGITLXRRPIEPDKGNSSIILLDWVVEHWRNDLVTKAADMRILNRCSLDXVSLVLKLGLLSHXSYPLPNARLPMQQVMXYLDGNMXIPPNLLPAYLSSNMLERSISVGCSSLGSSPSSRAWWGRVSWDRWSSRGRGMKDTRK

SEQ ID NO: 140592 - protein, 70 aa, Oryza sativa
  Clone ID: PAT_MRT4530_41778C.1.pep
YTICSNLSISSTVKTMASRVRAPRPPPVPSGLSAAGDAWAAHRPPIAACAFQAERRQSCVPPVSSASHTP

SEQ ID NO: 140593 - protein, 490 aa, Oryza sativa
  Clone ID: PAT_MRT4530_41779C.1.pep
MFRLRSSARLLRELREASRSSGRRREWLSGGAVASAARTTSLLHPLPGLDVPQCLPDQLGVQPTRVTTLPNGVRVASEDLPGPSACVGVFVDSGSVYETAETAGVSHLLERLSFKDTAHRSHLQIVQDVEATGGNIGASASREQTVYSYETLKAYLPQATAVLIDCVRNPLFLQDEVERQVAFAREEVQELQKNPERFLQESLNLVGYTGALANPLVAPEESLTRINGSIIQKFYHENFTADRLVVAASGVDHQYLLDVAEPLLSDWHKGSPVERPESKYIGGDFRHRADSEMTHVALAFEVPGGWLEERDATIMTVVQTLMGGGGSFSSGGPGKGMHSRLYLRVLTKYHTVESFSVFSNAFDRSGLFGIYLTTPSDFVAKAVDIATKELIAIATPGQVTDIELARAKNSTISAVLMNLESRVIVAEDIGRQILTYGCRKPVDHFLQCMDEMTLDDITAFAKKMLSSPPTMASWGDVDKVPPYEFVCKRF

SEQ ID NO: 140594 - protein, 99 aa, Oryza sativa
  unsure (1)..(99): unsure at all Xaa locations
  Clone ID: PAT_MRT4530_4177C.1.pep
PVKILLGNQGGFVQFVPKTYSEEALQGLKGPVFGKPAVSLSWGPGPSHKQGXFGPRRTNLFFGAPFSGGTGYASPVPPPKMYVSAYGAPPVFGRPPLVG

SEQ ID NO: 140595 - protein, 84 aa, Oryza sativa
  Clone ID: PAT_MRT4530_41780C.1.pep
PPPRVIGKLAWFYRFVPFELCKQKKNATRFFYALCFMGESGSSNIGQCFTVFNGWATEFSTTAIGNYFDVYITALLIQNYVPLL

SEQ ID NO: 140596 - protein, 598 aa, Oryza sativa
  Clone ID: PAT_MRT4530_41781C.1.pep
MPASSLRLRALLASPAPLPARALLAAHALLLTSGLAADSALLAHFARHLASAAARSSSSAAAASAFRALLLLRPRCAHPFNALISSLTHAGDPSAAFRAFALLLVASGAGAGARPDGYTLPAALKACARLGGGLREGCQAHAVAEKAGFLGRVPVQNALVTFYGACGQCGDARKVFDEMAERDVVSWTALLSAFTRGGMFMEALGVLAEMDVTPNEVTLASVLVACGNLGTARAGKAVHGWYFRREKELNLIVGNALLDMYVKCEKLDLARRVFDMLLARDIVSWTVMISGLVQCKRPSEALEVFNAMQISGVKPDKVVLSTVLSACASLGALESGRWVHEYIERKGIEWDVHVGTSVVDMYVKCGCLDTAVSIFQEMPLKNVSSWNALINGFALHGRGREALDCFDRMVASGLHPNEVTFITVLGACCHSGLVQEGRQLFELMTKSYKLSPWEDHYGCMVDLLGRAGLIQEAYDVIKAMPMRPGVFTWVTLLSACQAHGRMDFSQQILMHIHELESSGNGIYVLLSNMYAVSDRWADVGKARGFMNEKGMQKEPGSSVIEVNGKTCEFLVGQQNHLYMDDVRAMLSILMKQIHLDGL

SEQ ID NO: 140597 - protein, 159 aa, Oryza sativa
  Clone ID: PAT_MRT4530_41782C.1.pep
MGTAGGCGRAPRGRGSPAAAPAREGFACHGKRGGRGSPGWVVESPPLPSPPTSWLLSSPSVQREETETSLPLSKSAELNLGIAIAASGSTSRIGKTTQRLRKSGSSAAVSAAGGRGSGRPAPAGLPPLCRDPAVSPLPPSCRYHRAPAAPPLPLPRRSR

SEQ ID NO: 140598 - protein, 196 aa, Oryza sativa
  Clone ID: PAT_MRT4530_41783C.1.pep
MVAARARRPSSLTRGGEVLASKVSTMKDDNTKSFLNKVKDFWTEITTRESQVVKNNNADEIEKNNKKRSGLYRDLIVMFALGSVFWSGAKKALSQLKGWVFCVASVYINFALISMMVGAAAGTLPDVFRCHMGLSGNGVLQGLLFNIIAFNYELFTTLLPGSLVKLSQRVMYWVTGATSAIAVTVIWTLATEDPLV

SEQ ID NO: 140599 - protein, 77 aa, Oryza sativa
  unsure (1)..(77): unsure at all Xaa locations
  Clone ID: PAT_MRT4530_41784C.1.pep
CFEELTPFPLVAPSRRVETDHANDIHPLVSSTGTVMTKAGLGGHXSPRAVFLKKDGTPRDIVGMTGMGRKDSYDGHK

SEQ ID NO: 140600 - protein, 42 aa, Oryza sativa
  Clone ID: PAT_MRT4530_41785C.1.pep
VRSPSEALVAAGLALKVRPTVRFERIPTPSPVGAALPVELMR

SEQ ID NO: 140601 - protein, 78 aa, Oryza sativa
  unsure (1)..(78): unsure at all Xaa locations
  Clone ID: PAT_MRT4530_41786C.1.pep
RCSRGGKCAHXCGLGFHPTDQXVPTFRKGFNTVYHRQFXHLRQPVPQVTLRQATGXRGSSQGVGSSAPCADKPXILLG

SEQ ID NO: 140602 - protein, 136 aa, Oryza sativa
  unsure (1)..(136): unsure at all Xaa locations
  Clone ID: PAT_MRT4530_41787C.1.pep
PPPFCVCPCRPLPWVVGVPISXGPPNLAPSLIGGGPXLGPPRGCPLFLLFWAWGEGPPPAPLGGPPVLGVGVGNGPGPEFLFPSGGPVFPEELRVSPPRGAGKRKEKTPGFRRWPGVPRRGGTPFFWALTAFFFSR

SEQ ID NO: 140603 - protein, 65 aa, Oryza sativa
  Clone ID: PAT_MRT4530_41788C.1.pep
RELHSFFFTQNFLLTKFFYIPHIQFVYKFFYTQGYCRGKTQGFYFNPSKKDSCDEIHDQPLLFLR

SEQ ID NO: 140604 - protein, 103 aa, Oryza sativa
  Clone ID: PAT_MRT4530_41789C.1.pep
MEGVNGGAVEEERKPLSEVVGDCVQRWFQDALKEARRGDSAMQVLVAQMYHSGYGIPKNEHKGRAWAEKASRYRPSVWKVGTKRPGYNASDSDSDEMNDDEKQ

SEQ ID NO: 140605 - protein, 69 aa, Oryza sativa
  unsure (1)..(69): unsure at all Xaa locations
  Clone ID: PAT_MRT4530_4178C.1.pep
LLYCYNSIPDTTDGGNATGSQCCSLGRYRILTACLGAQHSLGLSLTADRSRRLAKHVFQXSSAWTCRLD

SEQ ID NO: 140606 - protein, 603 aa, Oryza sativa
  unsure (1)..(603): unsure at all Xaa locations
  Clone ID: PAT_MRT4530_41790C.1.pep
MFGSRVQDEVEMQRRTTNRIFPDERQDQFKLPFQAARADRFGVNRIDAKTTEKIKVISEGNIPWHRRILDPGSSMVLMWNRVFLGSCLFALFIDPFFYYLPLVHVLDESTNRSCIAKDRRLSITITVLRTFADLFYMLNIMVKFHTAYVDPKSRVLGKGELVLDLKKIQRRYLRTDFFIDLLATIPLPQVTVWIIMPSIKNSDYNIRNTTFALITGAIYYLLSIERQITCWNQQCLNESCSFNFISCDNTGSSSYLTWGKNTSIFDNCDPNRNSSANPPPFNYGMFSTALSKGAVSAPFLEKXXFCLGWGLLQLSSSGNPVRTSAFIAENSFATRVVEQESVLQALPVGIRRNVQRPLCLDLVRRVLFHSDMDXSGFETTCAIVCCISGSGGAHTFHVRQNHVYEMNLPHKRXPLESATTNGGRSNFFNSIILRPGDFAGEELLTWALLPKTNVHFPLSTRTVQSLTEVEAFALRAEDLKFVANQFRRLHSKKLQHTFRFYSHHWRXTWAACFIQAAWRQHQRRKLAESLSRWESYSWWPEEHPPADKPKQEGTSSSTKTIAESAIAQMHKFASASRRFRADDTAIRRLQKPDEPDFSADHFD

SEQ ID NO: 140607 - protein, 241 aa, Oryza sativa
  unsure (1)..(241): unsure at all Xaa locations
  Clone ID: PAT_MRT4530_41791C.1.pep
TRPGVNRIDAKTTEKIKVISEGNIPWHRRILDPGSSMVLMWNRVFLGSCLFALFIDPFFYYLPLVHVLDESTNRSCIAKDRRLSITITVLRTFADLFYMLNIMVKFHTAYVDPKSRVLGKGELVLDLKKIQRRYLRTDFFIDLLATIPLPQVTVWIIMPSIKNSDYNIRNTTFALVIMIQYIFRMYLIVPLSNQIIKAAWXVLPKSAWLGAAYNLLYYMLXASHITGAIYYLLSIERQLHV

SEQ ID NO: 140608 - protein, 185 aa, Oryza sativa
  Clone ID: PAT_MRT4530_41792C.1.pep
PTRPGYIASFDGMVEHVIEQYSRIKGRKEVRGLPHFLLGQSMGGAVALKVHLKQPKEWDGVLLVAPMCKISEDVTPPAPVLKALSILSCLLPEAKLFPQKDIGDLAFRDPSKRKVAEYNAISYTQQMRLRTAVELLKATKDIESQLEKICSPLLILHGAADLVTDPHVSEFLYEKASTKDKTLKL

SEQ ID NO: 140609 - protein, 78 aa, Oryza sativa
  Clone ID: PAT_MRT4530_41793C.1.pep
FFFCFLFYQKWSQALSIYSLDPENQNFFIPFQKSKIRNSFYYDMLFFPFITLEDQSRSYRLYQESGRIFCFIQMCKRS

SEQ ID NO: 140610 - protein, 106 aa, Oryza sativa
  Clone ID: PAT_MRT4530_41794C.1.pep
ICCHDDWEGQIRRRRRQGWSDPPPRRPRRPDPPPTPTVEAGSAVATTGEANGEGGRWIQWWTTTTAPAITTTATVTMTTTATASWRPFLLAGTPLYRHKVPQGKPA

SEQ ID NO: 140611 - protein, 438 aa, Oryza sativa
  Clone ID: PAT_MRT4530_41795C.1.pep
MGGGDESWTVSVFLLEGDFINMSLDEDLPLAGPQPNPAADDDEDPDGGHIWQMGHPQAGPGDWDDLVQQQNTANEQVEDAWGQDHPMGQIMEVNPDGIIDLAVANPGDDNVVVPFVPAIDKGKKVQGSDQDAQVQRSLARLEKIAKNEYPKVPYFYPMKEINKKIDHLCKERGSMHQFLASNSIPATLYEPSPFKALVLPKKTMFDFSPQVSKLDATWALDFHKSNSPPQSQAHENMEILEVLPWVVHPPSSLVCQAAAPLMLPKAPGKKREGRTLLYNPYRRQSARLQHIKGDSELKVDPRMGIGKSRGKSARKLKELAVEENRMLSVYEWNFRETVKLFHNPGSKENLPETVNDFRPISLMGISLKILTKLLDDILQGVILKLCQQSKREIVLLKLDFEKAFDTIEHSAILSVLQHMGFPLKWIEWVQMVFSTACY

SEQ ID NO: 140612 - protein, 318 aa, Oryza sativa
  Clone ID: PAT_MRT4530_41796C.1.pep
MAGEDAAAAASAGAAAVQRRPKVVEEDDDEDDFVPLSHARGRKKASGAAAPKYKEEEEEDEDDDEEDNVPLAVSRAKKAGNAGASKAKKDEDDSGDDDDDYHVPLSRSNKGKEKQKSTVKAKVKKEETDSDDERKPKAQKKSSAVTKTSKVKKIKDEDLEIDTKKIKKGAATRKGDAEKVKKEKKVYDLPGQKHDPPQERDPLRIFYESLYEQVPTSEMAAIWLMEWGLLPVDVAQKVFEKKQGQKLKSPVKTTSAKRRPDTPTKKPQLSSATKTNSAVKDSGKTTAQKKRRASSDTDDDDDDFIVSKTKTKMQKMNS

SEQ ID NO: 140613 - protein, 164 aa, Oryza sativa
  Clone ID: PAT_MRT4530_41797C.1.pep
MGFFGGYEIGFKSASKKASTVLLVNGDGTEERDTGASCDHRRRPRRPRANCDRRRRPRHPRASRDCRRRPLPSPRGFDWAAWIRERKSEKKRKRERKRKRKKNGLRQRHLRQAPPRIHAGCATLATTPATPPALLTCIVQLEPVAIASARRDGARRHLCCTACT

SEQ ID NO: 140614 - protein, 45 aa, Oryza sativa
  Clone ID: PAT_MRT4530_41798C.1.pep
MAGGWVAALPVPAMTDQGRHGRRIGNLAWAGEGFPIPERMKRVDS

SEQ ID NO: 140615 - protein, 174 aa, Oryza sativa
  unsure (1)..(174): unsure at all Xaa locations
  Clone ID: PAT_MRT4530_41799C.1.pep
PSLTTPSTGIIFSKPLRECSAGRAPTPRSPASAAPPPPPSACCAAAATAASARRLGRRRRPPRADGAAPPRPSPPPPPPPPRRRRCPSRAPRPXRARRGAAARAPPQPPWTGGGGAGRRPRPPWGRSTWTPSPRHPLRSLVAAAAAAGARKRVLRRFLQVTAQRLKRRQSECVC

SEQ ID NO: 140616 - protein, 246 aa, Oryza sativa
  Clone ID: PAT_MRT4530_4179C.1.pep
MAIQKSKIKHGRSKHLKAIGSSTQVTRKMHISDVRLITEYGVKNFVAVQHLTIENCTQIGQNLLSSTKSWLPSNLRFLQFSSCTFSGVLNFHKGLSMLSGLEIRNCAKLESLIGLNYLNNLRGLVLVECPLLDMSTGTKFPDLLSSLIIRGCHQLLSLHLCNPAVLTELEISDCRGFMYIGGLRNFRDLESLKLLHCPLLQLRDLMPAAPETAVICCCPRLKKWCEWHDIEYKDIQENPEDSYGKL

SEQ ID NO: 140617 - protein, 39 aa, Oryza sativa
  Clone ID: PAT_MRT4530_417C.1.pep
MGIRMEQSRLQPAVKNLGRSSQVSEEVKLWCLAFQVILP

SEQ ID NO: 140618 - protein, 67 aa, Oryza sativa
  Clone ID: PAT_MRT4530_41800C.1.pep
SLRSADKSLGNISQCEHRQQASQSPSLGLHKSAPIFTHPLGVLRLSPSLASLLKAQLNHLLQAPVEQ

SEQ ID NO: 140619 - protein, 59 aa, Oryza sativa
  Clone ID: PAT_MRT4530_41801C.1.pep
GTVWSDQLATPCSNVVCATDKDPGRCQAMFRTGMPPKSCNSNTTSYQVNSIGQCLVYVF

SEQ ID NO: 140620 - protein, 70 aa, Oryza sativa
  unsure (1)..(70): unsure at all Xaa locations
  Clone ID: PAT_MRT4530_41802C.1.pep
SKRRDHTCEEWPSIVETDFDTTARTSTSTRSISTKFNTVNDSXPSSSIGTGFXRXXLXXXXXXXKXLKIX

SEQ ID NO: 140621 - protein, 91 aa, Oryza sativa
  Clone ID: PAT_MRT4530_41803C.1.pep
SMNRKSHYLHKWNLLLKTRPTIHAGHTKTHMLYVTRTYMYCTVCTHAHFTAETRIDFNLSSLAEGDVPSWTDPWQLSSLDGALTCGRWPIP

SEQ ID NO: 140622 - protein, 173 aa, Oryza sativa
  unsure (1)..(173): unsure at all Xaa locations
  Clone ID: PAT_MRT4530_41804C.1.pep
CRFALLATCSPAAAPLRSAGRRALARFAPPTPGAVPDPRRPPPVSAPPRVHRPRPTHAPESAARXQHRPSPPPXPSHSTCAAPTVPPPALRAKRRRDWPDPAAAPPDPPAAATXPTPSTPTEAVAAVEPAAFARRRPPLKPTARACPPLPPATRCAALGQPPVAACPAPCRCG

SEQ ID NO: 140623 - protein, 160 aa, Oryza sativa
  Clone ID: PAT_MRT4530_41805C.1.pep
MAARGSRSCAWPCGLGMAGGGQEGSGNRQGVGDGVPPDGGRDSEARRKMVTALGGYGSPRGCGVPRQWQSEHCESDKVEADPIEQIQRGFSIYRANTEGKGVVDGGFTCFAMGIGRVVSAGTAAASAESRLRRLLEMLLVVVSNIGTYQTRGILVKDLLK

SEQ ID NO: 140624 - protein, 66 aa, Oryza sativa
  Clone ID: PAT_MRT4530_41806C.1.pep
MAKPSRWSNLLTGWLELANQNALPNGGPQQRPVGVAAGVLLTATSFAEPFRPRRIQPTARPPPLRL

SEQ ID NO: 140625 - protein, 246 aa, Oryza sativa
  Clone ID: PAT_MRT4530_41807C.1.pep
MASAIVDVAGGGRQQALDGSNPAVARLRQLIGGGQESSDGWSRCWEEGVTPWDLGQRTPAVVELVHSGTLPAGDATTVLVPGCGAGYDVVALSGPGRFVVGLDICDTAIQKAKQLSAAAAAAADGGDGSSSFFAFVADDFFTWEPPEPFHLIFDYTFFCALHPSMRPAWAKRMADLLRPDGELITLMYLAEGQEAGPPFNTTVLDYKEVLNPLGLVITSIEDNEVAVEPRKGMEKIARWKRMTKSD

SEQ ID NO: 140626 - protein, 66 aa, Oryza sativa
  Clone ID: PAT_MRT4530_41808C.1.pep
SECRFTIITDACYGKTSIYVLCPFCDINSQRLQMYLLLLSTLYICHILYHPKLMQFLTPQNRTFHS

SEQ ID NO: 140627 - protein, 675 aa, Oryza sativa
  Clone ID: PAT_MRT4530_41809C.1.pep
MAAYEPKNILITGAAGFIASHVANRLVRNYPHYKIVVLDKLDYCSSLSNLNPSRPSPNFKFVKGDIASADLVNYLLTTESIDTIMHFAAQTHVDNSFGNSFEFTKNNIYGTHVLLEACKVTGQIRRFIHVSTDEVYGETDEDAVVGNHEASQLLPTNPYSATKAGAEMLVMAYGRSYGLPVITTRGNNVYGPNQFPEKLIPKFILLAMRGLPLPIHGDGSNVRSYLYCEDVAEAFEVVLHKGEVGHVYNIGTVKERRVIDVAKDICKLFGLDTEKVIRFVENRPFNDQRYFLDDQKLKKLGWAERTLWEEGLKKTIEWYTNNPDYWGDVAGALLPHPRMLMTPGVERHNWTDEIKSLSTSPDEAKESSTAVPAATAKSTSSAPQKASYKFLIYGRTGWIGGLLGKICEKQGIPYEYGKGRLEERSQLLQDIRNVKPTHVFNAAGVTGRPNVDWCETHKQDTIRTNVVGTLNLADVCREQGLLMINYATGCIFEYDAKHPEGSGIGFKEEDKPNFTGSYYSKTKAMVEELLQEYDNVCTLRVRMPISSDLSNPRNFITKIARYDKVVNIPNSMTILDELLPISIEMAKRDCRGIWNFTNPGVVSHNEILEMYKKYLNPDFKWTNFTLEEQAKVIVAPRSNNEMDASKLKSEFPELLSIKDSLVKYVFEPNRKVPAN

SEQ ID NO: 140628 - protein, 108 aa, Oryza sativa
  unsure (1)..(108): unsure at all Xaa locations
  Clone ID: PAT_MRT4530_4180C.1.pep
PNLPFLFSPSPMWGRLGLQGGRDFFGGFLGFKGGAGFFPALKCFKGSKVFRFFVPKSPFFGGFGRSKGPILFSPPGFWGEGTFSFXWEGVSVDPFSEIFFSPLPPKKV

SEQ ID NO: 140629 - protein, 378 aa, Oryza sativa
  unsure (1)..(378): unsure at all Xaa locations
  Clone ID: PAT_MRT4530_41810C.1.pep
GGGGGGGGARAGAHGVGGAGEAGDPRAVSASPSPTAPAGGGGGVPAATAPARHAAAAAADVAVDDLRAAVRAGADDAAGVXGFGRGAGPGAAAVAARSAEGDGDGGAASRHAAVDDNDDDAAAEGIRVQRRWTSGGGAFAARDDDGCGAASRRAAEAEAAYPRAAAAAAAESGLQRGRGWGDGGAFAAGDGGGNASRHAAAAANQGIGVSGGRGWSWSCARVFSAERDVGGGGDGVGGYGGGRSEGRPRPAAAAAAGGAAEAAAAAGGGGAAAATDAAAASPAAAATLPGAAAAASSAAAAAHARAAAAATDDGSAATAAAGDLVPRPAAATGAAGAGVLAGARACRAAAAAAAATTGGGAGGWRGHRDGAAAVEGAS

SEQ ID NO: 140630 - protein, 279 aa, Oryza sativa
  Clone ID: PAT_MRT4530_41811C.1.pep
MAATAVTLPSSPAPFPVTTTASSSRNVRLLLRSPPPRRALRVAASAAADAPPKPAPPPTSPSGIVLVDPTEAQKVHRLKAVYDQKVVPLITEEFGYTNVHQVPKVEKIVVNCGLGAEAGNSKGLESAMKDLAMITGQWPVKTKAKKSVASFKIREGNTIGIAVTLRGRVMFNFLDRLINLGLPRTMDFLGVNPNSFDGHGNFTIGLRDQGVFPEIPYEVGGKKNGMDVCIVTTAKTDNEALRLLTLLGMPFAEHIKSSVVIRKKRLKRHHFMSKGRGRR

SEQ ID NO: 140631 - protein, 200 aa, Oryza sativa
  Clone ID: PAT_MRT4530_41812C.1.pep
MEVTADEEAAAEAEAEAEAACSGDSDAEAEDLNFDLSSIDPVREFGFLSMGHEFDNYPKGRIRPPKDWNWFLEEVRKGSDDEDDEEGKLKGKGANKKNEGQREDEDWIGESEDDKDSLSRGSSVKRSKYVTRSKEPKKPRKEKTETKDKNKNSGDEKDEGDEDDEEDETLSGFIVNEEDEPMEELSEEEEDEFDDDDDDD

SEQ ID NO: 140632 - protein, 218 aa, Oryza sativa
  Clone ID: PAT_MRT4530_41813C.1.pep
KPACHSVKDKDRLTTLPNDVLLNILERLDTADDIRACTLCKRMTKLPAELSRIVVDANSFTPNKIAPDPLTLSDVVQMNEALAGATEKLLNFRSQQIALRQLSLRFYLRYYDCLTIGKAVQHAMSTYNLETLEFTILTEKQGGCCEETHMLCFGKQFRTFLAAFPDAFAGLTRLQLQHLHFAEPDIPNLLTTCKQLKHLRLFSCLTKMTRRAADRAPA

SEQ ID NO: 140633 - protein, 766 aa, Oryza sativa
  unsure (1)..(766): unsure at all Xaa locations
  Clone ID: PAT_MRT4530_41814C.1.pep
MGRPKGGAAASSSSSKKPKAKPKQRGGVDFKKYKHKVGRKLPPPKNATDTEIKSRAIVLPEQSMASERAGMAVNKRGLTLRELLQQTGHYTANVRRAALNGLKDLVTMHPSKLKLHEVAIVGEVQERICDTNKVVXSILIQYAAVFPLPIVDRDNAISTRSTLFLLMANILNGMTHLSMDIQLMSFRFLELVVINFPSSFPGYAEQVFNNFLAVLSNDRIHLQDKSKLNSVLSGLGQCLSQVAYATENGDASNRLVHNLSGRELWKCTLDEDNSGSRAFAMSNILMKLQNLFQILVNSVEVSVSELFAKSTIDAQSSEALLSALHCLDLICNICIQEAKTLRNKDTMEKHLSPLITFIPDLVSNAPDDSKGYLLEAFTDAFWDCKVDCKLIFPYLDAVGKMLFPEKTGILFVENDSGSEYHGVWVKELPGILLQSIDKAPSVTKVVLELLLRIGQYFPTMEFGNLRSFIKLFGVKCDVLEPTILFRIIEVLQSTYKAGNLHITEQLSFLSLLMARFRVHPGSFSTQDNSQKGSNMNTFKSLNRLILNSLSEMGDGSLVLELMWDNLSKEIAQIPSLHNMNGLFRIIVTLDAGTCKLMNEDAIKIIAGYLIDAAMDLSKTIELGFQSDRTRLFQYFIKPCIIIFCQNEKVLCCALEMLKSFATGDDHVLSSASKLNYPGELSHRICVVTTILIFLCNDGKLHKNLSLGKCVIKGILQHTRHLMDSNVLDVTYEDKQKLRFAFEQLKTKALQLNCWDRSELEGFSSTT

SEQ ID NO: 140634 - protein, 134 aa, Oryza sativa
  unsure (1)..(134): unsure at all Xaa locations
  Clone ID: PAT_MRT4530_41815C.1.pep
EPTAAAKNPLPGTPPPQRTRRQKPAGSTSPPPPPPXPPPPAGSTPPSPPPPPRCRQELAAACRIYSPTSSSSSRSLWKTAPPTAAWEERRRRRGCHHIRLRRPPHPPLQPPHPPRPPKGGEGGAGEKWSGGAGG

SEQ ID NO: 140635 - protein, 194 aa, Oryza sativa
  unsure (1)..(194): unsure at all Xaa locations
  Clone ID: PAT_MRT4530_41816C.1.pep
MNLEQGRGTSGRDTDGSGGRLGARGAGGGDGDRLGAXGAADGGRPDWRERCIRWRKPAWRERRCRRWRRRPRYEKELLVDVARSSALEGWPAGGAGAGVPHVGRGXGWWEHQCWAISSVFLCWSSGGRSRLAAPGXGVSLLPVLCVGAVGVWVVVYFFLXLVTTLQDCNFVIFFSSINRTSHRFMRVVKKRKKQ

SEQ ID NO: 140636 - protein, 112 aa, Oryza sativa
  unsure (1)..(112): unsure at all Xaa locations
  Clone ID: PAT_MRT4530_41817C.1.pep
AQTSFFYIKSVNTQLLNSYLKWIYTRLXFLCSDLNSTLPQQYYISKPQKVWNHIMAETMCSNSVEAENKILLRLDASTFPHAQTHIMKVQALKCCDTSQFIAKISQPLLVTS

SEQ ID NO: 140637 - protein, 88 aa, Oryza sativa
  Clone ID: PAT_MRT4530_41818C.1.pep
NGRLKLDAKTHSCAYFRTEVAREALQNAKPGCSDRTGPHDPENRDQPQKREMPSIRPSGSMHRVTFLQQQANNDKSRRDSCTMKSRVR

SEQ ID NO: 140638 - protein, 82 aa, Oryza sativa
  unsure (1)..(82): unsure at all Xaa locations
  Clone ID: PAT_MRT4530_41819C.1.pep
XFRLLAXSYLLLSYAILXFNDCXKNSXXMLLLXXLXXHAXXXMXXXATXXFXXLVLRKYYXDXILXXXYLSXYXKTXTNSXX

SEQ ID NO: 140639 - protein, 59 aa, Oryza sativa
  Clone ID: PAT_MRT4530_4181C.1.pep
MAVAASLLLEYVSRSLRWPIPRALKELLLSPHCLKESPRWLYSSRRCWDEIPTEYGFTA

SEQ ID NO: 140640 - protein, 65 aa, Oryza sativa
  Clone ID: PAT_MRT4530_41820C.1.pep
ITNWSQIDLRLKEKSRRCSKKFHRSLTSLIIRAKGTVLFIEQTDVGGDDTFQKKKTNGRKSEKQL

SEQ ID NO: 140641 - protein, 80 aa, Oryza sativa
  unsure (1)..(80): unsure at all Xaa locations
  Clone ID: PAT_MRT4530_41821C.1.pep
CGCEXGPXVHLKPRLDHIERAHEGRXQPHXRRAXAAGVAEQAAGGGGVVXLLRRRGTXGAGAGEVATSPGITPPHTHRSA

SEQ ID NO: 140642 - protein, 176 aa, Oryza sativa
  Clone ID: PAT_MRT4530_41822C.1.pep
MPGLTGWGPALPPWPLAMEAAGRRGAHGATANVSGIEANTVTLGDGGGRPSGCSARSGSPPPQNLGAPVAGQGPRPPASRRPACLPNHGEGPPYLPPIWWRRQGRRPGPGLGGWRAALPGAGSPTPSGIGTSAGLELRQQLYSGAGLGPPRYRACAQDWGEPRDLGVGRQRKQRFG

SEQ ID NO: 140643 - protein, 107 aa, Oryza sativa
  unsure (1)..(107): unsure at all Xaa locations
  Clone ID: PAT_MRT4530_41823C.1.pep
MGTXPGNRLANCXMDHHQVKLWNAHGWXXHQLSCKXTTLPLAASGSQLGSSELSVFAQHKLIGYTHGHMVISSCIMLQEFNRFLRKYCEIPAFKTEPLFPVPNVVLI

SEQ ID NO: 140644 - protein, 95 aa, Oryza sativa
  unsure (1)..(95): unsure at all Xaa locations
  Clone ID: PAT_MRT4530_41824C.1.pep
GLPWPXVSLVLFGFSASQFRVXNSNVNIFVSSSKGGPXPNSPYXEFLXQFTGPSXYNXLXWENLAXPNLNXLGXTSPFPXLGVIXXKGPXRSXXP

SEQ ID NO: 140645 - protein, 86 aa, Oryza sativa
  Clone ID: PAT_MRT4530_41825C.1.pep
MVAARRRSDGFHTDLHLHVTDSVAYPCLHGHRQASTSDPYQLSPGSTLDHVAPTSSTTPPPTREKIFLDAERFCFLAGHNWNRMEK

SEQ ID NO: 140646 - protein, 56 aa, Oryza sativa
  Clone ID: PAT_MRT4530_41826C.1.pep
SAPLVLSYRSIIGYVLLIHPARMVLSTPSDALLCIIHSIRHLLFRSLIIVPPYKIH

SEQ ID NO: 140647 - protein, 154 aa, Oryza sativa
  Clone ID: PAT_MRT4530_41827C.1.pep
KILKRRWNLCRLELQREKRASSSALAMAQRAQRESVAIRKAVRSLGCTVNFGTNESQVEKTEGLTYSFRRDTDFESQHEKSSDFSISITAIEDSLVSETPSNHICESLCPFRTREGCRWPDAACAQLGSQFVGLKANFDAFDRLSVQDSYFGSE

SEQ ID NO: 140648 - protein, 43 aa, Oryza sativa
  Clone ID: PAT_MRT4530_41828C.1.pep
MATNLYFDKCFTCDRLRCHRPLEVSNLHPLEMSLVITDQRPTR

SEQ ID NO: 140649 - protein, 590 aa, Oryza sativa
  Clone ID: PAT_MRT4530_41829C.1.pep
MRKIQGRNKKQLSKHFAKLFKNKHPRLNSAKMCSTERRGPRYLNQQISFEAEDAKGVLFPHQDPLVISAEVAGFEVRRILIDGGSLADVIFAEAYAKMGLPTLALTQAPVSLRSFGGEAVQVLGQVQLVVAFGTGENRREEQILFDVVDIPYNYNAIVSRATMNKFEAISHHNYLKLKMLGPAGVIVVKGLQPSATSMGDLAAINRAVHNVEAELHDHVKHMPKPAPHSKVIKVQVDDADPTRFVSLGGDMGEREVENILKVLKKNIDIFAWGPDEVGAKDEVQKLLKAGVIQEIDHPEWLANSVLVRKSNGKWRMCVDFTNLNKACPKDDFPMPRIDQLVDSTAGCKLMSFLDAYSGYHQIHMNPADIPKTAFITPFGTFSHLRMPFGLRNAGATFARLMYKVLYKQLGRNVEAYVNDIVIKSCKAFDHASDLQETFDNLRAADAKKSPPKVSATSAAEPNRLRRPIGRQNRRRVLLHAAIIEEMCEGLNLEIRFASVAHPQSNGAAERANGKILEALKKRLEEAVKDEDGRKVSLELLEGVRVEALEHMRKYATSTSATYNKKVRPMELLPGHLVLRKKANPVAVRKL

SEQ ID NO: 140650 - protein, 76 aa, Oryza sativa
  Clone ID: PAT_MRT4530_4182C.1.pep
HEGSICTPWWLLTPAARLSSAAAVRIMMHFGAVLKKTYICRDCRKHMLQVLNHGPAYISKELWLEKLTALLNVFIY

SEQ ID NO: 140651 - protein, 53 aa, Oryza sativa
  Clone ID: PAT_MRT4530_41830C.1.pep
KLAKCKSEMKLIQVGGNKISGADTNCLLLPTKMIGTYVQARKFERILPRISED

SEQ ID NO: 140652 - protein, 96 aa, Oryza sativa
  Clone ID: PAT_MRT4530_41831C.1.pep
MAGFGLDQHLDLIRAHLLEDAHHHVLAPSPSPSPPGTGRVRPAPVSLPPRPPLLWAAASAAPRQQEECFELGGGYAGEGEGEEEADFRGCRGGRQR

SEQ ID NO: 140653 - protein, 534 aa, Oryza sativa
  Clone ID: PAT_MRT4530_41832C.1.pep
MAWCLVFMVFLIYCLISTVGLPVAPADEAAMQLGGVGGGRLSVEPSDVMEASLDFGRLTSAEPLAVFHPRGAGDVAALVKAAYGSASGIRVSARGHGHSISGQAQAAGGVVVDMSHGWRAEAAERTLPVYSPALGGHYIDVWGGELWIDVLNWTLAHGGLAPRSWTDYLYLSVGGTLSNAGISGQAFHHGPQISNVYELDVVTGKGEVVTCSESNNPDLFFGALGGLGQLGIITRARIALEPAPHRVRWIRALYSNFTEFTADQERLISLQHGGRRFDYVEGFVVAAEGLINNWRSSFFSPQNPVKLSSLKHHSGVLYCLEVTKNYDDSTAVTVDQDVEALLGELNFIPGTVFTTDLPYVDFLDRVHKAELKLRGKGMWEVPHPWLNLFVPASRIADFDRGVFRGVLGSRTAGGPILIYPMNRHKWDPRSSVVTPEEDVFYLVAFLRSAVPGSTDPAQSLEALERQNREILEFCDEAGIGAKQYLPNHKAQREWEAHFGARWARFARLKAEFDPRAMLATGQGIFDSPPLLAES

SEQ ID NO: 140654 - protein, 112 aa, Oryza sativa
  unsure (1)..(112): unsure at all Xaa locations
  Clone ID: PAT_MRT4530_41833C.1.pep
KYPTGYLPGRMAPLKXFFGIMSFAFVVLGIYWFYQYMKFWREVLPLQNCITLVITLGMLEMSLWYFEYAEFNETGVRPKGITFWAVTFGTVKRTVARVIILIVSMGYGVVRP

SEQ ID NO: 140655 - protein, 302 aa, Oryza sativa
  Clone ID: PAT_MRT4530_41834C.1.pep
MSKLQLRPPLLATLHCSLLVLLIINGAAAAGKTGELTVIWGRNKDEGSLRSTCDTGLYTTVVISFLTVFGHGRYRTDLAGHPLAGVGADVKHCQKAKNVTVLLSIGGAGDQYSLPTAKSAQDVAEHLWHAYLGGGRRGVSRPFGDAVLDGVDVYVDRGRWGHYDELARRLRSFGREKPAVRLTASPACSLALFDDEVETMKTLSLFERLHVRFYNESSCDYNYFETRPFWGAWRTWTSRFPAARVQVGWPAMEEMSGFVDPQTLRESVLSSVQDDANYGGVMLWDRYYDKITGFGRAIKDIV

SEQ ID NO: 140656 - protein, 829 aa, Oryza sativa
  Clone ID: PAT_MRT4530_41835C.1.pep
MDSRSINLRGFAGNAGKNIMQGIGGFVFGNERSESKEDSYVERFLDRISNGTISDDRRSAMTELQSLVAESRSAQMSFGAMGFPVLLNVLKEDREDVELVRGALETFVSALTPIETSQGPKTEVQPASVNSDLLSRETENISLLLSLLSEEDFYVRYYTIQLLTALLTNSLKRCPVIRNEALLLLTYLTRDAEEIQKIVVFEGVFEKIFSIIREEGYSDGGVVVQMLLKETIGFDPLIAILKIRRGSAFNFTQQKTVNLLGALDTVELLLMGGGSSGEPGKDANKTTNQTALAQKNILDHLLLLGVESQWAPVALRCMKNPGGQALLASTIAPHPNQAHATFGATTDMPFGSILLQALVSSDDNGDMEACCRASSVLSHIIKDNLQCKDRVLQIQLETPAPSLGRTEPLLHRIVTCLSIAASAEGENGQSGQPEESYIQPVILRLLIVWLVDCANAVDCLLESAVHLNYIIELASSKRYSACVRGLAAVVLGACVLYNASREKGRDAFAVADAISQKIGLSTYFLRFDELRKRFAHSSSGQQNRKQLSRSSANSMSDFQEIEEEEINKGDQHPVLSEIFDSHFVSFLSKLETDIRDNIMDIFSRTKTATAIIPAELEQKNGEVDGEYIKRLKSFVEKQCNEMQDLLGRNAMLAEELVRTGGGNSADSLQKPSSGRERVQIESLRQELEGATRRIEALRAEHTQIEAEASNQRNLAAKLESDLKSLSDAYNSLEQANFRLDSEVKALRQGGSAPYPDVEAIKAEAKEEAEKESEAELNDLLVCLGQEQSKVEKLSTRLAELGEDVDTLLQGIGDDTALPDDDDDEDEDDE

SEQ ID NO: 140657 - protein, 110 aa, Oryza sativa
  Clone ID: PAT_MRT4530_41836C.1.pep
EEVPEYCALRNRRTNPILHIIPTIFLLEQRILTFSKRSPQSSLIISSYTSIYYPAWRIWVPLSFITHISFFYAFLAFFMLTRHISNAFFHLHWVPGFSIFEFWLFFSGYL

SEQ ID NO: 140658 - protein, 111 aa, Oryza sativa
  unsure (1)..(111): unsure at all Xaa locations
  Clone ID: PAT_MRT4530_41837C.1.pep
TDSKILVSAVQSNSHDQATGGILFKEIKEVVLTTKFGNMSIGDKDXIEAESKMKIVSETEXESAGVQIGYDQGWLSSSQTGDIFGQKSAAKTYGILEFVRDKSRVRDGHIL

SEQ ID NO: 140659 - protein, 137 aa, Oryza sativa
  Clone ID: PAT_MRT4530_41838C.1.pep
GNGATVRGGGAGPPVFGRWSVGPGGRAGPGAGRRNVVVLWDPPVQGPRRGSWKDVPRPRTGRTKGASVNNNKASNLVSGPNLFIGGNFNKGNGVRPYFLKAGKNNNGTGGLFLSNVLGFKDSATRNLAYRVGCHGYK

SEQ ID NO: 140660 - protein, 55 aa, Oryza sativa
  Clone ID: PAT_MRT4530_41839C.1.pep
MATRDEGISGCRAPVHAGMLGAAANLIRVMGDSVGPRRRNATNQAQAEWNRFSEP

SEQ ID NO: 140661 - protein, 55 aa, Oryza sativa
  Clone ID: PAT_MRT4530_4183C.1.pep
MPPQRKLGGADAERSANNDDDVEVAFPCGQRAKPHSLVGGTHVQCPAINNTVDCH

SEQ ID NO: 140662 - protein, 62 aa, Oryza sativa
  unsure (1)..(62): unsure at all Xaa locations
  Clone ID: PAT_MRT4530_41840C.1.pep
KYGXXXLXGGRXXAPXXXXEXLYXLXXLVXXSQPEQSRLSESFFXLRAXWXXFLYXAWRXVV

SEQ ID NO: 140663 - protein, 90 aa, Oryza sativa
  unsure (1)..(90): unsure at all Xaa locations
  Clone ID: PAT_MRT4530_41841C.1.pep
TLRQTELPDWVDIVKTARIEELPAYDGDWGYATAGSFAGDIYLREDVDARVWHKIYGAQAKNGSRATXHCRTGGAIISYVLHHLLNMSII

SEQ ID NO: 140664 - protein, 43 aa, Oryza sativa
  Clone ID: PAT_MRT4530_41842C.1.pep
MPRYDDRYGSTRLYVGRLSSRTRSRDLEYHFSRYGRYGQNHGP

SEQ ID NO: 140665 - protein, 56 aa, Oryza sativa
  Clone ID: PAT_MRT4530_41843C.1.pep
QSKRRPRFFWVSAAAPLASVIIGSLLVYLTHASATSLNFSSPYMMLALKTGIITGV

SEQ ID NO: 140666 - protein, 83 aa, Oryza sativa
  Clone ID: PAT_MRT4530_41844C.1.pep
MFLGLRSGPAQVPWSQKSPAGNFWRVGYLRRLWFSGLETQGSGLVFGEGLWQGGKVMGGFWGIQPRKAKETLGIKEGFQHYLL

SEQ ID NO: 140667 - protein, 657 aa, Oryza sativa
  Clone ID: PAT_MRT4530_41845C.1.pep
MGSGSAANGGGGGAGAARVPMPAAKPFLETLGGNMKETFLPDDPFRVVRRERGCGRRAAAALRYVFPFMEWAPSYTLGTLKSDLIAGITIASLAIPQGISYAKLANLPPVLGLYSSFVPPLVYAMMGSSRDLAVGTVAVASLLIGSMLSEEVSAAEDPALYLHVALTATFFAGVFQALLGVLRLGFIVDFLSHATIVGFMGGAATVVCLQQLKGMFGLDHFTTATDLVSVMSSVFSQTHLWRWESVVMGCGFLFFLLITRFFSKRRPRFFWVSAAAPLASVIIGSLLVYLTHAENHGIQVIGYLKKGLNPPSATSLNFSSPYMMLALKTGIITGVIALAEGIAVGRSFAMFKNYHIDGNKEMIAFGTMNIVGSLTSCYLTTGPFSRSAVNYNAGCKTAMSNVIMSVAVMITLLFLTPLFHYTPLVVLSAIIMSAMLGLIDYPAAVHLWQVDKVDFCVCLGAYLGVVFGSVEIGLVVAVGISILRVLLFVARPRTTVLGNIPNTMIYRRMDQYTAAQRVPGVLVLRVDSPIYFTNASYLRERIARWIDDEEDQCKEKGEMGIQYVVLDMGAVGSIDTSGTSMLDELRKTLDRRGLQIVLANPGSEIMKKLDSSKVLEAIGHEWIFPTVGEAVAECDFVMHSQKPGMVMGSGAPHENLV

SEQ ID NO: 140668 - protein, 73 aa, Oryza sativa
  Clone ID: PAT_MRT4530_41846C.1.pep
QSRSNAISPRQPRLRVKKKSEDHDTGVSATTICYGSQPSCDTTTAQDIFWGLSPVQLICALLMRADYQQKQNP

SEQ ID NO: 140669 - protein, 81 aa, Oryza sativa
  Clone ID: PAT_MRT4530_41847C.1.pep
CYKEMLLRCYIVEVSKTELFKTDAWPCNSKCSVDGFMVIAWFLLNLLAMLISLSILLRFCTWYGIADMKSSFRTLCLFCLN

SEQ ID NO: 140670 - protein, 72 aa, Oryza sativa
  unsure (1)..(72): unsure at all Xaa locations
  Clone ID: PAT_MRT4530_41848C.1.pep
MGSGRRDRARERRQAPATWGGIEGRSGGGSVPFFSGRVGKXGEDEGCDRAHAHAXRGGHAGGAATWAARAGG

SEQ ID NO: 140671 - protein, 234 aa, Oryza sativa
  Clone ID: PAT_MRT4530_41849C.1.pep
MTPSPLPPLLPEPEAIQPPPGAKPLYCHSRAQHYRRRRAQQQPSASRNLLPAASATCRLSLPGCPCRCELPQLRAGSGSFDWAPIDWIVEDDDPTKNQRDASGGFPTVGWFGSNGMDAVTNSVLIWTFSGTTVSAKAEEQHNAAAILFYLSSNNSDASRRRSRCCLYGLLQSTAIAAGAVLALTTLLSNDRDDLAQDSIVLLARKAEQTSGAMAVLSQPGLTAHLAEALAASSS

SEQ ID NO: 140672 - protein, 195 aa, Oryza sativa
  unsure (1)..(195): unsure at all Xaa locations
  Clone ID: PAT_MRT4530_4184C.1.pep
RPLKKNSQSKFNHTNKIRGSIIHTNISKKKGSKGRSSSNRRRCRRQRRDARPPQHPSRWIRQRGGAPPPPPPLPLDPXIERHRCPCPPCPLPPEGRAPPLASLEHSRGPMARKRRSAAAPRRCPSPLKGRGRGARQSLLRVASATRGAPLAGRHSMPPQLLGGRGRGVPLAGRCSAPPPPHPSLGEIGGGEGGGE

SEQ ID NO: 140673 - protein, 149 aa, Oryza sativa
  Clone ID: PAT_MRT4530_41850C.1.pep
MERGQKKKLATLVGCNYAGTPNELQGCINDVAAMRDALVARFGFAPADVTVLTDDRGSPVLPTGANIKRALADMVARAAPGDVLFFHYSGHGTLVPPVKGRRHGHGECDEAIVPCDFNLITDVDFRRLVDRVPRGASFTMVSDSCHSGG

SEQ ID NO: 140674 - protein, 111 aa, Oryza sativa
  Clone ID: PAT_MRT4530_41851C.1.pep
QRPRPPRVPYYEGLGSIPSPIICMSVEILHRVFYWIDHLKKSGATAVQWVVKLYCNCKLKPNKKFVPFRIGKNRGRSVGRLSVLPPQMFLKGVPKPHTCCFGGKSWLFFPV

SEQ ID NO: 140675 - protein, 164 aa, Oryza sativa
  Clone ID: PAT_MRT4530_41852C.1.pep
MARTMTMRVSSLLVAVLLLAALSFQACSGHGGINDGDGQVDAPATPASSSGVWSKGLIAVKFAAGVFLGTALMHFLADSTSTFKGLTTNQYPFSFMLTCVGFLLTMLSDLVIAAVARRSAAAGVSDNQVSEQQQRQQAEGAVMSRKEEEAAAVAHPAMLVRTVN

SEQ ID NO: 140676 - protein, 53 aa, Oryza sativa
  Clone ID: PAT_MRT4530_41853C.1.pep
HINTDEVYQCNNILIATTYYQPPPIYPCLSRTRFKTHEYITDSCGVPPINKVS

SEQ ID NO: 140677 - protein, 392 aa, Oryza sativa
  Clone ID: PAT_MRT4530_41854C.1.pep
MVGPTFSLLLVFFSSRFFSLLFLSMLRQSRRWAAMGVATAAVGAATAMAAGAATENGGKLRSAASTRTTTTFATRRRTLRSRGAPRRRNEARGIGRARAREEKGRGGSAMSFADLEAGAVRAPRRARGPDATRALVFQITTGVASYRRLLNSLGTPKDTPALREQLLRRAPDADKIADTGPSEFVLDKTVSNYMCDHADKRVADMKLAKDFATTMEEYGKLQNLAIQREMAYKPVVPQTSQPKSYNFAYVIAPLASLPLKYGDGSYYFAFYTTGGIEARDSGKIPEQHALLAESKRQEVLQLDNEIVFNEAIIEEREQAIQDIQQQIGELTRTCFIIEEIDTNIENSAAATKEAKTELAKASKTQKSNSSLLCILLVIFGVVLLIVIIVLAT

SEQ ID NO: 140678 - protein, 45 aa, Oryza sativa
  Clone ID: PAT_MRT4530_41855C.1.pep
RFSIGTCMLMLLHTLLTIALQLLCECTLKLLVILIYQHDMNHLML

SEQ ID NO: 140679 - protein, 352 aa, Oryza sativa
  Clone ID: PAT_MRT4530_41856C.1.pep
MARTMTMRVSSLLVAVVLLAALSFQACSGHGGINDGDGQVDAPATPASSSGVRSKGLIAVKVWCLVILLVFTFAGGVSPYFYRWNESFLLLGTQFAAGVFLGTALMHFLADSTSTFKGLTTNQYPFSFMLTCVGFLLTMLSDLVIAAVARRSAAAGVSDNQVSEQQQRQQAEGAVMSRKEEEAAAVAHPAMLVRTSSFEDAVLLIVALCFHSVFEGIAIGVSASKSEAWRNLWTIGLHKIFAAVAMGIALLRMIPKRPFLMTVVYSLAFAVSSPVGVGIGIAIDATSQGRAADWTYAISMGLATGVFIYVAINHLIAKGYRPHHPTAADKPLFKFLAVLLGVAVMAVVMIWD

SEQ ID NO: 140680 - protein, 68 aa, Oryza sativa
  unsure (1)..(68): unsure at all Xaa locations
  Clone ID: PAT_MRT4530_41857C.1.pep
LLHFCTKLLHLCSLGAEVHCHDAGVISAEGWCYWLWHSCQPRSPQSDGDCQFYLWPHLXLXFITLLIP

SEQ ID NO: 140681 - protein, 156 aa, Oryza sativa
  Clone ID: PAT_MRT4530_41858C.1.pep
MTSAVTLPPAAARACKLAGERRRDGTNGGHQHVEGDAANSPRRRRADEDSDTTATTAVTSPSDDHDWSDGGARGWKVVAKAHGDRRREGKIRAITVQQVKSALAHTLSLDAMADMKVVLVEDQGLPWMKLQEYSHVGLRIDPELTTALQKESGSQD

SEQ ID NO: 140682 - protein, 61 aa, Oryza sativa
  unsure (1)..(61): unsure at all Xaa locations
  Clone ID: PAT_MRT4530_41859C.1.pep
PQSSSLHCQVARNNSDNASFSSSFIACYFIHFSIYPFSHPFKLLSTFTIKIMNKITXVPDE

SEQ ID NO: 140683 - protein, 559 aa, Oryza sativa
  Clone ID: PAT_MRT4530_4185C.1.pep
MGAEVIQQQPAVLLVPFPAQGHVTPMLNLARALAAHGVAATVAVPDFIHRRIAGAAAAGGRARDNQAVGGGVELASIPSGIPHLPAGESGGGRHADDQPGFGAIVHAMEHHMPEQLERMLLSTAGRGRVACLVVDVLASWAVPVAERCGVPAAGFWPAMLASYRAVAAIPELLRKGVISESDGTPAVSSNQLDDKDGREEEQVVRGLGILPAQLELSTKELPWLVGDSATQRSRFAFWLQTLRRARGFRSVLVNSFPGEAVTGTAAAEDDDGPQRQAACPRVLPVGPLLVLAGCNVERAKGAGDDGGVAATNINNHPQPCSKNPSMWQADSTCIRWLDAQPAASVVYVSFGSWVGPIGHDKIRELALGLEATGRPFLWAIKDDPSWRAGLPAGYAGSVAGRGKLVDWAPQDDVLGHAAVGCYLTHCGWNSTVEAIQHGVRMLCCPVSGDQFINCAYITRVWEVGLKLGSVRRDVVRDCIERIMGGAEGTRLQEKMDALRQRAVTAEARCLAQGNLRSFVNEIKRDHPLLTQIYNILQLGKGVLPFERHVFVDAQDQDES

SEQ ID NO: 140684 - protein, 129 aa, Oryza sativa
  Clone ID: PAT_MRT4530_41860C.1.pep
MLCVGDDPLPAGRLLRPCSPRCAAMARRWPPLVVGLALLLLLSVADYSVVAKTDQPDVAALNVMFESMNKPSELLGWKASGGDPCGDDDQWKGIECSDSSVTEINLSGLGISGTLGYQLFSLESGTKFD

SEQ ID NO: 140685 - protein, 448 aa, Oryza sativa
  Clone ID: PAT_MRT4530_41861C.1.pep
MATAALIPPRQSASPCLVPHSHHQPPCHYRATSHVIGKASLPSVAHANLPTPSVTAFRCRWCHPHRATRINDLSRRCQARLLALPLRPTAATGHCQPPPGFLPSPPPPPSSRRRHHLGVPTVNGAPLCSSSSSALPPPHSRTPPASPLAAARGPTSHAGETGSRREGARSSSGRCPPSCQRFLSPIDSGSQAFARQLQPSVAAAVVAPELIGVVGSDPMTSGKRKALPPPSLRPRRFLWLAQVAVRRRMEGSGGGGAAAEVTAPRERSGGPRLANAVRVSRLSNSDGTGAGGGGGGGYLNGGGSGFGSGAGSAQSGNPFGSYATAVAGGGSSSTSQDGGSGNGAGGGSASGAGENIDTVSTGYGGSTSAAGNGGGGGGGQAGGSYGSYGQGGGGGTGSGSGMANTYVFVPITEAEGNAKGNGGGNGTGQNGGNGNGGGGGSGYAKAHP

SEQ ID NO: 140686 - protein, 111 aa, Oryza sativa
  Clone ID: PAT_MRT4530_41862C.1.pep
MTIWKPMSLHQSQDMPDGSAFGGARNDWVCMCEFTSQRRYIAEKSRAAPGPSSHGLASAPCEMPSPPCKHMQGPVLIFMFPKPDRGTRYIGSNPLSGWEQVQMRTPTRFMS

SEQ ID NO: 140687 - protein, 100 aa, Oryza sativa
  Clone ID: PAT_MRT4530_41863C.1.pep
TISWRRYSTKRNQYRPLFGRKDSMVRYMHCLTATTTVHVQLPSTVRNFSTRNYLSDAYLAVLNMQHASVKMISSSSILIMNQMMTQKEIVLLQLQLVNRL

SEQ ID NO: 140688 - protein, 702 aa, Oryza sativa
  Clone ID: PAT_MRT4530_41864C.1.pep
MEGLNIEGIPPVPIDPNSVDVLSSSNIDPNSWTYLEEENYDNQLERKEIYRHNSAGNIFRAAEIAERFIQTIDKRVLVDTAAPIESVKDAVSKFGGILDWKERRKHVQVELDKMQEDAPEYKRRVEVTEVEKSKVLEELYCTRRTIERLKIDLDKSHTETIQAQQDLELAEIRFEEMQQGIARKERSITKAKIEVANERRATALEDLQSVKMELDQLQKEYTSLISQRDNTETKARKAIVASQEIEKVVQDLTIKVITMKDLITTSQANHVIAEGKKINAALAYQQDMVNWQNELKQIDDEVQKLNDDLSLNKDLESKLQTASMWLMNLRDEFKAHVDGTLPKVPSEAREEERPMIIVCAKLARTRKELENMRIDIDKAKDDVKSLWNAAATLQANVEMEKTNIASLRQKENLAFESALALQEELSKIAFELSMVEERTKAAKMPLELQQATKKLEHAKLNAVFARNEMEKAREEADQAQAEVNVVQLRIEATLREILAVNASREIAVASANALQDYKQEIELEPLANRKNNNVTLSLEEYNVLCKKVQDAEDSAKKQVIRAIEKIKKAKDAEVRSLDRLDQLIKQIDDRRVALREAHEKANVACDGKLAMENELRKRRAHHEKQRNTGEVSLPIAQISNVKNTSTSFDAVGSSNSNPYKYRMLLPRADTIATTIAESRPRKSFFPRSLVAMFMFRRKTHLK

SEQ ID NO: 140689 - protein, 581 aa, Oryza sativa
  Clone ID: PAT_MRT4530_41865C.1.pep
MSIRKALGAVKDQTSIGIAKVSAAIAPELDVAIVRATSHEDAPAEDRHVREVVTLTAHSRPYTAACAASLSRRLSRTRDYVVAAKCLALAHRLVADGDPHFRHELVRPAGRRGEPMLALLAEFRDEAHSASWDHSAFVRAYALYLDHRARFLISLLPAPRTVRFADETGSPPRGSTAATVQEMDTEALLGRALQLRQLLDRVLACRPSGGARQSRVVLATLYPVVKESTQLCSDVAVVLAVLLDRFFDMDYPDCVKVFEAHVSTAKQTDDLLAFYGWCDDVRLARPADFADVKRIDDKLLETLEQFVRERGRAGHSSPPPWQQQQQQTAQSDELDMNGIKALPAPEHHAAEPSRSAPEKVAPEQMAPPPPPPQTGDLVDLREPVVEDEQENKLALALFSGTENGGWVAFPSDDAAEVTSAWQTPAAEAGKAEWELALVETASKLSRQKASMGGGLDPLLLHGMYDQGAVRQQVGAHEAATGSASSVAAPRRAPVLALPAPDGTARTTGGDPFAASMGVPPPAYVQMAEMERKQQLLVQEQQMWAQYRQGGMQGQVAMDRLAAGAMPVQYGMPMASAYGGYY

SEQ ID NO: 140690 - protein, 823 aa, Oryza sativa
  Clone ID: PAT_MRT4530_41866C.1.pep
MEGLNIEGIPQVPIDPNSVDVLSSSNIDPNSVDILSSSNIDPNSVDILSSSNIDPNSVNVLSSSNIDPNSVDILSSSNIDPNSIDVLSSSNESKPTISFDLPSSFSVGHTRHSSEDLSSLTINNLRINHREDNYQSQFEEKRIHSHGHTRRFSEDLSSLKINDLCANKEEENYDNQLERKEIYRHNSAGNIFRAAEIAERFIQTIDKRVLVDTAAPIESVKDAVSKFGGILDWKERRKHVQVELDKMQEDAPEYKRRVEVTEVEKSKVLEELYCTRRTIERLKIDLDKSHTETIQAQQDLELAEIRFEEMQQGIARKERSITKAKIEVANERRATALEDLQSVKMELDQLQKEYTSLISQRDNTETKARKAIVASQEIEKVVQDLTIKVITMKDLITTSQANHVIAEGKKINAALAYQQDMVNWQNELKQIDDEVQKLNDDLSLNKDLESKLQTASMWLMNLRDEFKAHVDGTLPKVPSEAREEERPMIIVCAKLARTRKELENMRIDIDKAKDDVKSLWNAAATLQANAKRESCIESALALQEELSKIAFELSMVEERTKAAKMPLELQQATKKLEHAKLNAVFARNEMEKAREEADQAQAEVNVVQLRIEATLREILAVNASREIAVASANALQDYKQEIELEPLANRKNNNVTLSLEEYNVLCKKVQDAEDSAKKQVIRAIEKIKKAKDAEVRSLDRLDQLIKQIDDRRVALREAHEKANVACDGKLAMENELRKRRAHHEKQRNTGEVSLPIAQISNVKNTSTSFDAVGSSNSNPYKYRMLLPRADTIATTIAESRPRKSFFPRSLVAMFMFRRKTHLK

SEQ ID NO: 140691 - protein, 835 aa, Oryza sativa
  Clone ID: PAT_MRT4530_41867C.1.pep
MEGLNIEGIPQVPIDPNSVDVLSSSNIDPNSVDILSSSNIDPNSVDILSSSNIDPNSVNVLSSSNIDPNSVDILSSSNIDPNSIDVLSSSNESKPTISFDLPSSFSVGHTRHSSEDLSSLTINNLRINHREDNYQSQFEEKRIHSHGHTRRFSEDLSSLKINDLCANKEEENYDNQLERKEIYRHNSAGNIFRAAEIAERFIQTIDKRVLVDTAAPIESVKDAVSKFGGILDWKERRKHVQVELDKMQEDAPEYKRRVEVTEVEKSKVLEELYCTRRTIERLKIDLDKSHTETIQAQQDLELAEIRFEEMQQGIARKERSITKAKIEVANERRATALEDLQSVKMELDQLQKEYTSLISQRDNTETKARKAIVASQEIEKVVQDLTIKVITMKDLITTSQANHVIAEGKKINAALAYQQDMVNWQNELKQIDDEVQKLNDDLSLNKDLESKLQTASMWLMNLRDEFKAHVDGTLPKVPSEAREEERPMIIVCAKLARTRKELENMRIDIDKAKDDVKSLWNAAATLQANVEMEKTNIASLRQKENLAFESALALQEELSKIAFELSMVEERTKAAKMPLELQQATKKLEHAKLNAVFARNEMEKAREEADQAQAEVNVVQLRIEATLREILAVNASREIAVASANALQDYKQEIELEPLANRKNNNVTLSLEEYNVLCKKVQDAEDSAKKQVIRAIEKIKKAKDAEVRSLDRLDQLIKQIDDRRVALREAHEKANVACDGKLAMENELRKRRAHHEKQRNTGEVSLPIAQISNVKNTSTSFDAVGSSNSNPYKYRMLLPRADTIATTIAESRPRKSFFPRSLVAMFMFRRKTHLK

SEQ ID NO: 140692 - protein, 95 aa, Oryza sativa
  unsure (1)..(95): unsure at all Xaa locations
  Clone ID: PAT_MRT4530_41868C.1.pep
SWXASAFLQQDAIRMEXXXIXQQLRLXXHLSPXQDIXXVQXIALQLHLXQFXYLSIDRXLAQALALLAFNLPSTYGIYXWSYNAPDSITTLGDIL

SEQ ID NO: 140693 - protein, 258 aa, Oryza sativa
  Clone ID: PAT_MRT4530_41869C.1.pep
MVFNSEFGLRHPRSRISPAASAKRRTAPAKLVAFSRGRSRGAHGRRGRDGRRRDVRRDEHGVEHRRRAAVDREVGVDYAKQMLADASSFIWDTFEQPGDGGDRKPVDAVTLTVEDIDGVAFTSGDGIHLSARYVGGYSAAGDVRAEVTGVLYHEATHVWQWDGRGGADGGLIEGIADFVRLRAGYAPPHWVQPGQGDRWDQGYDVTARFLDYCDSPAVVQGFVAQLNGKMKDGYSDDFFVQISGKTIDQLWQDYKAKY

SEQ ID NO: 140694 - protein, 74 aa, Oryza sativa
  unsure (1)..(74): unsure at all Xaa locations
  Clone ID: PAT_MRT4530_4186C.1.pep
FFFKQFNPNKFFLNGVFGIFXXKXXXGXXPKXKKKKVXFPXKKKKKKKKKKKKKKKKKKKKKKKKKKKKKKKKK

SEQ ID NO: 140695 - protein, 233 aa, Oryza sativa
  Clone ID: PAT_MRT4530_41870C.1.pep
MKPFHMATLAALMAAAAAAATAAGAVTFDATNTASSTAGGQRFDREVGVDYAKQVLADASSFIWDAFEQPGDGGDRKPVDAVTLTVEDIDGVAFTSGDGIHLSARYVGGYSSSSGDVRTEVTGVLYHEATHVWQWGLQDYAAHSWVYEGIADFVRLRAGYVAAGWVQPGQGNSWEDSYSVTARFFDYCDSVKPGFVADINAKLKDGYNVDYFVQITGKTVQQLWQDYKAKYGN

SEQ ID NO: 140696 - protein, 117 aa, Oryza sativa
  unsure (1)..(117): unsure at all Xaa locations
  Clone ID: PAT_MRT4530_41871C.1.pep
LTLHRXKVESIRTPTLSLHVPPMFPHSPTLHPSRLGEPTEGVTIRLNIFLRHSHTARGTAPTMFCLVPRHKGHHYHESHDHTTKLTTSPLFSCITYDHDRYKFTLSHHRPGMLCAPL

SEQ ID NO: 140697 - protein, 135 aa, Oryza sativa
  Clone ID: PAT_MRT4530_41872C.1.pep
MASAPLPQAAQLGYKPNVFSFWILYLQLSHGSGDDLAGARDLGRAIGGHLRVEDNKTNSKVLTDTTNDVGRRPATNLNGGGGSDLAGDGAPVAGDERGRAAGLPLTTAHLNAAAASGDDDGGGGATSPEMAGGNR

SEQ ID NO: 140698 - protein, 89 aa, Oryza sativa
  Clone ID: PAT_MRT4530_41873C.1.pep
RIDAIHPYTIATFQETLLRVTYCSRGETFKVFNFSLSRKKKRVFKGSMILRFGKLLLSQFKSPMTLASSSTVTIHLQQQLQSKLNSSCR

SEQ ID NO: 140699 - protein, 164 aa, Oryza sativa
  Clone ID: PAT_MRT4530_41874C.1.pep
HEGRRRRRFRRVVLRRLRALDHGAEPVVRAGLSDELTIEHSRRNAGQLRPSASHTVSLFDRRQPLPIPQPATATTIPTGGRTIALPIGDRSPLNSFLHQINLTDDRSASTRDRLLLPPRGSSKVLALWFTPTELIIDLYPVDMHLSPPRSPQEEREIHLPSPIS

SEQ ID NO: 140700 - protein, 37 aa, Oryza sativa
  Clone ID: PAT_MRT4530_41875C.1.pep
RMIWRGQQRRVTIYFRWEGKHAFYFDNDLLMCLYLTM

SEQ ID NO: 140701 - protein, 62 aa, Oryza sativa
  Clone ID: PAT_MRT4530_41876C.1.pep
WRCGGGGSLPATATSARSGGGRREKQWRRPKATPRARRTAAHTGERERGRRGSSHQQARRPA

SEQ ID NO: 140702 - protein, 71 aa, Oryza sativa
  Clone ID: PAT_MRT4530_41877C.1.pep
MQGGRGGSNIVVDGSGYAACGSAAAALDLVRAVDSKDLGIDVISVGADGGGGTGTGIARDLGRRPDSTRKA

SEQ ID NO: 140703 - protein, 479 aa, Oryza sativa
  Clone ID: PAT_MRT4530_41878C.1.pep
MELAEQLYSVFRSYAPPIWASITAGIFVITSLSLSLFLLFNHLSAYKNPEEQKFLVGVILMVPCYAVESYISLVNPSISVDIEILRDGYEAFAMYCFGRYLVACLGGEDRTIEFLKREGSSGSDVPLLDHETGQRYVNHPFPMNYMLKPWPLGEWFYLVIKFGLVQYVIIKTICAILAVILESFGVYCEGEFKWNCGYSYTAVVLNFSQSWALYCLVQFYAAIKDELAHIKPLAKFLTFKSIVFLTWWQGVVIALLYNWGLLRGPIAQELQFKSSIQDFIICIEMGVASIAHLYVFPAKPYEMMGDRFIGGVSVLGDYASVDCPLDPDEVKDSERPTKTRLPQPGDRVRCSTGIKESVRDVVLGGGEYIVNDLKFTVNHAVEPINEKLHRISQNIKKHEKEKKKTNDDSCINSQQSLSRVISGIDDPLLNGSLSDNSGQKKSRKHRRKSGYGSAESGGESSDQGLGGYEIRGHRWITRE

SEQ ID NO: 140704 - protein, 53 aa, Oryza sativa
  Clone ID: PAT_MRT4530_41879C.1.pep
NKSVCCHAKGFTWMLQSTCYDKRNNVYSSLFYIVICPCYIKIKAELQCLTEKQ

SEQ ID NO: 140705 - protein, 53 aa, Oryza sativa
  unsure (1)..(53): unsure at all Xaa locations
  Clone ID: PAT_MRT4530_4187C.1.pep
ASNLSLTXHKRCNXXKRKLXVKETWLGQPVXXIVLHSHXXXLLLLPXPXXSFG

SEQ ID NO: 140706 - protein, 400 aa, Oryza sativa
  Clone ID: PAT_MRT4530_41880C.1.pep
MATGGSGGGGGGGGGGDDVHGLKFGKKIYFEQDAAASASAAAVESSSTSSGGGGKKGKGVAAAAAPPPPLPPRCQVEGCGVDLSGVKPYYCRHKVCYMHAKEPIVVVAGLEQRFCQQCSRCSVHMVRFHQLPEFDQEKKSCRRRLAGHNERRRKPTPGPLSSRYGRLAASFHEEPGRSRSFVVDFSYPRVPSSVRDAWPAIQPSDRMSGSIQWQGGHELHPHRSAVAGYSDHHAFSSHGGSAAGAPMLHHPAFELTSGGCLAGVATDSSCALSLLSTQPWDTTQSTSSHNRSPPMSSTASAFGGGNNPVSPSVMASNYMAASPGWNSSSRGHDGARNVHLPPPHGVVLNEVPPGSVHHGHFSGELELALQGGAPSNRPEAEHGSGSGAFSHSTNAMNWSL

SEQ ID NO: 140707 - protein, 186 aa, Oryza sativa
  Clone ID: PAT_MRT4530_41881C.1.pep
MALGARHPPSSKKTTPTTSKAAKQQHNPMQEHEITLESKQRNNKNEKSSYQQRHQYSHTITWPWEKVEESYALSWSRGKQRRRTTTTTRRECERDQVLTSPQFRCSCNELLRFAKQKRKCKGSTNFAQEGCVDASPPLDRIYVAAAPDPTVQGHPSVLLVLPGPLRDALAVRWCPRVRSDAEHTRA

SEQ ID NO: 140708 - protein, 92 aa, Oryza sativa
  Clone ID: PAT_MRT4530_41882C.1.pep
AYHNKDWSHMKHSLCSPCFAVHALAVSLGSFEYSCSAVLLNRCYPYMSRGTWIRAPFAILLTENTNCTVPVAHITIDINMSAYHTTTHSGTY

SEQ ID NO: 140709 - protein, 107 aa, Oryza sativa
  Clone ID: PAT_MRT4530_41883C.1.pep
MSRVGADLKLDIADTISCSPAVSVGGKVIATATREGDLELTSSRKGEGGARAHRLSEGRQGGGRSSSPVLGGATTEVVLDPSYYQKLLPSPEPLAQDYIILDLGEKA

SEQ ID NO: 140710 - protein, 150 aa, Oryza sativa
  Clone ID: PAT_MRT4530_41884C.1.pep
MVYLAGKVSQDGRRKGRERPFQGTIIAVNELLPFEGAKLSDLLLDRFARSEQQRAMRPYAFDLSIGPLSYPINIIIVFFVAVMGPPLLLPLSASWGRASTGGEERRAPTATATQSCSAKIPDEHELINSSAAAAAKSARQSIRPRGTNRV

SEQ ID NO: 140711 - protein, 102 aa, Oryza sativa
  Clone ID: PAT_MRT4530_41885C.1.pep
DRGLIDHKASRSCSSGGLWRPWGISGQLSESEMSSGQACRERADSRGPCRRCSTGSSPPERFSRCSAAGRAQLLCTLQHCRREPKCRARHPGGRTIGEHAIP

SEQ ID NO: 140712 - protein, 119 aa, Oryza sativa
  Clone ID: PAT_MRT4530_41886C.1.pep
HISVYICRWCVYIYIYIYICIYIYMYMYIYIVHTGPHVYTRAHARSCVHRIRSHICIYMYIYIYICMYMYIYVCICMYIYVYICIYICIYICIYIYVCMYVCMYVIENVSFHIYQQYKY

SEQ ID NO: 140713 - protein, 61 aa, Oryza sativa
  Clone ID: PAT_MRT4530_41887C.1.pep
MAPAIAGNGRTKPGRLSLPPVNIQVDYPSSLVLSSLPSAVKCTPLATFYHVSPLPRYTVVP

SEQ ID NO: 140714 - protein, 80 aa, Oryza sativa
  Clone ID: PAT_MRT4530_41888C.1.pep
MTTNFQLEGNSQPAGVLWVSYCCGGRRSVAEEVANASTGPRGGGSSECPYEPPRRTRSPPQWTASALQRDDTLSRGPIFW

SEQ ID NO: 140715 - protein, 46 aa, Oryza sativa
  Clone ID: PAT_MRT4530_41889C.1.pep
CHSCKWFGRRVLLLWLSTPACFAMCCQSTVCSLHQCSIKLANVLSS

SEQ ID NO: 140716 - protein, 58 aa, Oryza sativa
  Clone ID: PAT_MRT4530_4188C.1.pep
PHCIVILKAYRSQCDTMSLSGNIFFTMCISHVLNYACNGTTKCSKENETTISLISYYA

SEQ ID NO: 140717 - protein, 931 aa, Oryza sativa
  Clone ID: PAT_MRT4530_41890C.1.pep
MPSPAGGPVAVAAASAAAAEALGISPEMYPTEDDLAYEEEILREPFKLKGWWRYLVARAAAPFAKRAVIYERALKALPGSYKLWHAYLRERLDHARPHPISHHAYASLNNTFERALATMHKMPRVWVLYLTSLLDQRLLTRARRAFDRALRALPVTQHDRIWPLYLRLASLPACPVETSLRVFRRYLQYDPSHAEDFIDFLISANRWQEAADRLASVLNDDGFRSVKGKTQHQLWLELCEILTKHADEVAGLKVDAILRGGIRKFTDEVGKLWTSLADYYVRRTLYEKARDVFEEGVASVMTVQEFSVVFEAYTQFEQSMLAAKLEAAEEEGAGSEGEEEAGRKNGMDKLSKKFLADCWLNDEDDTDLRLARFERLLDRRPELLSSVLLRQNPHNVEEWHRRVKLFEKDPTRQVATYVEAVKTVDPMKAAGKPHTLWVAFAKMYEKHNRLDSAEEIFKKATQVNYKAVDHLASIWCEWAEMELRHSNFDKAIELMRQATAEPSVEVKRRAAAEGDEPVQLKVHKSLKLWSFYVDLEESLGTLESTRAVYERILDLRIATPQIVLNYAYLLEENKYFEDAFKVYERGVKIFKYPHVKDIWVTYLTKFVRRYQRSKLERARELFDEAVKQAPPQEKKVLYLQYAKLEEDYGLAKRAMNVYDEAVRAVPNSEKMSMYEIYIARAAELFGVPRTRQIYEQAIESGLPDRDVMTMCMKFAELERNLGEIDRARAIYVHASNYADPNSHPEFWNKWNEFEIQHGNEDTFREMLRIKRTVAASRSQTHFILPEYLMQRDQRLNLDEAVDTLKRAGVPEDEMANLERQLAPGPSTAPPAPSTATAPANRMMNFVSAGVQAQAESSSRQQQAAATNNEDIELPDESDEEEDDVQIAEKSVPAAVFGELGKRAAENREEESSGAQENEQLGALERIKRRRQ

SEQ ID NO: 140718 - protein, 59 aa, Oryza sativa
  Clone ID: PAT_MRT4530_41891C.1.pep
MCSFNLWIDAGDVVVPYMGPRPPVGIHRYVMVLFQQKARVAAPPPDEDAARARFSTRAF

SEQ ID NO: 140719 - protein, 380 aa, Oryza sativa
  Clone ID: PAT_MRT4530_41892C.1.pep
VSTDGQWCFVVFWVVPRTPSIKVRWANLKNRLMSMCPSNYPMTFYPEITQPGPSQFYLLKLFSADRKGLLHDVTHILSELELIIHRVKVSTTPDGRVIDLFFITDGMELLHTKERQEETCSMLIATLGPSISCEILLAEGFQQGFSSLPPTISEELFRLELADGDNCSRSICAEMKRVQKATINFDNTLSPAHTLLQINCADQKGLLYDILRTMKDCSIQVTYGRFWSDKKGFREVDLFIKQADGKKIIDPEKQDVLSSRLRSEMLHPLRVMIVNRGPDVELLVANPVELSGKGRPRVFYDATFALKALGICIFSAEIGRQAASERQWEVYRFLLDDSSEFPLSNSLVNRNRIVDRKELAICVTKERMTYPEYVIWSYIL

SEQ ID NO: 140720 - protein, 95 aa, Oryza sativa
  unsure (1)..(95): unsure at all Xaa locations
  Clone ID: PAT_MRT4530_41893C.1.pep
MSKRTLLTYYSSSSNTNTSDPPLNNEIASQSKRPREEFSHMDIIGDPGKRKQIDYPSEIRDQVKRAYALSGPTXPDICTFPRKWQSSEWRSFQKA

SEQ ID NO: 140721 - protein, 369 aa, Oryza sativa
  Clone ID: PAT_MRT4530_41894C.1.pep
MAMPLPPPPPPRPPLGRGRLVGVGPAPAPATASQSNRPVPPLQLPRCRCHRSEGPWRTTAAANGRRRWWSDEDMEEEDDEEGYGYDDGGAPGGSAQELFGEPWFSKLFRAYGYVLPLLLASMLVATGPRAFLMAMALPLAQSAISWVVSFFTTRSRRQQEEEESYGYDYDDDPAFQRREEDDDDGDYYDAGAWQWRSRSHQQSTESGSGFGGWDDLLYDDEEKKEQESSGKKRTPPEPDTAAAAAASDLGLGLRARRGPRRSNGGMSRGRSSSSMRNQTMKIEMKFLALLSTDSKKHQTLMWTGRRTDLLLLLLLFLRRAGAVVLPTLCQYSNSALQRETDRIRKKDEKHSRINRDGQQASEIRSAGSA

SEQ ID NO: 140722 - protein, 50 aa, Oryza sativa
  Clone ID: PAT_MRT4530_41895C.1.pep
MASFSSRRDSLVVRDGVGKALRQWGTAEAMRMEEHDGGGTEIKNMLISDD

SEQ ID NO: 140723 - protein, 67 aa, Oryza sativa
  unsure (1)..(67): unsure at all Xaa locations
  Clone ID: PAT_MRT4530_41896C.1.pep
MAWQLSNYNIHEYTRCRXAADAFCENRALGDXAFADGKKQLDVAKRHAVVYSLYAPKAKSIMEMKLQ

SEQ ID NO: 140724 - protein, 611 aa, Oryza sativa
  Clone ID: PAT_MRT4530_41897C.1.pep
MDISWEKKKKTKKKKREPAMAMAASPFLILPSLFPKPTILAARIHPSIFRGRHIRCSPNGAAVPESPEPAPRRGRRKSPSPSPPKAKTTRRRTKKNTQESDSEGEEEPPKRRGRRTRKSKQEAEQEAAEKEDEVRAASPGTEDSKRAVQDEDGEAEATGSDSEDGEDSPYDWPPLVCCFGAPRWEFVPTVRVSDRQMHPDIYSTWLHLQWEPPEFARAPGSAASNVAIALTRLGGRAAVLGKVGDDDFGRELVYRMNCERVQTRAIRFDDGAATATARMKVGFRDREDGSGGTRLVAETVKSAAEDSLSKAEINVDVLKEARVFHFNSEVLLTPSMESTLFRAIELSKKFGSKIFFDLNLPLPLWRSRDETKELINKAWNEADIIEVSRDELEFLLDHEYYQYKRANPPQYYLDGFHLTRNWPQYYHYTPEEIAPIWHDGIKLLLVTYGTLRIHYYTPKFHGCVIGTEDALITPYTTDRTGSGDAVVAAAIRKLTSCPEMYEDQDTLERNLRFAVAAGIISQWTIGAVRGFPTESAAQNLKEQNNAHDIQVYFMSAATEVVKGKVLPKQLTGFSVFSFSWKNVSATWRLPLLYSFEELCLPIDFHGRDASV

SEQ ID NO: 140725 - protein, 105 aa, Oryza sativa
  Clone ID: PAT_MRT4530_41898C.1.pep
AHSTSFPHAEAWALGHETSRSLHTRPCSWQILLGGRVARLPPARVETDPGGPGGYLPASARPGKERPVGEHGGLRVTCSPGGALVIRHNSTQIRAGSIKCKAWGA

SEQ ID NO: 140726 - protein, 97 aa, Oryza sativa
  Clone ID: PAT_MRT4530_41899C.1.pep
VIYAVLKKPLAAGIGYNNRKAQKEAITIKTAKNDKTTNKRHEEDGSVCNWGVSVDTDKEPGAVILEDSHEHQGILGDRERAPDVGIAPESHDNLTGD

SEQ ID NO: 140727 - protein, 52 aa, Oryza sativa
  Clone ID: PAT_MRT4530_4189C.1.pep
CTLVCFLTGSNRFKTAHRSIGQYPNCNLHNSVLAYGILQVIQNRFNYHKSVS

SEQ ID NO: 140728 - protein, 2445 aa, Oryza sativa
  Clone ID: PAT_MRT4530_418C.1.pep
MEMDFESMKRRELQALCKRHGLSAGGSNAALVARLAATLSGAATEEKAVGVVVGKGCMKRSGGGSEGFGAAKTVTFALEEEEEVMETRGRGRRGRRPRVMWSPVAAKTRGRQKAGEVVTDSEAGSGGGGKQRRGARVGGDAAAEGEPAAEAPRRRSRRNAVNSSDADGAEGDGAKEGEAVDNKRKQRQKQKQVAGDVGEEITVSVQDGVSVRSTRSSCLLTAVTVVQSPVVEKKRGRKRKGDVNEQICLEVQEHCAEVQDDGRKLRSGSTSVTTVSPPVVDCRRSRRKAEDPIVEKAAKVNVSTRSTRSSSVVTDIASPIVLENKRQKKEHIHLDVEPPTVPVVQANVAPSTRSLRNRVVQVKDNVMMETEVCKKLENKSLSCRPSTQYQTSAFVEEEDEQMVHDPSIGPKLRRSSRRQSVANELLLINSISESNNVSRAQTDAKGLKTAQPLMHNAAKTSMKNVVVRKDENAGLTKRKTGRGRDKIAKSVGKVSLSESSGEALPTEMQQEVIEPLKRSRRKSVVSTLLEEGTKCMHGSVRGDVLVKQPTENRPVRRSTRKSVVSAMLDKESNGLTTEMMPEAHIRRSKRKSFLPNMLNDEKMDDCEMVRDEEHKHSKGNDPGKKLAIKEPARRTTRKSVVPIMFDRETKGLAAETNPEVHVRRSTRKSVVPNMPNSENKYHDELVRTVVGVAVAKQLEAKKPVRSNGGGFKLGKRRRTSMEMSCSSGNNTKVSDRQKSRKQQKVQTPASEGPCAKESTTDALQEIISFEESNADADDMVVRESTQDGNEGCHEYCNDSSASTQEVNRDNATVEETHREQWVNSEVHGSDSSDTAHEYVDLRTESIIHLSGISSEELGQSSSITELVSRAGISSENKVLLDDAEADLGAAVAQTLNANSNEEVLEDLDNPAAIAEELSSATALPLLDAEDHTDKNEIITLPEQLLGALSKLSSVDQLPPCTSDADALVIVNDSNACNIANWTAVKGTDDIQNVDIALSGDGIVASKSMTVAEVLSCAVATVLEHGTLAEHDFERTCMKNGDASLSLFDSGSPGNETDNGSFKALEFELNYLPTVNDERGKQAEEDKCPEVHSDAASEKSNQGDDLCKNLSTVKGESPLASNFHVEDAAEHGSMLQIEINAERGSSDGMDSSYGLKSLFAEEGNQQHYMIDDGNIAAEVDSGNKLSDERHSSLGLKSLFAEEGNQQHNLIDVQHIAAKVDSGSKSSDVRHSSFGLKSLFAEEGNQQCNLVDDENIAVKVNSGSNSSDGRHSSFGLNSLFVEESNQQCNFIHDENIAVKVDSGNKSIGFKTSTFYTRVDCDLEDAAAQLIGEGDNALDVEQGVAYDKIMLSPLNDIGACSSYGRNPSIGQRSLYAQERGGSNVTNGAFVAAETDGKKDLDNIIVGLHMESDGIHTEMDVGLVSDSPENKLALEPVQQGDAEEGVHSENGVDESNIDDQTPVLEPVEDHGAHVDSILVTKSGEGNGNEESSKASCEEQVECGQLGLFKDANCTETTNCQGIGYEGEVCNRVHSTDISTLCEKSDDNGSSKDAKGNSDALLSSSVIVPANDNDVHVSSNISQLESTDCLDEPTLFFNMGVHLGPNEKCNKRMEDQVPSGVSTIDISVPATANGLESGLTLLPANETLNLQDDQHNSELESTQVGQSGISCAEKSTNILELGTVNVVDKGNPCDHSLPQDCPMDHYQQHEGLNDIPVDKSLEASDMYLGNSVFRIEGIIEKPAINLATPDCKLQGTLLEFSLKNGAETPNSKHSPFGLQSLFSEENMDGSRQQDNAGFPCAENKVDESNSSHGKCRVEKPVSAEPVRCEGSHENLGIVKEIGSCVSSCQQVNEQEEFSEASHKKRWVAPIQLDLADDVNQTEREIISSELVCEKEEKIEVMSSDIDTPVRESHGSELSTHASPFSRPQICDPRSSQIFDDAHPSSNPSQLELPDVFHHDHEVLCSERNDQILPGIPSSPFSEAVSIKFSENETMLLEAAETSELLDEKLNPQPGCDELAEHDLSGFKDTEDSSDTEFMRYSIFRFPADGQIDSCQEMELPNDQSATKAREESAFSEGESVVGSCETNEQRCQVDCKEENEHKADQVTPCIPTFDLSGAASTKGSEGGITLLPDAKLSVFTAVQLNSKLDGEHNLSGGKDTGNIFDNRSVDDSYHEQELLNDLSAPKSLVEPCSACMDSCNGQAILEDMPGPKSPEDYQDDSVSGSVGDMFEPSPTERAEQETTLVSPAEMLVFKFGQHNNPNLVSVGGHNDSCDEDTADMFSTEPVASNNQHEQELPNDVSAPVSLKESAICQEDISVHTESCPGKSLPVPEDISAPKSPEERAIHQDDSVPRSAVLCQTSGRRRIDEISTKLLSFKISSTVKPSHIAMNAPSTKQVDNLSESAIALLRNRENTLAIKTDRPVKPNPDRSVAKNSSRRPLQPIGRRPEGH

SEQ ID NO: 140729 - protein, 418 aa, Oryza sativa
  Clone ID: PAT_MRT4530_41900C.1.pep
MMNTHMNLKRTTRLPFKSVARSACVSKDWRAAVSDDYLRRRLPLLMTTVYFPDDDAVAAGGGGGGGPRFACAASDGNDGHRLEDCHLGFLPERGGVVVCDGCNGLLLCRSPGTPEFFVVDPVTRRWAALPAPAKAATLSVLAFDPSTSPDYRVVNFTGWRDRGAAVEVFSSATWAWTARDTEFGGVPASSLSGSMHYHDGILYILASEPDCLVSLNLADFSSTAAVIDLPEPVDGGDAHVAHSGGRLHYIFRDGELLKVWELDDDDQWRPKHAVKVEHLAHGGGEVRFLAMHPEEEDVVYTWSPWKVVEHDLRRKTTTCHCQAWEFGDDGGCERGGGGSGEAAAERRGGGEASTAARIKSTGTLIHSKASFGPALELSRSPRPRVFCQQQRELPPPLASSAAPCRRRSLSPAYCRAPE

SEQ ID NO: 140730 - protein, 48 aa, Oryza sativa
  Clone ID: PAT_MRT4530_41901C.1.pep
QDHRKGGNWSLGVATISTLVVRHHPYLNIGPCYHALSSLQLAARSPDP

SEQ ID NO: 140731 - protein, 287 aa, Oryza sativa
  Clone ID: PAT_MRT4530_41902C.1.pep
MQALLLSPAAAPRPPLPAPRRPSLPPRATSILTPAPRSPALRVVDAFAAGRWGGRAASRLPAAAAAAAAAAEAGPPDPAPSPAEDEAERAMLAQVSKRLEKTAQYFKTLGTLGFWSQLVCTTVSAGILSFSAVATGNATSPFTFFATSIGIVAAFISVFWAFGYIRLSQRLKRTANKPAKAPPRADVVKNLKNGIVLNVLGMGAAILGMQATVGALVAKALTTSAVPYYQGISPGQSPVLSLDVFLVQASANTILSHFLGLSSTLELLRSVTLTKVEAASTPRSQPA

SEQ ID NO: 140732 - protein, 130 aa, Oryza sativa
  Clone ID: PAT_MRT4530_41903C.1.pep
TSSASTSGPPPPPPAPRSCRVQTLPTWRSSLHLFLLPPQGWRLLAAPPLPRQPPSAIAATSSTAEECRGSLLDRWPPPVAPPFLAGRRRSSPIASVCQQEVTTRRGHTEQAAHNFPGLPGSRCHLSGSKE

SEQ ID NO: 140733 - protein, 162 aa, Oryza sativa
  unsure (1)..(162): unsure at all Xaa locations
  Clone ID: PAT_MRT4530_41904C.1.pep
TKFGCSYSRLPAISACSRSLYAASIQILSPCGEFVSHSAAQWATPFCQSPVFQLRNCQVMQHQCCQQLRMIAQQSHCQXITSVQAIVQQLQLQTVCWASYFDQAQAXQAQAMLPLKLPXQISGIYPSYNTAPCSIPTVVVSGMELYRIVVQERKIKSWHHRV

SEQ ID NO: 140734 - protein, 271 aa, Oryza sativa
  Clone ID: PAT_MRT4530_41905C.1.pep
MAVESSSSSSSSTGAAAAGCTSSASPTIFRHSRHLLHRRGMPRLPPRSPATSRRSSLSCRALSVVANSFRCVIELHKDAPCADNSTVDGASSETMPPHWDFGSERKKEIERRLAPRSVSTTRSGVHEHVEDAAAIVHGRGLGDSNKASTLPNTTSRFAHSLVSDEKTSKGGAAGGVEGRDKRYEGRGRQPLAGGYTVEWAYFEIELLIGVAADRATTNEAEHVDVRSAEGKMPPPWHPDLMASRPSLSGAEEVYCLVLFIQWPSLSRKTSL

SEQ ID NO: 140735 - protein, 202 aa, Oryza sativa
  unsure (1)..(202): unsure at all Xaa locations
  Clone ID: PAT_MRT4530_41906C.1.pep
IYQWATQFGDRIDETEEMLTDNRIWIERLRGVGVVPAAEALNLSFTGVMLRGSGVPFDVRKNQPYDAYDQVEFDVPVGTNGDCYDRYLCRMEEFRQSLRIIHQCLNKMPAGPVRVEDYKVSPPPRAAMKENMEALIHHFLLYTKGYAVPPGETYSPIEAPPGGDXGVYPPFXGRERPLTXHIGVSGFGHFAGSPPPPQRSFP

SEQ ID NO: 140736 - protein, 265 aa, Oryza sativa
  Clone ID: PAT_MRT4530_41907C.1.pep
MRGHANADAKRGVNLHGMAQAAVKRSAGRCEAFWGESAGSDRFLLFLGRAAPGLKSLRLISCYDVSNKGFGKAIKKFPLLEELELSLSPNVFGTDVFRTVGKSCPQLKRFRLSQHGFHSFEDSHDDDEALGIATMTQLRSLQIFGNTITNEGLEAILDNCPHLESLDIRHCFNVFMDDTLRAKCARIKALRLPDDSIDDYDLQVFSPVFADSGNSSDDMDDGYMVPGLHCVVFSEENECFDDDINEDELDDEARMMLNGLRALLM

SEQ ID NO: 140737 - protein, 695 aa, Oryza sativa
  Clone ID: PAT_MRT4530_41908C.1.pep
MEQLVGVHHHHSSSSSLSPRTPSPTHPLPHLLRLPSSSNRLRPPDHPHSSHPVSKLLRVTPPFFLVLLAAVYLLASFTIFSSPAASLRPTKNRPKLLLPMPAPSPPPPDLFELHGGRIRAWITNVGATVTSLLVPDNNGVLGDVVLGFDSLDPYQEKCSTFNDACLNNLKLVTSTSNYGWSVWGEMYCEYWTIVFSLGVPNGTSPYFGCIVGRVANRIKDGKFTLNDKQYSLAINNPPNTLHGGFKGFDKIIWEVAEYVKGENPSITFKYYSKDGEEGFPGDVSVTARYSILASTTLKLEMEAIPLNKATPISLAQHTYWNLAGHNSGDVLAHTVQILGSQITPVDETSIPTGEMMPVSGSPFNFLTETTIGSRIDQVPGGYDHNFVIDCGEVKSGLCHVAKVTDPSSSRVLDIWADAPGVQFYTGNFLNGIVGKGGAVYGKHAGLCLETQGFPNAVNQPNFPSVVVQPGENSCRPFCFVLSTSLMLQWLYSFQILLHVTICYSEFTRISRQGISCRTCRQGSFQDEVKDIVGMETDGGLWDGTEYGGEVGENNHMNPRNSRVFLVTMSPTHTRVDRKMMFHSNFDFTITALATWRQPPVGSREDIRKRKVVLKVLWIIKHHYLGYTQQSSNGHSRTDNKSSCATIEFRGTMKGTRRHLEKDLEPWRIIEDVQSQRGGPNQVNLGCNSESRTSLY

SEQ ID NO: 140738 - protein, 115 aa, Oryza sativa
  Clone ID: PAT_MRT4530_41909C.1.pep
QQDPANTDAKDKILLVTCIAIMFFMFTFGMSLGSSVWPYISFMMNTKGVVVASVVNWILAGSSIIAFSFVTNSMTSPYVMLFIYCSITFILTIVFTVMSVNVKGLSAKKVQMQLQ

SEQ ID NO: 140739 - protein, 55 aa, Oryza sativa
  unsure (1)..(55): unsure at all Xaa locations
  Clone ID: PAT_MRT4530_4190C.1.pep
ARGQASNRGLSRMQDPDLATRNLHVPTXSHSLYCNSARNKGMNPSNVRTNMSLPA

SEQ ID NO: 140740 - protein, 64 aa, Oryza sativa
  unsure (1)..(64): unsure at all Xaa locations
  Clone ID: PAT_MRT4530_41910C.1.pep
ALFRCGVSFDPPKXVVLAKGFPFFCSPCIPRVLAPPPPKCPGCGPPFGPSHVREVKFFGFTQPA

SEQ ID NO: 140741 - protein, 155 aa, Oryza sativa
  Clone ID: PAT_MRT4530_41911C.1.pep
MKERCRWLYRIKPSVTHEPFHPRRPAHPRLIGDFDRTTTDTVVTPTQLRWRPVDVPPHHPPLDFIDGLYTVCGAGRCFLRHGYAIHMYSANKCMDGCAFCNADGYFLIVPQQGKLLITTECGKLLLPPGEIVVIPQGSRFAVDSPDGPLRGYVAE

SEQ ID NO: 140742 - protein, 717 aa, Oryza sativa
  Clone ID: PAT_MRT4530_41912C.1.pep
MGGRPRAPPLQTCSQGGRTHRRMLGWGVAVLTPRASSPSPAGSARRREKCRLALLIGDGGEGESTGIFDPRHSEIRAHYIVLSTLASSLIFNDCDPDRLAIRDERSNPQRCRDTVYVGCGAGFGGDRPMAALKLLERVKELNYLVLECLAERTLVDRYQIMMSGGKGYDPRVKEWLSVLLPLALDRGVCIITNMGAVDPLGAQEEVLELASNLGLEITVAVAYETSSGNSVFSNESTGVRQGGSTYLGVASIVHCLENGKPQVVITSRVADAALFLAPMLLDLSLPYAEVSYKGEVFVGKAEGSGGLLSYSTCAEQLLYEVGDPANYITPDLVVDFRDVKFQQISKDKVQFRMDGLFELEEHAIKFVEEFIALYTNGPAGGGGISTGQKKEITLQKILVDREKIFWQVNMKKSSIPSPQNQATNADKGQMCDQQQHKCPRRAGDKGNDLNFSIIPHFPDDIGRLRAVITRDWVKNAVSPLLDSSLFPADRANQVRYDPLENVSIEIYDVPGISSLNVVVRNILDGGKRKIGGVLQENNVSLTGLMILAAYLIGEFAFHPCQDELQKFETGKNRNGNEQAVYSRKRKKTASKGEAKTGTGNDVTEKTGVRVIDTSAEVKNSTSENTNQKDGVPTLNTPMDKKLSGADAFKQEDALIADDAGAGLKDSNGAAASALDQHATGATNPMENKADNGAEAALASIYGDRPNGTCVSHLLSSC

SEQ ID NO: 140743 - protein, 59 aa, Oryza sativa
  Clone ID: PAT_MRT4530_41913C.1.pep
GHDFLLAFKGGIHFLTCTTSVGENIMLPTKGTIPHIPSLKAGFTKRIETQYYLRHQDFL

SEQ ID NO: 140744 - protein, 57 aa, Oryza sativa
  Clone ID: PAT_MRT4530_41914C.1.pep
IHLVMSSGYLSVSRFPFFFHLIFLHSAWPLLLQPLFSCNPFCMISLQRRLLLFLRIH

SEQ ID NO: 140745 - protein, 283 aa, Oryza sativa
  unsure (1)..(283): unsure at all Xaa locations
  Clone ID: PAT_MRT4530_41915C.1.pep
MTSPPAAAARRLGRRTLAGERRREDANGGHQRVERDAANSPVTKRAAEDQRTATTTRLKRRRRSGRRRRRCSGGLRRLRRGGRGRRRLGDPDGGLPERRRXLERRRRTAGATAVTAALGHTALERYGRREAKAREAAGRGELGGPFKGARRRRRRPTATXATAKETSGRTNPKQTRIHRFPNRSRGXFQKRKGGGDPGDCFPSINSAGNGKXERPDLEGNGGGGSLGFRAAAXRGRRRLTSGTHLSATASARARLRPGLGRLGRGRERGGFGPTFGPKPKEDF

SEQ ID NO: 140746 - protein, 54 aa, Oryza sativa
  Clone ID: PAT_MRT4530_41916C.1.pep
SSYYFRCTSFFIMRHFRFGLCSNLPIISTRTKTERFQQESCTCKTIVQNPRFHP

SEQ ID NO: 140747 - protein, 143 aa, Oryza sativa
  unsure (1)..(143): unsure at all Xaa locations
  Clone ID: PAT_MRT4530_41917C.1.pep
SCRSKSQSQSQNNNRLPSVREPSCRRRAPAQGSPGPPSWSPRGRCCRCPPXPPARPPPPPSSPPAEAHXPSRSACTRPPPLPAAVWRTDPTPAPLPRPDLPPAALWRPDLPPAPLSRRSMRQLDEEEGGRRLARSGGQGEAAP

SEQ ID NO: 140748 - protein, 40 aa, Oryza sativa
  Clone ID: PAT_MRT4530_41918C.1.pep
LRVCVQGTNWGCFLKIEEEGSCTTRMELQSFHWRLPTGFT

SEQ ID NO: 140749 - protein, 209 aa, Oryza sativa
  Clone ID: PAT_MRT4530_41919C.1.pep
SKSQSQSQNNNRLPSVREPSCRRRAPAQGSPGPPSWSPRGRCCRCPPKPARETTAAAIVATRRSPRPSRSACTRPPPPAEARTLTTLNPSSAPLPPPEHFPLLSGGQIRRPRLSRDRICRLRPSGGRICRRRLSRAGRCGSSTRRKEEGDSPDLEGKGRPHHPRSAPRPVHHVRIAGVAVAGCRLPRGGGEAWVWEWGRGAGVEEEEAR

SEQ ID NO: 140750 - protein, 245 aa, Oryza sativa
  unsure (1)..(245): unsure at all Xaa locations
  Clone ID: PAT_MRT4530_4191C.1.pep
PRVRAVAAAKEATKRTRARWSCVDSCCWLVGCVCSAWWLLLFLYNAMPASFPQYVTEAITGPLPDPPGVKLQKEGLRAKHPVVFVPGIVTGGLELWEGHQCAEGLFRKRLWGGTFGDVYKRPLCWVEHMSLDNETGLDKPGIRVRPVTGLVAADYFVPGYFVWAVLIANLARIGYEEKTMYMAAYDWRLSFQNTEVRDQTLSRIKSNIELLVATNGGNRXVVIPHSXXXVLYFLHFMKWVEAPPP

SEQ ID NO: 140751 - protein, 109 aa, Oryza sativa
  Clone ID: PAT_MRT4530_41920C.1.pep
MAVAGLVLVPALSPCATTLPVFLAVGNSSSMMILAIIVLLFSTITVMTSLVALSFYGASQIKFHWVERYDKILVGSVLCLVGVLTYVFHHHDGDEHSLHEHVHRKLVGL

SEQ ID NO: 140752 - protein, 78 aa, Oryza sativa
  Clone ID: PAT_MRT4530_41921C.1.pep
MACHSNSNSRTVRQMRRLWWQMSGQLCRIRPNCLPHEQREQRRGSIVDMSGLLASFVSTSHLDDGNHAYHTVLNLHLS

SEQ ID NO: 140753 - protein, 409 aa, Oryza sativa
  unsure (1)..(409): unsure at all Xaa locations
  Clone ID: PAT_MRT4530_41922C.1.pep
ANVGPSHLLPLQCESPPTTRVLRRTSGTRAPPPPPSPPFKNLIPISFCIKTKKQLTHSPSTPPPPPPAQAAGTGTPSSPSATDRRRPRAAAAASRTSPSSGSTTASASSCTRTRTAPPPPPARSGCSRRRGTSSPFATRRAPPAPPRRPGRQGHQVPEPPATAGRAPPPPPPPPPPPQSSPPPPRQTERDAPPPPPQPSPPPPHQRERDTPPASPPQPAGALPPPPPPPASGPAPPPPPQPPPPPPPPPHQRETPSPSPPPQPQFGGAAAVPATPWRXPAPSPPTRSTTPPPPXQTPATSGTPSSPSATIHPRRPPPPXSPSVSCPPPPPPPPPGPRRISCPPRRPGGAARLPGTPWPXPTPSPPTRCTPPPPPPAQTAAASGTPSSPSATIPRRPRPALAAPPSSRTN

SEQ ID NO: 140754 - protein, 113 aa, Oryza sativa
  unsure (1)..(113): unsure at all Xaa locations
  Clone ID: PAT_MRT4530_41923C.1.pep
RPPPAATSRPLRRRRPPASPVVEEADPASPNRRRQAPXRRRPPACPVVEEAXSGLPRRRGGRIRPPSSSRGPRRRGGGRAPPPLPRPSPLSSEAAELYHPSFLSPPAPCPRPP

SEQ ID NO: 140755 - protein, 56 aa, Oryza sativa
  unsure (1)..(56): unsure at all Xaa locations
  Clone ID: PAT_MRT4530_41924C.1.pep
VPMDMSLILFHYYFTPMSITTTDXYFXTTRTALRVXPGDTSGPGNLTRRTHAFPIT

SEQ ID NO: 140756 - protein, 231 aa, Oryza sativa
  unsure (1)..(231): unsure at all Xaa locations
  Clone ID: PAT_MRT4530_41925C.1.pep
MMNKSNIGFGQQDVSLAYTLVPTIPILCKYRNHDIKRRQWHASTSPDEIGTIIISNLIHQDRSSLETSLREISVRYFXISLIISYIHPACIYKENIFQKQLSTRVGCGRVYRIIENDLDKCRVVTPXLPTNTDDLSHSTGRGWTIXEKWSSYDYYLVLDQRCSDSPTISTSSVLISGKFYSTLTKTPCLYGXYTPRSTKASTTNIDKASSQXTVDGSRQGIRNEEMVYPLR

SEQ ID NO: 140757 - protein, 695 aa, Oryza sativa
  Clone ID: PAT_MRT4530_41926C.1.pep
MDSKKTTTQSEPNDGVQAPHRPELLMAARHGDRDRLKRLLGTVSPPVALPVGEVVLHVEDVETVGVGVDDDDDAEPTAAVVTSAEAVTVALDSVLHVVASSGDEPAFLESATAVHARASHLLDAGNGKGDTPLHCAARAGMVRMVSHLLDLARRGGGGGVAGDAAARAFARRRNSKGETALHEAVRLGSKAMVEALMSADPELARVVAADGGSPLYLAVSLGRRDDIARLLHEHDRGLSYAGPDGNNALHAAVQKGKERYEFNDLSISETTKMILGWNKDLIKQADRHRGSTPLHVAASWGHHDVISLLLDADPSAAYQPDHDGAFPIHVAAYDGQVRAVSILLGLDNHRKCAGLCSGERRRRDLRGCAELRDGRGRSFLHVAVEEQRQSVVAYACKLGNLSPAVMNMQDDDGNTALHLAVKAGNMWIFNPLMERRQVELNLTNNKGETPLDISWIEKPVGVYFGLNQRVKIYKLLKDANAKQGNHRWDLFLKKHNKKVDEEVEGKKLTESTQTIGVGSVLIATVAFAAAFAPPGDYGDDGAPRLAGRYAFDVFIIANTLAFICAGLSVISLTYAGVAAVDMRTRMISFVFSASFMACSARSLGVAFAFGMYVVLAPVARTTAIAACVITGLALADVAWFVFVVAAGEVMLLKRLGIARAWWRLPFAIMATLLMQFWPYIVIVVVVLYSKIRGVH

SEQ ID NO: 140758 - protein, 311 aa, Oryza sativa
  Clone ID: PAT_MRT4530_41927C.1.pep
MVLLAAAAVGPHKTLNPTLSPPSSGGRRPRLRFPLPLPRGGHLRCSAGYREAAAAAASTSSTTTTPRPTEIPWSRELCNSVRLIGTVGTEVELRQLPSGGSVARGRLAIWKSATETTWVTLAFWDDLAVVASEHVKKGDRIFVSGRLVSDTVDEGPEKRQVYYKVVVQQFNFIESFQQVQLYEPEAGLDTLGGKHGDYVGSTSGSSEGKSRDHVDSSSRSTEQLWQAFFANPFDWWDNRTNKKNPRYPDFKHKHTGEALWVDGRNNPNWVISQLAILDSRMGSLQGNDRKPVAFMYADDFMTPDTDTEAHM

SEQ ID NO: 140759 - protein, 220 aa, Oryza sativa
  Clone ID: PAT_MRT4530_41928C.1.pep
MGISRDSMHKRRATGGKQKAWRKKRKYELGRQPANTKLSSNKTVRRVRVRGGNVKWRALRLDTGNYSWGSEAVTRKTRILDVVYNASNNELVRTQTLVKSAIVQVDAAPFKQWYLTHYGVDIGRKKKAPAAKKDAEGQDAEATTEEAKKSNHVVRKLEKRQQGRTLDAHIEEQFGSGRLLACISSRPGQCGRADGYILEGKELEFYMKKLQRKKGKGASA

SEQ ID NO: 140760 - protein, 238 aa, Oryza sativa
  Clone ID: PAT_MRT4530_41929C.1.pep
MGISRDSMHKRRATGGKQKAWRKKRKYELGRQPANTKLSSNKTVRRVRVRGGNVKWRALRLDTGNYSWGSEAVTRKTRILDVVYNASNNELVRTQTLVKSAIVQVDAAPFKQWYLTHYGVDIGRKKKAPAAKKDAEHALGKIRCLFIGLYVMLKGQDAEATTEEAKKSNHVVRKLEKRQQGRTLDAHIEEQFGSGRLLACISSRPGQCGRADGYILEGKELEFYMKKLQRKKGKGASA

SEQ ID NO: 140761 - protein, 733 aa, Oryza sativa
  Clone ID: PAT_MRT4530_4192C.1.pep
MSLLRRRKQPQPPPEQPNEDSSNGSDLDEKGKKKPGSSSSSAAPPPEAAAAAAKEATKRTRARWSCVDSCCWLVGCVCSAWWLLLFLYNAMPASFPQYVTEAITGPLPDPPGVKLQKEGLRAKHPVVFVPGIVTGGLELWEGHQCAEGLFRKRLWGGTFGDVYKSNFRCFDVFVDGYKTTMIYGPLCWVEHMSLDNETGLDKPGIRVRPVTGLVAADYFVPGYFVWAVLIANLARIGYEEKTMYMAAYDWRLSFQNTEVRDQTLSRIKSNIELLVATNGGNRVVVIPHSMGVLYFLHFMKWVEAPPPMGGGGGPNWCAKHIKSVMNIGGPFLGVPKAVAGLFSSEAKDVAVARAIAPEVLDSDFLGLQTLRHLMRMTRTWDSTMSMIPKGGDTIWGDLDWSPEDGFECKAKNQKINDSEVSKDANGKNEVHPEPVKYGRIVSFGKDVAEAPSSEIEQIEFRLVQLFHIYLQDAVKGNNIAHSNTSCRDIWTEYHELGWGGIKAVADYKVYTAGSIIDLLRFVAPRMMQRGSVHFSYGIADNLDDPKYGHYKYWSNPLETKLPNAPEMEIFSMYGVGIPTERAYVYKLAPQAECYIPFQIDASAEGGDENSCLKGGVYLSNGDETVPVLSAGYMCAKGWRGKTRFNPSGSKTYVREYSHSPPSNLLEGRGTQSGAHVDIMGNFALIEDIIRIAAGATGEELGGDQMYSWELCYDLKLSTPHITKYQAYLLFTRY

SEQ ID NO: 140762 - protein, 56 aa, Oryza sativa
  Clone ID: PAT_MRT4530_41930C.1.pep
MSPAPAPFSIKVACCLTPQCRRLMESMLAVEGKGILFTEPAVEASPDLGEVEVMRD

SEQ ID NO: 140763 - protein, 535 aa, Oryza sativa
  Clone ID: PAT_MRT4530_41931C.1.pep
MEVAAMEISTSLLLTTVALSVIVCYALVFSRAGKARAPLPLPPGPRGWPVLGNLPQLGGKTHQTLHEMTKVYGPLIRLRFGSSDVVVAGSAPVAAQFLRTHDANFSSRPRNSGGEHMAYNGRDVVFGPYGPRWRAMRKICAVNLFSARALDDLRAFREREAVLMVRSLAEASAAPGSSSPAAVVLGKEVNVCTTNALSRAAVGRRVFAAGAGEGAREFKEIVLEVMEVGGVLNVGDFVPALRWLDPQGVVARMKKLHRRFDDMMNAIIAERRAGSLLKPTDSREEGKDLLGLLLAMVQEQEWLAAGEDDRITDTEIKALILNLFVAGTDTTSTIVEWTMAELIRHPDILKQAQEELDVVVGRDRLLSESDLSHLTFFHAIIKETFRLHPSTPLSLPRMASEECEIAGYRIPKGAELLVNVWGIARDPAIWPDPLEYKPSRFLPGGTHTDVDVKGNDFGLIPFGAGRRICAGLSWGLRMVTMTAATLVHAFDWQLPADQTPDKLNMDEAFTLLLQRAEPLVVHPVPRLLPSAYNIA

SEQ ID NO: 140764 - protein, 60 aa, Oryza sativa
  Clone ID: PAT_MRT4530_41932C.1.pep
MYLPAVPCSISLHVDLALCATPLLFCVTFMYSLLSQFLCQLGYCGPFCHTLFGTLYSPWE

SEQ ID NO: 140765 - protein, 385 aa, Oryza sativa
  Clone ID: PAT_MRT4530_41933C.1.pep
MGRSRGKDGGGRSFPSPASSSSASSSEFEFTVTLSPASKQRSAAQLCPADELFYKGQLLPLQLSPRISMVRTLLLSSASTSSASASDSTSNSSSSRDSNGSTSSSFSADCAALLLPDSAASSSRPSSATEDDRHLAPPPPPPGVAASFAAKRTGKQYLSSFATRFSSVFHRGGAPAPAAAAANAKKPPSKSLAKEVIKKYAKKVKPLYEKLSQIPKNQSNSSGQPLQQQQQQGLKKPFSFSMRKKRGDDDHAAAAPAAAAAVAAEVGGGGKYAHSNSFSGNLRFPRQKRCAASCPSSMRSSPSHSGLLTFGGAGGVGFPDVPAAAAAAMSGGISVGPVSLSTASSMEELQSAIEGAIAHCKSTMGGAVTMCSRKAAAAADEICAF

SEQ ID NO: 140766 - protein, 164 aa, Oryza sativa
  Clone ID: PAT_MRT4530_41934C.1.pep
MVIVFAGCYTSGGRVAAASGAQQPCDVSGARSYVTTDDDAPEPVNPAVRSLASYSGHAIAAKRSRRIVGCDGEYHRRHPIRGISTPPPARRRHLPSSPARAARRRPSPPANRLAAAAASPPPPHPAAAASPPPPPQSCLASSAAPRGRAPPHPPLAVSSAAVRM

SEQ ID NO: 140767 - protein, 86 aa, Oryza sativa
  unsure (1)..(86): unsure at all Xaa locations
  Clone ID: PAT_MRT4530_41935C.1.pep
MARARNGEDWEGKEEGRAPGIKGRQCRFGNRPWAVXGASWRSALAAKTATEADDAGGEXKGKRGGEKGGLPPCYFGEKEEGEGAMR

SEQ ID NO: 140768 - protein, 485 aa, Oryza sativa
  Clone ID: PAT_MRT4530_41936C.1.pep
MAEESSPFDEVPAYVLYEIARHIPCKVDRVRALVVNCSWRTSLQALPPPPLPPQLPWLLRPSAGGPTFSCLLSGADELSVHRVRVPADLRGARYFGSYDGGWLFLASGQTFGHMLFNIRTEQRLFLPDTVTQPWRSDDFPMIMLAATVSSPPSAKDDLCFGAAIVSDVGQKLAQRCNVFWELGDCRAVSFVPPQDPFNLFFEMEDVIYYQGAFNFLSIWRNVLECRLTLHQGVLQVHQKWRLFLPQEELSLCRNAAARYLVESRGQLLMVIRERPAYNQSREFFIFDMTKTEEAVDEAEYIWRRMPELDGRMLFVGHGCSRSYEVGDFPGFQEGIYFFDDQDSYSVSSIAEDNEYTCFDNGKWSAGPPLMETYCFWPDQVNSNYSSPVWLLPGEYLFDVSRCFHLLLFHGHGLRPDGHVRGLAGGGQGPRTGARLTPVIPVTVKAKAVVAGPGKLFTQNGNLNAAKIHQASASGPGSCFNRKQSE

SEQ ID NO: 140769 - protein, 299 aa, Oryza sativa
  Clone ID: PAT_MRT4530_41937C.1.pep
LSPVMAASPAMPSLLLLLLLAVLVSAADAYDSAASANTNAGAIPDPNILNMEAMCPKTTDVKACQQLVKNMPSNIVAGKKDARSIARGCIATAWFVARDGAKDCTAAVDECKDKVDQCLDSCRHAFAAVNDALEPQGTGDDAVKVPEDEKLLAIHASLTQLLRGPTGTRRPPLCNTCCQDGSCTEEKKRNVVALFVQLWSLLDFADAVLEDLYPLTKLPGDKAAGSDTSAAAAGSTADKETSAAAGSTADTATSAAAGSTSAKETSPVAGSTADKTYAAAGSAPPVVDTAPAPPVTTYD

SEQ ID NO: 140770 - protein, 61 aa, Oryza sativa
  Clone ID: PAT_MRT4530_41938C.1.pep
WVRGFARLARCCFFRMQLCLVVFVAVSVCSFLGYLGAGNLIVLLWVSAMLFIPPLKKKKRG

SEQ ID NO: 140771 - protein, 311 aa, Oryza sativa
  Clone ID: PAT_MRT4530_41939C.1.pep
MAPPLAAAAAAAAAVSSSSPLFSSSSSRPLPRRHLPPSSVSLRPRRRSIAAASAAVESAGRPLLEARDLVACVKENGQEILSGVNLTIREGEIHALMGQNGSGKSTLMKVLAGHPEYEVTGGTVLFKGENLIDMEPEERSLAGLFMSFQAPVEIPGVNNYDFLLMALNARREKKGLPALEPLQVYPIIEEKVNALNMNAEILNRAVNEGFSGGERKRNEILQLSVLGADLALLDEIDSGLDVDALEYVAKAVNGILTPNSSLMMITHYQRLLDLIKPSYVHIMEKGKIVKTGDRALANYIDESGYKAIATA

SEQ ID NO: 140772 - protein, 78 aa, Oryza sativa
  Clone ID: PAT_MRT4530_4193C.1.pep
TLECVNLLIRSFHNLTSARRNLRLFDDHKGVTGTIDDHAGAYYENLMHTSLTNSSLFMGIPAIDHSSDIHDKTLPTLL

SEQ ID NO: 140773 - protein, 96 aa, Oryza sativa
  Clone ID: PAT_MRT4530_41940C.1.pep
ALEPLQVYPIIEEKVNALNMNAEILNRAVNEGFSGGERKRNEILQLSVLGADLALLDEIDSGLDVDALEYVAKAVNGILTPNSSLMMITHYQRLLD

SEQ ID NO: 140774 - protein, 51 aa, Oryza sativa
  Clone ID: PAT_MRT4530_41941C.1.pep
DSNVVMKDMHVYFAGYIDFSSFIFRTCICVVCLVVRFFLLPHNCSGFQIQA

SEQ ID NO: 140775 - protein, 115 aa, Oryza sativa
  Clone ID: PAT_MRT4530_41942C.1.pep
RPPEHPAVRSVAVVARTRISADPFHQRPLTGDAALPHAAGKPTGRGRSGRGGAAEAAGRGGGAVPSASCVRGRGDGGDTSSAHGGGWWGEDQPDGTAAADEPAGGRTVLQGELHR

SEQ ID NO: 140776 - protein, 134 aa, Oryza sativa
  Clone ID: PAT_MRT4530_41943C.1.pep
TTVALHHLRYRSAGRRRREEEPPSAAVVEWNRYGGVYTQRLHTPGLFHVGSGWGRPRLEARRPPSRKTTGDSLASPPPPPPPPPGPRPPTPAAPPPPPPPPRPDPTRGSPRRPVRPPESPDPVAGAAAAPFGGE

SEQ ID NO: 140777 - protein, 397 aa, Oryza sativa
  Clone ID: PAT_MRT4530_41944C.1.pep
MPLTREAADAFGVATITLFAIFAVLGLFCIFQSIYFRFRIRRGAFIPLGYFNGPWVTRIVLILITIWWGVGEIVRLSFLKRKLFSSILLQKGVCDAYILSNLGFAEPSIFFAFAFLLHGSLQKRELGTLNQRWNWKTIGYMLVFCVPVFFVQALLVFVGPTFVKDENNTHGRKKIAKYFIRTSMPVGDTNICTYPLFGTIFLGLIDAILMSYVSYVGSRVLSLVINKALRRRVSLLMLSVLFFLPIRVLLLGFSVLPQPGDVAFEVIIFLSFLMMISCTTVGVLLLVYYPVADSLALREIGQREITEMVPYDDYYYEGASLVANQSFREIERNSDTSTKRGSISFRTMIREDQLQQDGVDEIGFSSRSGAHIGSPSPSGSSPSAAMPMLPLKEVPRY

SEQ ID NO: 140778 - protein, 1539 aa, Oryza sativa
  unsure (1)..(1539): unsure at all Xaa locations
  Clone ID: PAT_MRT4530_41945C.1.pep
MASLDSRLFFPPIAASFLFVFFFFFLLRIQVQSPPLFSHCHLSSVSNLFCKFSFVALYLLQAMSCAQQDMDPPTRDALSEALDGNRSDHSVYDAEHSGQNGIGDTKKRTSSSDLSTDDNFSSSALQSKHEHMNRDALSIDDRSVKSGDESDGAESTSGKSGSIDSTCTENDSIWIPPEAADKEYEADSVSGKIAYADDDDDYSDGIKWGRSSFPATNEEQEVSHNTRDERESAMLDAMNGQLKILVSRFLASAGISFSKGESGESWLDILTSLSWEAALLIKPDASKGKEMDPGSYIKVKCIASGTRRQSEVIKGLVFKKNAAHKHMPTSCHNPRLLLLKGVLGHSDVGLSSFNSMDQEKDHLERAISKMMEICSPNVILVEKTVSRDIQELLLKEGVTLIFDMKLNRLERIARCTGSPIISFSEVLDKPKLKRCDSFHIEKFIEEHNSASDGGKRLSKTLMFLEGFPKPLGCTILLRGANSEELKKVKQVMHYTVFAAYHLILETSFFEDQRIFLNDQNASRENSVTAMAGPSANGYDPSVLCASDFPSRDDSPALRLYHATSNGYTDVKKSLSSSTKVDAPSSITNSSSSVGEDASIRYDSKPPLHSQRLPSPVPGTLRKYVGMLSHQNIYLPVTSLQETSATQIEGEVESGKEIVSNGFHVGSKVEEPAVSTANVDCSQDHQRQERIQDIMPTNSTHDKREESPVMVEDGEQHSTIDIISKEKTTNEDQADDALDTHSILILMSSQCITKQGDICKTFCRIRFCRIRLGSKVAMFRYSSVEIYTTCKPQTTLQFDNPCRQDWFKEERRYVLARGIKLFSEVASMLQPLKDQLLDVTTTNCTGSLPVKDFSELEELLIKEKAFFEDSLEKTINQNENLSASVHELVDINWSYQDLLLELYLWDRRLDQLTKCVSAGQERVVSCKDPFDTVVKNIRVNQEIENKADELTCDRTTSVLSAVGLTECPSNRNYIDLQSVDIEAPVLTENQGAGCAQFSSTGGRNDEDSYTAPCQLEVDSMAQTKEVPSFEISEVQGDGIVVHPISLDQEPSNAPNHFRKIPDWDTGEGWIWNSFHECQLAYRKDIQNEILDKFEIVNRYSPSHMSPLFEQHEEVSSPQFTVGPGGNILSVLEDEISSIIARALAVSGEHRHLVENETEGARLEHAKTMEKSYSFMSGSSLDSSPWSSIGSLDSEASFLSLGSSVSSDDLSGYDSLPLFSSIHPEVAVNGKVALRGKYSVTSIYAKQFQDLRKKCCPSELAYITSLSRCKKWDAQGGKSKAFFAKTVDDRFIIKQIKKTEFESFIKFAPDYFKHVYHSLDTGSQTCLAKILGIYRSTLRTXSLLVGVEKEKMENLLFGHNISRIYDLKGAIFSRHVAHSNDRNTVYLDQNYVEDMQEKVPEVHGQALPHSSRAIWNDTSFLTSVNVMDYSLLVGVDKEKHELVFGIIDYLRQYTWDKQLETWVKSSLVVPKNVSPTVVSPKEYKKRFRKFMAKHFLTVPDTWSSENSSGPSKSFGHSNNMLVEVHSDDNLLQHPIEAETVV

SEQ ID NO: 140779 - protein, 324 aa, Oryza sativa
  Clone ID: PAT_MRT4530_41946C.1.pep
MPRAKTPMGLIPFPKKRAATFARRKETVMKMAKELSVLCDAQVAVVVGNPGGGAAEKAAWESEEGRAKLAKVREEGAFKPWDDALDGIAEEETRKLHKYLSDKIEAARARMEAMGLQLGDVDDNGVNGDDGGGLDLQQHVPPSASDAKEFESVPVVHGGQYIGSSSGGGGGDIQMQTTPAADGISFAEHFLVAPRAQPLAFSTAGADFINAPNNFLTTGVSVSDYSVQSSGYGIGNQIDNAKQLLYQMQMQYPVGGTGGAEPSNTQTQSPDLRSFSNVVGDYSYTAAQSSANRLDQMHHPVGGRGSTGGAAADPSDTQSKNRGS

SEQ ID NO: 140780 - protein, 1131 aa, Oryza sativa
  unsure (1)..(1131): unsure at all Xaa locations
  Clone ID: PAT_MRT4530_41947C.1.pep
MHEMKNIFGADYFCFLLVLDLEISIHKRLGSYSAAAWSVLLISQRQEAAMDSDGEEYDAMWSARCSVSSSAGSLQDAGDQWDEQSLAAGEDKVFVAVDEDVEHGKSTFLWALQNLSTDGANIVVAHVHSPAQTLSKVHCTRMKPEEISEYLMLAKEEAEKNLDEYALIAKSTGKDMKTDCQKVLIDMDDVAKGLEELITLHGITRLVMGAAADQHYSEYGPHLPXEMKEPNSKIALKLMETASPSCKIWFTCNGHLICTRXFNRSCPKRQIFMTRDWGRTGYGSLRTDDAISIPEATTLAAIVDDTNKQRSVMHSPQESDSVNFSSPACDPQQEEEEPNLDEDMHDILNEACTRAELLKKEVDGESSKRRKAEMDLLIALQRVQESEKSYLQEVNQRKETERTLARQRLEIDEMKRRHNTLYDELQDTKKQKLLLEQHISEIKSAAKDYVQEITEYFIQESCEEAKKFQKIKMDLLAMLQRVKDVENLNRNEKMQRKDMEEKIARQRMEIEETKRQRDELYHELKDVKEQKLCLERLDSSKETKRRRKAESEMLSALKKVHDLEHQYLNELKRREAVEETFARQKEEIQETKRELNKIRSRHMTEIKAHEEKLAESIRFIQKIQAKYDKTLHERDTAIAESEKLRQMNRDGASMIATTQIADFSFFELRQATQDFDTALKIGTGRFMNVYKGFIRNTAITVMLLHPQGLQGQLEFHQEVVVLSRLRHPNVMMLIGACPEAFGMVYEFLPNGSLEDQLSCKKNTPPLTWKMRTRIIGEICSALTFIHSQKPHPVVHGNLNPMNILLDANFVSKLHVCQLLRKYNTGNNTSGTSSYIDPEFLSTGELAPRCDVYSFGIIILHLLTGKSPQNITTIVEDAMEKRQLHSIMDTSAGSWPFVQANQLAHLGLRCANLSGRHRPDLTGEVWGVIKPLLKDASQNFGCKQAFEALSDDTQAPSYFICPILQEVMTDPHIAADGYTYEANAIRNWLDGGNARSVPLKSQSPSIGVHLLYYLRSQKVDAHERNRILTCRQQAESRRASVDAGGGRRAGGLLSPELHSRLLSDHRAPLLSLLRRRDDELRTKIKYHLLALGWTIASKPNLPGLTPRLRYVSLAGSMHACIAIHKHIYMVLN

SEQ ID NO: 140781 - protein, 47 aa, Oryza sativa
  Clone ID: PAT_MRT4530_41948C.1.pep
QRVAVILVRSYTSELSMLIIIASSTMCVSRQCVTAVEECRLVFQQQT

SEQ ID NO: 140782 - protein, 152 aa, Oryza sativa
  unsure (1)..(152): unsure at all Xaa locations
  Clone ID: PAT_MRT4530_41949C.1.pep
MPWIWRPLQATVSSVAPWSSPTSAPAVVDLAALLNPGAQGEGVLITVASTRQFSAGPCSSAAVPLPVVHTSTGCYSVETXRHPPQCGLTTGGLLAAASTSSCVGPTTSPSSSSSMIHRQCRRIFLDYTSLFSGNCVLLRQFSLYAVLAPRPS

SEQ ID NO: 140783 - protein, 917 aa, Oryza sativa
  Clone ID: PAT_MRT4530_4194C.1.pep
MASDRTSSDDECSSNSKSDNKVADSDYANSISEEEETSDSDKYITKKDLVSTLKDLFSGSIKRKRARTDKPVRRQKQKRTKLEYDQDKSGSAESPKPRSRLNITYFSNLIEGLSNEQRSIIENSAFGSLLNFQRCAIPLSFVKWIASHTDVSCSDIVVNGRSIPINPNTTNFILGIPNGGLEIKNDNDAGKHFFHQHFGSTKPLISFFGTKLLSDKGVNKLSEDDVLRCFMVVALSTFLCPNSDTHPSPKYLEPLSDIKSSSKWNWSKFVYEWLMTYIAKFQKESKSKEQTSKTLGGCGHLLAINYLDFKDFGIRNIPIGPPPRISVWKGGMIKEYSKIDECKTGDFGKRPLIDDISTVCKWFTREHSDTTYGKNAQLAAKVLDCVYMSKASLFTQKDTTTTREEKSGEEKSKGGSKQGGNNVAHNGNAPPLEQNHPNNTDVCSQLPKTPQTKSTAEHKTKSNINNTSTSKGAPPTDKKASSKDFVCSQQSNNSVASRTRAKRLHSASPLSVVSISPSKKYSSDQKIRKAVRKQPLKATEPINTQPDREESNKDALFVEPICTIPAKKEEVQPTKNLESSSTEFVIDIEGPYDAEDITGHTTDKTKFILVNYSNSSEEHNSQDPTQDESDNIPNKSTNQPKFECLHHFDDKSKTNKSASLGHFLSQTTSGTNIMDIEHSSMQSSQSSPDIGMNSPRIAQMREPNQHAQAEERQYSMIRIIDSLNASANCSGTRHNLYRPKRIVHPILMDNVKVTWSSLSKSLSPRGVVDTYVLNAYAKKIANDQNNKENEYRNFYFFHRTSVYFLKNWEGTGKEEDYENCARQAFTFARNKKPLHYYELLIFPCLYDNHWFVFTVDIKGHHFVFLDSIYDENNKYHKKIQGLLIPGLIAMWEEFSNVEKNFSKFDIQYPPITCQNNG

SEQ ID NO: 140784 - protein, 36 aa, Oryza sativa
  Clone ID: PAT_MRT4530_41950C.1.pep
QGLHHRLYLPADGLLYTQAVIYAAPPNPSPSPVGHE

SEQ ID NO: 140785 - protein, 76 aa, Oryza sativa
  Clone ID: PAT_MRT4530_41951C.1.pep
PWNACCSQGRSQIPPDPWIHFLFPPAVHPVANPYGFSLPIAPGPPLMNGRVGFSPPSFRAHGPGQCLSAIFFLSVF

SEQ ID NO: 140786 - protein, 350 aa, Oryza sativa
  unsure (1)..(350): unsure at all Xaa locations
  Clone ID: PAT_MRT4530_41952C.1.pep
SPIPAPSYNDLYNRSSSSTRLRHQASGCRCXRPPRATVPLPVVHTSTGCYSVETXRHPPQCGLTTGGLLAAASTSSCVGPTTSPSSSSSMIHRQCRRIFLDYTSLFSGNCVLLRQFSLYAVLARPRVWQTWCDVLSFMVRLYRLFDVIFLXTTVAIVSPSSSPARPRAPRFTTXLPCVHDHSTASYVRSAARLPRHHRLPDFGYIDHGYSTHGFSDHGSPGSFALATSTMAQRAIIRVEHSCRFILQSKCPRCSRLDXGGMLEYMYSYIYRPXLRLNTMCPIFAVXLFLYYPTEIPLVVLVELVDAERRHTRLDPSRSQRDQVQRQEHHPRLRLVRTAEHLIARGEEALQ

SEQ ID NO: 140787 - protein, 113 aa, Oryza sativa
  unsure (1)..(113): unsure at all Xaa locations
  Clone ID: PAT_MRT4530_41953C.1.pep
PQCRCLWSTPPLVVTVLRPERHPPQCGLTTGGLLAAASTSSCVGPTTSPSSSSSMIHRQCRRIFLDYTSLFSGNCVLLRQFSLYGVLAXRPSXRPSLLVFSDNWRIISGGSPN

SEQ ID NO: 140788 - protein, 209 aa, Oryza sativa
  Clone ID: PAT_MRT4530_41954C.1.pep
MLHMSFRLVYKPNPDHCSGRSSLPSGTPKRKYAWLVAPNSIFYAEHDWKIADAPFDPLQYQQQTDGFEESYAYLEHAISQMGNIDGILGFSQGAAMAALFCRQQQKTCGSLKFRFGIFCSGYPAPIISDFDGEPIKLPSLHCFGNSEDHDRQIANRASTELANRFDKSCRSVIEHDMGHIIPTRPPFIDKIKEFLSNFKKKKNLQPGDP

SEQ ID NO: 140789 - protein, 135 aa, Oryza sativa
  unsure (1)..(135): unsure at all Xaa locations
  Clone ID: PAT_MRT4530_41955C.1.pep
MVRLYRLFDVIFLXTTVAIVSPSSSPARPRAPRFTTXLPCVHDHSTASYVRSAARLPRHHRLPDFGYIDHGYSTHGFSDHGSPGSFALATSTMAQRAIIRVEHSCRFILQSKCPRCSRLDXGGMLEYMVVRVILG

SEQ ID NO: 140790 - protein, 112 aa, Oryza sativa
  Clone ID: PAT_MRT4530_41956C.1.pep
SYYMIHDTDLQAVVICTDVPGSAWLIGSALVGIGRWMMPLWEDVCCGLVLVMHVSSLSFGCVRLSSPIFLLCWDQLSIVLVYGTLSISSQELSLYNFKNRKGPDRPEQKKKK

SEQ ID NO: 140791 - protein, 68 aa, Oryza sativa
  Clone ID: PAT_MRT4530_41957C.1.pep
DSLSMTITVHLDLNCCNSSRCKSMKLPDLPSPDFSKAVTSTKALWYALTITTTYLSPFFTHWLLNIHT

SEQ ID NO: 140792 - protein, 392 aa, Oryza sativa
  Clone ID: PAT_MRT4530_41958C.1.pep
MGRHDVSVFDDEEIGRVMDLFFTDGVLGLDGGVSPEEEEEEEEVEVDLEPLFYDEAATVAESVAAAERRRVREEDRARVVEQQTKVRKAKEAYFKKNRKFNPKTGLHYFTRIFFINPLTFDLNEESPLGPMRYTDRIYNEHEALRMRNSVNILSVKILSSDVGFPINVYGTVIARDSLDEKCIYLFRRPRDDCQLINSKDDSLILTGPTRGLVLQDAVYFEVDLRIKDDRLRGKKKEHSKGLLMIDGIRRTIKVKTEVENDTFVGKLGTVELRYAVIKDAVEATVEIKVVEGYFCGEVAACTTNIQDKVVLLDSRTCCVMADNLDVQLSRRVMAVHNKEKLLLTVVNQDDEVPTGCVTQTIDFTPKFNGSDVTEVTCGSVKMLVKVTWSLMV

SEQ ID NO: 140793 - protein, 624 aa, Oryza sativa
  Clone ID: PAT_MRT4530_41959C.1.pep
MVTDAEEVSPTASSSELEQEDDDDDCYLSDQEDDALEESVLQVLEDERDEDCHWSSTSVCPPTIHRFILVVFVVRVPIASVVDGFLRLQVITKESLLAAQREDLRKVMELLGLREHHARTLLIHYRWDVERIFELLDQKGRDRLFSEAGIPLQPANNPGSPSSTEVTCNVCYDDVPLSDASKMDCGHNYCNECWTGYFIVKINEGQSRRIKCMALKCNTICDEAIVRKLVNAKRPDIAERFERFLLESYIEDNDTVKWCPSTPHCGNAIRVKGDIHCEVECTCGRQFCFNCSSEAHSPCSCVMWELWIKKCRDESETVNWITVNTKPCPKCHKPVEKNGGCNLVACICGQAFCWLCGGATGRDHTWSSISGHSCGRFTEDQSKKTEQARRNLYRYMHYHNRYKAHTDSLKQEAKLKGDIQGKISISENKDSKIKDYSWVINGLNRLFRSRRVLSYSYPFAFYMFGDEIFKDEMTSDERELKQNLFEDQQQQLEFNVERLSGFLERDFQNFSDDEVMDTMKHVINLSNVVDRLCKQMYQCIENDLLYPLRTPHNIAPYKSKGLDRASELNVCWDSSEQGSSIFGKRQLGSSSNNNGRPHKRERNDAHGGAALFDLNVPAEVADKI

SEQ ID NO: 140794 - protein, 154 aa, Oryza sativa
  Clone ID: PAT_MRT4530_4195C.1.pep
KKRHYLKYKTLSSIQVFTIRNIELFNHCHTTSNMCPSNMCRLGTSQRCRIFQPAPRRQHRLETLKTSTFEIYELKKIIIKIRIIKFSSAQIEPSRCIKATKKKSKNLKKQIRCWHHCRCTLLHAAATHAPPAARTLRHRRRCRDHRATAIATGS

SEQ ID NO: 140795 - protein, 222 aa, Oryza sativa
  Clone ID: PAT_MRT4530_41960C.1.pep
KTTLLHLLHQPQSLILVTGPTDFCKSITLYSALSHLNQPDKHILTAEDPIEIEIEGIIQTQVNRAIQLDFSHLLRTFLRQDPDIIMLGEIRDPESAEIALRAAQTGHLVLSTLHTNDAPSAIERLLQLGIKEYELKNALLLVIAQRLVRKLCTQCFGKGCQACYQGYRGRIGIYQLLSRTGKIFEKETAYLDFASLHHSAKHKLEADITSLAEINRVLGDAE

SEQ ID NO: 140796 - protein, 74 aa, Oryza sativa
  Clone ID: PAT_MRT4530_41961C.1.pep
INSVGGDCSVRPSRGCNHFLIRFSIKSCETSLMTPQNFSSVMEGSITCPVSLLLREGKKINSPHCEGLIMYKVH

SEQ ID NO: 140797 - protein, 246 aa, Oryza sativa
  unsure (1)..(246): unsure at all Xaa locations
  Clone ID: PAT_MRT4530_41962C.1.pep
KVLPSSVKKTDKKGKKTKYVRFKKGEKTGKRKTKRKKKGDKKEKKPDRYDKKTGKRKRKTKRKKKGXNKKKKKQIGPIKKTRAKKPEKGKKKQICPIQKKGKNKGKESDSVYTVKKXEKYKKSKKKVLPSSVKKTSEKKSGERKNWEKKKRAKKIIQFREKKGEKNNKKKRXRSDSKQTKSGEKTGKKIKQKKGIRFCVKKGEKNKMNRSXKKKKLVEKKLREKNRVKKPAKKTNYVDTVNKGRKK

SEQ ID NO: 140798 - protein, 116 aa, Oryza sativa
  unsure (1)..(116): unsure at all Xaa locations
  Clone ID: PAT_MRT4530_41963C.1.pep
VLSLHPCPPSSSSSVRPPHPSFDSTPPAVALWLPRGPSPWPRPRRRSPWGGAWPGPSPPPPPPSAAAPRSTXGAPHRQIPRLRARRRKPWPRTSSPSPSAPPGTRPSPATPGWRRR

SEQ ID NO: 140799 - protein, 37 aa, Oryza sativa
  unsure (1)..(37): unsure at all Xaa locations
  Clone ID: PAT_MRT4530_41964C.1.pep
HKEKPYSGEWHNIIPIVKNKPPPLHYIHXKSRSSNFN

SEQ ID NO: 140800 - protein, 814 aa, Oryza sativa
  Clone ID: PAT_MRT4530_41965C.1.pep
MSPDAAGAGPPSSELARVGSLGGRLVAADEARACLARRLHAALQVREESRRQGAALDEMRARVELRRARVGELLVARRDAARGVDRRREQLQAQIDRVLRLSGAVAAASRRLQDAKEALSGEKARLGDLQRLLRMRQQSMIGQVAALYPVKIGKDYKRPRYLLDVVSIVIFQICAVKLIEDKAMGVEADHGTPCIRTILRCSIRMSYRYASENWVLLFPVLLLYLLFRSSPGFFAFLLSHSPVIICAALILGVLISHGSTNVAEIKEERKSVAEVSDPKYADLSRNIHLEANKGFSAKENTASLNDGEIKDGLNSSREHAIEVVEMVGKISHDRGSTDSQSDEMKVDSEDKPAGTCKWGRAFSVRRRKKLSDIKVEPINAAVDSPLDSSLDSPFGRVGCHDGSPGFDHDQTEGTTPGTPRTRIASVLDEIDPLSSADSPHPDPIQNDDSDNHMSLQDSRTVRDNNYESDKSKANKNDDKNVSTDPAFLGTVDDDKNVMDLGYSEVERHRRLEILMVKRRSRKNIVFDPDSNLDIDNDKVCKRNPSDILSCSDETEFPGSAPSVLHTWRNPFDHPFEQSDESDLHEHVAIPHQDMFFTRHESFSIGSQGRRPSRFKPPFIIEAMDIDEPSASDFQRQFSDKKNVLVVMVKVKTILSQAGRTVLCRHVHFNPERPQLPPSSSISTLPERPRAKPRGHKDGGGGASLRLTAQGQGGLPSIGRRKPPRSAPTGRIWRGGSRRRGSVFEQWRLARVVTKFRGAAEDEATRSAPDLAGRHPATLGAGGKDVIVCCGTATATAAPMPWRPDLVVVEPNDDC

SEQ ID NO: 140801 - protein, 67 aa, Oryza sativa
  Clone ID: PAT_MRT4530_41966C.1.pep
KVGEYGDTINLFGVNKVGSTMCKLSISGGTGKFKGAYGFHEVRPLIATGQHVTDGAETLLRISVHLA

SEQ ID NO: 140802 - protein, 76 aa, Oryza sativa
  Clone ID: PAT_MRT4530_41967C.1.pep
PGATGTSHGEGEDVEVVVVHGDAGTDVEKYYAHSLTFAGFVIDGDVAAGDWNPEVFQVSTAVPAAAGATAMKCNSY

SEQ ID NO: 140803 - protein, 839 aa, Oryza sativa
  Clone ID: PAT_MRT4530_41968C.1.pep
MSSSASPSAAPPAEYAEHLSNLVAIPSLSHENHYFLGPVGNIDPTEFIIGETNRIPFRLTNPDLEKTSPEKSWATWFKRISAVKRVHWDEIGIGQALDLTIANSAKDEPLMAAASYFWSNTINAFLFNQGPMTPTLIDIIMITGLDVTSSANPMRLNIKNQYDFKTKSIGGWSGYVATYMGQGSVTPREHVAFLMMWLEKFLFCGSSCGPTTNWQFIAEALEAKKQFPLGKILLGYLYQMLNNASAKLAVGSIVGVGGPWSYGEYASTSADAGAKLSAELLKDWFCSFYEGFQKDARTWFLYEDSADLELPSDFRFEDINHEIYQSSREIFSAAISPCILPVGIHQGRNIQASYEFYHPMSSARQHGMGQLPIGLFCADKIQCRGEISSTLMMDRLLNLQGPPLGSIGSIELARFRSRNFDRWWGEWKLHLFHQLASMYMTELFPDVIPQTTESSPPRQSNSGRDIRYAPGLIPNGGGLSPPAIGYNAPKTSALLQGLIREPADASKKRKTRSLAANILAPTPKKKTKTKKTKPTDDLPALDSSIEQALDEEEIGEDVDQVAAEKKKTAVKKKSAATTSKPAPPPESSHRPPSAAGSYNVEEEEQPAAPAIQVLADLFSFDIKDYLDEETEEETSSKSLAPVNEDVKKILEDISHRLGSSLDSLVADCGSIRARFAEIQALVPDDLANIITPAVYLEQHQFKLEKAKQRIANRCERKNIEATIQVNRQLVHEEKSKLDQLSEGPIKSNIDRLEARKIELLAQLQECNAELDLEHKKLDDLPQAVEKQKAKLKSAIKNVADMTKALKVIPGTNAQDAQAIEEVEQIRQRAISAIQHYLSQ

SEQ ID NO: 140804 - protein, 70 aa, Oryza sativa
  Clone ID: PAT_MRT4530_41969C.1.pep
KETGFSPFFFHLSFAKFLSTKGFKHRRRGQKNNTISCSHVDCFRTYHPLESLKPTLSFVHACTLRQMGLP

SEQ ID NO: 140805 - protein, 1032 aa, Oryza sativa
  Clone ID: PAT_MRT4530_4196C.1.pep
MASDRTSSDDDSSSNSKSDNKVADSDYANSISEEEETSDSDKYITKKDLVSTLKDLFSGSIKRKRGRTDKPVRRQKQKRTKLEYDQDQSGSAESPKPRSRLNITYFSNLIEGLSNEQRSIIEKSAFGSLLNFQRCAIPLSFVKWIASHTDVSCSDIVVNGRSIPINPNTTNFILGIPNGGLEIKHDNDAGKHFFHQHYGSTKPLISFFGTKLLSDKGVNKLSEDDVLRCFMINYLDFKDFGIRNIPIGPPPRISVWKGGMIKEYSKMNECKTGDFGKRPIKAMEKLSYDAICSGARCIEQQGNNSNMSCGDALQQYHSKSFSPRLIDDISTACKWFTREHSDTTYEKNTQLAAKVLDCVYMSKASLFTQKDSTTTREEKSGEEKSKGGSKQGGSNVAHNGNAPPLEQKNQNNTDVCSQLPKTPQTKSTAEHKTKSNITKSNINNTSTSKGAPPTDKKASSKDFVCSQQSNNSVAYKTRAKRLHSASPLSVVSISPSKKNSSDQKIRKAVRKQPLKATQPTSTQPDKEESNKDGIFVEPICTIPAKKEEVQPTKDLESNSTEFVIDIKGPYDVEDITGHTMDKTKFILVNYSNSSEDHKSQDPTQDESDNIPHKSTNQPKFECLHHFDDKSKTNKSASLGHFLSQTTSGTNIMDIEHSSMQVTQGERPNFTANMGNRRLEGQHCDENEYQDDFAEFLYEEEPSDNIDMVEQRASSQSSPDIGMNSPRIAQMREPNQHVQTEERQYSMTRIIDSLNASGNCSGTRHNLYRPKRIVHPSKYKSSPYDNYTRHQTISAAELNHYNNILSIGETQQYKYKFAVLMDNVKVTWSSLSKSLSPRGVVDTYVLNAYAKKIANDQNNKENEYRNFYFFHRTSVYFLKNWEGAGKEEDYENCARQAFTFARNKKPLHYYDLLIFPCLYDNHWFVFTVDIMGHHFIFLDSIYDENSKYHKKIQGLLIPGFIAMWEEFSDVEKDFSKFDIQYPPITRQNNGELPINPTNQLLAKTMGNYLSTQQSSANYISFSFLSKTPPFFFP

SEQ ID NO: 140806 - protein, 153 aa, Oryza sativa
  unsure (1)..(153): unsure at all Xaa locations
  Clone ID: PAT_MRT4530_41970C.1.pep
PRAWETAASGRRGIVWWRGRRPAWCREAQPMAAEAGLAREAQPMEGGRIGSRGASGGGGWLGAERRGRRWRRRPRCEEELPVGVVVFGARRLASGGRRCRGLTCRQSLCGGGXIGASDVDFPRWRSVTLSGGRSGVSLLLGLCVSDVGVWVVV

SEQ ID NO: 140807 - protein, 61 aa, Oryza sativa
  Clone ID: PAT_MRT4530_41971C.1.pep
LVPKWLVTVVLRRRDDDASDDGCDGESAKALFGTHVSNPGQELIKARFQWIRVDSLEPPVD

SEQ ID NO: 140808 - protein, 66 aa, Oryza sativa
  Clone ID: PAT_MRT4530_41972C.1.pep
PVGLGGLVIYSTCKRAGPLAIQPLIALAFEVGGLAPVVEARFAALGSPAKFNCFANPLRGPLLRCN

SEQ ID NO: 140809 - protein, 66 aa, Oryza sativa
  unsure (1)..(66): unsure at all Xaa locations
  Clone ID: PAT_MRT4530_41973C.1.pep
XXXCSPXPTLVHXHSXQXXKVXEXHXXGVGPLXXXPRXXYRXDXKTQXXRPRXGXRRIXMTSRXRR

SEQ ID NO: 140810 - protein, 84 aa, Oryza sativa
  Clone ID: PAT_MRT4530_41974C.1.pep
RHRVLWSHQSQVKILPSRDRHGAQAEVRCCRRTETGDLVGTLTESYKGGTLMVGVDDVDLFKGIGLKFLAMDSCWWTTRSCAPL

SEQ ID NO: 140811 - protein, 62 aa, Oryza sativa
  unsure (1)..(62): unsure at all Xaa locations
  Clone ID: PAT_MRT4530_41975C.1.pep
MVGGGEIALSEGRGVEGDEKEGKXKXKXXGWGSGRCWPAATLTHEMRNPCPICNPEDVAAIS

SEQ ID NO: 140812 - protein, 79 aa, Oryza sativa
  unsure (1)..(79): unsure at all Xaa locations
  Clone ID: PAT_MRT4530_41976C.1.pep
LTWPCFSFSSNGLLHPPFRFLAAASASSGSSYSIPHARLRLAVTTPSRLPSPIXXSPDPPXDXAHDEDEQEGQHHKEER

SEQ ID NO: 140813 - protein, 262 aa, Oryza sativa
  unsure (1)..(262): unsure at all Xaa locations
  Clone ID: PAT_MRT4530_41977C.1.pep
RQWRSKLAVVAALRSSRXTSSATTAREHGATATVATAQISXRWWQQRLVGGDSTVAGRRHWRLXALGLSRRRQRRGTRGDGCSSGWTTAMGLRLAGGEVAVGSSGRGGGGRWXLGRLAEDVADGCIWPVRESTEEGSETGLVQRGTADGSRGRLGARGAGGGDGGRLGARGAANGGRPDRCERRVRWRRPVRCERHGRQRRRXPWCEEEMPVGVARSSALEGWPAGGAGAGVPHVGRGCVVVEHRCRAISSVFLCWFSGGPH

SEQ ID NO: 140814 - protein, 131 aa, Oryza sativa
  Clone ID: PAT_MRT4530_41978C.1.pep
MATRGKLVAVAAPRSSRATSAAATARDHGATAAVETARIPWRWWQQRLVGGDSTVAGRRHWRLLAAVALGLSRRRQRRGTRGDGCGSGWTTSMGLRLAGGEVAVGSSGPGGGGRWHGGLGRLAEDVADGCI

SEQ ID NO: 140815 - protein, 579 aa, Oryza sativa
  Clone ID: PAT_MRT4530_41979C.1.pep
MQPSATSSASRPRPPPTTTTAAAANGHLAASQPQPHRRRPAATATVATSSASLPAPREPQCHSRQCRRPATVLSPPTSRCCHHRYEICAVATVAVAPCSRAVVADDVAASSAVPPPPRVCSATAGYRYPKYSPRCYYLAHWEARNNAKNNNESIHPKRVAQKFFAYVDMIVQHCYKAQAAPRGDSSPSIPRWTPPPVGTVMINCDAALFQSSCQMGIGFLIRDHDGRCLLALNERVQNVTQPELAEAVAIRRALSLAKEEGYQKRDAIKRSLLDSLAALKKPALALLLAGALLAAAGPHHGAALAASGGRVGGSAFSSRSSSPPSSYGYTAPAPRGGYSAAPFYSPSPFVSVGPAVGIGFGGSSFFFVLMGFAAFLYLAGFLSDSSGGSVLTETDKTTVLKLQVGLLGMARSFQKELDQIAEKADTSTPAGLSYVLTETTLALLRHPDCCISAYSSVDVKRSIDDGEKRFNQLSIEERGKFDEETLVNVNSIKRQKAGSQRSSGFSNEYIVITILVAAEGVHKLPSINGSGDLKTALQKLGAIPSRKILAVEVLWTPQNENDTLSERELLEDYPLLRPL

SEQ ID NO: 140816 - protein, 176 aa, Oryza sativa
  Clone ID: PAT_MRT4530_4197C.1.pep
MASDRTSSDDECSSNSKSDNKVADSDYANSISEEEETSDSDKYITKKDLVSTLKDLDRSKGKELGQTNHTQNMNKSRSAESPKPRSRLNITYFSNLIEGLSNEQRLIIENSAFGSLLNFQRCAIPLSFVKWIASHTDVSCSDIVVNGRSIPINPNTTNFILGIPNGGLEIKNDKVA

SEQ ID NO: 140817 - protein, 64 aa, Oryza sativa
  Clone ID: PAT_MRT4530_41980C.1.pep
NLKSPEATITSSTQAEAASARSKRHDHPRFWMENKKTEKKMTKAEHLDRAKHWRSITSHLLGEQ

SEQ ID NO: 140818 - protein, 366 aa, Oryza sativa
  Clone ID: PAT_MRT4530_41981C.1.pep
MPVTATVAVHHCAPSFGGKPQPICLGAEEKAPSPPSFHCAHSRQPAQAGARRADASGGEESVEGDLVGLTPGDGGRQGSRRAGSGEEAATVARAAQLRSWATRSGACERHQRRLRPFARRPVRMATRGKLTAVAEQARGGGGTAELAATSAAATVREHGATATVVTAWISWRWWHQRLVGGDSTVAGRRLWRLLVAVALGLSRRRQQRGTRGDGCGSGWTTAMGLRLVGSEVAVGSSGRGGGGSWHGGLGRLAEEVADGCIWPVRESTEEGSETGLAQKGAADGSGGRLGARGAGGGDGGRLGARGAADGGRPDWRERRVRWRRPVRRGRQRRRRPWCEEEMPVGVARSSALEGWPAGAPVRGSHM

SEQ ID NO: 140819 - protein, 54 aa, Oryza sativa
  Clone ID: PAT_MRT4530_41982C.1.pep
AHRMSLQRPFGAGASVRSICLRICVRRSARFRFLSNPRRLNSPTQSRQRVLDIS

SEQ ID NO: 140820 - protein, 275 aa, Oryza sativa
  Clone ID: PAT_MRT4530_41983C.1.pep
MGDSGSKPQARVTWVTGRRRNQETINDAPKHIVKIPIRKDDQGRSKHSAVVIEPLRDDHDNREKSTQLDKAPPPEPSKSLLIEETPLSGPDPTTSYWQARAPPMVVYNKFPSSPSMGSSEAVQVDDLSDFSPETKEKLQEKNSDYITKFVARSTNLQLSSVYLIPDEPLALKLPKSTPVDGRNARMVQGDLVEIQDCLRRKQFDKDTIELIKTADAGRAKIYKPPLPADMAILMSHLEALVLRLKGDLPKTFEEKTLATQDGEAHSYLAKLEGDC

SEQ ID NO: 140821 - protein, 276 aa, Oryza sativa
  Clone ID: PAT_MRT4530_41984C.1.pep
MSSIGTGYDLSVTTFSPDGRVFQVEYAGKAVDNSGTVVGIKCKDGIVLGVEKLVTSKMILKGSNRRLHSVHRHSGLAVAGLAADGRQIVSRAKSEAASYEKVYGEPMPVKELADRVASYVHLCTLYWWLRPFGCGVILGGYDRDGPQLYMIEPSGLSYKYFGAALGKGRQAAKTCVYDGSRKDDSAFEYVGCLFVMTHEQWEIEKLNLSELTCREGIVEVAKIIYGVHDEAKDKDFELELSWVCDESKRQHEKVPDDLVEQAKAAAQAALEEMDAD

SEQ ID NO: 140822 - protein, 120 aa, Oryza sativa
  unsure (1)..(120): unsure at all Xaa locations
  Clone ID: PAT_MRT4530_41985C.1.pep
LLCFLAFSLCVLALVWSLLCFLARXSRVPLCFVWASSCSFSPFFFVSAWFVVAXWFRLAPVLFFVLLXFSLWLLGGARGLFPLFPPFPFXXXXXXXFSALRFCARRPGXXFRPGPCWRAP

SEQ ID NO: 140823 - protein, 75 aa, Oryza sativa
  Clone ID: PAT_MRT4530_41986C.1.pep
LLSAFLIGAVYGQPGAVTWYVYDCSSTYNSLEYNFCHLSLDTGYYWQQNLYLIDSSNLQTVCAPVVKTVNLELNV

SEQ ID NO: 140824 - protein, 169 aa, Oryza sativa
  unsure (1)..(169): unsure at all Xaa locations
  Clone ID: PAT_MRT4530_41987C.1.pep
MDFPVFLYPDTPEKTYSENDPFWGARIVGAVVQRDGTSLSGAVLLPPWWGGAEEHTRTKHTKNKLKXEEICVTCRIFQNSTEKLLASXNXSCKRNLEILLSPNPTKLVRIGYNFFYRCPWIYYXPDSKSKKLGGGGSSSHIGTLPLPPQHRPATAAREAAVVPWPVPLA

SEQ ID NO: 140825 - protein, 196 aa, Oryza sativa
  unsure (1)..(196): unsure at all Xaa locations
  Clone ID: PAT_MRT4530_41988C.1.pep
KGKIISTNSHKILXLSSSGKTISIFLQLPXRRSNKNTSIHQKPXVTRGKSIKKGQILAKGSTLGXKNVLATYMPWEGYNFEDAILISECLVYEDIYTSFHIRKYKIQTDTTSQGSAEKISKEIPHLKEHNQKSNVNTSKIQSGSGSECSDILLTGLLSTSFVELKATHNIETCLIAFHISGKNHGNKNRPLKWVGG

SEQ ID NO: 140826 - protein, 39 aa, Oryza sativa
  Clone ID: PAT_MRT4530_41989C.1.pep
VLRGMLSILLYQVLNILWRTNIMSWLYAPPIYSDIKPTA

SEQ ID NO: 140827 - protein, 247 aa, Oryza sativa
  Clone ID: PAT_MRT4530_4198C.1.pep
MASDSTSSDDECSSNSKSDNKVADSDYANSISEEEETSDSDKYISKKDLFSGSIKRKRGLSNEQRSIIENSAFGSLLNFQRCAIPLSFVKWIASHTDVSCSDIVVNGRSIPINPNTTNFILGIPNGGLEIKHDNDAGKHFFHQHYGSTKPLISFFGTKLLSDKGVNKLSEDDVLRCFMVVALSTFLCPNSGTHPNPKYLEPLIDVKSSSKWNWSKFVYEWLMTYIAKFQKERKSKEQTSKMSRPEIH

SEQ ID NO: 140828 - protein, 163 aa, Oryza sativa
  unsure (1)..(163): unsure at all Xaa locations
  Clone ID: PAT_MRT4530_41990C.1.pep
ERPHEPGLMGFXRAGENGYSAKGINWGTPRVFPSPLFKNPAPGFYFGSPLKKVKPGFYREEKLETQKRAPPIFFFFYLYSLLCCYAMLFCKSWIFLYFFFLFPXSFPLFXFFFFFFFMFSXNIXXYXXYLFXDHXXXRCXXNXXATXCDPLLXXMQRTAXXKS

SEQ ID NO: 140829 - protein, 136 aa, Oryza sativa
  unsure (1)..(136): unsure at all Xaa locations
  Clone ID: PAT_MRT4530_41991C.1.pep
LDLLAIAACNGSAHFDVLSQRYTQYQLQMPVLLQQTXLNRYNEFAWDKYDISESRXLQSDVVQLTNNQVWQQLELAAQQSDYQDINIGQAIKNQLLLQQFGDLYFDRNLAQAQALVAINVPPRYDIYPKNYAAKRT

SEQ ID NO: 140830 - protein, 205 aa, Oryza sativa
  Clone ID: PAT_MRT4530_41992C.1.pep
MIGPSIPISKCDHVHHGGKRDKILDRKEATTGGREGGCGQRVGEESRRAGTEAAAGGDGGSCGRGAEAGGERAQRPRRVAGEELRSSPPRDLCPHPRERESRRAPRSPQLGLRGVQPPPGSALHRRHHYAQDKSLQIRPKEIERRQRQIEVRWREVVGLNVPGLRAMPGCGLGQANVNILLARGVRQGRQRPGIMTAENTDVMRN

SEQ ID NO: 140831 - protein, 67 aa, Oryza sativa
  Clone ID: PAT_MRT4530_41993C.1.pep
NSSNVLERLHVAWLYQLQKLKKGCLTYLFVFGKIVAGREEINSFFQHADRELALEMFQEVITAWKPI

SEQ ID NO: 140832 - protein, 115 aa, Oryza sativa
  Clone ID: PAT_MRT4530_41994C.1.pep
MTAPPLVVHEEDEVAGELHEEDGSGGGAQEEEVQVRLRLSSMPATVEHPSLPRGTKFVIIEHPSLPRRVGGGLAAHSGADEERKGRESCRSLLAAGAAWATPLDRSGRFAGAVAA

SEQ ID NO: 140833 - protein, 68 aa, Oryza sativa
  Clone ID: PAT_MRT4530_41995C.1.pep
SSAGPSADSAEKVKGPPQKKPTTITDEEKILRIKSVEYSLPSVKLSWRDANGITHGVILNKQKEEDRH

SEQ ID NO: 140834 - protein, 1478 aa, Oryza sativa
  Clone ID: PAT_MRT4530_41996C.1.pep
MARAEGLPEGAAPGVGVDLYAQARKALSVRTPFEGEGTAPRVPTLPARLVNWSGQSDARKKHKKIQPQDVADVELPPQPATEPSAKTGVWEQFEAYFRPVNLDDIDMLMPKFPFGYGGLDSCILIPFVGSGKELMDTAETFDVAVAETSSYLGLGGEERVSNKEHSERSERSEQSVEQGIHEVIVRQFVGNKERGEQSVEQGIHEVVVQQENWPLEVEQATSSAGIVSSKCEEEGESSLNWLLGSKERFVLTSERPNKKRKLLGVDAGLEQLVLLPRSGAEASSVCDVCCLGESSTVSNSMLNCNRCKVTVHQKCYGLHVVPDGQWLCTWCKDLESLQSLKKDADNTLSMPCVLCPKEKGALKPVKGEPGQTAHGGNLKFVHLFCSLWTPGALVEDMESMEPVTNVGSVQENQWKLVCSICKVKHGVCVRCSHGTCRTPFHPICARESKHQMEIWGKFGYPNVELRAFCSKHSTIGYANSLERSNCASHQSPTEARLKDANLITGKVPKLRFTRKNKDKFMNYEATSFNSSNLIKVETIEQASLPHTVRSSDSLAIQGMEVDTDNLSVGGNLMRNSADVALVLRKLIDQGKVSVGDVASEVGISSESLEAALVGETTTFSHGLKLKIIKWLQNSAHIPAAQAKILKGGPMVVHNSKPGRSEDTNSVNMKNSLVPNDEKGTTAYLSDSAVMKSSSTRSKDNNKIMRDNTAVCATGVTTLLQNGIKKMAEAGAERECSSPAEDCAKGTPKEEHGGLISNNISGNTQFGTSMAIPNENKGTSPGKKRYNLTEAEPGSELEGVSSLNQYFPPGDNVKHELNLVENGVGNNHDCNADHVPGQPFSNFNDSHYYIHPLIKEKMTQLWDNTFKQDKLAPCHPEDPLCYPDERRRVGSSIKLTETTDVMDQVSRAKSLGILEHSPDDEVEGEMLYLQARLLDTAAFLKHRYEDLIAKVVQNLSRELDAFSRRKWDFIFVNQFLRDVREAKKRGRKEKRHKEAQAILAAAAAAVVASSRNSTVRKDANDDVVPAKQENSPKFGTGPPNVGQRTSSLLRLKDLSKPPNNKISQDNNRSTFHMPNYSKENALYCDVCMRSETVLNRIFVCSRCKAAVHIGCYRNIENISGPWKCELCEDISPEDTCVGDQSDCNGTNLSLVQCDLCHGTSGAFRKTADGQWIHAFCAEWLLETEYVRGQDSPVKGMESLVKDKDTCCVCLHTVGACLKCNNGDCQTTFHPYCARHAGFYMNTKGSGGILQHKAYCSKHSIEQKEADMQQYGLEEFNNMKRMRVELEKLRLLCERIIKREKVKRERVLCDHDILAKTKDTLVFSYLTHGASSESATTSVNNKSYSGTMQRSDDVTVDSTISGKKAIRFSLNNRDAEINTADSSRTLISFKRKFSERGSLAGKQLPRRPVTSQKLEAGEKKTKDKKNRETFQKELFMTSDQASTQNQRLPKGYAYVPRDSLSKDKLRNRNTQAHEPQEPGG

SEQ ID NO: 140835 - protein, 116 aa, Oryza sativa
  unsure (1)..(116): unsure at all Xaa locations
  Clone ID: PAT_MRT4530_41997C.1.pep
INVPQRLLGEGSPKGGXATEGWGHRPPSSSRLQSGFNKLLASXNALRGKEAPKEEGPLNIAVRDTQAERVKAIRGIGKDGSVVTKATTSAAHTQRLHSGAARVHPLPPYTQPLGRC

SEQ ID NO: 140836 - protein, 56 aa, Oryza sativa
  Clone ID: PAT_MRT4530_41998C.1.pep
MLIGALRTDVFIRFGFVREEQALPDMEHGSSGRSTATGREEMAPPSGDAQPPLSPL

SEQ ID NO: 140837 - protein, 243 aa, Oryza sativa
  Clone ID: PAT_MRT4530_41999C.1.pep
SGSPGCRQSPVSLSPGTPGGEATVTKASRSHAYTASSPPATLRPLGRCRRRRPPSPHPNTTTSFHRRLLPFSLFLFHIQNSSTRCLVSQPCCSLRRRQPAVVVGGGSASYHAPPPLRSRRSWSLPTACCFRLLARLCGGDGPDGLLPAMSCGGLRLRVSPVARFTFPVLVGSAATEGLCVGRQWMNSGCSTVESLGVCCRCGRLSDNAAVFANVCSIPFSSCLPGGWKHFEPCHDQLSPKLHV

SEQ ID NO: 140838 - protein, 148 aa, Oryza sativa
  Clone ID: PAT_MRT4530_4199C.1.pep
CTSTFLTRGCGETYSPPALDAVPYWHYGEGRGWAKPVRPQPLTPHLNGIVAKGLGVAEPIRPQPLTPYLIGIVAKGLGVAKLIRPQPLTPYLIGIVAKGVGVAKGRHALLVIWRRAWRVAKPSRPQPLTPYLIGTMAKGVGGRNLFAR

SEQ ID NO: 140839 - protein, 151 aa, Oryza sativa
  Clone ID: PAT_MRT4530_419C.1.pep
MGRMHSRGKGISSSAIPYKRTPPSWVKTAAADVEEMIMKAAKKGQMPSQIGVVLRDQHGIPLVKSVTGSKILRILKAHGLAPEIPEDLYFLIKKAVAIRKHLERNRKDKDSKFRLILVESRIHRLARYYKRTKKLPPTWKYESTTASTLVA

SEQ ID NO: 140840 - protein, 56 aa, Oryza sativa
  Clone ID: PAT_MRT4530_41C.1.pep
MDKVNNITTSHKDKTRDPQTFRGPEDEEAILVGHENVVHLFLWIPFKWSRSRYDYD

SEQ ID NO: 140841 - protein, 78 aa, Oryza sativa
  Clone ID: PAT_MRT4530_42000C.1.pep
MRRRRTRSEDAGTTARVAGGRRDDGSAAGGWWDGGAGLQAGGAQRPLAWRDAREGKGIETTRSTGVRLNGELHGVRQY

SEQ ID NO: 140842 - protein, 104 aa, Oryza sativa
  unsure (1)..(104): unsure at all Xaa locations
  Clone ID: PAT_MRT4530_42001C.1.pep
MTTCERLKMWCRLTTRLITILNTTDITSPPPWLTAVLSACQHYLTMLSATAIFPTILMPLMGGVHVDKAIVSQTIXFLSATYMVLKWHLCTRFPARSVASYAYF

SEQ ID NO: 140843 - protein, 44 aa, Oryza sativa
  Clone ID: PAT_MRT4530_42002C.1.pep
DRKPNQGLAMLDDQGYSHPKGCRCDGHDTMQVSLSRVLLIGVDA

SEQ ID NO: 140844 - protein, 112 aa, Oryza sativa
  Clone ID: PAT_MRT4530_42003C.1.pep
YPNEDWSDTPGVKAREYREDWEYRWSAIFGPYDTISPIPPMRYTHRKDDSMPRHISVRHTLQIISVKIKGIRGGLQWPINVFGLIAARDTIDRNRIMIFNRTRDNCQTITKE

SEQ ID NO: 140845 - protein, 84 aa, Oryza sativa
  Clone ID: PAT_MRT4530_42004C.1.pep
MVAAVAVQRGSSRREEGKTGGREEKGNEALSAMAKEASRSAPASSAPEGGNPAVRELEEGGGMARRERGEGGVATLPAAAPARR

SEQ ID NO: 140846 - protein, 393 aa, Oryza sativa
  unsure (1)..(393): unsure at all Xaa locations
  Clone ID: PAT_MRT4530_42005C.1.pep
LKLLFYTFEQLSGLKINFNKNXLYCFGEAKIFENQYTELFGCSIGKFPYRYLGIPIYYRKLRNTYWKGVEELFEKRLSSWQGKLLSTGGRLTLINSVLSSLPMYMSYFFAIPRGXLNYLSSRFFWQSDGQKKKYRLAKWNVMCCPKEQGXLGIHDLDIKNTTLLSKXLFKLLTTDGIXQQLIRNKYLGNKPLSXLNERLGTXDFWASLVKVKLIFFVLGXLDYQDDSQVRFLEDKWLGNSTLRDQYPCLYNIVRHKQMTVAEVFQTNLLNFSWRRDLVGSKLVAWNNLLPRIANIQLSEEQDEFRWNLTPNGEFSMKSHYLASFTVXCSERKQGSLETKNPKVKIFLWYLHRGVLTKVXQTKXQVSKNCCFCHKEETIRHLFNECCLANSVSS

SEQ ID NO: 140847 - protein, 133 aa, Oryza sativa
  Clone ID: PAT_MRT4530_42006C.1.pep
LQEGERRQHRGGDGWWAVDGATAGGGRSGGGWRVEQRSAAQQAEQRGGGSGGERWAERWRVAGGAEGRQTAGGVVAGVLTGRGRRLTRSFVLDMKSRGIDVEAAEEGRSKRPRLPPRPAAERRLPPRPAAACH

SEQ ID NO: 140848 - protein, 40 aa, Oryza sativa
  Clone ID: PAT_MRT4530_42007C.1.pep
MELFPVNIAVESVLQIYGTICCYDVSVIIAKSAYYGKGIE

SEQ ID NO: 140849 - protein, 118 aa, Oryza sativa
  unsure (1)..(118): unsure at all Xaa locations
  Clone ID: PAT_MRT4530_42008C.1.pep
KQPEKAASVHPHSAPLLLLLQSSPVQRTPHSTTLPRYSPPAPRNHGILLLDPSQSPIPASPRSASQRDPNLMAXPPGKKGEGGGDGGGGKAEWLILRVRGRAGRRFLAELNRVXPEIF

SEQ ID NO: 140850 - protein, 703 aa, Oryza sativa
  Clone ID: PAT_MRT4530_42009C.1.pep
MSSSTSPSTAPSAEYAEMLNNASAKIAVGSIVGAGGPWWLLQTWLNLIVMNIVNRPSVTEAEFPLPEPIVEDDGEERTHRRCMSYGEYASTSTDAGAKLSAELQKDWFCSFYEGFKKDARIWFPYEDSADLELPSDFRFEDINHRKFQKSREIPIAAISPCILPVGIHQGRNIQVSYEFYHPMSLARRLGLGQLPIGLFFADNIQCRGQIASTLMMDRLLNLPGPPLGSIDNIELAGFRSKNFDRWWGEWKLHLFHQSAAMYMIDLFNNVIPQKKKTAVKKKPAATIVKSAPPLPPPSPPVQQSSSNQTPSAVGSHHVEEEEQPAASAIPALADLFSFDIRDYLDEAEEDTSSKAQAPLSDDVRKTLEDIAHRLEASSLDSLVVDCGSIRTRLHEVQALIPEDLADVLTPAAYLEQHQFKLEKAKLRLAERRPIKSNIDRLEARKIELLAQLEECNAELDMEHKKLADLPKSIEEQKARLKSAIKNVADLTKSLKVISGTDAQDAHAIVEGACFEFAYTIKPYATNNQAEYEAVLKGLQLLKEVEADTIEIMGDSLLVISQLAGEYECKNDTLMVYNEKCQQLMKEFRLVTLKHVSREQNIEANDLAQGASGYKLMIKDVKVEIAAMTADDWRYDVHQYLHNPSQSASRKLRYKALKYTLLDDELYYRTIDGVLLKCLTADQAKVAVSEVHEEILVLINRLIR

SEQ ID NO: 140851 - protein, 866 aa, Oryza sativa
  Clone ID: PAT_MRT4530_4200C.1.pep
MASDMTSSDDDSSSNSKSDNKVADSDYANSISEEEETSDSDKYITKKDLVSTLKDLFSGSIKRKRGRTDKPVRRQKQKRTKLEYDQDQSGSAESPKPRSRLNITYFSNLIEGLSNEQRTIIEKSAFGSLLNFQRCAILLSFVKWIASHTDFSCSDIVVNGRSIPINPNTTNFILGIPNGGLAIKHDNDVGKHFFHQHYGSTKPLISFFGTKLLSDKGVNKLSEDDVLRCFMVVALSTFLCPNLDTHPSPKYLEPLIDVKSSSKWNWSKFVYEWLMTYIAKFQKESKSKEQTSKTLGGCGHLLAIKYLDFKDFGIRSIPIGPPPRISVWKGGMIKEYSKMDECKTGDFGKRLIKAMEKLSYDAICSGARCIKQQGNNSNMSCSDALQQYHSKSFNPRLASGSQENILTQHMKKNAQLAAKVLDCVYMSKASLFTQKDSTTTREEKSGEEKSKGGSKQGASNVAHNGNAPPLEQKNQNNTDVCSQLPKTPQTKSTAEHKTKSNINNTSTSKGAPPTDKKASSKDFVCSQQSNNSVASRTRAKRLHSASPLSVVSISPSKKNSSDQKIRKAVRKQVQPTKDLESNSTEFVIDIEGPYDIEDITGHTMDKTKFILVNYSNSSEDHKSQDPTQDESDNIPHKSTNQPKFECLYHFDDKSKANKSASLGHFLSQTTSANFTANMGNRRLEGQHCDENEYQDDFAEFLYEEEPSDNIDMVEQRAQPQINNEQSSPQTPLHINIASARTPATKQVMQIVYFLKNWEGAGKEEDYENCARQAFTFARNKKPLHYYDLLIFPCLYDNHWFVFTVDIKGHHFIFLDSIYDENSKYHKKIQGLLIPGFIAMWEEFSDVEKYFSKFDIQYPPITRQNNG

SEQ ID NO: 140852 - protein, 132 aa, Oryza sativa
  unsure (1)..(132): unsure at all Xaa locations
  Clone ID: PAT_MRT4530_42010C.1.pep
GGPPAAPPSPPPXPPPPPPPPPPNSPPXPPHAALPPPPPPPQRRSSSSRPPLGRAPPAPTPAAEAARTSTRPALCASSRRRRRRWCSSRTSSSGGRRDGEAGKRWRRRTARRGAPRWRGPALGSSGTPRATL

SEQ ID NO: 140853 - protein, 718 aa, Oryza sativa
  Clone ID: PAT_MRT4530_42011C.1.pep
MSSSTSPSTAPSAEYAEHLSNLVAIPSLSHENHYFLGPIGNLDPTDFIFGETNRIPFRLANPNLGHCKNTFKSWPSLEKPTPDKSWTTRYQRISASKKTHWDEIGIGQVLALTIANSAKDEPLMAAATYFWSNTINAFLFNQGPMTPTLIDIIMITGLNVTSSANPMSMNTKNQFDFKTKSIGGWSGYVAAYMGKGPVTPREHVAFLLMWLEKFFFCGSSCGPTTNWQFVAEALESKKQFPLGKILLGYLYQMLNNASAKIAVGSIVGAEAEFPRLEPIVEDDGEERTHHRCMSYGEYASTPADAGAKLSTELLKDWFCSFYEGFQKDARVWFLYEDLADLELPLNFRFEDINHEIYQTSREVFTAAISPCILPVGPPLGSINNIELAGFRFRNFGRWWGEWKLHLFHQSATMYMIDLFPDVIPQTTESSPPHQSNSGRNIEYAPGLIPNGGELSPPVIGYHVPKVLTLLQGAIREPTDVTKKRKTRSSTVSTLTLAPKKKAKSKKTKPTDDLPALDPSIEQALDEEDIDDDVDQAAAEPPPPPSSPVQQSSSDRTPSAVGSHHIVEEEQPAAPAIPVLADFFSFDIKDYLDEAEEDTSSKALAPLSEDAKKTLEDISHRLEASSLDSLVLEARKIDLLAQLEECNAELDMEHKKLADLPKSVEEQKARLKSAIKNVADLTKSLKIISGTDAQDAQAIEEVEQIRRSAISAIQQYLSQ

SEQ ID NO: 140854 - protein, 103 aa, Oryza sativa
  unsure (1)..(103): unsure at all Xaa locations
  Clone ID: PAT_MRT4530_42012C.1.pep
LLPMSMNTKNQFDFKIKSIGGWSGXVAAYMGQGSVTPREHVAFLLMWLEKFLFCGSSCGPTTNWQFVAEALIVMKVVNRPSVTEAEFPLPEPIAEDDGEERTH

SEQ ID NO: 140855 - protein, 157 aa, Oryza sativa
  unsure (1)..(157): unsure at all Xaa locations
  Clone ID: PAT_MRT4530_42013C.1.pep
MSEVLKNPAILAKATEELDTIVGVGRLVTEGDIPHLPYIHAIMKETMRMHPVVPLLVPRXPFRPERFVEAXIDVKGRDFELLPFGTGRRMCPGYSLGLKVIQLALANLLHAFSWNLPDGIAAGELSMEEIFGLTMPRKIPLLAVVKPRLPDHLYAEP

SEQ ID NO: 140856 - protein, 494 aa, Oryza sativa
  unsure (1)..(494): unsure at all Xaa locations
  Clone ID: PAT_MRT4530_42014C.1.pep
MSSSTSPSTAPSAEYAELLLYNQWQFVAEALESKKEFPLGKILLGYLYQMLNNASAKIAVGSIVGAGGPWWLLQTWLNLVVMKVVNRPSVTEAEFPLPEPIVEDDGEERTHRRCMSYGEYASTPTDAGAKLSAELLXDWFCSFYEXTESSPPHQSNSVKNIEYASDLIPNGGGLSPPFIGYHAPKTSTLLHGLTREPADAGKKRKTRSSAMSTLSLAPKKKTKFKKTQPQPTDMSTDDLPALDPSIEQALDEEEIDEDVDQAVAEMSDIERTPSASPKQTPPTPSAPVHFTRQSSSDQTPSAVGSHHVEEEEQPAAPAIPALADLFSFDIRDYLDEAEEDTSSKALAPLFDDVRKTLEDISHRLEASSLDNLVVDCGSIRTRLHEVQALIPEDLADVLTPAAYLEQHQFKLEKAKLRLAERRDRKEIEATIQANRQLVHEEKTKLDQLSEGPIKSNIDWLEAHKIELLVQLEECNAELDIEHKKLADLPKSIEE

SEQ ID NO: 140857 - protein, 540 aa, Oryza sativa
  Clone ID: PAT_MRT4530_42015C.1.pep
MELQSSWATFFAVVLATVVFLLRAVLLRRRRAYKLPPGPKPWPIIGNLNLISSLPHRSIHEISKRHGPIVQLWFGSCPVVVGSSVEMAKLFLQTNDAVFADRPRTAAGKYTAYDCTDITWSPYGAYWRQARKMCAAELFSARRLESLEHIRHEEVRALLRELHGSGAAGNAVQLRDHLSMAALGVISRMVLGKKYVEKQPAGGGAAMTTPEEFKWMLEELFLMNGVLNIGDFIPWLDWLDLQGYIRRMKNVNRLIHRFLDRVLDEHDERRRLQGDGFVARDMVDILLQLADDPNLDVQLTRNGIKGITQKNLSLKPLELNVPYVIETWLNDLVTGGADTSTVTVEWAMSEVLKNPAILAKATEELDTIVGVGRLVTEGDIPHLPYIHAIMKETMRMHPVVPLLVPRMSREDASVAGYDVPAGTRVLVNTWTIGRDPSVWDSPEQFRPERFVGSGIDVKGRDFELLPFSSGRRMCPGYNLGLKVIQLTLANLLHAFSWCLPDGVTAGELSMEEIFGLTMPRKIPLLAVVKPRLPDHLYAEP

SEQ ID NO: 140858 - protein, 693 aa, Oryza sativa
  Clone ID: PAT_MRT4530_42016C.1.pep
MSSSTSPSTAPSAKYAEHLFNLVAIPSLSHKNHYFLGPIGNLDPTDFIIGETNRIPFRLANPNLGHWKNTFKSWPSLEKPTPDKSWTTWYQRISASKKAHWDEIGIGQALALTIANSSKDEPLMAAATYFWSNTINAFLFNQGPMTPTLIDIIMITGLDVTSSANPMSMNTKNQFDFKTKSIGGWSGYVAAYMGKGPVTPREHVAFLLMWLEKFLFCGSSCGPTTNWQFVAEALGSKKQFPLGKILLSYLYQMLNNASAKIAVGSIVGAGGPWWLLQTWLNLVVMKVVNRPSVTDAEFPRLEPIVEDDGEERTHRGCMSYGEYASTPADAGAKLSAELLKDWFCSFYEGFQKDARVWFLYEDSANLELPLDFRFEDINHERYQTPREVFIAAISPCILPVGIHQGRNIQVSYEFYHPISSVRQLGFGQLPIGLVFADKIQCRGEISSTLMMDRLLNLQGPPLGSIDNIELAGFRSRNFDRWWGEWKLHLFHQSATMYMTDLFPDIIPQTTKSSPPHQSNSGRNIEYAPDYLDEAEKDTSSKALAPLSDDAKKTLEDISRRLEASSLDSLVVDYGSIRTRLHEVQALIPEELADVLTLATYLEQHQFKLEKAKLRLAERRERKEIEATIQVNRQLVHEEKVKLDQLSEGPIKSNIDRLEARKIKSNILLAQLEECNAELDMEHKKLADLPKFVE

SEQ ID NO: 140859 - protein, 35 aa, Oryza sativa
  Clone ID: PAT_MRT4530_42017C.1.pep
SSLVFATDFVAAGAGMGAMLTSDSLQLFRLPTHGS

SEQ ID NO: 140860 - protein, 824 aa, Oryza sativa
  Clone ID: PAT_MRT4530_42018C.1.pep
MSSSTSLSTAPSAEYTEHLSNLVAIPSLSHKNHYFLGPIGNLDPTDFIIGETNRIPFRLANPNLGHWKNTFKSWPSLEKPTPDKSWTTWYQRISANVTSSANPMSMNTKNQFDFKTKSIGGWSGYVAAYMGKGPATPREHVAFLLMWLEKFLFYGSSCGPTTNWQFVAEALESKKQFPLGKILLGYLYQMLNNASAKIAVGSIVGAGEPWWLLQTWLNLVVMKVVNRPSVTEAKFLRLEPIVEDDGEERTHRRCMSYGEYASTPADAGAKLSAELLKDWFCSFYDGFQKDARVWFLYEDSADLELPLDFRFEDINHERYQTSREIFTAAISPCILPVGIHQGRNIQVSYEFYHPISSARQLGLGQLPIGLFFADKIQCRGEISSTLMMDRLLNLQGPPLGSIDNIELAGFRSRNFDRWWGEWKLHLFHQSATMYMTDLFPDVIPQTTESSPPHQSNRGRNIEYAPGLIPNGGGLSPPVIGYHAPKVSTLLQGAIREPTDVTKKRKTRSSAVSTLTLAPKKKAKSKKTKPTDDLPALDPSIEQALDEEDIEDDVDQATAEPPPPPSSPVQQSSSDRTPSAVGSHHIVEEEQPAALAILVLADLFSFYIKDYLNEAEEDTSSKALAPLSDDAKKTLENISRRLETSSLDSLVVDCGSIRTRLHEVQALIPEEMADVLTPAAYLEQHQFKLEKAKLRLAKRRERKEIEATIQVNRQLVHEEKVKLDQLSEGLIKSNIDRLEARKIDLLAQLEECNAELDMEHKKLADLPKSVEEQKARLKSAIKNVADLTKSLKIISRTDAQDAQAIEEVEQIRQRAFLAIQQYLSQ

SEQ ID NO: 140861 - protein, 224 aa, Oryza sativa
  Clone ID: PAT_MRT4530_42019C.1.pep
MASSRSVVLRVLVAVAVVAAAGAPRLAVADSPPLQDICVADLRAATAVDGFPCKPTASVVSDDFFCDAIVQAPSTSNPFGVNSTRATVSAFPGLNTLGLSITRTDLAPGGLNPPHSHPRASELVLVLSGEVMVGFTTAANRLFSKVVREKELFVVPRGLQHFQLNVGAGNASFVAMFDSQSPGLVTPTFALFATQPAMPMEVLAKTFLMGEDEVGAIKSKFAGF

SEQ ID NO: 140862 - protein, 114 aa, Oryza sativa
  unsure (1)..(114): unsure at all Xaa locations
  Clone ID: PAT_MRT4530_4201C.1.pep
IFWQVESGTSFIERHPHXVLGVGHDRSGXTGATLFWTRKVSMLYAHGRWLGKXNASENIXKAHLLCKRSIPPACTTRDNCTRXAFTLNELTAGLKEKLPPTDSRWRPLQRCLEK

SEQ ID NO: 140863 - protein, 197 aa, Oryza sativa
  unsure (1)..(197): unsure at all Xaa locations
  Clone ID: PAT_MRT4530_42020C.1.pep
LLSPLFSASGWPDSIQKNQVNADDGRXAGAERRRAAGEAEAGIEXSVGEWTRESDVVLTAPGCGRSAAGESGDGRAAGELQVAPCAPHHQGRDDCWVWAAALLRXAPYSPHISTSWSAASPADAPTSRVGAPPLLLSRXPRHADRLRLPLQPHSPTPALAAALPAASRARPXLPSQPLRLPPPTPGEEKRTTEKCGS

SEQ ID NO: 140864 - protein, 750 aa, Oryza sativa
  unsure (1)..(750): unsure at all Xaa locations
  Clone ID: PAT_MRT4530_42021C.1.pep
HWDEIGXGQALALTIANSTKDEPLMAAATYFWSNTINAFLFNQRPMTPTLIDIIMITGLDVTSSANPMTMNTKNQFDFKTKSIGGWSGYVAAYMGKGPVTPREHVAFLLMWLEKFLFCGSSCGPTTNWQFVAEALGSKKQFPLGKILLGYLYQMLNNASAKIAIGSIVGAGGPWWLLQTXLNLVVMKVVNRPSVTEAEFPRLEPIVEDDGEERTHRRCISYGEYASTPADAKAKLSAEMLKDWFCSFYEGFQKDARGWFLYEDSADLELPLDFRFEDINHERYQTSREVFTAAISPCILPVSIHQGRNIQVSYEFCHPISSATQLGLGQLPIGLFFADKIQCRXEISSTLMMDRLLNLQGPPLGSIDNIELAGFRSRNFDRWWGEWKLHLFHQLATMYMTDLFPAVIPQTTESSPPYQNNSGRNIEYAPGLIPNRGGLSPPVIGYHAPKVSTLLQGAIREPTDVTKKRKTRSSAVSTLTLAPKKKAMSKKTKPTDDLPALDPSIEQALDEEDIEDNVDQAAAEALADLFSFDIKDYLDEAEEDTSSKALAPLSDDAKKTLEDISRRLEASSMDSLVVDCGSIRTRLHKVQVLIPEELADVLTPAAYLEQHQFKLEKAKLRLAERRERKEIEATIQVNRQLVYEEKVKLDQLSEGPIKSNINRLEARKIDLLAQLEQCNVELDMEHKKLADLPKSVKEQKARLKSAIKNVVDVTKSLKIILGTDAQDAQAIEEVEQIRQRDISAIQQYLSQ

SEQ ID NO: 140865 - protein, 756 aa, Oryza sativa
  unsure (1)..(756): unsure at all Xaa locations
  Clone ID: PAT_MRT4530_42022C.1.pep
ANPNLGHWKNTFKSWPSLEKLTPXKSWTTWYLRVSASKKVHWDEIGIGQALALTIANSAKDEPLMAAATYFWSNTINAFLFNQGPMTPTLIDIIMITGLDVTSSANPMSMNTKNLFDFKTKSIGGWSGYVAAYMGKGPVTPREHTWLNLIVMKVVNRPSVTEAELPLPEPIVGDDGEERTHRRCTSYGEYASTPTDAGAKLSAELLKDWFCSFYEGFKKDARIWFPYEDLVNLELPSDFRFEDINHEKFQKSREVLIAAISPCILPIGIHQGRNIQVSYEFYHPMSSARQLGLGQLPIGLLFADKIQCRGKITSTLMMDRLLNLPGPPLSSIDNIELAGFRSKNFDRWWGTTESSPPHQSNSGRNIEYATGLIPNGGGLSPCVIGYHAPKTSTLLHDLTREPADAGKKRKTRSSAVSTLALAPNKKAKFKKTKPTDKPTNDLPALDPSIEQALDEEEIGEDVDQAVAEMSDTERTPSASPKQTPPTPSAPVHFTRPPYPVQQPSSDQTPSVVGSHHIEEEEQPTAPAIPVLADLFSFDIRNYLDEAEEDTSSKALAPLSDDVRRTLEDISHRLEASSLDSLVVDCGSIRTRLHEVQALIPEDLADVLTPAAYLEQHQFKLEKAKLRLVEHRERKEIEAAIQANRQLVHEEKTKLDQLSEGPIKSNIDRLEARKIDLLAQLEECNAELDMEHKKLADLSKSIEEQKVRLKSAIKNVADLSKSLKVIFGTDAQDAQAIEEVEQIRQRAILAIQRYLSQ

SEQ ID NO: 140866 - protein, 871 aa, Oryza sativa
  unsure (1)..(871): unsure at all Xaa locations
  Clone ID: PAT_MRT4530_42023C.1.pep
MSSSTSPSTAPSAEYAEHLSNLVAIPSLSHKNHYFLGPIGNLDPTDFIIGETNIIPFRLANPNLGHWKNTFKSWPSLERPTPDKSWTTWYHRISASKKVHWDEIGIGQALSLTIANSAKDEPLMAAATYFWSNTINAFLFNQGPMTPTLIDIIMITGLDVTSSANPMSMNTKNQFDFKTKSIGGWSGYAAAYMGKRPVTPREHVAFLLMWLEKFLFCGSSCGLTTNWQFVAGALGSKKQFPLGKILLGYLYQMLNNASAKIAVGSIVGAGGPWWLLQTWLNLVVMKVVNRPYVTEAEFPRLEPIVEDDGEERTHRRCMSYGEYASTLADAGVKLLAELLKDWFCSFYEGFQKDARVWFLYEDLADLELPLDFRFEDINHERYQTSREVFTAAISPCILHVGIHQGRNIQVSYEFYHPISSARQLGLDQLPIGLFFADKIQCRGEISSTLMMDRLLNLQGPSLGSIDNIELAGFRSRNFDRWWGEWKLHLFHQSATMYMTDLFPDVIPQTTESSPPHQSNSGRNIEYALGLIPNGGRLSPPVIGYHAPXVSTLLQGAIREPTDXPKKKAKSKKTKPTDDLPALDPSIEQALDEEDIEDDVDQAAAEPPPPPPSSPVQQSSSDRTPSAVGSHHIVEEEQPAAPAIPVLADLFSFDIKDYLDEAEEDTSSKALALLSNNAKKTLEDISRRLEASSLDSLVVDCRSIRTRLHEVQALIPEELADVLTPAAYLEQHQFKLEKAKLRLAERRERKEIEATIQVNRQLVHEEKVKLDHLSEGPIKSNTDWLEARKIDLLAQLEECNAELDMEHKKLADLSKSVEEQKARLKSAIKNVADLTKSLKVISGTDAQDAQAIEEVEHIRQRAILAIQQYLSQ

SEQ ID NO: 140867 - protein, 899 aa, Oryza sativa
  Clone ID: PAT_MRT4530_42024C.1.pep
MSSCTNPSDAPSAEYAEHLFNLVAIPSLSHKIHYFLGPIGNLDPTDFIIGETNRIPFRLANPNLGHWKNTFKSWPSLEKPTPDKSWTTWYQRVSSSKKVHWDEIGIGQALALTIANSAKDEPLMATATYFWSNTINAFLFNQGPMTPTLIDITMITGLDVTSLANPMSMNTKNQFDFKTKSIEKFPFYGSSCGPTTNRQFVAEALESKKEFPLGKIHLGYLYQTLNNASAKIAVGSIVGAGGPWWLLQTWLVLIVMKVVNRPSMTEAEFPLPEPIAGDDGEERTHRRCMSYGEYASTPTDAGAKLSAELLKNWFCSSYEGFKKDARIWFPYEDSADLELPSDFRFEDINHEKFQKSREVLIATISLCILPVGIHQGRNIQVSYEFYHPMSSARQLGLGQLPIGLFFADKIQCRGQITSTLMMDRLLNLPRPPLGSIDNIELAGFRSKNFDRWWGEWKLHLFHQSASMYMTDLFPDVIPQTTESSPPHQSNSGKDIEYAQGLIPNGGGLSPPVISYHAPKTSTLLHGLTRELADARKKRKTRSSAMSTLVLAPKKKAKFKKTKPTDKSADDLPALDTSIEQALDAEEIGEDVDQAVAEMSDTERTPWASPKQTPPTPSAPIHFTRKKKTAVKKKPAATIAKSAPPQSSSDQTPSAVGSHHIKEEEQPAAPAIPVLADIFSFDIRDYLDEADEDTSSKALAPLSDDVRKTLEDISHRLEASSLDSLVVDCGSIRSRLHEIQALIPEDLADVLTPAAYLEQHQFKLEKAKLRLAERRERKEIEVTIQANRQLVHEEKTKLDQLSEGPIKSNIDQLEARKIELLVQLEECNAALDMEHKKLVDLPKSIEEQKTRLKSAIKNVANLTKSLKVIPGTDAQDAQAIEEVEQIRQRAILAIQRYLSQ

SEQ ID NO: 140868 - protein, 108 aa, Oryza sativa
  unsure (1)..(108): unsure at all Xaa locations
  Clone ID: PAT_MRT4530_42025C.1.pep
XPLHHVLXHNLFAQXLGRKYFRXYSASISNDLYPHRETMLSNISQVDLDNINVNEFPRTGDVEFMDGILEEGDLLYFPPKWWHYVRSLSTSFSVSFWWRTSIPPPQGS

SEQ ID NO: 140869 - protein, 640 aa, Oryza sativa
  Clone ID: PAT_MRT4530_42026C.1.pep
TILYCNVLSFAASNPGLASTNLLIAKNRHLSPPSCLPSLVPLLPVLPYRHLLPLLLSFVPLDPLRHLHRHLLAHLPTSPLADAALSAYARLRLPHLAAQLLHSLRRRRGVRPSLQAANAVLSALSRSPSTLPQASLDVFRSLIELRLHPNHYTFNLLVHTHCSKGTLADALATLSTMQGFGLSPDAVTYNTLLNAHCRKGMLGEARALLARMKRDGIAPTQPTYNTLVSAFARLGWIKQATKVVESMTAYGFEPDLRTYNVLAVGLCQAGKVDEAFRLKDEMERLSTALPDVVTYNTLVDACFKWRCSSDALRLLEEMRDKGVKPTLVTHNIVVKSLCKEGKLEEALGKLEKIAEEGLAPDVITYNTLIDAYCKAGNVAKAFTLMDEMVGKGLKMDTFTLNTVLYNLCKMKRYEDAEELLHSPPQRGFVPDEVSYGTVMAAYFKEYNPEPALRLWDQMIERKLIPSISTYNTLIKGLCRMERLKEAIDKLNELVEKGLVPDETTYNIIIHAYCKEGDLENAFRFHNKMVENSFKPDVVTCNTLMNGLCLHGKLDKALKLFESWVEKGKKVDVITYNTLIQSMCKVGDVDTALHFFDDMEPSSADEADVKEHEGKPEAESSEKAQDNALETYMERLNGLCT

SEQ ID NO: 140870 - protein, 155 aa, Oryza sativa
  unsure (1)..(155): unsure at all Xaa locations
  Clone ID: PAT_MRT4530_42027C.1.pep
SLRVIVAELARQAAPTPPQQPITLQLDQRPPHTQEPXLRRKERAPHRQRAPEEQPLKTGRTGSGGTGGWMSRPRRRQKPQQACCPRPGPRGSRRRGALRRPTXGQIWRGDRNWRRHRRSRAEPHRRAADAAESPTTTPSPRHHRPAAATSPPSRH

SEQ ID NO: 140871 - protein, 98 aa, Oryza sativa
  Clone ID: PAT_MRT4530_42028C.1.pep
LSGERPIRKSSLASPLCADLLSVAEALNISFSSRSGSMLYSLPYIWWFSYYFFEIEEHSSSPSVKGSEHVQLQRKKKRKMEGKQHQITKQIVPSHHSV

SEQ ID NO: 140872 - protein, 329 aa, Oryza sativa
  unsure (1)..(329): unsure at all Xaa locations
  Clone ID: PAT_MRT4530_42029C.1.pep
MLHFQTLAALPGRSLRVIVAELARQAAPTPPQQPNTLQLDQGPPHTQEPSRSKLTARPTTSEQDAENPHATPXQTKELPGIDWKQPSLRREEHLRRKERAPHRQRAXEEQPLETGRTGSGGTGGRXWKSRPRRRQKPQQACCPRPGPRGSRRRGALRRPTGRAAADRMRATADPMPSSPTKPHGGCKPPANARGRRHRPSPSLAARRHPGQIWRGDRNWRRHRRSRAEPHRRAADAAESPTTTPSPRHHRPAAATSPPSRHCRHARARARWSQERWPRRRHPSASPGIAGDELRRRRSKEEGGGGAAVARVSPPSRRARATRGHQRVFF

SEQ ID NO: 140873 - protein, 125 aa, Oryza sativa
  Clone ID: PAT_MRT4530_4202C.1.pep
MKKRKKSKIKEKSSNELHALPPLAGHRASVPPLLRRDARSCPGSAPRPGPNRASRTRAEVAVAPSHAYAAALPHARQATAPTAGRHACTGPPPLRHRMAVCPHYGHFPSTVDAPRQHAAMRWLSG

SEQ ID NO: 140874 - protein, 140 aa, Oryza sativa
  Clone ID: PAT_MRT4530_42030C.1.pep
MCGAVVDFDLTMDTFGYEELPYIIWEGDKSPRAKAEADRCAKHQEFRTAAAEAWKSRWMRKRREFPGLEEGRGGVAQWWVVVRRRRGGGGAIGAVVADGRVGGRGRGWGGGTSQSLGRINGERWSAEGSSASSIVGGVTC

SEQ ID NO: 140875 - protein, 102 aa, Oryza sativa
  Clone ID: PAT_MRT4530_42031C.1.pep
MDSTTTARLNGTFVSDPGGGAVACRDCKILFQVVKFGDLNQQGFASNIFFIVNYTTNNMILTITRPTLNLPMLAMETIIGPTWQAYMIRSIPMDSLQLQLSE

SEQ ID NO: 140876 - protein, 908 aa, Oryza sativa
  Clone ID: PAT_MRT4530_42032C.1.pep
MKLSPSAGGVSDQPPSPPEVAEEQKCLNSELWHACAGPLVSLPAVGSRVVYFPQGHSEQVAASTNKEMESQIPNYPNLPPQLICQLHNVTMHADAETDEVYAQMTLQPLSPQELKDPFLPAELGTASKQPTNYFCKTLTASDTSTHGGFSVPRRAAEKVFPPLDFTQQPPAQELMAKDLHGNEWKFRHIFRGQPKRHLLTTGWSVFVSAKRLVAGDSVLFIWNDSNQLLLGIRRANRPQTVMPSSVLSSDSMHIGLLAAAAHAASTNSRFTIFYNPRASPSEFVIPLAKYVKAVYHTRISVGMRFRMLFETEESSVRRYMGTITGISDLDPVRWMNSHWRSVKVGWDESTAGERQPRVSLWEIEPLTTFPMYPSPFPLRLKRPWPTGLPSLYGGKEDDLASSLMWLRDSQNTGFQSLNFGGLGMSPWMQPRLDSSLLGLQPDMYQTIAAAAALQNTTKQVSPAMLQFQQPQNIVGRSSLLSSQILQQAQPQFQQMYHQNINGNSIQGHSQPEYLQQPLQHCPSFNEQKPQLQPQQQQQESHQQQPQHQQMQQQKHLSNFQTVPNALSVFSQLSSTPQSTPSTLQTVSPFSQQHNFPDTNISCLSPSNVSSMHDTLRSFPSEAASDLPGVPRITPVPVSDPWSSKRVAVESTITSRPHDISSQIENFDLTPSSIPQNSTLAPLPGRECLVDQDGSSDPQNHFLFGVNIDSQSLLMQDGIPSLHNENSSSTIPYSTSNFLSPSQDDYPLSQTLTTPGCLDESGYVPCSDNADQVKRPHATFVKVYKSGTVGRLLDITRFSSYHELRSEVGRLFGLEGQLEDPLRSGWQLVFVDREDDVLLVGDDPWQEFVNSVSCIKILSPQEVQQMGKPGIELFSTSARRLGNSCDNYMSRQESRSLSTGIASVGSVEF

SEQ ID NO: 140877 - protein, 79 aa, Oryza sativa
  Clone ID: PAT_MRT4530_42033C.1.pep
ILFFMPFSEIQLTAVSAPSHFESFRMLSQPSIRRDSGEVVRYPMLFGNSENQQRGEFHHLKDREGSGTSFPVNWANSAG

SEQ ID NO: 140878 - protein, 500 aa, Oryza sativa
  Clone ID: PAT_MRT4530_42034C.1.pep
MAASRSPPPSSPWPSWVLLDPNVSDYRFCIGPTAKGWKVVDFTNKNYGAGKKYGQLMAECLKLYVRLADGDAGLDQSELAITANDGVIRSIIEEELTEQTGCLKMDLHGIVHASCVTGYVEIADKNLIILAVSYSFARDNYYLIYDATLRSLSMIPHVSAHPYCQAYYPCDPLPVRYGDEYTLVLFARNLEYQKEEQGCNYYHRDVLCLWPPPPSSEKPPLLLRDTPGPSIEPWHLKEPVFPEGKTPSEFRHHVKFTSTSHAFWADLTKGVLCCRCSDLFDSYHVNFSFIELPHGCECDALDMPDTAPAEIYRTMGCTSGSSIKFVSISFEDSMPVDEKTMTVWTLDTASWGWTKDVELSLGSLWELEDFKKNGLPETQPVYPFLRKEEDEDNALYFTLSSSLLGPISECGEPAVHHMCRFDMRSMRLESSPLSFPPDMIVPQRLFGSEFFRYLDRHVQVPGCGKGKRKLNEDYILMLICPSEFLGLCAQQWSEWKSMQK

SEQ ID NO: 140879 - protein, 80 aa, Oryza sativa
  Clone ID: PAT_MRT4530_42035C.1.pep
MAGRPCGRAGGPHGTAGRRRYETAKTAGARSQVAEEPMGVGVKNTTGLATEVSRRMGTGVGGSARGHTEDAGARAMGGSA

SEQ ID NO: 140880 - protein, 1153 aa, Oryza sativa
  Clone ID: PAT_MRT4530_42036C.1.pep
MAMRGEPWRRQEGEQAQAEADRERELDLFRSGSAPPTVEGSMGALHAAAAADVFLEDELRADPAYHSYYYSNGNINPRLPPPLLSKEDWRSAQRLRPGLGGIGDGRKPRGGGGGRGGGGAGGMGPGDGLIGMPGLEIGRQNSFSGFGTIKRLSVAKVLVLKLLIILFKAKEITSDLYMLQDDSYQHDTDRQGANCNGTDLLSSSKVQYGLHRETGAISGLHSDSKAPCLPENQNESSHSYASIIGSSLSRSASPDPELVRRVPSPCLPPIGVKLGATDKKNNVGSSSFNCSSPNIIESDDLVSALSGMNLSSSRAMNGNTMDQSKLHQDVDDVRKFLFDQYMDQTNGNQRHSYMKRSEQGHVKVPQEYSGASMNPSVMRSQINAGGFTSFNNSSVGSGFASPRLGSRSPGGSLSSRQNLTGASNLPNYVGIGSPTAASAHQMPVDPLYVQFLRAAEIAALAANCEDPLMDRANLGGSYMDLFGPQKAYLSPLLQSQKQYSYYGNLGVGLGYAGNSLTSPILPSSPGGPGSPLRHGDRSMRYPSGMRNFGGSFGSWNSDLGGKMEANLVPSLLEEFKSNKSKSYELSEIAGHVVEFSADQYGSRFIQQKLETASTEEKDMVFAEIMPQALTLMTDVFGNYVVQKFFEHGSSAQIKELADQLIGRVLALSLQMYGCRVIQKAIEVVDLDQQTKMVAELDGQVMRCVRDQNGNHVIQKCIECIPQHAIQFIVSTFYGQVVMLSTHPYGCRVIQRVLEHCDDPKTQQIMMDEILQSVCLLATDQYGNYVVQHVLEHGKPHERSAIIEKLIGQIVQMSQQKFASNVIEKCLAFGNPVERQVLIGEMLGSSNESEHLEVMMKDQFANYVVQKVLETCDDQQREMILTRIKAHLNTLKKYTYGKHIVARVEKLVAAGENPSIMGEEAPEEYELGGGEDERVMEWETGLPGADELTPLSQPLVPAGLAAAFRIPPEPGRTLLDVHRASAATVSRLRRASSSSSSSFPAFASKGAGTGADEAESGGGADGGNGNTNNSSSKRARLVWTPQLHKRFVEVVAHLGMKNAVPKTIMQLMNVEGLTRENVASHLQKYRLYVKRMQGLSNEGPSPSDHIFASTPVPHASLHDQVPSPYHPHPHHHSYNNAAYAATVSSYHHYHHANH

SEQ ID NO: 140881 - protein, 51 aa, Oryza sativa
  Clone ID: PAT_MRT4530_42037C.1.pep
YAIQEEKGPLQTQFADIEKSNEDPNQAPQPREPAQEFDTDAHMEKQTAMEA

SEQ ID NO: 140882 - protein, 57 aa, Oryza sativa
  Clone ID: PAT_MRT4530_42038C.1.pep
SPAPRPSTAASPSPIAPAPCAGYPRRRRSRPCCSTPGVAPTTPSTATARSRRSAPAE

SEQ ID NO: 140883 - protein, 152 aa, Oryza sativa
  Clone ID: PAT_MRT4530_42039C.1.pep
PRVRPRVRSKKKRRQMRNRDSAMKSRERKKMYVKDLETKSKYLEAECRRLSYALQCCAAENMALRQSLLKDRPVGAATAMQESAVLTETLPLVSLLWLVSIVCLLPVPGLPNRNPVARSSAGRDLATVTGKKTSSEQQLEETLLLHGRRKGS

SEQ ID NO: 140884 - protein, 87 aa, Oryza sativa
  Clone ID: PAT_MRT4530_4203C.1.pep
MEQLASLILHPYFPICPWECSQSSRCGRSTFQPANLESCRTKPKPKVKISNSCTKSVARCKDTGRRLLAAGYLASGTGQRPQQEVEP

SEQ ID NO: 140885 - protein, 46 aa, Oryza sativa
  Clone ID: PAT_MRT4530_42040C.1.pep
SYISDFQNYFSNIDGDFALIPGLMSNSLCDQQTVVRNGELKLCCSI

SEQ ID NO: 140886 - protein, 144 aa, Oryza sativa
  Clone ID: PAT_MRT4530_42041C.1.pep
TRQFVILVPGIPIRASPRHHSPSPLLPPPPPRRRRAARRRNPPRRPPPPPRGPPPSGTSRSPTAPPPGKGWAAGSSPTPATPPPHRAAVTGRRGPRRRSRRRRRRRRRRRGARRGRGRRRTLHPWRSRWRYFCLSRWVAARGCV

SEQ ID NO: 140887 - protein, 341 aa, Oryza sativa
  unsure (1)..(341): unsure at all Xaa locations
  Clone ID: PAT_MRT4530_42042C.1.pep
RARKATKLRAKRGRAGAAAPRPSRAMAIPKVDLRGLEPGTPGWEAARAAVTASMVSHGCVVVAHGALGPELREALFSRAARELXFALPAEAKRRNVSTVGPYRGYITNTPGMNWESLHVGAAADAGRVPEFAGLLWPDGNPEFWCSSSDTIVSFAKKMTELERAVERMTLEGLGVGEDHIASHLDAHDDAVRLSRYGPPPDAASAMSMGEHRDDTVITIIVQHEVEGLEVQASDGSWHTIPPEPDTVAFMAGELFTVVTNGRVPACVHRVRTPSHRERLVALFTTRCKGGTVVSAMDELVDGDHPLAYRPCNEDEYVQFRHSEEGGRFSEPLKAFCGVDVR

SEQ ID NO: 140888 - protein, 50 aa, Oryza sativa
  Clone ID: PAT_MRT4530_42043C.1.pep
HASAHASAHASGHFSPPGHWYKHPGLTKYSSRGRQFGVVHILLTRNQRCS

SEQ ID NO: 140889 - protein, 138 aa, Oryza sativa
  Clone ID: PAT_MRT4530_42044C.1.pep
MIPKAENIESMEAAGGQLEAALLLIMQRHHHHSLHQRKITDREKIDAVRSAARVADLLVATVDGGAQELYINERRIEIEARALLATIARYKKQTDQWLAATNAINSVLKEIGDYENWMKIMDFDCKSINAAIRNIHHS

SEQ ID NO: 140890 - protein, 660 aa, Oryza sativa
  Clone ID: PAT_MRT4530_42045C.1.pep
MSSSASLSTAASAEYAEHLSNLVAIPSLSHKNHYFLGPIGNLDPTDFIIGETNRIPFRLANPNLGHWKNTFKSWPSLEKPTPDKSWTTWYQRISASKKTHWDEIGIGQALALTIANSAKDEPLMAAATYFWSNTINAFLFNQGPMTPTLIDIIMITGLDITSSANPMSMNTKNQFDFKTKSIGGWSDYVVAYMGKGPVTPREHTWLNLVVMKVVNRPSVTEAEFPRLKPIVEDDGEERTHRRCMSYVEYASTLANAGAKLSAELLKDWFCSFYEGFQKDARVWFLYEDSADLELPLDFRFEDINHERYQTSKEVFTAAISPCILPVDLFPDVIPQTTESSPKYQSNSGRNIEYAPGLIPNGGGLSPPVIGYHAPKVSTLLQGAIRKPTDVTKKRKTRSSAVSTLTLAPKKKAKSKKTKPTDDLPALDPSIEQALDEEDIEDDVDQAAAEPPPTPSSPVQKSSSDRTPSAVGSHHIVEEEQPAAPAIPRTLEDISRRLEASSLDSLVVDYGSIRIRLHEVQALIPEELADVLTPAAYLEQHQFKLEKAKLRLAERRERKEIEATIQVNRQLVHEEKSNSISYPKLEECNAELDMEHKKLADLPKSVEEQKARLKSAINNVADLTKSLKIIPRTDAQDAQAIEEVEQIRQRAISAIQQYLSQ

SEQ ID NO: 140891 - protein, 588 aa, Oryza sativa
  Clone ID: PAT_MRT4530_42046C.1.pep
MRVELPGGGWRGSSPMRRRMRARSARLTGMLRRRRSGWLWWPHGRGGRRRIPKNIFRFIYMCEKDWHNYLHPITGARDHTSIPRDQRSRRMDVRHRLALTAQRAAPRWHVGRNSPKAVPYTPVMWWSSVPGSHLGCQQLSTLISGSRIGGSDGAMRTCIPDKNAPISSSSFVPCLKNLPAAIAGFTGAPAEVRNRGEIIVGSESGWAGGRDDASDVNARRILGATPSPDASYRRPRRRERRRPWTAWAGIDTTTVAARSERMAGIVVGRACWRWEVVRMSSSPWDHADECLHLHFILPRVLTWRRCRSCSPRLDAAAAVFLFRSWKRHRPPIAAACPGFPNRRGRGYRAPAEVTAVLILPYPAVSPVTTVTVRLPTVTDAPRKYVPCWHFVEHLVGVALLLPPPLNPCAVTATRLRPRRQRSAHGSPSQPSSHVRRPATARTPTDADVNAADADVDATDSPVPPWPAAGPFGPDSAKLRRSRGGPGPLAPRKYVPCWHFVEHLVGVALLLPPPLNPCAVTATRLRPRRQRSAHGSPSQPSSHVRRPATARTPTDADVNAADADVDATDARAPAAAAVARAQPPSACLP

SEQ ID NO: 140892 - protein, 53 aa, Oryza sativa
  unsure (1)..(53): unsure at all Xaa locations
  Clone ID: PAT_MRT4530_42047C.1.pep
IEILGNRVGPTFQHRQVTYLNDSLPXLYYAGRLQCIDGMQIDRDLVFSLMEQN

SEQ ID NO: 140893 - protein, 56 aa, Oryza sativa
  Clone ID: PAT_MRT4530_42048C.1.pep
MACNDQAVFSGSATKVGRRWQLPEEELELRAAMEARRQVASGGEKGDRRQEAGPRT

SEQ ID NO: 140894 - protein, 786 aa, Oryza sativa
  Clone ID: PAT_MRT4530_42049C.1.pep
MSSSTNPSDTPSAEYAEHLSNLVAIPSLSYENYYFLGPVDNPDSTEFIIGETNRIPFRLTNPDLGHWKNTFKSWPSLEKVPPEKSWTTWFKRVSASKRVHWDEIGIGQELDLTIVNSAKDEPLMATASYFWSNTINAFLFNQGPMTPTLIDITMITGLDVTSSANPMSMNTKNQFDFKTKSIGGWSGYVAAYMGKGPITPREHIAFLLMWLEKFLFCGFSCGPTTNWQFVAEALKSKKQFPLGKILLDYLYQMLNNASAKIAVGSIVEEGGPWWLLQTWLNLVVIKVVNRPSVTKAEFPREIFIAAISPCILPVGIHQGRNIQVSYEFYHPTSSARQLGLGQLPIDLFFANKIQCRGEISSTLMMDRLLNLQGPPLGNIDNIELAGFRSRNFDRWWGEWKLHLFHQSATMYMTDLFPDVIPQTTKSSPPHQSNSGRNIEYALGLIPNGGGLSPPVIGYHASKVSTLLQGAIREPTDVTKKRKTRSSAVSTLTLAPKKKAKSKKTKPTDDLSALDPSIEQALDEEDIEDDVDQAAAEPLPPPSSPVQQPSSDRTPSAVGSHHIVEEEQPAAPAIPVLADLFSFDIKDYLVEAEEDTSSKALAPLSDDAKKTLEDISRRLEASSLDSLVVDYGSIRTRLHEVQALIPEELADVLTPAAYHEQHQFKLEKAKLRLAERRERKEIEATIQLSEGPIKSNIDRLEARKIDLLAQLEECNAELDMEHKKLADLPKSVEEQKARLKSAIKNVADLTKSLKVISGTDAQDAQAIEEVEQIRQRAISAIQQYLSQ

SEQ ID NO: 140895 - protein, 53 aa, Oryza sativa
  unsure (1)..(53): unsure at all Xaa locations
  Clone ID: PAT_MRT4530_4204C.1.pep
RTRGGAQSAHDAEIRALLYQHGLSPVASYXVQGGGAHCAHLRAAERAGEEGGQ

SEQ ID NO: 140896 - protein, 986 aa, Oryza sativa
  Clone ID: PAT_MRT4530_42050C.1.pep
MSSSTSPSTAPSAGTLSKKVHWDEIGIGQALAFTIANSAKDEPLMAAATYFWSNAINAFLFNQGPMTPTLIDITMITGLDVTSSAKPMSMNTKNQFDLKTKSIGGWSGYVAAYMGQGSVTPREHVAFLLMWLEKFLFCGSSCGPTTNWHSVAEALESKKEFPLGKILLGYLYQILNNASAKIAVGSIVGAGGPWWLLQTWLNLIVMKVVNRPSVTKAEFPLPEPIVEDDGEERTHRRCMSYGEYASTPTDAGAKLSAELLKDWFCSFYEGFKKDARIWFPYEDSADLELPSDFRFEDINHEKFQKSREILIAAISPCIFSVGIHHGRNIQVSYEFYHPLGLGQLPIGLFFADKIQCRGQITSTLMMDRLLNLPGPPLGSIDNIELAGFRSKNFDRWWGKWKMHLFYQSASMYMTDLFPDVIPQTTESSPPHQSNSCRNIEYASGLILNGGGLSPPFIGYHAPKTSTFLHGLTREPADAGKKRKTRSSAMSTLALAPKKKTKFKKTQPQPTDMSTDDLPALDPSIKQALDEEEIGEDVDQAVAKMSDTERTLSALPKQTPPTPSAPKKKTTVKKKPAATIVKSAPPQSSSNQTPSAVGSHHVEEEEQPAASAIPALADLFSFDIRDYLDEAEEDTSSKAQAPLSDDVRKTLEDIAHRLEASSLDSLVVDCGSIRTRLHEVQALIPEDLADVLTPAAYLEQHQFKLEKAKLRLAERRPIKSNIDRLEARKIELLAQLEECNAELDMEHKKLADLPKSIEEQKARLKSAIKNVADLTKSLKVISGTDAQDAHAIVEGACFEFAYTIKPYATNNQAEYEAVLKGLQLLKEVEADTIEIMGDSLLVISQLAGEYECKNDTLMVYNEKCQQLMKEFRLVTLKHVSREQNIEANDLAQGASGYKLMIKDVKVEIAAMTADDWRYDVHQYLHNPSQSASRKLRYKALKYTLLDDELYYRTIDGVLLKCLTADQAKVAVSEVHEEILVLINRLIR

SEQ ID NO: 140897 - protein, 52 aa, Oryza sativa
  Clone ID: PAT_MRT4530_42051C.1.pep
MTMTSDDDGDDDYNHEEGERNDPVVKFYNSGIQGVNEVLRFHFNVNEEIAGD

SEQ ID NO: 140898 - protein, 840 aa, Oryza sativa
  Clone ID: PAT_MRT4530_42052C.1.pep
MSSSTSPSTAPSAEYAEHLSNLVAIPSLSHTNHYFLGPIGNLDPTDFIIGETNRIPFRLANPNLGHWTNTFKSWPSLIKPTADKSWTTWYQRVSASKKVHWDEIGIGQALALTIANSAKDEPLMAAATYFWSNTINAFLFNQGPMTPTLIDITMITGLDVTSSANPMSMNTKNQFDFKTKSIGGRSGYVAAYMGQGSVTPREHVAFLLMWLEKFLFYGSSCGPTTNWQFVAKALESKKEFPLGKILLGYLYQMLNNASAKIAVGSIVGAGGPWWLLQTWLNLIVMKVVNRPSVTKAEFPLPEPIVEDDGEERTHRRCMSYGEYASTPTDVGAKLSAKLLKDWFCSFYEGFKKDARIWFPYEDSADLELPSDFRFQDINHEKFQKSREILIAAISPCILPVGIHQGRNIQISYEFYLPMNLARQLGLGQLPIGLFFADKFQCRGQITSTLMMDRLLNLQGPPLGNIDNIELAGFRSKSFDRWWDEWKLHLLHQSASMYMTDLFPDVIPQTTESSPPHQSNSGKNIEYASGLILNGGELSPPVIGYHAPKTSNLLHGLTREPADAGKKRKTRSSAVSTLVLAPKKKAKFKKTKPTDKPADDLPALDPSIEQALDEEEIGEDVDQAVAEMSDTERTPSASPKQTPPTPSAPVHFTRKKKTAVKKKSTATIVKSAPPQPSSDQTPSAVRSHHIEEEEQPAAPAIPVLADLFSFDIRDYLDEAKEDTSSKALAPLSDDVRKTLEDISHRLEASLDNLVTNCGSIRARFTDIQALLPDELADALTPAVCLEQHRFKLEKARQRLADHRERKDIKATIQHNRQLVHVEKSKLDQLSGGPIKSNIDRL

SEQ ID NO: 140899 - protein, 109 aa, Oryza sativa
  unsure (1)..(109): unsure at all Xaa locations
  Clone ID: PAT_MRT4530_42053C.1.pep
PVHPTLPNFPWHYLPHISDXIFYSNKQRAQGNYTYFKGVMIGNALMDNKTDHTGMIYYPWDPTLISDPVYAHVKKYCNSFMENMTDACDNTLTKYFSVYRLIIMFNLYT

SEQ ID NO: 140900 - protein, 905 aa, Oryza sativa
  unsure (1)..(905): unsure at all Xaa locations
  Clone ID: PAT_MRT4530_42054C.1.pep
MSSSTNPSDAPSAEYAEHLSNQVAIPSLLHKNHYFLGPIGNLDPTDFIIGETKWIPFRLANSNLGHCKNTFKSWPSLEKPTPDKSWTTWYQCVSASKKVHWDEIGIGQALALTIANSAKDEPLMAAATYFWSNTINAFLFNQGPMTPTLIDITMITGLDVTSSANPMSMNTKNQFYFKNKSIGGWSGYVAAYMGQGSITPREHVAFLLMWLEKFLFCGSSCGPTTNWQFVAEALESKKEFPLGKILLGYLYQMLNNVSAKIAVGSVVGAGGPWWLLQTWLNLIVMKVVNRPSVTEAEFPLPEPIAEDDGEERTHRRCMSYGEYASTPTDAGAKLSAELLKDXFCSFYKGFKKDARIWFPYEDSVDLELPSDFRFEDINHEKFQKSREVLIAAISPCIHPVNIHQGRNIQVSYEFYHPMSSARQLGLGQLPIGLFFANKIQCRGQITSTLMMDRLLNLPGPPLGSIENIELSXFRRKNFDRWWGEWKLHLFHQSATMYMTDLFPDVIPQTTESSPPHQSNSGKNIEYASGLIPNGGGLSPPVIGYHAPMTSTLLHGLTREPADAGKKRKTRSSAMSTLALAPKKKSKFKKAKPTDKLADDLPTVDPSIEQALDEEEIGEDVDQAVAEMSDTERTPSASPKQTPPTPFAPVHFTRKKKTVVKKKSATMIAKLAPSQPPLASPPVQQSLSVQTPSAAGSHHIEEEEQPTAPAIPVIADLFSFDIRDYLDEAEEDTSSKALAPLSADVRKTLEDNLADVLTPAAYLEQHQFKLEKAKLRLAERRERNEIEATIQANRXLVHEEKTKLDQLSEGPIKSNIDRLEARKIELLAQLEERNAELDIEHKKLADLPKSIEEQKARLKSAIXNVVDLTKSLKVISGTDAQDAQAIEEVEQIRQRAISAIQRYLSQ

SEQ ID NO: 140901 - protein, 646 aa, Oryza sativa
  Clone ID: PAT_MRT4530_42055C.1.pep
MDDLKAILARPIQLAEQVIKWAEEAQTCRQECLDLKAKVERLASLLRQAARADLYERPARRILDDTGKALDKAAALLDRCRGHGLIRRVFTIIPAGSFKKTSNQLDNSLGDLSWILRVSNYSNADDLDDDHIGLPPIAQNEPILFLIWEQIAVLYTGNPEARADAAASIVSLARDNDRYGRLIIEEDGVPPLLRLIKEGSSEGQETAALAIGLLGRDPECVELMVLAGVCTAFAKILKDAPMKVQGMVAWAVSELATNHPKCQDAFLQSNVIRLLVSHLAFETVQEHSKYAVASKMSIHTVLMDKKNNGSTSSSHHHDALDAVDHAAATTTTTTAMAAKPTGGGAASSSGAGAGSAGTGTTSSSSVSVGGTVAGTKQHNASLSGTSTKAREFEDPETKAYLKANAAKALWQLAMGNAAVCKNITESRALLCLSVLLEKGVDDVRYNSAMALMEICLVAEQNADLRRSAFKPTSPAARAVVDQLLRVVHKADYDELLIPCIISLGCLSRTFRATETRIIGPLVNLLDEREADVSREAAAALTKFACTENYLHVDHSKAIIHHGGAKHLVQLVYFAEQAVQIAALLLVCYIAHNVPDNEELAQAEILTLLEWASKQAAMVQDPLIENLLLEAKIRMELYQSRGAKGYY

SEQ ID NO: 140902 - protein, 918 aa, Oryza sativa
  Clone ID: PAT_MRT4530_42056C.1.pep
MKKEMRGFGCRCPWRPSPSIVPSAEYAEHLSNLVAITSLSHKNHYFLGPIGNLDPSDFIIGETNMIPFGLANPNLGHWKNTFKSWPSLEKPTPDKSWTTWYQRVSASKKVHSDEIEISQALALTIANSAKDEPMMAAATYFWSNTINTFLFNQGPMTPTLIDIIMITGLDVTSSANPMSMNTKNQFDFKTKSIGGWSGYVAAYMGQGSVTPREHVAFLLMWLEKFLFCGSSCGPITNWQFVAEALESKKRFPLGKILLGYLYQMLNNASAKIAVGSIVGADKFPLPEPIVEDDGEERTHRRCMSYGEYASTPTDAEAKLSAELLKEWFCSFYEGFMKDARIRFPYEDSADLELPSDFRFEDINHEKFQKSREVLIAAISPCILPVGIHQGRNIQVSYEFYHPMSSAKQLGLGQLPIGLFFADKIQYRGQITSTLMMDRLLNLLGPPLGSIDNIELAGFRSKNFDRWWGEWKLHLFHQLASMYLTDLFPDVIPQTTESSPSHQSNSGKNIEYAPGLIPNGGGLSPPIIGYHAPKTSTLLHGLTRDPADAGKKRKTRSSAVSTLALAPKKKTKFKKTQPTDKPTDDLPALDPSIVQALNEEEIGEDVDQAVAEMSDTERTPSASPKQTPPTPSAPVHFTRKKKTAVKKKPAATIVKSAPPQLSSDQTASAVWCHHIEEEEQPAAPAIPLLLFPKLSLLVLAGLFSFDIRDYLDEAEEDTSSKALAPLSDDVRRTLEDISHRLEASSLDSLVVDCGSIRTRLHEVQALIPEDLADVRTPAAYLEQHQFKREKAKLRLAERRERKEIEATIQANRQLVREEKTKLDQLSEGLIKSNIDRLEAHKIELLAQLEECNAELDMEHKKLADLPKSIEEQRARLKSAIKNVADLTKSLKVICGTDAQDAQAIEEVEQIRQRAILAIQ

SEQ ID NO: 140903 - protein, 931 aa, Oryza sativa
  Clone ID: PAT_MRT4530_42057C.1.pep
MSSSTSPSTAPSAEYAEVSPHQLDPFSSHEIDFSFSPHVFCFPIPLDLLHLSNLVAIPSLSHKNHYFLGLIDNLDHTDFIIGETNRIPFRLANPNLGHWKNTFKSWPSLEKPTPDKSWTTWYQRVSASKKVHCDEIGIGQALALTIANSAKDEPLMAAATYFWSNTINAFLFNQGPMTPTLIDITMITGLDVTSSANPMSMNTKNQFDFKTKSIGGWSGYVAAYMGQGGSSCGPTTNWQFVAEALESKKEFPLGKILLGYLYQMLNNALAKIAVGSIVGAGGPWWLLQTWLNLIVMKVVNRPSVTEAEFPLPEPIVEDDGEERTHRRCMSYGEYASTPTDAGAKLSAELLKDWFCSFYEGFKKDAQIWFPYEDSADLELPSDFRFEDINHEKFQKSREILIAAISPCILPVGIHQGRNIQVSYEFYHLMSSARQLGLGQLPIGLFFADKIQCPGQITSTLMMDRLLNLLGPPLGSINNIELAGFRSKKFDRWWGEWKLHLFHQSTSMYMTDLFPDVIPQTTESSPPHQSNSGKNIEYASGLIPNGGGLSPPFIGYHAPKTSTLLHGLTREPADAGKKRKTRSSTMSTLALAPKKKTKFKKTQPQPTDMPTDDLPALDPSIEQALDEEEIGEDVDQAIAEMSDTERTPSASPKQTPPTPSAPVHFTRQSSSDQTPSAVGSHHVEEEEQPAAPAIPLLFFPKLSLHALADLFSFDIRDYLDEAEEDTSSKALAPLSDDVRKTLEDISHRLEASSLDSLVVDCGSIRTQMHEVQSLIPEDLADVLTPAAYLEQHQFKLEKAKLRLAERRERKEIEATIQANRQLVHEEKTKLDQLSEGPIKSNIDRLEARKIELLAQLEECNAELDMEHKKLADLPKLIEEQKARLKSAIKNVADLTKSLKVISGTDAQDVQTIEEVEQIRQRAILAIQRYLSQ

SEQ ID NO: 140904 - protein, 42 aa, Oryza sativa
  Clone ID: PAT_MRT4530_42058C.1.pep
AFLPSVRPPKPRRLDHPNTLSPSILYGSFNDFSGGTLFFLSK

SEQ ID NO: 140905 - protein, 437 aa, Oryza sativa
  unsure (1)..(437): unsure at all Xaa locations
  Clone ID: PAT_MRT4530_42059C.1.pep
MSSSTSPSTAPSAEYAEHLSNLVAIPSLSHKNHYFLGPIGNLDPTDFIIGETNRIPFRLANPNLGHWKNTFKSWPSLEKPTPDKSWTIWYQHISATNSAKNEPLMAAATYFWSNTINAFLFNEGPMTPTLIDIIMITRLDVTLSGNRMSMNTKNHFKTKSIGGWSGYVAAYMGKWPVTPREHVAFLLMWLEKFLFCGSSCGPTNQLAICSRSFRIIXQFPLGKILLGYLYQMLNNASAKIAVGSVVGAGGPWWLLQTWLNLVVMKVVNRPSVTEAEFPRLEPIVEDDGEERTHRRCMSYGEYASMPTDARAKLSAELLKDXFCSFYEGFQKDARVWFPYEDSADLELPSDFRFEDINHEKFLXATISPCILPVGIHQGRNIQVSYEFYHLMSSARQLGFGQLPIDLFFADKIQCRGEISSTLMMDRLLNLQGPPIGS

SEQ ID NO: 140906 - protein, 282 aa, Oryza sativa
  unsure (1)..(282): unsure at all Xaa locations
  Clone ID: PAT_MRT4530_4205C.1.pep
MTSPTAAAARRSRRLGRRTLAGERRHYGTNGGHQHVEDDAANSPVTKTAAEEERTATVTRLKRRRRSGRRRRRCSGGLRRWRSGGRGRRRLGDHDGGLPERRRXPERRRRTAGATAATAALGHTVLELFRRREAKARVATGRGGTGGPFKWARRRRQRPTATATAKESSGRTNPRRTRIQLFPRRFGQRFQRRKGRGDPEDHFPSINSAGEGKERPDWKXGGGGAKLGFRPEXTTTPTGGTHLSATARARARAAAAADWAGWAEEREXGFGPTFGPKPKEDF

SEQ ID NO: 140907 - protein, 891 aa, Oryza sativa
  Clone ID: PAT_MRT4530_42060C.1.pep
MAMSSSTSPSTAPSAEYTEHLSNLVAIPSLSHKNHYFLGPIGNLVPTDFIISETNRIPFRLANPNLGHWKNTFNKKVHWDEIGIGQALALTIANSAKDEPLMVAATYFLSNTINAFLFNQEPMTPSLIDITMITGLDVTSSANPMSMNAKNQFDFKTKSIGGWSGYVAAYMGQGSVTPREHVAFLVMWLEKFLFCGSSCGPTTNWKFVAEAFESKKEFPVGKILLGYLYQMLNNASAKIAVSSIVGAGGPWWLLQTWLNLIVMKVVNRPSVTEAEFPLPEPIAEDDGEERTHRRCMSYGEYASTPTDAGAKLSAKLLKDWFCSFYEGFKKDARIWFPYEDSANLELPSDFRFEDINHEKFKKSREVLIAAISPCILPVGIHQGRNIQVSYEFYHPMSSARQLGLGQLPIGLFFVDKIQCRGQITSTLMMDRLLNLPGPPLGSIDNIELAGFRSKNFERWWGEWKLHLFHQSASIYMTDLFPDVIPHTTESSPPHQSNNSKNIQYVPGLILNGGNQPMQAKNRKTRSSAVSTLALAPKKKVKFKKTMPTDKPADDLHALDPSIELALDEEEIGEDDDQAVAEMSDTERTPSASPKQTPPTPSAPVHFTRKKKTAVKKKPAATIVKSAPPPPLPSPPVQQSSSDQTPSAVGSHHVEEEEQPAAPAIPVLADLFSFDIRDYLDEAEEDTSSKALAPLSHDVRKTLEDISHRLEASSLDSLLVDCGSIRTRLHEVQALIPEDLADVLIPAAYLEQHQFKLEKAKLRLAERRERKEIEATIQANRQLVHEEKTKLEQLSEGPIKSNIDRLEARKIELLAQLECNAELDMEHKKLADLPKSIEEQKSRLKSAIKNVADLTKSLKVISGTDAQHAQAIEEKEQIRQRAILAMQRYLSQ

SEQ ID NO: 140908 - protein, 841 aa, Oryza sativa
  Clone ID: PAT_MRT4530_42061C.1.pep
MSSSTSLSIAPSTEYAEISSHRLDPFPSHEIDFSFSHYVFCFPIPLDLQHLSNLVAVPSLSHKNHYFLGPIGNLDPTDFIIGEINRIPFRLANPNLSHWKNTFKSWPSLEKPTPDKSWTTWYQHISANVTSSANPMSMNTKNQFDFKTKSIGGWSGYVVAYMGKGPVTPREHVAFLLMWLEKFLFCGSSYGPTTNWQFVDEALESKKQFPLGKILLGYLYQMLNNASAKIAVGSIVGAGRPWWLLQTWLNLVVMKVVNRPSVTEAEFPRLEKIVEDDGEERTYRRCMSYGEYASTPADAGAKLSAELLKDWFCSFYEGLQKDARVWFLYEDSADLELPLHFRFEDINHERYQTSREVFIAAISPCILPVGIHQGRNIQVSYEFYHPTSSARQLGFGQLPIGLFFADKIQCRGEISSTLMMDRLLNLQGPPLGSIDNIEFAGFRSRNFDRWWGEWKLHLFHQSATMYMTDLFPDVIPQSNSGRNIEYAPGLIPNGGGLSPPIIGYHAPKVSTLLQGAIKEPTDVTKKRKTRSSAVSTLTLAPKKKAKSKKTKPTDDLPALDPSIEQALDEENIEDDVDQAAAKPPPPPSSPVQQSSSDRTPSAVESHHIVEEEQPAAPSIPALADLFSFDIKDYLDEAEEDTSSKAQAPLSDDAKKTLEDISRRLEASSLDSLVVDCGSIRTRLHEVEALIPKELAGVLTPAAYLEQHQFKLEKAKLRLAECHERKEIEATIQVNRQLVHEEKVKLDQLSKGPIKSNIDRLEARKIDLLARLEECNAELDMEHKKLADLPKSVEEQKARLKSAIKNVADLTKSLKIILGTNAHDAQAIEEVEQIRQRAISAI

SEQ ID NO: 140909 - protein, 456 aa, Oryza sativa
  Clone ID: PAT_MRT4530_42062C.1.pep
MATGGNSLPSPSCADDKKRRVCYYYDPGIAHIKFSDDHVMVPARVAMAHSLVGVYGMLGDMRRLRTRPATEAEIRRFHSPEYVDLLRDLTPESYFNDAALRQKAEDDHGIGGDDDCPAFDRLWKYCRGYPGGSFAAARALVDGASDIAINWSGGMHHASACKATGFCYVNDIVLAINELLGTFRRVIYVDIDAHHGDGVQNAFLDSNRVMTLSFHRYGKITPHKDFFPGSGAINEIGDGAGEHYSVNVPLDAGVRDDVYHTLFKPIVGKAMEVFQPEAIVLQCGADSLSGDRLGGMELSVRGHAECVSFLRGFNLPLLLVGGGGYTINHVASAWCYETAVAVGKERKLPDDIEIPSHGYELMYKNQGNKLHYKTSTATAARKRSSSTEVTKGKVLEHLSQVKRAPSVQFQERRGGDNAAGVGLYYERPPSLEDDEPAQRLHRLCFPGLTKRIRLND

SEQ ID NO: 140910 - protein, 103 aa, Oryza sativa
  Clone ID: PAT_MRT4530_42063C.1.pep
ASKFFLKKLVSKFSPKVFGKKFKKSLSSIFPLQNVFSPKVKFFKAPNFYFGNLMEVPGYYKKNVGIKLKRPFKIKKGVQGEFPPLNKKWFSKFLSLLKNLGCS

SEQ ID NO: 140911 - protein, 80 aa, Oryza sativa
  Clone ID: PAT_MRT4530_42064C.1.pep
DEDILKSAPLEGMLSQVRPWDTPGMGPSYDIRLRIIANTTYEGCCDSIPAIVGPRDHRPWAQSDIGRKHRGCENSTSWGI

SEQ ID NO: 140912 - protein, 119 aa, Oryza sativa
  unsure (1)..(119): unsure at all Xaa locations
  Clone ID: PAT_MRT4530_42065C.1.pep
SFELTLDPFTXYELLVVAPVRXIVSPELGIGFAPIGLANMLNAGGAVQGFEAARKDGDVAAEVAXVKGAGEMVAYSSARPRLCKVNGQDAEFKYEDGIVTVDVPWTGSSKKLSRVEYFY

SEQ ID NO: 140913 - protein, 187 aa, Oryza sativa
  Clone ID: PAT_MRT4530_42066C.1.pep
MAYYAIAPLMCVLPLIQNELCMHLFLHQAWGGPTKNQYAVVIPPDSPNGFGGTAANDWVITDGLDASRSNTVGRGQGFTINNSLSKFSFYTSFNLVFENGRFNGSTLQITGVLPQSANGEWSITGGTGELALARGIAKFKAVQMSSLSNVYELTLHAYYSPMDSCGNPVATCCESWKVGTTQDGITV

SEQ ID NO: 140914 - protein, 51 aa, Oryza sativa
  Clone ID: PAT_MRT4530_42067C.1.pep
ISAWVLQERLRINGSLARRAMKHFMDRGLVRMVSVHCSLQVPSTGTNGKVV

SEQ ID NO: 140915 - protein, 66 aa, Oryza sativa
  Clone ID: PAT_MRT4530_42068C.1.pep
RDPCHTFYISSSTYFLFLPPLILDIPRHLAITNIISRYLFCFSFMSRLFSVNSYCIGRTDIISHHM

SEQ ID NO: 140916 - protein, 63 aa, Oryza sativa
  Clone ID: PAT_MRT4530_42069C.1.pep
SLFPILSSPASRLNVPATAAPGSPPSRARSPPPTVVRPSRTPTPRPRRPDHRHLAPPHPPLAP

SEQ ID NO: 140917 - protein, 68 aa, Oryza sativa
  Clone ID: PAT_MRT4530_4206C.1.pep
MGTVIFEEEKTVPLWRSTSAGGIVGNHAVAGQSSCPVHVVVAGQRAKLKESDGREEDVDGGARFKISE

SEQ ID NO: 140918 - protein, 90 aa, Oryza sativa
  Clone ID: PAT_MRT4530_42070C.1.pep
MGAPAARRRGGRCGEEDGAAMGAPAVEERRRGGKHGDGVPAVEARQRKRCGRRGGGRGWRRRRMEAKRERFGEGKRIAGDESADRMQSDI

SEQ ID NO: 140919 - protein, 119 aa, Oryza sativa
  Clone ID: PAT_MRT4530_42071C.1.pep
LRIMHSNQFQWEYSILFDSLIPSVNKSQYLKSRKMCAVLQFLIPSSSMSKLVLFHTILATKYLFLDLQTKKLNSKIQVQFIIHGKLYKPVAVYITFLNSLDQKSKNSEYMHVRKNNVTV

SEQ ID NO: 140920 - protein, 479 aa, Oryza sativa
  Clone ID: PAT_MRT4530_42072C.1.pep
MAHKIPLEVAHTLVEIAEVARYAIEHRRGHGPAHDGVSPPAVDGEEAERLRAENVILRARLADDLSILRELQGEPCVSQECPADLHNRLVAAVNNASFLAQLEKIRDESRHQQTELSPDNMTDIPYTEGGGKNGSWVLVACDKPGANMEEISGIDNENYVLVNDDDIIDGMTSFIARCILEDPKSKSISPVELQKAVAMALSTLNDKWKWMSIWEAGKVLYILATWGITIVGLYRSRHVLKIAAKGAVMGWLNSASDDAWNEPNPRPTTPQLHKLPVQSPLANPSRRHSFPSPKPPQSFSSSSAAAANSDFIFSETPMATKSQKKKRPSGPNPSIKSKASSSDQKPKPSKPTEEEREEKAAAAVAAEKPKKKKATNEIDKIFQATKSSGKKRKQQQQQGEEESVRAKKPKERSEGAKKSNKAKKGSKGRDTDDDDEVEEKRPRRRTADGLAIYSADELGFGKSDAGGTPLCPFDCDCCF

SEQ ID NO: 140921 - protein, 388 aa, Oryza sativa
  Clone ID: PAT_MRT4530_42073C.1.pep
MPPLAATPLATAAPPAAQAAARCRAARRLLASTPLRLRAAAQPAASAPPRRRADPLSLSLDLDRDKAALSLDLSKKNEIRQERGRDAPRSYTLSAARTAHHHPSRPVDHLPPPMPYRSAGREGSSSTASRPPPLPAAAADDARAKSYAIMVLMLPSDSARKWHVHELELVEVVADQVAVALSHAAILEESMRARDLLMEQNVALDLARREAEMAIRARNDFLAVMNHEMRTPMNAIIALSSLLLETELTPEQRLMVETVLKSSNLLATLINDVLDLSKLEDGSLELEIKAFNLHAVFKEVMSFIKPIAAIKRLSVSVMLAPDLPLCAIGDEKRLMQTILNISGNAVKFTKEGHITLVASVVKADSLREFRTPDFHPTASDDNFYLKVQ

SEQ ID NO: 140922 - protein, 75 aa, Oryza sativa
  Clone ID: PAT_MRT4530_42074C.1.pep
QWEEMLLSEKKTAASLQCKETGRPNGPRPGFGNSWCFPPFPGSTSDGSPRKPRHPRWRPTGMLLEYPKHLNALVP

SEQ ID NO: 140923 - protein, 503 aa, Oryza sativa
  Clone ID: PAT_MRT4530_42075C.1.pep
MAHKIPLEVAHTLVEIAEVARYAIEHRRGHGPAHDGVSPPAVDGEEAERLRAENVILRARLADDLSILRELQGEPCVSQECPADLHNRLVAAVNNASFLAQLEKIRDESRHQQTELSPDNMTELDIADIPYTEGGGKNGSWVLVACDKPGANMEEISGIDNENYVLVNDDDIIDGMTSFIARCILEDPKSKSISPVELQKAVAMALSTLNDKWKWMSIWEAGKVLYILATWGITIVGLYRSRHVLKIAAKGAVVSAKFVMKALNHLKETRESSEFEQKASDDAWNEPNPRPTTPQLHKLPVQSPLANPSRRHSFPSPKPPQSFSSSSAAAANSDFIFSETPMATKSQKKKRPSGPNPSIKSKASSSDQKPKPSKPTEEEREEKAAAAVAAEKPKKKKATNEIDKIFQATKSSGKKRKQQQQQGEEESVRAKKPKERSEGAKKSNKAKKGSKGRDTDDDDEVEEKRPRRRTADGLAIYSADELGFGKSDAGGTPLCPFDCDCCF

SEQ ID NO: 140924 - protein, 66 aa, Oryza sativa
  Clone ID: PAT_MRT4530_42076C.1.pep
LVLNSYMDSKLIFQYSLFFSIPNFYYFLIGFLYGLYTLLLKFFFFYSEFQLFLNCISIWTLVSSSN

SEQ ID NO: 140925 - protein, 56 aa, Oryza sativa
  Clone ID: PAT_MRT4530_42078C.1.pep
CDSNALLFRDVILNRNYSVFFLLSSAFTCDLSDAPLYRPKISSIDGYPLVAKKKKK

SEQ ID NO: 140926 - protein, 100 aa, Oryza sativa
  Clone ID: PAT_MRT4530_42079C.1.pep
YVLVNDDDIIDGMTSFIARCILEDPKSKSISPVELQKAVAMALSTLNDKWKWMSIWEAGKVLYILATWGITIVGLYRSRHVLKIAAKGAVVSAKFVMKAL

SEQ ID NO: 140927 - protein, 417 aa, Oryza sativa
  Clone ID: PAT_MRT4530_4207C.1.pep
MDDDDAAASASPSPSPSPVASALPVADPVTVAAGPPSGLLALALPIQKQQHAASPNPGGGGGGREDAWSEGATAALIDAWGERFVALGRGSLRHPQWQEVADAVSSREGYAKAPKSDVQCKNRIDTLKKKYKIERAKPASSWQFFGRLDDLLAPTFNQKPGGNGGGGVGASVNGRNPVPAALRVGFPQRSRTPLMPAPVSAVKRRAPSPEPSASSESSDGFPPERQPAFPPLPLPPPPNGKRSRADEGRGGGAGGGGDRAQGLRELAQAIRRFGEAYERVETAKLEQSAEMERRRLDFASELESQRVQFFLNTQMELSQVKDHSSSPANAAAPPGATGGAGGTSRRMASVNDASASGNYHRRYRVSDGGRHRHHPQPPPSRPHYQYHENNIAVAAAAAASDGEQSSDEEDDEEEESQ

SEQ ID NO: 140928 - protein, 308 aa, Oryza sativa
  Clone ID: PAT_MRT4530_42080C.1.pep
SISVNGQSCVPPGFRFHPTEEELLNYYLRKKVASEQIDLDVIRDVDLNKLEPWDIQERCKIGSGPQNDWYFFSHKDKKYPTGTRTNRATAAGFWKATGRDKAIYNAVHRIGMRKTLVFYKGRAPHGQKSDWIMHEYRLDDPATDTAAATPTVTSAAAAAAAMAAAADGGQEDGWVVCRVFKKKHHHKEAGGGGGKHGGDGSAGAKAAHAYSSSDDALDQILQYMGRSCKQEHELPSPQASGGAGAGAGSRPASRYLPPMYPSLRASGFGNRSLFRRPRGGSAAIGYSSVLPDNNIVYILYVVSGSSAD

SEQ ID NO: 140929 - protein, 613 aa, Oryza sativa
  unsure (1)..(613): unsure at all Xaa locations
  Clone ID: PAT_MRT4530_42081C.1.pep
CATVGKGDRCGPLRYYASWRNLVVMKVVNRPSVTEAEFPRLDPIVEDNGEERTHRRSMSYGEYASTPTDAGAKLSAELLKDWFCSFFEGFQKDAQVWFLYEDSADLELLLDFRFEDINHERYQTSXGKSLQLQSAHASYLSVFTKEEISKSPTNSIXYNIELARFRSRNFDRWWGEWKLHLFYXLATMYMTDLFPDIIPQTTESSRPHQSNIGRNNEYAPGLIPNGGELSPPVIGYHAPKVSTLLQGAIREPTDVTKKRKTRSSVVSTLTLAPKKKAKSKKTKPTDDMPALDPSIEQAVDEKDIEDDVDQAAAEVSDTEKTPSASPKQIPSTPSAPTHFFRQPAPSFSPVQQSSSDRAPSAVGSHHIVEEEQSAAPAIPVLADLFSFDIKDYLDEAEEDTSSKALAPLSDDAKKTLEDISCQLEASSLDSLVVDCGSIRTRLHEVQALIPEELADVLTAAAYLEQHQFKLEKAKLRLAERRERKEIEATIQVNRQLVHEDKVKLDQLSEGPIKSNIDWLEARKNDLLAQLEECNAELDMEHKKLADLPKSVEEQKARLKSAIKNVADLTKSQKIISGSDAQSLSLSAVAAELLYAAIVAPDRLPPRRRLLWLR

SEQ ID NO: 140930 - protein, 36 aa, Oryza sativa
  Clone ID: PAT_MRT4530_42082C.1.pep
MRTDSLGLEGTNGEFPSPSPHGDLHNRCLTTPYRRI

SEQ ID NO: 140931 - protein, 886 aa, Oryza sativa
  unsure (1)..(886): unsure at all Xaa locations
  Clone ID: PAT_MRT4530_42083C.1.pep
MSSSTIPSTAPSAEYAEHLSNLVAIPSLSHKNHYFLGPIDNLDSTDFIIGETNRIPFRLANPNLGHWKNTFNKKTHWDEIGIGQALALTIANSAKDEPLMAAATYFWSNTINAFLFNQGPMTPTLIDIIMITGLDVTSSANPISMNTKNQFDFKTKSIGGWSGYVATYMGKGPVTPREHVAFLLMWLEKFLFCGSSCGPTTNWQFVAEALGSKKQFPLGKILLGYLYQMLNNASAKIAVGSIVGAGGPWWLLQTWLNLVVMKVVNRPSVTEAEFPRLEPIVEDDGEERTHRRCMSYGEYASTPADAGAKLSAELLKDWFCSFYEGFQKHARVXFLYEDLADLELPLDFRFENINREXYQTSREVFTAAISPCILPVGIHQGRNIQVSYEFYHPISSARQLGLGQLPIGFFFADKIQCRGEISSTLMMDRLLNLQGPPLGSIDNIELAGFRSRNFDRWWGXWKLHLFHQSATMYMTDLFPDVIPRTTVSSPPHQSNSGRNIEYAPGLIPNGGNQPMXTKKRKTRSSAVNTLTLAPKKKAKSKKTKPTDDLPALDPSIEQALDEEDIEDDVDQAAAEVSDTKKTPSASPKQIPSTPSAPTHFFRKKKTAIKKKSAAPILKPASPPPPPCSPVQQSPSDRTPSAVGSHHIVEEEQPAAPAIPVLTDLFSFDIKDYLDEAEEDTSSKALVPLSNDAKKTLEDISRRLEASSLDSLVVDCGSIRTRLHEVQALIPEELADVLTPAAYLEQHQFKLAKAKLRLAEHRERKEIEATIQVNRQLVHEEKVKLDQLSEGLIKSNIDRLEARKIDLFAQLEECNAELDMEHKKLADLPKSVEEQKARLKSAIKNVADLTKSLKIISGTDAQDAQAIEEVEQIRKRAISAIQQYLSQ

SEQ ID NO: 140932 - protein, 240 aa, Oryza sativa
  Clone ID: PAT_MRT4530_42084C.1.pep
RVRLFKTPVDLKSGDWMLKVDHGLVGRIISMTHLPSDSQWLHSRIEINGYEEYSGTEYRSAGCTEEYNVMRRYLVRPRVRESVCLEGDIGGGLVLQRHISILKDNPKIFQIDSSIQARNVGAGSGGFSRLVCLRVHPTFTLLHPTEVVVAFTAINGSKQEISPESGVVLEGDMRPDGEWMLVDNCVGLSLVNRFDPSQVSKCLVHWGTGDVNMELWSEEIPVSKETPLRICHQYEVRQTN

SEQ ID NO: 140933 - protein, 59 aa, Oryza sativa
  Clone ID: PAT_MRT4530_42085C.1.pep
APLLASDGDIGKELIFVPVHTIPLGKHLKFKDCIGCNAPMWKLMLPKLTPRFLAKILIV

SEQ ID NO: 140934 - protein, 627 aa, Oryza sativa
  unsure (1)..(627): unsure at all Xaa locations
  Clone ID: PAT_MRT4530_42086C.1.pep
MSSSTSPSTAPSAEYAESNTINAFLFNQGPMTPTLIDITMITGLDVTSSANPMSMNTKNQFNFKTKSIGGWSGYVAAYMGQGSVTPREHVAFLLIWLEKFLFCGSSCCSTTNWQFVAEALESKKEFPLGKILLGYLYQMLNNASAKIAVGSIVGAGGPWWLLQTWLNLVVMKVVNRPSVTEAEFPLPEPIVEDDGEERTHRRCMSYGEYASTPTDAGAKLSAELLKDWFCSFYEGFKKDARIWFPYEDSADLELPLDFRFEDINHKKFQKSREILIAAISPCILPVGIHQGRNIQTTESSPPHQSNSVKNIEYASDLIPNGGGLSPPFIGYHAPKTSTLLHGLTREPADAGKKRKTRSSAMSTLSLAPKKKTKFKKTQPQPTDMSTDDLPALDPSIEQALDEEEIDEDVDQAVAEMSDIERTPSASPKQTPPTPSAPVHFTRQSSSDQTPSAVGSHHVEEEEQPAAPAIPALADLFSFDIRDYLDEAEEDTSSKALAPLFDDVRKTLEDISHRLEASSLDNLVVDCGSIRTRLHEVQALIPEDLADVLTPAAYLEQHQFKLEKAKLRLAERRDRKEIEATIQANRQLVHEEKTKLDQLSEGPIKSNIDXSKLTKLSSWCNLKNAMPS

SEQ ID NO: 140935 - protein, 82 aa, Oryza sativa
  Clone ID: PAT_MRT4530_42087C.1.pep
AFFLLMFFPAPLFSLVFSFCRYVACFLSLFLFSFCSFGDQHIPPKGWCFLPFLPFVPLIACGSTVVAASWCVGLCGFPDCSF

SEQ ID NO: 140936 - protein, 614 aa, Oryza sativa
  Clone ID: PAT_MRT4530_42088C.1.pep
MSSSTSPSTAPSAEYAEMLNNALAKIAVGSIVGAGGPWWLLQTWLNLIVMKVVNRPYVAEAEFPLPEPIVEDDGEERTHRRCMSYGEYASTPTDAGAKLSAELLKDWFCSFYKGFKKDARIWFPYEDSADLELPSDFRFEDINHEKFQKSREILIAAINPCILPVGIHQGRNIQVSYEFYHPMNSARQLGLGQLPIGLFFADKIQCRGQITSTLMMDRLLNLPGPPLGNIDNIELAGFRSKNFDRWWGEWKLHLFHQSASMYITDIFPDVMPQTTESSPPHQSNSGKNIEFASGLIPNGGKKRKTRSSALSTLALAPKKKTKFKKTQPQPTDTSTDDLPALDPSIEQALDEEEIGEDVDQAIAEMSDTEITPSASPKQTPPTPSVPVHFTRKKKTAMKKKTAATIVKSAPPPPPPSPPVQQSSSDQTPSAVGSHHVEEEEQPTAPAIPALADLFSFDIRDYLDEAEEDTSSKALAPLSDDVRKTLEDISHRLEASSFDSLVVDCGSIRTRLHEVQALIPEDLADVLTPAAYLEQYQSKLEKAKLRLAERRDRKEIEATIQANRQLVHEEKTKLDQLSEGPIKSNIDRLKARKIEIGSKLAKLSSWRNLKNAIPS

SEQ ID NO: 140937 - protein, 895 aa, Oryza sativa
  unsure (1)..(895): unsure at all Xaa locations
  Clone ID: PAT_MRT4530_42089C.1.pep
LIDTIVFSGLYPRAAIILKHLNSTQCHTPNYTVRIGCIGSPSLTQTQPILIVADPNLGHWKNTFKSWPSLEKPTLDKSWTTWYQRISASKKAXWDEIGIGQVLALTIANSAXKDEPLMAAATYFWSNTINAFLFNXGPMTLTLIDIIMITGLDVTLSANPMSMNTKNQFDFKTKSIEGWSGYVATYMGKGPVTPREHVAFLLMWLEKFLFCGSSCGPTTNWQFVAEALGSKKQFPLGKILLGYLYQMLNNVSAKIAIGSIVGAGGPWWLLQTWLNLVVMKVVNRPSITEAEFPRLEPIVEDDGEECTHRRCMSYGEYASTPTDAGAKLSAELLKDWFCSFYEGFQKDVRLWFLYEDSADLELXLDFRFEDINHERYQTSMEVFTAAISPCILPVGIHQGRNIQVSYEFYHPISSARQLGLGQLPIGLFFADKIQCRGEIYSTLMKDRLLNLQGPPLGSIDNIELAGFRSRNFDRWWGEWKLHLFHQSATMCMTDLFPDVIPQTTESSPPHQSNSGRNIEYAPGLIPNGGGLSPPVIGYHAPKVXTLLQGAIREPTDVTKKRKIRSXAVSTLTLAPKKKAKSKKTKPTDDLPALDSSIEQALDEEDIEDDVDQAAAEVSDTEKTPSASPKQIPSTPSAPTHFFRKKKTAIKKKSAAPILKPAPPPPPPPSSPVQQSSSDRTPSAVGSHHIVEEEQPAAPAIPVLADLFSFDIKDYLDEAKEDISSKALAPLSDDAKKTLEDKLADVLTPAAYLEQHQFKLEKAKLRLAERRERKEIEATIQVNRQLVHEEKVKFDQLSEGPIKSNIDRLEARKIDLLAQLEECNAELDMEHKKLADLPKSVEEQKARLKSAIKNVADLTKSLKIISGTDAQDAQAIEEVEQIRQRDISAIQQYLSQ

SEQ ID NO: 140938 - protein, 37 aa, Oryza sativa
  Clone ID: PAT_MRT4530_4208C.1.pep
LLPPVRSHLLTQHILKRQVEQRKPNNGPYYDSSNPNG

SEQ ID NO: 140939 - protein, 78 aa, Oryza sativa
  Clone ID: PAT_MRT4530_42090C.1.pep
MAASFAVDTTTEVGLRTAPCGGGGRSYTQQYCRLSAKRIGAEVGRLSANGIRQNGAEIPRTKSHLRSLGPAPMRLALR

SEQ ID NO: 140940 - protein, 803 aa, Oryza sativa
  Clone ID: PAT_MRT4530_42091C.1.pep
MSSSTSPSNAPSGKYAEDEPLMAAATYFWSNTINAFLFNQGPMTPTLIDITMITGLDVTSSANPMSMNTKNQFDLKTKSIGGWSGYVAAYMGQGSVTPREHVAFLLMWLEKFLFCGSSCGPTTNWHSVAEALESKKEFPLGKILLGYLYQILNNASAKIAVGSIVGAVMKVVNRPSVTKAEFPLPEPIVEDDGEERTHRRCMSYGEYASTPTDAGAKLSAELLKDWFCSFYEGFKKDARIWFPYEDSADLELPSDFRFEDINHEKFQKSREILIAAISPCIFSVGIHHGRNIQVSYEFYHPLGLGQLPIGLFFADKIQCRGQITSTLMMDRLLNLPGPPLGSIDNIELAGFRSKNFDRWWGKWKMHLFYQSASMYMTDLFPDVIPQTTESSPPHQSNSCRNIEYASGLILNGGGLSPPFIGYHAPKTSTFLHGLTREPADAGKKRKTRSSAMSTLALAPKKKTKFKKTQPQPTDMSTDDLPALDPSIKQALDEEEIGEDVDQAVAKMSDTERTLSALPKQTPPTPSAPKKKTTVKKKPAATIVKSAPPQSSSNQTPSAVGSHHVEEEEQPAASAIPALADLFSFDIRDYLDEAEEDTSSKAQAPLSDDVRKTLEDIAHRLEASSLDSLVVDCGSIRTRLHEVQALIPEDLADVLTPAVYLEQHQFKLEKAKLRLAERHERKEIKAIIQANWQLVHEEKTKLDQLSGGPIKSNIDRLEARKIELLAQLEECNAELDMEHRNLADLPKSIEEQKARLKSAIKNVADLTKSLKVISGTDAQDAQAIVEVEQIRQRPILAIQRYLSQ

SEQ ID NO: 140941 - protein, 193 aa, Oryza sativa
  Clone ID: PAT_MRT4530_42092C.1.pep
MSTVSSALSSFLYCCFSPTGGHRHGHRAGAYYYSSHPTSTNTYYYEGGLAGRRMGRSRPLSLQTVELKVRMCCSGCERVVKHALMKLRGVDSVEVELEMEKVTVTGYVERQRVLKEVRRAGKKAEFWPNPDLPLYFTSAKDYFHDEESFRPSYNYYRHGYNGDKHGHLPEPHRGADPVSNLFNDDDVNACSIM

SEQ ID NO: 140942 - protein, 623 aa, Oryza sativa
  Clone ID: PAT_MRT4530_42093C.1.pep
MSSSTNPSDVPSAKLTNPDLGHWKNTFKSWPSLEKVPPEKSWTTWFKRVSASKRVHWDEIGIGQALDLTIANSAKDEPLMAAASYFWSNTVNAFLFNQGPMTPTLIDITMITGLDVTSSANPMSMNTKNQFDFKTKSIGGWSGYVAAYIGQGFVTPREHVAFLLMWLEKFLFCGSSCGPTTNWQFVAEALESKKEFPLGKILLGYLYQMLNNASAKIAVGSIVGAGGPWWLLQTWLNLIVMKVVNRPSVTETDFPRLEPTVNDDGEELTHWRCTSYGESLSRYCPSNNRIFAPSPKQQQQGYQVCPRTDPQRREPADAGKKRKTRSSAVNISAPAPKKTAKTKKTTPADDLPALDPSIEQALDEEIIEDDVDEAAAEKKKTAVKKKPPTMITKSTPPPSPASPPVRQKSSDQTPSAAGSHHIEEEEQPVAPAIPVLADLFSFDIRDYLDEAEEDISSKALAPLSDDVRKILEDISHWLEASLDNLVTNCGSIRARFTDIQALLPDELADVLTPAVYLEQHRFKLEKARQRLADRRERKDIEATIQHNRQLVHVEKSKLDQLSEGPIKSNIDRLEARKIDLMAQLQECNAELDMEHKKLADLPQALEEQKAKLSLELTLKMPKP

SEQ ID NO: 140943 - protein, 626 aa, Oryza sativa
  Clone ID: PAT_MRT4530_42094C.1.pep
MSSSTSPSTAPSAEYAEHLSNLVAIPSLSHKNHYFLGPIGNLDPTDFIIGETNRIPFRLANPNLGHWKNTFKSWPSLEKPTPDKSWTIWYQHISAKAEFPRLEPIVEDNGEEHASTPADAGAKLSAELLKDWFYNFYEGFQKDARVWFLYEDSADLELPSDFRFEDINHERYQTSREVFTAAISPCILLVGIHQGRNIQVSYEFYHPISSARQLGLGQLPIGLFFADKIQCRGEISSTQMMDRLLNLQGPPLGSIDNIELAGFRSRNFDIWWGEWKLHLFHQSATMYMTDLFPDVIPQTIESSPPHQSNSGRNIEYAPCLIPNGGGLSPPVIGYHAPKVSTLLQGAIREPTDVTMKRKTRSSAVSTLTLAPKKKAKSKKTKPTDDLPALHPSIEQALDEEDIKDDVDQAAAEPPPPPSSPVQQSSSDRTPSAMGSHHIVEEEQPAALAIPVLADLFSFDIKDYLDEAEEDTSSKALAPLSDDAKKTLEDISRRLEASSLDSLVVDCGSIRTRLHEVQALIPEELADVLIPAAYLEQHQFKLEKAKLRLAERRERKEIEATIQVNRQLVHEEKVKLDQLSEGPIKSNIDRLEARKIDLLAQLEECNAELDMEHKKLADFPKSYQECC

SEQ ID NO: 140944 - protein, 56 aa, Oryza sativa
  Clone ID: PAT_MRT4530_42095C.1.pep
YFVVTNNNSKCTPSLNLSPLHFLAPAFLFHPILHPFPSYQISLYFAPPKYILLPSI

SEQ ID NO: 140945 - protein, 868 aa, Oryza sativa
  unsure (1)..(868): unsure at all Xaa locations
  Clone ID: PAT_MRT4530_42096C.1.pep
MSSSTSPSTTPLAEYAEHLSNLVAIPSLSHKNHYFLGPIHNLDPTDFIIGETNRIPFRLANPNLGHWKNTFKSWSSLEKPTPDKSWTTWYQRISASKKTHWDEIGIGQALALTIANSAKDEPLMAAATYFWSNTINAFLFNQGPMTPTLIDIIMITGLDVTSSANPMSMNTKNQFDFKTKSIGGWSGYVAAYMGKGPVTPREHVAFLLMWLEKFLFCRSSCGPTTNWQFVAKALESNKQFPLGKILLGYLYQKLKNASAKIAVDSIVGAGGPWWLLQTWLNLVVMKVVNRPSITEAEFPRLEPIVEDDGEELTHCRCMSYGEYASTPADAGAKLSAELLKDWFCSFYEGFQKDARVWFLYEDSADLELPLDFRFEDINHERYQTSREVFTAAISPCILPVGIHQGRNIQVSYEFYHSISSARQLGLGQLPIGLFFADKIQCRGEISSTLMMDRLLNLQGPPLGSIDNIELAGFRSRNFDRXWGEWKLHLFHQSATMYMTDLFPDVIPQTIESSPPHQSNSGRNIEYAPGLIPNGGGLSPPVIGYHAPKVLTLLQGAIREPTDVTKKRKTRSSAVSTLTLAPKKKAKSKKTKPTDDLPALDPSIEQALDEADIEDDVEQAAAEKKKTAIKKKSAPPPPPPPSPVQQSSSDRTPSAVGSHHIVEEEQPAAPAIPAEEDTSSKALAPLSDDAKKTLEDISRRLETSSLDSLVVDCGSIRTRLHEVQALIPEELADVLTPATYLEQHQFKLEKAKLRLAERREHKEIEATIQLSEGPIKSNIDRLEARKINLLAQLEECNVELDMEHKKLADLPISVEEQKTRLKSAIKNVADLTKSLKIIPGTDAQDAQAIEEVEQIRQKAISAIQQYLSQ

SEQ ID NO: 140946 - protein, 508 aa, Oryza sativa
  Clone ID: PAT_MRT4530_42097C.1.pep
STLEDPLYGIGISVDRSRTASSLPFSVRTLELPSICIFARLPDWIGQLRKLHTLNLAVRELIENDIDSLAGLPDLIVLSMHIMKAPMERIVFNRKAFPVLKYFKFICGTLRMAFQAGAMANLHRLKLGFNAHKGEKYDNILVGIEHLLNLKKIAVRIGGAAEAKESDRMAAEAALKEAIRKHLMFLDDLDIARVECVKEEYKCIKKKHKIKIEDSISEKNGDSKKQHSVEKKAVWGKTMKNIADSGVFPEDYTMSREQRVAEGFVVGIEKCRAEDAAERIIRNVPVDYDGLGQVSTSKIQDHLPELAPRAVQNEKFGSSNDLSIMIQINKYARLPSYEWRDTDISKLNFRLLRAPMLLEAVTARCHLLDLILIGSNNITVLDLGRPTITKLPASIECLPNLRYLRLQGTQLKSLSETLAETVQDSDDLSDETEGIADDEGEFSTRANASTPKVDEDEVDRRANNFIARFRKQITIRNSGFAKKESSIDERLWIRDLDECQLSKRGGRF

SEQ ID NO: 140947 - protein, 716 aa, Oryza sativa
  Clone ID: PAT_MRT4530_42098C.1.pep
GCRRQAEGSTVQSIVTDFSIESNEMTTSDSLSILLRKVLLDKKPEEVPLIVESILSKVIQEYEHRIAIQNKMDEEEQNLLNITEQVNHVVVNGDGEVKQFQLEAQTNFDVQQKQIQKYLIYPFFYHVVKGKHFYTLSNAASSYHKVLEENRKLYNQIQDLKGNIRVYCRVRPFLPGHRSLSSSVADTEERTITIITPTKYGKDGCKSFSFNRVFGPASTQEEVFSDMQPLIRSVLDGFNVCIFAYGQTGSGKTFTMSGPKVLTEESLGVNYRALNDLFNIKAQRKGTIDYEISVQMIEIYNEQKGLAVPDASIVPVTSTADVVELMNQGQKNRAVGSTAINDRSSRSHSCLSVHVQGKYLTSGAMLRGCMHLVDLAGSERVDKSEVVGDRLKEAQYINKSLSALGDVIASLAQKNSHVPYRNSKLTQLLQDSLGGQAKTLMFVHVSPELDAVGETISTLKFAERVASVELGAAKANKEGSEIATLKAALAKKEGEPENIQSTQSSPDMYRIKRGNAIPAFPKNRQPMEEVGNLEVRNNATPMQKKASFQFSGVLSENNSSDLAENCNGIQKTDRMAVGNNQFENGNSILELEPGATQLPTFFYQRYDPDKQRRRAEPVETDDSDSFDAATSSPSDQEMLLSTSGLKADGIASRGAFIIKKPQTKNTKITATKIPNLAMKSPMSEKRLQTPIRNSKQLPFSTTGGRRTRNGKINTPK

SEQ ID NO: 140948 - protein, 843 aa, Oryza sativa
  unsure (1)..(843): unsure at all Xaa locations
  Clone ID: PAT_MRT4530_42099C.1.pep
MSSSTNPSDAPSAKYAEHLSNQVTIPSLSHKNHYFLGPIGNLDPTDFIIGETNRIPFRLANPNLGHWKNTFKSWPSLEKSTPDKSWTTWYQRVSASKKVHWDETGIGQALALTIANSAKDEPLMATATYFWSNTINAFLFNQGPMTPTLIDITMITRLDVTSLANPMSMNTKNQFDFKIKSIGGCCGPTTNWQFVAEALESKKEFPLGKILLGYMYQMLNNASAKIAVGSVVGAGGPWWLLQTWLNLIVMKVVNRPSVTEAEFPLPEPIAEDDGEERTHRRCMSYGEYASTPTDAGAKLSAELLKDWFCSFYEGFKKDARIWFPYEDSADLELPLDFRFEDINHEKFQKSKEVLIAAISPCILPVGIHQGRNIQVSYEFYYPMSSAQLGLGQLPIGLFFADKIQCRGQITSTLMMDRLLNLPGPPLGSIENIELAGFRSKNFDRWWSEWKLHLFHQSATMYMTDLFPNVIPQTTVSSPPHQNNNGKNIEYASGLIPNGCGLSPXVIGYHAPKTSTLLHSLTREPADAGKKRKTRSSAVSTLALAPKKKAKFKKTKSTDKPADDLPALDPSIEQALDEEEIGEDVDQAVAEMSDTEKTPSASPKQTPPTPSAPVHFTRPPPASPPVQQPSSDQTPSAVGSHHIEEEEQPVAPAIPVLADLFSFDIRDYLNEAEEDTSSKALAPLYDDVRRTLEDISHRLEASSLDNLVVDCGSIRSRLHEVQALILEDLADVLTPAAYLEQHQFKLEKAKLRLAERRERKEIEATIQANRQLVHEEKTTLDQLSEGPIKSNIDRLEARKIELLAQLEECNAELDMEHKKLADLPKSIEEQKVRLXSAIKNVADL

SEQ ID NO: 140949 - protein, 274 aa, Oryza sativa
  Clone ID: PAT_MRT4530_4209C.1.pep
MPVQLGGGGKVAEPKDLSATDKDRPSSKKNRRRQKKPATSAAISPPVAAMQTLFDTSREVFQDSLPGFVPPPQAVARLAALLNDLKPHDVGIEPSMSCFKNADSKGPPRVTYLHFYDCPKFSFGIFCLPKSAVIPLHNHPGMTVFCKILFGSMHLKSYDWAKSAPDNDNNALETSDGARLAKVNTDAAFDASSETTGLYPENGGNLHCFTARTACAVLDVMGPPYNRADGRDCSYYDESPYLSSSGGDARYSWLKENHSTFEMKGVQMPQRFIV

SEQ ID NO: 140950 - protein, 118 aa, Oryza sativa
  Clone ID: PAT_MRT4530_420C.1.pep
MERGTEAHAPSCMPASKAVAMLALVWMEFSGNSTLCKKKIGVKTQDTYALLTMINHCRSILYIETQLLKYVTEKESDSLYVGIIQVVLRQPAMLQHILPYNIGHRLNKDKEIERMSPD

SEQ ID NO: 140951 - protein, 62 aa, Oryza sativa
  Clone ID: PAT_MRT4530_42100C.1.pep
VKEIKNGPLPMFSMLGFFVQAIVTGKGPLKNLLDPLSDPVAKNAWVYATKFTPGSLMAHPPL

SEQ ID NO: 140952 - protein, 74 aa, Oryza sativa
  Clone ID: PAT_MRT4530_42101C.1.pep
LIHSFGEEVRSGSLWANIPILAAMKNFMRGYWSNPAYNERLKGGSCNKTGTNWKAPKAHPLFRTEILKRGELRT

SEQ ID NO: 140953 - protein, 83 aa, Oryza sativa
  Clone ID: PAT_MRT4530_42102C.1.pep
SAAPPPSCQCTVAPDPPRRASSPCTAVEPKGVADPRQDQDPQSFEQGKSSLFLEHVDPNCEIILFTNKIACNDEHPICEYAMP

SEQ ID NO: 140954 - protein, 184 aa, Oryza sativa
  Clone ID: PAT_MRT4530_42103C.1.pep
MHTIRCISAGALVLIMVVNLNLKEELYVVAGSNQFFNSQHLSLPHLYLLSSPHTPPSLSNSLPVDRVAAAGGHPTVAAVLHPEAGGGRSIAEVVARGVWRWREEAAAAAIPRVDLAADGFFSRADDISTRTRKTDFSVRMDGISSTGRSEQIELAAPPSSAPASELGSHPSRRHRRRHDFGTPA

SEQ ID NO: 140955 - protein, 123 aa, Oryza sativa
  Clone ID: PAT_MRT4530_42104C.1.pep
FFFFSGQPRFMESVFRSHKNDPNCLTLHITIAKHYHHFAWIPVGRQACATCQHGFDPHPLGGLGAIEHQACLLPINLVHEDTVPCVHTGFLQSITIWNPMHTVWHDEYHILTPEMHPVKQMIH

SEQ ID NO: 140956 - protein, 295 aa, Oryza sativa
  unsure (1)..(295): unsure at all Xaa locations
  Clone ID: PAT_MRT4530_42105C.1.pep
LFLKRKKGLLRQRLGFAVDRVHGSGSRERTVGIXLSKTDGXDRTVHDRATADGPDDVSGDVTSGGGSGAQARRRTTALRHKRRAPGRRARRGELTDDQRKGGGVLRLDDDGDAPAVYSDGEGADEDGDAMTTXDGGLPERRRRLERRRSTAGATATTTAQGLTALGRFRRRETKARVATGARRRWRRPMATSDKKERLGFGGERPIRIDLESMDFQTKLADDSKREKVEEIPEIISPLLISPEKEKAGGTHLSATASARARTAADWADLGRGKERGGFGPTFGPKPKETFKNLFQ

SEQ ID NO: 140957 - protein, 204 aa, Oryza sativa
  unsure (1)..(204): unsure at all Xaa locations
  Clone ID: PAT_MRT4530_42106C.1.pep
RRSLMTSAVTSPPAAARRLGRASSPANDGASARTEGSRXRGRRGELTDDQNDGGRXTDGGGVEEKAAESFGLTTTTMLRRSTAMAKGRTRMATRRRPRWRSPRATATAGTTAKHGWSGGDDNGTKSHGARALPTAKDEGEGGGGKRKGRGDPEDCFPSIDFTGSGKTQPNLEGDDGGAALGFRAAADARKTTTPTVQLVTDSTL

SEQ ID NO: 140958 - protein, 41 aa, Oryza sativa
  Clone ID: PAT_MRT4530_42107C.1.pep
KVDWKIYRILAYTLEIQFKHEFIEAVLHACSSFHMVWAIKL

SEQ ID NO: 140959 - protein, 191 aa, Oryza sativa
  unsure (1)..(191): unsure at all Xaa locations
  Clone ID: PAT_MRT4530_42108C.1.pep
GFRKRVPKKGGVLWLDDDDNAPAVYSDGKGADKDGDGTTPPDXRSPRATATAGTTGXHGWSGGDDNGTKSHGVRALPTAKDEGEGGGGXRRHWGSFYRGKEAAAKAHGDRRREGNIGVWRKETDPIRPRIHEFPNDSSRXFQKRKGRGDPEDCFPSIDFTGSGKTQPNLEGDDGGAALGFRAAADARKTTT

SEQ ID NO: 140960 - protein, 38 aa, Oryza sativa
  unsure (1)..(38): unsure at all Xaa locations
  Clone ID: PAT_MRT4530_42109C.1.pep
VGRPRTLSTARKSTRPXGKKPKPDPEATTSEPWGLRFA

SEQ ID NO: 140961 - protein, 121 aa, Oryza sativa
  Clone ID: PAT_MRT4530_4210C.1.pep
HRASVQKEGSGAPSAVRSSDPIAVALSTSAAAAAAAAARALAARVTTTGGYTASAASTAMRRAAAAVEGKGAAGMTHAKDGPRPNVPDRGELNSPAPMAAAALCTVNARHDAAMISTLLSH

SEQ ID NO: 140962 - protein, 58 aa, Oryza sativa
  Clone ID: PAT_MRT4530_42110C.1.pep
FHYNLQIQVLYINVHKINKSFLHCLLGQQSKTNWNFYYKKMIKKHVKTRLFAGGGKWE

SEQ ID NO: 140963 - protein, 146 aa, Oryza sativa
  Clone ID: PAT_MRT4530_42111C.1.pep
MADLFFGGPFRRILYGRPFPPDWASASATAAMDWVETPTSHVLRINVPGLGKDDVKVQVEDGNVLTVRGAAPHAAAEKEREREKDVVWHVAERGRPEFAREVALPAEVRVEQIRASVDNGVLTVVVPKEPAPARPRTRPIAVSSKL

SEQ ID NO: 140964 - protein, 127 aa, Oryza sativa
  Clone ID: PAT_MRT4530_42112C.1.pep
MGGGDGWRQCGPSAAIACGGRSGGRPEVRSGRPPPCRPGRIRLHAAGSGGGEVRPAASTLSGPPPLLPLPVSSRLHSTGSGGGEVRPVAPTPYGPPPCCRAPAPLALGHATLAPESGEAESEGDADR

SEQ ID NO: 140965 - protein, 48 aa, Oryza sativa
  Clone ID: PAT_MRT4530_42113C.1.pep
MKFSWGHMKTECMLILIWVMFDSALTVKIILGMLLTVMGMVLFYFFLL

SEQ ID NO: 140966 - protein, 90 aa, Oryza sativa
  Clone ID: PAT_MRT4530_42114C.1.pep
HFTFVDDAEEALGLGGEVSGWTGWAVETPKCLHVFPQVAESVAIAHAQAVCPSCFIMLPPFARVAFIESISSLDASGFSSDGSDPDSLLP

SEQ ID NO: 140967 - protein, 245 aa, Oryza sativa
  Clone ID: PAT_MRT4530_42115C.1.pep
MAPTTPASFLRPPPLPHHHHPRIVRLPPPSATFRVADLLGGRGLCNGEVGIRKELASDSPAAPPSTTTSSDEPAESPPPPPAASGVDPDAFDKEMMGLTGGFPGGEVGLKDFVAKNPPPPKPAHRKGLAAAATVERPRAPELPLFLPGMVVLVKNPNNAYHMYCGIVQRVTDGKVGVLFEGGIWDRLITFDLDELEGREKGPPMVNPKSVLLESLAAEMEDDVAKEEEGEEAKKKKEEEGTAAAA

SEQ ID NO: 140968 - protein, 58 aa, Oryza sativa
  Clone ID: PAT_MRT4530_42116C.1.pep
HVSSLHHQCTMHHHAPSPVTVPSNTATFISFPPAYQPCFWCVQHSVCTAAATPLYFSQ

SEQ ID NO: 140969 - protein, 73 aa, Oryza sativa
  unsure (1)..(73): unsure at all Xaa locations
  Clone ID: PAT_MRT4530_42117C.1.pep
KVFFFEDSIIENWQLCAPKVCRDTPLDGPATFMDSNRANLELGKSISQPYNNLSKAXSNCWLCSKRYHTHXSS

SEQ ID NO: 140970 - protein, 41 aa, Oryza sativa
  Clone ID: PAT_MRT4530_42118C.1.pep
TRFCSSVAGRIHTIFCSARTSSSCMLPPIIFNAGSDKRSGH

SEQ ID NO: 140971 - protein, 99 aa, Oryza sativa
  Clone ID: PAT_MRT4530_42119C.1.pep
KGGAAKFFYESILVILHKSKGSKRLMNWQWIYTVDRRSKEFIDGAHYFLSVTDAHKPKCFICCPRKNCKNQKHYSISRILHIHLLQSGFMPCYNCWTFR

SEQ ID NO: 140972 - protein, 264 aa, Oryza sativa
  Clone ID: PAT_MRT4530_4211C.1.pep
STWEDSPASPRLALALRIPTRRTAQPRPRLAAMDAPALPPPPRLVDYISSLQGLVRLGDLADLEPDKSVVVVVSGCYPLEDAPILFDDLSARETWCVIGMPELCILRARAISLLQRREDLRALVRDMGHDLLVCGTESGKVEGVLARALKLPAGMDAPPGISLDLVGDADEGRRFLRRDIARARLQLAALAGHTERHILRRLGRELALRASTGVVAPQELWPDIQEQRLRHAPPDSTSDAALYAEAAEEAAWVAPAGTPPDSDA

SEQ ID NO: 140973 - protein, 124 aa, Oryza sativa
  unsure (1)..(124): unsure at all Xaa locations
  Clone ID: PAT_MRT4530_42121C.1.pep
SLILQVRGAAATHPSTRRRCSPPAPDAASPPPTPSARRRCSPPAFXPQRSTPPPANNPSPPPTDPPMAPPSSEHELLPMVLVSSSSFPPPSSSSSWLQYWRGRACSIHRRAPPVLPVFTGELIP

SEQ ID NO: 140974 - protein, 82 aa, Oryza sativa
  Clone ID: PAT_MRT4530_42122C.1.pep
YKVKLILGLDKPWTEAEVDNVPPSVSSWRVLFNNDLSLLVYRLNVHERAILSHVMWGIPFHRRNRWDELGTGRGTGPGGPVV

SEQ ID NO: 140975 - protein, 151 aa, Oryza sativa
  unsure (1)..(151): unsure at all Xaa locations
  Clone ID: PAT_MRT4530_42123C.1.pep
SRRPGPQFNDIWRSAPGFKCKRNLSREACTPVGGMHRSGEYTSTRLQLNDIXGGQHGAHVSTELVQGGMHRSGEYTEACTAVVNTRRPGSSLTIFGGQHGAHVSTELVQGGMHRSGEYTGGLPRQGVNTRRPGGCLLLGYLEDPFKLPRFQ

SEQ ID NO: 140976 - protein, 128 aa, Oryza sativa
  unsure (1)..(128): unsure at all Xaa locations
  Clone ID: PAT_MRT4530_42124C.1.pep
RYLEGGMHRSGEYTSTRLQLNDIXGGQHGAHVSTELVQGGMHRSGEYTEACTAVVNTRRPGSSLTIFGGQHGAHVSTELVQGGMHRSGEYTSTIFGGQHGAHVSTELVQGGMHRSGEYTSTRLQQAPS

SEQ ID NO: 140977 - protein, 64 aa, Oryza sativa
  Clone ID: PAT_MRT4530_42125C.1.pep
RRWATRGTRANVCHSKRFDELRSERHLAARRGIGPHRPTDYTAADPEIARLWPSGAHGGGARQA

SEQ ID NO: 140978 - protein, 55 aa, Oryza sativa
  Clone ID: PAT_MRT4530_42126C.1.pep
MEEKLFELADTVHKYDDARSNGNGLQQRGRSSIEPLIGNEEVDPNKVVTVSARPK

SEQ ID NO: 140979 - protein, 153 aa, Oryza sativa
  Clone ID: PAT_MRT4530_42127C.1.pep
MATSEAGKGAEQACAAAAAATDGDDGGERPPRMIQMPQEYVDWVLAQKREAYYESPEDYPLLRTNNPVKVDGLSEEWVEKNSKSVIKTANLLKKADDSFEEFQKQVRKEVEKGYYEVGMDFFVQRAASRALFDEQWAKIDFTGIDVEEDDDDE

SEQ ID NO: 140980 - protein, 114 aa, Oryza sativa
  Clone ID: PAT_MRT4530_42128C.1.pep
MWIAVPAEGEEIGSSEGIGGVWRRRRKGTTLRRRERGMRGGIGWRRRSIGWSTVGLRRGEENRGEEERESSMVSASSSREKEEADNPWRMDGGYGSGQTQMDGSAAAIQPGVTG

SEQ ID NO: 140981 - protein, 409 aa, Oryza sativa
  Clone ID: PAT_MRT4530_42129C.1.pep
MELGSSAQPPRAQCGVAGTRLGGRAGSRLWWGVWQDPPRAAMDQRKALFRAKLREREAKEKQERRIDPSLVRYNEFDQPICRICNVTLKSEALWPAHQVSRKHHEAKAAAAASAKAPSGAGSRGNKANHEQPAESQKPKSSTLPANFFENQGMKRHSDGAGSEGRSVRREVADVQQKTKEASKTKPSVNFEKIPKKESQANTNVKGVLPGNFFDYNDEDEDPAPTEANSAPGNPPISNRMQVKGVPDGFFDGNKNSNGMQPSEPSQSSKAVKSSETSEVKGSLPEGFFDNKDADLRARGIQPPKIDINDAYKEFEKEIQEDLQEVDDRLEEEEIDAAAEREEYLTLEQEEYRQRVDMLKKQLTESKAARTTKANSKPVGMDMLSSSDSSSDEEDDSTDFAVDWRAQHLK

SEQ ID NO: 140982 - protein, 453 aa, Oryza sativa
  Clone ID: PAT_MRT4530_4212C.1.pep
MADNMPPAVDDDLQELIAELMEADLQDPELEQSLTTVLSLATNYLDDPDPPSPELADWAATLETNSTIIADGLASRLLDFRRGLAVFAGTGRPEKAVLRKHVAWVDARRADAADIASAARRLLEKELRCFAARDHPVDPEVAELITAMRESTKSRVLQDSSGGDAVRRAGLLDIAIKFEDAVVEEMTALKEKLTRGAAVFFAGEEELVQALQKHAATAEAEIAEAQAFSAVLLADANRTASPVVVVQKRAAPETETETEEEPPRQRRRTGDAGDKSSSGRPGGRERARMEREAQGLRRRRSMGGRFRAEIQIDPGVAIPRGPDAGFAAAVREPLVKLQRPKFEFEQWDWDYISWPHDRLDANLQMRDSDPEATFEADRKASDEFLRRSTLQLNKCERDRRKPEQQDMELEDQDMFVASLLHVDDEPTGCRSSSEPWRTAGQRSAITPHMGAAY

SEQ ID NO: 140983 - protein, 64 aa, Oryza sativa
  Clone ID: PAT_MRT4530_42130C.1.pep
VHFIDSLPEVYPVVEEWVEDVLMDEGNATIFTLFACLVTVLYLRERQRRQAAAANPQQPDGAPN

SEQ ID NO: 140984 - protein, 99 aa, Oryza sativa
  Clone ID: PAT_MRT4530_42131C.1.pep
FMVPTFIFVLFARRIACMVYFPSAPLVFVASVECSSVPSIDQSGSFLPSMVASCRVRGPSFRFWSGRRGSARSRPSSSAGSCGPPGRTTDAWAPEIRPV

SEQ ID NO: 140985 - protein, 43 aa, Oryza sativa
  Clone ID: PAT_MRT4530_42132C.1.pep
KTACGHLHSGMAIARPSCKKWYHHHCSHYCSTLAFAVLADLLC

SEQ ID NO: 140986 - protein, 54 aa, Oryza sativa
  Clone ID: PAT_MRT4530_42133C.1.pep
QAGAARRARQWRSCSCQGAPSVDGVRKTTMLHLIPRVSMQLLDYIVCLDFCCSI

SEQ ID NO: 140987 - protein, 462 aa, Oryza sativa
  Clone ID: PAT_MRT4530_42134C.1.pep
MSKLDYCFSNDYMVLRPDRAGAYELLHLLFSPKVGRNKAVDCFTSTELHSFRRRLSIFLNLLLQLFLLSLVGPLVAVLGGALEFALNLASNVLHGRMEYPDRKSASYRSITGLIDPRVDLERSITPADSRYHAALCVMASKVAYENEAFIRDVVTRRWQMEFVQFFNCWNEFENAYTAQAFVFCDKAADAELVVVAFRGTPALDVARWCADVDPSWYKIPRLGRAHAAYTHALGAQRNIGWPKWVEHVKGKPQRVHAYYAIRDAVKRLLEANGRARVLVAGHGSGGALAVLFATVLAYHKEKAALDRLAGVYTFGQPRVGDAMLAMFAERNLDRPRKRHFRITYGDDPLPRLPHESSAAHFLHFGIRLHFDSLYNLKVVKELPGDGSSSSSAAEFATSRINAAWELARSAYLGYWRSAYCREGWLLMAARAAAVALPGLPFHRVQDYVNAVTLAGSNIPKDM

SEQ ID NO: 140988 - protein, 171 aa, Oryza sativa
  Clone ID: PAT_MRT4530_42135C.1.pep
SPLPPIPPRRSARQTSKQACGQTKPSSPNPKAANQKCRQGITGIPRLRRRRRRRRRGVVVVVVVVEEEAEEVLNRGVGGELIRERARRSGAATRERAKRARWPRRADCGGCLSDREAEWKGKSGETRNRNRNRINPLTRPLQGGGRRRRRRRPKGKVVVVKGEGNSQPTRC

SEQ ID NO: 140989 - protein, 73 aa, Oryza sativa
  Clone ID: PAT_MRT4530_42136C.1.pep
PPRTLFEDNKFGLPQEGGTFQALPPPPQVIVITPPFTLITPLMLGAQTPCCEGRPPSLQRVLGLGPSPPQKAR

SEQ ID NO: 140990 - protein, 63 aa, Oryza sativa
  Clone ID: PAT_MRT4530_42137C.1.pep
SDIGNIFHLQPSMDVFKGMLHDLEIGRANSDGADQGFLVGCYPDLLDRPMFHPPENGSKLNGT

SEQ ID NO: 140991 - protein, 106 aa, Oryza sativa
  Clone ID: PAT_MRT4530_42138C.1.pep
MAGNASVMRRLYLSFYNWIVFIGWVQVSWSMILALLENGYEAVYAAVEQHLLFAQTAAIMEILHSIVGLVRSPVSSTIPQITGRLFMIWGILWSFPEVISGPYSKL

SEQ ID NO: 140992 - protein, 725 aa, Oryza sativa
  Clone ID: PAT_MRT4530_42139C.1.pep
EDDIIVQMVNKLGPKKWSTIAQALPGRIGKQCRERWHNHLNPGINKEAWTQEEEITLIHAHRMYGNKWAELTKFLPGRTDNAIKNHWNSSVKKKVDSYMSSGLLTQVSCLPLNEYSAHCNSSPALTQQNSEDSGSYAVREVENSSVCSQSSLAKVSCSQVHNANVALGCDLQVNANVDNNEAHDSQSSVGHEACYTSVGAVATAIPEVHYHVSSSNFDPDQHLQEEFAQGLNLHMSMDEVPSNSSFADNPTICSIENHERSLEPYDVAMEMPLSMLPSDSGAEQKLHFMSEADFNSPNCLKSELWQDISLQSLLSGPDAVETDSFSRSNHQSDVYSSQADNEFLAPPYLLQTSNSSSVMEATYGQSPQMSVPPSLICSNVMTDVPSDNRSEPKEMTVSQAEMVTQSSSSSGDAEMSANPGSSNGSDIPSMMERIPECADQHVTNAEEPEASIEKEPSVTPSATADEKQDEGALFYEPPRFPSMDVPFVSCDLVTSGDLQEYSPLGIRQLMRSTMNVCTPMRLWGSPTHDESPDILLKSAAKSFICTPSILKKRHRDLVSPIPDKRIEKKSGTEKDCGVSDTSSIGIQTCFINATKDDAVITKSVLRIERSASSKPLEKKLEFSDENKENLDNTIEQAKDGQSAGNYKHIDEQARGERRTATNITTTYDDLPGNLQPAGILIEPNGDDLVSPDYVCKEGVSAKKLAELIVEKSSACINVDYEYVNM

SEQ ID NO: 140993 - protein, 102 aa, Oryza sativa
  Clone ID: PAT_MRT4530_4213C.1.pep
MATTEMAAPPRAPSPARACSKNVCALLLLVMTSFLRNSAIFSDELFLGRSYGGLFLGSSGSCGGLFISNGAGDIFLHSDAGDIFLGGALFFAARLVSVVASA

SEQ ID NO: 140994 - protein, 943 aa, Oryza sativa
  Clone ID: PAT_MRT4530_42140C.1.pep
MTSDNGKAPEKGGEASGPSSAPQEGEISNEPQRRRPLSGRTTGPTRRSTKGNWTPEEEDDIIVQMVNKLGPKKWSTIAQALPGRIGKQCRERWHNHLNPGINKEAWTQEEEITLIHAHRMYGNKWAELTKFLPGRTDNAIKNHWNSSVKKKVDSYMSSGLLTQVSCLPLNEYSAHCNSSPALTQQNSEDSGSYAVREVENSSVCSQSSLAKVSCSQVHNANVALGCDLQVNANVDNNEAHDSQSSVGHEACYTSVGAVATAIPEVHYHVSSSNFDPDQHLQEEFAQGLNLHMSMDEVPSNSSFADNPTICSIENHERSLEPYDVAMEMPLSMLPSDSGAEQKLHFMSEADFNSPNCLKSELWQDISLQSLLSGPDAVETDSFSRSNHQSDVYSSQADNEFLAPPYLLQTSNSSSVMEATYGQSPQMSVPPSLICSNVMTDVPSDNRSEPKEMTVSQAEMVTQSSSSSGDAEMSANPGSSNGSDIPSMMERIPECADQHVTNAEEPEASIEKEPSVTPSATADEKQDEGALFYEPPRFPSMDVPFVSCDLVTSGDLQEYSPLGIRQLMRSTMNVCTPMRLWGSPTHDESPDILLKSAAKSFICTPSILKKRHRDLVSPIPDKRIEKKSGTEKDCGVSDTSSIGIQTCFINATKDDAVITKSVLRIERSASSKPLEKKLEFSDENKENLDNTIEQAKDGQSAGNYKHIDEQARGERRTATNITTTYDDLPGNLQPAGILIEHNGDDLVSPDYGKNTMKQKQNTNMESLSVCKEGVSAKKPAELIVEKSSACINVDYEYVNILADTPGIKRGLESPSAWKSPWFVDMQFQGSYFVSPANGSYDALGLVKQINVQTAAALAEAREVLASGGQSENINSDKENLENPDAKKEPGATTKLQAKIKTEGKILDFNECATPIRSSDKKAGSSLGRSLSSPIPSSHLLKSFR

SEQ ID NO: 140995 - protein, 60 aa, Oryza sativa
  Clone ID: PAT_MRT4530_42141C.1.pep
NSASNHSAYLAVSQLLHTQGVKDTTTYINLMSSNNTTACHLRIYRSEPPHPPGSDTIFLH

SEQ ID NO: 140996 - protein, 133 aa, Oryza sativa
  unsure (1)..(133): unsure at all Xaa locations
  Clone ID: PAT_MRT4530_42142C.1.pep
HEEPQNRFRPAAAAGRLPEAGNSGGRDLSATKKFGVTLPEPSPSPSLAGAPSPRRPVASSPRSPRPACPVAPSPRAQVARPIAARLSPRVQAGAPLRPRPQAXPPASKPPPXPAPXSPPVPTSPPSHLQVTAH

SEQ ID NO: 140997 - protein, 48 aa, Oryza sativa
  Clone ID: PAT_MRT4530_42143C.1.pep
WLVGPVTLRHIKQGWRPARHESVTGSATARHTLSAGHLRPSLPQASSA

SEQ ID NO: 140998 - protein, 52 aa, Oryza sativa
  Clone ID: PAT_MRT4530_42144C.1.pep
MEHGGNGGNWPCRVPKHMMEAELLTTFQEVAIVDEVTVIKDKRPLCDLYTQI

SEQ ID NO: 140999 - protein, 171 aa, Oryza sativa
  unsure (1)..(171): unsure at all Xaa locations
  Clone ID: PAT_MRT4530_42145C.1.pep
SPSSPQTPQVRCLCLLSGPFVDSGSGAAPAGXRKLRQPCAAAGGEVGLERSATAVRRRGGAESSPSTSPADGGSTVFQSVLPAGGSTRLPELPGGRPARRRWRCRPPPSRAVLPPPSLAVPAPGVSPLSVLHRRRPRRLSPSTPPTSMPTGDSSSPPPTPTTPRRPAARAS

SEQ ID NO: 141000 - protein, 233 aa, Oryza sativa
  unsure (1)..(233): unsure at all Xaa locations
  Clone ID: PAT_MRT4530_42146C.1.pep
MPGQRGGEALSALVAVRKSHQWASTSAAWMARGGGDGDGEAQRGARRRGQGRRATAGGGRRETAAADSASGAAPVGHPEAQAAVCCRQRGGRTGTQCYRRPPARSRARTPHRLDLLCRILYESVGKVLVSALILILQTTDRFQSNLAGDGSEKQQLLGDGTNSRHRGGAESSPSTSPADGGSTAFQSDLPAGGSARLPELPGGXRRGAAAAINEWAREQAETSHLWGLRRGRT

SEQ ID NO: 141001 - protein, 896 aa, Oryza sativa
  Clone ID: PAT_MRT4530_42147C.1.pep
MASALFLWLSWLVLSLLSIYLLDLLAHSRRRLPPGPRPLPLIGSLHLLGDQPHRSLAGLAKTYGPLMSLRLGAVTTVVVSSPDVAREFLQKHDAVFATRSAPDAAGDHTRNSVPWLPPGPRWRELRKIMATELLATHRLDALHELRQEKVSELVDHVARLARDGAAVDVGRVAFTTSLNLLSRTIFSRDLTSLDDRGASKEFQQVVTDIMGAAGSPNLSDFFPALAAADLQGWRRRLAGLFERLHRVFDAEIEHRRRVAGEEHGKVKDDFLRVLLRLAARDDDTAGLDDDTLRSTSVIDNGIAQLKKPNVTWMAHGWWARLRTLISGIIAQFLPQYCNGGFVSLAFMACALSLLSVYLLDLLAQSRRRLPPGPHPLPLIGSLHLLGDQPHRSLAGLAKTYGPLMSLRLGAVTTVVVSSPDVAREFLQKHDAVFATRSAPDASGDHARNSVALLPNSPRWRELRKIMATELFSTSRLDALHELRQEKVVELVDHVARLAREGAAVDVGRVAFTTSLNLLSHTIFSRDLTSLDDHGASKEFQQVVTDIMGAAGSPNLSDFFPALAAADLQGWRRRLAGLFERLRRVFDAEIEHRRRVVGKEHGKVKDDFLRVLLRLAARDDDTAGLHDDALQSIFTDLFAAGSDTSSSTVEWAMAELLRNPLPMAKACDELQRVIGSTRRIEESDIGRLPYLQAVIKETFRLHPPVPFLLPRQATTTIQILGYTIPKGAKVFINVWAMGRDKDIWPEAEKFMPERFLERATDFKGADFELIPFGAGRRICPGLPLAVRMVHVVLASLLINFKWRLPVKLLQSKEKDRSDLAYVINAVKDLMGAAAATTATNLTILPSPRVRKSKCEEAHVMPTTAKLHTPATTKHGLTDYVASCDNEAHIQDNKWPPS

SEQ ID NO: 141002 - protein, 62 aa, Oryza sativa
  Clone ID: PAT_MRT4530_42148C.1.pep
LAQGQVGLGSEGAIRPISLTPDAAVVPDPGPSVVQNPGCRKYLRLAVPAIIIMGHRRGALGE

SEQ ID NO: 141003 - protein, 50 aa, Oryza sativa
  Clone ID: PAT_MRT4530_42149C.1.pep
YAIILINIIAKQMQSQCPYHFLSYNKEAKIIISIAMSLVTRTLAPDCCFL

SEQ ID NO: 141004 - protein, 42 aa, Oryza sativa
  Clone ID: PAT_MRT4530_4214C.1.pep
YADMIFHPSKLAILATKQQGSTHLISLSLTHSLSLAFAHSLH

SEQ ID NO: 141005 - protein, 74 aa, Oryza sativa
  Clone ID: PAT_MRT4530_42150C.1.pep
FVFNSHFICFLFFSYPMFCVTALESLVAANEAFMMDMLEAKQVAQAPTAFQELEWHRNVDKPSYSSLLNLIISL

SEQ ID NO: 141006 - protein, 119 aa, Oryza sativa
  unsure (1)..(119): unsure at all Xaa locations
  Clone ID: PAT_MRT4530_42151C.1.pep
GGLRTGGEEEAXEVSTGLGCXHWRGGALFFDDGLRRSRAAHAACSFHASGPRGGAARHRLPPARATAAAAAAARKRXRSRRTAAVDSLICCRDFGGRFLGKPFHGLCEGTSGRGVPLHR

SEQ ID NO: 141007 - protein, 87 aa, Oryza sativa
  unsure (1)..(87): unsure at all Xaa locations
  Clone ID: PAT_MRT4530_42152C.1.pep
NPTPTTLFRSHPPHTPRIXEHVPDGPTXARGRRPGNYGLSPRGRTQKXQEKTTRERTAPPPPHLAAGXLXXAXCHWETWAGXRRESA

SEQ ID NO: 141008 - protein, 84 aa, Oryza sativa
  unsure (1)..(84): unsure at all Xaa locations
  Clone ID: PAT_MRT4530_42153C.1.pep
LLHLQVAFPTFTSVRSTLLLAEMHXSHQLFAATSTSQSNSTNKGKNGKGKGKGRSSGGNGNTRNSRDSGSDGRGGDYPRSGSQK

SEQ ID NO: 141009 - protein, 35 aa, Oryza sativa
  Clone ID: PAT_MRT4530_42154C.1.pep
VCKIVHITWAGHFPIPIQSPGLARGYFTLINAIGE

SEQ ID NO: 141010 - protein, 67 aa, Oryza sativa
  Clone ID: PAT_MRT4530_42155C.1.pep
MVVKASPKRHYDSKALPGVSASSPPYHIAYGVRLIPNAPLWRLYRVLGATTAKGDATGSRGHGFCPD

SEQ ID NO: 141011 - protein, 358 aa, Oryza sativa
  Clone ID: PAT_MRT4530_42156C.1.pep
MELLAYKEGIALAIQWTLKPIVVESDCLEAAHAKVGVAAAEILVPRRPVITGKGMWHLQLFHLHDSRLDKVFIVVALIMFAYREITMVWLRVLSPPSWTALSPPVAAGSRVGGHLPVLSMDFYFFSSSAPAPEKKTRRQQQQQQQREQEGGGGGNEARYLGVRRRPWGRYAAEIRDPATKERHWLGTFDTAEEAAVAYDRAARTIRGAAARTNFAYPDLPPGSSLTPYLSPDLSTNDLHRHYYGAGAGADTQTAAALPAPAQPAHGGDAQEMAYGGGGGQNVGGVFDVVGGGGGAAWCDASELEFGGYDDAGASAAAAAVYFEEGYVHSPMFSPMPAADEVAADGFQLGGSSSSSYYY

SEQ ID NO: 141012 - protein, 65 aa, Oryza sativa
  Clone ID: PAT_MRT4530_42157C.1.pep
ALFFLVFLNFLGFKFLFFFFFFPKIIITFIQLKFPFLTFLTQGIHKTPPPFIKQIQNTHQLFLAY

SEQ ID NO: 141013 - protein, 52 aa, Oryza sativa
  Clone ID: PAT_MRT4530_42158C.1.pep
CDTGVSSTKSWTAPSMVGSIAFPPILNHAAVIGWEALTMDLSSFLVFGVPIL

SEQ ID NO: 141014 - protein, 249 aa, Oryza sativa
  unsure (1)..(249): unsure at all Xaa locations
  Clone ID: PAT_MRT4530_42159C.1.pep
MAAALAFPTCCCCRRPSLRPSAGRRGRRPVARCTLPSSEKNSFSWKEYAISVALSAGLITGAPTLGWPAHASPLEPVIPDVSVLISGPPIKDPGALLRYALPIDNKAVREVQKPLEDITDSLKIAGVRALDSVERNVRQASRALSNGRNLILGGLAESKRANGEELLDKLAVGLDELQRIVEDRNGDAVAPKQKELLQYVGTVEEDMVDGFPYEVPEEYSSMPLLKGRATVDMKVKXKGNPNLEDCVFR

SEQ ID NO: 141015 - protein, 175 aa, Oryza sativa
  unsure (1)..(175): unsure at all Xaa locations
  Clone ID: PAT_MRT4530_4215C.1.pep
KENPEFQCYPIFKYFENWCQDENRHGXFFSALKKAQPQFLNDWQAKLWSRFFCLSVYVTMYLNDCQRTNFYEGIGLNPKEFDMHVIIETNRTPARIFPAVLDVEPPEFKRKLDRMVVSYEKLLAIGETDDASFIKTLKRIPLVTSLASEILAAYLMPPVESGSVDFAEFEPNLVY

SEQ ID NO: 141016 - protein, 101 aa, Oryza sativa
  unsure (1)..(101): unsure at all Xaa locations
  Clone ID: PAT_MRT4530_42160C.1.pep
HTEFAMTDLGALHFFLGVSVTPSFGGLFLSQRQXAVDLLQRAGMAECHSTSTPVDTRAKLSTTDGLPVADPSEYRSIAGVRVVAHAVAKCCRLRQLLQELH

SEQ ID NO: 141017 - protein, 459 aa, Oryza sativa
  Clone ID: PAT_MRT4530_42161C.1.pep
MAAALAFPTCCCCRRPSLRPSAGRRGRRPVARCALPSSELNLFLLRKIRFSWQTFLCLFLVVANTEPSRHPKNSFSWKEYAISVALSAGLITGAPTLGWPAHASPLEPVIPDVSVLISGPPIKDPGALLRYALPIDNKAVREVQKPLEDITDSLKIAGVRALDSVERNVRQASRALSNGRNLILGGLAESKRANGEELLDKLAVGLDELQRIVEDRNRDAVAPKQKELLQYVGTVEEDMVDGFPYEVPEEYSSMPLLKGRATVDMKVKIKDNPNLEDCVFRIVLDGYNAPVTAGNFLDLVERKFYDGMEIQRADGFVVQTGDPEGPAEGFIDPSTGKVRTIPLELMVDGDKAPVYGETLEELGRYKAQTKLPFNAFGTMAMARDEFDDNSASSQIFWLLKESELTPSNANILDGRYAVFGYVTENEDYLADLKVGDVIESIQVVSGLDNLANPSYKIVG

SEQ ID NO: 141018 - protein, 47 aa, Oryza sativa
  Clone ID: PAT_MRT4530_42162C.1.pep
MLKIRSSLEHCAVSISRELDVDDHTTRSALLYIILGSEEAYISGSII

SEQ ID NO: 141019 - protein, 1310 aa, Oryza sativa
  Clone ID: PAT_MRT4530_42163C.1.pep
MAGSSRPDLGGGGSFREGPQLSGAGTPRALAEPPPLAQYLPLESFPVGDHKQSRATELRRVLGVTVEAEQSFGLVQTKPLPSIASEELKRIRGGVVESSAKAKEKTKSLQDSIQKLDKYRNVVTRRRQRSEGGATERSSGSGSGSLRMGAQNSMDNPGQRLEERAKSATTSKRVRSSLAADARLEGRGNVPTRQGPLADSEKSSSLEKEKNSLRNVNAASGFSEDKLRGLAPGGEGWEKKLKRKRSVGTMLNRGNDVDRDVKPLVQHRPNNEARMRSSDGLPIRHGASAGALGGSKMDGGSQQSNAGSRYLLKADMDSTSLPNERRERHLGIDKERVLVKGNKANTSEDMQPGTLNPLTKGKACRAPRTSSLVVMNSSSTLQRSSGGIDEWEETPSTNKSSPLGGTANRKRPMTASGSSPPVAWVGQRPQKMSRTRRANVVSPVSNFDEGLSEGSPLDAAVRPAVESPGLLLPRGVASNNSQVTPRMDNISSPAGLSESEDSAATENKNKDKISNSGDFENEGANSAHNSADLIISSKKSRILLKEELEDGSIRRQGRSGRNTMHVKGCASMPREKLDSPETRKLLKSGRPVSEKNESKLGRPPTKKGSDRKASSRHSEILNCGLTDISGESEDDREELLAAANAARSAIVNAYAGPFWKKIEPMLTFISSEDLSFLKHQITFLEELEMGMSKSSDEHNLNTSTNYSGPLSMGQNSSLPQSNSCVSLEQSEANGPRTRESIDILSPNDENTASQKTHAEELFGGMASLTHKLFSAFIVEDGDNSSECNGGDILLEFSNDFLPYAANMNLENDFEASAVKSNFGSSPDFKHSNHSSVHNSMSNGFTASSNLRASYSPNSICSENASDAIKFAVYPENGGFHEFVPHISQQYQNCAKSTPLPPYEYQYDQLPVHDRALIELHSIDLCPEMLRGLEVLRIGKPKLDDGEDEDIDKVITELQKRLFEQASISHKICMRTPTFHCDVSWTVFLLLLPDVFWEIDVLFLRVNTYLTLVLLDLFQVNQKKCQLHKLDKAIRDTKNMEERSLEQHAMNKLVEMAYKKLMGGRGSSSHKGGLNKAANKAAKQVALAFAKRTLARCQKFEETEKSCFREPFLWNVLSAPLPKNDAIDGGLPGSADRPKLLKLDRSPLSQGTTKWKKSDRERDQNRDASLKNSNSKSGRNSSGNARSERKTKIKPKQKLAQLSTSGNVLGRVTEPSNFAAPGQRESHDWTSTSSTRPTQPVRNSAATVAQDTLDAPLANLPAIDPMDILDVPEGNDISSWFTDGLDDSLQDFDFSGGLEIPDDDLTQLGFM

SEQ ID NO: 141020 - protein, 156 aa, Oryza sativa
  Clone ID: PAT_MRT4530_42164C.1.pep
MAAVAYDVAARALRGPDAALNFPDLAASRTAPPASSSADDIRAAAAAAAASLQHDRAGGGIAPAASGSAHQQRGGSSAAARTTAGSGGAQQEGSSGAGAGSHQYFLDEEALFETPQFLRNMAAGMMMSPPRLSPSSSDDSPDPSEAGGSLWSYRDP

SEQ ID NO: 141021 - protein, 321 aa, Oryza sativa
  unsure (1)..(321): unsure at all Xaa locations
  Clone ID: PAT_MRT4530_42165C.1.pep
MWRSCLHMPHLNYLPKGYPGRRRRRNEGRGGGLPTTAAATAAQGEATLGTAHGAVWRLRGRQRGXHEGGGAVARERRRGGEGRGEEEGNGVGESGEGVGYLXGRGGEGEGKGRRLNGDATAAHGARDDGDARAATRWRRGARSGDATGGDEAXDARGGTGLGAMERAARQWRRATARGRARGGSRREADGDATVTARQRRRRARRAGDDGAAAVARGTRRDATVTATARQRRHGAQGDATGGSGDATAGGAARGAMTRQQRRRRRGSNGDGARWDGTRWRRHAARHRRRDGARRGTMATGEGDGMAMARRDGDGGSGLKAG

SEQ ID NO: 141022 - protein, 221 aa, Oryza sativa
  unsure (1)..(221): unsure at all Xaa locations
  Clone ID: PAT_MRT4530_42166C.1.pep
MGLKSWISTGRPAVYNQGFPRNYGFQGYPGRRQRRNEGRGGGLPTTAAATAAQGEATLGTAHSAVWRHRGRQRGGTRAAAQXARERRCGGEGRGEEEGNGVGESGEGVGGARGSGRRRRAGGDAMAARDGARQHGARGFEGAAARGATARGARRWRRDGDGVRRGTMATANGGSGLKVMEWRWRDETATARQRRHGAQGDATGGSGDATAGGAARGLNIFP

SEQ ID NO: 141023 - protein, 486 aa, Oryza sativa
  unsure (1)..(486): unsure at all Xaa locations
  Clone ID: PAT_MRT4530_42167C.1.pep
IAEGRGQYWMDKEGNEDPNEEGNQDGNMEGNEEGTDRQRGAARKLEGRHIIADVAPNGEPVAPAGILRKFVGLSGWVVRDHVPISIVYWRQTRSCGDDQSFLPDTEKEMLWTTMLXTFMIPEADXARVKEWTMKKMAKXFQSYKSYMYKTYIVKGITPDFDEFTKLMDHWDAFVAYRTGERGSADXKRIKPVHQLGLGGYKKTIPKXEKMEAGLIEKDIVPATTNWLEXMKXWYYAHGGSLIPVDGSLIYAXEIRESTSRLIDAVDGYARGXGTFRPNREKDELMLAIHNPEHPGRTRGKCMVPWKXGFQEDIRTYKSHIRSMRDTEAKIIDLEYRASNYDARITEKVSRQVDQLLAEQRGLDTQLSIMPVMVSTSGNRSSSYASTGQVGSXSMEAVQAHDEPPCPIDEITQRIPCEMHIPIKNLSIKVTSVMAIPTDPSGTYHRRLIPPGYTRVEIELVECTFEDLELDIPGGDRETKLVDTTHE

SEQ ID NO: 141024 - protein, 198 aa, Oryza sativa
  Clone ID: PAT_MRT4530_42168C.1.pep
MDLEGKHKYYADFKMDLEDFMWRFTVRLIPQISFSQYTYPDSDYQNAEVLSPTIYPLDCISDVPIGFHLRFWKEPNECHSIGLSNGNEWTTTISTMSLLTIKLFTAIAPHYTGIYKKLSGEEHFGDDMLMLRKEGHICYSFVEKSNATVLIKLYSDSPMTCEHSIILQVQGNLLAQLEMLDYITSLAFLDREQSIVTF

SEQ ID NO: 141025 - protein, 251 aa, Oryza sativa
  Clone ID: PAT_MRT4530_42169C.1.pep
MAAARMLVLLASLCALLLTASAAKWTPAFATFYGGSDASGTMGGACGYGDLYGAGYGTRTAALSTALFNGGASCGACFTIACDTRKTQWCKPGTSITVTATNFCPPNYALSGDAGGWCNPPRRHFDMSQPAWETIAVYRAGIVPVNYRRVPCQRSGGIRFAVNGHSYFELVLVTNVGGSGAVAQMWIKGSGTGWMAMSRNWGANWQSNARLDGQALSFRVQADDGRVVTAADVAPAGWSFGATYTSSAQFY

SEQ ID NO: 141026 - protein, 31 aa, Oryza sativa
  Clone ID: PAT_MRT4530_4216C.1.pep
FPKLICHWYFYLTIRQNLHEFPTHRANDLFM

SEQ ID NO: 141027 - protein, 227 aa, Oryza sativa
  Clone ID: PAT_MRT4530_42170C.1.pep
MSGLSPSPRPYLSLLLSYVVPLRRPRGCGYARRDSIGIDVSGRVGVQDRRLRAVVRPRAVKFRGGGREAEQARCKGGNDRPPMVEHIEEDGDNANPGVKQVEVGDVSLGVVLAHSIDAEAAEGEGEGDGVQQHVPRCPRQHLLEVSWSGCPPTLSSSPSPFSSAGRTLPLLLFLAARGLAFLYPFVPISCVVELCLDRSRVNPLRLRTEKGGVGATQQLGVHHGWRL

SEQ ID NO: 141028 - protein, 51 aa, Oryza sativa
  Clone ID: PAT_MRT4530_42171C.1.pep
SRGISRCLSHKRFNRQSSTATPVNRAFFLPRSPQPAEEALGRVRRAKVRRV

SEQ ID NO: 141029 - protein, 72 aa, Oryza sativa
  Clone ID: PAT_MRT4530_42172C.1.pep
MKAGALKIPRLYINVFHLITTLSAGKRRALIPPQVVYTDESVRPIPEEGLTMEIVSAHQKFALLSSLLAILE

SEQ ID NO: 141030 - protein, 110 aa, Oryza sativa
  Clone ID: PAT_MRT4530_42173C.1.pep
MGTWKAKPEEEIWLTGERREVYSCFRGATGGGSSGGGGQTASAWRWRMQSSAAHSCDAVAFACGDDDGTGTVLLLLMTVVKISTAAMEWSCAVCHLLFWGTEMQKLMDPS

SEQ ID NO: 141031 - protein, 54 aa, Oryza sativa
  Clone ID: PAT_MRT4530_42174C.1.pep
PPDSPVHPHLPDFHPWRPTTSSWPYETRTGVSNNLPHRLRRLHRLHHSYEGDHP

SEQ ID NO: 141032 - protein, 39 aa, Oryza sativa
  Clone ID: PAT_MRT4530_42175C.1.pep
MRMLTGMWLKQQDDGAPVPAPALLAREMEIGAGVICSAS

SEQ ID NO: 141033 - protein, 103 aa, Oryza sativa
  Clone ID: PAT_MRT4530_42176C.1.pep
MESSFFIPFQLICKLISKNLGVGMHMVVAERAPRSRRTASVRTLPVAPPNSASAAASPPALLLRGGGPASMVVVNAPVSLPPPPPAYTGGAPAPGASHSRGIR

SEQ ID NO: 141034 - protein, 111 aa, Oryza sativa
  unsure (1)..(111): unsure at all Xaa locations
  Clone ID: PAT_MRT4530_42177C.1.pep
LPVVLKRRNWKKPWLSQXLNRFEENPLLASWGNSKKAQTNRLSKKLGSLNGKWNVPCSGXIKRGGCGVYVKXTVKFVRPLGPVLLVFFLSFLESLGGFPGKVLNGGFLLGF

SEQ ID NO: 141035 - protein, 114 aa, Oryza sativa
  Clone ID: PAT_MRT4530_42178C.1.pep
MHRETTPPGAAAGELAFSSSCPASRRGGGGEPEPLPMIILRRGRARVSSRWGEDDEHRACGIDDYGVEDTKDGSTCDHNTALAPSSPSMSQLRCFPAENFHMIDSDMLVFIFFH

SEQ ID NO: 141036 - protein, 66 aa, Oryza sativa
  unsure (1)..(66): unsure at all Xaa locations
  Clone ID: PAT_MRT4530_42179C.1.pep
XASASXSAXXRDXPPWSXXWDAQXPXEGFHGDAPRHADXRXHVXWRXVPXXXIXIPXXXXFXXXXX

SEQ ID NO: 141037 - protein, 262 aa, Oryza sativa
  Clone ID: PAT_MRT4530_4217C.1.pep
MEREAGGTEPQPVLGRMVAIEDYILYGFLPPPSEFLLLVLNFYSLFLLHLNPNSIAFLSIFSHLCEAYIGVEPFLDLFRFYYELRWMEPKKVSGCVGFRLRDGLKSRYIPFQCPSSRSKWRGRWFYLQIEDSDPVFIVSKEQPAKISSWTAKPALTPSLKSFVDIIDDLRERGLSGYEVTTDFIGLNSATVKRRVGQLMISGPTTTSNVPVPLCEKGAVEREAAINLDYPFCNAADNVFVSHDFTEREGGYNCDLVGLEVVA

SEQ ID NO: 141038 - protein, 40 aa, Oryza sativa
  Clone ID: PAT_MRT4530_42180C.1.pep
MQVGGQVHKARGGRERAHGGNAKWTMLAMADAAGRSTDDM

SEQ ID NO: 141039 - protein, 53 aa, Oryza sativa
  Clone ID: PAT_MRT4530_42181C.1.pep
FFFFFFSKQLTAVTWLWNIITIQNITTANQWCYIFLAEGYYGWMGSEWHLYIP

SEQ ID NO: 141040 - protein, 400 aa, Oryza sativa
  Clone ID: PAT_MRT4530_42182C.1.pep
MADNFSSLEEEEEYATFMAMRFKSENDGFTFYNRYAKGKGFSIRKNFARRDPVTADVIFRQYTCSREGALIHSTYGPEEFENKWVEFKDKHKVVGGVEATSESAAQSAGSESSASSAGSEGSASTAGSEGSESSASSAGSAGSEGSASTAGSEGSTAGSGPSAWSSAGESSSGSTAGSEGSTAGSEGSASTAGSEVSAAGSAGSSHGRSDGMKVVDGGNPRDLISYRINIAREMEDDEVRNEAQFEPSVQPRFDEITTEALVTEHKVVVVIDDPEEIKGDIVPVQCEGQIDEKKIDGFMEDNTVDVIHIVPEPEEIKGDNVSEDCQGATAENNNDQARGGLSLGATAAPRAPQASALGEVTAGGGGSRKPRGSRRRQPEAAGLATTAGRSVQQAAAQYKG

SEQ ID NO: 141041 - protein, 633 aa, Oryza sativa
  unsure (1)..(633): unsure at all Xaa locations
  Clone ID: PAT_MRT4530_42183C.1.pep
MEDDEVRNEAQFEPSVQPRFDEITTEALVTEHKPVIMKDMTIACSIQRFLAVVANFDKSKISQIERIGFGRMLALPDITLHRKLIGQIAERYDSKTETINIQGTAIPITTHDVKCIMGLPADGMIIKPKPHMNGEDYKYYSMYKQHKGKNISLHELARQINSAKHPDEHFLRRFVLFTIGYILCPTTKPIVSSQYLALLKDIDNIKNINWARITRDYLINCLNELKGGRRNLEGNVPLLQFWAWEHVHINDPMCTLTYVGRPPPLMAYWNEMNVMTWLKYDKKCILETGTVVVVIDDPEEIKGDIVPVQXDCQGATAENNNGDFIKDDTPTNEEPDYMFKATKERTAANGFNSHGRGDDDESPHHVYIEDDVNVPSSPENFKYPEASSPENYKDPEAHQSANFDAIMTQLMQIQQGCQFLDNKISTKLISIENTCIQNRRDIQAIKYRLGTTSRSRTFRKFKPAAKQEETVIDSRADCRQDLVDDSKNYDSQPNGTATSPHIIESDDNSQQNPTLQLSTIGGRLRRPEGRIIKPTHKSQTDFIYYKKTFPKPVKSSREPKPHDLSLLDEVTLSYISKSEDKKLLSTIAGIKIFRQHLKPLILPKQAPSKAKWLNGTVIDAYIQIIIDKQSDTP

SEQ ID NO: 141042 - protein, 406 aa, Oryza sativa
  unsure (1)..(406): unsure at all Xaa locations
  Clone ID: PAT_MRT4530_42184C.1.pep
YRYKVSMFADDVAFFIRPALQSXIENLKTLLALFGKVSGLQNNIQKTEIPTILCAHLNIERAIQSFPGKVNAFPTTHLGLPLHPRKLCKIDFVPPLEKFGSRIQGRKGRNYTSVGRKTLVKSVLSSMPIYXANFLANSEVDHKKIDQLRSAFLWKGTEPENTHSXNSLLNXQMVCRPKDLGGLGILDLQKFSRALRXKWKDDSRLWASMELRCNDVDRKLFHACTKIFLGNGKKTFFWKDNWLQGQCPKDLPNLFNLAIKKNRTISVEIHNNSXLTSFRQITNVETLHELVQLGNLLTCIQLAEDIEDDIVWTMSSSRNFSTKSAXQAQFLGSAINTQFKYNWSSDAQPNQRFLGWLIMHQKALTAENVLIRLWPCDWICSLCTNAFENTYHLFRACEYTRQVWSS

SEQ ID NO: 141043 - protein, 177 aa, Oryza sativa
  Clone ID: PAT_MRT4530_42185C.1.pep
MKDKLHRSGLCLEVPMYIDDGEYFGDETGTQLKCRHGLRPKRRTAWEWKDTGRRFLGCPLEEEDQCDALFWVDEEWQPRIQKAFEMLWLALDHASTRNPTKAQYQWSNFVDRTIVEEDKMKLEFQMASQISAIEAKHKKRVSRIKKETEDLKAWLMGSLVVIAFLLFKIIENMYQGC

SEQ ID NO: 141044 - protein, 62 aa, Oryza sativa
  Clone ID: PAT_MRT4530_42186C.1.pep
SLPPTSYNFNLLTWLYITFSHAVVFFFQNQINEGPLFYRAQFFFPPLQSPFFFFWSPLFIFF

SEQ ID NO: 141045 - protein, 103 aa, Oryza sativa
  unsure (1)..(103): unsure at all Xaa locations
  Clone ID: PAT_MRT4530_42187C.1.pep
VHKTNRSGPSILRVQIEAHNTAGQVPLTFFEWLPTYSRPNGRPGPARHGTPTARPTRARPIRHGSCSGPCRAGPRAKATAQARPKKVLXAVPGRHGYCSGTWA

SEQ ID NO: 141046 - protein, 53 aa, Oryza sativa
  Clone ID: PAT_MRT4530_42188C.1.pep
MALNASGMEAAHIPEDHCTHSAYSEPRSQAPQKPEAAAERNGTPPFNGSVLPG

SEQ ID NO: 141047 - protein, 219 aa, Oryza sativa
  Clone ID: PAT_MRT4530_42189C.1.pep
MAETVDFASGDAAEWRAALAAYDRRLAALGKPDLVEVDSFYRRDLPDLLRRRDPEPFLAKPELVRLLQWKLSRGKWRPRLMDFVKGLEDAVVESASCKAFAALPDLRKAITELTVLKGVGPATASAVLAAYAPDVAPFMSDEAMVAALGNAKEYTLKQYLAFAEKLQTKSKELSSGEEVFTTSDVERALWSSAVASKSLKAPPGNDLENKSKTHGKRKR

SEQ ID NO: 141048 - protein, 163 aa, Oryza sativa
  Clone ID: PAT_MRT4530_4218C.1.pep
MSAAGSPFMAFHALSNELLLLLAEGGSRSRRRILLHDHGRRRGGGHARRRCIAAAAAAHLVLLSDKEGSREQPIDVSKGQDSGHCDSASVALYPAERGLITSSPHQVAKGQDFAGLTSGSMDGSRSKGYGCRYRQRAENICKYRQATPTAEACNRAFSLKLSE

SEQ ID NO: 141049 - protein, 94 aa, Oryza sativa
  unsure (1)..(94): unsure at all Xaa locations
  Clone ID: PAT_MRT4530_42190C.1.pep
LYFKMRRQPXWESDSCGYHGDDGYLYRGPGKSESFGPKFTSGDTIGARINYFSQEFFFTKNGSLVGSLRNEIKGPLYPTIASHTQDEDVTVNIG

SEQ ID NO: 141050 - protein, 86 aa, Oryza sativa
  Clone ID: PAT_MRT4530_42191C.1.pep
MRLLPHNDYSPDPGGILPGRKRRYRKGGEWEEEDRLPVGSEPRSRRRSPVKESFARARFGGGGERVGGGERRGRGLRPHNMGNDGP

SEQ ID NO: 141051 - protein, 98 aa, Oryza sativa
  Clone ID: PAT_MRT4530_42192C.1.pep
SCSPDLTSHPCWSGLARSRKYSCCRRRRLSNLDLTSLGLDLTSSVPQSAVSGALVEGDSLTNNPIALNQNLNLAQPVDGEPGQPLRPPGRGFAAYLFS

SEQ ID NO: 141052 - protein, 169 aa, Oryza sativa
  Clone ID: PAT_MRT4530_42193C.1.pep
PTRPPTRPPTRPIASDGIWDALPSEAAAKACRGLPAELAAKLVVKQALKKSGLKDDTTCVVVDIIPSDYRLTSPQLSPKRNQSKFKSLLFGRRSHSSIGKLGGKSASFGSVEELFEEGSAMLEERLGRNLSLKATSAPLRCAICQVDQEPFESMMTEKGGSYCSSPCAP

SEQ ID NO: 141053 - protein, 115 aa, Oryza sativa
  Clone ID: PAT_MRT4530_42194C.1.pep
MGGGGGSLSCLGDKEGDGDDNASICAVGVRSAIVGAQSRHRSSSSPLGTPRRQICPELAIPRSHAADQAAASGDESSGDAPASAGLDLAAPLPFFQALSLLVPPLCPAARRGGRR

SEQ ID NO: 141054 - protein, 130 aa, Oryza sativa
  unsure (1)..(130): unsure at all Xaa locations
  Clone ID: PAT_MRT4530_42196C.1.pep
PAPRRGSGAPTRGSRYLGRVRELHRGEGRPAAEQEAVARGLLALLLPSHSGSFDFRVIYADQCGGKACFIVDNHPLFDGEGTPQVLLLGTSGVEISVGLHWDLKHYCAAXVSWDKTGGAXLLSVPRPGSL

SEQ ID NO: 141055 - protein, 782 aa, Oryza sativa
  Clone ID: PAT_MRT4530_42197C.1.pep
MPAPRLLRVLLLLVALACATSGVGCSDPRFPHLGRVRELHRGEGRPAAEQEAAARGLLALLLPSHSGSFDFRVISADFPLPGTVVVLICKDSQSVPWNPQDQCGGKACFIVDNHPLFDGEGTPQVLLLGTSGVEISAGLHWYLKHYCAAHVSWDKTGGAQLSSVPRPGSLPRLPSGGILIQRPVGWSYYQNAVTSSYSFAWWDWERWEKEIDWMALQGINLPLAFTGQEAIWQKVFQRYNISKSDLDDFFGGPAFLAWSRMANMHGWGGPLPQSWLDDQLALQKKILSRMYAFGMFPVLPAFSGNIPAALRSKFPSAKVTHLGNWFTVDSNPRWCCTYLLDASDPLFVEIGKLFIEEQIREYGGTSHVYSCDTFDENTPPLSDPNYISSLGAATFRGMQSGDDDAIWLMQGWLFSYDPFWEPPQMKVGVGMSMEGIEQNPIVYDLMSEMAFHHRQVDLQVWVETYPTRRYGKSMVGLQDAWKILYQTLYNCTDGKNDKNRDVIVAFPDVEPFVIQTPGLYTSSSKTYSTKLSKNYIAVDASNDEYEHPHLWYDTDAVIRALELFLRYGDEVSDSNTFRYDLVDLTRQTLAKYANQVFVKIIESYKSNNVNQVSNLCQHFIDLVNDLDTLLASHEGFLLGPWLESAKGLARDKEQEMQYEWNARTQITMWFDNTKTKASLLRDYANKYWSGLLRDYYGPRAAIYFKYLILSMEKKEPFALEEWRREWISLTNNWQSDWKVFPTTATGDALNISRTLYKKYLHDADLIQPEGIIRLRNLKNTPW

SEQ ID NO: 141056 - protein, 705 aa, Oryza sativa
  unsure (1)..(705): unsure at all Xaa locations
  Clone ID: PAT_MRT4530_42198C.1.pep
MAQVYIYAICGCARARAEIPLPAQAQASAAALPWVMSVTSPPLLRRGGWAMGASDHAAVAAAASGNGKPRARRPSAAAAAQLGEPEATDVRPTLVHPSXTSAARSLVNSTQNPDEVCTENLDVTKGPIKIVWFKGGKTNICYNAVDRNVEAGDGEKIAMYWEGNEPGQDAKLTYSELLNKVCQLANYLKSVGVGKGDAVVIYLPMLMELPIAMLACARIGAVHSVVFAGFSADALAQRIIDCKPKVVITCNAVKRGKKLIALKDIVDVSLADSAKNGVDVGISLTYENQSAMKREDTKWTSGRDVWWQDVVPNFPTKCDVEWVEXEDTKWTSGRDVWWPGCCAPIFQQNVMWNGQYIYWCTADCGWITGHSYVTYGPLLNGATVLVYEGAPNYPDPSRCSDVVDKYGVALFFTVDEKGKALEGECSGYVCINTSWPVAFRALYGDKDRYETTYFKPFAGGDARCPISDTWWQTETGGFMITPLPGAWXPLKPGSATFPFFGVQPVIVDEKGKEMEGECSGYLCIKKSWPGAFRTLYGDKDRYETTYFKPFAGYYFSGDGCSRDKDGYHFLTGRVDDVINVSGHRIGTAEVESALVSHPKCAEAAVVGIDHEVKGQGIYAFVTLVDGVPYSDELRKSLVMTVRSQIGAFAAPDKIHWAPGLPKTRSGKIMRRILRKIASRQLDELGDTSTLAEPGVVDQLIALADS

SEQ ID NO: 141057 - protein, 176 aa, Oryza sativa
  unsure (1)..(176): unsure at all Xaa locations
  Clone ID: PAT_MRT4530_42199C.1.pep
TYNILDYQIFGIPEWTTKLDGSFQFPSNFIWATGINTSSVQFIITPPNWGIITTTILDSPGHPFPHTLGQLASSSHQAHFQSSLGSIALQSTESKYPQRGXSLTDRTQPAPGDSLALPLTAKKDSPXCHCGRDQLASNWCILINFSSPSADTLMETVGLTSFLHRSXCRGSLYGFT

SEQ ID NO: 141058 - protein, 287 aa, Oryza sativa
  Clone ID: PAT_MRT4530_4219C.1.pep
MDLDKSTSTGASLKKLQEDGALPGRGTAEREVGGTEPQPVLGCMVAIEDFILCGFLPPPSEFLLLVLNFHGLSLLHLNPNSIAFLNIFSHLCEAYIGVEPFLDLFRFYYELCWMEPKKVSGCVGFRLRDGLKSRYIPFQCPSSRSKWRGRWFYLQIEDSDPVFVVPEEQPDKIPSWTTKPALTPSLQSFIDVIDDLRERGLSGYEVTADFIGRQIQPLQARAHPTFDYSGTEDATRISPRGLDSATVERRVGQLMISGPTTASNVPVPLCEKGAAERDAAINVSALH

SEQ ID NO: 141059 - protein, 151 aa, Oryza sativa
  Clone ID: PAT_MRT4530_421C.1.pep
MGRMHSRGKGISSSALPYKRTPPSWLKTAASDVEEMIMKAAKKGQMPSQIGVVLRDQHGIPLVKSVTGSKILRILKAHGLAPEIPEDLYFLIKKAVAIRKHLERNRKDKDSKFRLILVESRIHRLARYYKRTKKLPPTWKYESTTASTLVA

SEQ ID NO: 141060 - protein, 163 aa, Oryza sativa
  unsure (1)..(163): unsure at all Xaa locations
  Clone ID: PAT_MRT4530_42200C.1.pep
MNNPCFWSXKLQPYRQTAFGIRGALKLRSKFYGPFKIMEKVGRVAYKLQLPEGSNIHPVFHVSQLKKHIGSRAVPMANLPSVGPDGQIKTEPVAVLKRRMIPRGGVAVTQWLVLWHNLSPSEATWEDASMIQSMFPSFNPXGQGSAQGEGNVRNWTSFLRENN

SEQ ID NO: 141061 - protein, 207 aa, Oryza sativa
  Clone ID: PAT_MRT4530_42201C.1.pep
MQERYHSQICSKMPLITYKRRKQHEQLRSLEVELNESSIATPSRRTTHEGIAVVSTDKPRKAIALESHPTKASTTEATKCRQHTEATCTIAHRNYLHNGHCHDDLCRHLAGLMKLHVEPRSQTVTATSRAPAASPLTKTNHITCIWIENAGVFLPRSRSRNRATTSELGLPAMRLRRELGLLSVTSHPHLQAVLSSSRRPCCIAFSK

SEQ ID NO: 141062 - protein, 102 aa, Oryza sativa
  Clone ID: PAT_MRT4530_42202C.1.pep
MATEILFIWPKSNTMHMETQEAVHQATAPNLYYDRSLTCRCILVVVVLLSGGCVAVFKKQRVNAQRLPIGPFELVTCMFLMPPRPTSIATIYMAGVASMKHC

SEQ ID NO: 141063 - protein, 76 aa, Oryza sativa
  Clone ID: PAT_MRT4530_42203C.1.pep
SKPWQKRCQGLVLLLLRLVSLVSSDFGAITSRLGCVNFAVSERNHGDNIAFAYSNGMDAGNGTIPGFINLAVFYTV

SEQ ID NO: 141064 - protein, 148 aa, Oryza sativa
  Clone ID: PAT_MRT4530_42204C.1.pep
MECETGLVRSLNGDGHVLPAEATRAAMLVRINTLLQGYSGIRFEILEAITKLLNANVTPCLPLRGTITASGDLVPLSYIAGLITGRQNSVAVAPDGRKVTAAEAFKIAGIEHGFFELQPKEGLAMVNGTAVGSGLASTVLFEANVLAI

SEQ ID NO: 141065 - protein, 719 aa, Oryza sativa
  unsure (1)..(719): unsure at all Xaa locations
  Clone ID: PAT_MRT4530_42205C.1.pep
MECETGLVRSLNGDGLCMSSVSAPPRADPLNWGKAADELAGSHLDEVKRMVEDFRQPLVKIEGASLTIAQVAAVAAGAGDARVELDESARGRVKASSDWVMNSMMNGTDSYGVTTGFGATSHRRTKEGGALQRELIRFLNAGAFGTGTDGHVLPAEATRAAMLVRINTLLQGYSGIRFEILEAITKLLNANVTPCLPLRGTITASGDLVPLSYIAGLITGRQNSVAVAPDGRKVTAAEAFKIAGIEHGFFELQPKEGLAMVNGTAVGSGLASTVLFEANVLAILAEVLSAVFCEVMTGKPEYTDHLTHKLKHHPGQIEAAAIMEHILEGSSYMKLAKKLGELDPLMKPKQDRYALRTSPQWLGPQIEVIRFATKSIEREINSVNDNPLIDVSRGKALHGGNFQGTPIGVSMDNTRLALAAIGKLMFAQFSELVNDFYNNGLPSNLSGGRNPSLDYGFKGAEIAMASYCSELQFLGNPVTNHVQSAEQHNQDVNSLGLISSRKTAEAIDILKLMSSTFLIALCQAIDLRHLEENMKTAVKNCVMQVAKKSLSMNHMGGLHIARFCEKDLLTAIDREAVFAYADDPCSANYPLMQKLRAVLIEHALANGDXRARPGDLHLRQGGRVRAARPRRAAQGGGGRPRRRRERHPARXPNRIKECRSYPLYRFVREEVGTEYLTGEKTRSPGEELNKVLVAINERKHIDPLLECLKEWNGAPLPLC

SEQ ID NO: 141066 - protein, 80 aa, Oryza sativa
  Clone ID: PAT_MRT4530_42206C.1.pep
FRQDRIPMNYSRGGGQSPFFLWAYPLPQTLDEKTWTTPALLYNTIHPTNVPKSSKGVKIFTSKKIQQTFFWAPPISNKVP

SEQ ID NO: 141067 - protein, 487 aa, Oryza sativa
  unsure (1)..(487): unsure at all Xaa locations
  Clone ID: PAT_MRT4530_42207C.1.pep
ILPLGSLARSSAGSSWSGEASAGSSGELGGGGGGGEIAEAEKMGSGGSGRGARARRLRAPRRRRRRLRRXSTAATAAASTTATGAPASTAAPASAPPAAWSASSAARGTTTSCPWATRSSSXADVVVGLRRGRRRHRRRRLERRKKIAVPNESASQGQKRFDLKTFLSLALDLAPKEFRDRHDRYMFPFELLDGKAASCLQQIQLSFVSLKPPTQFSGFPKLKKLSLHLVQVIAKDLQGLLSSCSNLEWLSIVRCNLNDDELKVDCALSRLLYLRIANCEISKIEMYALKLKTFIYEGAQLPVDPIQAQELEVADIVFKGDITFQYALTVLPVVFPSVQNLTVHANFGLQVGSLVTSQTKSKFIQLKYLKLLLPQCSGDMDNIVYLASFLKAAPLLEVLEIHVSTFFNVPGYEDAGIPVLRSLPKCPYKNLKSIYITGFRGLKGQAEFLVHAVENAPALEVLTIDTATKIGVRSAQHIESAGGYAGE

SEQ ID NO: 141068 - protein, 390 aa, Oryza sativa
  unsure (1)..(390): unsure at all Xaa locations
  Clone ID: PAT_MRT4530_42208C.1.pep
DGRRGIRAELHQLAAVQVPDRVGEPRHGLAVPAVAGPAGPPPGPAPSRCPPRRRTSRTWLAPCSPSRTPPLPTSSARPPLPPXLRPPPPLPPXLRPPPPLPLPPLASATVAAPSPGSGHRRCSLPWLRPSPPPHPPAIWLQPPAPQLRPPPSLSPSAQLRPPPPPPPPALAPHHRRRSPPAAGSAIVPRAPPGEPVDPPGHXAPAPCRTSPRNSRSPSQGPPATTGPPSPSRRRRSXPRTPPGWRAWRRPRTRSPPPAPARRPAPSRTAATSRPPCSPACTRPPPERPXRAPPARSRSGGPPRRPSAAARASRYXARRPAPPPSPRPAPTGPSPAARGSYPRWPRTTSPRRSRRRARTRSPPAPAPSRCPPPPSGTPPPPTSTARPSRCR

SEQ ID NO: 141069 - protein, 77 aa, Oryza sativa
  Clone ID: PAT_MRT4530_42209C.1.pep
ILLNMLLELSLIRNALQLHFFSLCLCSCYIMLVSLLVIIGKSCDLWHNIFSIVFCTLVMTCLCSPQTTRFFCYLLHG

SEQ ID NO: 141070 - protein, 359 aa, Oryza sativa
  Clone ID: PAT_MRT4530_4220C.1.pep
MEREAGGTEPQPVLGRMVAIEDYILYGFLPPPSEFLLLVLNFYSLFLLHLNPNSIAFLSIFSHLCEAYIGVEPFLDLFRFYYELRWMEPKKVSGCVGFRLRDGLKSRYIPFQCPSSRSKWRGRWFYLQIEDSDPVFIVSKEQPAKISSWTAKPALTPSLKSFVDIIDDLRERGLSGYEVTTDFIGLNSATVKRRVGQLMISGPTTTSNVPVPLCEKGAVEREAAINALPLTDIIGPLVDHQAAASLKEDVAKEASDVAAAAATTSGGNVTDGLVRTSRKVSGSSGSRLDARRARSSGSMLSLRSESPFTTSRLTPSAAAALIPLDYPFCNAADNVFVSHDFTEREGGYNCDLVGLEVVA

SEQ ID NO: 141071 - protein, 108 aa, Oryza sativa
  unsure (1)..(108): unsure at all Xaa locations
  Clone ID: PAT_MRT4530_42210C.1.pep
APAPCRTSPRNSRSPSQGPPATTGPPSPSRRRRSXPRTPPGWRAWRRPRTRSPPPAPARRPAPSRTAATSRPPCSPACTRPRRTSAARRRSRPLRRRGARPPSVVVTV

SEQ ID NO: 141072 - protein, 178 aa, Oryza sativa
  Clone ID: PAT_MRT4530_42211C.1.pep
TYHRPVPRRVHAEHLQQRDGAVVDGDDGRRNVPDELRQLAAVQVARRGAHLLLRARRGTCARRPAPPPSPRPAPTGPSPAARGSYPRWPRTTSPRRSRRRARTRSPPAPAPSRCPPRRRISGIWFAPCSPSGTPPPPTSTARPSRCRRRLLRRRRREGGARWRSLTWRALQRRRRVSP

SEQ ID NO: 141073 - protein, 150 aa, Oryza sativa
  Clone ID: PAT_MRT4530_42212C.1.pep
TRRRRTSAARRRRRPRRRRSGARPRRRAAPWPRRTCRRRPGRPPSRPAASTGPAPCRGRRARWRRTTGRRRSRRRTRSRSPPGPAPSRCPPRRRTSRTWLAPCSPSRTPPLPTSSARRSLRRRRHHRRRREAVVTARALQRWFSPLRCIL

SEQ ID NO: 141074 - protein, 144 aa, Oryza sativa
  unsure (1)..(144): unsure at all Xaa locations
  Clone ID: PAT_MRT4530_42213C.1.pep
ILDPPGCTNSARDNYSTKQRHTLVSCTTAGMPVARRSGNSSFGNVSNGGRIRCMHVWPIXGINNFETLSYLPPLTVEXTSLKHIGYLLRXSKLGCPCLRFQPRSGFVYXREKHRFPPDTNTASYLDHFKPPCSGMHPHPFSGTS

SEQ ID NO: 141075 - protein, 170 aa, Oryza sativa
  Clone ID: PAT_MRT4530_42214C.1.pep
MDAMRQSTPRAMLLLCAVLMLAVAPPGAATAAAVAGCECGNAAAAAVAGEDARGALRLKLVAIASILAAGAAGVLVPVLGRSFAALRPDGDVFFAVKAFAAGVILATGMVHILPAAFDALASPCGGGRGGGGGFPFAGLVAMAAAMATMMIDSVAAGYYRRSHFKKPRPV

SEQ ID NO: 141076 - protein, 193 aa, Oryza sativa
  Clone ID: PAT_MRT4530_42215C.1.pep
MDLCFQNPVKCGDRLFSALNTSTYYKLGTSNLGFNGPVLENRKKKKKLPRMVTVKSVSSSVVASTVQGTKRDGGESLYDAIVIGSGIGGLVAATQLAVKEARVLVLEKYLIPGGSSGFYERDGYTFDVGSSVMFGFSDKGNLNLITQALKAVGRKMEVIPDPTTVHFHLPNNLSVRIHREYDDFIAELTSKFP

SEQ ID NO: 141077 - protein, 130 aa, Oryza sativa
  Clone ID: PAT_MRT4530_42216C.1.pep
MALVGIIIRQFCVLSLASMKEGGIRAIAPSIFEHVPVRIRKRRTVAEALLNKAWIRDISGALGVQAIREYLKLWSLLQNAGCNPSEQDVICWKWDSSGQYSSKSAYRALFLGRVPFQSAPIWKSLAPPRC

SEQ ID NO: 141078 - protein, 146 aa, Oryza sativa
  unsure (1)..(146): unsure at all Xaa locations
  Clone ID: PAT_MRT4530_42217C.1.pep
GGPMAPGKFPKASSSVFGPEDVEPXTEKVIRAPPPFVFVPEIFFASKPKKAQPIXSENNGLIRPIPNVGANLPSSIVKAGDPNNPLPVGFFSPLKTLFGFRAPPFSFFYAFLGATPPLVRAFNGLPFETKFPWVAMFFSAKFFGPM

SEQ ID NO: 141079 - protein, 105 aa, Oryza sativa
  Clone ID: PAT_MRT4530_42218C.1.pep
MTLLGKRCLTRWRGWRLLAAIMSSMACRGAVASRGRVAMAVHGGAAATATAARREGSATTGPGSGARAAVGGFGDSARQRRANPVAAPTRGGREVAPAPTRATGR

SEQ ID NO: 141080 - protein, 140 aa, Oryza sativa
  Clone ID: PAT_MRT4530_42219C.1.pep
TSWRPDPAVAGWVALEESGKRPRTPTVGGWRRRPPGSTSPNLVEAGSGGRCSGCVGGVEEEAADAGGWGMEAAAARSTSPNLVEAGSGSRRSGGIGGVGEEAADAGGWGMDVAAAGSTSSNLVKAGSGSRLSRKRLWRPD

SEQ ID NO: 141081 - protein, 59 aa, Oryza sativa
  Clone ID: PAT_MRT4530_4221C.1.pep
VYSRLISNYYTCSNPIDVACTRHLIMRPVLHVSFAKIITRTFTYNCMHDAGLIIPSHAP

SEQ ID NO: 141082 - protein, 63 aa, Oryza sativa
  Clone ID: PAT_MRT4530_42220C.1.pep
TRTSASATWPAATPRPATRASPRAPPPPYTPATAAAAPPARPPPLPPPPAPPPPPPTPPARPA

SEQ ID NO: 141083 - protein, 54 aa, Oryza sativa
  Clone ID: PAT_MRT4530_42221C.1.pep
VTVEMMIPTGARTCRNKLGLVKVTKVTILLHCREAIQSGKIIHCSTFTRSLNLE

SEQ ID NO: 141084 - protein, 55 aa, Oryza sativa
  Clone ID: PAT_MRT4530_42222C.1.pep
LFVKFSFLLHYLYRVKEFLIEYHFLKLHSNYVYSVIHRYTQLNFSCLSFNFLVEK

SEQ ID NO: 141085 - protein, 784 aa, Oryza sativa
  Clone ID: PAT_MRT4530_42223C.1.pep
MGFPASVANLGTNGRARGELIAFGFEDQKGVQFSSRGSVSVKPSDDSDLLLKPPQKPIRANGPPESVNAASPSPSRPTLEDRDKVRESLDEVLEKAEKLKASTSGNGIGNGDLRQNGASKPDSSATPAAEGANSRKTKTLKSVWRKGNPVSTVHKVVRDHPRSESRNQSSSTAKPSMPAPTKPVPPLLTKPSVVAPPPRRPVKADTSKEKKGPILIDKFASNKPIVDPVVAAALIEPVKPVRGPPAKVKDDRRKKTSTPAGPRRRMPKNDGLVDEDTAVRKGRRWSKAKRRAARLQLEASQVEEPVRVEILEVGEEGMVIEELAYQLAIDESEILRFLSVRGAMLDNVQTLDKDLVKMTTLLDYIRKSKVVASEAGGITQGIGAYQVIVQVDGNPHACVFLDTPGHEAFGAMRARGARVTDICIIVVSADDGVRPQTNEAIAHAKAAGVPIVIAINKNGTLNKGDIVVCGEAFGKIRAMYDDGGKLIDKAGPSNAVQVIGLNNVPLAGDEFESVDNLDVARERANARAEALRIERISSKAGEGKVTLSSIAASVSSGKQVGIDTHELNIILKVDFQGSVEAIRQAIQVLPQENVSLRFLLQAPGDVSVSDVDLAVASEGIIFGFNVKAPGSVKSYAKKKSVEIRLYKVIYDLIDDLRNAMEGLLELAEEEVPIGSAKVRAVFSSGSGKVAGCMITTGKVVHDCNVRVLRKGKEVYMGTLDSLRRVKETVKEVGAGLECGIGVDDFDEWEEGDVVEAFNTVKKTRTLEEASASVTAALKDAGVQL

SEQ ID NO: 141086 - protein, 862 aa, Oryza sativa
  Clone ID: PAT_MRT4530_42224C.1.pep
MTDTVLSIAKSLVGSAVSKVASVAAEKMVLLLGVQKEIWFIKDELQRIQAFLMAAEPSKKSILLKVWVQQVRDLSYDIEDCLDEFTVHVSSQTLSRQLMKLKDRHRIAIQIRNLRTRIEEVSTRNIRYNLIENDLTCTTTDERNLFMEDIRNQSANNIEEADLVGFSGPKRELLDLIDVHANIGPTEVVCVVGMGGLGKTTIARKIYESKEDIAKNFSCCAWITVSQSFVRLELLKDLMMKLFGEEVLKKQMRELEGKVPQVDDLASYLRTELNERRNNNKGSWVIVTTRDVGLAKECTSELLIYQLKPLEISYAKELLLRKANKTTEDIESDKKMSDIITKIVKKCGYLPLAILTIGGVLATKEIREWETFYSQIPSELESNPNLEAMRRIVTLSYNYLPSHLKQCFLYLSIFPEDFEINRNRLGSKYCSKISFDWSIIRSLTMFAERPVELEHSVCSSQLRMLRVLDLRDAQFTITQNDVNNIVLLCHLKYLRIARYNNASYIYSLPKSIGRLDGLQTLDLDSTNISTLPTQITKLRSLRSLRCMKQYDFSSFTTCLTDTLCLPMIFTPSVSTSDRAEKIANLHLATKSFRSKSNGVKVPKGICRLRDLQILGVVDIRRTSSRVIKELGQLSKLRKLYVVTKGSTKLKCEILYTAIQKLYSLQSLHMDAVGCTGIGTLECLDSVSSPPPLLRTLRLNGSLEELPNWIERLTHLRKFYLLRTKLKEGKTMLILGALPNLMLLHFCHNAYLGEKLVFKTGAFPNLRTLVTFNLDQQRDIRFEDGSSPQLEKIEIGRCRLESGIIGIIHLPRLKEISVEYKGKVAMLAQLEGEVNAHPNCPVLRMAMDRSDHDLAGNAKGSPP

SEQ ID NO: 141087 - protein, 248 aa, Oryza sativa
  Clone ID: PAT_MRT4530_42225C.1.pep
MPRPTQSNPHSSSAAPPFPVKGVFTYEQLTAAMGNFAEPSETSLLRPQRAPLPGRVPHPPQGLPHFADFCPRAASIAFPALGPLYPLRWLFLRRPRIRDNPKHGGGREAQDRGHAMPLPYPAGRQPRRSLLHVVFPSIPAALLIGSQWREELTGLPERRGREDPQLLEEPPELSLLPSPTLPLVIVVGDRSRRGHGAAVPIDPLSPQRNTAAFLFAHITNLGQCQQLGMPTASSMASMVREEGRGSRR

SEQ ID NO: 141088 - protein, 68 aa, Oryza sativa
  unsure (1)..(68): unsure at all Xaa locations
  Clone ID: PAT_MRT4530_42226C.1.pep
FFFFFFFFFFFGPKNQGNQYPIVHILNCSSYIKLIFLYLXXFFLYLTYIXDEXYQIFSTIFYNCSDGF

SEQ ID NO: 141089 - protein, 91 aa, Oryza sativa
  Clone ID: PAT_MRT4530_42227C.1.pep
MACLANLRGSFPFVCANPLLLWLRLPQAFLILTVLDPICLRMIVLMLGEKSDENVAIVFKVANMKGKKLATFTNPMLVLILKASSGFARIS

SEQ ID NO: 141090 - protein, 235 aa, Oryza sativa
  Clone ID: PAT_MRT4530_42228C.1.pep
MAPKRRRARPADESSTPPPPPPPLRTAPSHLQPVVVFAHGAGAPSSSDWMVHWKDMVKDALDAIEVVTFDYPYMSGGKRRAPPKAEKLVDHHLGVVKDAVAKHPGHPLVLMGKSMGSRVSCMVADSDDIIVSAVICLGYPLKGVNGAVRDETLLKLKIPTMFVQGNKDGLCPLDKLEATRKKMNCKNELHVIDGGDHSFKIGKKYQESTGVNQQAAEMEAVKAIAKFVQNSIAGT

SEQ ID NO: 141091 - protein, 48 aa, Oryza sativa
  Clone ID: PAT_MRT4530_42229C.1.pep
AASTPPPPPPPPPPHRVATSTSRRPYRWPPPSSLSPSRAQPSPPLPPP

SEQ ID NO: 141092 - protein, 54 aa, Oryza sativa
  unsure (1)..(54): unsure at all Xaa locations
  Clone ID: PAT_MRT4530_4222C.1.pep
HLSLTNSSFCPXPCKLCMCLFSSSKIPDLXLCPGCRKEYVPARLSRSCSMAPTY

SEQ ID NO: 141093 - protein, 53 aa, Oryza sativa
  Clone ID: PAT_MRT4530_42230C.1.pep
KLIFAADKLVSSSQYSCHTSVRAHACKVCEHCTQIVSPSGNTGAGRRAYQLTL

SEQ ID NO: 141094 - protein, 99 aa, Oryza sativa
  Clone ID: PAT_MRT4530_42231C.1.pep
CAPHRARSGREWRGARASRGTATTARTRRRRRPCRCGRRPPSSAAATPRPRRRGSRRRPACAAPVSRPPRPPSAASWSACSRPRRRRSPAAGPCPCRPP

SEQ ID NO: 141095 - protein, 161 aa, Oryza sativa
  Clone ID: PAT_MRT4530_42232C.1.pep
MVNSGEKYTEGPSACHRVTKLSPTEKPNIRHLLTNQNQFFDGFDSGFIRRRPTSGEEAGSRIRVVRPYHISEKKNKWRSRHGKRKPKRRADVCVSVTYYARTGAEMQIESRPSSNRCAGWSYASNRRIEPAAAAVASSPPQCGRHRIDPTNDHHLSPVSCR

SEQ ID NO: 141096 - protein, 50 aa, Oryza sativa
  Clone ID: PAT_MRT4530_42233C.1.pep
SPPVFKSLKESKRACPDAFVRIIGFVNFRQVPVFRFMANKPPGFEKVGGK

SEQ ID NO: 141097 - protein, 76 aa, Oryza sativa
  Clone ID: PAT_MRT4530_42234C.1.pep
MAAAVAAPSPYPPSSCGRSGVGGVRGRIRSGGSLRRNSSPSGDGSGAALDKTESATCVAHATFHLGLDLYVWAFIC

SEQ ID NO: 141098 - protein, 398 aa, Oryza sativa
  Clone ID: PAT_MRT4530_42235C.1.pep
MAKQSCCHKKKLRRGLWSPEEDEKLMNHIAKYGHGCWSSVPKLAGLERCGKSCRLRWINYLRPDLKRGTFSQEEEDLIIQLHSMLGNKYVLYSSSTHICQSLSRSVPSLTMAAATATALARWSQIAAQLPGRTDNEVKNFWNSYIKKKLRDRGIDPATHKPLAADSSATPTNTTAAAASRSTATCRAVFSDAELQIPTAAAVQQQQQAPLVGAMQLVDGIKMPLDDYWPAAAAAAAPSSSTTTFSAYHHALSMQQQAAAGCGAAAAFDMDALSHCGVVVAPSASSSSTLTSMAGLSPAAADAAEQSANVAAAAAATTTNLPWLDLGHANPIATMDHYAGVLDELRWSDYFDGAYQAATTATQGGALQGQCLYDGGGGGGKDVDDAVQFVDVHSLSNWC

SEQ ID NO: 141099 - protein, 41 aa, Oryza sativa
  Clone ID: PAT_MRT4530_42236C.1.pep
MDTYRVASARLAVDGYVAYHRKRLAVDGYVAYHRKYNAIKS

SEQ ID NO: 141100 - protein, 135 aa, Oryza sativa
  unsure (1)..(135): unsure at all Xaa locations
  Clone ID: PAT_MRT4530_42237C.1.pep
MLLPLWRSAAAAVVACRTPREQPLAAPPWPRRRRGGRRRREVGSRRRTXDVGRRRRPRERAAPAGAEEPRRLQGGEHPRHDGDRRRGDDRXRRVTAPPPPSWPRRGTGVSRRRRRRRSRGRRRWWCLLVHAYLSK

SEQ ID NO: 141101 - protein, 184 aa, Oryza sativa
  Clone ID: PAT_MRT4530_42238C.1.pep
MPPPFLGKVVGFLGPVSFGPLPFFFPVEMYIAQRGVPRGSGRWVSLKTLRGGSLFFPIPPGGGSIVEVIAPPKGSPPFPEFLDRGGPGAPLNFFFLSLSQNIPTLFKWGEIGVVFRGEFLVLGNFPPCFKLLYFGAPLVQFSPKGKKKEEMFPVGFFLGAQKKKKKKKKKKKKKKKKKKKKKKK

SEQ ID NO: 141102 - protein, 791 aa, Oryza sativa
  unsure (1)..(791): unsure at all Xaa locations
  Clone ID: PAT_MRT4530_42239C.1.pep
MTRSMVPVFTRESYDIWCIKMWTLLLSRIMGYWKVLLSGPNTLITLIAEHNKSLTENRMTDAKALFLIQXGVVESLFPRIIGTKKSKEAXDKLKEEFXGSQKLLAVKLQTLRMQFQNLQMKASEKVKDYFSRLIKIVNQMRLYGEDIKDQKVMXKILISQPKKYEYIVAAIEESKDLSTLTTXQLMSSLESHEERKLQREGNFVENAFQSKLSFRPQNLRFCGNFQKNGFPMQDRGCFQKKKGFSKXNMMQKEDNQERIEKELEKLIGLIFPKKRKNXEEMIFSCRTAXEEKDNVWVIDSGCTNHMAADPNLFQEIDSSYHAKIHMGIESISQSEKKEFSCKILDRKNNRLVXKINMGTNINFLLKMNHPTQMALRSEVDISNLWHKRMGHLSYRALKLLKTKGMVQDLLFITLKFDPCEGCVIGKQIRTAFPHSGAWRANAPLELVHTDIVGKVPTMSQGENXYFITFIDDYTRMIWVYFLKEKSAALNTFKKFKSMVEIQSNRKIKVLCSDQGGEYISIKFEKYCENACIQRRQLTAGYSAQQNGVAKKNRTINDMANSIVQDIGTPKSFWAKAVNTAIYILNRSPTXAVPNYTPFEAWYSXKACHLWSYERVFGCICXAQVSAQKRVTFDNRSDRCIFVGYADGIKGYQLYNLEKKKIIIXRDVIFDENARWNWKRPCATSRPLGGPAIDIYSMPLITGSRRRPRDGDVFAEAPPEPLHPLRRQSDAHLNAAATDIAPVFATDTTSTFAGLPNPKSTSYTRNLGDPATESGGAPLVLTSKLCSLYLSQ

SEQ ID NO: 141103 - protein, 61 aa, Oryza sativa
  unsure (1)..(61): unsure at all Xaa locations
  Clone ID: PAT_MRT4530_4223C.1.pep
IVPSVQYLRWKCGVLWHILIXXLEYCLKWLTYSYHKSCGRRWYMEVVILIIISSLSLCAYA

SEQ ID NO: 141104 - protein, 80 aa, Oryza sativa
  unsure (1)..(80): unsure at all Xaa locations
  Clone ID: PAT_MRT4530_42240C.1.pep
IFQLSAPQGEFYEPPPSSEPSXCANSDWEKLRDRLCLPFFPESKPAISXSLTKESSLEPSPDSKEXQAPGCTPKFRDDPH

SEQ ID NO: 141105 - protein, 1122 aa, Oryza sativa
  Clone ID: PAT_MRT4530_42241C.1.pep
MIATAALPPAARSAEALAAEVGGHAHAAADELRGLARRLDAVGAAAAGAEAREARDAGARAWLREILDALYELGDARDDFRRAADAAARPRRQQEEGRRSFLHWFTIPPNLYGMRYKTLKTSINSLNMKMDGILQKGSELGLLPIDQEILNERSEISLEVIPDDYIVGDIENEANKLIDILTDRKSAKTLVAIVGGSGTGKTTLAWKIHDDHRTRNAFGMIVWVSVFNDFDDIGLLSAIVTAAGGNPKEAKNRTQLELMLASMLKGKRFLLVLDDVRGHQIEENSLEAHWHVCGHGSRILITTRDENVATKLNASYIHQVKELSFQNCWSLLCCNACLDENLHGNTLRNIGIMIIQKCKKIPMAVKIIGAVLRRKEQTQESWQRVYEFEGWSFDDLRGDVQGLTGAIYLGYHDLPSHLKQCLLYLSLFPEGSTIRQQFVTQLWISEGLIDRQDDCSAEKIAEEYYEELISRNFLQLETGNRDITRCTMHDQIRSFLQFFVKDKICSGEVKPGTNGTSSEGLRHVWISGTSTTTNLEETVTSLKTVILYKNPLRNQGLDKLFKGLKYLHVLDLGGTEIRYIPRTLEFLVHLRLLNLSLTRITELPESISYLRNLQFLGLRYCNWLHTLPKGIGNLHRLQTLDLRGTSLHQVLPSLVNLKQLSTLHGFTVNRTPIPEDDPSGWPLENLKDLNALRSLQILKMEKVSDFSRVKEAMLEMKSQLKDLEICCSNDDRLAEAREDDSRTLKQIFDSLSPPQCLKSLKIVSYYARHFPNWLPCLTNLQRLVLSDCKFCEHMPDLSKLNQLKFLTITGCSKLLTVEQESTGVTQAFPKLEQLHLKDMPKLVSWIGFASGDMPSLVKFCLESCPKLKCLPEGLKYSRVLRSVQIRHADSLEVIQDLPVLKELNVQACNELKIVSNLPLLEVLTIRRCPRLDDVSGVHYLSHVCITDKELRKLPDWLSIHAPVLQTFNIVGVSELLDRLLPNGEDWEIIRQIDKVYANLLDESPFFTYTKSSGDFHVDQRIGEINKPPVVLGHGTAVGGLSIPDHSVEISSQIGVSRVPMNRISTLRWVVRSYLVPYLIMVMVVMQFLSYYLHNRSTREIWLVQTLFIFFATVFLLLLVFLD

SEQ ID NO: 141106 - protein, 83 aa, Oryza sativa
  Clone ID: PAT_MRT4530_42242C.1.pep
QHLVHEWRVHVLVWPAFPLPRKIPSPSARPSLPLRTEESNLIHPLHAHLEGTHLPQSGGGGSSRRGGYGGEESSPRGDRAIAC

SEQ ID NO: 141107 - protein, 41 aa, Oryza sativa
  Clone ID: PAT_MRT4530_42243C.1.pep
VLVPLVRSSCALCFLLVWRRCPLRLWDPPFSFRWAPRGRDP

SEQ ID NO: 141108 - protein, 53 aa, Oryza sativa
  Clone ID: PAT_MRT4530_42244C.1.pep
MERGGPCDSLCRFRIHLGTRGDCPLPAGDGVKSSLKLRAKSEKICPESSFRED

SEQ ID NO: 141109 - protein, 285 aa, Oryza sativa
  Clone ID: PAT_MRT4530_42245C.1.pep
MMRGLGPAAAAALGGRSAARWCTYRRVTVAVCLGNLVAVLLVVKKLEKVFAREEKRRKELPLELKQKVSYEILERMRDLGENSNTTEQREALESWRLEKLKDIRSASAQNLSMSDLSNEESRMLKRALELNWRMLMDDIGLWIPVSVWHTEHDDKPENEPEEEEIIAGPPLPPECNAQVHTDYGGAAVRWGLTHHKESAADCCQACLDQAKRARPGALKCNIWVYCPSEYGCYSPDKYEHKHQECWLKQADHPKLNFKDRYSESYRDAHPSAPVVVPWMSGVITV

SEQ ID NO: 141110 - protein, 245 aa, Oryza sativa
  Clone ID: PAT_MRT4530_42246C.1.pep
MAVVSREGDSDGKESGSATAGPRSTNPSSSQPSSLSSQPSSSLPHALVAVAVAVAEAQAGTFSVEFRTRDGCRLGISRYPDFAYNAQGGRGVGVVASSGEDSGTVLVEFDVSSLYIPAMSGATTKFLGLPLPPFLKIDILPEALRGNIDPTSGQVDLKFRSRFCFSVGSIYRAPPLFVDTTLTSEESSGAIRRGTGERMDGEGRCKLVGVAVVDPIDDVFMNTFLSLPTECIAYLNATISITEPS

SEQ ID NO: 141111 - protein, 246 aa, Oryza sativa
  unsure (1)..(246): unsure at all Xaa locations
  Clone ID: PAT_MRT4530_42247C.1.pep
MMRGLGPAAAAALGGRSAARWCTYRRVTVAVCLGNLVAVLLVVRSLYSAPGYFASAPSVAVKYSEEQIRLVEESIRIRRAAVSVELVEAVKKLEKGVXREEKRRKELPLELKQKVXNEILERMRDLGENSNTTEQREALESWRLEKLKDIRSASAQNLSMSDLSNEESRMLKRALELNWRMLMDDIGLWIPVSVWHTEHDDKPENEPEEEEIIAGPPLPPECNAQVHTDYGAVLLILKMGLHTAKE

SEQ ID NO: 141112 - protein, 80 aa, Oryza sativa
  Clone ID: PAT_MRT4530_42248C.1.pep
LSLLFKMPRYNPIKRITARQAIEHVILQEPLDGTMTPAMALHWIGKMYGAGAPRFIPSVKAVSLVWAFLSFSCMFQILCV

SEQ ID NO: 141113 - protein, 98 aa, Oryza sativa
  Clone ID: PAT_MRT4530_42249C.1.pep
HEASAEFGTRGRRRRRRVRHGEARAPPSACLRFFGSSVRLTIGCSHPPPTSPFGPRLEESGEGVCGRRGTGGEWGFRASLDDIYVLKRSYDGKSKKDQ

SEQ ID NO: 141114 - protein, 113 aa, Oryza sativa
  Clone ID: PAT_MRT4530_4224C.1.pep
MTSSRLVGRAQGMYVAAGKDALSLMMSMNFVFADDGPYNGSSLVVFGAVFSSLAAWLPTARRRRPVAAALPSPRRLACSPPARAGRSCAWPPPALRCRQRRQVGLGFDRVQRG

SEQ ID NO: 141115 - protein, 170 aa, Oryza sativa
  unsure (1)..(170): unsure at all Xaa locations
  Clone ID: PAT_MRT4530_42250C.1.pep
LQPKNAIWKCWGHLRCKFFIWLAINDRCWKADQLARRGLQHSVSCPHCDLSQESIQHILISCVFSRQVWTAIFLRLGLAEVAPXPSTDRFLRWWSQATKNRPKKVRMGINSLVTLVAWKIWKYRNDYVFNGANPRVVTILQVVENESHPWSVAGASGLQKLVCGTASLGS

SEQ ID NO: 141116 - protein, 54 aa, Oryza sativa
  Clone ID: PAT_MRT4530_42251C.1.pep
TKTKRPAGMCLTREPNPYPVPPELICWPKGFSGQSWGPPFRKKKEGVFFGAPLN

SEQ ID NO: 141117 - protein, 57 aa, Oryza sativa
  Clone ID: PAT_MRT4530_42252C.1.pep
TCNASALNTPKVNAVHYPYNKILQFLSDILSDKALIYFLFKSKHNQRVYTLIHYYFS

SEQ ID NO: 141118 - protein, 596 aa, Oryza sativa
  unsure (1)..(596): unsure at all Xaa locations
  Clone ID: PAT_MRT4530_42253C.1.pep
MASPSSVASARAAAEGAATVAARGGAEPARALRLPPANGARRGVRCCCGAANPGGGSGGGGGAVAREEFVGFFREAWPYIRGHRGSTFVVVISSEVVSGPHFDGILQVLXMDISLLHGLGIQFVLVXPGTHVQIDKLLSERGRMAKYVGQYRVTDSDSLEAAMEAAGRIRLTIEAKLSPGPPMLNLRRHGVIGRWHGLVDNVASGNFLGAKRKEVVSGIDYGFTGEVKKIDVSRIKERLDSDSIVVVSNMGYSSSGEVLNCNTYEVATACALAIEADKLICIVDGQIFDEHGRVIPFMSLEEADMLIRKRAKQSDIAANYVKVVDEEGISHLHEDVKPFLNGSGPLGAYAASFHNGLGFNNGNGILSGEQGFAIGGEERLSRSNAYLSELAAAAFVCHGGVQRVHIIDGTVDGSLLLELFTRDGTGTMIARDVYEGTRIAREEDLLGIRKILRPLEESGVLVKRTDKELLEALESFYVVERDGSIIGCAALFPFPEDKSGEVAAIAVSEECRGRGQGDKLLDYIEKAAMSLGLEKLFLLTTRTADWYATLSFSWSIIWVVSYAXRKRINLSRGSKYYIKQLQPKHASVTPNNITAR

SEQ ID NO: 141119 - protein, 37 aa, Oryza sativa
  Clone ID: PAT_MRT4530_42254C.1.pep
RSCRCCCAGSPRQLMRRRRVHMITGCRCPAIHSLQPG

SEQ ID NO: 141120 - protein, 56 aa, Oryza sativa
  unsure (1)..(56): unsure at all Xaa locations
  Clone ID: PAT_MRT4530_42255C.1.pep
RLSVRRRGRGVGXPVDGLEGQRIRRDIXASASFLPPAASASCVRRHGRRCRRRRTC

SEQ ID NO: 141121 - protein, 82 aa, Oryza sativa
  Clone ID: PAT_MRT4530_42256C.1.pep
VAKSVWEGRTDLGGQALGWWPRRFRGRCESGDGVDVLGGEAGFMVDRVHGGGSRKRTAEIHPSKTDGQDPTDPRPGHGERRR

SEQ ID NO: 141122 - protein, 165 aa, Oryza sativa
  Clone ID: PAT_MRT4530_42257C.1.pep
MDRLLLFRPRKPASSSSVAAVADGDLLERDVLWPASSAPGLLAALPDDEGSKKKKRAGPAAVRSASRPVPETAPLTPTAGAARSAPVRIPSEAAAAAGRRGRWAAAQSSVGGEDGDAAMVVPPHEVVARRAAAHSSVLEGAGRTLKGRDLRRVRNAVLRRTGFLD

SEQ ID NO: 141123 - protein, 218 aa, Oryza sativa
  Clone ID: PAT_MRT4530_42258C.1.pep
MAATTMPPPLLLVAAAALIAVVTATVAAGAGEGPACDTAHCGRGQCVEQPGPLGLDTFRCDCDAGWSNMFAFLPASPCTIPKCTFDNACFNITFNFPRGFPLTDPCVAINCGSGGECVKEEGLSYHCACSPGFVNMFNLTMFPCIKNCAFGKDCSAQGLSPPGSPPPPPPPSPSSSSPATPGNDSHDSSGHPSCPKGNASTVATSTTSLGYTITRFFT

SEQ ID NO: 141124 - protein, 112 aa, Oryza sativa
  unsure (1)..(112): unsure at all Xaa locations
  Clone ID: PAT_MRT4530_42259C.1.pep
YPAAVAIPATIGHNPAWRRSSRPSSSSDPPTSPAAIVVPPNPAKRRRFGSPRXPPPRRVPPPPEVWKHEAPPPSLQPHGFADGRSDGGEVEEGRWERGDGRVVVSRATTRRE

SEQ ID NO: 141125 - protein, 95 aa, Oryza sativa
  unsure (1)..(95): unsure at all Xaa locations
  Clone ID: PAT_MRT4530_4225C.1.pep
KYXXLXHRIXIPGGKRQXYGFLAEKEDLEAFNRHHGKDYLKYEMKSYNEMVVTQLKQXSEDNQQLXYXKXEMVKTERHSKXVEEAXGVETQKLQX

SEQ ID NO: 141126 - protein, 60 aa, Oryza sativa
  unsure (1)..(60): unsure at all Xaa locations
  Clone ID: PAT_MRT4530_42260C.1.pep
GQKXMTHFFCLGKQAKSHPRVNALDHLQAMVFFFFKIQAASTNFTNVPNSKLWRIFSTLS

SEQ ID NO: 141127 - protein, 36 aa, Oryza sativa
  Clone ID: PAT_MRT4530_42261C.1.pep
VLNVMFPISRFGSQHISSPQVCILLVNLLVIDIELR

SEQ ID NO: 141128 - protein, 159 aa, Oryza sativa
  unsure (1)..(159): unsure at all Xaa locations
  Clone ID: PAT_MRT4530_42262C.1.pep
PPPLLLSRLRLPPPPPPLPPLAPTTATPPSHGSGHRSRSLHRMQLPPPLPLPFLAPATAVTPFPSSGHRSTPLLSSLMYPPPAARTRRTALPSSTSSGKTIXPSAIARMCYGAPPIAATRSAADAIPIXPSDLPPSPSPPLDTPPPPSPPSDPLSSSSP

SEQ ID NO: 141129 - protein, 153 aa, Oryza sativa
  Clone ID: PAT_MRT4530_42263C.1.pep
LFVFFFFCLICLFFLYCFFCWVGTRTKKTYARGTHRQSLNQYKVPTWGGGGGGFLNTLKKKQPENLGGLKNPKGAYWPKKATIFTGGGRGVPKRNKKGVCPTTRKTPFFGVTSTVGQAPEFGGTHGGGAEKARKIEGGPQWTMGNGGATKEKP

SEQ ID NO: 141130 - protein, 168 aa, Oryza sativa
  Clone ID: PAT_MRT4530_42264C.1.pep
FSLLHLVSCCATLVVSFIPGLASQELASRQDQQPQQLLLHQQQRQEEEDLESEQQRNQWLVIRLYEAINARDHTAAHALLAPDLEWWYHGPPASHHMMRLLTGCASPSSSSFRFRPLSVHALPAYDVVIAEGITGRYHDSYWVHAWTVGPGHNGDRVITHLREYLNTD

SEQ ID NO: 141131 - protein, 424 aa, Oryza sativa
  Clone ID: PAT_MRT4530_42265C.1.pep
MSSSSNNNKKMKAPLSFASSRQGSGGLSQISEDGIPDLTDSIHGAAHHHGRSEENVSTHDHVVRSFSSGGFSIGSWEDSNSIVFSTSTGKSGAHGNDDIIATLSNYESQLVAPREMAGVEKYLQMQHDQVPFRVRAKRGCATHPRSIAERERRTRISEKLRKLQALVPNMDKQTSTSDMLDLAVDHIKGLQSQLQIIRHYPENLQCWSGVATCMGPWKGRFTTLAGRSVLVQSVLFSIPVHESMAIGLPVWVIKAIDNKRRAFLWTALRAPLLGWPKGPSLADRLRHVRGIHFLCAGKWFFLWFAFQRRCWTADLIQKRGIDSHLGCPFCVQDLDTANHILFDCMFARWFQDWWSSFRACLPEHLYDSFDSLVFLVSWRLWKERNSRVFDSALSSISVVLEFIHSEGHMWSLAGVVAFGDLLGV

SEQ ID NO: 141132 - protein, 137 aa, Oryza sativa
  unsure (1)..(137): unsure at all Xaa locations
  Clone ID: PAT_MRT4530_42266C.1.pep
SRSGRGRAAAGGSGRGRAAAGGSGEGGGHATAGGSXAGRAAAIRLGQGSADPGRLGRGRAAAGRSEQGRADAVAHASPRRGPLPPESALRAAAPTPNAFSSAAPAARYLPPCPSPCMPPPPPESALWAAPGASSSAA

SEQ ID NO: 141133 - protein, 373 aa, Oryza sativa
  Clone ID: PAT_MRT4530_42267C.1.pep
MAKPFPDPPKPPVPEPPKPGSDGACYDCPSPPPPPPPHSRDHRRVVIALATTASLLFAILLAFSVYCFIRRRRQQRARREALLAPPPSDAAGGGGAPGAPVAAGDGAVGGAGEGEGEGEVLHHAWHIRTVGLDEAAIESIALARYRAGAGMLGATDCPVCLGEFRDGELLRLLPKCGHAFHVPCIDAWLRAHVNCPLCRAHVLHPADADADAGDGERVPPPAGANGGGGGGGGAATDQASSPTDQTADQENPGQQQQGEQHELRVQIDRRDQPSSPEPPRRSPDPRSAQSFRRVASMGSRSPPAPSEDAPEDEQTTTQSSKEKQGSGGDSACCGKAPSGSGRLHHMRRSFSGGGGRRSLPSRHGRTSSSMLPL

SEQ ID NO: 141134 - protein, 67 aa, Oryza sativa
  Clone ID: PAT_MRT4530_42268C.1.pep
MANMQLSLGDWENIKKERRRLLVEEAEDKQQGWFVVDEKKGRKYFMAHDRADKKVGVTISELHMIVI

SEQ ID NO: 141135 - protein, 89 aa, Oryza sativa
  Clone ID: PAT_MRT4530_42269C.1.pep
KKKSRGWNKGDTKNKCWFHLKIKRHGPFNLILLEAHYTRAAHDVRRGELAGAERPELDRSIVTPSSLGRRPRRVLGRRHRTGGGRDHGP

SEQ ID NO: 141136 - protein, 131 aa, Oryza sativa
  Clone ID: PAT_MRT4530_4226C.1.pep
LTKEQRLELNARRRVARQSMPDVEIHDMNACRRSRRQNVTPGERSAHLARRNALYAARRDKPCAESIALECPEGSIPLLLNPTPCLETTGDVPSTSSLQTEHAVDHQARSCTFNDGIIYICFHSYSQFGGI

SEQ ID NO: 141137 - protein, 259 aa, Oryza sativa
  Clone ID: PAT_MRT4530_42270C.1.pep
MRRMLLLLLLLPAAAAAVSLPPSNKVVFILGGQSNMAGRGGVVGSHWDGMVPPECAPNPSILRLSPQLRWEEAHEPLHNGIDSNRTCGVGPGMSFANALLRSGQFPVIGLVPCAVGGTRMADWAKGTDLYSDLVRRSRVALETGGRIGAVLWYQGESDTVRWADANEYARRMAMLVRNLRADLAMPHLLLIQVGLASGLGQYTEVVREAQKGIKLRNVRFVDAKGLPLEDGHLHLSTQAQVQLGHMLAQAYLNYGTSTL

SEQ ID NO: 141138 - protein, 106 aa, Oryza sativa
  unsure (1)..(106): unsure at all Xaa locations
  Clone ID: PAT_MRT4530_42271C.1.pep
RTRGFKGYLIGNGATDQDYDFNSFVPFAHGMGLISTELFEDACTACHGTFXGKVNNLCQEKIDRVHWELKDLDKYNILAPCSITLKFKNYESXNSSVPSSFRKLGE

SEQ ID NO: 141139 - protein, 185 aa, Oryza sativa
  unsure (1)..(185): unsure at all Xaa locations
  Clone ID: PAT_MRT4530_42272C.1.pep
AILSASANRRRAIGDRVVVGGALVRYWATALSTRPHPCSCSCMLCFAVCTVQQLLLLVLVVSGCAVASSGPTTRTPPTSGCHRLAIIHSTRRHPDPAFNTTNLSLLLTPDRFCFLQIQTKPPPAARADRXESPGADEAPSCGAGARRSRGGWATRHGHQQCSSPSAVLNLHQGLANCSNPLXVXX

SEQ ID NO: 141140 - protein, 38 aa, Oryza sativa
  Clone ID: PAT_MRT4530_42273C.1.pep
TNLWGWLAPHVPSRDLLGGPTRAYMASESPSTADLGVA

SEQ ID NO: 141141 - protein, 167 aa, Oryza sativa
  Clone ID: PAT_MRT4530_42274C.1.pep
LRRRKVAEALPWELLHRLASLLPPAALEALHHAAHDRCCFSAATAAVGFAGPDGDRRGIKRSRCEDFNPEWQALFGLRWPRCDNAGHDGLLTVDWQRQYWEKHLQECLDEAAESALLPSFCGSIDELTIPAKIVSCILHTKDIPQQYSRIVVSLQQFLAVTRGTMIN

SEQ ID NO: 141142 - protein, 59 aa, Oryza sativa
  unsure (1)..(59): unsure at all Xaa locations
  Clone ID: PAT_MRT4530_42275C.1.pep
YLLXQNSDSMWKLNDPSLKINFQFFYFLVVKKLKIFFVVGIYAPVAVSCDFTPKKKKKK

SEQ ID NO: 141143 - protein, 96 aa, Oryza sativa
  Clone ID: PAT_MRT4530_42276C.1.pep
MPTNSSLVRLCQMNPALQKAATIKRSQKLEVDDPSPSPCCAISPSSLPCQHASPEPPSLRPSHFPHLLPHRLDTPGPPSLRPSPFPHLLSHAASHI

SEQ ID NO: 141144 - protein, 85 aa, Oryza sativa
  unsure (1)..(85): unsure at all Xaa locations
  Clone ID: PAT_MRT4530_42277C.1.pep
FPSTPEKNEYGYLSDRIVXYGYFLPDTDTDMVSGFPSDTDNNSDIRKNCFHIHVRSYSILIHIRDNPYLFPYSSYPYLLSYLAKI

SEQ ID NO: 141145 - protein, 47 aa, Oryza sativa
  Clone ID: PAT_MRT4530_42278C.1.pep
MAIESGLRAMVKTAPPIAVAPALVSILINTVVVVMFLKGDVRAAEAK

SEQ ID NO: 141146 - protein, 489 aa, Oryza sativa
  Clone ID: PAT_MRT4530_42279C.1.pep
MRKARVCVRAPHGAGALLVVGGAVVGAAVFAWCRRRCRSDGGEGEGERKEGAKNHGEHPAKEEGGLDGGVVEGEQGDAQRLHQIYQNLSRDNVEVGVNGSDGKATDELYQIQKDDEVVPSGYKFVLSELVTEAVEKYDHGSIKDCAEIAPDGMVNEAVETYNHNSERDCAEITAHVMDTENVTEDDDNSGKNDAENEIIVNENEGEENSAENTFSLSSPDITLEEHDNNNCVDQDTASTETTPTTEKVMHQEQVSEQVKMAETAEVKPAEETETTPMVQTEVKLEEETETTPVAETTEVKPAEETETSTVAETLQVKPAEETDTTSMAETAELKLAEETETASMAETAEVKLAEETETIPMAETAEVKLAEEKVMKKNEFEHEEENSKEEYVKPVNSLAYSSVPSLLKRTVKKGQVNPRWNETGMKLEQDCTNGELNEHDLTKAGATAMGGAVLTMARRPDSMAILALIVAVTIAITIVVRLYVPLQAT

SEQ ID NO: 141147 - protein, 232 aa, Oryza sativa
  Clone ID: PAT_MRT4530_4227C.1.pep
MEITPAGCDHEIPEHLFMCSRLYIAAFRGYTDEVFSLLAGSSGAAVEPANSRPSPAAQEHANHHGGCSIREVTAERSKLLHIAAGEGHGELIAELCSHDSSLLSSSSSSGNTPLHCAARAGHASAVRGIVRLARANVEEDRLKAMLRGMNATGDTALHLAARHGHGEAVEELMEVAPETALELNGGGVSPLYLAVMSRSVRAVRAILSCRDASAAGPSSQNALHAAVLQSSG

SEQ ID NO: 141148 - protein, 67 aa, Oryza sativa
  Clone ID: PAT_MRT4530_42280C.1.pep
VSTLAVKVCDGALDQSSQKSLCVHSICPNERCVDNVTCRDPSCSSPVSFHGCAALSGVVRFLSIQAY

SEQ ID NO: 141149 - protein, 64 aa, Oryza sativa
  Clone ID: PAT_MRT4530_42281C.1.pep
KNGSNTPVHQKNNTKAGGKMDTKKLKKFRLIKCPADDHMENKNSEKTKKKIPKNGPTTTEKACI

SEQ ID NO: 141150 - protein, 107 aa, Oryza sativa
  unsure (1)..(107): unsure at all Xaa locations
  Clone ID: PAT_MRT4530_42282C.1.pep
TREHSTVRESAPSPCASNSASSASACFSSPPRCNATGCFCRSPTPSPRSAQPMTPPXPPPPPLLLPPFRRAPPRPPPRHAPRASSSTAPPALAAARAGERLHAVALG

SEQ ID NO: 141151 - protein, 74 aa, Oryza sativa
  unsure (1)..(74): unsure at all Xaa locations
  Clone ID: PAT_MRT4530_42283C.1.pep
IARRPSDLSPWQPPLRHEACIRRHRLSAAVPPPPSPPRXXHACAASPXRASKLAHAGXSACPPAWQPPPPPPLR

SEQ ID NO: 141152 - protein, 60 aa, Oryza sativa
  unsure (1)..(60): unsure at all Xaa locations
  Clone ID: PAT_MRT4530_42284C.1.pep
SINQITSTRQFPVPPVQLARCCLVVTSVLVGRRRDLCLLLACATCRXHVGTISLCAPLCR

SEQ ID NO: 141153 - protein, 258 aa, Oryza sativa
  Clone ID: PAT_MRT4530_42285C.1.pep
MGRVRQQLQVFVITDLVEPLIIACAYWSINGASRVIGISSFEVFLPCGAYVAILSGNIIKPVGPICGAGRPEQVTGEAGRHHRRRRLAGAVQLDGLHTNIVVSPAVGRDFARRRRRYLAVAAKQPPLSSILSRCRRVHIGEIHRNRHSQLRTVAAPSSRPSRSNATVADVFLVPQRPSLPRSLRTRTKSNQPRTDDELEAIQGSQLACIRSVLPQPYTISSIGSLLVEIWCFVCKLQAFVRFNTLPTINVLVASEELT

SEQ ID NO: 141154 - protein, 681 aa, Oryza sativa
  Clone ID: PAT_MRT4530_42286C.1.pep
MRALPVDVGGEPGYAIRNYRFKQPVETHWEGVTTLAELFEQSCKDYVNMPLLGTRKLISREQESSLDGRSFEKLHLGEYDWKCYAEVFKSVCNFASGLIRLGHQKTDRVAIFAETRAEWQIALQACFRQNITVVTIYASLGEEALCHSLNETEVTTVVCGQKELKKMIDISGQLDTVKRVIYINEEGISAEVSLAQKSTSWIIEPFEDVGRLGDTAPVDANMPLPSDVAVIMYTSGSTGLPKGVMMTHRNVLATLSAVMTIVPEIGKKDVYLAYLPLAHILELAAEALIAAVGASIGYGSPLTLTDTSNKIKKGTLGDASALKPTLMTAVPAILDRVRDGVRKKVDTKGGVAKQLFDVAYNRRLAAVNGSWLGAWGLEKLLWDMLVFKKVRAVLGGKIRFVLSGGAPLSGDTQRFINICLGVPIGQGYGLTETCAGGTFSEYDDPSVGRVGAPLPCSYIKMNSFLVETTLIDWSEGGYLTSDSPMPRGEIVIGGPNVTKGYFKNEAKTNEVYKDDEKGMRWFYSGDIGRFHPDGCLEIIDRKKDIVKLQHGEYVSLGKVEAALIVSPYVENIMIHADPFHSYCVALVVAAHNELENWASQQGVTYTDFVDLCQKPEAVKEVLGSLSKAAKQARLEKFEIPAKIKLISEPWTPESGLVTAALKLKREVLRKTYEDDLAKLYA

SEQ ID NO: 141155 - protein, 99 aa, Oryza sativa
  unsure (1)..(99): unsure at all Xaa locations
  Clone ID: PAT_MRT4530_42287C.1.pep
MVGLSKQKQDGHAQHXLLHHQRDIATSLRIVYEVHDNDLARVGSNLPVIXKYDSAAYVNXELAVDKQFDEYDFSNAEMVKAASNKCTGSTSFWWYTVGH

SEQ ID NO: 141156 - protein, 204 aa, Oryza sativa
  unsure (1)..(204): unsure at all Xaa locations
  Clone ID: PAT_MRT4530_42288C.1.pep
METAVPWKVLEFYSGIGGMRYSLAASVARSQVVQAFDINYVANDVYELNFGHRPYDGSIQTLTASDLHMYNAQAWILCPPCQPYTRSIRMRCLLDCLQDIVCPESKRCCCFTKXSYYRYVKGTGSLLATSNNLKRISKEDLEISSLKELGLRFFTPREVANLHSFPSSFHFPNHISLRQQYAMLGNSLSVAVVGPLLRYLFAET

SEQ ID NO: 141157 - protein, 374 aa, Oryza sativa
  unsure (1)..(374): unsure at all Xaa locations
  Clone ID: PAT_MRT4530_42289C.1.pep
METAVPWKVLEFYSGIGGMRYSLAASGARAEVVEAFDINDVANDVYELNFGHRPYQGNIQTLTASDLDKYKAQAWLLSPPCQPYTRXHSADARAFSFIKILNLMKNMCFPPQMLFVENVVGFEVSDTHDQLIEVLSDLNFNTQEFILSPLQFGIPYSRPRYFCLAKREPVSFQNPSDNSKLLRTPTFLTLVRAGHNRCNPDEDELELVCKPISDFLETISLNVADQDSSGTISDINGSDGCTPSGIISQDYVVPLNLIERYYRYVKGTGSLLATSNASLVLPLNLNIHDSFSFYDYLLKLQNLKRISKEDLEISSLKELGLRFFTPREVANLHSFPSSFHFPNHISLRQQYAMLGNSLSVAVVGPLLRYLFAET

SEQ ID NO: 141158 - protein, 722 aa, Oryza sativa
  Clone ID: PAT_MRT4530_4228C.1.pep
MTEETGNDFQMVQGYEIVPSNEEAHAEEVQGDELVLAEDLAQGDEVQVNGLVSAEMSTPPTSRRRRKKSLVWEHFTIEAVSGGATRACCKLCKQTFAYSSGSKIAGTSHLKRHITLGSCPKIKNQEHKLALTPAVGTDNDGEGTVERPSKRRYRYTGYANAAFDQDRSCSYLAKMIILHDYPLHIVQQPAFTTFIDSLQPRFRVVDVETMEGEVYAVYQKEKENLMQAFSTMPGRISLTIGLWTTSQTLGYVSLAGQFIDSEWKIHRRMLNFMMVSSPHSENALSEAISTSLSDWNMKDKLFTITLDNDCSSHDIYSANLRDYLSNKNNLMLKGQLFVVRCYAHILNAVAQDVIASIHGVIYNIRESIKFIKASPSREEKFAEIALQLEIPSTKTLCLDVTTQWNTTYLMLLAALDYKQAFSTLETSDDNYNEAPSAEDWKKVEAACNYLKLLYDSAHSIMAAANPTSNLFFHEAWKLQLELSNATGHEDPVFSSIAKDMHERFDKYWKDCNLVLAIAVVMDPRFKMKLVEFSYSKIYGVEAAKYVKVVDDAVHELYKEYVAQPLPLTPAYVEQGDGNNAPASENGTQATAPSTGDGLVDFDMYLSEIATSQPTKSELEQYLDESLTPRIQEFDILNWWKLNTLKFPTLSRMARDILAIPMSMVSSGNSIFSAGTGTRMLDDYRSSLRPEIVEALVCAKDWLQYLPATPEAPSTTLVKVDAP

SEQ ID NO: 141159 - protein, 177 aa, Oryza sativa
  Clone ID: PAT_MRT4530_42290C.1.pep
MARPHAVVVPYPGSGNINPALQLAKLLHGHGVYITFVNTEHNHRRIVAAEGAGAVRGRDGFRFEAIPDGMADADHDIGNYDLALSAATSNRCAAPLRELLARLDDGGAGAPPVTCVVVTALMSFALYVARELGLPTMVLWGSSAAALVTQMRTRELRERGYIPLKGNEIKDDRDRTV

SEQ ID NO: 141160 - protein, 88 aa, Oryza sativa
  Clone ID: PAT_MRT4530_42291C.1.pep
PNHYQVTKMGFIVRKGLVFVCKNFFFSNWGVLYTFTGHGGQKNGSKKLETSCKEGEPPNQVAGDTQKIRGGRSPPLQKGRRGGPPNRG

SEQ ID NO: 141161 - protein, 89 aa, Oryza sativa
  Clone ID: PAT_MRT4530_42292C.1.pep
YQPHKQNEPVARHRGGQRNSTLCEHWRIYGGPGAQNLPTQHRQRGNKTSETQQKNNKPQDQNQRGPPAPKADKKNPLKDAAKPQKTQQM

SEQ ID NO: 141162 - protein, 57 aa, Oryza sativa
  Clone ID: PAT_MRT4530_42293C.1.pep
VIYAYGIHQLSLQYMSGRWGAACGGLARCSHEDHGAIQGLAVHEWASVQELWGIFGR

SEQ ID NO: 141163 - protein, 462 aa, Oryza sativa
  Clone ID: PAT_MRT4530_42294C.1.pep
MDHVVGGKFKLGKKIGSGSFGELFLAVNVQTGEEVAVKLENVKTKHPQLHYESKLYMLLQGGTGIPHLKWFGVEGEYNVMVIDLLGPSLEDLFNYCSRKFSLKTVLMLADQMINRVEYMHQKGFLHRDIKPDNFLMGLGRKANQVYIIDYGLAKKYRDLQTHKHIPYRENKNLTGTARYASVNTHLGVEQSRRDDLESLGYVLMYFLRGSLPWQGLKAGTKKQKYDKISEKKMLTPVEVLCKSYPSEFISYFHYCRSLRFEDKPDYSYLKRLFRDLFIREGYQFDYVFDWTILKYPQIGSKPLMRPSERTSGAAGPSMEKMEKAPGEASGRRNPTGSLNQSDNYAQRPSMSLKEIMHSTDRSGERTVERPRTSSRTGSASRRAVASSSRPGSSVEPMEQQYSRTSRLFSSSGSRPSSTQRVNPSVGETRATSLSRAAVARGSRDEPLHRSLELLSLGGGKRK

SEQ ID NO: 141164 - protein, 176 aa, Oryza sativa
  Clone ID: PAT_MRT4530_42295C.1.pep
MAAVVGRVRVPQPCSPNAAGRHRCDTFDRFTYEDAVSHPAWCEGAKAINIPGEAGPGPQQEPGGAQGPGQKEHLDVHGGVIFSYIEMSSLVNLSRIGADDAPTYANSDKVNAMSTLVSWSDHMEVNDNPTPESRGEVDKLIPNQSYDNLLLRFPCVGEGFPTPPKEHNLSAALVAL

SEQ ID NO: 141165 - protein, 64 aa, Oryza sativa
  Clone ID: PAT_MRT4530_42296C.1.pep
LVNVGFFIYFSGLFFFFIFEGIMFFDRVRVLPCFGEFLFAFFLGSCVRLSVGVGGLRVGLGVQY

SEQ ID NO: 141166 - protein, 71 aa, Oryza sativa
  Clone ID: PAT_MRT4530_42297C.1.pep
LGGRWKLSMWDLLEISVKTISMPVETIMEKGFKALLVQFLKFTVKINFFFVQCIKYTPSRIHKIEVDVFST

SEQ ID NO: 141167 - protein, 49 aa, Oryza sativa
  Clone ID: PAT_MRT4530_42298C.1.pep
LLLLLTADACSFSWIGFYIDVECFLVTASLGCGVYCRDHTGGWECLSGS

SEQ ID NO: 141168 - protein, 61 aa, Oryza sativa
  unsure (1)..(61): unsure at all Xaa locations
  Clone ID: PAT_MRT4530_42299C.1.pep
YKSFSASLSKLVENYAELLASQXVLKTAMEYLKLLGSDEHSHDVAILRDRIRFSTEEIIVR

SEQ ID NO: 141169 - protein, 40 aa, Oryza sativa
  Clone ID: PAT_MRT4530_4229C.1.pep
ANPTNARLVKFSENSPGASPYTKLYVDTRHVAQATSLLIK

SEQ ID NO: 141170 - protein, 110 aa, Oryza sativa
  unsure (1)..(110): unsure at all Xaa locations
  Clone ID: PAT_MRT4530_422C.1.pep
GXPPPPXXKXTXXXXQXXXXXXGXGGXXXLXQIIQFKCITGFFIFXQNLKNGIKXIXFXVFLHNTEVLIXKSXXIYREIXAXDTKLTLXASLILGGLLPXGKEKXCLASK

SEQ ID NO: 141171 - protein, 224 aa, Oryza sativa
  Clone ID: PAT_MRT4530_42300C.1.pep
GIVAGGDPRGARALQQRHGHHRHGRRGARGRWRRRGGGGQANRRPPRHPPSCRQRRRRPRRRRPALRPAGAHAGRVRPLALARLLTLPLPRPPRRRQPPRGRAMLLRHRRRRRWRRRRTPPPPRRRAIPWRVRRTPVHARMAAGAAVPATGDRRRRRGRRAAALPEAHRSGGRAVVPRLPRRVQGGRHAGHAGVLPPPRRAPRMPAPPPGQGPRRPLCGGPTAL

SEQ ID NO: 141172 - protein, 373 aa, Oryza sativa
  Clone ID: PAT_MRT4530_42301C.1.pep
MATMPAPVATCFVPATSGVRCRAFSTPITNYSARGVVADPPKLLSRPGNLQLTSGGARFSGRFRASAAAVHKVKLIGPDGAESELEVPEDTYVLDAAEEAGLELPYSCRAGSCSTCAGKLASGEVDQSDGSFLADEQIEQGYVLTCISYPKSDCVIYTHKEEEEGCQRCSSVDDGDVVLSAKPTKRKSTKGTPTKTVKMSPQLVRSMAKSSEQPENATDDADEETPTTTAAAEPTNKHPTPQATAGAIDQRVTCLAQGIYGASRIFEKTTIDKKSGGYIWTLVHGPMERGQTSGPSPRAGGAEEAADRVAADSVKRARPLRWRPRRVGRERRPGRRIERPAASCAYRRAAENREGRRAPEASGGQGELIQWCG

SEQ ID NO: 141173 - protein, 103 aa, Oryza sativa
  Clone ID: PAT_MRT4530_42302C.1.pep
LRPLDRGACSNAFPPTTVAEFRLHRDPLVPRSNEGLHPLFADFAIVLWGATRMGEPLVKDRKSNGAGVWVVDRTARWPGGLALVVSGFGFTRRTWRIGRPGRG

SEQ ID NO: 141174 - protein, 448 aa, Oryza sativa
  Clone ID: PAT_MRT4530_42303C.1.pep
MSLNLNPYHTVITAGDSYSLLALREKEDVGTLRKEDLFPTASTECILILTGGFVPNCIYRMQPYFDRGAKLTIGQPKPNPGQPHLQPPAQPKESSTATTMAAATEKTAEEIRRELQELQRQHREVEDTEAKEDVKKEAEAEGPEGGSAAAEGGERRDGGFRRDGSQRMPRREFDMSLPEPLPREFPKDEDQSLVKRNKRMLGKLLVGTLEKFQQEDKKLSNTEAYMRRSEVQRKADQKAREESERLRQQEREQAIEKRKRDMMLRARVAAKAEEKRLELLYMQWAEHHKKLSNFLRTTAEPPIYYMPAKPIIDDPAIAEENKEKAFQEWKSERRAELTQFQKQVEEQYMSNVERQLERMQNARNARRGNGPSNMQEMDKELDTHRAEHGPKTRRVLEGGNDDEDDMDDMAVEDELMDEVLGINEPISDEQTKPSEEAADGVPVSEEVQ

SEQ ID NO: 141175 - protein, 134 aa, Oryza sativa
  unsure (1)..(134): unsure at all Xaa locations
  Clone ID: PAT_MRT4530_42304C.1.pep
SNMVAFIEAIVDRHSCFRYLRDNGIGVLLPPNYKVVPLEVDKGRVLLESSRVALLGYGXSVQYCLATASLVDXHGLKVSVXDVXFCKQLDHTLISRLASSLXVLLTVEXGSIGGLGSHVVQFLALDVLLVGKLK

SEQ ID NO: 141176 - protein, 45 aa, Oryza sativa
  Clone ID: PAT_MRT4530_42305C.1.pep
VKPVIKASYLKKIELQNGLLWRNICYVKVHPSIFTGQVLMSMRFV

SEQ ID NO: 141177 - protein, 68 aa, Oryza sativa
  Clone ID: PAT_MRT4530_42306C.1.pep
NDYSAGYGLQSSLMLRAKEEAHSISLNMVWQIYLFPVLMNLLSMTSSCLHSDDVMIIYCAHSHCRNLH

SEQ ID NO: 141178 - protein, 138 aa, Oryza sativa
  unsure (1)..(138): unsure at all Xaa locations
  Clone ID: PAT_MRT4530_42307C.1.pep
LGWSYPCDIWRCGXDILVELCTGEALLQTHENWQHVAMIERVSGPVACDMLNRADRHWRKYVTKGRVNWPEGRAXRDSMKAVMKLSGVQNLVXQNVYHSGXEFIDLQLGLCWCEPRRRXTAQEALMHPLLREQGQPIL

SEQ ID NO: 141179 - protein, 59 aa, Oryza sativa
  Clone ID: PAT_MRT4530_42308C.1.pep
MMTSGLPNFGVNSTPLHSRPVARGDKELGVGGGDGDDLDCVLAMGRAPTLSPRISSAFS

SEQ ID NO: 141180 - protein, 134 aa, Oryza sativa
  Clone ID: PAT_MRT4530_42309C.1.pep
MERSASYTEKSRSAATVAGAGAGDLRCHSAYYVTSTYSAPPPPPLWYDDAGSGKASKIKKKKAAATWPSSSASASTSASKGRVWGGLGDAAEMQRRRRVAGYRVYGVEGKVKVSLQSSMRWIKGKCTRVVDGWW

SEQ ID NO: 141181 - protein, 113 aa, Oryza sativa
  Clone ID: PAT_MRT4530_4230C.1.pep
GPGGPPGISGPFLGGVPFFLWGGCFKTGLYLENTFFLGKNFFRSKFQKIKGRGAKRVNPGGLIGGAPPLFLGWANCPFYGGKTFWPRFFIELPTPGGRGFFFFAPGGVFFLPD

SEQ ID NO: 141182 - protein, 240 aa, Oryza sativa
  Clone ID: PAT_MRT4530_42310C.1.pep
MGRVKWRPPPPTSVMGEIAAAGRGAEDTQPSEDKADKGKGTQTAAAGTCLGEERAGRDQGEERPGDTNGGGNVLGAQTAAVAATNLDKETGGGGEHNDSGDVRAAQEVAHCGAWPTTKSRVSTRGLAMDEVAKTTAGTPMVVTVEPAEQTAAVIDEPVSEPVVAADESVAAANEPMEGTVAADKPTVREGIVAPTRLISPEKGDGPEREGGPPERGGMGRGPRIEASRRSASSNMGSMVS

SEQ ID NO: 141183 - protein, 503 aa, Oryza sativa
  unsure (1)..(503): unsure at all Xaa locations
  Clone ID: PAT_MRT4530_42311C.1.pep
MAAAGGAVLLLVLATATSVSGQHDYSDAMNTATRSXEHPRSGRLPPDQRLRWRRDSALNDGATAGVDLTGGYYDAGDNVKFGFPMAFTAMAFTATLMSWGLIDFGRSFGAREAVRWATDYLMKATATPNTVYVQVGDVLRDHSCWERPEDMDTPRTVYKVDPSHPGSDVAAATSPXETAAALAAASIVFRDADPDYSNRLLDRAIQVFEFADKYRGPYSSSLHAAVCPCYCDYSGYKDELLWGAAWLHKASRRREYREYIKRNEVVLGASEAINEFGWDNKHAGINVLISKEVLMGKDEYFQSFRVNADNFICTLLPGISNQPQIQYSPGGLLFKVGNSNMQHVTSLSFLLLAYSNYLSHADVRVSCGTGVSASPVQLRRVAKRQVDYILGDNPLRMSYMVGYGSRFPLRIHHRGSSLPSVAAHPARIGCKGGATYYASAAPNPNLLVGAVVGGPSNPSDAFPDARAVFQQSEPTTYINAPLLGLLAYFSAHPNLAQSDLLYD

SEQ ID NO: 141184 - protein, 106 aa, Oryza sativa
  Clone ID: PAT_MRT4530_42312C.1.pep
MEVGPMTTPEREEGRGEAHWREGEGEKLAGETASAPSPSSRRRRTIGEGESGADCGEEEPRRRWGRSDRDFAPAETATGSSAAGFRAASPPASRQIQRGRGAPAAQ

SEQ ID NO: 141185 - protein, 500 aa, Oryza sativa
  Clone ID: PAT_MRT4530_42313C.1.pep
ARERARRIPGRLAFAYVFSPPMHAAGHDYGDALHKSILFFEGQRSGRLPPDQRLRWRRDSGLHDGAAASVDLTGGYYDAGDNVKFGFPMAFTATLMSWGLIDFGRSFGPHKEEARKAVRWATDYLMKATAKPNTVYVQVGDAFRDHSCWERPEDMDTPRTVYKVDPSHPGSDVAAETAAALAAGSIVFRDADPAYSKRLLDRAIAVFEFADKYRGPYSSSLHDAVCPCYCDFSGYKDELLWGAAWLHKASRRREYREYIKKNEVVLGASESINEFGWDNKHAGINVLISKEVLMGKDEYFQSFRVNADNFMCSLLPGISNHPQIQYSPGGLLFKVGGSNMQHVTSLSFLLLAYSNYLSHAGARVSCGAGGSASPTQLRRVAKRQVDYILGDNPLRMSYMVGYGARFPRRIHHRGSSLPSVAAHPARIGCKGGAAYYASAAPNPNLLVGAVVGGPSDATDAFPDARAVFQQSEPTTYINAPLMGLLAYFSAHPNPAEWADD

SEQ ID NO: 141186 - protein, 190 aa, Oryza sativa
  Clone ID: PAT_MRT4530_42314C.1.pep
MGNGGRSSPESSGDGDRRGKLGRGCGELRKTGKKKERRAHGVPFFGSGGEGSRPRVVDFPAGVRAATWGWWRRFGADSRGGSGGGERRRVTRSHDGFGRRGWRWVAGWRVIGGGVGARLDHGNRLEVGDGPDRWGHGSHLSAMGERGGRWRDAEQTLQGGGPRKREREAREEEGGAQATGREGGLGPKMA

SEQ ID NO: 141187 - protein, 208 aa, Oryza sativa
  unsure (1)..(208): unsure at all Xaa locations
  Clone ID: PAT_MRT4530_42315C.1.pep
IWHAHFSFQHWYHPACFNWSHTMMHDFIYLSVVTHSSLGHQFQSPSITHRTGRQCLQGSQGCSWGSASPASLHGHRFQGPNHQTGACSLQPASHSQHAQPTLVGAGGRRASARQRPARPGARRRRAGGRTSVGRRPATARGRQPARLRAMAPRAGWHRAGGSPPGWTVGTQTRGGSGHKHMVGHRQHMGLRLSRKRXPPGRGGLNGNT

SEQ ID NO: 141188 - protein, 84 aa, Oryza sativa
  unsure (1)..(84): unsure at all Xaa locations
  Clone ID: PAT_MRT4530_42316C.1.pep
NSTTTLTXHXVCPATLSGIAQHLNPQNKPSIVAPMGVLSSCKPXTRFAHSTLGASFPSTASXSICIGPITLVNPCSQVCPRVWX

SEQ ID NO: 141189 - protein, 73 aa, Oryza sativa
  unsure (1)..(73): unsure at all Xaa locations
  Clone ID: PAT_MRT4530_42317C.1.pep
LTAAHIGPSRLEALAACWHNSLWEKVHPRSLNLSSNYKIILQPXNRIHIPQLIKPVQIRSLSSFDPGFIQCGS

SEQ ID NO: 141190 - protein, 178 aa, Oryza sativa
  Clone ID: PAT_MRT4530_42318C.1.pep
MAPCAALHLGTLATECLGFLATIALQHQQQPRPKAPFFLGYFNGTDMVPWIKAAWAANLLPRPLPPLGRRAKDGDHGFSTSAAPHGALGDGDGGCGGNEGQVGGDEASGNGDGKPRIWQWQFLDAVDPTAEWEEASGDIGKLRIWRQWGANLVEATNLMAWARAGFGEAPMVDPRPRC

SEQ ID NO: 141191 - protein, 79 aa, Oryza sativa
  Clone ID: PAT_MRT4530_42319C.1.pep
YLLIKSEDEQWRKHKLFSVSGDKRRARISSYLEKAQRLWVECVVVAALPWPYFPLYYYQSPHMQRIMRAQQLLIIIVFL

SEQ ID NO: 141192 - protein, 72 aa, Oryza sativa
  Clone ID: PAT_MRT4530_4231C.1.pep
VNSDVTNSIKDYSALDRSNPKSTSILHRSLSLSFQKDKFYTDLLNYCSKLQATFQCLRKRKSLTPRIKQQSS

SEQ ID NO: 141193 - protein, 81 aa, Oryza sativa
  unsure (1)..(81): unsure at all Xaa locations
  Clone ID: PAT_MRT4530_42320C.1.pep
FFFFLMIRAHWKRMMXFGGQSQQRSISTHQCTGSSSHLSESPIHIHTPHHCXWSXGVVVPVQYQPVHRSIHTQGKLIDPSH

SEQ ID NO: 141194 - protein, 246 aa, Oryza sativa
  unsure (1)..(246): unsure at all Xaa locations
  Clone ID: PAT_MRT4530_42321C.1.pep
MGTGKTMIGKAIAGEAKATFFYISASSLTSKWIGEGEKLVRALFGVACCRQPAVIFVDEIDSLLSQRKSDGEHESSRRLKTQFLIEMEGFDSGNDQILLIATNRPQELDEAARRRLTKRLYIPLPSSGISLFHGLFXKEARAWIIRNLLEKDGLFKLTEEETNIVCKLTEGYSGSDMKNLVKDASMGPLREALQQGVGITKLNKEDMRPVMLKDFETALQEVRPSVSSSELGTYEEWNRQFGSLAN

SEQ ID NO: 141195 - protein, 91 aa, Oryza sativa
  Clone ID: PAT_MRT4530_42322C.1.pep
VVPDQLLKELHFHTHTCYMFDDICKAKEAHPHNNTLSVWWSILSVTLPSPSSDRELHTNVSSPPKLSQSQLLDRSTNNSFCSLHWLAFLSG

SEQ ID NO: 141196 - protein, 294 aa, Oryza sativa
  unsure (1)..(294): unsure at all Xaa locations
  Clone ID: PAT_MRT4530_42323C.1.pep
MAALLLRRLAGTHRGRVPLAAAAAVTGGAALFCASSPPTIALMEEKGEDAAAKVALNPDKWLEFKLQEKATVSHNSQLFRFSFDPSTKLGLDVASCLITRYTPISDPDSKGYFDLLIKVYPDGKMSQYFASLKPGDVVEVKGPIETRTYLSPIQILKDILTCXTGITPMLQVVRAILKNPDDNTQVSLIYANVSPDDILLKRELDRLASSYPNFKVFYTVDKPSNDWRGGVGYISKDIALKGLPRPGEDSLILVCGPPGMMNHISGDKAKDRSQGELTGILKELGYTAEMVYKF

SEQ ID NO: 141197 - protein, 71 aa, Oryza sativa
  Clone ID: PAT_MRT4530_42324C.1.pep
LLVSKPLRVYQQGYPGKFYCPRMNSMNKPAYAAICTHSPDKPVLIFVSSRRQTRLTALDLIQVDAVLDSFI

SEQ ID NO: 141198 - protein, 428 aa, Oryza sativa
  unsure (1)..(428): unsure at all Xaa locations
  Clone ID: PAT_MRT4530_42325C.1.pep
MPPAAAAAAATRHRHARPAGHLRCAADAVSTAPAERTAARVIATSSRTASASAASGSVARVWRKVQGSGDWDGMLSPLHPVLRGEVARYGELVGACYAALEEDPSSPRYMNCKYGKLRMLEDAGVAGAXGYEVTQYIYSSPDAAVPGMEASTXGRASWVGYVAVSTDETTRRLGRRDVLVSFRGTVTPAEWMANLRSSLVPASLAARGGGGGDVKVESGFLNVYTSADETRRFGCADSCRDQLLREVSRLFAASRSGGEDVSVTLAGHSMGGALALLLAYDLAELGVAGGAPVTVFSYGGPRVGNAAFKARCDELGVKVLRVANARDPVTKLPGVFLNEATTRSGPLAAMRGACYVHVGEELALDFVNLGDLASVHDLGSYVASLREGVVTDAEAATGGVLAMAMELVGRQWQSKDAARGMMQSTGLI

SEQ ID NO: 141199 - protein, 92 aa, Oryza sativa
  Clone ID: PAT_MRT4530_42326C.1.pep
RKYYVLHIMGVPTKICTMIKITDGTNCLKAFSQTHGKHVLELMLTSTCSLTKLLIWSTICIVIHHIRKIRLQWRSMTTGGRDRVMGNGYGEA

SEQ ID NO: 141200 - protein, 170 aa, Oryza sativa
  unsure (1)..(170): unsure at all Xaa locations
  Clone ID: PAT_MRT4530_42327C.1.pep
RVAGGNHHVLGRRRARXAPPVAGGRGVFVRRVASRVRRRRRRRVPQLRRLVRVRGTATAVRRRRRRPAPRSRRRRGFLGVSRWWPRGEEAADDLGGRLQHEEEQPQQEGPDLPHHRQEPAHAAAGEVEASAARRGRSRGGWWGGPTCQWGVDRGEETEEEDDDGVSGRVG

SEQ ID NO: 141201 - protein, 148 aa, Oryza sativa
  unsure (1)..(148): unsure at all Xaa locations
  Clone ID: PAT_MRT4530_42328C.1.pep
VRQQGFTKLDLRSVYHQIRLLDHDEHKTAFXTHQGHYEFKVMPFGLKNAVAIYIRGLINIIFAHLIRNCVLVSVDDILFYSKNLEEHLSHLREVFKIVAHHQLFVKESKWSFAQQHRHVIGTXGVAPDPNKVLAVKDWPMTRNLRQLV

SEQ ID NO: 141202 - protein, 67 aa, Oryza sativa
  Clone ID: PAT_MRT4530_42329C.1.pep
MAVEMIYDAHASTGMPASDSGGVGRLASGGGTGRHGGGRATHREMEGGHDDWGRRRPLTQLHRPRLE

SEQ ID NO: 141203 - protein, 43 aa, Oryza sativa
  Clone ID: PAT_MRT4530_4232C.1.pep
MAPGSSGQNLRYSLDVRWLQQEVKMMDLSIADSNNGSLIWPKG

SEQ ID NO: 141204 - protein, 623 aa, Oryza sativa
  Clone ID: PAT_MRT4530_42330C.1.pep
MARGSASGEASREVFADITVSIHPVNALFLDAIASLERDYGQGLGRSGLKAIDLTGAKGSFSGGVHINAFDKKPSKDCPVLSFVNKLNIYVVKFMLLPDAPKPSVAAIDGVALGGGLELVMVCHARVSTSSAQLGLPELQLGIIPGLGGTQRLPRLVGLPKALEMLLMSKPLKGVEAHKFGLVDAVVSADELISTACSWALEIVEDKRPWFRSLHRTDRLPALEETKKILNFARVQAQKQSASLQHPLVCIDVIEEGIISGPRAGLMKETLCGKMLEMSQISKSLRHVFFAQRATSKIPNISILGLTPRRIHKVAIVGGGLMGSGIATALISNNLLVILKEVNEQFLDAGISRVKANLQSLVKRGQMTKEDYENKLSLLSGVLDYEQFREADVVIEAVIEDLSLKQKIFADLEKYCHSNCILATNTSTIDLHLIGQKTSCQDRIAGAHFFSPAHAMPLLEIIRTHRTSSQVVIDLLNVAKQIRKTPIVVGNCTGFAVNRMFFPFTQVAYFLVDYGLDVYHIDHVITKFGMPMGPFRLADLVGFGVAIASRKQYLQSYPERCYKSMLIQIMLEENRTGESSRKGFYLYDDKRKASPDPEMNKYIEKSRSMASIVQDPKMSYFSE

SEQ ID NO: 141205 - protein, 70 aa, Oryza sativa
  Clone ID: PAT_MRT4530_42331C.1.pep
HASGFGVAIASRKQYLQSYPERCYKSMLIQIMLEENRTGESSRKGFYLYDDKRKASPDPEMNKYIEKSRS

SEQ ID NO: 141206 - protein, 437 aa, Oryza sativa
  Clone ID: PAT_MRT4530_42332C.1.pep
MPPFSSEPMTNNEGEPVEDASCRSVRRRRYREQTSTNSAPLRQQGDISEGAQNTMTGFDFDRLPQDILCHIHSLIPLRDAACLACLSCRFLRSWRCFPNLTFNQETFSLNVYEGTSYEKEKEPVDIIDSILQNHSGTGVKTLKLDVSNYFKPITADHINNWLNAAVKPGIIEIAVKFPHLTVLNVLFCTNLKMIEIYAPKLTTFDFRGRPMKILTSDSSHLKYMTLHGTFFSGMIQYARTELHSIASNLQTLTLASSKEDFITPMLPVKFLHLRNLNVYFDGIRFQSYDYFSLASFFEACPALETFYIWAGEYDLAWKDPALQDSNADSLQIRRIPEIHHANLKKVSINRFFPSKSLIELTYLIIENASSLQCLKLDAGYGFDTSGMCKRMNKLDVLHALSAVEVAKKYIEGKVPSSVKFNILEPCERCHIAKLSQL

SEQ ID NO: 141207 - protein, 43 aa, Oryza sativa
  Clone ID: PAT_MRT4530_42333C.1.pep
ARGRELVSSFFFFFFKTIRVLYVEGKSKGPIWGQFLNKQSFAV

SEQ ID NO: 141208 - protein, 1000 aa, Oryza sativa
  unsure (1)..(1000): unsure at all Xaa locations
  Clone ID: PAT_MRT4530_42334C.1.pep
MRVLIPLLLLLYGVGNIGGSTLPDNTTDMLSLLGFKEAITNDPSGVLSNWNTSIHLCSWNGVWCSPKHPGRVTALNLAGQGLSGTIAASVGNLTSVRSLDLXPDNNFSGQMPHLANLQKMQVLNLSFNTLDGIIPDTLTNCSNLRKLDLYTNLLEGAIPPPIGRLRNLVYIDLSRNNLTGIIPASLKNISLLETIYLQRNQLEGSIPDELGQFSNISLMALGANRLSGNIPASLFNLSSLRILELRANLLGGILPSNMGNHLTNLQHLFMGQNMFKGHVPASLGNASMLETIVLQSNNFTGRIPTSLGKLSNLYKLDLELNMLEAKDTEGWKFLDALTNCTALEVLALAENQLQGVIPNSIGSLSNTLRYLVLGGNELSGIVPSCIGNLSGLIQLSLDVNKLTGSISPWIGNLKYLEYLNLGKNRFTGPIPYSIGSLTRLTELYLEKNAFEGHIPPSLGNPPLLLKLDLTYNNLQGTIPWEISNLRQLVYLKLTSNKLTGNIPNALDRCQNLVTIQMDQNFLTGTIPISLGNLKGLSVLNLSHNILSGTIPAVLGDLPLLSKLDLSYNNLQGEIPRIELFRTSVYLEGNRGLCGGVMDLHMPSCPQVSHRKERKSNLTRLLIPIVGFLSLTVLICLIYLVKKTPRRTYLSLLSFGKQFPRVSYKDIAQATGNFSQSNLIGRGSYGSVYKAKLTPVKIQVAIKVFDLEMRWADKSFVSECEILRSIRHRNLLPILTACSTIDYSGNDFKALIYEYMPNGNLDMWLHKKNTAVASKCLSLSQRVNIAVDIANALSYLHHECERSIIHCDLKPMNILLDSDMNAYLGDFGISSLVLESKFASLGHSCPNSLIGLKGTIGYIAPEYAECGNASTYGDVYGFGIVLLEMLTGKRPTDPMFENELNIVNFMEKNFPEQIPHIIDAQLQEECKGFNQERIGQENGFYICLLSVLQVALSCTRLIPRERMNTREIAIKLHAIKTSYAEATKRESTLCRRELECVMELV

SEQ ID NO: 141209 - protein, 181 aa, Oryza sativa
  Clone ID: PAT_MRT4530_42335C.1.pep
MASVFWGSGHPADEVADFDEYDPTPYGGGYDIALTFGRALPPSDEICHPISTASSSSSSYDRPQQGRRPPAEETHLSAGHGRRPDDDEATHGGGYRKPKPAYGDDEQQRRHTSGGGRKKHGGDDDDGSGDERKPRYKKHDDDDDGERKPRYKKRDDDDDDSDGERKQRYEKNNRRRHDYDD

SEQ ID NO: 141210 - protein, 66 aa, Oryza sativa
  Clone ID: PAT_MRT4530_42336C.1.pep
ISYREPIDNHCGCPYELGFSFLLKSSLWLPTPPFLLPSRTLCYTSLTTLKFSASFPLLNGEVRRIC

SEQ ID NO: 141211 - protein, 310 aa, Oryza sativa
  Clone ID: PAT_MRT4530_42337C.1.pep
MADKFSTKPHVFNGVDFPYCVTSKNGNEIWNALRNFHQRTSNIKELRKDIFKKDYIKLEKKSEEALDDYLARFNKILSNLRSVDSSYDVNYSQFEVSRHFLNGLDMSIWEMKVTSIQESVDMFCLTLDSLYTKLKTHEMNILSQKVDSKSSALVSSLDLGASSSNSVSLYSINALSDDQLESFEEEDLALAINKLSRAMNNVRLKKRGGRIRCFECGELDHIRSHCPKLGRDKKDDNGVKTKDNKPVTTFKGRRSKEALKKVLNQVYAAFEPASNGDIKSDEDKDKEEYISDFCFMAHGESESEIEDNEF

SEQ ID NO: 141212 - protein, 98 aa, Oryza sativa
  Clone ID: PAT_MRT4530_42338C.1.pep
AVLFWCSPPGVVCQHLKGRISSDACNRVTWNLWSWWCIYGVTTEEGSAIEAGARHRDTCTVANVTVLHAVHDALLELALHHRTDHNTAPVARHGPLCV

SEQ ID NO: 141213 - protein, 115 aa, Oryza sativa
  Clone ID: PAT_MRT4530_42339C.1.pep
MEANADADERRLRRKIFNRESARRSHARKQWHIDKLRARAGRGRGRRRLGAAGAEAVVWRAPEERPEAGAEASDGGREGKASCKPPGPAPPPLVARWRGQAPHPQSGARFSVWML

SEQ ID NO: 141214 - protein, 1084 aa, Oryza sativa
  Clone ID: PAT_MRT4530_4233C.1.pep
MAAFAGKEDEQRQRLASRKKASEAVPSAYRWNLVASVVDTMVGWDSEDTMVGWDSEVKALLGLPVLATMTLLGAIHLIEGVAIGALIQLHTKGFLWAGNHLLLSNSSAGLRMDCQENNLKSFLQTNGHVVLQRVDNNYSLRYFTKNEVWHITNGYSIMLGKGAFGEVYKGILDDGCPVAVKRYIHGNLKEEFAKEVIVHSQINHKNVVRLLGCCTEENALMIVMEFICNGNLDNVLHCSNTKGCVPFPLYKRLDIAIEVAEALWCMHSMYSPVLHGDVKPANILLDENHSPKISDFGIARLLCANGAQHTKNIIGSIGYVDPAFCENGILTPKSDVYSFGVVLLEIITRKKAVDGTITLAQSFTDAIEKGKKVMNLFDEEINDKQNMNFLEDIGKLAVKCLRRDVKVRPEMVEVATSLRMIRKDLEGEQGNLTQQHTSTPNNSTPSKNEGSAGRQFGNLNIFKQEEIKHMTRNYSMTFREEFHERLYNGVLGMVHAVIVKQVSTSSKTDREVFLKTMGILCQKYHKNVANVAGFHLGEYISECVYESCCELSQVNNGHISFSNRNLYEIICSTEKLPLHVRLSIAVQCLEGLVHIHSFLAENPESRGTSLFGNFRSANIFLDKNFMPKVFNANLSTFLGLCAVQQCTASVDCIHDQRSQKYYLDPKDVSDHLFNPKSDVYSFGVVLLELITWKTAKYKSGGQAHMLTTDFLDTYRIDHSATDFFVKKVYDEEGKCFLHEAIAIGVECLKLDVQMRPEMSDVLSRLRIISAAQSIRSKLMGPQAKGIMILIVNQIVTDKFSDCGDNGPSQYIAPTPVNNDVKIPSPPTSASTISLDILKKITRNFSNNSLIGEGSHAKVFFGVLKDGKNSAVKKLNPNEETIVQVSTISKMLKHDNVVQIHEYFIEGENHVLVYEYAPKGSLHDILHGREGVTGAQARPPLSWVQRVKIAITAAKGLEFLHEKAVPPVIHTNIKSSNILLFGNDVAKIGDLGVSKQLHVEDYDYSYTRVVPQIFRYEAPELRGQYSVKSDVYAFGVVLLELLTGRKATPRLSKDKVKQCVDPKLGRAFPLKAVARMVSFAHVTHG

SEQ ID NO: 141215 - protein, 142 aa, Oryza sativa
  Clone ID: PAT_MRT4530_42340C.1.pep
PSYNSFENLKFLHLDRCPSLKTLEIVCCGALKDVFPLDSDSTIVFRRLKRIHLHELPKLQRICGRKMSTPQLETVKIRGCWSLKRLPSVGRHDSTPPIVDCEKEWWDGLEWEGMEANHHPSLYKPIHSHYYKKALRRTSLLR

SEQ ID NO: 141216 - protein, 71 aa, Oryza sativa
  Clone ID: PAT_MRT4530_42341C.1.pep
NILVHPSTLGKRIRTYIRYIYNYIYWTEYTHLYTPAETRIEINLASLAEGDASPWQHGGGGAHLPGTNKQA

SEQ ID NO: 141217 - protein, 62 aa, Oryza sativa
  Clone ID: PAT_MRT4530_42342C.1.pep
ICVCSLRSLCSYSFQQSILECYQADLTTSMTTKYLLDLKDRYVPIFCFLKGFFRSSTALLFL

SEQ ID NO: 141218 - protein, 117 aa, Oryza sativa
  unsure (1)..(117): unsure at all Xaa locations
  Clone ID: PAT_MRT4530_42343C.1.pep
MERVASSCLSLLAQRRGYSVAAAVAKGAGRRADEKKVAAAVAKRTMAKAAEEKTAWVPDPVTGYYRPAGGAKEVDAAXCAPSCSPTPRGWLPTETDRRRIGRSRLAMYSALRCALPS

SEQ ID NO: 141219 - protein, 74 aa, Oryza sativa
  unsure (1)..(74): unsure at all Xaa locations
  Clone ID: PAT_MRT4530_42344C.1.pep
LERGADSRPTLRSDSGRATQRRSSEKSLLPSRCCSSTVLHPVLQFSIITFDHRVSITFGFPLFGFCPFTFLXFX

SEQ ID NO: 141220 - protein, 67 aa, Oryza sativa
  Clone ID: PAT_MRT4530_42345C.1.pep
MAMIDWRRRRVEATASASDGAERERCESGSGDCAIWSIDNEAPTVTSSISNMSTQSFKGAHRDKLCV

SEQ ID NO: 141221 - protein, 68 aa, Oryza sativa
  Clone ID: PAT_MRT4530_42346C.1.pep
YSSSTNCPTIMASWYGSGTGTRKRNVRLVMSLVSWLRFFQEQVVIIQTLIHFLFESLTNTLDSCPSYY

SEQ ID NO: 141222 - protein, 86 aa, Oryza sativa
  Clone ID: PAT_MRT4530_42347C.1.pep
MERQPPKSPTRGQTPGSPSTTRSRAQGSSSTRGGGRSPGSPSTRGRAQGFPLTHSAYSSAAMAACGCSDVPPDSGVCDRVAIRSCV

SEQ ID NO: 141223 - protein, 578 aa, Oryza sativa
  Clone ID: PAT_MRT4530_42348C.1.pep
MHFTNMTFVITFLITAPVMVDSLDTIHKAGSVKIIGTLMSVAGVMLLTFYKGVALTHQVVSSTKLTKKYPALYSSTAYMFLISSLQGGALTAAIQRRASVWVLTRTVEIVAVLYTGIMGSGVGYVLMTWCVEKRGPVFTSAFIPIIQIMVAIIDFFYLHENLYLGSVVGSILMILGLYILLWGKNRDTSAAASAKEAKEEEEDKEKQLKIHLMLNPDFWGRPPDQTLVESKGKASGFPEMWRAGCMEQWMPTVSMVATNVVIAIMTALIKQALNQGMNRLVLITFRQMVATVFLGPIAYFKERPVLLQYTLFVGLEFTTATFAATFGNLLPVVTFLISLVFRFEALNVKSRSGSAKISGTLVSLSGAMMLTFYKGSALTHTPSSSSSPASSSSHSQAEEHDTAHWVLGSVSLLANVVGFALWLMLQRKFTRKYPAIYSATAFMSLFSCLQAGALALSIQRSSISIWALKGKIEIATVVYCGVVASGFGYLMLTYCVEKRGPVFTAAFSPLSQIFVAGIDLFILHEPLYLGSVLGSVLVIVGLYLVLWGKREETAAVSKDAIASPEKPVQDVEQQQEKV

SEQ ID NO: 141224 - protein, 48 aa, Oryza sativa
  Clone ID: PAT_MRT4530_42349C.1.pep
MTHIRQISLVYSITLKPKLTSQPEVKATFLSKWNSPSSLTTYIGRGST

SEQ ID NO: 141225 - protein, 63 aa, Oryza sativa
  Clone ID: PAT_MRT4530_4234C.1.pep
AGASNCAPILLAVNVLYSSPASNVSLSTTGCISCLMFQSASLCLLQRWYYVSSPSALVTPLCI

SEQ ID NO: 141226 - protein, 334 aa, Oryza sativa
  Clone ID: PAT_MRT4530_42350C.1.pep
MAAAASVVVLCALVVLAAAGGASAWPVMSPSYYEASCPSVYDIVRRVVQEARCTDPRAPASLLRLHFHDCFVNGCDGSLLLDDFGAMQSEKNAPPNKGSARGFDVVDGIKAALENACPGVVSCADILALAAEISVELSGGPSWNVMLGRRDGTAANFEGARDLPGPTDDLDLLRRKFSEFNLDDTDFVALQGAHTIGRAQCRFFHDRLYNISGTEQPDQTLDMAYLNELRQSCPASDPESAALRNLDPPTPDAFDNSYYGNLLRNRGLLQSDQGMLSAPGGAASTTAPIVVWFAGSQDDFFRSFATAMVKMGNISPLTGSMGEIRRNCRVVNRG

SEQ ID NO: 141227 - protein, 105 aa, Oryza sativa
  Clone ID: PAT_MRT4530_42351C.1.pep
AGRQAPGGNSSPRRRTGGRRRLEHGDGHRRGMPDAPSARAAKAPTAPCAPTRRPTAGLLEAGGQRQPARRLLGRAGGGARTSEWRRAGASSPPGSRAADASAWRL

SEQ ID NO: 141228 - protein, 62 aa, Oryza sativa
  Clone ID: PAT_MRT4530_42352C.1.pep
PDSFHFAEDWVRTAFHAKKKVQTEHAWVALDDQCAISHNAAANQSMQTLKTYPFERRGSYGP

SEQ ID NO: 141229 - protein, 79 aa, Oryza sativa
  Clone ID: PAT_MRT4530_42353C.1.pep
MALKLERRGTVGPMLGFPLRDADVWARGKKGLDARCQWHSGLWARPGVDKDKRKLILIGQHIGFGYGLNYKSVRKMKFS

SEQ ID NO: 141230 - protein, 151 aa, Oryza sativa
  Clone ID: PAT_MRT4530_42354C.1.pep
SAHHACAVVGTSLRWEAHRRSYSPRRSAVPELVAAGSGCPRAQGGQIWRPPSPWRPDPVALDITTANQSTSGPPSPHLHVVPPPTEPLRRIASSCGAAAPLVGSRRGEGKSNLERRGESRDWKVSRIRDFIFPGERREKWCASCRFLQPGG

SEQ ID NO: 141231 - protein, 144 aa, Oryza sativa
  Clone ID: PAT_MRT4530_42355C.1.pep
MGKSKYVAADKHGVLYNLKRRAEPWPVGRATDRSARLLGDQGAGGRCGCNNRDDVALVHVRVRDQLLLRARSRMATTVAAMCGAAEERVVGTHKAPGACPRCGGAVVATDVESERRILCLPLCVKSKRKYSCSRCLRRLVTLYS

SEQ ID NO: 141232 - protein, 174 aa, Oryza sativa
  Clone ID: PAT_MRT4530_42356C.1.pep
MGKSKYVAADKHGVLYNLKRRAEPWPVGRATDRSARLLGDQGAGGRCGCNNRDDVALVHVRVRDQLLLRARSRSRAVGGGEPGTRDGWMDRSVFRASPQAACRMATTVAAMCGAAEERVVGTHKAPGACPRCGGAVVATDVESERRILCLPLCVKSKRKYSCSRCLRRLVTLYS

SEQ ID NO: 141233 - protein, 237 aa, Oryza sativa
  Clone ID: PAT_MRT4530_42357C.1.pep
MKDGVAGGGGERPCMCYFHPREEVVGVCSQCLRERLLLLLASKTSPAAAHLLADRPLHRKNSSISLPKVFALGSSFLQRLDSSRHHLRPAPHDSDANSDADTASIASLDDSFISIKFEDNGKATWDSQKAAAGEKKTDTTTTAVVEHVKRGGVTRWRKQVVGRLLQLARWKRSGNGKAAACHQLGIDGKKTAERSSSKGTTEISVGVMDCYSELPSLAPTLKLVIRQLAARTVYWQL

SEQ ID NO: 141234 - protein, 72 aa, Oryza sativa
  Clone ID: PAT_MRT4530_42358C.1.pep
GFVLADAEDDRWLPELLHYDIRYVPCFVLLDKNGRALAKTGVPTSRQHVIAGLHHLLNMNQISLPEGTKSTA

SEQ ID NO: 141235 - protein, 114 aa, Oryza sativa
  Clone ID: PAT_MRT4530_42359C.1.pep
MGDPDNAGDKADKEGETREHNVVFLSAPTPLSAATRRSRVCCCPQGRGPRSRDLAAGRPPSSGAEGVRCLVPSPLDRPDLEAGHPPPREPGGPLLGALVSSVWWTSLPGKTLLR

SEQ ID NO: 141236 - protein, 873 aa, Oryza sativa
  Clone ID: PAT_MRT4530_4235C.1.pep
MESCVCACAWPTAPTVVALFATGYEEGVAEAPHDVDPMTNGHVVFQRVENNCSLRYFTENEIRQITRGYSILLGKGSFGKVYKGMLDGRCPVAVKRYIHGTRKEEFAKEVIVHSQINHKNVVRLLGCCTEENALMIVMEFICNGNLNDILHCSNTNGRVPFSLGKRLDIAIEVAEVLWCMHSMYNPVLHGDIKPANILVDENLSPKLSDFGIARLLCANGAQHTNNIIGSIGYVDPAFCMNGILTPKSDVYSFGVVLLEIITRKKAVDGTITLAQRFTEAVEQGKKVMHLFDEDINNTKNMNFLEDIGKLAVKCLRREVEVRPEMVEVATSLRMIRKALEEEEGNLIQQNISAPSNSIPSKNVKSSAQQFGNLKIFKQEEIKLMTKNYSMKFREEFCERLYNGVIGTTHAVIVKQVRTSSESDRMMFLKTMSILSQKYHKNIANVAGFHLGDSISECVYESCCDLSQGNDGHVCFCNRNLYDIICTREKLPLHLRLSIAVQCAEGLVHIHSLLAENPDSHSTGLLGNFRSINIFLDKNFVPKVFNSNLSTFLGLSVMQKHTASVDRPNDQRSQIYYLDGRDISGQLFNPKSDVYSFGAVLLELITWKTVRYMSSGRVHMLTKDFLDTYRIDHSAAISFGKKVYDEQASGDNKPNQHVAPPLTKKFVKTPPTIVSIIPLNILEKITSNFSNDALIGEGPDARVFFGELSDGQKSAIKKLDPNEKIVVQVLTISRMLKHDNIVQILGYFIEGENRVLAYEYAPKGSLHDILHEGVRGAQPGTPLSWEQRVKIALSAAKGLEFLHEKAVPPVIHTNIRSNNIFIFGNDVAKIGDLGVSKQLYPESDNDYYNTRLDPLRSFGYDAIAPEYAMKDFHA

SEQ ID NO: 141237 - protein, 85 aa, Oryza sativa
  Clone ID: PAT_MRT4530_42360C.1.pep
PTFKICSHASYFILHAYRSAAAQPRLLIPVALVMMYNRWNEILVPDYGFMHLELIPMLVGFFTYKIATFAQAIQESIPAVGNRES

SEQ ID NO: 141238 - protein, 369 aa, Oryza sativa
  Clone ID: PAT_MRT4530_42361C.1.pep
MGRKAPSVVCCCFPFTVAELVVLAVVCVPAALCHLAVRGGHRRRVCSAKQKEMGELLTLDVTSPRSLAAAAAKARKVEVEFPATPMAEHLGEAEVARWKSGLQAALHWVARLLSSAGEDARPAADLRVLLPVLACPLSPVPILPRLPRHTHLPFFPDLALFSLGDVAAPVSPTLGELTEPRFPPTRPLSRSRSAPATMPPTVARARSATPPNDSRVWGGAPARSAREEGGGGGGGDAALPACRLLAAYSLAASPPKVTEPTKPAVRPLTNHPNIRQRAPQPRCRSSSPSLSSSSLSRGSSGKPARCGTVARERLFWRRVRQLRATSIHAEARAAHVIVVVLVVKLPPAREACPRSTAPSARQGPPHRRR

SEQ ID NO: 141239 - protein, 100 aa, Oryza sativa
  Clone ID: PAT_MRT4530_42362C.1.pep
MARGFHLVDLRLSASATTASAVARLSAMAAAGPPPPFPPPSHPPPLPHPLYLPSPTLPAIVRLSTMAADLSLPHPLYLPDSSNFYGGADRLTNSGGGYEL

SEQ ID NO: 141240 - protein, 62 aa, Oryza sativa
  unsure (1)..(62): unsure at all Xaa locations
  Clone ID: PAT_MRT4530_42363C.1.pep
LVILKSPFVLVMMLLFFNPPGLVTPFGXWPDTNSLEWAFIFMGLVENLAMRRFLLPCWFTWC

SEQ ID NO: 141241 - protein, 137 aa, Oryza sativa
  unsure (1)..(137): unsure at all Xaa locations
  Clone ID: PAT_MRT4530_42364C.1.pep
NLTHETQCTLIYNQYALICAXMKSCKHVVNMWNKQKIESTPSIKYKSSAWHRILRTSSNMQQCSQSFPSTPSTLGGCAWTREAGCCACGLWRRAAAAPGXWWCNGXAGRRHGAPIPRRAPEPKKRCXSDLVQAACWL

SEQ ID NO: 141242 - protein, 351 aa, Oryza sativa
  Clone ID: PAT_MRT4530_42365C.1.pep
MAGYRRTISFPAPRPAAFAIGATARDKLAAAYHVRSASLPCRFHPLVVQLDDDVAALRLVIGQSPPAAPSASSVSAAASQVGRVLVSLSELLHHPQAQEPLRRLGRSTFAERLLDDFLRLADAHGSFREALVGLSALQAETRAALRRGDPARLASAARAQRRAGRDLPRLAAAARAVVSKSPAQLPEDLPADTAAIAAAVADATIAVASGSAAVFSGLSSLSNSAAAARVEVASTPCWVTAPARLTASSDEPSTSHHRIWWVADLVRWMSRAKRRSAKKQNDGGGDDGESSTVQLRSESRMKPEEKARRAAFERHENLERCIASVDSSGEKVFRALVNTRVSLLNILSPSF

SEQ ID NO: 141243 - protein, 224 aa, Oryza sativa
  unsure (1)..(224): unsure at all Xaa locations
  Clone ID: PAT_MRT4530_42366C.1.pep
FQRKKAKSKKTKPTDDLPALDPSIEHALDEEDIEDDVDQATAEANYLDEAEKDTSSKALAPLSDDAKKTLEDISRRLEASSLDSLVVDYGSIRTRLHEVQALIPEELAGVLTLATYLEQHQFKLEKAKLRLAERRERKEIEATIQVNRQLVHEEKVKLDQLSEGPIKSNIDRLEARKIKSNILLAQLEECNAELDMEHKKLADLPKFXNXQKARLKSAYQDMLL

SEQ ID NO: 141244 - protein, 302 aa, Oryza sativa
  unsure (1)..(302): unsure at all Xaa locations
  Clone ID: PAT_MRT4530_42367C.1.pep
PYEYEHQEPIGLQDQKHRWLVWLCGGIYGPRLPPPSPPVQQSSSNQTPSAVGSHHVEEEEQPAASAIPXYLDEAEEDTSSKAQAPLSDDVRKTLEDIAHRLEASSLDSLVVDCGSIRTRLHEVQALIPEDLADVLTPAAYLEQHQFKLEKAKLRLAERHERKEIKAIIQANWQLVHEEKTKLDQLSGGPIKSNIDRLEARKIELLAQLEECNAELDMEHRNLADLPKSIEEQKARLKSAIKNVADLTKSLKVISGTDAQDAQAIVEKQLVVLPLRRDDSPQPMESDYLTIAVQEEKEEEAAK

SEQ ID NO: 141245 - protein, 679 aa, Oryza sativa
  Clone ID: PAT_MRT4530_42368C.1.pep
MSSSTSPSIAPSVEYAENTFKSWPSLEKPTPDKSWTTWYQRVSASKKVHWDEIGIGQALTLTIANSAKDEPLMAAATYFWSNTINAFLFNQGPMTPTLIDITMITGLDVTSSANPMSMNTKNQFDFKTKSIGDWSGYVAAYMGQGSVTPREHVAFLLMWLEKFLFYGSSCGPTTNWQFVTEALESKKEFPLGKILLGYLYQMLNNASAKIAVGSIVGAGGPWWLLQTWLNLVVMKVVNRPSVTEAEFPLPEPIVEDDGEERTHRRCMSYGEYASTPTDAGAKLSAELLKDWFCSFYEGLIPNGGGLSPPFIGYHAPKTSTLLHGLTREPADAGKKRKTRSSAMSTLALAPKKKTKFKKTQPQPTDMSTDDLPALDPSIEQALDDEEIGEDVDQAVAEMSDTERTPSASPKQTPPTPYAPVHFTRQSSSDQTPSAVGSHHIEEEEQPAAPAIPALADLFSFDIRDYLDEAEEDTSSKALAPLSDDVRKTLEDISHRLAASSLDSLVVDRGSIRTRLYEVQALIPEDLADVLTLAAYLEQHQFKLEKAKLRLAERRDRKEIKATIQTNRQLVHEEKTKLDQLSEGLIKSNIDRLEARKIELLAQLEECNAELDIEHKKLADLPKSIEEQKARLKSAIKNVADLTKSLKVISGTDAQDAQAIEEVEQIRQRAILAIQRYLSQ

SEQ ID NO: 141246 - protein, 83 aa, Oryza sativa
  Clone ID: PAT_MRT4530_42369C.1.pep
AVIEQADWDYSKILEKVRRDVEDHTLSIREGKLSELTNHAKVSPKYTLITPSQCKSLWKQFKAETEFAITQAVSTQQAHKRGN

SEQ ID NO: 141247 - protein, 236 aa, Oryza sativa
  unsure (1)..(236): unsure at all Xaa locations
  Clone ID: PAT_MRT4530_4236C.1.pep
MSASAEPPANPLRRAAAAPTPRRWPAIKEESRPPLHFHSIHVDGLERERVREKDGSPXPALAHPTWPSYGGKPPPQEDRRLEGSSPQASTPPYGVTVVAASTRLPVXAAWSHRRRLHPPTTATSPVLSSAAPRRAAPLSAVTGCPSRVGQPPPSPATPPRTRPPLLPATPPRAPASTAAAAPLRAPASTAAGCPSALLTRAASAPLPSDRRLRPDPAGVAPDPPPPRREESPLPRP

SEQ ID NO: 141248 - protein, 92 aa, Oryza sativa
  Clone ID: PAT_MRT4530_42370C.1.pep
SQAHGDGVRSGDGRRGDLPPARLHHPLAGRVSFFSAVLGDLLGRSISFIVDSYYQQHQGVEENRPVVGGGDDWRWLDIDGVAAWRWSLLLLH

SEQ ID NO: 141249 - protein, 60 aa, Oryza sativa
  Clone ID: PAT_MRT4530_42371C.1.pep
MALEQTFIMIKPDGDFAVDIGRNVIHGSDSVENARKEIALWFPEGIAEWRSNQHPWIYEV

SEQ ID NO: 141250 - protein, 835 aa, Oryza sativa
  Clone ID: PAT_MRT4530_42372C.1.pep
MSFSTSLSTAPSAEYAEHLSNLVAIPSLSHKNHYFLGPIDNLDPTDFIIGETNRIPFRQANPNLGHWKNTFKSWPSLEKPTPDKSWTTWYQRISASKKDHWDEIGIDQALALTIANSAKDEPLMAAATYFWSNTINAFLFNQGPITSTLIDIIMITRLDVISSANPMSMNTKNQFDFKTKSIAEALDSKKQFPLGKILLGYLYQMLNNASAKIAVGSIVGAGGPWWLLQTWLNLVVMKVVNRPSVTEAEFPRLEPIVEDDGEERTHRRCMSYGEYASTPANAGAKLSAELLKDWFCSFYEGFQKDARVWFLYEDSVDLELPSDFRFEDINHERYQTSGKSLQLQSAHASYLLIQCRGEISSTLMMDRLLNLQGPPLGSIDNIELAVFRSRNFDRWWGEWKLHLFHQLASMYMTDLFPDVIPQTTESSPPHQSNSGKSIEYAPGLIPNGGGLSPPVIGYHAPKVSTLLQGAIREPTDVTKKRKTRSSAASTLTLAPKKNAKTKKTKPTDDLSALDPSIEQALDEENIEDDVDQAAAEISDTEKTLSASPKQIPPTPSAPTHFFRPPPPPSSPVQQSSSDRTPSAVESHHVEEEEQPDAHAIPVLANLFSFDIRDYLDEAEEDTSSKALAPLSDDMRRTLEDISHRLEASSLDSLVVDCGLIRTRLHEVQALIPEDLADVLTPAAYLEQHQFKLEKAKLRLAERRERKEIEATIQANWRLVHGEKTKLDQLSKGSIKSNIDWLEARKIDLLTQLEECNAELDMEHKKLADLSKSIEEQKARLKSTIKNVADLTKSLKVISGTDAQDAQAIKEVEQIRQRAILAIQRYLSQKRLCNRT

SEQ ID NO: 141251 - protein, 789 aa, Oryza sativa
  Clone ID: PAT_MRT4530_42373C.1.pep
MDEAAAAEAVQLIDGEGEFAADSAERFMAAAGVAGCGLSYAVVSIMGPQSSGKSTLLNQLFGTNFREMDAFRGRSQTTKGIWIARCVGVEPCTVVMDLEGTDGRERGEDDTAFEKQSSLFALAISDIVLINMWCHDIGREQAANKPLLKTVFQVQVTALPSFEEKEEQFREQVQQLRQRFSNSIAPGGLAGDRRGVVPASGFLFSSQQIWKVIRENKDLDLPAHKVMVATVRCDEIAHEKFSCLTSDAEWMELESDVQSGPVPGFGKKLGYIVDVHMQEYDKEAIYFDEAVRTAKRQLLKSRVLNLVQPAFQKMLAHLRTRALEKYKTELNLTLESGKGFAAAVRDTTESNLNEFDQGCADAVIEQADWDYSKILEKVRRDVEDHTLSIREGKLSELTNHAKEKLRKALVEPVESLFDAAGPSTWASIRNLFKRETEAILPEFQKNLAGFEMESATSEGMVSKLRDYARSIVENKAKEEAGKVLIHMKERLAKSSIIRSPYRSISRTSDKVACHCQALKLLSVLAAIRWDEKPDKIEKILTSTLLDGSVTPKSKGASASSDPLASTTWEEVSPKYTLITPSQCKSLWKQFKAETEFAITQAVSTQQAHKRGNGRLPPPWAMVAIAVLGFNEIMTLLRNPIYLFLLFVGYLLVKALAVQLDINREFQNGVVPGIISVTAKLIPTLQNILNKVATEQQQQQGHHQDAAAEAPQQQQQPQPQPPPLLLSPRSPMSELRRPLHMPFSPVRKAVSPSPSSSSSTVTSPRNAGEDQKPRQMVQPDNESNNAYSIV

SEQ ID NO: 141252 - protein, 71 aa, Oryza sativa
  Clone ID: PAT_MRT4530_42374C.1.pep
DGCLPGGDPLVAVAAFCAACATCSPVVKILNGMWMAPAASVTASTARRAWYSPSACAFPDSKDRWMLLHTP

SEQ ID NO: 141253 - protein, 151 aa, Oryza sativa
  Clone ID: PAT_MRT4530_42375C.1.pep
MALEQTFIMIKPDGVQRGLIGEVIGRFEKKGFYLKAMKLINVEKSFAEKHYADLSSKPFFGGLVEYIVSGPVVAMVWEGKQVVSTGRKLVGATNPLAAEPGTIRGDFAVDIGRNVIHGSDSVENARKEIALWFPEGIAEWRSNQHPWIYEV

SEQ ID NO: 141254 - protein, 667 aa, Oryza sativa
  Clone ID: PAT_MRT4530_42376C.1.pep
MSSSTNPSDAPSADYAEHLSNQVAIPNLSHKNHYFLVPIGNLDPTNFIIGETNRIPFRLANPNLGHWKNIFMSWPSLEKPTPDKSWTTWYQRVSASKKVHWDEIGIGQALALTIANSAKDEPLMAAATYFCCGPTTNWQFLAEALESKKEFPLGKILLGYLYQMLNNASAKIAIGSIVGAGGPWWLLQTWLNLIVMKVVNRPSVTEAEFPLQNLIVEDDGEERTHRRCMSYGEYASTPSDAGAKLSAELLKDWFCSFYEGFKKDARIWFHYEDSGDLELPSDFRFEDINHEKFQKSREVLMAAISPCILLVGIHQGRNIQTIESSPPHQSNSGKNIEYAQGLIPNRGGLSPPVIGYHAPKTSTLLHGLTREPADADKKRKTRSSAVSTLTLVPKKKSKFKKTKPTDKPADDLPALDPSIEQALDEEEIGKDVDQAVAEMSDTERTPSASPKQTPPTPSTPVHFTRKSSSDQTPSAVGSHLIEEEEQPAAPAIPVLVDLFSFDIRDYLDEAEEDTSSKALAPLSDDVRKTHEDISHRLEASSLDSLVVDCESIRARLHEVQALIPEDLADVLTPVAYLEQHQFKLEKAKLRLAERRERKEIEATIQANRQLVHEEKTKLDQLSEGPIKSNIDQLEARKIELLAQLEECNAELDLEHKKLADLPRSVEE

SEQ ID NO: 141255 - protein, 316 aa, Oryza sativa
  Clone ID: PAT_MRT4530_42377C.1.pep
MSSSTNPSDAPSAEYAEHLSNLVAIPSLSHKNHYFLGPIGNLDPTDFIIGETNRIPFRLANPNLGHWKNTFKSWPSLEKPTPDKSWITWYQCVSASKKVHWDKIGIGQALALTIANSAKDEPLMTAAIYFWSNTINAFLFNQGLMTPTLIGITMITRLDVTSSANPMSMNTKNQFDFKTKSIGGWSGYVAAYMGQGSVTPREHVAFLLMWLEKFLFCGSSCGPTTNWQFVAEALESKKEFPLGQILLGYLYQMLNNASAKIAVGSIVGAEPIVEDDGEERTHRRCMSYGEYASTPTDAGAKLSAELLKDWFCRFYE

SEQ ID NO: 141256 - protein, 415 aa, Oryza sativa
  Clone ID: PAT_MRT4530_42378C.1.pep
MSSSTSPSTAPSAEYAGHLSNLVAIPSLSHKNHYFLGPIGNLDPTDFIIGETNRIPFRLANPNLGHWKNTFKSWPSLEKPTPDKSWTTWYQRISATNPMSMNTKNQFDFKTKRIAGWSGYVAAYMGKGLVTPREHVAFLLMWLEKFLFCGSSCGPTTNWQFVAEALESKKQFPLSKILLGYLYQMLNNASAKIAVGSIVGAGGPWWLLQTWLNLVVMKVVNRPSVTEAEFPRLEPIVEDDGEERTHRRCMSYGEYASTPTDAGAKLSAELLKDWFCSFYEGFQKDARVWFLYEDSADLELPLDFRFEDINHERYQTSREVFTAAISPCILPVGIHQGRNIQVSYEFYHPMSSARQLGLGQLPIGLFFANKIQCRGEISSTLMMDQLLVDPRFYNRNQSCKQYHFPGSSSLVHTNS

SEQ ID NO: 141257 - protein, 67 aa, Oryza sativa
  Clone ID: PAT_MRT4530_42379C.1.pep
SIWRLLKCGGCCLSLLDFPSEFQCLLRSSVHAQFASCIAVAFVPGGVLSSFDVECMKHFSYIMKYPL

SEQ ID NO: 141258 - protein, 155 aa, Oryza sativa
  Clone ID: PAT_MRT4530_4237C.1.pep
MIIYKDFLTGDEMMSDSYPIKEVDDVIFEVDCDAIYPESVAGDDEPVEFNNVIYSFRLQPTTYDKKTYVSSLRSYLKIVKNRLKKIGKNPEYIANFEKNAQDFLKTKLLPNFDDLEFYTGESMDLDGMIAVMGYREDGTTPYFMFWKDGLKEMRI

SEQ ID NO: 141259 - protein, 42 aa, Oryza sativa
  Clone ID: PAT_MRT4530_42380C.1.pep
ILQPPPSSPPVQQPSSDQTPSAVRSHHIEEEEQPAAPGTQRY

SEQ ID NO: 141260 - protein, 413 aa, Oryza sativa
  unsure (1)..(413): unsure at all Xaa locations
  Clone ID: PAT_MRT4530_42381C.1.pep
SNKRPIELAGFRSKKFDRWWGEWKLHLFHQSTSMYMTDLFPDVIPQVNFVITKLHNQLADSLLDXSLAPVLQTTESSPPHQSNSGKNIEYASGLIPNGGGLSPPFIGYHAPKTSTLLHGLTREPADAGKKRKTRSSTMSTLPLAPKKKTKFKKTQPQPTDMSTNDLPALDPSIEQALDDEEIGEDVDQAVAEMSDTERTPSASPKQTPPTPYAPVHFTRALADLFSFDIRDYLDEAEEDTSSKALAPLSDDVRKTLEDISHRLAASSLDSLVVDRGSIRTRLYEVQALIPEDLADVLTLAAYLEQHQFKLEKAKLRLAERRDRKEIKATIQTNRQLVHEEKTKLDQLSEGLIKSNIDRLEARKIELLAQLEECNAELDIEHKKLADLPKSIEEQKARLKSAIKNVADLTKSLK

SEQ ID NO: 141261 - protein, 75 aa, Oryza sativa
  Clone ID: PAT_MRT4530_42382C.1.pep
MFSISVKQRIFPPQKISRTHVNQNHQKKSLEANWQTIKINKSENDIPLSANRGSFMNITESKRFAPLHNASLWCG

SEQ ID NO: 141262 - protein, 50 aa, Oryza sativa
  Clone ID: PAT_MRT4530_42383C.1.pep
MKQQGSPPIAQQQPSLSDSAISRCNSRIHIHKIATNLLLLAKLKILLLRT

SEQ ID NO: 141263 - protein, 50 aa, Oryza sativa
  Clone ID: PAT_MRT4530_42384C.1.pep
HHVPFYTKQPSYFIEIQHEEGKVLLLGVASVNIKNKRFFPKKNISYLSPP

SEQ ID NO: 141264 - protein, 28 aa, Oryza sativa
  Clone ID: PAT_MRT4530_42385C.1.pep
GRRCSLRYTRCCRVFGHCFQLVMVVGLV

SEQ ID NO: 141265 - protein, 44 aa, Oryza sativa
  Clone ID: PAT_MRT4530_42386C.1.pep
MVYQSSSSPAISASAVRFLHDTDTWHEAAINKEEASHMIIGQLP

SEQ ID NO: 141266 - protein, 161 aa, Oryza sativa
  unsure (1)..(161): unsure at all Xaa locations
  Clone ID: PAT_MRT4530_42387C.1.pep
GGPHTTHLLHPQFPTRQPHGRSTRRRRSPRPPLRSLSPLPAPARRGRRPSHTVRPPASARRGRPPPHGAARCLRSPRPPSPARRGRWPRAPRAAPAASARRGRRPPXSRPLPPSVTHRARRLRSLPACRRRLLPANTRKKRKRGRKGKKKKGEADIWVPVS

SEQ ID NO: 141267 - protein, 95 aa, Oryza sativa
  Clone ID: PAT_MRT4530_42388C.1.pep
SKCPSAREEAGAPPARRPASRSGDTRRRWRTRGTRRRRSTAARPPSWQASTRAPRAAGRRRRRARAPRRGTTSPWRRAGRRRGTRCRAPATPRSR

SEQ ID NO: 141268 - protein, 88 aa, Oryza sativa
  Clone ID: PAT_MRT4530_42389C.1.pep
GAATKPIRLAPQQKDKGGHNPVFTAKETPIISRRYNRESLLLSLPMATRMGHFGRLWLACSWIQNVFQNVDLFGNLRNYAYPQLPPPA

SEQ ID NO: 141269 - protein, 101 aa, Oryza sativa
  Clone ID: PAT_MRT4530_4238C.1.pep
MSSPAGEDEKKPAGGEGGGAHINLKVKGQDGNEVFFRIKRSTQLKKLMNAYCDRQSVDIKSIAFLFDGRRLNAEQTPDQLEMEDGDEIDAMLHQTGGSLPA

SEQ ID NO: 141270 - protein, 99 aa, Oryza sativa
  Clone ID: PAT_MRT4530_42390C.1.pep
MLEGKARVEDTDMPARMQAAATSAASRALDLFDVADCRAIAGHIKAEFDKRYGVGWQCVVGANFGCFFTHTSGTFIYFSLERLSFLLFKAAAAAAIAAS

SEQ ID NO: 141271 - protein, 142 aa, Oryza sativa
  unsure (1)..(142): unsure at all Xaa locations
  Clone ID: PAT_MRT4530_42391C.1.pep
MLEGKARVEDTDMPARMQAAATSAASRALDLFDVADCRAIAGHIKAASCSQETPMDLVESTMHQSIRLCRMDQRRXFWVRFVVCLLMLQEFDKRYGVGWQCVVGANFGCFFTHTSGTFIYFSLERLSFLLFKAAAAAAIAAS

SEQ ID NO: 141272 - protein, 114 aa, Oryza sativa
  unsure (1)..(114): unsure at all Xaa locations
  Clone ID: PAT_MRT4530_42392C.1.pep
FWCRDSPLAXQCSNVVXEVVVAGREEWDSMVLGSEAPVLVXFWAXWCGXCXMIXXVIDXLAXEFVRXIKXCQVNTDESPNIAXNYXIRSIPPVLMFXNXXKKEXVXGAVXXXPS

SEQ ID NO: 141273 - protein, 131 aa, Oryza sativa
  Clone ID: PAT_MRT4530_42393C.1.pep
KIWAFKGKGARLLRGSLNNTNGLVPPVRQVKVVVSPMSGVHLRSHNLMFQLKLVEAIKKTGNVKRFPPSKFGMDPSRMGNALEPGRVPFNEKMEIRKAIEDAKIPPTNVSSKGFAAYFCPNPSQLKKTLFS

SEQ ID NO: 141274 - protein, 392 aa, Oryza sativa
  unsure (1)..(392): unsure at all Xaa locations
  Clone ID: PAT_MRT4530_42394C.1.pep
MLRCPPPRRLCLRLRLRLGSPVSTMASTLSFLRPSAPAPLAASRGAARGVPAAVRVPCRSRVSAAGVSLGSEEAVGSDALFADYKPTTAFLFPGQGAQTVGMGAEAVNVPAAAKLFDKANDILGYDLLDFCTNGPKEKLDSTVISQPAIYVTSLAAVEVLRSRDGGQNVIDSVDVTCGLSLGEYTALAFAGAFSFEXDGLKLVKLRGEAMQDASDAASSAMVSVIGLDSEKVQQLCDAANEEVDEKERVQIANFLCPGNYAVSGGVKGIEAVEAKAKSFKARMTVRLAVAGAFHTSFMQPAVSRLESALAETEIKTPRIPVISNVDASPHSDPDTIKKILARQVTSPVQWESTVKTLMGKGLEKSYELGPGKVIAGILKRIDKGASIENIGA

SEQ ID NO: 141275 - protein, 710 aa, Oryza sativa
  unsure (1)..(710): unsure at all Xaa locations
  Clone ID: PAT_MRT4530_42395C.1.pep
KEEHTKHISSLCQRVLLSGPAGSEIYQESLVKALTKHFGAKLLIIDPSLLASGQSSKSKESESYKKGDRVRYIGSVQSTGIILEGQRAPDYGSQGEVRLPFEENESSKVGVRFDKKIPGGIDLGGNCEVDRGFFCPVDSLCLDGPGWEDRAKHPFDVIYEFASEESQHGPLILFLKDVEKMCGNSYSYHGLKNKIESFPAGVFIVGSQIHTDSRKDKSNSGSPFLSKFPYSQAILDLTFQDSFGRVNDKNKEALKIAKHLTKLFPNKVTIQTPQWKQLLDRDVEILKAKANTSKIQSFLTRNGLECADIETSACVKDRILTNECVDKVVGYALSHQFKHSTIPTRENDGLLALSGESLKHGVELLDSMQSDPKKKSTKKSLKDVTTENEFEKRLLGDVIPPDEIGVTFEDIGALENVKETLKELVMLPLQRPELFSKGQLMKPCKGILLFGPPGTGKTMLAKAVATEAGANFINISMSSIASKWFGEGEKYVKAVFSLASKIAPSVIFVDEVDGMLGRRENPGEHEAMRKMKNEFMVNWDGLRTKDKERVLVLAATNRPFDLDEAVVRRLPRRLMVNLPDASXKKILSVILXKEDLADDVDLEALANLTDGYSGSDMKNLCVTAAHCPIREILEREKKERASAEAENKPLPPPRSSSDVRSLRMNDFKHAHEQVCASITSDSRNMTELIQWNDLYGEGGSRKKTSLSYFM

SEQ ID NO: 141276 - protein, 182 aa, Oryza sativa
  Clone ID: PAT_MRT4530_42396C.1.pep
METQEAKRADVAAAPATATGGEAVKPAAGDAGAVTKTNAADGPSAPAGKAATPTGSVDRDAILANVELERKLSMIKAWEESEKSKAENKAQKKMSSILSWENTRKAAIEAKLRTQEEKLERKKAEYAEKMRNQVAAIHKAAEEKRATVEATRHEEIIKYEEMAAKHRSKGTTPTKFLSCFGS

SEQ ID NO: 141277 - protein, 82 aa, Oryza sativa
  Clone ID: PAT_MRT4530_42397C.1.pep
DAVFVSYRQKFLLEFCSLFLSIDQYMSSLSTDHLRFATSRLLRTIDSKTGTTNSALPTRGNRPICLLACNAAMHIRQEDTTA

SEQ ID NO: 141278 - protein, 66 aa, Oryza sativa
  Clone ID: PAT_MRT4530_42398C.1.pep
ILQEKIKKILDQGEKIRKNNNPLILSISFLFQVESFKNIELCYPKSPLPIIQKKRFIKYKINIKKI

SEQ ID NO: 141279 - protein, 680 aa, Oryza sativa
  Clone ID: PAT_MRT4530_42399C.1.pep
MAALVVLWPTLLPLVLLANLLPLPRHGRALELMNWSCNNGSSYAANTTYHSNVRAVLTALSAITPNSTARFATASAGRGGADAVWGLALCRGDTDRAGCASCLAAVPAVAFGECRGDRDVAVFYDRCLARFSYADFTSRPDNTEVLIGSPSENRVTVDAGRFDALVARLAGALADWAAYNSTRRYAAGLMASGDGFTSTTEDMVHNIHGVVQCTPDQAAAACRACLETLRVDMPKVFAGRIGGRFDAVWCNLRYETFLFYDGDPTVRLAASPSPGSSSSPLPSPSPSLPPLEGKRRNRPKNAAIVVVSVLASLVVLLSLLSFYLWRKLQAKQYTDENDIYSGSLLFDLATLRKATASFAEHNKLGHGGFGAVYKGFLPDGREIAVKRLDKTSGQGLEQLRNELLFVAKLRHNNLAKLLGVCIKGEEKLLIYEYLPNRSLDTFLFDPEKRGQLNWETRYQIIHGIARGLLYLHEDSQIKIIHRDLKASNVLLDANMNPKISDFGLARLFDGTKTASITNHVVGTLGYMAPEYAVLGHVSVKLDVYSFGILVLEIVTGRRNTDVSGEVEESNNLLSYVWDHWVKGTPLEIADASLLGDGRSLSDMELLKCVHFGLLCVQENPVDRPTMLDILVMLHDVDTNSFVAPSKPAFTFAHGGNTTSSSQGVAALSTNEVSISEFVPR

SEQ ID NO: 141280 - protein, 60 aa, Oryza sativa
  Clone ID: PAT_MRT4530_4239C.1.pep
MMFDVSVYQFLYSLVPPPFPSEQVQYSVCSYLYHIINCLALSPKELRTVLYIPQIKCFVS

SEQ ID NO: 141281 - protein, 68 aa, Oryza sativa
  unsure (1)..(68): unsure at all Xaa locations
  Clone ID: PAT_MRT4530_423C.1.pep
LGDLTPCMAXYVTMLSLKSPIGTQXLGFAYNLAGFISAGGEKGTSSGMPLSRNTLQGPAGTSRGQADD

SEQ ID NO: 141282 - protein, 212 aa, Oryza sativa
  Clone ID: PAT_MRT4530_42400C.1.pep
MNPFAKKPTPREAIRSSKRELTNATRGIERDIGTLQLEEKRLVAEIKRTAKTGNEAATRILARQLIRLRQQISNLQGSRAQIRGIATHTQAMHANTSVAAGMQSASKAMGALNKQMDPAKQMKVMQEFQKQSAQMDMTNEMMSDSIDNILDDDQAEEETEDLANQVLDEIGVDIASQLSSAPKGRITGKKVQADESSELDELEKRLAALKNP

SEQ ID NO: 141283 - protein, 740 aa, Oryza sativa
  Clone ID: PAT_MRT4530_42401C.1.pep
MAELMATMVVGPLVSMVKEKASSYLMEQYKVMEGMEEQHKILKRKLPAILDVIADAEEQAAKHREGAKAWLEELRKVAYQANDVFDEFKYEALRRKAKANWQYKMLGMDVIKLFPTHNRIVFRYRMGNKLRMILNAIEVLITEMNAFRFKFRPEPPMSSMKWRKTDSKISEHSMDIANRSREEDRQKIVKSLLSQASNGDLTVIPIVGMGGMGKTTLAQLIYNDPQIQKHFQLLLWVCVSDNFDVDSLAKSIVEAARKQKNCNERAEFKEVVNGQRFLLVLDDVWNREASKWEALKSYVQHGGSGSSVLTTTRDKTVAEIMAPPKEVHHLKDLNENFIKEIIERSAFNSEEEKRQSELLEMVGDIAKKCSGSPLAATALGSTLRTKTTKKEWEAILRRSTICDEENGILPILKLSYNCLPSYMRQCFAFCAIFPKDHVIDVEMLIQLWMANCFIPEQQGECPEISGKRIFSELVSRSFFQDVKGIPFEFHDIKDSKITAKIHDLMHDVAQSSMGKECAAIDSESIGSEDFPYSARHLFLSGDRPEVILNSSLEKGYPGIQTLIYSSQNEDLQNLSKYRSLRALEIWGGIILKPKYHHHLRYLDLSCSEIKALPEDISILYHLQTLNLSHCSNLHRLPKGTKYMTALRHLYTHGCERLKSMPPNLGHLTCLQTLTCFVAGACSGCSDLGELRQSDLGGRLELTQLENVTKADAKAANLGKKKKLTELSLGWADQEYKEAQR

SEQ ID NO: 141284 - protein, 146 aa, Oryza sativa
  unsure (1)..(146): unsure at all Xaa locations
  Clone ID: PAT_MRT4530_42402C.1.pep
MLGACGSGVAARRRRRGAVGRPGXRAGAAAAARGPGGVGAWRRRGPAAWGRGGGARRPRRGELEAVAAEWQGRRRGVAAAWRSSPAAWRARGGGGVRGSGDGVVGSGGRVERRLSPNXCGGGVCGGGGEDRQATARNDGGVGAGLP

SEQ ID NO: 141285 - protein, 101 aa, Oryza sativa
  Clone ID: PAT_MRT4530_42403C.1.pep
KTFPLGMSIKWETKEMFPGFCPEVREHGPIFGLPGGFSRAWGHSSPCQCPWSKVPNLFLAWPPAMFPDPSVPHSGRAPGPPNPDILWVPLRNQDRFTSFPK

SEQ ID NO: 141286 - protein, 210 aa, Oryza sativa
  Clone ID: PAT_MRT4530_42404C.1.pep
MGSVVDAPVVVEGVAENMLGDKKVTVVFVLGGPGSGKGTQCANIVEHFGFTHLSAGDLLRAEIKSGSENGTMIENMIKEGKIVPSEVTIKLLQDAMIKNENDKFLIDGFPRNEENRAAFENVTKISPAFVLFFDCSEEEMERRLLGRNQGRVDDNIETIRKRFKVFVESSLPVIEHYNAKNKVKKIDAAKPISEVFEDVKAIFAPYAKVE

SEQ ID NO: 141287 - protein, 288 aa, Oryza sativa
  Clone ID: PAT_MRT4530_42405C.1.pep
MGSVVDAPVVVEGVAENMLGDKKVTVVFVLGGPGSGKGTQCANIVEHFGFTHLSAGDLLRAEIKSGSENGTMIENMIKEGKIVPSEVTIKLLQDAMIKNENDKFLIDGFPRNEENRAAFENVTKISPAFVLFFDCSEEEMERRLLGRNQGRVDDNIETIRKRFKVFVESSLPVIEHYNAKNKVKKIDAAKPISEVFEDVKAIFAPYAKLGIQLLAPDKISWIRVMEWLNRDKKRTTEGTNGGVLSEKQQWLSRVTVNCNENFTSNIIGVKVSYHALLECDYISVIKNH

SEQ ID NO: 141288 - protein, 86 aa, Oryza sativa
  unsure (1)..(86): unsure at all Xaa locations
  Clone ID: PAT_MRT4530_42406C.1.pep
QLRRGFDTVVVLAAXSIWKERNNRVFYQQQHSWPDVARAAAEEAALWRSAGLLPELTISIRVAKFMPGHITFVTFSLFLFSVRVGL

SEQ ID NO: 141289 - protein, 74 aa, Oryza sativa
  Clone ID: PAT_MRT4530_42407C.1.pep
DVTFSPAFVYNRWIQILAGSIYLPLLPDQNLKLIDQPPNVPHIERLPSNSKTTTIQTSLRSNSTRGSTVAHLPN

SEQ ID NO: 141290 - protein, 79 aa, Oryza sativa
  unsure (1)..(79): unsure at all Xaa locations
  Clone ID: PAT_MRT4530_42408C.1.pep
GGGNXXXGXXVXXSRXXXXXGKNMGNGXDXMVXXLGXXKXTXDAPGGRMEAFSQSVXGGKDXXKQRYSKLIFHXEAMEX

SEQ ID NO: 141291 - protein, 189 aa, Oryza sativa
  Clone ID: PAT_MRT4530_42409C.1.pep
MTSTEIADGLRLLRIHRTQRRTAGGKTTAAGAGRRVDGWGVRGGDASAISWTPPPITSSFHNPHHLVDISKHMDADANADDATILNPAAAAEGKEKKTDQEEAGPSPNFGDMDDDSPEHRREREELHAYLDKVELEFEAFQEEVRREVQETGGYLQTFDEAAHADMEEFIAQAMEEWTGTGLNRVSTLN

SEQ ID NO: 141292 - protein, 58 aa, Oryza sativa
  Clone ID: PAT_MRT4530_4240C.1.pep
THGRSVLISGFIYSLHYLFFSLYFHYFTCFRHTHLRCCVPDSLSFLTTNPTPHATSDQ

SEQ ID NO: 141293 - protein, 226 aa, Oryza sativa
  unsure (1)..(226): unsure at all Xaa locations
  Clone ID: PAT_MRT4530_42410C.1.pep
PATHYRSDRPGRWGPLTAQLSSMGRRLGIEDPNWHSDPCVYLLPPWCQRPLCLCGDXCQLMASRNPDIRGRPFFRCPNYDREARTTACVYIEWVDTENPVLDLTTCLQEGCWYFAFESTEQYLQRKAAYERXCREQQCNXRVLTTALPPWEARPRCTSGDRCQVLRSIKPTRLGRRFFVCPNILDDNFMEPPRRCQXRERIDTRRVLTPPSRAVQLELPEQYRDTK

SEQ ID NO: 141294 - protein, 53 aa, Oryza sativa
  unsure (1)..(53): unsure at all Xaa locations
  Clone ID: PAT_MRT4530_42411C.1.pep
FQCPTPVRDTLLWAQMWSYNYITAHRVRSGTIGTLEWSQTRXEKWGESVFYLC

SEQ ID NO: 141295 - protein, 110 aa, Oryza sativa
  Clone ID: PAT_MRT4530_42412C.1.pep
MARRRGVEDLNWRSDPCVYLLPPWCQRPLCLCGDRCQLMASRNPDIRGMRFFRCPNYDREEPPRRCQYREWIDTRRVLTPPSRVMQLELPEQYRVTKARFERGEGSSRRG

SEQ ID NO: 141296 - protein, 312 aa, Oryza sativa
  Clone ID: PAT_MRT4530_42413C.1.pep
KKKKLWMHHHIQYSLPHLLHYKSDRLSSMARRRGVEDPNWRSDPCVYLLPPWCQRPLCLCGDRCQLMASRNPDIRGRRFFRCPNYDRETRTTACAYIEWVDTENPVLDLTTCLQEGRWYFASESTEQYLQRKAAYERQCREQQSDWRVLTTALPPWEARPRCRCGDRCQVLRSINPTTLGRRFFVCPNILDDDFMEPPRRCQYREWIDTRRVLTPPSRVVQLELPEQYREMNEREKREEEEPREEREFATWVAATSAESYARFNLPPLTLEEAELEAAVRRRRDDDVSVLRPEDDEEIKRRIGNDGILCHFD

SEQ ID NO: 141297 - protein, 97 aa, Oryza sativa
  Clone ID: PAT_MRT4530_42414C.1.pep
MTLTLSAAARMTLTSCGMKHSARAPGPQPKRSSVAVQSRRAPRPRAHALACPVDLASSGAGADLRGGGELSSCRRSSPSHGYFLIQMPPKRHVNPTD

SEQ ID NO: 141298 - protein, 127 aa, Oryza sativa
  unsure (1)..(127): unsure at all Xaa locations
  Clone ID: PAT_MRT4530_42415C.1.pep
ALTSSQEVPPTPGRPVKEPMFIPIAVLXLSDYTAKEMPVTRIHREGRLQSVTSDGQPAFTTVLDFTKKEEESTFNNIAEKPAPCLLRAYRGTVRIDPDLTDSDLXFTLANDSDEXFNRGEADQVLGR

SEQ ID NO: 141299 - protein, 156 aa, Oryza sativa
  Clone ID: PAT_MRT4530_42416C.1.pep
FPIRSSAWLLKNYRKLCCLPDTDTDATRSKRNVTVQDSGAYRMQRRSIQLAHLAATVCSTAVVVVAVVVVGDPDDKTWRGGGVFPSLATPPFDRSLLGSGGGGDPAVNSCRWLDPLSFTSRIQRRVIRGNEMLDLEDEARQQCRLAPGGVGRCGPG

SEQ ID NO: 141300 - protein, 526 aa, Oryza sativa
  Clone ID: PAT_MRT4530_42417C.1.pep
MATARAAAVARAGGRRELARGAAAAAARAGGGKGVRSGAAAAARAGGGEGVRAATACGRRRRLLLLLPWPLASTPRHRRQPPPPPAPTIAFAATAPVAGDDPILLDVDVGAYGALLPVPCSRSSPARYCWMQRVYMSLKSEDKTAIGFESGGVDAIAPKFWRCHWLADCNCQCGDWTTSVVGIELVKSHTNTMQGIFACGSISSPHGSCFRPACLAVDDLRLFYKINSITCGAYSWRWCVKKLHMRTNRRQMGTTVRTNAKWLFGGDDRSSSNARLERSESANEDILIFYFQLDLQTRIQYALNIEQFDVAKQLREKLTEIETEIIRQREAKRGSSKTEAQDKAINLLRVRADLQKAVDSENYALAAALRDEIAKLETESLAVSAKALAYQNVEYAFRLGQKVRHKVHGYRAVICGMDPVCCESKSWMETANVENLSKGPNQPFYQVLVDVYADPELLVAYVAEENLAEAEISEKGRFDHPYIEFLFFGEDTAGDFIPIKQLREKYDQPRYEASGDEDDDDGSTDS

SEQ ID NO: 141301 - protein, 110 aa, Oryza sativa
  Clone ID: PAT_MRT4530_42418C.1.pep
MGMRMGMRKRVDQRLWRQWESRRWAVRVRDAGCSKEGKRCPGEWGWGTRRQKRSLSRRRRQWGKRVLNNNLSEILVNSLRGKIMFFYHDDIKVKVKVKVPSGLMDTPEDQ

SEQ ID NO: 141302 - protein, 66 aa, Oryza sativa
  Clone ID: PAT_MRT4530_42419C.1.pep
CGGVFIQEQMLVNGHAWHFKNYDKRPQFAKVRNYGVYFNIFFNCDIHIYILLCKYSRLNSENDKYY

SEQ ID NO: 141303 - protein, 110 aa, Oryza sativa
  unsure (1)..(110): unsure at all Xaa locations
  Clone ID: PAT_MRT4530_4241C.1.pep
MASMVVFFAEALMEAMVAISGAQMIEXEMRLRDRHCQREVQDRPVDACRHVLDRQLTGRERFHAMVRRPGALGLRMHCXSTCMTVSPQCRXAVIRRMVRSFEESMPMPLE

SEQ ID NO: 141304 - protein, 280 aa, Oryza sativa
  unsure (1)..(280): unsure at all Xaa locations
  Clone ID: PAT_MRT4530_42420C.1.pep
SHTQRSGGTAREQRDGPSRTVGVDGFLSGGGFSLMLWKHGLASDLVVDANMVNAXGRLLNRAAMGEGLFWAIRGGSGGNFSASYCRTRTCSSSPCTSVVGTRLGLVAAMADTFPELGVTASDCIEMMWIQSMLYFAFYCTGKPLEMLLDRGTSKPDKYLKAKSDSLLKDGAGLLILDPYGGKMVHVAPVVMSFPHRQALYNIQYYGFWSKSRAATEKHMGWIRGLYGEMEPYVSKNPRGGAAAIAAVTGSLAVCRSWRGGIWLQGQSCHFENFPPLLSRK

SEQ ID NO: 141305 - protein, 316 aa, Oryza sativa
  unsure (1)..(316): unsure at all Xaa locations
  Clone ID: PAT_MRT4530_42421C.1.pep
MAAAWAAVVAVMLLLAQVSAAAPVMGPAFLWAPKNYGFSSDEAKEMVYYQTVSPKSLVKSVLEEGGWSNLVCSREDHAKSVDVAVLFLGSKLQSSDISKEKQADSTLVDMLKNSFASSEFSMAFPYIAMSDDDKLEKSLLSGFAENCNNGFGDNHITYTDTCSVSEDLNKHHNNMDSIHGLVASQTKKNPALSRITLGTARAAESNSPSPWRGKSEGECFLSLTLLAGSFVGTAPPAILITAPTXRPSNLPLGRYLAEKTNTTKPGRGKCERXCLVKSTLLEGSFVGIVLLIILISGLKCMMGIDTPSKFDAPPES

SEQ ID NO: 141306 - protein, 350 aa, Oryza sativa
  Clone ID: PAT_MRT4530_42422C.1.pep
MDLHGEEREPASWTCVVPSGYTATSLRGSLPRIYAASASWSHASHTIGIGERIPNSWEMKNIVPEKIFTEVDPAALGESDRVIGCNLVTESHPNTLRIVALERKIWLFGGDGRSSSNARMERSESANEDILIFYFQLDLQTRIQIETVIIRQREAKRGSSKTEAQDKAINLLRVRADLQKAVDSENYALAAALRDEIAKLETESLAVSAKALAYQNVKYAFRLGQKVRHKVHGYRAVICGMDHVCCESKSWMETANVENLSKGPNQPFYQVLVDVYADPELLVAYVAEENLAEAEIPEKGRFDHPYIEFLFFGEDTAGDFIPIKQLREKYDQPRYEASGDEDDDDGSTDS

SEQ ID NO: 141307 - protein, 295 aa, Oryza sativa
  Clone ID: PAT_MRT4530_42423C.1.pep
MAAAWAAAVAVMLLLAQVSAAAPVMGPAFLWAPNNYGFSSDETKEMVYYQTVSPKSLVKSVLEEGGWSNLVCSREDHAKSVDVAVLFLGSKLQSSDISKEKQADSTLVDMLKNSFASSEFSMAFPYVAMSDDDKLEKSLLSGFAENCNNGLGNNHITYTDTCSVSEDLKKHHDMDSIHGLVASQTKKNPSGQTDLVVFCDGGFKDNTKSEGELLSELVTLLKKSGAKYTILYASQPYGLLESPSNLPLGRLKPIMFSNKNSKILEGIVLLIILISGLKCMMGIDTPSKFDAPPES

SEQ ID NO: 141308 - protein, 234 aa, Oryza sativa
  Clone ID: PAT_MRT4530_42424C.1.pep
MQGIFACGSISSAHGSCFRPACLAVDDLRLFYKINSVTCGAYSWRWCVKKLHMRTNRRQMGTTVRTNARWLFGGDGRSSSNARMERSESANEDILIFYFQLDLQTRIQYALNIEQFDVAKQLREKLTEIETVIIRQREAKRGSSKTEAQDKAINLLRVRADLQKAVDSENYALAAALRDEIAKLETESLAVSAKALAYQNVKYAFRLGQKVRHKVHGEYYCYTTHFVLLFTHYF

SEQ ID NO: 141309 - protein, 42 aa, Oryza sativa
  Clone ID: PAT_MRT4530_42425C.1.pep
AVQQEIALAGGRVRIFLHDWFPQGCDALVYLRGGSNSEHGMG

SEQ ID NO: 141310 - protein, 292 aa, Oryza sativa
  Clone ID: PAT_MRT4530_42426C.1.pep
MARGQRDASSGTVGVDGFLSGGGFGLMLWKHGLASDLVVDATMVNAEGEAPRQGRHWGGPLLGHPRWRRRELLHVIVQNQNAQFESLYLGSRHTPWPRRRHGRHLPGARRDGKRLHRDDVDLVHALLRVLRHREAIGDAPGQGHQQARQVLEGQVRLRTFKNMPSQVWETTWSWLLKDGARAGHPSPLMRRDGSRRSIRDRIFSPAGGLQQSVLRVLVKEAGRRQAKNDMGWMRGLYSEMEPYVSKNPRGGAAAIAADTGSLAVCRSWRGGIWLHGQSCHFEITSFDPEIIK

SEQ ID NO: 141311 - protein, 128 aa, Oryza sativa
  Clone ID: PAT_MRT4530_42427C.1.pep
MASRVPPIVISAFSILLGALQSLESFLAASSATSPSLDRGAQLAAGALFFTILISVELTCLLLFAYVGKLGAAGGAGHGGFFAVATATLAAAAVTALLAEPSFLSFPLAQAESSRSIKLLDFDGNWKY

SEQ ID NO: 141312 - protein, 118 aa, Oryza sativa
  Clone ID: PAT_MRT4530_42428C.1.pep
GTRAVICGMDPVCCESKSWMETANVENLSKGPNQPFYQVLVDVYADPELLVAYVAEENLAEAEISEKGRFDHPYIEFLFFGEDTAGDFIPIKQLREKYDQPRYEASGDEDDDDGSTDS

SEQ ID NO: 141313 - protein, 402 aa, Oryza sativa
  unsure (1)..(402): unsure at all Xaa locations
  Clone ID: PAT_MRT4530_42429C.1.pep
ARGGGGFTLAGRLHVRGLLRLPPPRLPPPPQPPSXATPPETRTTTTRRTRRPPSPPPEVKLSPPPPVPPPPPPQPXPPTTTSRCGAPAAPPXPPPPAIYPRTPHVRPPRPPRAPPCRSRGRRSRRRRPPAPRRRRPPPPPSPSPPSPSPXSSTAPSSSSTYSTHRTASRTPPPPXPPPAPSCPPSAGTPRRRSPGTRARPPPVRPATSPAAAPPSPWPSPPSPGTPSTRIPPRRSPPAAPPPPPAPASPPPPPPLVEALPPRPPPPLAPTPPXPPFFIRASTTPNPSSSSPRPPSSPPSPSATPSTSVPWSPSPXDTPLAPRPTVPPPRQPKPPPKPPNPPSPFHPQWHRQSPPRFSCKKTLPPSPPVPPPPPAAAAPGVAPPXPPQVPSPEDPSTEAPLPT

SEQ ID NO: 141314 - protein, 64 aa, Oryza sativa
  Clone ID: PAT_MRT4530_4242C.1.pep
EIDIGPGDRPRPTFISKNLSPEFRTKLIELLKEYRNCFAWEYYEMPGLSRNATTTYRKEAVIGP

SEQ ID NO: 141315 - protein, 89 aa, Oryza sativa
  Clone ID: PAT_MRT4530_42430C.1.pep
FFFFFLWFAVFHVSIFQLSNRCTSTLCFLCSCRVAGLMNAAYLQNSHQREHSYRRTWGSTDCKSTRIFFRTVYVKGFMDWPLYGCYPQS

SEQ ID NO: 141316 - protein, 99 aa, Oryza sativa
  unsure (1)..(99): unsure at all Xaa locations
  Clone ID: PAT_MRT4530_42431C.1.pep
VHDAAVSRHSSPHLLLTATRRSGGTTRGQRDGPSGTVGVDGFLSGGGFSLMLRKHGLTSDLVVXATMVNAXGRLLDRAAMGEDLFWAIRGGGGRNFSAS

SEQ ID NO: 141317 - protein, 125 aa, Oryza sativa
  unsure (1)..(125): unsure at all Xaa locations
  Clone ID: PAT_MRT4530_42432C.1.pep
RAEESARGSLSLSQLVRAATKHIASTPPHPHLQRSPPPPSCPVSSTAPXLLPPRRSFYPIPSPPPESSSAPPDPHASSAPPQARLPPAPSPVLRPPPLPPRPDRRPAGSXPYVPPASPPPPRAPP

SEQ ID NO: 141318 - protein, 51 aa, Oryza sativa
  unsure (1)..(51): unsure at all Xaa locations
  Clone ID: PAT_MRT4530_42433C.1.pep
KPRPGFDALLSVTLVFVPVLWFVXVCSVXXHDRAHSPLAGHDTVFVNNNII

SEQ ID NO: 141319 - protein, 713 aa, Oryza sativa
  Clone ID: PAT_MRT4530_42434C.1.pep
MGDIAGEEHRVQIAARASSDRQDKVAAPEKWVNCFVRVVTLMERTSNALGTLAFTWATVVLLGGYPVVLDSHGDFWFATAIVFLEAARMFGRNNRFDYQLFFRTRGAFSFRSLGGNGLIAIVYFSAAKVAIVVREVQDGAFMLIIIMIPAAIVREELARMRLTRHDYIGVGEKTNLGQSLTILYSMVLGQGILYIVAGTLEVFSFIPLRSLVCRAGFTGQWGVESINLYYEYAFDKYMEGGVFAPKRINLSNFAIDSINSDLSKNQLYGIQMMHTFLQRDPTRAQLLEKLTTSMQTKARLINMLDWTNGNQHTTIRLYAAKVMAEFAKSLRIVTVPEAMQLVSTLLDTEGRPKRGHPLLNADDDQDPFVDPTEERLDAADKVTDLIPKIIGFTSFRSAMVNSVAQQKRLTSIEGEIGIALRYKISKHPFLLGNLAEILGDNTSMQELRKLVAGILRNLAIDRDTRQEIGQMQVLITRLMKASLNSDGPSSTDGDCLLPKVAGQALAMLASENVHNCLVMLKEPEFINKLKNMILIHDGKCIYVAASLLRNLYLHAQAQPDLTESNQNDLSDAFQKVLETITDVEGAELEILIGLSSQICKVKPEEFVQELEHGQIKRRFVKKLVDALNANMKPSVDYPGIRRMILEQTIYMMESSSCYANCFNEFQMMNALLMVEETPSRVENYMIFLGDTGFMECNTPLSALVDRAKQLIGH

SEQ ID NO: 141320 - protein, 51 aa, Oryza sativa
  unsure (1)..(51): unsure at all Xaa locations
  Clone ID: PAT_MRT4530_42435C.1.pep
TNYLQVTTYKLFCHILKTKKVDKYSNLHIQTHEVQILWALTIMXSTLDXYH

SEQ ID NO: 141321 - protein, 119 aa, Oryza sativa
  Clone ID: PAT_MRT4530_42436C.1.pep
MGFYPAATTTLSTAAQCVLVVGGILLARATVRQEHGQRPLRLPSGSGRRQLRLSSNVPAGNQLRRRQLRREDRARHYVWGHGDSAHLLGGGAIAIPDVFLVGGLDERCIKPAQCHPSAS

SEQ ID NO: 141322 - protein, 62 aa, Oryza sativa
  Clone ID: PAT_MRT4530_42437C.1.pep
IFSELRNHAHPFIICSPQLLHFRLHSSVAAYHSFTDFPVAQVTSILSVSAPGYSSNCTCVTP

SEQ ID NO: 141323 - protein, 169 aa, Oryza sativa
  unsure (1)..(169): unsure at all Xaa locations
  Clone ID: PAT_MRT4530_42438C.1.pep
MASRLKEDERTSXIIRGLLKLPANKRCINCNTLGPQYVCTNFWTFICTNCSGAHREFTHRAKSVSMAKFTAQEVSALQEGGNERAREIFFKEWDAHRNSFPDSSNADKLRNFIKHVYVERRYTGERSADRPPRGXDDKDEFSENRRSDGNWGGSRSPPYNESYSDRRSF

SEQ ID NO: 141324 - protein, 79 aa, Oryza sativa
  unsure (1)..(79): unsure at all Xaa locations
  Clone ID: PAT_MRT4530_42439C.1.pep
QCRAAAPPPPPAMRGASRGXPSPPRPRATPPVACGSESPTPSTGCPRPRRVDVATACGPSPPRPRAAPHLTHGSDSSAG

SEQ ID NO: 141325 - protein, 81 aa, Oryza sativa
  Clone ID: PAT_MRT4530_4243C.1.pep
PPLEFFFFFFFFFFFFFFFFFFFIKKKIYHTNEHCRFYTMLRTVKTITWLFQNMPVHPGMLTLKTSTPYEITLIHMKRFGS

SEQ ID NO: 141326 - protein, 97 aa, Oryza sativa
  Clone ID: PAT_MRT4530_42440C.1.pep
RHHDTQTGGADDGNARDRHYRAGAAKRRHNAEKADTGPAQNTEKSATARAGKKTTDPGAKKRGGGYGQATTKANATAQGGPQSRQNRKDATRTRTAR

SEQ ID NO: 141327 - protein, 65 aa, Oryza sativa
  Clone ID: PAT_MRT4530_42441C.1.pep
PQIQQFIQHRTYWGQSDDISENLTVHRRMMCTGASVSFINFPLVFIQLVLALVNFRRQLLEFLLS

SEQ ID NO: 141328 - protein, 102 aa, Oryza sativa
  unsure (1)..(102): unsure at all Xaa locations
  Clone ID: PAT_MRT4530_42442C.1.pep
PPPXKKGAPPPRGFREPTRAVQTFSQMFQPLEFPXPRPPEEIERPRIQFPQDLELKRIPAFLDVPLPPSKAKPRKPPYGAPEMLLSLPPLPFPSPPAFLLLF

SEQ ID NO: 141329 - protein, 170 aa, Oryza sativa
  Clone ID: PAT_MRT4530_42443C.1.pep
MGEDSVARHRPHSCSPETSPPPPPRSPADDDDLLSEILLRLPPQPSSLLRASLVCKRWRRLVAGPVFLRRFRAHHHRSPPLLGFFIDDYGDALFTPTLDPPNRITAERLSLRQGPGERLSFLGCRHALALLLNRPRLEALVWDPVTGRRRAVAFPPEFAINQGDFVRGGR

SEQ ID NO: 141330 - protein, 229 aa, Oryza sativa
  Clone ID: PAT_MRT4530_42444C.1.pep
MERSGEGDAGRGDGRRLRSGQGGDASDTDSDEEQMWHGHGAWGEEHRDSKDGKGWIGYQGGMNVYEQRRWLATRQDGELRHASRCQLTEHMAEVGREVLKEMAEGKRKGGPTSRGGNGSDTPPECDRSPETTSSEGKLRVAGSSELSSISEVKGSSPSSLPPWPLSSVERGACCPRSHHDPSRQRMGGEGAQGGEEAGTSGGGDLKKGIGGEGWAKPDVNDIEDQEPKC

SEQ ID NO: 141331 - protein, 60 aa, Oryza sativa
  Clone ID: PAT_MRT4530_42445C.1.pep
SKDLDSLIRVDHDEHQGGCITNADMHRQLTANSGEAAQLDGHLVRMSEAPCPQNRDVENH

SEQ ID NO: 141332 - protein, 84 aa, Oryza sativa
  Clone ID: PAT_MRT4530_42446C.1.pep
MVKMIVWQASKDRAEERSQSGPPLWRLKLPWPNQQIKAALCRSDSDTEEKECRSCGVVAARKLNNQHNLFARETVELRAVYAEK

SEQ ID NO: 141333 - protein, 326 aa, Oryza sativa
  Clone ID: PAT_MRT4530_42447C.1.pep
MTRGEKGMQPKISAFFKRQAPEPETSSGGDTHREGTCGTEVKRPKSCADGKVLNKKRNYAQFHLELGQPDFLLHMCSVCGMMYARGNDDDEKAHKAYHKSYFEGVPFKGWRNETVVARSEGGDRIILVTDENSCARNSKVQEVIKVVQKELGFGEGQLLHKLCKVYLFISSQRIVGCLVVEPIKTAHKVIPGSTEENGSDLPVDKIEPVKTNHTLEFGKISFKREVLKRHDHSDKNKEEYRDPGAIICEKEDVPAHCGFRAIWVVPSRRRKRIGSQLMDAARKSFLEGETLCISQCAFSPPTSSGKALARSYCKTSAFLVYKEQDA

SEQ ID NO: 141334 - protein, 298 aa, Oryza sativa
  Clone ID: PAT_MRT4530_42448C.1.pep
MTRGEKGMQPKISAFFKRQAPEPETSRFFILVPSSNLLAVAIRGGDTHREGTCGTEVKRPKSCADGKVLNKKRNYAQFHLELGQPDFLLHMCSVCGMMYARGNDDDEKAHKAYHKSYFEGVPFKGWRNETVVARSEGGDRIILVTDENSCARNSKVQEVIKVVQKELGFGEGQLLHKLCKVYLFISSQRIVGCLVVEPIKTAHKVIPGSTEENGSDLPVDKIEPVKTNHTLAFGKISFKREVLKRHDHSDKNKEEYRDPGAIICEKEDVPAHCGFRAIWVVPSRRRKRIGSQLMDAAR

SEQ ID NO: 141335 - protein, 50 aa, Oryza sativa
  Clone ID: PAT_MRT4530_42449C.1.pep
LLKLNISVVLISRGNNRKQYAEHQKFCLHIVIEEVGKDYTQTIIAMKNPS

SEQ ID NO: 141336 - protein, 168 aa, Oryza sativa
  Clone ID: PAT_MRT4530_4244C.1.pep
MAVIRGVVVVVLALVVVAAAAADGAGECGATPPDKMALKLAPCASAAKDPKSTPSSGCCTAVHTIGKQSPKCLCAVMLSSTTRNAGIKPEVAITIPKRCNIADRPVGYKCGGKLRSGAAKKTVLVINACLLGTFTRVILVMSQRSLQLTTSDVRHMHNEPMILPESQY

SEQ ID NO: 141337 - protein, 91 aa, Oryza sativa
  Clone ID: PAT_MRT4530_42450C.1.pep
MDDLTRVPHQKQTLTYFSPSLSLRFCVSGGGTATPTLLPHLASPRLLLGLAAGEQGTVGGHGVDGPHLLPDPATLAFSPLACGLTRTAARG

SEQ ID NO: 141338 - protein, 145 aa, Oryza sativa
  unsure (1)..(145): unsure at all Xaa locations
  Clone ID: PAT_MRT4530_42451C.1.pep
GKTPNGPAPTNPSGGGKGRPPRHLYRGFPAPILPPPGPPPTLDPGLNERTPNGVERKTPPTPVPXGGTGGKTPPPMGSPPPGGRHPPGPPFLGGGGGTPPAPPFLGGRGTPRMARAPKGESFDGQKAPPGHPPAQLKPRGGPRGP

SEQ ID NO: 141339 - protein, 247 aa, Oryza sativa
  Clone ID: PAT_MRT4530_42452C.1.pep
MVFATANAARRGRIASAEWWCLAANLMPRRARREGAGGRRRRDGCSSEVDEADTEAHVAIDTVQQREGRGSGWDFIGEEALDWRSASERQWRFVGNLKSSDGVDAFGWRGRWIGRHELNRECGRGSSASSRWGATSWRLASAASGHSASKSKETKVGERNQCPGGKKKWRTVERGACSFRFGEVRQARRVGAVWGTRRRRRRRDMAASNSTTCPRLIPMSIRSDTQLLGLNIGLNTEVPSMIPMNSR

SEQ ID NO: 141340 - protein, 57 aa, Oryza sativa
  Clone ID: PAT_MRT4530_42453C.1.pep
RIISHQLRHILRRCCCVIHAYTVVMWVTLDSSFSSPLDQLCVSLTLFGWLLVRLHAI

SEQ ID NO: 141341 - protein, 70 aa, Oryza sativa
  unsure (1)..(70): unsure at all Xaa locations
  Clone ID: PAT_MRT4530_42454C.1.pep
VXXXFPXKQAXXXSSXXSXQRSPXXSRLSPSXKPHXLSLLGAGLPSLILLQPPPSSLATTLPLPRRVRSQ

SEQ ID NO: 141342 - protein, 537 aa, Oryza sativa
  Clone ID: PAT_MRT4530_42455C.1.pep
MAAASSAPFFGLGDTQMPPPQNPTNPALHHHPNPFPAPVDAAAPAPKKKRNQPGNPSKYPDAKVIALSPRTLMATNRFVCEVCNKGFQREQNLQLHRGGHNLPWKLKQKNPKEARRRVYLCPKPSCVHHDPSRALGDLTGIKKHYCRKHGEKKWRCDKCSKRYAVQSDWKAHSKTCGTREYRCDCGTLFSRRDSFITHRAFCDALAQENARMPPIGAGVYGGAGNMTLGLTGMAAPQLPAGFPDQAGQPSASAGDVLRLGGGSNGASQFDHLMASSSGSSMFRSQGSSSSSFYLANGAAHHAPAQDFGPEDGQSQAGQGSLLHGKPAAFHDLMQLPVQHQQSGNGNLLNLGFFSGSNGGVDQFNGGAGNGGQGSIVTSSGLAGNHGGGGGGFPSLYNSSEPAGTLPQMSATALLQKAAQMGATTSSYNAGGAGGASSLLRGASSHGISVGEGPANERSSYQNLIMGSMASGGGGAGFAGSFSGASGFGGAVDDGKLSTRDFLGVGVVQGISGSAAMGPPRHGAAGLHVGSLDPANMN

SEQ ID NO: 141343 - protein, 399 aa, Oryza sativa
  unsure (1)..(399): unsure at all Xaa locations
  Clone ID: PAT_MRT4530_42456C.1.pep
VGPATPPVRPSSYLRLXGRSRHGRRLPPTSCQIRRPPARALAPKPSKIGSPPPPPPLPPLFPNFRRRFMPHLPTMPXPLCRPFPPLPATISIPEPNIKHPHHILPGAHAPPLPAELQPRCATAAVHPGLGRHPPRHRSRRARPVHRSISPLHLRSAAATRTTSLRRRHRLQPPLLAASATAVPCRRHRRHRRAELHPVLHLFSPISHRNSTSTVHPSRLNYTASSRHLSXALAVAAQRNPTGAAFPKSRSCRPSAVASLWSGVVGTPFPPPPAPATAILSAAGRLPMVVSPPQPSVSSPSASSFFPSSAAPRARCRDALPSPTVVWPRAAARRRSTGSALCRARVLAVPPRGRPIGFGPIRAVGSRGPAVDRLGGPGPRWTDALVSLTGGARMSAPAAP

SEQ ID NO: 141344 - protein, 153 aa, Oryza sativa
  unsure (1)..(153): unsure at all Xaa locations
  Clone ID: PAT_MRT4530_42457C.1.pep
HPLGLIPEAQWQALSILHTIRQIEIYFXREVDEVKELIETGREYVTGLRMELKRTESRDDVDRIQEXLAAYITNCTLQTAHMMLVLVSAMAVGYMXRSCDAAQHCARMLIEDNPNEAHARKARQEQQRCYVENDSSELNYYYRNPFVECGATY

SEQ ID NO: 141345 - protein, 588 aa, Oryza sativa
  Clone ID: PAT_MRT4530_42458C.1.pep
MAGYEREKKRLLDLAADSGFERDLAADCLDRIVRLYGEGGQGFITVENCGDDFLGALADATNNNDDWDDLNAIENEACGNLNGMMKHGVIDDKEVEVRTPLFRQAESSARQTRINLDSFGFSSDDDFETLESHCDRSVSTQKKVNRGNNRCESSTSTSNRETLSYQQLYSLDDINFANVVIFGNKSFRPLQYEACRAAVSNMDTFVLMPTGGGKSLCYQLPATLHPGVTVVVCPLLSLIEDQIVALNFKFAIPAAFLNSQQTPSQSSAVIQELRSGKPSFKLLYVTPERMAGNSSFIGILIGLHQRGLLARFVIDEAHCVSQWGHDFRPDYRGLGCLKQNFPRVPIMALTATATASVCKDILSTLRIPNATVLKRSFDRTNLNYEVIGKTKTPQKQLGDLLKERFMNMSGIVYCLSKNECADTAKFLREKYKIKCAHYHAGLAARQRSNVQGKWHSGEVKVICATIAFGMGIDKPDVRFVIHNTMSKSIESYYQESGRAGRDNLPAHCIVLYQKKDLGRIVCMLRNSGNFKSESFKVAMEQAKKMQTYCELKTECRRQTLLGHFGEQYDRQRCKHGCSPCDNCIKIPS

SEQ ID NO: 141346 - protein, 161 aa, Oryza sativa
  Clone ID: PAT_MRT4530_42459C.1.pep
SCEKRRLEPAAAAERGGARGCGASKVERGNGAVDGVRTAAAMPGRATAQCGVNESGGAARLEFAEERRSWGARGESGKRRRGLGEEGETGEEAPGMLFIGEGRRDRAREGWKLAGDVGGERGAGGGDVAMTASTHAQERESRGRGGDVGGFGGHGGGWGWS

SEQ ID NO: 141347 - protein, 452 aa, Oryza sativa
  Clone ID: PAT_MRT4530_4245C.1.pep
MTLGWLVVAVFNCCVALSMAEICSAYPTSGGLYYWSAKLAGKQWASLASWVTGWFNVVGQWAAIASVDFSLAQLLQVIILLSTGGGNGGGYMASKYTVLAIYAFILILHGIINSLPIEWLSLFGHVGAIWNAAGIFVLTILIPAVAKDRPNIEFVFTHLNTENGMGIHDKAYILAVGLLMSQYSVIGYDTSAHMVEETKNADRSGPIGIITSVLFATVFGWIYLLALTSVVTDIPYLLSPSNDAGGYAIAQALYTAFHRRYGSGVGGIVCLGAVAVAVFLCGIACVTSNSRMAYAFSRDGAMPLSRVWYRVNKHEVPLNVVWLGVAVAFVMALTSLGSQVAFQAMGSIATLGMYIAYALPVFFRVTTARRSFVPGPFHLGRYGVVVGWAGVVWVATVTVLFSLPVAYPVANKETFNYTPVAVGGVLLLSVGAWVLRARFWFQGPITNVDTHC

SEQ ID NO: 141348 - protein, 434 aa, Oryza sativa
  unsure (1)..(434): unsure at all Xaa locations
  Clone ID: PAT_MRT4530_42460C.1.pep
LGSPPSLPPRQVGPATPPVRPSSYLRLXGRSRHGRRLPPTSRRIRRLPAGTLAPKPSKIGSLPPPPPFPPLSPXNRRRLTPPPPHVGATLRRLFPPLPATISIPEPYIKHPRALLFRFLLLPELPRARNHILPGVHAPPLPGELQPHRATAPVHPALRRRPPRHRSRRAHPVHRSISPLHLRSATATRTTFLRRCRRLQPPLLAASTTAVPCRRHRRHRRPELHPVLHLFSPISHRNSTSTVHPSRLNYTTSSRHLXRSSRRRAASPRSTAPWLPLHSVQNLTGAAFPKSRSCRPSAAASLWSGVVGTPFPSPPAPAAAILSAAGRLPVVVSPPQPSVSSPSASSFFPSSAAPRARCRDALPSPAVVWPHAATRRRSIGSALCRARVPAAPPRGRPIGFGPIRAVGSRGPAVDHLGGPGPRWTDALVSLTDGAH

SEQ ID NO: 141349 - protein, 60 aa, Oryza sativa
  Clone ID: PAT_MRT4530_42461C.1.pep
HAFAQGFVGSRKSLTWHCRCPPCATWPLSPFHFFPVGGVDPTLVTCSLVIRCCNPLCANP

SEQ ID NO: 141350 - protein, 67 aa, Oryza sativa
  Clone ID: PAT_MRT4530_42462C.1.pep
CFVTIFEHLQLLCILMKKKKKKKKKKKKKKKKKKKKKTKKKKKKKKRAAVLKKQNLTNPCMQKKKLF

SEQ ID NO: 141351 - protein, 47 aa, Oryza sativa
  Clone ID: PAT_MRT4530_42463C.1.pep
MAAEERFVAGVGEGATVARLTRSARGTSGNSRRPQDMAGSSRRTCDT

SEQ ID NO: 141352 - protein, 85 aa, Oryza sativa
  Clone ID: PAT_MRT4530_42464C.1.pep
LMNFDVRSIPSANLSKRAVFRTPTPRCQLGARLSCPRLKITTNQQRPTAGGNWDVVACGNASATSNASSPTLPPPPPPTRPPTRP

SEQ ID NO: 141353 - protein, 81 aa, Oryza sativa
  Clone ID: PAT_MRT4530_42465C.1.pep
LDPWARRRAGPPSPAEHPTLPRPFCPADALLALTWPGLVPPAPLLVREIRVLKASHQLWIHLAWDNIIGFRLLLCWPSGSE

SEQ ID NO: 141354 - protein, 124 aa, Oryza sativa
  Clone ID: PAT_MRT4530_42466C.1.pep
MEGAVATLPRARPPSGGGPCGYRGQPPGGSLLSMALIPLDPYHRQILFREKYDLHYIYTRPPYSGKGIELQAIAKATLRSNPEEVIAVPTIPILYKSRLRVLLPLRRAAMEEKTPTATVFLYVD

SEQ ID NO: 141355 - protein, 182 aa, Oryza sativa
  Clone ID: PAT_MRT4530_42467C.1.pep
MASEKKQANPMREIKVQKLVLNISVGESGDRLTRASKVLEQLSGQSPVFSKARYTVRSFGIRRNEKIACYVTVRGEKAMQLLESGLKVKEYELLRRNFSETGCFGFGIQEHIDLGIKYDPSTGIYGMDFYVVLERAGYRVARRRRCKSRVGIQHRVTKEDAMKWFQVKYEGVILNKAQANTS

SEQ ID NO: 141356 - protein, 156 aa, Oryza sativa
  unsure (1)..(156): unsure at all Xaa locations
  Clone ID: PAT_MRT4530_42468C.1.pep
MATISATLSISFLPSSIRFAVATTSTSTTSSSSSWRIKRPARFRCCAEPSSPEQENPSTPAPPPVKPPASPSSLWGISTSTWSAGVAGLGFLETAYLSYIKLTGSEAFCPVSGGGCGDVLQSDYSVVFGIPLPLLGLVAYGXVLTLSLQEMATRSS

SEQ ID NO: 141357 - protein, 138 aa, Oryza sativa
  Clone ID: PAT_MRT4530_42469C.1.pep
NLTCVFIFMTNYLNFTWRRDIIGSKLVAWNHLFPRIANIVLSHEQDEFKWNLTPAGRFLVKSHYLALAHTGAPNINKTIWKLKMPLKVKIFLWYLRRGVVLTKVNLAKRKWKESKICCFCHKEETIKHLFFECRLARS

SEQ ID NO: 141358 - protein, 91 aa, Oryza sativa
  Clone ID: PAT_MRT4530_4246C.1.pep
EEVGFPLPFLVWVGAYGFLSRVRPAPGFCFSGPCKKKWNLNWWWPHLPIHLAFLGPTDIKSGARVGLHARDCCFRDQWAFLVKMEWVCRGT

SEQ ID NO: 141359 - protein, 55 aa, Oryza sativa
  Clone ID: PAT_MRT4530_42470C.1.pep
MAVAIEAHQLRTSVVMMSSRENAKSNRRKKAILFVLSRITETFKRLMPSLVIKIT

SEQ ID NO: 141360 - protein, 52 aa, Oryza sativa
  Clone ID: PAT_MRT4530_42471C.1.pep
TWWSRRLTATSTAAGTSPAAPHRRWATPPPPHHRLGLSLGLDASCNHTQLAS

SEQ ID NO: 141361 - protein, 89 aa, Oryza sativa
  Clone ID: PAT_MRT4530_42472C.1.pep
QWFVVAEICTCPFECWSCSLHLLKVIALCPGFLRCKKICSIAVSYYCTELHLLETHLIKDCDEQHTSFFRSCMIGQMLIEALFSFMRHN

SEQ ID NO: 141362 - protein, 76 aa, Oryza sativa
  Clone ID: PAT_MRT4530_42473C.1.pep
EELVPEGQHSTSVLTTLLEQATSTQSSLNQLGPLPDSVFIEANRNTLPQPRATTFTHVGRAQDEEKPPQINNGQII

SEQ ID NO: 141363 - protein, 164 aa, Oryza sativa
  unsure (1)..(164): unsure at all Xaa locations
  Clone ID: PAT_MRT4530_42474C.1.pep
EXKKKAADXGTPGKGSPAADEATGTXGKRRASXKGENXEXNRRAPRGGGXXTXGAPQDXSGGNRXDETXNQNTKEGKPXXXXPKEAXAXPGSKGDKGTXEGAGADKETTTQGHEDRGKQXAKXNEAGARXGKXXAXPKNGPGQAXQXGRXXNAQGPGGARPGER

SEQ ID NO: 141364 - protein, 56 aa, Oryza sativa
  Clone ID: PAT_MRT4530_42475C.1.pep
SQRLCNLATNKDTLTICHNKFDTKPLGHININTVKLPMATARATNQKDQLSTAHSA

SEQ ID NO: 141365 - protein, 361 aa, Oryza sativa
  Clone ID: PAT_MRT4530_42476C.1.pep
MPRRRRDDDDDDGGEAYRRHHHDKRPRPPAPPQQKHLYLVLDDWDRGYSIHKLDVDLDDAGVIHGGGGGPAVRFAAPRSSCDARFFPMCGDSVVMVSDAAPTLVYDTGAAALTVESPLPGLLAGGMAIAMPGGERLYALTSLGERFPRAFEVLSTGGGWSWKNAPVAPPPPPVEEAVAAYAVHPDGHTVFVSTSGDGGGGTYTVDTKRGEWRRHGGWLLPFHGQGFFDAELDAWVGLPRHGDTICACQVPSRGGARPPEWDTMDDDDVVPSWKKSRRRPGGRRRATLTYMGDSKFCVVDCVECDGDDGGGVVTPPQCEVHVAVFGLKYNRRGELKATARRAAGSFRVPKHFSWFSPVAFWM

SEQ ID NO: 141366 - protein, 798 aa, Oryza sativa
  Clone ID: PAT_MRT4530_42477C.1.pep
MSSRRVRVTGLGRPDAGVSRTKKQQQNQGLPRQHQQQQEAGGGGRAGREHAHHLFDELLRRDTTSIFDLNSALSAVARESPAVALSLFNRMPRADLCTYSIVIGCCSRAGHLDLAFAALGRVIRTGWTAQAITFSPLLKGLCHDKRTSDAMDIALRRMPALGCTPNAFSYNILLKGLCDENRSQQALHLLHTMMADDTRGGCPPDVVSYTTVINGLLREGQLDKAYCLFDEMLDQGMSPNCITYNCLLHGYCSSGKPKEAIGIFRKMCRDGVEPDVVTYNTLMVYLCKNGRSMEARKVFDSMVKKGHKPDSSIYGTLLHGYATEGYLVQMHQLLDVMVRNGTQPDHYIFNILIGAYAKHGMVDEAMLAFSKMRQQGLHPNIVTYGTVMDALCRVGKVDDAMSQFDRLISEGLTPNGVVFRTLIHGLCACDKWDKAEELAVEMIGRGICPNTIFFNTLLNHLCKEGMVTRAKNIFDLMVRVDVQCDVITYTTLIDGYCLDGKVDEATKLLEGMVLDGVKPNEVTYNTIINGYCKNGRIEDACSLFRQMASKGVNPGIVIYSTILHGLFQTRRIAAAKELYLWMIKCGIKLPIGTYNIILQGLCQNNCTDDALRMFHNLCLIDFHLQNRTFNIMIDALLKGGRHDEAKDLFASLLARGLVPNVVTYWLMMKSLIEQGLLEELDDLFLSLEKNGCTADSRMLNALVGKLPQKGEVRKAGVYLSKIDENNFSLEASTAESLVFLVSSGKYDQHINSIPEKYRPTAKSRAVFSQKKNPGLFDAAGSYGVVTRLYSSSYIELVV

SEQ ID NO: 141367 - protein, 798 aa, Oryza sativa
  Clone ID: PAT_MRT4530_42478C.1.pep
MSRRVLSAPDGTKVSRFNLMKLQGRQEAAAAGTDSHHAHHAFDELLHRPTTSSIVDLNRALSDAARHSPAVAISLFRRMVMVARPKVPPNLITYSVVIDCCSRVGHLDLAFAALGRVIRSGWTAEAITFSPLLKALCDKKRTSEAMDIALRRMPVLGCTPNVFSYTILLKGLCDENRSQQALHLLHTMMVADDTRGGYPPDVVSYNTVINGLLREGRQLDTAYHLFDQMLDQGLSPDVVTYNSIISALSKARAMDKAAVVLVRMVKNGAMPNRITHNSLLHGYCSSGKPNDAIGVFKRMCRDGVEPDVFTYNTLMGYLCKNGRSMEARKIFDSMVKRGHKPNSATYGTLLHGYATEGSLVKMHHLLDMMVRNGIQPDHYIFNILIGTYTKHGKVDDAMLLFSKMRRQGLNPDTVTYGIVMDALCMVGKVDDAMAQFGRLISEGLTPDAVVFRNLIHGLCARDKWDKAEELAVEMIGRGICPNNIFFNTLLNHLCKEGMVARAKNIFDLMVRVDVQRDVITYNTLIDGYCLHGKVDEAAKLLEGMVLDGVKPNEVTYNTMINGYCKNGRIEDAFSLFRQMASKGVNPGIVTYSTILQGLFQARRTAAAKELYLWMIKSGIKFDIGTYNIILLGLCQNNCTDDALRIFQNLYLIDFHLENRTFNIMIDALLKGGRHDEAKDLFASLLARGLVPNVVTYWLMMKSLIEQGLLEELDDLFLSLEKNGCTANSRMLNALVGKLLQKGEVRKAGVYLSKIDENNFSLEASTAESLVLLVSSGKYDQHINAIPEKYRPVVKTRAV

SEQ ID NO: 141368 - protein, 72 aa, Oryza sativa
  Clone ID: PAT_MRT4530_42479C.1.pep
VEVVYLRVQAGVSPGVLGGVRRGGQRGGPQGGRPEGRPCVRPWVLCMRPHRCPLGRPSYFSGVRIYLQGHTN

SEQ ID NO: 141369 - protein, 516 aa, Oryza sativa
  Clone ID: PAT_MRT4530_4247C.1.pep
MAAGDQAADDPDSLRLLQLGYKQELKRGLSTLSNFAFSFANISVLTGVTATYNTGLRYGGPVSMTLGWLVVALFNGCVALSMAEICSAYPTSGGLYYWSAKLAGKEWASLASWVTGWFNIVGQWAAIASVDFSLAQLLQVIILLSTGGANGGGYMASKYVVLVICAVILILHGVINSLPIQWLSLFGQIGAIWNAAGVFVLVILIPAVAKDRPSVEFVFTHLNTDNGMGIHSKAYILAVGLLMSQYSVLGYDTSAHMVEETKNADRSGPIGIITSVVCATVFGWIYLLALTTAVTDIPYLLSPGNDAGGYAIAQALYTAFHRRFGSGAGGIACLGAVAVAIFLCGIACVTSNSRMAYAFSRDGAMPLSRVWYRVNKHEVPLNVVWLAVAVAFFMALTSLGSQVAFQALGSIATLGMYIAYALPVFFRVTTARRSFVPGPFNLGKYGVLVGWVGVVWVATVTVLFSLPVAYPVANKETFNYTPVAVGGVLLLSVGAWVLHARFWFQGPITNTSDGPI

SEQ ID NO: 141370 - protein, 205 aa, Oryza sativa
  unsure (1)..(205): unsure at all Xaa locations
  Clone ID: PAT_MRT4530_42480C.1.pep
WRQPRGRVAPTRGPHPSVTHGRQAHGGPSPRAHRDGTVDPDHGGPQAATHGGRGAATAHGRARPPATXTRHGGEHGRWPPKRRKGRWRGXSPCAGAARGNGQWRRSLGKGGGGGPMATREHEAADGSRDSLGKKIEGLGRNIGDRSGENTTPERRGMVELTGDREIPSFGGISAAWSGSRGRGAVAGVELGMAMPTAAAAQRSGR

SEQ ID NO: 141371 - protein, 73 aa, Oryza sativa
  Clone ID: PAT_MRT4530_42481C.1.pep
PASSYPTPKGGNDHQLLADTRVCTWDRIKAQLHAQTMLLNIKSTNAVILYARSGHRLSVRPQQRQHRVQDAYG

SEQ ID NO: 141372 - protein, 249 aa, Oryza sativa
  unsure (1)..(249): unsure at all Xaa locations
  Clone ID: PAT_MRT4530_42482C.1.pep
LPEAPHARNPLLPVKPMRRRSPAISSHTPRPLPPPPHCVATTAHLAARCRAPASPSSPQSIAGTPSPQHHPTGRPVHRLQPATTSALAAAALRRRRRRHRHAELHPGNRSSSFNHHRKTSPTAHPRPPSXFAASGPSQCTSAATPSRRNPAEARYLSVAGNPGCRPPLRARGSPSDLRHRPSRGSASTARCPSPPRRMVSTPLHLPFLLFGGHLPCSPPCRVMSPVAAPGHHRGPGPRCRPGARVDLVH

SEQ ID NO: 141373 - protein, 161 aa, Oryza sativa
  Clone ID: PAT_MRT4530_42483C.1.pep
MDVSHSGPSADDPILTPEKGCFTDSSGLFVQAALHYGLYSVADHTRVRGKYGPRSMRKAQFTHDAHQPVLPASWAAVLRVTRELSAAGSAFRVISPPLLLGALIADLITHTSTTSTTPAISRHPPVDARFAQPPREIGRAMCEEVHETPWWFLTAPTPPTF

SEQ ID NO: 141374 - protein, 94 aa, Oryza sativa
  Clone ID: PAT_MRT4530_42484C.1.pep
MDRVVASGLPMGCATHAWTLIDRRSMDRNVAVDINRDRATAPVDVDRIAAVDAELSKDLAVSSDLLMDYTVDAESPIGLAIAAATESSVDRVLT

SEQ ID NO: 141375 - protein, 68 aa, Oryza sativa
  Clone ID: PAT_MRT4530_42485C.1.pep
FFETKFMYKSAAMVYLSKHLGPYCKLFHHGTIIKRSRVTFFLTQNFDKLCLPFHPFSFNVSGSEIQAA

SEQ ID NO: 141376 - protein, 49 aa, Oryza sativa
  Clone ID: PAT_MRT4530_42486C.1.pep
SWLENTHFVVGFLFFVGDLWNEGRVRVVELGFEKGIDRDLKYVLYMTHK

SEQ ID NO: 141377 - protein, 155 aa, Oryza sativa
  Clone ID: PAT_MRT4530_42487C.1.pep
PRRTPVHAADSSGLAQQQEEAVATAAGKVQLGVFTEVPAISSQRREKLAVMVRVKAPAYTKQTRAPLDLVMVLDIGGRMRELEQLKQGAKFIIHNLTQQDRLSIVTFGPRADRLSELTPMTEQDKRSSNDAVQALEASGGVKIGAGLNVAYQVLD

SEQ ID NO: 141378 - protein, 162 aa, Oryza sativa
  Clone ID: PAT_MRT4530_42488C.1.pep
KPPQGFPFFGFFLPGGVGFFSSTKGSLFFLICKGRGEFFSLKTKFCPPPRVFKIKQGMGCFLKKNWFFCGSPPPEKKKKGFPPVFKARGNFFFPFFFLKTPLQVFRFFCPLPKWVFFFFFNPPPLGFFPPLTNGCPLFFFFFPQKIKNHKTIEMPPYQPFFT

SEQ ID NO: 141379 - protein, 135 aa, Oryza sativa
  unsure (1)..(135): unsure at all Xaa locations
  Clone ID: PAT_MRT4530_42489C.1.pep
ASGAQERDGRRHPTRLARRRPPLAMRCPSPRRPPLPWSAVACRAGRRRSAGRRSRGWRGRRPTPPPTARRTPHSRTLGPQAQAQAQARARAXPPPPVQHCRGHRPDTPRPPRRPAPRRRRRHLPPYPLPLPPAAH

SEQ ID NO: 141380 - protein, 590 aa, Oryza sativa
  Clone ID: PAT_MRT4530_4248C.1.pep
MQTVAKTVDEVAAEIATEESLPISKFVGLAGAVPKEARATHDCLYRAVDIYLKAHPALEEMEREKVCSVMDPLKLSYQGRLHASQNNRLPLQAVLSALYYDRLKLRSGDEGGGGWDAYGNGVMRSSAAGSARKQAKEEASLARENEALRSELARMRAYVSGMQQQSKGSSSSRGKKGSWLRTLSRLNPFKAGIWGKDTSGIVDGKTDAMNSVKSKRRRWGPLAANLAGVGTHQPSPENTIHWDPRVGLILTIRAVKSAVALTTDVENGSAHECPCDGHVPHPAELERRDASPPPPPPAHHLLLLLALASDMEDAHHHHWTMVERRGTQLWASGRPFIIHGFNTYWLMSFAADQATRLRVTAAIAEAGLNVCCTWAFSDGGYRALQTAPFHYDEDVFRVSYHGASLACARAARQALDFVVSEARRHNMRLILSLCNNWEDYGGKAQYVRWGKEAGLDLTSEDDFFSDPTIKSYYKAFVEAVVTRINTVTNETYKDDPTILAWELINEPRCPSDPSGDTLQAWMEEMASYVKSIDPVHLLEIGIEGFYGPSIPELLPVNPDEYSGHAGIDFIRNHQAPGIDLASIHVYSDIW

SEQ ID NO: 141381 - protein, 61 aa, Oryza sativa
  Clone ID: PAT_MRT4530_42490C.1.pep
LKDPRRGAVRGPPRPRPNGRAFLGRLRPLAGIPGWMVAGVEVGGRARAPGCLAAVRAGASV

SEQ ID NO: 141382 - protein, 203 aa, Oryza sativa
  Clone ID: PAT_MRT4530_42491C.1.pep
MDHHQHHEQQQQRMVEMRMGMAMGEAYVGGGEVVAREAAAQALGAVVQLHFDKTLEKKRAADAQKQELWRLFLAFFLFLAILLSAVAQSPPSRLQCRHLWAPAGLLSLAHLAFYAAVAHHLRCLNGFRYQRRCHKLTLALAADRLRMLKSGGDVVAAADVEVPYQEPPESYLAKFKRSWAIHFAFLITTFAFSVAAAVAILCF

SEQ ID NO: 141383 - protein, 445 aa, Oryza sativa
  Clone ID: PAT_MRT4530_42492C.1.pep
MAVPGRRDDLVGDDLVDDDGIGEEYMAPSDDEEAQLPDELFRLADAAQSGNVAALRAALDNYSGNIDDPIEDGDTLLHIACLYGHLPCVQLLLERQASLECKDEEGAIPLHDACAGGFSDIVQYILNFAANIDGCVTRMLNTVDSEGDTPLHHAARGEHLGIVDLLLKAGACAKKENTYGQVPAEMADEGTEVRKLKVVTVPSSNPHPCHQLPIRHSPNHDDGGGAAPSPSSRRPSSAVPRTMEDERDERVVSMDGTYDADEKPVLLFSRGDGVVRVHDLPSLKKRGDILCYDEVKTISIRSRGVVFTGDASGEVPSTGVMFAKLNADTSEIKLTEKQDDDTEDDKKKVNGSMKIPRVWLSLSDCWEKMKVSIFEFMIDTSGKKEAIYTVYSYIAIGIILSLNCFWKVWREASNSDEKPSGFKAFFITIVCMVGKKLYDSLKTTK

SEQ ID NO: 141384 - protein, 163 aa, Oryza sativa
  Clone ID: PAT_MRT4530_42493C.1.pep
MAFVLALVKPYASWWTSPLAISKAAEELAGGRGGGAVGEARRRGPDGKWMATGPGQGRTSEGCGGWVRRPKLCPSPPPSSSPHACHREGGGRAPSAPHRRPAALVLLARTPPRERGKPRRAPSAPSFVCPHAAKSEGEAVPSGRLLIRCRRRHRSVSPAAADP

SEQ ID NO: 141385 - protein, 159 aa, Oryza sativa
  unsure (1)..(159): unsure at all Xaa locations
  Clone ID: PAT_MRT4530_42494C.1.pep
VVPVFFFLLSFFFFFFFGNPPPNRHFSGGNAGTRGGTTKLAPLGGKWAFPPPGPGGPPGFSAPAPGGAPLSPLGGPIKLGRRPGPPPAPGGKXPPSQSPPNDSPESYRGNPGGPTGGPPPPFWGGAARPFSWGEPCPPPLFMNAPPPRGGGVSFFGPRG

SEQ ID NO: 141386 - protein, 115 aa, Oryza sativa
  unsure (1)..(115): unsure at all Xaa locations
  Clone ID: PAT_MRT4530_42495C.1.pep
RPSSPPSAWGSGSPAPPSRPSPRRRTPSRPWRRPTTRSSXPPPPPPPPPPPPPPPPAGDPGGSLGELLWQRKDDDLGGLDTASARRPRGWRLPRMKGTAAAPMARRRRGEAAMHG

SEQ ID NO: 141387 - protein, 69 aa, Oryza sativa
  Clone ID: PAT_MRT4530_42496C.1.pep
MLLGSLTTRTCAPEPSFPFPRPFRETSVSWMWLLYNLMWLTRWSSSLVWLRHEGSQLDDEDDVGVVGPA

SEQ ID NO: 141388 - protein, 68 aa, Oryza sativa
  Clone ID: PAT_MRT4530_42497C.1.pep
VVNIEFELPLGGISVFGVIKFKIDNLRNFHEKIKLLRMMRLSDACCSVIVLLKKDPRIVRLCSIQLCQ

SEQ ID NO: 141389 - protein, 56 aa, Oryza sativa
  Clone ID: PAT_MRT4530_42498C.1.pep
PLTHDYLETTTGQHDLRSKKGRGGIFPLIPSPLNTKNYTPPDPDTDCINPGTECWK

SEQ ID NO: 141390 - protein, 465 aa, Oryza sativa
  Clone ID: PAT_MRT4530_42499C.1.pep
MKEVDLSVDCALGEAAVTVRARWWLHCITRSRDCDVRIVVPMGDQGSILGAEVTVGRRSYNTQVIEVEDHTTENAPKADSGGLLKPQLFYLTISQIEGGADISATIRWSQKLHYDNGRFSVDIPFRFPYYVNPLPKVFMKREKIQLTVNSGFSKEVLLQGTSHPLKEKGYSGDLSGGVLVQPSTLRDYDDRDRFCIFLLPGGGNRKVFRKAVVFVIDTSGSMQGHPLENVKNAMSTALSELTEGDYFNIITFNDELHSFSSCLEKVNEKSIASALDWINLNFVAGGGTDIMHPLNEAMASLSSAHDVLPQIFLMTDGSVDDEHNICQTVKTELISRGSKSPRISTFGLGLYCNHYFLRMLASIGRGHYYAAFETGSIESQVLRWFRKASSTIVANISIDATAHLDEFEIDSEYIPDISAKSPLCISGKYQGKFPDMVTAKGYLADMREISIELKVQHIKDIPLDK

SEQ ID NO: 141391 - protein, 268 aa, Oryza sativa
  Clone ID: PAT_MRT4530_4249C.1.pep
MPGPGAHLLYALSGGAALSRLAGAARFGPHHCAVYAANAFLGPDLGSFAEWLASFLPSSSSAAAAVGDLAMGVVHHPFYYPLLLGFPLACLYAWLSRRLLLAGVLDEPSRVALSRRQCFYLITAGSLSHFFLDHLFEENGHSTMYTWILSTGWWVGRAPINSDAVVIVGLLCICLVLGFVYINRVKHEKSATQKSNQSFFLIVVIAILYCMWCATQIYLRNPPQPAIGEEADLGVIIFVAIYLFLPHGLCALSMNQNDYAELEGIQLR

SEQ ID NO: 141392 - protein, 68 aa, Oryza sativa
  Clone ID: PAT_MRT4530_424C.1.pep
MGSVVARSGRPELGGSRIRPPQARVRRTCAGSSCDGGPPTASWWVFELARRGASKAIMGYVKLMCDNW

SEQ ID NO: 141393 - protein, 147 aa, Oryza sativa
  Clone ID: PAT_MRT4530_42500C.1.pep
MASPCRPLPPLFSRVDDFAVPLRRRPRAPSMASAQRLRGNAGIDRSSSARPGSCIRGDKRVQSRDEGLEPGQIQEEEEGKRKEGLTRIPGSDHLEGNVATASIIFLLFSSLLVLSSSLAPNSLLQDLRFARSGGQGVRKQQIQSHKL

SEQ ID NO: 141394 - protein, 758 aa, Oryza sativa
  Clone ID: PAT_MRT4530_42501C.1.pep
MEGFARAVEDGLKLSKRLVLPGGLPPPRPLAGMDRGVGVGGGGGGDASVAALLLPSAPMAYAVVTDPGAVDTPDVPSYQPYVYGRLDPPALIPLQMKEVDLSVDCALGEAAVTVRARWWLHCITRSRDCDVRIVVPMGDQGSILGAEVTVGRRSYNTQVIEVEDHTTENAPKADSGGLLKPQLFYLTISQIEGGADISATIRWSQKLHYDNGRFSVDIPFRFPYYVNPLPKVFMKREKIQLTVNSGFSKEVLLQGTSHPLKEKGRQGEKLSFRHEATVENWSSKDFNFSYSVYSGDLSGGVLVQPSTLRDYDDRDRFCIFLLPGGGNRKVFRKAVVFVIDTSGSMQGHPLENVKNAMSTALSELTEGDYFNIITFNDELHSFSSCLEKVNEKSIASALDWINLNFVAGGGTDIMHPLNEAMASLSSAHDVLPQIFLMTDGSVDDEHNICQTVKTELISRGSKSPRISTFGLGLYCNHYFLRMLASIGRGHYDAAFETGSIESQVLRWFRKASSTIVANISIDATAHLDEFEIDSEYIPDISAKSPLCISGKYQGKFPDMVTAKGYLADMREISIELKVQHIKDIPLDKVLAAQQIGLLTAKAWLSSDKQLERKVVKLSIQNSIPSEYTSMVLLQTLEKVDAAQKVSPTKQKLKGHKGPDEPRRIPLQCLKLGFGDRAATRENLVTGFGDVKPLETFEILNKAAGCCSRLADCLCCMCCIKACNKMNDQCAIVMTQVCAAFACLGCYECCAELCSGSDS

SEQ ID NO: 141395 - protein, 138 aa, Oryza sativa
  Clone ID: PAT_MRT4530_42502C.1.pep
MGATANPHTGAAFSVRSGGDSIGGRGLFLLQFSTPWQVIISETRSSGFKIDWDEKSKTGTILTSALLFCKQSPSLNDWRSANQYASDAEALGVYVFPFKIHTLFHSRKMALIHTLFHSRKVVLFGELAKSYFESYFLA

SEQ ID NO: 141396 - protein, 457 aa, Oryza sativa
  unsure (1)..(457): unsure at all Xaa locations
  Clone ID: PAT_MRT4530_42503C.1.pep
HQPPPPDKRPTPAPPPTQTAPPPPLSDPLIPRHRLPTLHLPTPTPRPLTGTPCKAHLPAPPRPAPRPPPPPPXSPHATAPARRSPPARAKGDPPRPLRPPPPAADPPPRAPPPGRPTHTPNGPPPHTPYTPPSXPPPFPPPLATAPPTXTPPRARPPPPPRRRRRPRTPPWPGXSSARSSRLISGGNPAPPRPPPPPRPPEQPAASPXRPRPARAWWRSRRPPPPPRRRPSSSPPTGTPPPPPPPSPPPRRPRPXNNHAPPSLPSSLASPSLSYPPPPPPHCAPXPPPLVPPPTTLSGRPPPPPPPPPSPRSPRPPRLSSRCRRRAPRPSPPPESAGSRRAFRAPGRPKPRRIRRHHQPRSTVILTPGPHLPATPHLPPNIASAPAAVALFSSAASSKATTKASLSSSRSTSPHSTFCSLRETSCFTLPPTTLTALSLASALSRDMSHRPICMSDSS

SEQ ID NO: 141397 - protein, 648 aa, Oryza sativa
  Clone ID: PAT_MRT4530_42504C.1.pep
MAAAAVGAYRSAGRRRDAFAAAAEDAGSATTRGRAAAAGGSGGLLRRSRSLSRFPPPSPSPEDAATPSSRFVNKVRGGGRGGAGLPPEISLDDLADEFFRARAESEDDDDDEEAVVVVRGEESRGRLRFPAPAEKGGGRRSSTARYARETESSRQRGRSVSRPPAERRGGATAVANGGAAAAGRQRYASVDRRASMDRHRWCDSDWSVNPTSTFVFKNDMDISHRYGSRGINTKSSNNSLQNSSFHKTAKQYNCDMFHVMQTIVHNVAVCATVQPVAWCLMISGTGSDCITHLHPWAITSLAALYAPNRNLSHSSITDDEFRDSFHSRNQKGIRAVYTLEKDRLSNNEDENALYDVMRKEVRQAVDEIRTQLEKVVTKSEPSEKATSADAQPTQVINELRRSYTSKLEESEMRKQELLAQLAAEEQRGHELTKIVKELLPTPKKNMNSERQPRYRRRSNDRARVSRRLTEEAEQYFEDFLSNVEDTDFSSFDGERSDTSSSRRDVVQNTKIETPITLPKVASPVEADGVVLPWLQWETSNDLQTSPCKPKTQGASTACSTSSRTMSSRGSWSPGDHDSAAGSKDTLLTRFEEAASRRSSCPDNTQRSSFHIDDYMHLRRSHDLLLERWRQKERIGDGGLILCSRSSIM

SEQ ID NO: 141398 - protein, 185 aa, Oryza sativa
  unsure (1)..(185): unsure at all Xaa locations
  Clone ID: PAT_MRT4530_42505C.1.pep
YPSSHRVALPSIPIPIAPPSLPSRVSTPPLPPSCRAXPLPPPSRRATPPPPHRRRRLRPPPPRRLAGRGGPPDSSRRATTSXPPPSTSPAPCPPSRCLAGRAGRRPLDLSRRAAPPPPPSASTPPRRSRGPPAAXHRAAPPPPPSASTSPVSSPPSASMPPRRSRRPPAAGSITPRRHLRPPPRH

SEQ ID NO: 141399 - protein, 443 aa, Oryza sativa
  Clone ID: PAT_MRT4530_42506C.1.pep
MASVAALRLVVLLAAAVPLLPPPAASLAVTSTYVRPTARATLSVLHDGDGRTPQQVHISAVGSDKMRVTWITDDDAPATVEYGTVSGEYPFSAAGNTTTYSYVLYHSGNIHDVVIGPLKPSTTYFYRCSNDTSRELSFRTPPASLPFKFVVVGDLGQTGWTASTLRHVAADVYDMLLLPGDLSYADFYQPRWDTFGRLVEPLASARPWMVTEGNHEVERIPVIHPRPFTAYDARWRMPHDAGASPSGSNLYYSFDVAGGAVHVVMLGSYAGYAAGSAQHRWLRRDLAGVDRAKTAFVVALVHAPWYNSNRAHRGEGDAMRAAMEELLYGARVDAVFAGHVHAYERFARVYGGGEDACGPVHVTVGDGGNREGLATRYVDPQPAASAFREASFGHGRLEVVNATHALWTWRRNDDDEAVVADEVWITSLASNPACNKKYSISLY

SEQ ID NO: 141400 - protein, 159 aa, Oryza sativa
  Clone ID: PAT_MRT4530_42507C.1.pep
MQLLEISKFGWGFSSCNDSKFHDHACTGLCLVDGDERGGLPPTPPPLPSSSSPPVAAAATSLRLLLHRIWEDGGETPSPMHPPPPTGSYNIRAATAIALRSGASTGSWRREGRRRCPYTLRLPLVTATSAPPPPSAPSPPQLPGEESTKMGVIGSTYGL

SEQ ID NO: 141401 - protein, 210 aa, Oryza sativa
  unsure (1)..(210): unsure at all Xaa locations
  Clone ID: PAT_MRT4530_42508C.1.pep
YWARLIELTEKIKLWPNRSRRPSTPLNPRDNPQAASPSIQPSRXLPSIPIPIAPPSLPSRVSTPPLPPSRRAAPPPPHRRRRLRPPPPRRLVGRAGPPDSSRRATTSALRPPHRRRRVRLHAASPIARAAGRQIHRATLPPPPSASTSPATSLPSASTPPRRSRGPPXPDPSGRTATSPSSSTSPVSSPPSASTSPASSPPSGSAPPNSV

SEQ ID NO: 141402 - protein, 402 aa, Oryza sativa
  unsure (1)..(402): unsure at all Xaa locations
  Clone ID: PAT_MRT4530_42509C.1.pep
RALPRPFALPNPRRRHFSASIPRAPFSPSIPFRIPSARHPSLCAASPLPSPPGQPVSPADPTPSRPPLPPVPAPXPPSPAAXAPLPPPRAPPSPPFRCFPPPPSAPLSPSPPVAPLSLPVSPARPIPLPLPFTPHTPSPSPXPHPPSPTLPLLSTLSPIHTPSKLAXPPPPPPPNRPNTPLNPKDNPXLHPHPSSHRATLPSIPIPIAPPSLPSRVSTPPPPPSRRAAVAASIAPRRAAPPPPXSSAPSAPSASTPPRRSRRATGFITPHHHLRPSPSTSSAPCQPSRCLAGRAGRRQPDPSRRAAPPPPPSASTSPATSPPSASTPVAWAAGRRIHRAAPPPPPSASTSPVSSPPFASTPPRRSRGPPDPSDHHAMPPPPPSASTSPASSPPSGSAPPNSV

SEQ ID NO: 141403 - protein, 135 aa, Oryza sativa
  Clone ID: PAT_MRT4530_4250C.1.pep
MEIEGDEGDDGGEKQCRTADDIRIADCTVAAGGDGCQPWRILQVKEADEQVKVKREAGAIANGSARHTQASASANSAATTNQQRTQQTSTAAGSSFPHSNSLAAAAAAARFLVACMHNCIEYAAAAAEIDVMEKD

SEQ ID NO: 141404 - protein, 59 aa, Oryza sativa
  Clone ID: PAT_MRT4530_42510C.1.pep
MAAAALICRQRQPPLVELPLCPHAAARCFFVASLCSAPACRINGVAKCEEQTMGTINWL

SEQ ID NO: 141405 - protein, 73 aa, Oryza sativa
  Clone ID: PAT_MRT4530_42511C.1.pep
EEANILCLWSPELMQQVVWELAAPTDRRKLISSSASLPVQKPVLNSISNMDLNISNLNQPSKDEGGWLDHTDI

SEQ ID NO: 141406 - protein, 94 aa, Oryza sativa
  Clone ID: PAT_MRT4530_42512C.1.pep
MTIKKGGSGRAVEEYNGKAADGLAGLLEIIQISRSHVLVFVFAFHANREYNCTVFRISGLSWHMHVRPVQESYCTLVLLVRTLVRADLSAFSAF

SEQ ID NO: 141407 - protein, 43 aa, Oryza sativa
  Clone ID: PAT_MRT4530_42513C.1.pep
RNIILKNILRNMHIVTYMSLPFFFKHANLSMQSALLSTHCMCC

SEQ ID NO: 141408 - protein, 83 aa, Oryza sativa
  Clone ID: PAT_MRT4530_42514C.1.pep
MEYMIGKRDNFFEQRFTPGLPRDSSMYLYDTKSSRYKIGESADISGNPPVHPMERILGIKHNRHRGGLRKRHVEAVAVISHTL

SEQ ID NO: 141409 - protein, 34 aa, Oryza sativa
  Clone ID: PAT_MRT4530_42515C.1.pep
LSFDKLIQHDYYTIQSVTRAVTAQDEIGSKSPRG

SEQ ID NO: 141410 - protein, 58 aa, Oryza sativa
  Clone ID: PAT_MRT4530_42516C.1.pep
HTLFSWGADILGGNLFTHGYIQQSHLIWLFLGYDIRPKRIKLGKHVQTHTRLIITCIE

SEQ ID NO: 141411 - protein, 247 aa, Oryza sativa
  unsure (1)..(247): unsure at all Xaa locations
  Clone ID: PAT_MRT4530_42517C.1.pep
MDSPATPVGLSPPLLSLVLRNEPCYTKGKEGLLRQRARVSVDRAHGXGSRERIGEIDPIQXTDGRDRTVHDRLTADDPDDVSDNFSDDGRTTALRPERRAPTGIGRQGKLPGDQTGGGRQPTAPALXEKTAAKIGSTAATVLPRSSAAVNQQTMTATTWRSRRWPFRVTTTTXATAAHRWTNGGMAAXKLTGLGRYTWRETKARDAAGRGDTGGPFKGANRRRLRPMAAGREKETSGSGRERGIPFD

SEQ ID NO: 141412 - protein, 121 aa, Oryza sativa
  unsure (1)..(121): unsure at all Xaa locations
  Clone ID: PAT_MRT4530_42518C.1.pep
LRETKEQAPLHVPVTGGERGFTPGXNPLKKTQAXRPLLRRPPXRRPPRGPAVRRRAAHXAPPTAARPPPGPPPHRAAARPPAARWDDGEGRRGVRGEVREEEEEGMMGEGRRGGGGRGRDG

SEQ ID NO: 141413 - protein, 633 aa, Oryza sativa
  Clone ID: PAT_MRT4530_42519C.1.pep
MATAAAASRAALSRPHAAAAAARASPAAGARVTLPRRRSVRSAVISSSASAAAVAASEPAAGRVTLGAGTDGALWPKPAVLVAEKLSEAGLAVLRGFADVECAYGMSPAELLAKVAQFDALIVRSGTKVTREVLEAGRGRLRVVGRAGVGIDNVDLQAATEAGCLVVNAPTANTVAAAEHGIALLASMARNVSQADAALKAVYSRTLTVFTAQGKWQRTKYVGVSLVGKTLAVMGFGKVGSEVARRAKGLGMHVIAHDPYAPADRARAIGAELVSFDEAIGRADFISLHMPLTPATSKVFNDESFAKMKNGVRIINVARGGVIDEDALVRALDSGKVAQAALDVFTEEPPAKDSKLVLHENVTVTPHLGASTVEAQEGVAIEIAEAVVGALRGELAATAVNAPMVPAEVMSELAPYVSLAEKLGKLAVQLVAGESGGIKGVKVVYTTARGPDDLDTRLLRAMVTKGIVEPVSSTFVNLVNADYTAKQRGLRITEERVSHESPAAEAPLESIQVRLSHVQSKFAGAISDGGDIVLEGRVKYGVPHLTVVGPYEVDVSLEGNLILCRQIDQPGMIGKVGNILGQTNVNISFMSVGRTFRGKQAIMAIGVDEEPDKETLEHIGHIPAIEEFVFLEL

SEQ ID NO: 141414 - protein, 178 aa, Oryza sativa
  Clone ID: PAT_MRT4530_4251C.1.pep
MASRRLPFAAVTAVILLLHGAADAKSSSSSGKTKSLASGFLDAHNAARRQVGVPPLRWDERLASYAARYAAARSGAGGGCALVHSHGPYGENLFHGSGVGWAPADVVAAWVSRERALYDAASNSCRGGDAAACGHYTQVVWRRTTAVGCALATCAGGRGTYGVCSYNPPGNYVGVRPY

SEQ ID NO: 141415 - protein, 147 aa, Oryza sativa
  Clone ID: PAT_MRT4530_42520C.1.pep
MAGQPSGADKEVINEQMVANMYANMRSEMNQLYSKITELEMEVSEHSLVIGAIEPLDPSRRCYRMIGGVLVERTIKEVLPAVQRNKEGLEEVVARMNEALEKKKKEITEFELKYKIRIRKADSDTQEEGSMKEGSAQGVLVGPASGQ

SEQ ID NO: 141416 - protein, 148 aa, Oryza sativa
  Clone ID: PAT_MRT4530_42521C.1.pep
GRVGGTKVTREVLEAGRGRLRVVGRAGVGIDNVDLQAATEAGCLVVNAPTSNTVAAAEHGIALLASMARNVSQADAALKAGKWQRTKYVGVSLVGKTLAVMGFGKVGSEVARRAKGLGMHVIAHDPYAPADRARAIGAELVSFDEAIG

SEQ ID NO: 141417 - protein, 108 aa, Oryza sativa
  unsure (1)..(108): unsure at all Xaa locations
  Clone ID: PAT_MRT4530_42522C.1.pep
RPRXASPXXXPPASAXAPRPSPRPASPSPPPAPXPXPPQKKPTTRSPRIGRFGAAGASPAPPRRGSRAPRRRRREALRGRRVRRRRRLPFSPIDGERESDGVFFLHLF

SEQ ID NO: 141418 - protein, 98 aa, Oryza sativa
  unsure (1)..(98): unsure at all Xaa locations
  Clone ID: PAT_MRT4530_42523C.1.pep
TSNATLARNSAGIPYASTSRTRAPPARPRSASPPPAPPASATAPRPSPRPASPSXPPAPTPPPPPRXPTTRSPRIGRFXAAGASPAPPRXGSRAAAAA

SEQ ID NO: 141419 - protein, 88 aa, Oryza sativa
  Clone ID: PAT_MRT4530_42524C.1.pep
AALDVFTEEPPAKDSKLVLHENVTVTPHLGASTVEAQEGVAIEIAEAVVGALRGELAATAVNAPMVPAEVMSELAPYVSLAEKLGKLA

SEQ ID NO: 141420 - protein, 267 aa, Oryza sativa
  Clone ID: PAT_MRT4530_42525C.1.pep
MGSAPFGDAVAGGGLYEYQGYHGGFAGGHGLGQPAGRAPALDDGETEGMDASAAAAVAAMEMAKRNCGGGREEKAAMALKSHSEAERRRRERINAHLATLRTMVPCTDKMDKAALLAEVVGHVKKLKSAAARVGRRATVPSGADEVAVDEASATGGGGEGPLLLRATLSCDDRADLFVDVKRALQPLGLEVVGSEVTTLGGRVRLAFLVSCGSRGGAAAAAMASVRHALQSVLDKASSGFDFAPRAASLLGSKRRKVSTFESSSSSS

SEQ ID NO: 141421 - protein, 276 aa, Oryza sativa
  Clone ID: PAT_MRT4530_42526C.1.pep
MVSGDVGVVVYYLLLVLVVVQGCKGSSAVQGEGRWYNESEAIGGAAAWGNAKATWYGQPNGAGAADNGGACGFKKVNQYPFMGMTSCGNQPLYKGGKGCGSCYRVRCNRNPACSGNAQTVAITDMNYFPLSQYHFDLSGIAFGRLAKPGRADDLRRAGIIDVQFARVPCEFPGLKVGFHVEEGSSPVYLAVLVEYENGDGDVAQVDLKEAGAGGGRWTPMRESWGSVWRLDSNHRLRAPFSIRIRSDSGKTLVAPDVIPLNWTPNTFYRSFVQYSS

SEQ ID NO: 141422 - protein, 605 aa, Oryza sativa
  unsure (1)..(605): unsure at all Xaa locations
  Clone ID: PAT_MRT4530_42527C.1.pep
VVGLRWQVGRDDSAFVEIVLDNGVYSTITYSSAQLFLSRYMPDVSTKLGSRLKNLLSDLLHSSQELEALSGIPSNDELDLIIKHLPLDRAPGPDGFNGMFLNKCWNIIKQDFYELAHQFFLNNIPLDNLNHSFITLIPKKPSPETTNDFRPITLQSFALKFLTKIMDNRLQPVIQKLIHKNQYGFIKSRTIQDCLAWSFKYLHQCQQTKREIIILKIDFEKAFDLVEHEAILQILHAKGFNQSWINLVNNVLKSASTSVMLNEVPGKTFKCKRGVRHGDPLSPLLFVLTAQMLQSIVNKAQTLGLLIAPIPIGDNQFPILQYADDTLIIMKADQKEVFTLKAMLNTYALCTGLKINFHKSCMIFLAGTFGCSIGKRPFTYLGLPMGXDFAPLIDRVERRLPSTTIFLNHGQRLSMINSVLSSLPTYYMCTLKLPKKVIQHIDHARRHCLWRKNSKMETKTHSLAAWDIVCQPKXKGGLGIINLEFQNIALLIKHLDKFYNKKDLPWVHLIWNKHYLESDKPPHAHKEKXSFWWKDTFRLVPLFRAFSQVNMGQGDTALLWKDKWTDXFPILFSYAKKXDTSIQNFTMASDLDMHFHLPLSNQAMH

SEQ ID NO: 141423 - protein, 109 aa, Oryza sativa
  Clone ID: PAT_MRT4530_42528C.1.pep
QRKTAFQYRQDFREACVSDTNCHTLDHIFSGREDSYVGVTPKSRCNSLQKEQSPVGLQSFSTSFSLTIWHFLSCSELYLYYALLHFLVWPMNKSNNTQKYKQNKAVPVA

SEQ ID NO: 141424 - protein, 134 aa, Oryza sativa
  Clone ID: PAT_MRT4530_42529C.1.pep
MSCVVSPSLPNVNGQIEQQIGTNTQDLQISEHEIYSPRSAMAISEEYWFCFQLQSLGRRSRLEPVAWSANCVGKVIHQSSPKLPLDNQGRVCARKFHMASERLSASKRTGGICILAPCSYAAGADKHIYFSPFA

SEQ ID NO: 141425 - protein, 57 aa, Oryza sativa
  Clone ID: PAT_MRT4530_4252C.1.pep
MVIRSQFHTTYEPEAIKVCEQPGGAPTMEWQLNSTINWGRGSTGPVLSQIWETLSGA

SEQ ID NO: 141426 - protein, 391 aa, Oryza sativa
  Clone ID: PAT_MRT4530_42530C.1.pep
MSCTVAIPSSPVFSPSRRPLSCKAASASASPESVSVAASSPAQAAPPAGSPLRPFALRAHLREEATPSPQPSAAAAAAVSAPAGSVLKRRRPAPLVVPVCGGAAAAAAAAAVAAVESDPRNEVEEDGEEFAVYCRRGKGRRRVEMEDRHVAKVALGGDPKVAFFGVFDGHGGKSAAEFVAENMPKFMAEEMCKVDGGDSGETEQAVKRCYLKTDEEFLKREESGGACCVTALLQKGGLVVSNAGDCRAVLSRAGKAEALTSDHRASREDERERIENLGGFVVNYRGTWRVQGSLAVSRGIGDAHLKQWVVSDPDTTTLGVDSQCEFLILASDGLWDKVENQEAVDIARPLCISNDKASRMTACRRLVETAVTRGSTDDISIVIIQLQQFSR

SEQ ID NO: 141427 - protein, 289 aa, Oryza sativa
  Clone ID: PAT_MRT4530_42531C.1.pep
AASRYEVEVTVASARDLKNVNWRNGDLKPYAVVWIDDGAKCSTRVDLDNADNPTWDDKLTVPLPPYTRLDDAVLYLDVVHANATDGVKPLVGSERLPLRDVLADTGIGARASRSLRLKRPSGRPHGRLEVRVAVREPKRYYDPSPAYPAPYHQQSSRDPYAYGNTTTGGYGYAYGGAPPAPYSAAPPAGYPSAYGGAAPTQPAYGSAAPPQPAAVSYGAPPVDAKKKSKMGMGGGLAVGAAAGVLGGLALAGGASYLENKFEDRVAERVEEDRYGGGGGGYDDYGDDDY

SEQ ID NO: 141428 - protein, 152 aa, Oryza sativa
  Clone ID: PAT_MRT4530_42532C.1.pep
MQSTLRTPSPAAAYRSRNSVVSTRLPRPRSTVMRRFKGADSPAQAVEAPAAEAPAGAQEDAAPAKAKFNHAYLIFNPAAGQENPASILGDISLKLSEQMKLTILQTQRDGPSPKEMAHQALKEGADLIMVSCGDGTVGAWAGAFVDTGVPMG

SEQ ID NO: 141429 - protein, 48 aa, Oryza sativa
  unsure (1)..(48): unsure at all Xaa locations
  Clone ID: PAT_MRT4530_42533C.1.pep
GGQRPAERNTKEKASPPPRKQRQGTETKRDRSHGPRRQTXRRRDRGAA

SEQ ID NO: 141430 - protein, 82 aa, Oryza sativa
  Clone ID: PAT_MRT4530_42534C.1.pep
MQRPTISLYEKASPKRCPKKDTTWSPPPLHPEAGARFSPGERRGTTPKDAAVVKPANGTAGLSPAIPHSNPRNLHKERRKPH

SEQ ID NO: 141431 - protein, 81 aa, Oryza sativa
  Clone ID: PAT_MRT4530_42535C.1.pep
MTDLRLLSPDLAWPRPDPAEAAGVVAQRERRRLRGFEWGIAGESPAVPLAGLTTAASFGVVPLLGGVVIALTPFFSLPFSG

SEQ ID NO: 141432 - protein, 104 aa, Oryza sativa
  Clone ID: PAT_MRT4530_42536C.1.pep
MTDLRLLSPDLAWPRPDPAEAAGVVAQRERRRYGWQRRGAPLWRRRRLARPARAPTHASGARGVARWSRRRRGTSAALHRWLGRHCPSRRGVRPLRPAPPPPSP

SEQ ID NO: 141433 - protein, 98 aa, Oryza sativa
  Clone ID: PAT_MRT4530_42537C.1.pep
MGPTQVPYVSPGFLFPLLFLSSTGGGGKEQLGTTGRCGGRGWRGAWRRGCGRRVELREEVLRRGDRAVVGDLVGAMTRSTRHTTSPAIPRRPHPARED

SEQ ID NO: 141434 - protein, 63 aa, Oryza sativa
  unsure (1)..(63): unsure at all Xaa locations
  Clone ID: PAT_MRT4530_42538C.1.pep
HASADXXSSYXTLNELFQLPDNTNTRDSDHICFILYTKSLLLNHQQQKLNDIQRSILSIHTSK

SEQ ID NO: 141435 - protein, 122 aa, Oryza sativa
  Clone ID: PAT_MRT4530_42539C.1.pep
MATKKGTLDGALLTGCTSSQSSNVERPRAPFSASPGQEGTAAGEDSFIAGSEEESQRWLHRIIDPFLWLGHSADEDRVHLHETHDDLLAGSTNIRRETVAGSGHKNAPENRKELEPPKAKPR

SEQ ID NO: 141436 - protein, 90 aa, Oryza sativa
  Clone ID: PAT_MRT4530_4253C.1.pep
MDDRSDYSNVALVDPASPAQQRRGHANEVELEENPQVQLQPSPALPPVASAPASSLAIARSRRLLALVDPVYLVVNYESALQTAKSTTVK

SEQ ID NO: 141437 - protein, 252 aa, Oryza sativa
  Clone ID: PAT_MRT4530_42540C.1.pep
MAEFDGGGVDEVALGGANPKTTTTRLGGGVSGGRRSGKGGGGGCSGAGAMESSGAADGKRKKEEENAGMVYMGSGGADEAGRRPNFSPTWGSGERELGGIQTESRPYGARAGREGVGKGAATWARQRGRGARSGGGGAPAVADRLEVGEGADRIGECLAAAAFTESEKGNSRQNSRDASSYSPVTGKSSAKAPHSLHGWILTPLVSSVTSAMEECCSRCSELMEACREAVISNELAAHVGDRWDYRRWCMWC

SEQ ID NO: 141438 - protein, 147 aa, Oryza sativa
  Clone ID: PAT_MRT4530_42541C.1.pep
GGKRFFEELDRDGDGQVTLEDLEIAMRKRRLPRRYARDFLRRTRSNLFSKSIGWKQFLSLMEQKEPTILRAYTTLCLSKSGTLHKNQILTSLKGAGLPANEDNAAAMLRYLNADSEESISYSHFRNFMLLLPSERLEDDPRYVDVLR

SEQ ID NO: 141439 - protein, 739 aa, Oryza sativa
  Clone ID: PAT_MRT4530_42542C.1.pep
MDAWQLFVPAIAILIPLLRLILFRRGDDGRRGRLPPGPPAVPLLGSTVWLTNSLYDAEPVVKRLMSRHGPVVSLRFGSQLLVFVADRRLAHAALVESGASLADRPSQAASARLVGEGDTMISRASYGPVWRLLRRNLVADTLHPSRAHLFAPVRARVRRLLVDRLREEHGEAEAAPRAVVETFQYAMFCLLVLMCFGEQLDEDAVRAIGAAERDTMLYMSSEMGVFNFFPAITRHLFRGRLQKAHALRRRKEELFVPLINSRREYKKNGGEPKKETTTFTHSYVDNLLDINLPEDGNRALTDDELVMLCSEFLVAGTDSTSAALQWIMAELVRNPSIQSKLYEEIKSKTGGGGQHEVSEEDVHDMPYLKAVVLEGLRKHPPAHMLLPHKAAEDMDVGGYLIPKGTIVNFMVAEMGRDEKEWEKPMEFMPERFLPGGDGEGVDVTSSKGIRMMPFGVGRRICPGLGIAMLHLEYFVANMVREFEWKEVAGDEVDFAEKREFNTVMAKPLRVRLVPRTIVARASPPFSHIPAVAAALHPAAVSALLAVSGGGWVRIPSVARRGPHLVGGDGFASCRGDESASRRGLDSACGHGDAVSSLPPPRPPSCHLTLFSGAPTPAYYLLAPLLLAVGGCLELLWACAIMLMIRADAAGATDGRRGRAQLAKGRMMWGGHGGHGSAIPKGGDAGTVLWLALLVDVERTSSRVSGSSHPSSAVLLPHRPPTMPLMPALLHVARAQEGEY

SEQ ID NO: 141440 - protein, 601 aa, Oryza sativa
  Clone ID: PAT_MRT4530_42543C.1.pep
MILNCSLLLGLHLLESLESEVGDHHDPSGEVKDENDGVSKKNKKAKAKKTAVGGVEKEIKQEDSPADLVDAKQKKNKNKNTSEAEAGAHQNTDKTKHIHTDAEEDTAQEASKKKKNKKKKTQEKNESENQTPKTQEKNAKGNQTSNTDLTGSESKKQPLQTRTFGNGMIIEEIEMGKPDGKKASPGKKVSVKYIGKLKNGTIFDSTVGRRAFDFRLGIGEVIKGWDIGINGMRVGDKRRLTIPPSMGYGNKRMGPIPQNSTLVFDVELVNVKRVSFLSDKDLYQPMGINMYTRGEREANSIDQEASASSSEDAANEDKPAEQGVSGTIDRIVTFIGDRGSNLNNLGEMLKQWEGTCNRYGTFLLHIGQVQFSERNGPVPVVIDRTTTVSRGVGCTLLHLGMALGSGGEVVRRVGVACTAASMLNDTPGLLALLDARSQEQPLKILLKSVEDAKDFISNWKINKDVVEVDVCPALTLDEVGAIRRLFQVEKADKFLTGDVVKVKLGQYEAIQAARNLPELPVSAVCAILAAAEKGKNKGAADVGAQGQQKPSAYLSVMLLFSTWYSKVSIGINRIREDKASRHPSFCRWAIFIGSLQEKFYL

SEQ ID NO: 141441 - protein, 137 aa, Oryza sativa
  Clone ID: PAT_MRT4530_42544C.1.pep
MAAATEKSPMQLNKAQENIMRDILGLVSSAMDSSLTKSWNTSSNPCEWSGVHCTSAASSSFVTRLSLPGYGLSNATILASICLLDTLHSLNLSRNSFTDLPSQFSPCPMKAELQVLDLSYNRLSSHLGNFSGFHELE

SEQ ID NO: 141442 - protein, 509 aa, Oryza sativa
  Clone ID: PAT_MRT4530_42545C.1.pep
MDTWHVAVAAILVLIPFLRLILSRRGGRGGGKRGRLPPGPPAVPLLGSTVWLTNSLADAEPLLRRLIARHGPVVSLRVASRLLVFVADRRLAHAALVEKGASLADRPAMASTRLLGESDNLISRASYGPVWRLLRRNLVAETLHPSRVRLFAPARAWVRRVLVEKLRDENGDAAAPHAVVETFQYAMFCLLVLMCFGERLDEDAVRAIAVAQRDALLYLSSKMPVFAFFPAVTKHLFRGRLKKGHALRRRQTELAAPTAEPKKETTFEHSYVDTLLDIKLPDDGNRPLTDDEMVNLCSEFLNAGTDTTSTALQWIMAELVKNPSIQSKLHDEIMAKTGGGGGGGQREVSEEDIHDMPYLKAVVLEGLRKHPPGHMVLPHRAAEDMEIGGYLIPKGTTVNFMVAEMGRDEKEWEKPMEFMPERFLAGGDGEGVDVTGSREIRMMPFGVGRRICAGLSFAMHHVEYFVANMVREFEWKEVAGDEVEFAEKREFTTVMAKPLRARLVPRRTT

SEQ ID NO: 141443 - protein, 523 aa, Oryza sativa
  Clone ID: PAT_MRT4530_42546C.1.pep
MDTWHVAVAAILVLIPFLRLILSRRGGRGGGKRGRLPPGPPAVPLLGSTVWLTNSLADAEPLLRRLIARHGPVVSLRVASRLLVFVADRRLAHAALVEKGASLADRPAMASTRLLGESDNLISRASYGPVWRLLRRNLVAETLHPSRVRLFAPARAWVRRVLVEKLRDENGDAAAPHAVVETFQYAMFCLLVLMCFGERLDEDAVRAIAVAQRDALLYLSSKMPVFAFFPAVTKHLFRGRLQKAHALRRRQTELFVPLINARREYKKRQGGANGEPKKETTFEHSYVDTLLDIKLPDDGNRPLTDDEMVNLCSEFLNAGTDTTSTALQWIMAELVKNPSIQSKLHDEIMAKTGGGGGGGQREVSEEDIHDMPYLKAVVLEGLRKHPPGHMVLPHRAAEDMEIGGYLIPKGTTVNFMVAEMGRDEKEWEKPMEFMPERFLAGGDGEGVDVTGSREIRMMPFGVGRRICAGLGVAMLHVEYFVANMVSEFEWKEVAGDEVDFAEKIEFTTVMAKPLRARLVPRRA

SEQ ID NO: 141444 - protein, 49 aa, Oryza sativa
  Clone ID: PAT_MRT4530_42547C.1.pep
NIRIRERFKNICQILVLGKERSTDIKAASRHAQFFLKPWQPWCCKQSKR

SEQ ID NO: 141445 - protein, 765 aa, Oryza sativa
  unsure (1)..(765): unsure at all Xaa locations
  Clone ID: PAT_MRT4530_42548C.1.pep
MDAWQLFVPAIAILIPLLRLILFRRGDDGRRGRLPPGPPAVPLLGSTVWLTNSLYDAEPVVKRLMSRHGPVVSLRFGSQLLVFVADRRLAHAALVESGASLADRPSQAASARLVGEGDTMISRASYGPVWRLLRRNLVADTLHPSRVRLFAPVRAWVRRLLVDRLRDEHGDAAAPHAVVETFQYAMFCLLVLMCFGEQLDEDAVRAIAVAQRDALLYLSSKMPVFAFFPAVTKHLFRGRLQKAHALRRRQTELFVPLINARREYKKRQGGANGEPKKETTFEHSYVDTLLDIKLPDDGNRPLTDDEMVNLCSEFLKAGTDSTSAALQWIMAELVRNPSIQSKLYEEIKSKTGGGGQHEVSEEDVHDMPYLKAVVLEGLRKHPPAHMLLPHKAAEDMDVGGYLIPKGTIVNFMVAEMGRDEKEWEKPMEFMPERFLPGGDGEGVDVTSSKGIRMMPFGVGRRICPGLGIAMLHLEYFVANMVREFEWKEVAGDEVDFAEKREFNTVMAKPLRVRLVPRTIVARASPPFSHIPAAATALHPAAVSALLAVSGGGXVRIPSVARRGPHLVGGGGFASRRGDESASRRGLDSACGHGDAISSLPPPRPPSCHLTLFSGAPTPAYYLLAPLLLAVGRCLELLWACAIMLMISSNLKGIIDIFNQTNQGMLLNLTLMGRRADAAGATDGRRGRAQLAKGRMMWGGHGGHGSAIPKGGDAGKKGEGTDRSRTSSRVSGSSHPSSAVLLPHRPPTMPLMPALLHVARAQEGEY

SEQ ID NO: 141446 - protein, 128 aa, Oryza sativa
  unsure (1)..(128): unsure at all Xaa locations
  Clone ID: PAT_MRT4530_42549C.1.pep
DKDITPSNTHNNNNPPSVIQGPITRVRAXQLNLELSSFLYSPLYDFENRLLPNDYIVIRNNEDDKETLGEGLRGMDDHQGRPSXGGGPKQVDFXTIRSSGPVCTKTSAQVAYVLGLGSSLYGCKAKKI

SEQ ID NO: 141447 - protein, 136 aa, Oryza sativa
  Clone ID: PAT_MRT4530_4254C.1.pep
MEVRSGGSKWWQHKDEGQRRRGGQPLAVSFLDLVGEKGVRDTGGRQRRWLAEAMMAGKGGCFSWSRSGRQPRVGSRFRLELADEVAGVGRRGFSGDESWLVVLLLGEVVVGDMVRSFGKPQVMVNNSVVGGLIIGK

SEQ ID NO: 141448 - protein, 126 aa, Oryza sativa
  Clone ID: PAT_MRT4530_42550C.1.pep
MKDGSRLWLDVRNIGQLNDAAGKMYWLGKDTDELRRETGNLGQGQSRPRLISVRCQVERLLPISCCLAQLLQYDCSVAIGKAVRSNASYKSLSCDVLRTPSPLPPATMASSSLPTSDNVVVLKLRG

SEQ ID NO: 141449 - protein, 89 aa, Oryza sativa
  unsure (1)..(89): unsure at all Xaa locations
  Clone ID: PAT_MRT4530_42551C.1.pep
SKATRNLIAMNQVASRGKKPXSVTFSLGRALQQSTLKAWAGKPQNVGKAQTELLARCXANSQFTLGAYSANTATGEGVSENLHVKAFKS

SEQ ID NO: 141450 - protein, 236 aa, Oryza sativa
  Clone ID: PAT_MRT4530_42552C.1.pep
MASSTSSSLAVATMVAVVLLLGATTQAARLLDELVPGIPMPTIPGVPAVGPTIPAIPTIPGVPAVGPTIPTIPTVPTIPGVPAVGPTIPAIPTIPGVPAVGPTIPTIPTIPTIPGVPAVGSTIPTIPTIPGVPAVGPTIPTIPGVPTIPTVPGVPELPVNPGGVVPTIPKVPLPPVNPGAVVPAVPALPVPPIPGAAGGVVPTLPVPPLPAVPGVPLPEVPGVPLPPVPSVVPPVP

SEQ ID NO: 141451 - protein, 121 aa, Oryza sativa
  unsure (1)..(121): unsure at all Xaa locations
  Clone ID: PAT_MRT4530_42553C.1.pep
LGEALLENGFLQAVRTRFHRLLNSPPPYHGSATCRRDPPVSHLQDPPTTALASSLGSAGVPSPDPPPVSSSSPTTSPPRXAASEPHLPPRRYGRVPPPRTAAEPPPFPPPRGDDGGEAMDS

SEQ ID NO: 141452 - protein, 73 aa, Oryza sativa
  Clone ID: PAT_MRT4530_42554C.1.pep
FNGEEVLINYLHASIPYIMEHLTKVVVPYIMEWREYMHCTSFCLTMVGCLLVLTGAELIQLPFVFTCFHYVHT

SEQ ID NO: 141453 - protein, 498 aa, Oryza sativa
  Clone ID: PAT_MRT4530_42555C.1.pep
MTARDLPLRYLEEITDGFSDSRKVGSGGYGEVYKGVERAGTEIAVKKLYHMSGIDDTQFRNEFNNLMKIQHPNIVRMEALTSIYVLVGLLGCVHPVGCRGLVLPILQKQESHGLDWCTRYKIIKGTCEGLYYLHERLKESIYHLDLKPANILLDKNMDPKIADFGLSRLFGGTQTHTTRNCKGTELIIAGPLGYSKCDDMPPQQFIELVCKKWRDRMEATSNYASTEEDCQRLKRCIEIALRCVEVERKNRPSMRDIIRELKQIDETSSSMSSWNKVRIAKIGQWGGIGGNYRDIEVAPCRLGSLMIGCGEVIYSIAFSYYDYNGQQHKVGPWGGDGPDKGVNHTIQFSLSEYLTGISGTIASSPYGVIITSLTLVTNTRTYGPYGQVGGTPFQIPIQIKGSIVGFFGRVGWYVDAFGIYVNPNQDATHEDEAAVVKIGPWGANEGEAHDIDVLPCRLESVAICSSDYVESFGFSYSDRSGHQHTAGPWGRPGGNTHT

SEQ ID NO: 141454 - protein, 559 aa, Oryza sativa
  Clone ID: PAT_MRT4530_42556C.1.pep
MAALSELDATEASLSLPSWRWSYSYLEKIRSMSVVGSSSSSSSSRSARSSNYSSTVSSTESGAGSHRRRCKTGAASGGSFLRVVGFQVPGPRDIASQMVRDGFVLALIGAFGRAPGPVLERWFSELDVGWVLRPTDQQQQEEEEEEEAERLVWRWTRALTVMAHALSATQGHLHDERSAAAAAAAAVAVVGGVEFAISQPPHHTAPAVASSSDHELLLRGVVGGGDDLCLVRFTDTTISKMIAFAAALAAAGKAGTCPTPTADSFFGLMEVHTCISDVSEILMPALKQEALDLRLPDSEQMQSLVNKIGEAMANTQDSLGEAIRKTAKDAEAVTPVLSAMDSWEKFTQTEGIHRATRLIVDYASLFWGYRRVLESILCCYRSESSQNCWEIVQSLIEQMIITFLDQLEKKSESFSDPSLRYIFLINNSYFIQDQFLATNTDYSFPSSKGIRYWHYQNCYLDVSWEPVLSFLYLYNKMPKFFPKHSPQLLARFQSEFQKACRHQKLWKVPNTEHRNSLRKAISDKVITAYRKYLEGHLEPEKSSSDLLAMEDMVNELFEG

SEQ ID NO: 141455 - protein, 487 aa, Oryza sativa
  Clone ID: PAT_MRT4530_42557C.1.pep
MAGLAVAVAAAAALVLLLCAASLRCSAAVGLALSAAPGKLWSGGVSIAAEAAAVEARAEGEEEEECDLFDGEWVWNDSYPLYHSTDCPFLDVGFRCSENGRPDASYSKWRWRPSRCDLPRLVDVVLTLGPFSRIPGEIGSEMRLTTTALRNCAPRLETRCLMLPTGFDARNMLEKLRNKRVVFVGDSIGRNQWESLLCMLSVAVPDKSSIFEVNGNPITKHMGFLIFKFRDYNCTVEYYRSPFIVLQGRAPPGAPGVVKYTIRVDAMDWLSDRGQWRDADVLILNTGHWWNYEKTIRSGTYFQEGDAVKMDMTVGDAYKRSIQTLFGWLHNEVNSSKTHVIFRTYAPVHFRGGDWKTGGNCHLETHPDVTPVKSLEQWADFLNPVNDVLGNSFRPKLLGLDILNVTQMTAQRKDGHVSVHLSPSGPVPLYRQDCSHWCLPGVPDTWNELVYNLLLKRQSMIGQNVPLVGTKTLKAGWRKLNKYNLTI

SEQ ID NO: 141456 - protein, 65 aa, Oryza sativa
  Clone ID: PAT_MRT4530_42558C.1.pep
MISPPPRPPSLAASSPTSPRPVAASPPRCPPPRRLPPTPTWRGEERRRGEQRRERNGEERRERER

SEQ ID NO: 141457 - protein, 819 aa, Oryza sativa
  Clone ID: PAT_MRT4530_42559C.1.pep
MHEDNTGSCTELIYKTIVRAFNFLCLMKKKRIDGGDADRVIKYMQARQKDDMDFYYEYETDEAGCLKRVLVHAPLEEDEFERKWVEFKVKHKVSDENSEAFFKSSMTEESTVKVMKMLENLMLEEDSSENYENFDIEFGYVVGQSSRNDIESGDMESERRCVILLSQRVEYRMAVVNMDVCMVQHELTSATLVGTLHCSELAVPPRARLQPCNRPQRLQCRGQPGRLQCQRKKKEQKKKKKEEALVAGHTSASINLILTPQITAMVTSKKVQNNEAAMADGAVKEYRHGLCMDVPMYIEDSEYCGEELGTRLTCRHGLTPKRRTAWEGPDTGRRFLGCPLEEEDQCDKFFWVDEPWHPRVQKTLEQMWHAVERATKLTAAMEKIGFGGLLAMPEININRCILDIPAEGPVISKLPPLITEDYKIYSRHKDGESKNISLISLQEAILEESKQSEINEEDFIRRMMFFTIGYILCPTTKAHEFKGGLKNIEGNLPLLQAVNSEFCNINYNGRQIPLISFWNAANVRLRNKYDCRTAEGGGLRYEHDTHGFEDRENDFYINEQRIEEDTAFEELENDYPILSDNEEIDAQQSFAYANDHMPYGTDNEKEKDDDRELNQCEDDHETKIKSPAKIAAVEHSGHIKVLVDMLQQLERSIQFMENKLTNKLLSVEQICRKNTLAIEDETNLAKEIDGNGTEEAPFIITGDEATETDDNNKTIAERLRGSANLGLTLKDKITINYILQSEKTKVIEAYTELINDNQQGHTRQYGSALIEKETQVQINGVAKYIDYTVKERPVPTSWTDTNVAKWPLCPKSVPQQKDR

SEQ ID NO: 141458 - protein, 269 aa, Oryza sativa
  unsure (1)..(269): unsure at all Xaa locations
  Clone ID: PAT_MRT4530_4255C.1.pep
MPCTSAAWMLHVGGAAAEQASSSSSSKGGGRVVTAGTTTMDTGGYNNGGGGGGGGGNGGGGGDHQESSSSGGGGGQSSRLAARGHWRPAEDAKLRELVALYGPQNWNLIADKLDGRSGKSCRLRWFNQLDPRISKRPFSDEEEERLMAAHRFYGNKWAMIARLFPGRTDNAVKNHWHVIMARKYREQSTAYRRRKLNXPSSASSTPPPPPTSSSPTTTPTPPPTTPTPSPSATTASLFRPPPPPPPTSRPSPACSPGRRRRPGAAAAVA

SEQ ID NO: 141459 - protein, 58 aa, Oryza sativa
  Clone ID: PAT_MRT4530_42560C.1.pep
DETNLAKEIDGNGTEEAPFIITGDEATETDDNNKTIAERLRGQFGRTVKPSYQTQSDF

SEQ ID NO: 141460 - protein, 148 aa, Oryza sativa
  Clone ID: PAT_MRT4530_42561C.1.pep
LIMSSLLTCKKKSLSMNVINLSFKYSGPILLIAIIQIINTLQFSRCSVAVFLTAVEDGRRQVGQLRSWARARRRRGGVGGRAVGRAAAGDGRSRAGAVARRRCVRRPSELAAAGVAAGNGKGMGREVHNCCQGCPWSGVATLRASSYI

SEQ ID NO: 141461 - protein, 758 aa, Oryza sativa
  Clone ID: PAT_MRT4530_42562C.1.pep
MVTSKKVQNNEAAMADGAVKEYRHGLCMDVPMYIEDSEYCGEELGTRLTCRHGLTPKRRTAWEGPDTGRRFLGCPLEEEDQCDKFFWVDEPWHPRVQKTLEQMWHAVERATKLTDNNTSTARRRNPGKRGRHGRKLPILSVTAAMEKIGFGGLLAMPEININRVICIWLADRYDVKSQTILIQDKSLPITLWDVQCILDIPAEGPVISKLPPLITEDYKIYSRHKDGESKNISLISLQEAILEESKQSEINEEDFIRRMMFFTIGYILCPTTKAHVSSSYLPLLRDVTKIHTINWASLTREHLCDCLKEFKGGLKNIEGNLPLLQCWYWEHVKAVNSEFCNINYNGRQIPLISFWNAANVRLRNKYDCRTAEGGGLIIEQIEHPDFLNDEQRYEHDTHGFEDRESDFYINEQRIEEDTAFEELENDYPILSDNEEIDAQQSFAYANDHMPYGTDNEKEKDDDRELNQCEDDHETKIKSPAKIAAVEHSGHIKVLVDMLQQLERSIQFMENKLTNKLLSVEQICRKNTLAIEDETNLAKEIDGNGTEEAPFIITGDEATETDDNNKTIAERLRGSANLGLTLKDKITINYILQSEKTKVIEAYTELINDNQQGHTRQYGSALIEKETQVQMQPQWYNASEDIKNLINGVAKYIDYTVKERPVPTSWTDTNVAKWPLCPKSVPQQKDSWSCGLNALKFMETWDGKELTSDFLNMEPNEVFRLKVAANLINTTLNIVLAVHDDIRRLHSENSSTSEVTMKL

SEQ ID NO: 141462 - protein, 168 aa, Oryza sativa
  Clone ID: PAT_MRT4530_42563C.1.pep
MVTVAQAAANLGMHVHVELRLDLCKMCAWMCGNRVPRDSLKVVRALTKLGRRRRCVERPGGGGKRWCDGDSLLQPPGISTSVASWLQSSWASFSLDLGDVVGAVVWPEIHRMDGNREGSRRRRSGAEDGDAHGTRWLICAKMDGGSGGGCRRWWWWYSTLCCRFRPLG

SEQ ID NO: 141463 - protein, 348 aa, Oryza sativa
  Clone ID: PAT_MRT4530_42564C.1.pep
MASAKLVMALVAAAVLMQCCGVLLAARPLEGDVAGGGGWRPMQTAGGGGGKMPVMQILQAVPIQPGNGCKQAPSPPGAPCFGSRRSAAVAHAWWEVIPAPSPAGRAAVEAAAGRAAQEAAAEHRRPPQTTAAHRPRQRSAIPYRCPPPSTTAFLRSVATPSPVSPSEDEGFAFYNQYAKEKGFVTRDLYNFFVKMKKKRIDGGDADRVIKYMQARQKDDMDFYYEYETDEAGCLKRVLVHAPLEEDEFERKWVEFKVKHKVSDENSEAFFKSSMTEESTVKVMKMLENLMLEEDSSENYENFDIEFGYVVGQSSRNDIESGDMVLDPTQIVPKGAPTKRMRGFLEKRK

SEQ ID NO: 141464 - protein, 109 aa, Oryza sativa
  unsure (1)..(109): unsure at all Xaa locations
  Clone ID: PAT_MRT4530_42565C.1.pep
EEMQEGTSLFTVHAYLPVVESVGFSNELRSVTVGAASALLVLSHWEAIPEAPFFIPKTHEEIKNFGDGSSIGPNXAKKLMNSVRRRKGLHVEEKVVEHGTKQRTLAKKV

SEQ ID NO: 141465 - protein, 107 aa, Oryza sativa
  Clone ID: PAT_MRT4530_42566C.1.pep
MAQPQADGAARPWNLRQRTRRRPAASMSWAAAAAVPVPSSSRRRKRAPFSVALTPEEIEEDIYALTGSRPRRRPRKRPRVVQRQLDSLFPGLWLTEVTADAYRVPDE

SEQ ID NO: 141466 - protein, 167 aa, Oryza sativa
  Clone ID: PAT_MRT4530_42567C.1.pep
MAGEAAAAERWVGAAVDFSEGSRAALRWAADNLLRAGDHLILLHVLKDPDYEQGETLLWEATGSPLIPLSDFSEPTIAKKYGAKPDAETLDMLNTVARQKEVVVVFKVLWGDPREKLCQAINEIPMSCLVIGSRGLGKLKRVLLGSVSDYVVNNATCPVTVVKTADG

SEQ ID NO: 141467 - protein, 109 aa, Oryza sativa
  Clone ID: PAT_MRT4530_42568C.1.pep
MRFVAAYLMATIGGNASPTKDDVRAILGAVGADIDEDKLGYLFDQVAGKDLAEILAAGSEMLAFGAAPAAAAATAGGAAAAGEKEEEEKVEEKEKEGEDDIVFSLFDDE

SEQ ID NO: 141468 - protein, 94 aa, Oryza sativa
  Clone ID: PAT_MRT4530_42569C.1.pep
GMQLFHPTPCLLVYQTVRFRENSLYMNFLETSIYELRARRCPFLCSNQGLQNLARLHRLGLLTQVKQQGEIKIQYRHDPLHFTRNHTVCPQQSC

SEQ ID NO: 141469 - protein, 46 aa, Oryza sativa
  Clone ID: PAT_MRT4530_4256C.1.pep
VSTATGGSISTISSAHLSKKAWKLCMPNAYHPLLLQQHQENLHRAK

SEQ ID NO: 141470 - protein, 103 aa, Oryza sativa
  Clone ID: PAT_MRT4530_42570C.1.pep
MLKGPVDHRSHPISATPFEVFYDGSWHGVNCIRIRNGNLFVKFIYSGSTVEHNVDGDCLRLRSRRATCSDCSNVLKPGVDVCVQSSHTPSKFTREEPNASVVT

SEQ ID NO: 141471 - protein, 965 aa, Oryza sativa
  Clone ID: PAT_MRT4530_42571C.1.pep
YSDDSDPDIDEDLQRDLDALRQSCILSGNDPDAAVAQVSACLAAPPAAAAGAEVNGLSDDDDEEEDEDLALVRSIRENLLLNKASPSSPLPRPICAWPPSDSEDDEDDLETLRAIQRRFSHYHSGTSSGSEMNTKTEASKEGSGNIFGNELDEEFDAEKHNKEATTRTGFPKAALLLVDALKKNRACQKFIRRKMITIEAKIEENKDLRDRVKCLLDYQLSCRKAFGKILCQKEDPRVRLISSRKPCAQSTKNKDKKTPALFLGPADNPHVSKYKMVLKQLPMSLQKQPWSDVEKEKLAKGIKQQYQEALILNSINKGSSTGDFSAVDMAYALTNTAGNFEVTPESLRSVLPLINWDKIAAMYLPGRSGAECESRWLNFDDPLISHNAWTAREEKRLILTVQQQGMNNWINIAVTLGTHRTPFQCLVRYQRSLNHCILNKDWAEEEDLQLQAAVNTFGTNWQLVSASMDGRTGNQCSNRWRKTLNPERSRVGRWSLDEDKRLMVAVKLFGSGSWNKIAQFIPGRTQSQCNERWRNVLDPDIDLGEWRPEEDSILLASVDEFGPCWSKIAGAKIPHRTDNMCLRRWRKLCQDKLPSVKAAQQIKKSILQCNFVDRETERPAIGPSDLMPLVRSKVDGSDENTVSAKVRKPRKRSRIPCEDNVLPGDTSNSSPSMNLPLSESIDAEAAVNTTTANSKKKPSRSRSKKQTDENLAVCDVNNSSNCSSGARKRKRSITDKNQVVQKKMKGSISGDNEAVVETVGTISADNEVATKRKTGSTSVGEEGTTKKTTRGSLSGKGEVNKRMRGSISGVQKGATKQRMRGSVSTDNHGAVMKSKRAPSRKSAEENSKADSMANAAFGSDLPTVASEDRDANNGNVKNGRLKSMPRPKQINMTEGSADKFSTSTRLADCMSFGRINGSSRVARHLCVSVKPLSNMIQSNGPSDVSAKDPTSAETDPTSVENSNTA

SEQ ID NO: 141472 - protein, 549 aa, Oryza sativa
  Clone ID: PAT_MRT4530_42572C.1.pep
MAGAERPYYPPRPTDGGSGQPAGCDSPMRWDDDDEDHGGGGGDGMTAVAGFNLFEEESDDPPAKNGVVDDPDTTTTSDCNTDMSEDLVKREEGMNFHCDPPLHEHTGIWVPVSVPPMTKRDHEEWHKGFGHNGDYFPEDEFNWEIDEENKEMTMWDVFSEMVVAAKDKVISVASYDLGRRGMSMLSKFFFQEAWKDMAQTLADANAGIANELLETERTIWLPDSAASACMLCNVRFHPIMCSRHHCRFCGGVFCGGCSKGRSLMPPKFNTSEPQRVCDVCGVRLESIQPYLINRISRASQPPTHDVTDLSTLRSWLNFPYAHTMEYEIYKAANSLNSYCKVGRLKPEKAIPYTILKQAKGLAIITVAKVGMMVAYKVGTGLVIARRADGSWSPPSAIATCGIGYGAQHIITKSDNFRLTHQAGGELADFIIVLRNTEAVKTFSGKAHLSVGAGVSASVGHVGRVAEADFRAGDGGYAACYTYSCSKGAFVGCALNGSLVSTRDTENARFYGGPIKAPDILMGSMARPPAAAALYKVLSELFDNPEKQSL

SEQ ID NO: 141473 - protein, 66 aa, Oryza sativa
  Clone ID: PAT_MRT4530_42573C.1.pep
KDLLDMFTTFEYDFFPMYIFLPLQEVAPINNTTSAEVKLRVSLIVNRGSSGVAILNRSGICFSRSG

SEQ ID NO: 141474 - protein, 149 aa, Oryza sativa
  Clone ID: PAT_MRT4530_42574C.1.pep
HKVSWCLPADDYIVLPGDTFKSIEIARFGFGRRLRKRVNTIPVATASRTTLKAVDAITPSSWAPGPQCHFPRTGTAAPRRSTYVRVESTRSRARGAAWRCASHRHHHRASSPCVLIISFSSGCRDGRDAEPPTRAAQCDARRGPGFRLL

SEQ ID NO: 141475 - protein, 73 aa, Oryza sativa
  Clone ID: PAT_MRT4530_42575C.1.pep
PGSKKVSPKKGPPNFPGQKTSCPPNPFFQSPRAPPLKFPHLGFKKIFFKTPGHPYMRSPCQNPFKKNRPHLNF

SEQ ID NO: 141476 - protein, 214 aa, Oryza sativa
  unsure (1)..(214): unsure at all Xaa locations
  Clone ID: PAT_MRT4530_42576C.1.pep
YGCPPPDPLPEPPPXPLPPGPLPPPPPPPPPPPPLAXRSIIWPTSXPYPPPAPXPYPPPPPPPPPPPPPPLAXRSIIRPTSXPYPPPAPXPYPPPPPPPPPPPPPPPPPXHKVHSKVRSKVHSKVHMVHNXPPPPPPPPPPPPXPPPPPPPPPPPPXIVRSIXGTYPPVWPPPPPPPPPPPPPAAYLATTPILALDTPILSSTKKVIARSLFPA

SEQ ID NO: 141477 - protein, 91 aa, Oryza sativa
  Clone ID: PAT_MRT4530_42577C.1.pep
MAWRGVAYIARGGKDESESESELLHPYRRARILEEMDTAEKALLRGRPNGTPLDRQFAIVVGARPRHGNCSEIKHLLVTIASVITFRQILQ

SEQ ID NO: 141478 - protein, 66 aa, Oryza sativa
  Clone ID: PAT_MRT4530_42578C.1.pep
KTLPPLFLGSALGKNFIPPGKPHPLGKKVPNQNFVLVEKKKKKKNKKKKKKPPKKKKKKKKKKKKK

SEQ ID NO: 141479 - protein, 92 aa, Oryza sativa
  Clone ID: PAT_MRT4530_42579C.1.pep
GGKHYALWEDPFKKPSYLFALVAGQLDCREDSFTTCSGRKVTLRIWTPGQDLAKTAHAMYSLKAAMKWDEEVFGLEYDLDLFNIVVVPDFNM

SEQ ID NO: 141480 - protein, 348 aa, Oryza sativa
  Clone ID: PAT_MRT4530_4257C.1.pep
MLRIASRAGLLGGRRCYSAAAKSGPSIAGVSDIIAVASGKGGVGKSTTAVNIAVALAKKFQLKVGLLDADIYGPSIPTMMNLHAKPEVSEDMRMIPVDNYGVQCMSIGFLVDKDAPIVWRGPMVMSALEKITRGVAWGNLDILVVDMPPGTGDAQLSMSQRLRLSGIYKSILGLVENMSCFKCPKCGEKSYIFGEGGGQRTAEEMDMKLIGEIPLEIDIRTGSDEGTPIVISSPDSASAQAYIQVAEKVIHRLKENEFSPLPNRAAIPAATSAPNPFLAGSSQLAVVSSPGAEEGSLVVLPNCRGLGIVELDAILKPDDPTKEDDENKHKNAQAANSIPSALSGSEFN

SEQ ID NO: 141481 - protein, 329 aa, Oryza sativa
  Clone ID: PAT_MRT4530_42580C.1.pep
MECGGALQLPPGFRFHPTDDELVMYYLCRKCGGLPLAAPVIAEVDLYKFNPWDLPERAMGGEKEWYFFSPRDRKYPNGQRPNRAAGTGYWKATGADKPVGSPRAVAIKKALVFYAGKPPKGVKTNWIMHEYRLADVDRSAAARKLSKSSHNALRLDDWVLCRIYNKKGVIERYDTVDAGEDVKPAAAAAAAKGGRIGGGGGAAAMKVELSDYGFYDQEPESEMLCFDRSGSADRDSMPRLHTDSSGSEHVLSPSPSPDDFPGGGDHDYAESQPSGGCGGWPGVDWAAVGDDGFVIDSSLFELPSPAAFSRAAGDGAAFGDMFTYLQKPF

SEQ ID NO: 141482 - protein, 73 aa, Oryza sativa
  unsure (1)..(73): unsure at all Xaa locations
  Clone ID: PAT_MRT4530_42581C.1.pep
FKVKKIKKGGEAKFFKMGFFIKGXVNGKGPVKNLFKELEEPFGKKMVTVIFGAAERKDSLLIFLRRGSWVASS

SEQ ID NO: 141483 - protein, 194 aa, Oryza sativa
  unsure (1)..(194): unsure at all Xaa locations
  Clone ID: PAT_MRT4530_42582C.1.pep
MAAATMALSSRRWPAXPPPKVFGEGRITMRKXAAXPSPPRPGXPWXGAXRVLYLXPLSGXPXNYLTGEFPXXYRWXTAGLSPHXXXFAXNRXLXVIHSPXAXLRXLGCXFPXLLPXXRXXFRXAVXFKAGSXXSPRGXQYSATHLITXXXILPXLGVQVVLXGXXQRVASPGGALRKFFKPPLPGGFTPSGAPP

SEQ ID NO: 141484 - protein, 64 aa, Oryza sativa
  Clone ID: PAT_MRT4530_42583C.1.pep
ALEVALHLSCSEHIPCLINSAFLEYSAFFSWAVMLPGYIYALVNGCNLRVIVYRICMLFWPLSP

SEQ ID NO: 141485 - protein, 169 aa, Oryza sativa
  unsure (1)..(169): unsure at all Xaa locations
  Clone ID: PAT_MRT4530_42584C.1.pep
MCADGRELLTQARTPASSSPIARTGGSSSPRADAGELLPRRADAXSSSPGVRKAWSSSPARGRPGAPPPARSFPXSSSPGARKAGXLLPRARTPASSSPVARTPASSSPVARAPAPPAARGRPGAPTPRTDAGELLPRRTDSKLFPQHADGRELTCGKDDMWSQLIFVL

SEQ ID NO: 141486 - protein, 117 aa, Oryza sativa
  Clone ID: PAT_MRT4530_42585C.1.pep
MSSAAWRLATNSYRRHATWRQASAFRRCERKTLEQRVEDRTGGDQLGGEKGAVKFNPSSSRRIAASLCPIFPALPRNIMVLPPAPSVHYVAATANTSMPHWELRNRLSRVYSADACL

SEQ ID NO: 141487 - protein, 81 aa, Oryza sativa
  Clone ID: PAT_MRT4530_42586C.1.pep
FSDHIASTNPCMYVGAAQLRQPTFAHRQLFCFHLNVETGLNSIIEKKISAFTGKEREGKINQQQRTSAIPSGFPPAPAIRC

SEQ ID NO: 141488 - protein, 109 aa, Oryza sativa
  unsure (1)..(109): unsure at all Xaa locations
  Clone ID: PAT_MRT4530_42587C.1.pep
SRRXTRSGSTPGRGMRFSHGVQEREIAPSSPRGWPGETPPACSQYRLQPPLHIFTFSQFGGVAERQSNRRRTWPPRVWSSGVVNGGAGHPRRRRATSCPTPPRRSSFFF

SEQ ID NO: 141489 - protein, 199 aa, Oryza sativa
  Clone ID: PAT_MRT4530_42588C.1.pep
MDLVPRSKANWDTFSNRAFCEICAEECEAGNRPTGCLSTTGYKNLQLKFFQRTGKKHDQKQLKNHWETLKKEYNLWIELKEKSTGLGWDPIKGTFTADDAWWADHIVFSYTRILLNLPSYRMKRQTKIILACMALHNFIRDSVLRDELFGRCDLDEEFDPNTEQASSSQENGINGLAVDDEDMNAFRDRIANSLTATRA

SEQ ID NO: 141490 - protein, 106 aa, Oryza sativa
  Clone ID: PAT_MRT4530_42589C.1.pep
QTAGSSSTKYCRKKPMNRAGSEWLHAQVVVHRARTYGSELARSIWESADAAYVASGGRRIDADPPEPGHGGGDSRRRRSYGSTRSGRLSRASDERDHSLGESKSPL

SEQ ID NO: 141491 - protein, 778 aa, Oryza sativa
  unsure (1)..(778): unsure at all Xaa locations
  Clone ID: PAT_MRT4530_4258C.1.pep
MSSSLPSSSFHYPLSSSDTDCGQRPRRGGALAAAFPLRRVVVFRGLVVPQESERSTAGSDDEDDHSGAIAVTLEKDMEFDSGGSGTEGGDAAGARPRGGADHHAAAREGVAKAYTGMARRPVVAGIVDSQRKQAIRKAESASCWRCSSSFSPPPRQPPPHPPPRRPPRLRLPRRLLSPGRGSRRRRRCPPPELGQPASLACSAAHPPRPLRHSPGRRRRRERGERGXEEEEGMAVTMAVLRLGDEGGSWAPCMVKEVEEKLGGIYDGKFEQRLIPSSPSRWLRCRWEHSASIVRLLRCRRQSARMVYADVEVIVPSILQYVCTACLQFSSSSFVYSSKAMSTPIFFIPDAPFHAQLEFNPGFLSFMRFRGLLWRFLLVLXIHKCNRYSLWWEHFFLHNDEVVLVFQIISSEVVAAGLVSFLVFDGVSPRSSRRAAATAGSWRGKGGAAPSSLLIIIVGGRMRWGRWRRSRPPPPRRHRQRRRSRLSPPPPRRRRRPPRCLHQQPRQAPPRRRPDQAGGAAPDRLLLVVVARGQRLRELRHPPLARSLEATASSSSSATGAALIRPAAPLPAASSSRPEGEGAGRLLLVVVAPGWRAREPPPEGEEAGRLLVVIVPMQLISAPTEPLSASSSRSPIRQRGDGGRGVYHCSSWSYIACRRATVGDAAHSNRNCTCMGTFKAGVIKLRGEAPLNMAKVIFVPDGDLPTGGHLLLNIYRGAHPVLDTSVYFAHMPSRYNLNARRVKTIKRVIIVHPILYAVLQPLASSYSDMTSITPIYRKQ

SEQ ID NO: 141492 - protein, 109 aa, Oryza sativa
  unsure (1)..(109): unsure at all Xaa locations
  Clone ID: PAT_MRT4530_42590C.1.pep
MEHKQYDDVGTGQEHLNPHLLQDSWETFFFTDNKYTKTDSIKTSAEXYTPDHLVHGKDGEAGKGLPSTKPALLHDSTSDHKLHSQVYYVFRPSSFILYDVNITLACIYT

SEQ ID NO: 141493 - protein, 63 aa, Oryza sativa
  Clone ID: PAT_MRT4530_42591C.1.pep
MSTSLRAKSWPERKSSRNRFAHRGDHRRERTEFALVVKAEETVIGREGGIETEFEIEIVPETE

SEQ ID NO: 141494 - protein, 38 aa, Oryza sativa
  Clone ID: PAT_MRT4530_42592C.1.pep
MAISPTGTRPYKDGVGAIFGPTDQIHFKLGVKCFNVAD

SEQ ID NO: 141495 - protein, 197 aa, Oryza sativa
  unsure (1)..(197): unsure at all Xaa locations
  Clone ID: PAT_MRT4530_42593C.1.pep
GGEEVPHRPRSPLAVLPPPTPSPSPASPLLPPLRRRPPTPPLVSQPPPSRRPGMERRVSTPRCPXRPRSPHAVLPPPMPSPSPVSPLPPPLHRRPPAPPVGAAEGRIQPRRGGLPSSXSQPQPSPPRWPPLRRRXPPPSPPCRPPPLPLPPRPGRPLHARRPACYLQRRQAREREGRERKRKREGADVASLHVGLTL

SEQ ID NO: 141496 - protein, 104 aa, Oryza sativa
  Clone ID: PAT_MRT4530_42594C.1.pep
MEHEEDRGWWNPSTSRLNFVIKFFEEKWMTCGCEQPRFEADSEKKNWIAQVAQHAFALSLDNANELLPVALLSEAMDDLAWAFQGPSSPISICNSYYSIWLKSI

SEQ ID NO: 141497 - protein, 206 aa, Oryza sativa
  Clone ID: PAT_MRT4530_42595C.1.pep
MHTIKETKMLAAKLDLLMKHLDDHEKKPQGTVKALDSHVTCEVCGSMGHCGNDYPETREEAMYMDNNTTGSVHREVRGETNPTHISKEPTITECSNAILHKLPEKKKGPGYLMITCSIETQKFNQALYDLGASVSIMPKDVFDKLNFTVLAPTPMRLQLGDSLVHYPTGIVEYVPVKIRDFFIPVDFVVLDMESDKETPIILGRPF

SEQ ID NO: 141498 - protein, 665 aa, Oryza sativa
  Clone ID: PAT_MRT4530_42596C.1.pep
MDRVRGCAFLLGVLLAGSLFAFSVAKEETKKLGTVIGIDLGTTYSCVGVYKNGHVEIIANDQGNRITPSWVAFTDSERLIGEAAKNQAAVNPERTIFDVKRLIGRKFEDKEVQRDMKLVPYKIVNKDGKPYIQVKIKDGENKVFSPEEVSAMILGKMKETAEAYLGKKINDAVVTVPAYFNDAQRQATKDAGVIAGLNVARIINEPTAAAIAYGLDKKGGEKNILVFDLGGGTFDVSILTIDNGVFEVLATNGDTHLGGEDFDQRIMEYFIKLIKKKYSKDISKDNRALGKLRREAERAKRALSNQHQVRVEIESLFDGTDFSEPLTRARFEELNNDLFRKTMGPVKKAMDDAGLEKSQIHEIVLVGGSTRIPKVQQLLRDYFEGKEPNKGVNPDEAVAYGAAVQGSILSGEGGDETKDILLLDVAPLTLGIETVGGVMTKLIPRNTVIPTKKSQVFTTYQDQQTTVSIQVFEGERSMTKDCRLLGKFDLSGIPAAPRGTPQIEVTFEVDANGILNVKAEDKGTGKSEKITITNEKGRLSQEEIDRMVREAEEFAEEDKKVKERIDARNQLETYVYNMKNTVGDKDKLADKLESEEKEKVEEALKEALEWLDENQTAEKEEYEEKLKEVEAVCNPIISAVYQRTGGAPGGGADGEGGVDDEHDEL

SEQ ID NO: 141499 - protein, 391 aa, Oryza sativa
  Clone ID: PAT_MRT4530_42597C.1.pep
MCNSNVKSAGVAQIDGRPVLQPAGNRVAAPEAARPLKKSLQKSLSMPASLDNAAAATTCAASPEKTRAADFARAAAASLLPPPTPASVSAKATRVSGAKVAAARTAAAAAAMGGLDRSRKPAKKGGAAVLPVVTFAGLEAYEPAGSIAAAQREHVAMAQAQRKMRIAHYGRTASFSRVEGKVSATATGAAELVAGAVTGHDEKRCSFITPYSDPLYVAYHDEEWGVPVRDDELLFEMLTLSGVQVGADWTSILKRRHVYREAFSGFNVDAVAKYTEKQMASLSAEFGLDLGTIRGAVNNACRISEVRRDFGSFSKYVWAFVNNKPLSPSYKYSRKIPVKTSKSESISKDMVRRGFRFVGPTVIHSFMQAVGLTNDHLVSCPRHRVCSSSSA

SEQ ID NO: 141500 - protein, 87 aa, Oryza sativa
  Clone ID: PAT_MRT4530_42598C.1.pep
MAAPGSGSGGIPIKADQDSDGSAQSTADMTAFVQNLLMQMCSLDEMGARIDELEQSINDLKVEMGTEGITPTKPKDEESKPAGSSAE

SEQ ID NO: 141501 - protein, 99 aa, Oryza sativa
  Clone ID: PAT_MRT4530_42599C.1.pep
MAAPGSGSGGIPIKADQDSDGSAQSTADMTAFVQNLLMQMQTRFQSMSENIISKIDEMGARIDELEQSINDLKVEMGTEGITPTKPKDEESKPAGSSAE

SEQ ID NO: 141502 - protein, 78 aa, Oryza sativa
  Clone ID: PAT_MRT4530_4259C.1.pep
MAGAKHLAEIPDPCWEAINVTRVGDAALAVHTIDPLLAQVRALRKCQRCTNPMGSVLNERHFRLGYSPSNEASQILAR

SEQ ID NO: 141503 - protein, 54 aa, Oryza sativa
  Clone ID: PAT_MRT4530_425C.1.pep
LELVAWLISYDVQLIRDGRDRRWWLAAGDGGGGEVCGGGVEVLPREAPVPPPPA

SEQ ID NO: 141504 - protein, 41 aa, Oryza sativa
  Clone ID: PAT_MRT4530_42600C.1.pep
MDAPRREQMHQHHHRKAGAQGEAAPAIAAAGVGAEGISRKI

SEQ ID NO: 141505 - protein, 61 aa, Oryza sativa
  Clone ID: PAT_MRT4530_42601C.1.pep
MSMSNFAKMGYSICGSFAAGIYVGVKLRVRQQAVERSEGKKYISNIEQNLQSLKNLYERVE

SEQ ID NO: 141506 - protein, 235 aa, Oryza sativa
  Clone ID: PAT_MRT4530_42602C.1.pep
MSTKRNGVMLHSWLKPAITNKAPERMPMWKLRQRKRLPAAPISRSTRKTGSRGPDTRACHIASISSRPFPGGSESAREKYVASSSDKFSAHHGDPGSVYEPGAGYGGRASEQPEAGDAAAQDNLKPTTPLPRLLHRRRPALTLSGPGRVPTGRRSKAPADGQHRREDAIVAELIAMMPRVLAPGVLWRVGGVPKLGGGGGGKTKGRPPTGRVLDQLGPCVGEEDTTTRAERTGSG

SEQ ID NO: 141507 - protein, 95 aa, Oryza sativa
  Clone ID: PAT_MRT4530_42603C.1.pep
NGHAHTYNSLGQTGTGGRPPGDYLSPLYDACRGSGGQKMVLAGPEIIPGGPQFRGHLDGPRDGGGHEVGGGAPVDGSNLVPCHKSLRGQDLLEAG

SEQ ID NO: 141508 - protein, 91 aa, Oryza sativa
  Clone ID: PAT_MRT4530_42604C.1.pep
MAFSLGHDALLFMLPFSVYALVFLRPPRGLHQTPYPILVCAFITPTALLAAADDVVLAAVLAWTANVSAATSLWWCLTNGGYTAMAFSRVN

SEQ ID NO: 141509 - protein, 515 aa, Oryza sativa
  unsure (1)..(515): unsure at all Xaa locations
  Clone ID: PAT_MRT4530_42605C.1.pep
EASFGDCSTSSPHLDKSEMIISSDQEGLISSSISPTYNYKQGNEMVNKVDDCPTLPLYSNNTDNEIAIFDCVVDSYKPSSAKCVHEDDMDGCSTFHSTCGTNLLKEEVNEHKWLSEESTSSTCLSSIAEDHACFMGDDDDFVVDQLNKKDTTMVIMLMGVIEKQHEXLIKKNEEIKGLSDEHKKLNGSHSSLIMKYEKLENEFSCATNSIACVAFLEKENQELKSEFEITSKYMDLQEMHHELCRFSXTIVEIAHEVIIATVKSYGPHAQVDLTCANTCCSEANISLSTTCDLDYVGKKDKDLWAMLXPSQDNRGNMVKKPEKGSTVACTKFYQANTKFNNKSKGQIQSSIKTLSTCIMCKKVGHYALICSNKIDDQEENKKXNMKCYGCNVKDHEVASCPHMKDEDFMSSRKKLNIKATSKMKDAVKKAPCKDKNRLCYNCXERDKLXKNCPNGNILNPNFLFEXKLLRKAKNVTSITXMISSPHASTKLTWVPKSLMTNLYGPNFLVDKNVLK

SEQ ID NO: 141510 - protein, 405 aa, Oryza sativa
  unsure (1)..(405): unsure at all Xaa locations
  Clone ID: PAT_MRT4530_42606C.1.pep
TSPRGEPWRPCRRPPSSRSPPSAPRTAPAAGSPPSPASGTSPSRRLGXGSPSPSPXGWSPPPPPPPSSPPSSSPPPPDSDRTPPPXPPSSRDPPPPPPXAPPPASPEGVNGAGEPPPPSPXPPPPPDPPPPNLMLCLPLPPTPAHCLPPSPXASAAPPPPRRLPXSPPPTASPPPTAIPXAPRKPPASPSLNPPPTLTPTPNPNPPPQTHRPRPRPRSRSPPSPSAPRRRTLSARAAPRGSRPRGGAGSAPRRRMAAPPLPGGERPAPVSPQHPXATPAPRSWPAXSRLPPSPRSISSALSSSPASLPAIELPAAAPEPAVSSNPPALPLQLPAAATALAPARRRSSPCSPRPPRQPXQTRSTPPRQRNRPPKPPRRPPTAKPDLGHPSTYKSVNFRSSGGFDHN

SEQ ID NO: 141511 - protein, 137 aa, Oryza sativa
  Clone ID: PAT_MRT4530_42607C.1.pep
MVKFLKPGKAVILLQGRYAGRKAVIVRVFEEGTRDRPYGHCLVAGLAKYPKKVIRKDSAKKTAKKSRVKCFLKLVNFTHIMPTRYTLDVDFKDVASGGPDALATRDKKVAACKAAKARLEERFKTGKNRWFFTKLRF

SEQ ID NO: 141512 - protein, 39 aa, Oryza sativa
  Clone ID: PAT_MRT4530_42608C.1.pep
TVSVCCKLNCGNTTYFRRSVLDASLLTQIDVPPSEKQLI

SEQ ID NO: 141513 - protein, 123 aa, Oryza sativa
  unsure (1)..(123): unsure at all Xaa locations
  Clone ID: PAT_MRT4530_42609C.1.pep
MAVGGGLAVGGGLRQAARRRRRRRSRGDGGRQWAGVGGRGKQSMRLGGGGSGGGEPPETGKTVGRGHLEERRERGEGGRGRGLAGAVDPFRXAGGGAVGRWRRRIARGRRSGGGIYENYLTTN

SEQ ID NO: 141514 - protein, 202 aa, Oryza sativa
  unsure (1)..(202): unsure at all Xaa locations
  Clone ID: PAT_MRT4530_4260C.1.pep
SLPSSSSHYPLSSSDTDCGQRPRRGGALAAAFTLRRVVVFRGLVVPQESERSTAGSDDEDDHSGAIAVTLEKDMEFDSGGSGTEGGDAAGARPRGGADHHAAAREGVAKAYTGMARXAESASCWRCSSSFSPPPRLPPPHPPPRRPPRLQLPRRLLSPGRGSRRWRRCPPPELGQPASLACSTAHPPRPLRHSPGRRRERGE

SEQ ID NO: 141515 - protein, 67 aa, Oryza sativa
  Clone ID: PAT_MRT4530_42610C.1.pep
MSSADLALNLAIDGLELHLQHAEGVGKRDFNVGEQRVVACMRAWSTGTGRAGCIQCQARLNKFEIRP

SEQ ID NO: 141516 - protein, 136 aa, Oryza sativa
  Clone ID: PAT_MRT4530_42611C.1.pep
MVKFLKPGKAVILLQGRFAGRKAVIVRVFEEGTRDRPYGHCLVAGLAKYPKKVIRKDSAKKTAKKSRVKCFLKLVNFTHLMPTRYTLDVDLKEVAAGPDALATRDKKVAACKSAKARLEDRFKTGKNRWFFTKLRF

SEQ ID NO: 141517 - protein, 266 aa, Oryza sativa
  Clone ID: PAT_MRT4530_42612C.1.pep
MKQKIVIKVSMPCEKSRSKAMKLVVMASGVSSVEVTGDGKDRLQVVGDGVDAACLVTCLRKKIGHAELVQVEEVKEKKPEEKKPEEKKPEPCYCPHPCYYHHHYGGIPVAVGDQPSDPCSIMSESSGGRSDIKEREWERWQLELDRAGLLVLLVAAAPLAVVVSAGGAGRFMSIDASPPLLHHHSRPPLQRPQGEQGVGGGEAVLGRGQLDLESLELLAGGMEGQRGGGKPGAGGTTRQRHGGMTRLRQARLKMMCDDACTAACAG

SEQ ID NO: 141518 - protein, 45 aa, Oryza sativa
  Clone ID: PAT_MRT4530_42613C.1.pep
YTYRALHLTHLIIRLRAVFQGVKEIVSNNKLIISIHSSPRLDSVP

SEQ ID NO: 141519 - protein, 80 aa, Oryza sativa
  Clone ID: PAT_MRT4530_42614C.1.pep
MLTTSAHLVIGVQAIVRQQADKLRTPIVSGCLTCDARLQAASPKLWLAPVQLCAIHYVVSTLTTIVLPRSTCHLLVVSGN

SEQ ID NO: 141520 - protein, 198 aa, Oryza sativa
  Clone ID: PAT_MRT4530_42615C.1.pep
MESVQKLPKWTETEDQQATFDDPQDEEAAEVGQELEEAPQGGPEPTWWLHWQTLFSLLQTQPTGKRPRTNKAPRILNSKRSFRLTKILTSNLASNPKRKKPRNVTTSSREENLQQGLSRTGHHPSEIKGFSKKENSEDGWTQEPNPGQAKDNLGEAASRVSEQQDRRSGASSLELGETKRNSRQAKKLWMYTGQQQQW

SEQ ID NO: 141521 - protein, 391 aa, Oryza sativa
  Clone ID: PAT_MRT4530_42616C.1.pep
MLMQVESGSEAAAATAAAVLTAPLSLEGGLAAELRPANLVQRVLSLFRNVRPGSDLSHFQLPATFNLPKSQLQLYGEGVYCVGKDYLRRCAKGSDAVERFAAVVGWSISTTRPPIFGFAPYNPVLGETHHVSSGSLHVLLEQVSHRPPVSALHATDDDGEIELVWCQNPIPKFHGTSVEATVKGMRHVKLLKFSENYEIDCPNLLIRLLPAPSAEWSGTVRIVCKESELEAELIYYRSNAFLGLGGDPRCVKGKIFSSRSGEIICEIDGHWDRIVSAKDAKTGKVSVLYDAESAIADLKTPVVRNQEGVSPSESVVVWGEVSDAILKKDWERSSQAKRRVEDTARRLDRERNDKGEVWIPKHFSLSQDKNGSWECSPLEKSVPPAPIIVPS

SEQ ID NO: 141522 - protein, 167 aa, Oryza sativa
  Clone ID: PAT_MRT4530_42617C.1.pep
MPLGHALYSARSLLRVDSLRESSSRLYLGPRGSSRARDLAPRKHKSALAQYSTGPCHCTVRGLRQFIEHLACEIEVIVSKPTKQTLPAIPAGKAEARLLLPCPVPCRAQAPTTAAAVGHGQPNTAALCPILTKPDSRSLPPLPPPCAKPTPLPPSAKPLTRCLLGAP

SEQ ID NO: 141523 - protein, 115 aa, Oryza sativa
  Clone ID: PAT_MRT4530_42618C.1.pep
PMFIKVDKSVVLCIRSRPLLPHHPRQGEGRRGRRKACLISGPSVVRHAHVHRIGVLWLMHCARCHLASATLYSPAVRRLQRTRDRQRVFGAQIEEAALSSSHVLHLRYRACLPFS

SEQ ID NO: 141524 - protein, 179 aa, Oryza sativa
  Clone ID: PAT_MRT4530_42619C.1.pep
FVKSAEREAEARLKTKQFAIWLDSKNSLQPRVHERSTAAGAVWAMSRRRCPARSSGKQAVAFDELVALRRGARLEAGQPASRRRARQSRRPAPSRHSEDQEVASLSPARVQAGVQGGKAGRKRHCAADPLWAVAGSGIVATTQLIDGLIEDLKLEIGKLLTSNLYLYLYLYLYYLYIKK

SEQ ID NO: 141525 - protein, 361 aa, Oryza sativa
  unsure (1)..(361): unsure at all Xaa locations
  Clone ID: PAT_MRT4530_4261C.1.pep
ACWSETTGGGGSPKEAVVXMPSAASGDATLGRHLARRLVQVGVSDVFAVPGDLNLTLLDHLIAEPGLRVVGCCNELNAGYAADGYAWARGVGACTVTFTVRGLLLHGRRRRSHRFWNQVTGDEAXGAAFRNQERAGAAPSLPSAVARRSGSVVVGGGXASPSSPPSPSSETTASWDRHAVCSEPVALTNLNFKQEGNNVESAAAGCPEEPGHGCLVTVTTTRGRRATTSAATAADARGRALLASWRRGRRVMSARPPLLVGLWLVSSPYGDVDLLVETPTPAGPWHAARGEVKLSIAFAAAAPSLVSKYAPPRCHPSRMWGHLAIANRPSSRPCVRVRREVATTGTTGMEARVAPHTLSAA

SEQ ID NO: 141526 - protein, 115 aa, Oryza sativa
  Clone ID: PAT_MRT4530_42620C.1.pep
LNTKTRFVCRINHLKISGVPRRLKWHQQIGSMISEFRIYVQEAIERYERYDLHSCTLAKLFYNKFGGRFDCRAFIQVPQKPNMKRLFCDIISQVQQNNPHEDCKELELIDNIRRH

SEQ ID NO: 141527 - protein, 153 aa, Oryza sativa
  Clone ID: PAT_MRT4530_42621C.1.pep
MISEFRIYVQEAIERYERYDLHSCTYRQRYASVSYVLSTPYEQTADLVIDGRTSKFIKWLANDGDPKLKMVSIVGCGGIGKTTLAKLFYNKFGGRFDCRAFIQVPQKPNMKRLFCDIISQVQQNNPHEDCKELELIDNIRRHLQDKRCCYFLK

SEQ ID NO: 141528 - protein, 41 aa, Oryza sativa
  Clone ID: PAT_MRT4530_42622C.1.pep
KISNCPALKCKYYMICDRIGQIDMTNFSYKRNVTRPNSIQL

SEQ ID NO: 141529 - protein, 61 aa, Oryza sativa
  Clone ID: PAT_MRT4530_42623C.1.pep
IASKAVSFEKVQRNTAFSRAFFLALPRAETSVVFFLYLKLLARCCFTLVFFLYCTVQCSAT

SEQ ID NO: 141530 - protein, 162 aa, Oryza sativa
  Clone ID: PAT_MRT4530_42624C.1.pep
SSSYTIVPQPQNQISSVPQLSKPATIGHSVVLTSVLSYVAAESVWDPRGPHMSGCHISLLSSSLFPSSLPSSSLSLSPFSDSASGRRRASAASEGRRGGGGRSGSRAPPSAPAHEAHVVEALPVGTAQRERGEGDGRRAAEGATHGAAEVPVAQARDARTPA

SEQ ID NO: 141531 - protein, 109 aa, Oryza sativa
  Clone ID: PAT_MRT4530_42625C.1.pep
SSYAAMPLGIPPGSCPAWYARWGRNPFAVCWLTRLAPQASLLWLPAPMVCAAASRLPGPAGFCYLLGFAFLLFVSLWGPRVRLLLPVRVSPVVPRVRRSLGNVRFQFRS

SEQ ID NO: 141532 - protein, 160 aa, Oryza sativa
  Clone ID: PAT_MRT4530_42626C.1.pep
MRLYQSLGQYRKPDGLGIVSLKIDWIIERYQLPQSYQRMPDFRRRFLQVCVNEINSRTPMRLSYIRETCRASCINESANAREAVCVLGALPLRSLTRCARSFGCGERYQLTQRPALPAYKNDLSQSGEPEDIRYRVPWSSRRSVRLAYGTVASLWKRRFI

SEQ ID NO: 141533 - protein, 51 aa, Oryza sativa
  Clone ID: PAT_MRT4530_42627C.1.pep
KIFPSGLCLASCSIKPRCPFSEFCTFTWSWNLWVMLLEKNCVFLLMIKHPP

SEQ ID NO: 141534 - protein, 123 aa, Oryza sativa
  Clone ID: PAT_MRT4530_42628C.1.pep
IQNFIPLPNTCLICIWHDNASSKTQDMPIFVYLGNLRVAARMSSEGRILQRPAEPDTSSILLLLCTYDCRLTLYTSPFSFVWQQSAAVLYAPWHYGYPQLKARYSLGSDPIRQACMLTLILSG

SEQ ID NO: 141535 - protein, 142 aa, Oryza sativa
  Clone ID: PAT_MRT4530_42629C.1.pep
RNWRILRKGGGNPGEKDLVEGEKDKLWLEILIVEQKHSMYELEVKRLKLELGALAEAKETAMNSFETEKIKFIMDVEDLKRKIEEIQVGKEATEEVGRDKDAEADRLRAELMKIGVSLSQMQASYNELDGKNSHLNDEKNSI

SEQ ID NO: 141536 - protein, 328 aa, Oryza sativa
  unsure (1)..(328): unsure at all Xaa locations
  Clone ID: PAT_MRT4530_4262C.1.pep
MQKVRLKWVKNRGLDHIIARTTSIRASCLLLDHLARLPSSSPVPARSLARLQKPLGLTVPVLRFLRRHPTLFAETLHPRFPTLPSFSLTPASDILLGRLARASALDSHLRLARLLLLTRSKSLPLASVLPLRFDLGLPYNFAAAFPVAHPDLFAVSNNHISXVRYRLRPPRGHRHLLPPAPPRRGHRGSEMVRRNAIRLLRXELGLPHKFTRLFTRYPGVFYLSLKCKTTTVVLREGYERGKLVEQHPLAAVRDKVFYVMRTGVLFRGKGLSKLVLDEDGDEEVVMDGDEEFHGEGMDEDADVECFGMDIGGYEDNTDDEDNERDMYD

SEQ ID NO: 141537 - protein, 27 aa, Oryza sativa
  Clone ID: PAT_MRT4530_42630C.1.pep
KNTTLALVPSLAGPPPRPVHPSLARST

SEQ ID NO: 141538 - protein, 82 aa, Oryza sativa
  unsure (1)..(82): unsure at all Xaa locations
  Clone ID: PAT_MRT4530_42631C.1.pep
MAPTVMVYSVTFVAPFQGLKSTVRLPRSRRFTNLGFGNXVSNGGRIMCMQAWPIEGIKKFETLSYLPPLTVEDLLKQTEYLV

SEQ ID NO: 141539 - protein, 81 aa, Oryza sativa
  Clone ID: PAT_MRT4530_42632C.1.pep
HARVVSLDPLERRLWEGSFEAAAAARRRAGLAGGRALGGLAPNVGRGGRGAGRCYWILIKRSVIIPATGSFAPHGFSTKTR

SEQ ID NO: 141540 - protein, 37 aa, Oryza sativa
  Clone ID: PAT_MRT4530_42633C.1.pep
TERLDNSTFSGFIEPYFYGSENTEQGPLYYLRRHRLT

SEQ ID NO: 141541 - protein, 65 aa, Oryza sativa
  Clone ID: PAT_MRT4530_42634C.1.pep
EHTASAGSLPHVTASRPVVSTALGTPQSAGSSTEIRLPGDEFTQHAQHRYHHQHNYIQLIYYCYY

SEQ ID NO: 141542 - protein, 283 aa, Oryza sativa
  unsure (1)..(283): unsure at all Xaa locations
  Clone ID: PAT_MRT4530_42635C.1.pep
GTFQTSFYPTICIVVNFFQNRAHYIVHTFSNDLFENACMEFDEDNLKPTFRILWGIPDVICSVLHMXGRSNAINIAERLGLPSDIIESSRQLLGTAGAEINALIMDMENFKQQYQHHLQEARFPRAPAKELHNNLEVAQKNIIDHTSAQRNXQARVISEYAVMARSIIRKKFQQFRESAIAKRVLEEEKAVQNDKPERLKDPEPTSTPAVKKAQNTNISMATTTEGEDNGIPEVGDLVYVPKLKNEATVVKIDSSKNEVQVQAGIMKLKLKFKDVKIQKRISR

SEQ ID NO: 141543 - protein, 287 aa, Oryza sativa
  Clone ID: PAT_MRT4530_42636C.1.pep
FIASSSEYDVDVVDDCKGDEAGNQKAVVVADPTAFNLGAAMLNDKFLMPASMKEEATDVEFIQKRSASGAEPELMLNNRVYTCHNVQCPHSDYGYGFLDRNARNSHQYTCKYNDPLQQSTENKPSPPAIFPATYNTPNQALNNLDFGLPMDGQRSITELMNMYDNNFVANKNLSNDNATIMERPNAVNPRIQIEEGFFGQGSGIGGSNGGVFEDVNGMMQQPQQTTPAQQQFFIRDDTPFGNQMGDINGASEFRFGSGFNMSGAVEYPGAMQGQQKNDGASEFEELE

SEQ ID NO: 141544 - protein, 115 aa, Oryza sativa
  Clone ID: PAT_MRT4530_42637C.1.pep
FLVLPFLVVLMRSFCLIRICSSSQVAPEGILPSPSPQVRDPLIHPPCLSSPLLAQDPHIPQENMWFVGGDVSDEHAPVSARGIGVGCTTGRRSAGRRRHRYMYGPGREGGGVHDK

SEQ ID NO: 141545 - protein, 418 aa, Oryza sativa
  unsure (1)..(418): unsure at all Xaa locations
  Clone ID: PAT_MRT4530_42638C.1.pep
RDRNGPAAVVKYHADNAVPGFESELASGTGSPHSLQELQDTTLGSLLSALMQHCDPPQRRYPREKGVPPPWWATGDEEWWPELGIPKDQSPPPYKKPHELKKAWKVSVLTAVIKHMSPDIEKMRRLVRQSKCLQDTMTFXEISTWLAVVKQEEELYLKLNPGARPPAPTGGITSAISFNASSSEYDVDVVDDCKGDEAGNQKAVVVADPTAFNLGAAMLNDKFLMPASMKEEATDVEFIQKRSASGAEPELMLNNRVYTCHNVQCPHSDYGYGFLDRNARNSHQYTCKYNDPLQQSTENKPSPPAIFPATYNTPNQALNNLDFGLPMDGQRSITELMNMYDNNFVANKNLSNDNATIMERPNAVNPRIQIEEGFFGQGSGFGGSNGXLFEDVNGMMQQPQQPTPEQQHDVSRIHTGSS

SEQ ID NO: 141546 - protein, 80 aa, Oryza sativa
  Clone ID: PAT_MRT4530_42639C.1.pep
ERRAAAAVGFPPVRMPMPTGAASPTQEHRRRPFAGTCRLLAGAGPRRTRRHAAMTEQETTPVRVQLQHCGSVLIGVLCNH

SEQ ID NO: 141547 - protein, 204 aa, Oryza sativa
  Clone ID: PAT_MRT4530_4263C.1.pep
MASVVLKDLNKRLLGLSCSSAASTSIVLSGHSPPHLRDPARTSNSSKKKKTKANKSKQQLVSPASSSRFLLNSSRMQPSADELPPPFVIPVAVAAAAEENEIVAAAVEGGGGEEEKRESSSQVEVVVLRVSLHCKGCAGKVKKHISKMEGVTSLDIDIATKKVTVVGHVTPLSVLTAVSKIKPAQFWPISSSSSPMPPRASASF

SEQ ID NO: 141548 - protein, 94 aa, Oryza sativa
  Clone ID: PAT_MRT4530_42640C.1.pep
MSGLKAKRRWGEGFGSPAPAAVASEENRVVSVADGDKLELVVGYTVKLALRVAPDRLALAHRVTQAGSSRHEPSKRLALPSSPPPLESQTWGFP

SEQ ID NO: 141549 - protein, 44 aa, Oryza sativa
  Clone ID: PAT_MRT4530_42641C.1.pep
FFCYKYGIHPRGRANPKVRKQHMRLPLHALLKLTLTDGSHAESV

SEQ ID NO: 141550 - protein, 139 aa, Oryza sativa
  unsure (1)..(139): unsure at all Xaa locations
  Clone ID: PAT_MRT4530_42642C.1.pep
MPLRLDIKRKLAQRSERAKSVDLHPTEPWILSSLYSGSVCIWNYQTQTMVKSFEVTELPVRSSKFITRKQWVVAGADXMFIRVYQLQXTWDKVKVFEAHXDYISVWAVHPTQPFVLSSSDDMLIKLWDWXKGWMCTQIF

SEQ ID NO: 141551 - protein, 257 aa, Oryza sativa
  Clone ID: PAT_MRT4530_42643C.1.pep
MAPCLLLVLFLLPALATGHQHPSTLGSSALSEWRSAKASYYAADPEDAIGGACGFGDLGKHGYGMATVGLSTALFERGAACGGCYEVKCVDDLKYCLPGTSIVVTATNFCAPNFGLPADAGGVCNPPNHHFLLPIQSFEKIALWKAGVMPIQYRRVNCLRDGGVRFAVAGRSFFLTVLISNVGGAGDVRSVKIKGTESGWLSMGRNWGQIWHINSDFRGQPLSFELTSSDGKTLTNYNVVPKEWDFGKTYTGKQFLL

SEQ ID NO: 141552 - protein, 807 aa, Oryza sativa
  Clone ID: PAT_MRT4530_42644C.1.pep
MAMAVMLAAAQVGYQAECVWWLDQRKLAQRSERAKSVDLHPTEPWILSSLYSGSVCIWNYQTQVCKLFRAKQEETMVKSFEVTELPVRSSKFITRKQWVVAGADDMFIRVYNYNTMDKVKVFEAHTDYIRCVAVHPTQPFVLSSSDDMLIKLWDWDKGWMCTQIFEGHSHYVMQVTFNPKDTNTFASASLDRTVKVWSLGSPDPNFTLDGHSKGVNCVDYFTGGDRPYLITGSDDQTAKTALVVPFLSIIVLDPFNLTVDWNNTLLVSYRLENTLNYGLERVWALGYMKGSRRVVIGYDEGTIMIKIGREVPVASMDSSGKIIWSKHNEIQTVNIKTIGADNEIADGERLPLAVKELGTCDLYPQSLRHNPNGRFVVVCGDGEYIIYTALAWRNRSFGSALEFVWSLDGEYAVRESTSRIKIYSKNFQERKSIRPPFSAERIFGGVLLAMCTNDFICFHDWAEGRMIRRIDVNVKNLYWADSGDLVTIASDTSFYILKYNRDVVSSHLDGGGSVGEEGVEDAFELLHEINERIRTGLWVGDCFIYNNSSSRLNYCVGGEAIAIEAQSESKWRQLGELAMSTGKLDMAEECLLHAMDLSGLLLLYSSLGDAEGLTKLTSMAKEQGKNNVAFLCFFMLGKLEECLQLLIESNRIPEAALMSRSYLPSKVPEIVTLWKKDLQKVNPKAAESLADPNEYPNLFEDWQIALNVEANVAPKRGIYAPAKEYIIHAERPNETLVEAFKNMRIHQEEVLPDENGDDTHEAIEENGVEESQEDAVEVDVEADGSTDGTVLVNGNDTEEQWVLTPDQ

SEQ ID NO: 141553 - protein, 56 aa, Oryza sativa
  Clone ID: PAT_MRT4530_42645C.1.pep
RCSKIPNAGFLVFLFHPFVYISFSPQDAVAIAHWTNAQMSSVIRSSIPDFQKKKKK

SEQ ID NO: 141554 - protein, 207 aa, Oryza sativa
  Clone ID: PAT_MRT4530_42646C.1.pep
TSITSIYTHVHKLVSQVLFLNKMRIDERFKKVKNLPDLSIMIVETKLHNRHEIIYKLLKLVIVLPVAIASVQIIFSAMNYVKNKLRNRLGDQYLNHCLVTFIEREMFLKVKDLSVLTYCEPLIFFYYELFFVKREYPTSKCWLRHCFYYSSLLLHASCREQCCELICQALHSRRRNCRFSTHVGFTQWRQIRGSLVRWRHAVMTSYS

SEQ ID NO: 141555 - protein, 1032 aa, Oryza sativa
  Clone ID: PAT_MRT4530_42647C.1.pep
MPLRLDIKRKLAQRSERVKSVDLHPTEPWILSSLYSGSVCIWNYQTQVCKLYRVIKQEEETMVKSFEVTELPVRSSKFIARKQWIVAGADDMFIRVYNYNTMDKVKVFEAHTDYIRCVAVHPTQPFVLSSSDDMLIKLWDWDKGWMCTQIFEGHSHYVMQVTFNPKDTNTFASASLDRTVKVWSLGSPDPNFTLDGHSKGVNCVDYFTGGDRPYLITGSDDQTAKVWDYQTKSCVQTLEGHAHNVSAVCFHPELPITLTGSEDGTVRLWHSTTYRLENTLNYGLERVWALGYMKGSRRVVIGYDEGTIMIKIGREVPVASMDSSGKIIWSKHNEIQTVNIKTIGADNEIADGERLPLAVKELGTCDLYPQSLRHNPNGRFVVVCGDGEYIIYTALAWRNRSFGSALEFVWSVDGEYAVRESTSRIKIYSKNFQERKSIRPPFSAERIFGGVLLAMCTNDFICFHDWAEGRMIRRIDVNVKNLYWADSGDLVTIASDTSFYILKYNRDVVSSHLDGGGSVGEEGVEDAFELLHEINERIRTGLWVGDCFIYNNSSSRLNYCVGGEAIAIEAQSESKWRQLGELAMSTGKLDMAEECLLHAMDLSGLLLLYSSLGDAEGLTKLTSMAKEQGKNNVAFLCFFMLGKLEECLQLLIESNRIPEAALMSRSYLPSKVPEIVTLWKKDLQKVNPKAAESLADPDEYPNLFEDWQIALNVEANVAPKRGIYPPAEEYIIHAERPNETLVEAFKSMHIHLEEVLPDENGDDTHEAIEENGVEESQEDAVEVDVEADGSTDGAVLVNGNDTEEQWGRDTTAYHRLEKLFAWTGLKTDVNFIKQCQVCQHAKSEHCKLPGLLVPLHVPKEAWMDISMDFVEGLPKSDGYSVILVVVNRFTKYAYFIPLRLLLTSGIIGSILPNIDITLLLTPPWAVHHIKHSLSSMVNRPYPKLAFKFFGPSKILEKVGTAAYRLGLPDHSLVHPVFHVSQLKPHVPAHTPVFGSLPTLVVLDAVEVVPAEILNRRLVKKGNAARMLLMCKC

SEQ ID NO: 141556 - protein, 428 aa, Oryza sativa
  Clone ID: PAT_MRT4530_42648C.1.pep
RPRVRPRVRPRVRVSSHLDGGGSVGEEGVEDAFELLHEINERIRTGLWVGDCFIYNNSSSRLNYCVGGEVTTLFHLDRQMYLLGYLANQSRVYLIDKQFNVVGYTLLLTMIEYKTLVMRGDFDRANALLPSIPKEQHDSVARFLESRGMLEEALEIATDSNYRFDLAVQLGRLEVAKAIAIEAQSESKWRQLGELAMSTGKLDMAEECLLHAMDLSGLLLLYSSLGDAEGLTKLTSMAKEQGKNNVAFLCFFMLGKLEECLQLLIESNRIPEAALMSRSYLPSKVPEIVTLWKKDLQKVNPKAAESLADPDEYPYLFEDWQIALNVEANVAPKRGIYAPAKEYIIHAERPNETLVEAFKNMRIHQEEVLPDENGDDTHEAIEENGVEESQEDAVEVDVEADGSTDGTVLVNGNDTEEQWGTNNEESLA

SEQ ID NO: 141557 - protein, 147 aa, Oryza sativa
  unsure (1)..(147): unsure at all Xaa locations
  Clone ID: PAT_MRT4530_42649C.1.pep
RIPLPTTPIQPELWTMFFDGSLMKTGAGAGLLFISPLGKHLRYVXLRLHFPASNNVAEYEALVNGLRIAIELGVRRLDARSDSXLVIDQVMKNSHCRDPKMEAYCDEVRRLEDKFLGLELNHIGRSYNETVYELAKIVSGRTTVPPD

SEQ ID NO: 141558 - protein, 396 aa, Oryza sativa
  Clone ID: PAT_MRT4530_4264C.1.pep
MCGGAIISGFIPPSAAAAAAAAAAKKQQGRRVTADVLWPGMLRKGKAAAAEEDFEADFREFERGMSDDEAEGGGGEEEEDDDDVVVVVPPPAAARFVVRAAAKAAPPTADGMLTTKLVQHDGPTARSAKHKRKNQYRGIRQRPWGKWAAEIRDPSKGVRVWLGTYNTAEEAARAYDAEARKIRGKKAKVNFPDEPAVAQKLSLKQNAAKQEKLAPPLKTCGDDAFFQLNSSDNDLFAMLAKVPAKPAEPVDLMPPVKPLASTETFEMNMLSDTSSNSFGSSDFGWEDDTLTPDYTSVFVPNAAMPAYGEPAYLTGGAPKRMRNNYGIAVPQGNGMPNLAQNMPTFDPEMKYLPLPYVESSSDESMDNLLQNDATQDGASNEGIWSLDELLMAAGAY

SEQ ID NO: 141559 - protein, 93 aa, Oryza sativa
  Clone ID: PAT_MRT4530_42650C.1.pep
MRMSKLSMATAVILLLVVMAMEVEGIRLDAETRAATSNQMVNKSTENVPKDSGDSLGEAKRSIAGNEVRAVAHKLPEFHEDYYGPSDHTPRHH

SEQ ID NO: 141560 - protein, 109 aa, Oryza sativa
  unsure (1)..(109): unsure at all Xaa locations
  Clone ID: PAT_MRT4530_42651C.1.pep
MADIALLVTEEFERKLKRGAPGEEGAAAESRRNFGAVIKVCSSWVDAAAAAAXRRGDGQRRAAQRRPQVRARRRRHGRRLLRLVASQFFLFCSSSFLLKKKDKLIRRRN

SEQ ID NO: 141561 - protein, 50 aa, Oryza sativa
  Clone ID: PAT_MRT4530_42652C.1.pep
TLALTTGHNITRLLPDQSLIVQPNKWCQGLLNLSSILQVQHYHYTNGFIF

SEQ ID NO: 141562 - protein, 110 aa, Oryza sativa
  unsure (1)..(110): unsure at all Xaa locations
  Clone ID: PAT_MRT4530_42653C.1.pep
AFVHIQLEKIPVVYXLKRYTMKANSDKCDRETAGPDGVHENYITNMMMIEAFGVMRAACKSKVAYERAMVILKELRRQVEEVPQDIQVVVCVLSLNRSRQGRTVSRGNQG

SEQ ID NO: 141563 - protein, 344 aa, Oryza sativa
  Clone ID: PAT_MRT4530_42654C.1.pep
LQDRGQQQQQVVVVVVVAAAAAAAMVPARSRLFHHDSSSSSKRGGGNSSSSCTPQYCIATQLDAAAAAAPARRRHHHHHQLAMAPPEDDAAAGTSSRGGGAGDDDDGDKDWLQLGLAAAAPTATAPAAAAAPSSSTPTAPELDVFAAKQYNGRPPLFPLPILRSYHHHHHHQYGHGGGRCPPPSFFPFARPLRSSGDLPGVMRVISPPRRAAAADAAGLWLTLQASPDQFREPILPQIPKSYLRIKDSNMKVEVVMKYLAGKLGLTQSHLQVQLTCRGQLLPPFLLVKNVRDSIWCSSLRPSCREDDDGDGEDDLVELHRRSPAAAATTDHVMALVYSTSSSCH

SEQ ID NO: 141564 - protein, 113 aa, Oryza sativa
  Clone ID: PAT_MRT4530_42655C.1.pep
EKLFLVGVTIEFFFKHNLAHKTTTKKFPHDEIGGGNITNSTWINPVGRKLFISYKIRLIIGGQPEGGGDHEALFFELSLGTRGPVEVAHFHHGGGELDLEHLFDGGGELGDPG

SEQ ID NO: 141565 - protein, 74 aa, Oryza sativa
  Clone ID: PAT_MRT4530_42656C.1.pep
SLLEVHLFDHGLLLAPQSGEPHDARVYKLETDACYHKPEASSDKKKDKLKKSVVPVTKLSSIYLSSYHKLETDA

SEQ ID NO: 141566 - protein, 97 aa, Oryza sativa
  unsure (1)..(97): unsure at all Xaa locations
  Clone ID: PAT_MRT4530_42657C.1.pep
MNQTVPEPYLTPQRGSGGGSTVEEKGAAAATALASGGGGRLGAGSAGEETGVTGSGGPGLLTRRSGGSLGGSGGXSTVEERELRRRRRTRAQEAPRA

SEQ ID NO: 141567 - protein, 256 aa, Oryza sativa
  Clone ID: PAT_MRT4530_42658C.1.pep
MPSELGLLKNLQGLDFSQNKLTGEIPISIGGCQSLEFLLVSQNFLHGSIPSTMNKLTGLQELDLSSNNISGIIPVFLGSFIGLTYLNLSFNNLIGEVPDDGIFRNATAFSIVGNKLSIATDVGSAVEYLHDYKPVPIVHCDLKPSNILLDSDMMAHVGDFGLARFTNQGDNNASQVSSSWAAFRGTIGYAAPGYARTKHVSMTIDNDKRCSCPSPGNKERLGISSNILAARRRMAMASARVADLAVPPSGGPDPPP

SEQ ID NO: 141568 - protein, 975 aa, Oryza sativa
  unsure (1)..(975): unsure at all Xaa locations
  Clone ID: PAT_MRT4530_42659C.1.pep
MLKAPTANTASNSSDRQVLLSFKSLITKDPSGALTSWGNRSLHHCRWQGVMCGKRGRRRGRAIAIDLNNLGLAGSISPSISNLTYLRKLHLPQNHLVGTIPPSLGGLPYLSTFILARNKLVGNIPPSLGNLSSLTELNFARNYLTGIIPHSLGNIYGLHSLRLTENMLTGTIPSSLGKLINLVYIGLQFNNLIGEIPLLLFNLSSLQKLDLQNNKLSGSLQNYFGDKFPLLQGLALNDNKFHGPIPLSLSNCSMLELIQLDSNSFSGTIPSNLGNLKRLSKLRLDYNKLEANYNSDWDFLNALTNCTQLXVLQLSFNRLRGVLPHSLSNLSISLEHLAILNNEVGGNIPEGIGRLSNLMALYMGPNLLTGSIPASLGKLSKLNVISLAQNRLSGEIPPTLGNLTQLSELYLSMNAFTGEIPSALGKCPLGVLALAYNKLSGNIPKEIFSSSRLRSISLLSNMLVGPMPSELGLLKNLQGLDFSQNKLTGEIPISIGGCQSLEFLLVSQNFLHGSIPSTMNKLTGLQELDLSSNNISGIIPVFLGSFIGLTYLNLSFNNLIGEVPDDGIFRNATAFSIVGNVGLCGGIPVLSLPSCTNQQAREHKFPKLAVAMSVSITCLFLVIGIGLISVLCKKHKSSSGPTSTRAVRNQLPRVSYTELSMGTNGFSSSNLIGEGRFGSVYKANMSFDQYSVVAVKVLKLQERGASHSFLAECEALRYLRHRNLVKILTACSSIDPRGHDFKALIFEYLPNGSLEKWLHTHIDEQSDQSVLNIYQKLSIATDVGSAVEYLHDYKPVPIVHCDLKPSNILLDSDMMAHVGDFGLARFTNQGDNNASQVSSSWAAFRGTIGYAAPEYGIGNEVTTSGDVYSYGIILLEMFTGRRPTEQNFEENTNLHRFVEEALPDSVEDVVDQNLILPREDTEMDHNTLLNKEAALACITSILRVGILCSKQLPTERVQIRDAVIELHKIKEKFFP

SEQ ID NO: 141569 - protein, 241 aa, Oryza sativa
  Clone ID: PAT_MRT4530_4265C.1.pep
MAGAVKRMVDNSYHDVMESIQAEESAAESARNRLLAVSTLLEQQRGALEVVSGRMASWAIREVEMSAITAELLLLDDVAAGACDAAARLRGIKTTLELVKLIKADDVTLTLATDDLEHYALKQPGDATFAPAPSPEELDEAMKHAEAAQEHVLRCCARVRAVVRCFQGVERVGVAGAEQGGVIAEGELGVAHESLDAAVGELLKAEAAAAASTANARNVSARKQNATVPDPPIPVIDIDSD

SEQ ID NO: 141570 - protein, 41 aa, Oryza sativa
  Clone ID: PAT_MRT4530_42660C.1.pep
IRYAVLGFTCPAVCDKFATYYTGVSDHKRPIYDPVVLIPPV

SEQ ID NO: 141571 - protein, 53 aa, Oryza sativa
  Clone ID: PAT_MRT4530_42661C.1.pep
SHTLKINIRIIQIGTSLSGCRPLPAVAVLNYSDGTRYHLLRIKFLLKLSIKRY

SEQ ID NO: 141572 - protein, 33 aa, Oryza sativa
  Clone ID: PAT_MRT4530_42662C.1.pep
MSYLSAENLAGASPEPTRHGPISHWAVRPVPGS

SEQ ID NO: 141573 - protein, 75 aa, Oryza sativa
  Clone ID: PAT_MRT4530_42663C.1.pep
ARAIPRAGITWSRERPSLACTLAVVAAILGGSRDAAHGGGGGGSSWLLHDRDNQPGIVPGLHVPELDSILAVLLH

SEQ ID NO: 141574 - protein, 438 aa, Oryza sativa
  Clone ID: PAT_MRT4530_42664C.1.pep
MAASPMLSTSCPPPMTAGYLLLGLHEDGRLPALLDTERLLPSLNDNCRQLLGLHDDGRLLALLDAEHLLLALYDRWPPPTRHPLPPAAASTSSFFAAEMSKQHDMSISGGTSGATSGQNPRTQNHLPTTRQVITVVDESEKVWEEFFGLKSIQEFGNEHPHRPGTTGYIEKEEIWAQEDDATAAANVPIPFTDISEVLARNWARPSGKVNQDDTITFPKQNDATVYQQLKRKISIEEMDACMKEPFKEVIQELKQDMDARDVALCILVVRVTPTFLSEVAKGMAYIPSSIERVHNVDLMAGYAKLIRSNIRSIHESMDSCACDSEHQNVEEVFFLGYFAGKPAKPNDKEQQAGDEETQAVDAQTPGDYFLGPPANLQQQPAAKQSADQNRSSTTLVKVTCDGPKPSPLTVLGLVSDQWSLVSPVTFDGWPAVSGDIHL

SEQ ID NO: 141575 - protein, 96 aa, Oryza sativa
  Clone ID: PAT_MRT4530_42665C.1.pep
MSQHYSSNRSIVANWVPSTRAASHSRTSPCAAASSSPPRPPSPPAQPRHRRAASPAAAEPCLAPPPMASPLAPAWPPQAPAASRPSWPAPPLSATP

SEQ ID NO: 141576 - protein, 240 aa, Oryza sativa
  unsure (1)..(240): unsure at all Xaa locations
  Clone ID: PAT_MRT4530_42666C.1.pep
MSNVGLITKNIAQLTHNRGHGYSNSFTLIRGVPLYPQDAIPXMSPCALAPPRYLGXNCDNTPRTTQLTTVHRSWIIISPSKPKAMDSPATPMDFSPLHSLVPRNESCYTKVIGDDLAGARGLGRTFGGHLRVEENNAISPVLTNATNDHGWRPATSLCGGGGSVDGGGGSPATGGDGEGXAELPLFHAHPTAAXGGGGDGXNDGARRLFAGRRRRRFGWRGGGTTRHERAREMGQTKEGD

SEQ ID NO: 141577 - protein, 476 aa, Oryza sativa
  Clone ID: PAT_MRT4530_42667C.1.pep
MAHLRQLHAALVKSGLARDPIAASRAVAFCAGDGRDAAYAARLVRHHPRPNAFMWNTAIRALADGPGPGAAVALFVDMLGSPTPPERRTFPSLFAAYARLGRAGDGAGLHGMVVKLGLGGDAYVRNSVIAMYASRGAADEAIALLARCEAFDAVACNSAIVALARAGRVDEARAVFDGMPARTVATWSAMVSAYSRDSRCHDAVELFSAMQAEGVEPNANVLVSVLGCCASLGALEQGAWVHAYIDKHDVAMNALVVTALVDMYCKCGDIRKAREVFDASRSRGQAKLSSWNSMMLGHAVHGQWREAAALFSELRPHGLRPDNVTFIAILMAYGHSGMADEAKAVLASMASEHGVVPGVEHYGCLVDALARAGRLREAEGAIAAMPVAPDAAVWGALLSGCRLHGDAEAAARAAREAVRCDPRDSGAYVLAASALARGGEARRGAAVRGRMREEGVGKVPGCSMIEVDGVVHEFVS

SEQ ID NO: 141578 - protein, 135 aa, Oryza sativa
  Clone ID: PAT_MRT4530_42668C.1.pep
MASKVVFFAAALMAAMVAISGAQLSESEMRFRDRQCPAEGPDKPLDPCPQVLHPQLTRPEKVQPMVRRPGALGLAMQCCQQLQDLSRECRFAAIRPMVRSFQESMPMPLEQGLSSSSSEYYRGEGSSSEHGYYRE

SEQ ID NO: 141579 - protein, 80 aa, Oryza sativa
  unsure (1)..(80): unsure at all Xaa locations
  Clone ID: PAT_MRT4530_42669C.1.pep
SLPFMRRHCRRRRPRLPPLRRRRISRLAATDPRRRLALNXSPSPSSHPTSSRIPRLPPLFSFPQLLPLSTSHNRRLDRSA

SEQ ID NO: 141580 - protein, 79 aa, Oryza sativa
  unsure (1)..(79): unsure at all Xaa locations
  Clone ID: PAT_MRT4530_4266C.1.pep
LSNPRSLTLVLLKAPPPNLVCFSVSILNILXFVFFRVXKLCFIFKIPTRPPTRPGRPFFFFFFFFFYRQKKDLHNSKSC

SEQ ID NO: 141581 - protein, 98 aa, Oryza sativa
  Clone ID: PAT_MRT4530_42670C.1.pep
RICAEFVFIVDAAGNSIILYILFKGNTVRGCNLSDLRHEGLFSLGGGNIRPSCAAPRIVHMGLDLPEGLPLFFLEWPGTDAWSVNILQVKTPLRGHIS

SEQ ID NO: 141582 - protein, 757 aa, Oryza sativa
  Clone ID: PAT_MRT4530_42671C.1.pep
MSKAGGTVAGGVGQQQERGGNGRKGSNPPSAMARTPSRSKGGAEDGRDGGEGRNGEAWGATAMGSMTIGAKYKTTLKDPGTTGVLRMNEDKFTFTPHDPRSAMKLNVDFRSIKGHKFNKVDGSKPAPPLLNLSKDSDKGGGYMFEFDNVTNRDLSRDFVAKVLGKQQGTIPPKPNVPPENSVTSTGEEQLSAAEMQRRMKLLQEDSELQKLHMKFVLGNILQESEFWATRKNLLEDEANKGSKQRPGFKSAMLADVRPSADGRTFTLVIAGDIDVISFFFLLLSQTNKVTFSLTTEIIHQIFAEKPAVHRAFLDFVPKKARSYPFVLYLHSLFRMYFRNFATAEAAEDEELAIFLKNDDILAKEARLKIKRVDPTLDMEADAGDDYIHLPDHGIIRDGSKETIDNDGELARRTLSQDLNRHAAVVLEGRSSDVELTDTKTVAEAIARSKKEPPSSSISDDTNHERLVKVARMTEIEDLQAPRSLPYAPLCIKDPREYFDSQQANALRSLGGNNDGRHARNCRLSTDDAFDHLLGQISSIKVNGLNYPVIQSDVALKKLMMKAAFEDHVDIQITCDWRVLNELNEGISRSRRLNLKNPQDSLLGQIPRRTRDELMDVQRIKDAMTQIYQKLQDIKESAQPDVRHEISQLVKPMTQCLIHSRHTLGWFVFITVPGPQPEALAHNLRRYGTTERLALVRSQERLMAGGRTYWDKALTKIFLDLCIAEKTKRNHNKKGRTNIGWQNLYRNFREQSGKYYDS

SEQ ID NO: 141583 - protein, 246 aa, Oryza sativa
  Clone ID: PAT_MRT4530_42672C.1.pep
EMQRRMKLLQEDSELQKLHMKFVLGNILQESEFWATRKNLLEDEANKGSKQRPGFKSAMLADVRPSADGRTNKVTFSLTTEIIHQIFAEKPAVHRAFLDFVPKKMSEKDFWTKYFRAEYLLRIKNTVAATAEAAEDEELAIFLKNDDILAKEARLKIKRVDPTLDMEADAGDDYIHLPDHGIIRDGSKETIDNDGELARRTLSQDLNRHAAVVLEGRSSDVELTDTKTVAEAFARSKIEPPFKFYF

SEQ ID NO: 141584 - protein, 129 aa, Oryza sativa
  Clone ID: PAT_MRT4530_42673C.1.pep
VLNELNEGISRSRRLNLKNPQDSLLGQIPRRTRDELMDHWAAIQELLQHFWSSYPITTSVLYNKVQRIKDAMTQIYQKLQDIKESAQPDVRHEISQLVKPMTQALDAAFNHDLEQQQKSSKSGNKPNGF

SEQ ID NO: 141585 - protein, 87 aa, Oryza sativa
  Clone ID: PAT_MRT4530_42674C.1.pep
MNRPSIINVLIVHEVQKFLVHTNFSSCRENNEPRKISPRIQSAAAVTRSVAHRNRGHRAAGDGWERGVQRRRWAASSNLTARTHART

SEQ ID NO: 141586 - protein, 967 aa, Oryza sativa
  Clone ID: PAT_MRT4530_42675C.1.pep
MASNHHSQSIFSAVLCSFGNCLQLNIAYAFKPEEVLVKLTEFNRRLEARSDDIKLMISMAGSKQQTCKHEVLDWLQTVELARTEVDAILQDYSKRSKHLISNFNISRRASDKLEELVDLYDRGSFEVVSVDGPLPSIEEKPIREKLVGMHLNVMKVLSYLLDAKIRLIGIWGMGGVGKTIFLKVINNQFLGVVDNMPFDHIMCVAAARGCVLENLQMNIAEKLGLLSKQGDSIESRAATIFNHLKNKNFLLLLDDLWEHVDLLEVGIPPPNESKIQKVVFATRSEEICCVMEADKRIKLECLQPDEAWELFKYSATEETICADMPIENVAKRVCAKCRGLPLALITVGRSMRAKRTWREWENALSTFDESTQLLEASEMKVINPILSTLRISYDNLENDQLKECFLVCLLWPEGYSIWTVDLVNCWIGLGLVPVGRTINDSHNIGLSRIEKLKRLCLLEEGDIKQSEVRLHDIIRDMALWIASDYKGKKDSWLLKAGHRLRNVLSCEVDFKRWKGATRISLMCNFLDSLPSEPISSDLSVLVLQQNFHLKDIPPSLCASMAALRYLDLSWTQIEQLPREVCSLVNLQCLNLADSHIACLPENFGDLKNLRFLNLSYTNHLRNIPSGVISSLSMLKILYLYQSKYSGFELELSKNITGRNDEFSLGELRCFHTGLSLGITVRSVGALRTLSLLPDAYVHLLGVEQLEGESTVSLKLQSTVTVVNFRMCLGVEELSIELDNGQDPEKSIPQLEYLTFWRLPKLSSVKIGVELLYIRMLCIVENNGLGDITWVLKLPQLEHLDLSFCSKLNSVLANAENGERRDASRVHCLSRLRILQLNHLPSLESICTFKLVCPCLEYIDVFGCPLLKELPFQFQPDNGGFARLKQIRGEEQWWNSLRWDGDATRNMLLPFYKVFDKNLETFEPALGTNPFVQASGSFFAHRKPMMRTAIQFSSYLSLLFGAQVASTN

SEQ ID NO: 141587 - protein, 111 aa, Oryza sativa
  Clone ID: PAT_MRT4530_42676C.1.pep
KQMGLPLTLFVSPSPEKIFSAPFFCFLSNPGFTSLPSVFLTFLRSFFLTCLFFHKILSRIKMLPPLVVKIFHPALINPNQFSRAILRKLHFFLFFVHPSCPFFFCAFFSWS

SEQ ID NO: 141588 - protein, 157 aa, Oryza sativa
  Clone ID: PAT_MRT4530_42677C.1.pep
MVTPAPLRGWDFSLGDSIRDEAWRCFGSPVHFSSHFSSSPFRLVVDVPRSTFRLTPSSVALYLRATIHGSPSGFQVQSLTDWSFSFVVMGWRRVVGARGEGSGRRGPLSRRTFLPTSCQLHPPRADTSEDNPTLSPAEDMLERTKLAQVPLTSSGFG

SEQ ID NO: 141589 - protein, 49 aa, Oryza sativa
  unsure (1)..(49): unsure at all Xaa locations
  Clone ID: PAT_MRT4530_42678C.1.pep
RXGLVFGADTIXAPXIHXKLSKWTEXXGDXFKPSXXXEXRXKRXLPLEL

SEQ ID NO: 141590 - protein, 84 aa, Oryza sativa
  Clone ID: PAT_MRT4530_42679C.1.pep
MGSRAGRVPTRRRPLGRERQAGRTAHASSGQVNPPNKIEDKIDTSDPPPPTNPQAARHPRPYRNRRQSTTSYRAKLGKVPRKCA

SEQ ID NO: 141591 - protein, 794 aa, Oryza sativa
  unsure (1)..(794): unsure at all Xaa locations
  Clone ID: PAT_MRT4530_4267C.1.pep
MMAPPLTVGLALTDSKSSTYALQWALSRFKFTKDDDAPIFLLIHVLTKLLTVPTPMGNHIPIDKVRTDVAXAYFKDVHHQAQQMLLLYKNMCHQNKVKAQVLLIQGNDVSQTVSTVVSDYQIKILIVGVTARTRKPFGNRTSSKICKNVPSFCTAYLVSKDGLSSLYSSSLESDLASSSKSDDLSDEMSSSSVTSNNSSDQSPFDSPRLLGSNLPSENPKNSSPAHRNRSLTLYDYLNGSTSIYPDKDRRVNSSTGTESSKPSELKGSNEVLRQESLLQGMLSDNKDHISTELEKLRLELRLIQGKHKLVQDESDDASRQASKVDLICYQRMAELAAKRMEEEAQLREIQSRLDKANDNVEKQKAHRYAAEQALNHVQDLVRGEVMQKNMLQVKASRDADKKLRLEKLFVLQGNSYSTFTWEEIDNATSSFADNLKIGSGANGTVYKGYLNHSAVAIKVLHSDDNSSNKHFRQELEVLGKIHHPHLVMLLGACVERGCLVYEYMENGSLEERLRCKSGTAALPWCDRLRIAWEVASALVFLHSSKPNPIIHRDLKPENILLDGNLVSKVGDVGLSTLVSSGSGGSSSTMYKKTALAGTLFYIDPEYQRSGQVSVKSDTYALGMVMLQLLTARAPIGLAEVVERAVEDGKLRDILDENAGWTWAMEEAQEMADLALRCLEMRGKDRPDLKTRVAVDLDRLKRRALPTQPPPEHFICPILKRVMQEPCIASDGYSYERHAIEMWVCDKDVSPVTNVRMPNKTLVPNRSLLTAITAWKSQGGRKPTNKFVTTSPNHL

SEQ ID NO: 141592 - protein, 85 aa, Oryza sativa
  Clone ID: PAT_MRT4530_42680C.1.pep
DVEAADCDQHESSMEIGWPTDVRHVDHVTFDRVHGFQGLHRQLQSEVVGNAHSACKTVFGVSTVSMHCSDDARWNSVPSILLLMQ

SEQ ID NO: 141593 - protein, 508 aa, Oryza sativa
  Clone ID: PAT_MRT4530_42681C.1.pep
MCTADGSVTLLAKRKGSPCQQEEDDNQDAKRMRNPRVSLPEDIWYHIHSLLPLRDAARAACVSSTFLYSWRCRPNLIFSKKTLGLNGNWRENVRELVNKVDHIMKNHSGIGLRTFGLQSYNLINTYYLDRWLNIAITPAIEELSLTQFPENNTKYYNFPCSILFNRGGNSIKHICLSHCAFRPTGGLNFLRRLHLGEVHITGDELECLLSNSFALEQLTLKYCKELNYLRIPCQLQQLKDLEVYERKALQMMEVKAPNLSTFHYDGNLARLSDGGLLAVKKLRISSFYQYNNVHYASANLSSIVPTIETLIISSFGEKFNTVVAPFKFLHLKSLKISLIGFNGAFSPAYDYLSLAYFIGASPVLETFTLIVSQIRMEHDVISENSSHLRQMPRSSHGNIKNVNIIGFCSAKSMIELTCHILENATSLECLTLDTIHDDYVHPDRLSVHEVGFCGRIGSPMIMEAENALLAIKRYIVGKVPSTVKLVVLKPCGWCHATEGLGVKDHRVA

SEQ ID NO: 141594 - protein, 199 aa, Oryza sativa
  Clone ID: PAT_MRT4530_42682C.1.pep
MVAKVYGVAASPYVATVLVCLEEAGASYELVAVDMAAGENRSRHHLARSPFGKIPAFEDGEVTLFESRAIQRYVLRNYNKPDLLREGNLEESAMVDMWMEVEAHHYDPAIFHIIRECVIKPMIGGGARDQAIVDENVEKLRKVLEVYERRLSESEYLAGDFVSVADLNHFPYTYYLMTTEYATLVESCTNVKAVEIMGI

SEQ ID NO: 141595 - protein, 382 aa, Oryza sativa
  Clone ID: PAT_MRT4530_42683C.1.pep
MFVVEDRGGAVALMVASLLFLGTWPALLTLLERRGRLPQHTYLDYSVTNLLAAAVIAITFGQVGETRPSMPSFFTQLTQDNWPSVLFAMAGGIALSIGHLISQYAWAFVGLSVTNIICSSLAVVLGTTMNYFLDGRINRAEILFPGVACFLVAIFLGSAVHSSNAKDEEEKLSMSRGIELSSDVADQGVKLLPNQEELENGEDDDFDTGTAEFIVQVEKRRSIKVFGSSRWLGLGMVLLAGVCFSLFSPAINLATNDQWRTLRDSVPHLTVYTAFFYFSVSCFAVGIGLNARLLYRPVAGVPPSTIGAYAGDWNGRHWALLAGLLCGFGNGFQFMGGQAAGYAAADAVQWYFSWLQQHIGRQGSPTQKDFTPGRYHRCNIHH

SEQ ID NO: 141596 - protein, 117 aa, Oryza sativa
  Clone ID: PAT_MRT4530_42684C.1.pep
FHNNLAYILHKVKKCKGSSASTSLMSRDLDANASANFLKHTDLPKIMKHRWISGGSEQTAFLSGPVFTVYPILQRTWSGLIESQILTHKSWKKFHLQQQHGWGIPSFDYLRLKGSKH

SEQ ID NO: 141597 - protein, 152 aa, Oryza sativa
  Clone ID: PAT_MRT4530_42685C.1.pep
MFVVEDRGGAVALMVASLLFLGTWPALLTLLERRGRLPQHTYLDYSVTNLLAAAVIPSHLGRLERPGLHAKLLHSAHSELLQVDSVTLEFGWYLWTQNKHERLVPTDNWPSVLFAMAGGIALSIGHLISQYAWAFVGLSVTNIICSSLAVVL

SEQ ID NO: 141598 - protein, 83 aa, Oryza sativa
  Clone ID: PAT_MRT4530_42686C.1.pep
AAFCFFCTVHQGVRRKSFIRPPFGSWRSQNEKFVAVKGLPKVRCPFRPVYREMEINGRSYKVFKVANWLRAHPGRTFQLFVVH

SEQ ID NO: 141599 - protein, 114 aa, Oryza sativa
  unsure (1)..(114): unsure at all Xaa locations
  Clone ID: PAT_MRT4530_42687C.1.pep
MWAARHGTAQARSCLGRGLSGQHGPTDASGHAMPAHSLYFVCRAWLAGPSCQAGPTVPGQPSVPMGRPRHSPAVGPXRHGPDPSQAVPCXLGRAKKPCHGPGLQASGLMAIYIS

SEQ ID NO: 141600 - protein, 162 aa, Oryza sativa
  unsure (1)..(162): unsure at all Xaa locations
  Clone ID: PAT_MRT4530_42688C.1.pep
MYLLEDASGWPDLVSQLQRTSLATTCGSSVKTQQQERSQELRRSRQTQHSSPRTSYQSQRETKELGRSRYTQRAMSCRTNPSATAGSWRGGDDWKVYFYVXPYRRTLETPHGLGHAFEASCIAGVREEPWLKEQNFSNFHDRDKMRLEVLSAALQCVRACMA

SEQ ID NO: 141601 - protein, 602 aa, Oryza sativa
  Clone ID: PAT_MRT4530_42689C.1.pep
MIFLCIARWIRGLFAQRFVQELMRRQNVASSGSSNGASALIQRSSSDSSNGATRHRRRGSWLRSIRNVAGSMVVGSRDRRSSDEKDTSSEKGGRRSSSATDDSQESASAVRRGPERVKVRQYGKTCKELSGLFMNQDIQAHNGSIWSIKFSHDGRYLASAGEDCVIHVWEVSELERKREGNGVCNQLVAVVCNGSPEPILALASVDGSCWEKKHRARILETRKSASSDRLMFPEHVFALSEKPVKTFEGHSEDVLDLCWSKSQYLLSSSMDKTVKLWHMSRTSCLKTFSHSDYVTCIQFNPVDDRYFISGSLDEKVRIWSIPGREIVDWNDLHEMVTAACYTPDGQRALVGSHKGSCHIYDTSGISHPLMILISYECISCCTGIQVYRVMLGSHNRFSKYQQPNISLPVFEREGRSKAVVSVTNSYEHFHCQDVTVAVALPSAGSAMTSRTNSRKTEEQDSIPQQHTQPDKQQDSSDFQCLSGNGLSTSSNHSGDRTSATWPEELMTPTRRIRGQFAQRSGIGSGYLLPRCTKLRSSTNLLRPGHTRCVDRSCKKTPSSHIRPLRLKESRTTDHGSKKKPSLIFGKYSRNNESKAAGMRCRN

SEQ ID NO: 141602 - protein, 89 aa, Oryza sativa
  Clone ID: PAT_MRT4530_4268C.1.pep
MAQATSCSPACETVNVSTAFPLLGCRIHVVLPRDEATFRFVNEANKTKSGSSLCHKDLAYIFRQVVYGVAAVRSQVPPRVICPQSEVLP

SEQ ID NO: 141603 - protein, 51 aa, Oryza sativa
  Clone ID: PAT_MRT4530_42690C.1.pep
AQDPRAPLPLAASLTCWHGRLTIVGELTENKTGGELGSERTGVSVTAMRAN

SEQ ID NO: 141604 - protein, 60 aa, Oryza sativa
  Clone ID: PAT_MRT4530_42691C.1.pep
MPLTLATACCILCTLAFSHATVAYVQLNVEASHETKVVSTLKYEADEADKKGLHLLGEEE

SEQ ID NO: 141605 - protein, 146 aa, Oryza sativa
  Clone ID: PAT_MRT4530_42692C.1.pep
MVKPVKPHTHTLRAHSAPSATGLVSTGVELRTRTPSARTPATPWVPRSAGSRRTPTGPRAAAAAAPPPSPSPSPSSSPPASPSRRRTTPPRRPRRSPRASASTPAPTASSAASPRAAPPPPAPPPPPDPPAPTTAAGSASRRRTAS

SEQ ID NO: 141606 - protein, 130 aa, Oryza sativa
  Clone ID: PAT_MRT4530_42693C.1.pep
MESSKRAVIHHSRNHNRRASPRSGGSTNQTNQTANRGYDRFDVRSGPNNYAWKVNRYSVTCSSTTGDDGGGQIPKHRRAVTKSRAQSYGAIESQKGQQQQRVEKVGNMHISKNKKERNGARGRTEEYLFT

SEQ ID NO: 141607 - protein, 68 aa, Oryza sativa
  Clone ID: PAT_MRT4530_42694C.1.pep
NKEMPSNQKNRVKPNGTDNLDGPTPVIQSHETNRAGPQCRDRGCMDDEHPQRCDIGQRNKRITLHRTH

SEQ ID NO: 141608 - protein, 52 aa, Oryza sativa
  Clone ID: PAT_MRT4530_42695C.1.pep
IGLGFRVYAICYSIGHLILLVVSVAARGGLLRCLSIICFVNHFLHEVTPGLS

SEQ ID NO: 141609 - protein, 69 aa, Oryza sativa
  unsure (1)..(69): unsure at all Xaa locations
  Clone ID: PAT_MRT4530_42696C.1.pep
KKNTPFSSLKSVRAEKERGELGKGDSEHTXNSCYQRLRNVKLKNKQYLVQVCTYCRNTSSTVKSSSCRF

SEQ ID NO: 141610 - protein, 60 aa, Oryza sativa
  Clone ID: PAT_MRT4530_42697C.1.pep
LVFLNGGGLFPTKIGENIHVHKEYYKCSRTDRAIQEPIFQKMLNLYRDVSSGLPDTPMER

SEQ ID NO: 141611 - protein, 38 aa, Oryza sativa
  Clone ID: PAT_MRT4530_42698C.1.pep
PFEGTMMFGTLYYLPPITVADLLKHVEYLLRFRGGALA

SEQ ID NO: 141612 - protein, 121 aa, Oryza sativa
  unsure (1)..(121): unsure at all Xaa locations
  Clone ID: PAT_MRT4530_42699C.1.pep
DAGNSADGDGVHGALFVDDLGDDGGSGGSHFFFEPSXAAPLWVIFPVSFFIAPTPFSFFPGPWIKLPYDAAPVAGSFVFRGLLLVFSLFCSCFFLLFLSVFVFFIFSSFFFFLSSFFFTRF

SEQ ID NO: 141613 - protein, 832 aa, Oryza sativa
  Clone ID: PAT_MRT4530_4269C.1.pep
MAGSGGEAMASSGLDLGEYLDRPDAIHRRAASVAIVRSGGGDGPRIVDGGRDDRRARSSRRLSLSSWRRPAGGETSVESRRYGFTAAAAAEVGGKTRAAAIWEWKPVRVLSRIGKRRCGCLLSVEVAGVRGVPASMDGLRLAVTVRKAETKDGAVQTMPATVRGGCADFVETLFVRCNIYFAGGAGTGKPLKLEPRRFVVSVVPAEAPGVRLGAHAVDVSSLVLDSLQKSSEGRRVRWFDTAVTLSGKATGGELLLKLGFQLMDDAGLCLYTQAATEKVDVVDDVSPALARAHNKNSFSVARTSGPKLSASDAAISPSMRAYKQLIDRLSVDEHGDPVTSLIPRKLADDELSGDVGLPEYEVVDKGVETVKEVVHYHAHRDVLKELDSIAEQIEAIEALMTNGGKKSPPSPKKVDQKQCLDADEEMVTVEFLRKLEVVDDKGRKLKQPMTPRSESEKKAAAAAPPVVPDLGPGLGTAVQTRDGGFLVSMNPFDLPLEKGDAPPKLAMQVSRPFVLPSSMAATGFDVLQKMAAAGGADEVRDKVARLGGMDNLTGKTPEQVGFEGIAEAVIGGRRTEGASSSAARSVRLVRKLAAAVSDGRSERVATGIWTAADDPETLEEVIAFSLQKLEAMAVDALMIQAEMADEDAPFEVAPAAGDATTVFDALVSPDEWSESRGSDGRVTVVAAIQLRDPSRRYEAVGAPMVAVVQSARLLGAAGNSGGRFKVRSLHVGGVQLRCPVGGGAGGGRASWGAERQKLTAMQWALAHGPARAAGRRARTPTTTTTPSSQARQRPDVVWSLSSRVLAGMWLKTVRNPDVRVGATAAGGGGGGN

SEQ ID NO: 141614 - protein, 65 aa, Oryza sativa
  unsure (1)..(65): unsure at all Xaa locations
  Clone ID: PAT_MRT4530_426C.1.pep
XSRAVFVKQCTHHFSTKAXRXSYNHYPKIYLSCWFKLVAIFXIRGSKFPLHVLEYIFMRSSWLSI

SEQ ID NO: 141615 - protein, 555 aa, Oryza sativa
  Clone ID: PAT_MRT4530_42700C.1.pep
MNCRHLALRLRHLRRLLAVAPLSSLAAAHSANRSSPRLNPTSVPPPPRQLHLPTLQARRLCSTTHVVLPTNLQDERFAALSDRIYDAVIETAAGSSEGTEAALDALGAELTTPLVADVLHRLRYDEKLAFRFFVWASHQDGYEHEAATYNDVIDILSGTRYKARQFGVLCDVLDHMKRRRTRSVPVDDLLGILRAYTEKHLTHLRKLAKKRRVRMRTPPETDALNVLLDAFCKCGMVREAEVVFSRVKRKLLGNAETYSILFFGWCRARDPKRAMKVLEEMIQMKHTPENFTYNAAIDSFCSAGLVSEARDLFEFMRTEGSTISSPTAKTYSIMIAALAKAGQMEECFELISEMRKCGCMPDVSTYKDLIEGMLLVDKLDAAYCVLDEMAKAGFPPDIVTYNCFLKVLCGLQKADDALELCERMIEAHCEPSVHTYNMLMVMFFEMREPDRAINIWIEMDKRGCHRAVDTYETMIDGLFDSGRTEDATALLDEVINRGMKLSYKKFDAIMLRLSAVGNLGAIHRLSEHMRRFYNVAMSRRFAITQKKKSIGLRRK

SEQ ID NO: 141616 - protein, 142 aa, Oryza sativa
  Clone ID: PAT_MRT4530_42701C.1.pep
MWRRGGGHAGEREEEDGLRRGLTADGGARRRSGARREGRKGDHRRGGKEAWIPFLGSDAAGAGRRRRIAAAHAGGEKKGKSRREGMGSIRGVGSISGTKGTRHGGRMEQSSAVEVRRREAASGSGCRRRRAHSEQRRRLGGD

SEQ ID NO: 141617 - protein, 192 aa, Oryza sativa
  Clone ID: PAT_MRT4530_42702C.1.pep
MALVNDKDSEDDVNAPACARRAAPLVIGAPWGFVLQLARRLGECEPRDFRARKMAIISFCALSLLFSKNTRIYIVLLCYLRKNYRPLIVTKESKRTKCCRITASLASRHGDELVCLCRARLASSALDRVVFKILKTSDFVLMVLKRCICVINPVHISRTHGSSMYSTLPDAVPYRSTERLAGGIVIDCTIGG

SEQ ID NO: 141618 - protein, 73 aa, Oryza sativa
  Clone ID: PAT_MRT4530_42703C.1.pep
CAFSVSGIAPRYFTGIKVNVPSIRHEIDHLPGLMLCFLCTHVRSSCLSFSLGKRACNVKTGLVHSDIFQTSCY

SEQ ID NO: 141619 - protein, 1025 aa, Oryza sativa
  Clone ID: PAT_MRT4530_42704C.1.pep
MASMREAEVVVAADVVGAVDGLSGWEHMFWCGRSALGIRLCGGTSWYQCQTLGRRSVGSVSEHGRHMLHIQHAAPIIDVVAVEVKLSPPHVAGRPKPNDCLHTPCINHKHLHRHYSIGVEDLVHHVGRNRVDEVAHLDMECSTCTTSQPARFHRTLVASYISFPSSHLGLGMPLMLRPGTLLGPYRDRASTREPRHGGGAKVKMLDAGAVISDFFFKWGQEKYILLRFRVIVPTLIVVCPLVQFGLIDDLNNTIDPAMKSFLYAVSDGILMYVLGAMQASPVKYALFPVWALALVGFRSILVGLHGKYDMQAELGNVAKLLIVAYMNVTHGCEIGRVPFWIYWSILVVKCMYRIVIRHQASKTLWHSRSSELLQAYMGPNPRQSNFVDNNSSPNGAMEGCKYLVFGESEQEQCSCRISPTRHVNINKLRSLVTLQNICQCLKEDNIVKKQAEVLKDVCLSFALSRLLRCRLEGARLHAGIDSINRKLLIGSYKERLDRLFKVLYRDVKFFKDCLFSNYPMIFSEGFLSLRFAFAQLMIKLPVGLWLSSDLFWAARHLSQNRHNLSATDLNIAGAAILIVVNVDDYGMGINFVNWTSLSAVCWLVHCRNRRKRLRLVRWFLGRLNSQEVRGGAFRGPLDKLINSQEVRSGGCRGQYAFLQSYKYSAWKRRLLHSLTMGMIASKDDGTNFATSLTTPEKVRTTVLSQELQGLDLHHDFSSSVDDNHSLPRDFFATVQHDANKPAEAEEQYWSEIIQSGAPRCSHVILIWHIATSLCEIKLAQEHDHCNGSPGFLHSALSCYRRRRNPYRGYLVDKLLDGDLWETYMVANWLSRYCAYLLVAKPDLLPGSIWVIKKDFQQTIQCARQMLHGCTSLKSIYDKLIATIPSQLEEAYLPGTEEEGSQILREGARLAKKLHDEDKKKQWEILAKVWARLLVHLSPSSDAQVHAKHLRSNMEFITIIWALFSHCGIDKSELWDYVSKHPSKMPTLTTSVQIVMEKYKKLVEHPSKTPTYEHPPPVHLPPTHWR

SEQ ID NO: 141620 - protein, 171 aa, Oryza sativa
  Clone ID: PAT_MRT4530_42705C.1.pep
MCQHAQAKLTESDLKELCHTLREVLERIMNVEGAELEILIGLCAQICKVIPEEFVQELEGGQIKKRFMKRLVDALNANMNPGGHCSGIRRVIIELSIYMMECNSHYANCFNELRMMEALSMVEEMPSRAENYTIFLGDVGFMEYSIPLIALVDRAKELMGQQCLQGVSSAN

SEQ ID NO: 141621 - protein, 156 aa, Oryza sativa
  Clone ID: PAT_MRT4530_42706C.1.pep
MEPAAARARLLLRAVAWLFSLLALVVMASNKHGHGGAQDFDNYPEYTYCLGISIIAVLYTTAQVTRDVHRLSWGRDVIAGRKAAAVVDFAGDQVVAYLLMSALSAAAPVTDYMRQAADNLFTDSAAAAISMAFLAFLAAGLSALVSGYNLAMEVLV

SEQ ID NO: 141622 - protein, 227 aa, Oryza sativa
  unsure (1)..(227): unsure at all Xaa locations
  Clone ID: PAT_MRT4530_42707C.1.pep
IPPPPKKKNLGFGGLTGIXTSGQTGGIAAVRLAVLGRSDRRRRQELAIDLGGSTGVTTLVRPTIFRQSDRRYYFGQTAIHXFRGVFSMATSNKFTTKPHIFDGTDFSHWCSRMQSYIMAENYNIWRKVSLSYVILETINIAAEKTTFELNCKARNILLSGISRSDYDRIAHLQTAHEIWVALNNFYEGTNNIKELRRDFFKKKYIKFEMKSGEALNNCLLPWRDVIR

SEQ ID NO: 141623 - protein, 65 aa, Oryza sativa
  Clone ID: PAT_MRT4530_42708C.1.pep
ANFVLSLSGDFSDAQGDPQATPSPARSPPAAMSSSASPSAAPSAEYASSSLAKPIGFPSDWPTQI

SEQ ID NO: 141624 - protein, 102 aa, Oryza sativa
  Clone ID: PAT_MRT4530_42709C.1.pep
MWNRIHLSTTAIVVHEINGEGLEAFGTCTLVPFTCQASNAVHTGAYTSCQKESCIAAWHFCEKFQFARFSLPASTYSLRMFGLTMVIRKTPSSTLHIHACLN

SEQ ID NO: 141625 - protein, 112 aa, Oryza sativa
  unsure (1)..(112): unsure at all Xaa locations
  Clone ID: PAT_MRT4530_4270C.1.pep
CLXPHRXXGKKYPCWXXEPPRGXQVNXPIWIHXHXNHRXTXXHRXVXXXXAFSXXXXPAEXNXXXXLRGXSXRRGXFXXTXEXEGVXAXGPGSXXXGPXGXFYXPPPAKTDC

SEQ ID NO: 141626 - protein, 68 aa, Oryza sativa
  Clone ID: PAT_MRT4530_42710C.1.pep
MFSTSGFLSLSLLFMSAFKHLVLTQSTILLTNVGRKCLMFCRRPLLLLPTPAHRILPAARSNALIYGR

SEQ ID NO: 141627 - protein, 75 aa, Oryza sativa
  Clone ID: PAT_MRT4530_42711C.1.pep
TRTPLFESSTKFDSGTGWPSYYQPIGDNVKCKLDMSIIFMPRTEVLCAVCDAHLGHVFDDGPRPTGKRYCINRYM

SEQ ID NO: 141628 - protein, 655 aa, Oryza sativa
  Clone ID: PAT_MRT4530_42712C.1.pep
MPKQGCVPNVTTYSTLMNFLCQHGQVDKAFELCERMQKEDIVADAVVYNILIAGLCREQRVTEAFNLFKSMVPKGCYPNSGTYQVLLDGLLSSGKFVEAKGLVSMMRAERMRPGFSSFKLLIDGLCSVNCLDDAHLVLKQMVEQAWYYWGLIMAKTFSLGLTPIFLPSWVSLTSETLTVLLNYVQTPQIPGLMQTAEKLGHVSMLMNWCSVCKCQQEQPRDLCLLEAAPHIIALTNRSASTELEAGNSEFTPEFAGMDFGDSRRKPNVVGKFTVAVALTVMCIIVLKQSPGFTSTSVFSRHEIGVTHVLVTGGAGYIGSHATLRLLRDNYRVTIVDNLSRGNMGAVRVLQRLFPEPGRLQFIYADLGDAKAVSFFSTIQVNKIFSENAFDAVMHFAAVAYVGESTLEPLRYYHNITSNTLTVLEAMAAYNVKTLIYSSTCATYGEPDTMPITEATPQNPINPYGKAKKMAEDIILDFSKRSEMAVMILRYFNVIGSDPGGRLGEAPRPELREHGRISGACFDAALGIIPGLKVRGTDYPTADGTCIRDYIDVTDLVDAHVKALDKAQPGKVGIYNVGTGHGRSVKEFVEACKSATGASIKVSFLTRRPGDYAEVYSDPSKIHDELNWTARYIDLRESLSTAWKWQKAHPNGYGSA

SEQ ID NO: 141629 - protein, 292 aa, Oryza sativa
  Clone ID: PAT_MRT4530_42713C.1.pep
MARAPTMVIQEDYIDMDLTPTTTPLPPSSPRLCGGGGFREFEFHSSGAVVSKAFASPADELFYKGNLLPLHLPPRLQLVQKLLQEQQVQVQGTKKEVEDDDMVDMSKVCAAKKYSWSKRLKLMKRWTSREYIKSLFLATAKPTGIAVVGGGNGGGVMDQEELCGHRKSFSGIIRRVRLVATKAASASAPGTSPLCSTSSSSSSTPSCGNASRFFPAAPALKRSSSAGSSEEGAIQGAIAHCKRSQHQHLQQQRRSVSDVVFYSVTNTPRVSSVAAAAGGEVAQGERQEMCRG

SEQ ID NO: 141630 - protein, 58 aa, Oryza sativa
  Clone ID: PAT_MRT4530_42714C.1.pep
SFDPAAAAAAAFCPLIGSIHHRSHSLHWGIILATNQFMLSSLYAPSSMVFYVGTCRLI

SEQ ID NO: 141631 - protein, 71 aa, Oryza sativa
  Clone ID: PAT_MRT4530_42715C.1.pep
MERSAGDGKEAVGDGMVEAGGFHSCMEKTIMLRIAQKIVNWGPIFYDCPDHEEDNNGNFCKHRATVFSDVS

SEQ ID NO: 141632 - protein, 109 aa, Oryza sativa
  unsure (1)..(109): unsure at all Xaa locations
  Clone ID: PAT_MRT4530_42716C.1.pep
QKTRGLGDLLNSSACPKLAFGCTSMPVDLIMXSTRNRSKETAVKSINDSRSARTLSMCGNHLKAPQSNPTSHIKLYCRDRVHQLTXPNSDSADLDFSRFLFCFRTRSPP

SEQ ID NO: 141633 - protein, 58 aa, Oryza sativa
  unsure (1)..(58): unsure at all Xaa locations
  Clone ID: PAT_MRT4530_42717C.1.pep
KLGAPDVGHPMSEVFRACRKGYLKRSGATLPGFXNVNIPNGGGGVCNWLARSGYKLGY

SEQ ID NO: 141634 - protein, 175 aa, Oryza sativa
  Clone ID: PAT_MRT4530_42718C.1.pep
RDEDEQDAWRASGRTGERWDQQAAGCASRLPPPSPTSSPPAPPLPHRIELSCPPAPSSSPSRPLSSLAQAPPPVQARAQTKTTSGERVAGCTSRLPPPSPRSSPPVPPLPHRHPAVGCASRPTPSPLPLCSPPPPAQVGDEDEDDERQDRRAAWCASRSQPPSPRCSPPVPPLPH

SEQ ID NO: 141635 - protein, 141 aa, Oryza sativa
  Clone ID: PAT_MRT4530_42719C.1.pep
VLDRERPLFFFFFRPNATSSSIDLRNIQKITDCNITDTLYATKKNMWCATKCTNHPPRGWGSKPLSPQSQSTRPRRPRWLLPAAAAAAVCPRRSQGLAEPPTAGAAPGAAAPPRAWRRRATRRRRTAGADPEQETTAVAVH

SEQ ID NO: 141636 - protein, 416 aa, Oryza sativa
  Clone ID: PAT_MRT4530_4271C.1.pep
MEVCAARAPGKIILAGEHAVVHGSAAVAAAIDLYTRCSLCLMPLADDEAAATLELDLKDPGLTFSWPCGRLREVLLTDEAAGAREARPCSPDRLASIARLLEEHEIPEAKIWLSAGLSAFLFLYTSILGCRPGKVTVSSDLPMGSGLGSSAAFCVSMSGVLLTAAGVVTAVGGISGEGMGWELVGKDDLELVNRWAFQGEKIIHGKPSGIDNAVSTFGSMIKFKKGELTNLKSSNPVKMLITDTRVGRNTKALVAGVSERASRHSDAMASVFNAVNSISEEVSSIVELAANDEIAITSKEEKLAELMEMNQVLSNLVLEKVIAELESHSFRCFKVELLFGCLDNEVDAGKAVLTASLPGTSNFFSGPYLISFAKDFLPIGNPSFAVPTRTPPCGSLLAVGAFLHLIKPRIPFKCLP

SEQ ID NO: 141637 - protein, 145 aa, Oryza sativa
  Clone ID: PAT_MRT4530_42720C.1.pep
MAELNLELTGDKRWLVWGGHRSNAGGESERRMFSGGDACASTIMYWLIGCMHIDGNGDDVAAAVRSSRAPVCTAAFPPIGCTREDEIKRRNIRHGEESMERKRRGNDRGSSTIAAIVFFAAGDGEPVEKSSEDALPRMDRHWNGG

SEQ ID NO: 141638 - protein, 97 aa, Oryza sativa
  Clone ID: PAT_MRT4530_42721C.1.pep
SAGPPAPINTPPVGRTTKSVPTRSPLFLFQNGGCPMEPAFQVFFPYGFKKKMGPPFLTFIQAGLFLTVTLFPLPPGLPFQKKFLVGLAKNKTTFAFL

SEQ ID NO: 141639 - protein, 509 aa, Oryza sativa
  Clone ID: PAT_MRT4530_42722C.1.pep
MATHAPKGYLCAGSSSFDDPDVVEVTPAAAAAGGWSSGHQKRKRSQVVPHEVIELDADDDPDGVVIIGEKSSVDKNKQAVGYPIDWLKHAKSSLAGEIAGPSSYPSKNPDILLGGLKIFQENPFYNNIDDYAYEAFEEDYGYDEDEYDDYDYDSTLYESEYNFTLASKFDGLDIPPGVEAPLPWLQTTAAEMANKTKPVNMMDDKIDEKYSAFKQFDTVDDHSDHYYSKPDLRKVQVVKKPSKEWAKRIQHEWKVLEKDLPDTIFVRAYEDRMDLLRAVITGPAGTPYHDGLFFFDIYFPPHYPSVPPLVNYRSGGLRLNPNLYACGKVCLSLLNTWSGSGCERWSPSNSTMLQVLVSVQALVLNAKPYFNEPGYAMHANTPHGEKSSLTYNEDTFLLSCRTMLYSLRNPPKHFEDFIAGHFRKYGQSILIACRAYLDGAQVGCLVGNGVQDVDEGDKSCSARFKSALKRLFEELLMEFTVKGAECDKFLAEKAKAAASRAPADTTLRL

SEQ ID NO: 141640 - protein, 182 aa, Oryza sativa
  Clone ID: PAT_MRT4530_42723C.1.pep
VILSSSSVIHIISSPMIKTILHTNNTPSWIPRIGMNFSCADEAWNFWVFYGGQVGFNARKKYENTSKIDKVVTSCRFVCSNQGYRAQDKRDHLTKLPRAETRTGCDARMGITLDRDSGLYTLHDLSIEHNHMLQLPETSHLMSSQRKISKAQATEIELADDSGISPKPSSFVSSIFCSCMRA

SEQ ID NO: 141641 - protein, 84 aa, Oryza sativa
  Clone ID: PAT_MRT4530_42724C.1.pep
MDGIQKSSTSCLRAARSRRPWRNPARQRRRASSASSSSVRRSVAASAPSAMLSSRRTLPCTSSAASWLSSATSGADEPPMSMSA

SEQ ID NO: 141642 - protein, 125 aa, Oryza sativa
  Clone ID: PAT_MRT4530_42725C.1.pep
MQSYGLKGAHRTLNEAPESLDSGSGEEDGPATIDGNGDDVAAAVRRARSRAPVCMAAFPPIGCTREDEIKRRNIRHGEESMERKRRGNDRGSSTIAAIVFFAAGDGEPVEKSSEDALPRMDRHWN

SEQ ID NO: 141643 - protein, 237 aa, Oryza sativa
  unsure (1)..(237): unsure at all Xaa locations
  Clone ID: PAT_MRT4530_42726C.1.pep
AHLPQFSPLWLEPHPVHPPSNTVTAERETEGADLHWTASMRGLDVAAPNQGFTSTQLHRLLPITTPEPSKPRGRAPAFLFHLDLAACREDDGRHHRHCAAVVSSSFAFHYRLSTPIPSXLSFIPFHAVVWWERKPRRRCSGARTGRRHRDIVFVAVEPEEAEPSHRTINISSVSSLKSLMNPWQWCSELGDRHRLPQFRPXTTYSLALNPFTFSPYVAHRDLPPFATGELENELGHG

SEQ ID NO: 141644 - protein, 127 aa, Oryza sativa
  Clone ID: PAT_MRT4530_42727C.1.pep
HEGWERKPRRRCSGARTGRRHRDIVFVAVEPEEAEPSHRTINISSVSSLKSLMNPCQWCSELGDRHRLPQFRGSSSTFDFSLSDHQPYQAGVVIARGSPPSLSRSARGHRYLDLAKFHWTLGLRFSL

SEQ ID NO: 141645 - protein, 136 aa, Oryza sativa
  Clone ID: PAT_MRT4530_42728C.1.pep
MARHGTMWWWRTTMTQQMATVKIASLPLMLPLLLRHLKYDQNTKPDPNLTCIAVAPPTAWRWRHMKCRMVHGANRRRDAIYAIQIPVTPNGNVELTCHDAGLHHGHKILGSLESFKDVFFSLSLTRCHVNQLSMMS

SEQ ID NO: 141646 - protein, 76 aa, Oryza sativa
  Clone ID: PAT_MRT4530_42729C.1.pep
MATATGGEEDGSRSPHLLRHCLGFLRVFEEDFKEKTLARRLGLSTIVVFFAAGGKDEGDGEVESLLPRFLRLRGGE

SEQ ID NO: 141647 - protein, 67 aa, Oryza sativa
  Clone ID: PAT_MRT4530_4272C.1.pep
RGRGFSKLCHKGKKFLPLKARHLGGIKPKNAPIKGFPLGTTKIKGEPPFLFLVKNKPVNKDLMSQTL

SEQ ID NO: 141648 - protein, 59 aa, Oryza sativa
  Clone ID: PAT_MRT4530_42730C.1.pep
KQILLTKKKRGDLMRDHQPQAGVICDKTIPGEKPAPLAVLTSARSLSMEEQHTELSLFS

SEQ ID NO: 141649 - protein, 130 aa, Oryza sativa
  unsure (1)..(130): unsure at all Xaa locations
  Clone ID: PAT_MRT4530_42731C.1.pep
MPNISPFDFILSGAANRRERCHAHXALERALRTAAATSSPLPSIXIKPERATTPPASPQPPLHFPSRIFKNGATSVEIVHRLLHLRSPSPLSIPPPPWIEPLPSSRSSTPSPDHLLLRCRCPDFPAPRSR

SEQ ID NO: 141650 - protein, 291 aa, Oryza sativa
  unsure (1)..(291): unsure at all Xaa locations
  Clone ID: PAT_MRT4530_42732C.1.pep
PRTKCKRLTVTAERETEGADLHWTASMRGLDVAAPNQGFTSTQLHRLLPITTPEPSKPRGRAPAFLFHLDLAACREDDGRHHRHCAAVVSSSFAFHYRLSTPIPSXLSFIPFHAVVWWERKPRRRCSGARTGRRHRDIVFVAVEPEEAEPSHRTINISSVSSLKSLMNPWQWCSELGDRHRLPQFRPSSSTFDFSLSDHQPYQAGVVIARGSPPSLSRSARGHRYLDLAKFHWTLEPPPLAPPSPLIPMTNACKNTTYSLALNPFTFSPYVAHRDLPPFATGELENELGHG

SEQ ID NO: 141651 - protein, 191 aa, Oryza sativa
  Clone ID: PAT_MRT4530_42733C.1.pep
CRSNRGRKLQLSLSTSLSLPAAKKRDIANRRRALFISNSYSFHSHLTMTNNFGFDPIPFHLLQQRERRHVMVALERALCTAAVTSSPFPLIWTKPGQAVAPASSPRPPLHFPSRISKDGATSVEIVHRLLHLWSPSPLPNPPPPFLELIEPSPFIRRFLPPPSRYTSRRHKPSYPSHVYHLDDCLIGEEVI

SEQ ID NO: 141652 - protein, 42 aa, Oryza sativa
  Clone ID: PAT_MRT4530_42734C.1.pep
SPGCRNSARGTNIIYCSHTTFFFACDCSGGGKNMTRMLPIQN

SEQ ID NO: 141653 - protein, 207 aa, Oryza sativa
  Clone ID: PAT_MRT4530_42735C.1.pep
MAGVARLMTAARVTARRRQEPPGERRWLNQLQELSCMCVHEVREAPGMLLMHGIGLVLTGGGGFGNGDGDRRWRRRWTISTLVAPSFEILEGKWRGGRGEDAGATAWPGLVQISGNGDDVTAAVHRARSRAPVCTAAFPSIGCTREDEIKRRNIRHGEESMERKRRGNDRGSSTIAAIVFFAAGDGEPVEKSSEDALPRMDRHWNGG

SEQ ID NO: 141654 - protein, 294 aa, Oryza sativa
  Clone ID: PAT_MRT4530_42736C.1.pep
MAMVAGDEAMSVPWHDVGVVVDPEAAGTAPFDAGAGYVPSYGQCQYYYYYDDHHHHPCSTELIHAGDAGSAVAVAYDGVDGWVHAAAAATSPSSSSALTFDGHGAEEHSAVSWMDMDMDAHGAAPPLIGYGPTAATSSPSSCFSSGGSGDSGMVMVTTTTPRSAAASGSQRRARPPPSPLQGSELHEYSKKQRANNKETQSSAAKSRRERISERLRALQELVPSGGKVDMVTMLDRAISYVKFMQMQLRVLETDAFWPASDGATPDISRVKDALDAIILSSSSPSQKASPPRSG

SEQ ID NO: 141655 - protein, 154 aa, Oryza sativa
  Clone ID: PAT_MRT4530_42737C.1.pep
MAFPSLSVSGILARHPVLFYAATWTAVATAAVSVAAFAPELAFVWAVTPGAAPLASSTAGCPGGIVLPLDGPPWDAACVPAALFGRVTLDVLVPPVFAAAVVSTALWFTKAVGVWEDDDDEDDSDEATMLDKCSVKVYTDSKIDSLSWPSLLCN

SEQ ID NO: 141656 - protein, 545 aa, Oryza sativa
  Clone ID: PAT_MRT4530_42738C.1.pep
MDSAAGGGGLTAIRLPYRHLRDAEMELVSLNGGTPRGGSPKDPDATHQQGPPAARTTTTRKLVLACMVAAGVQFGWALQLSLLTPYIQTLGIDHAMASFIWLCGPITGFVVQPCVGVWSDKCRSKYGRRRPFILAGCLMICFAGPARALLADLSGPDQCNSANAIFCTWMAVGNVLGFSSGASGNWHKWFPFLMTRACCEACSNLKAAFLVAVVFLLFCMSVTLYFAEEIPLEPTDAQRLSDSAPLLNGSRDDNNASNEPRNGALPNGHTDGSNVPANSNAEDSNSNRENVEVFNDGPGAVLVNILTSMRHLPPGMYSVLLVMALTWLSWFPFFLFDTDWMGREVYHGDPNGNLSERKAYDNGVREGAFGLLLNSVVLGIGSFLVDPLCRLMGARLVWAISNFTVFICMLATAILSWISFDLYSSKLHHIIGANKTVKNSALIVFSLLGLPLSITYSVPFSVTAELTAGTGGGQGLATGVLNLAIVVPQIVVSLGAGPWDALFGGGNVPAFALASVFSLGAGVLAVLKLPKLPNSYRSAGFHGFG

SEQ ID NO: 141657 - protein, 38 aa, Oryza sativa
  Clone ID: PAT_MRT4530_42739C.1.pep
HMLMLYRLLFILISLKLILSFALLILILPFWLILVRFF

SEQ ID NO: 141658 - protein, 376 aa, Oryza sativa
  Clone ID: PAT_MRT4530_42740C.1.pep
MSWRPRQPPLSLSLPLPSSSPPPASRRSSAITDRTRGTRRPASSRRPEPARRHRGAAVAGRTTLRPRAPPPPPYDYPKPDQPPPLLPTPDVVPNPNQPPLQPTPGVPPLPNPDVPPMNKPDVPPMPKPDGPPIPPVQPCPDQPPQPKPDGPPLPNPNQPPQPNPNGPPKPDMPPMPKPDGLPNTYEPSRPDQPPQPISDGPPLPNPNVPPKPDQPPQPIPNGPPKPDMLPMPKPDGSPNSYAPSVPDQSTQPNPNGPSIPNQPPQPIPNGPIKPDQPPQPNPDMPPKPDQPPQPCPDGPPKPDQPPQPNPNGPPKPDQPPQPNPNGPSKPDQPPRPNPDMPPKPDQPPQPEYYEQPPKPDAPQMPPLPNGEIPFSP

SEQ ID NO: 141659 - protein, 80 aa, Oryza sativa
  Clone ID: PAT_MRT4530_42741C.1.pep
MSRPLYSIAVAVCIVFVVMSTIPSCYGDEETFTDEVPHCKIVACTNKCRTHHHPKYTARCIHNTNPEQCCCKKDDARVTK

SEQ ID NO: 141660 - protein, 131 aa, Oryza sativa
  Clone ID: PAT_MRT4530_42742C.1.pep
APSQPCSRPSVRRNAAMAAVALRSLARKAMPAPATLRRAPPPSRSLHRHSLEDKLRGTTSPKTTAPTDQGRVSYFEENPELFAELVKRDAARRMFTRLVLAGAASAYAGALFVVSSMRDSVKEELRKNIYD

SEQ ID NO: 141661 - protein, 393 aa, Oryza sativa
  unsure (1)..(393): unsure at all Xaa locations
  Clone ID: PAT_MRT4530_42743C.1.pep
MCVDYRALNEVTIKNKYSLPRIYDLFDQLKGATVFXSKIDLRSGYHQLRIREEDIPKTAFTTRXEHQLYAEFSKCEFWLSKVKFLDHVIFPQGVAVDPATVEAVTKWRQPITQIHSILGLAGFYRRFIENFLKIAWPMTQLLKKEEKFMWTLQCXYCDASRQGLGCVLMQERHVVAYASRQLRLHDGNYPTHNLELAAILHALKIWQHYLIGNRYXLRRKHTRHARKHTSGQSDASTWIGGPTSQVKPHGMGHNCHKHHQGPPVSVPAKGEARREEMLFGCLSISTFPGDMERLNLHIIHQGSLTTLEVKPLLLDRIREAKKTDPDMKELQKNMRRGKVCGFMEDEHGTVWNGKQLCVPKTRXIKKLILLEAHKSQYSIHPGXSTKMYLDLKA

SEQ ID NO: 141662 - protein, 207 aa, Oryza sativa
  Clone ID: PAT_MRT4530_42744C.1.pep
REHQLYAEFSKCEFWLSKVKFLDHVIFPQGVAVDPATVEAVTKWRQPITQIHSILGLAGFYRRFIENFLKIAWPMTQLLKKEEKFMWTLQCEKAFQLLKTKLASSPVFVLLDVNKDFQVYCDASRQGLGCVLMQERHVVAYASRQLRLHDGNYPTHNLELAAILHALKIWQHYLIGNRCEVYTDHKSLKYIFTQPDLNLRQRRWLLT

SEQ ID NO: 141663 - protein, 852 aa, Oryza sativa
  Clone ID: PAT_MRT4530_42745C.1.pep
MKYRKGVAGESNDDDGSTKRGRDATPSIQVEIAEYHGGGGGGGGLGNGGGGSASFFEPWREATPGSGSGHGSSGRGGGGREPPEKRLTLFSLRLAVLEKAASGLGMLDFMWATVVLLGGFASALKITDFWCVTVILVGEGARVFGRSHELEWQHHSTLTSTAGSALRSSSRLFRRLVHALDDPAAATVTGGARGQDARDRAAQFQRQIVAFMKQRAWHAPDVSLLPYTGWVFVSKKIGRLLNWLQVLSAFTCVALSVMRLWRHDFGDEPNKRPALLLFYTLALIEALLFLLEKAYWTWKISVRKLLEQVSRECELGAYGHVSLTRFFYDAYSRCINGSIFDGIKMDLVTFAEELILSEFLDEQLIGVRILQQFADAKGSARDTLRKVGTSARSIERLVEMLNWKRPEEEEVRWCAAQVVSKLAGKRQNALRVSGIPGAIESVMSLLYAGWSAPVSATPHDVSPAARRSYDHPQFNLLGLLILKRLARDHDNCGKIGNTRGLLAKIIEFTHASPALLRNTLAPESQVRAVKLALKVVKILVSTTGSTGKMLRRGVAENVFTVSSLRVVLQHGQQHRALQKLATDILSGLAMDDKGKQVIVGTGGVVKQLLSIFVDAETELGGEAGEALAMLALESEASCAAILKRDDVLDHLVSALEGDGGARRLNAARVLRNLCAYAGEKHRPRLSAVIKAMPVVLKATMTGSDKILEVSVGLTTQICKFIDGDRFADELRGAGIDERAYVERLASILREHRYPVIRVPRMRRFIVQQVIWLMTSSSSADGGGGGGGGANYVSLLREAGMERLLESIADTTSELECYHVFSGSVGISKHRESFSAAVDAALELLGGDGRSSS

SEQ ID NO: 141664 - protein, 51 aa, Oryza sativa
  unsure (1)..(51): unsure at all Xaa locations
  Clone ID: PAT_MRT4530_42746C.1.pep
MAVDKTKRMCVDYRALNEVTIKNKYSLPRIYDLFDQLKGATVFXSKIDLRS

SEQ ID NO: 141665 - protein, 96 aa, Oryza sativa
  unsure (1)..(96): unsure at all Xaa locations
  Clone ID: PAT_MRT4530_42747C.1.pep
MIHLLFTLLARXALVLVLLFRTXFRXLAXLAIDRAKGXRGPVMVKTXVXTMLVVLGSSGYSIDKIRXXVGDXRPVTPTDQVLXSRHXLEASLMGTL

SEQ ID NO: 141666 - protein, 68 aa, Oryza sativa
  Clone ID: PAT_MRT4530_42748C.1.pep
KDVRRGRRERERAYINIMYLYIVIYCTYSLLYIKDIFLVQRGVISFLMIISYISSSITDHRVSVLIIV

SEQ ID NO: 141667 - protein, 70 aa, Oryza sativa
  Clone ID: PAT_MRT4530_42749C.1.pep
ISAAKKQRRNKILPPVKNYSSPSLTFSHFIVYFRLSIANLVYILLSAKVFSESRLHVAVHPCSTFISKGV

SEQ ID NO: 141668 - protein, 144 aa, Oryza sativa
  Clone ID: PAT_MRT4530_4274C.1.pep
PKNFKGLFSDKRGFRHTLQMFFFFFSPLETKKSWGPFLGVGPFFFFSGWGLGSPFLSPFFNKIFYLGPPQKRPLLFEKMVVPQKFYFFFSLGRAFLTPSFGALLIQTRWGSPQKKSPCFPIFFYNKISNKLSPPKQNKKNKKKL

SEQ ID NO: 141669 - protein, 55 aa, Oryza sativa
  Clone ID: PAT_MRT4530_42750C.1.pep
SEQYVHKIIQSSYRKIAAGNIQKDQIIITKLHKSSVHISSEIYWSNTACMSSYIF

SEQ ID NO: 141670 - protein, 118 aa, Oryza sativa
  Clone ID: PAT_MRT4530_42751C.1.pep
FFFFFLGPRALQTLSELSISLTHTQENTMQSCKGYNNGSSSLLQVTGNQCSSHMHLAAMHRRRHSSNMRARAHTHTHFEQEKAFDQIRVKAMDHGYLQLLKQQLSLLSPSLALNWQTD

SEQ ID NO: 141671 - protein, 123 aa, Oryza sativa
  Clone ID: PAT_MRT4530_42752C.1.pep
MARRGPAAIPIYEVEPLLLLFNLFTLLGTIGSRDNFVVDQPATGLDKAVIAFSIISEIVTGKVALTQLNIETSIPVTEIESLVLFNVSSTITTPVTGRHSPISHWPPLPRSPAGHVGRKEKKE

SEQ ID NO: 141672 - protein, 61 aa, Oryza sativa
  Clone ID: PAT_MRT4530_42753C.1.pep
EGVPVALAVHLDVDAYRHQVIPRRHAELDRRRPGGAEAHRLHLPRRAAAGSSSVRAGGASC

SEQ ID NO: 141673 - protein, 344 aa, Oryza sativa
  unsure (1)..(344): unsure at all Xaa locations
  Clone ID: PAT_MRT4530_42754C.1.pep
MDAMRKQLDVLMGANRNGDVREVSRKYYDRDVCRLFLAGLCPHDLFQLTKMDLGPCPKVHSLQLRKDYEEVKAKGTENYDRELEEMIDRLIVECERKIQRALKRLADEDAKAAIAISVSEVTQTDEVLQLSKEIKEKMKEVDTYDFEGKTDDKIKTMEVVEELRSKRADMQATLLLDAFNKDRASLPQPTPTPQMASVPAPAPPDARTQEMINEKIKKAEELGEQGMVDEAQKVMEEAEALKKLAARREPTSDPTKYTAADVRITDHXLRLCDICGAFLSVYDNDRRLADHFGGKLHLGYMLIREKLKELQEERSKRRKAPEDDRRSREYSKDRNGQASRDRDS

SEQ ID NO: 141674 - protein, 97 aa, Oryza sativa
  Clone ID: PAT_MRT4530_42755C.1.pep
KTRRSNTSKFCWNCISDNMGESLWDFKQALSTWFGNHHCSNSGFPYTYTLGHMTNLLTLPRKGNKYFLTLFISPSWRYGFIIRFWTSPSFFGPSMIA

SEQ ID NO: 141675 - protein, 270 aa, Oryza sativa
  unsure (1)..(270): unsure at all Xaa locations
  Clone ID: PAT_MRT4530_42756C.1.pep
MRKQLDVLMGANRNGDVREVSRKYYDRDVCRLFLAGLCPHDLFQLTKMDLGPCPKVHSLQLRKEYPLTYGTLHLSPFKIFRTLLYEEVKAKGTENYDRELEEMIDRLIVECERKIQRALKRLADEDAKAAIAISVSEVTQTDEVLQLSKEIKEKMKEVDTYGNDIXGNTEGKIRATEEVDKLKEQRAEEQAKHLLEAFNKDRVSLMTSLQTANQSIPPPPVAAAPDARTQEMIDEKLKKAEELGENGMIDEAQKLLDEAEALKKVIDLGF

SEQ ID NO: 141676 - protein, 95 aa, Oryza sativa
  Clone ID: PAT_MRT4530_42757C.1.pep
MGRRERRRWRHPPVPHGGQPEPDRGEVMEPGASPEPVAGGEDDEQPWEGGCQRRISPEELPGQAEGRRGMRGARERVGRDWGEKMEGSNRGTIMC

SEQ ID NO: 141677 - protein, 424 aa, Oryza sativa
  unsure (1)..(424): unsure at all Xaa locations
  Clone ID: PAT_MRT4530_42758C.1.pep
DLLEAVIKERFSLVIEVMSKQLDMLMGADGTGAVREISRKYYEHDKCGLELADLCPHDVVQITMMDVEALPKLHSRQLRDDYEEENVNXVQITDQKLRXITDRAHFGSVKGSDRRLVNVLRRKISSRLYARSVSDXTQTEGVIQLSKDIKEXKCKRMIILRFMETDXSIIATIAIDRSRNAHEKGWNYKAKQQLEAFQXEENLRSEKAPESMGDPIVMIHAATEGNAPLMTVTENMIDTRVATVRIDAAHNGREXSSEPDRLVFQFRGSCGIDAYXPAYVHINYHQLRLCCICGAFMCVFYIVLRLADHXGGKLHLGYMLIREKLKELQEERSKRRKAPEDDRRSREYSKDRNGQASRDRDSERKDRVEPRESRRDHDRDRDRRHDRDRRHDRDRDRDYDRSRGHDSRRRERSRSRERRRHDRY

SEQ ID NO: 141678 - protein, 224 aa, Oryza sativa
  Clone ID: PAT_MRT4530_42759C.1.pep
MEIIEVVAGQVAVALSHATLLEGSRAMREETLVPEQRLVIDTMARTDNVVSMLINDIMEMSVDNRERLPLEMRPFHLHAMIRDTACVARCLIGRTELGHVTLRVHSATDDVLEGSRDYHVSCICGQSTRRPHGEDEDREAREEVLTTGTTRQGNNDGDQRQPWRGDDERRRATEMNGRAALHLDGNDDRREARRWGGVPRVFGQRGDVVDDEGDEMKPTAATAQ

SEQ ID NO: 141679 - protein, 74 aa, Oryza sativa
  Clone ID: PAT_MRT4530_42760C.1.pep
QRLCLSSQKVCLVVITYDLKVLTNMDIASGWLVLLSRAQDVLALIGRLGIRVVVIVSVALPPVSLIPSGYPRSS

SEQ ID NO: 141680 - protein, 217 aa, Oryza sativa
  Clone ID: PAT_MRT4530_42761C.1.pep
MSLFGRSSRSQLTFRPKKSSPSGSKGLPLKKHIDATLGSGNLREAVRLPIGEDLNEWLAVNTVDFFNQVNFLYGTLMEFCTSSTCPIMSAGPKYEYRWADGMKVKKPVQVSAPKYVEYLMDWVESQLDDEAIFPQKIGAPFPQNFREVIRTIFKRLFRVYSHMYHSHFQMILKLKEEAHLSTCFKHFVLFTWEFHLIDRAELAPLNELIEPIVFRYF

SEQ ID NO: 141681 - protein, 54 aa, Oryza sativa
  Clone ID: PAT_MRT4530_42762C.1.pep
GLQEFGTRLGFFFFFFFFFFFLFFFFCRARSFWWQTSQNILFTKHGEGWYSHIT

SEQ ID NO: 141682 - protein, 94 aa, Oryza sativa
  Clone ID: PAT_MRT4530_42763C.1.pep
MAKLVVVLTLLALLASVACQTGGYGYDSSLVYKNVMSQHVLFRSDAALMTAADTMGLVLASAYFPGWWNAKFAEANFSIPVNYRHELLTAFCKG

SEQ ID NO: 141683 - protein, 72 aa, Oryza sativa
  unsure (1)..(72): unsure at all Xaa locations
  Clone ID: PAT_MRT4530_42764C.1.pep
MEEDVRLGANKWSERQPIGTARHVSDYIGSRAPPSAPLFEPEXPMSWCFYRAGIAXVMAYFLFLNINVFTVM

SEQ ID NO: 141684 - protein, 557 aa, Oryza sativa
  Clone ID: PAT_MRT4530_42765C.1.pep
MACTKGVVFDVNLLENSTLEDGLAGWAAVGECTALSVHNEEPEKVPTETINTVADDYKPSGRYILAAGRAGEEDGLRRAVAGALKPRVTYRVAGWISLGDGAEGSHPVRVNLRLDDDDECVVEGGAVCAQAGRWTEIKGAFRLKASPCGATVFVQGAPDGVDVKVMDLQIFATDRRARFRKLRKKTDKVRKRDVVLKFGGAGSISGASVRVMQMDSSFPFGACINGGVIQNPAFVDFFTKHFDWAVFENELKWYWTEAQQGQLNYADADALLDFCDRYGKPVRGHCIFWAVDNVVQQWIKGLDHDQLTAAVQGRLTGLLTRYAGRFPHYDVNNEMLHGSFYQDRLGDDINAFMFRETARLDPGATLFVNDYNVEGGNDPNATPEKYIEQITALQQKGAAVGGIGLQGHVTNPVGEVICDALDKLATTDLPVWLTELDVCESDVDLRADDLEVVLREAYAHPAVEGVMFWGFMQGHMWRQDACLVNSDGTVNDAGERFIDLRREWTSHARGHIDGDGHFKFRGFHGTYVVQLATATGKMHKTFTVEKGDTPLVLDMDV

SEQ ID NO: 141685 - protein, 125 aa, Oryza sativa
  Clone ID: PAT_MRT4530_42766C.1.pep
MSGGTEGQTAEPGDGAARRVKPRRQMRPGGAPPAPAPRRGGAGAGAAAVSLSRRQPWRRLKLHRPTNQQEKQAEGTKDDKVTNQSISPDSVGSSVSVVCPPRAVVDGRTFVRSLGGPALGCAPCA

SEQ ID NO: 141686 - protein, 138 aa, Oryza sativa
  Clone ID: PAT_MRT4530_42767C.1.pep
MAANARWWMRRWWQPRVDPAAAAPSAPSRLPPTADPAPVALLSVAASGSGSGGGDYGLIRRRQLPLSLLASLPQQIRRWWQRQRQPQVDPAAVAPSVSSRLPPTADSVVAAMSAAATSGSGGGRGWIQWRPRGWIRSR

SEQ ID NO: 141687 - protein, 71 aa, Oryza sativa
  Clone ID: PAT_MRT4530_42768C.1.pep
GVSYGWFSKRLIHVYSSTTVSAVSKPFPFMVHKSIKLCGICMARNTTSAAITSACGQSQWSACRPCCLNSI

SEQ ID NO: 141688 - protein, 457 aa, Oryza sativa
  Clone ID: PAT_MRT4530_42769C.1.pep
MGAPSREDEEAKKMEAGGDTVGQKLDAGALFVLQSKGSWLHCGYHLTTSIVAPPLLSLPFAFASLGWAAGLICLVIGAAVTFYSYNLISLVLEHHAQQGRRQLRFRDMATDILGPGWGRFYIGPIQFLVCFGAVVACTLLAGQSMKAIYLIANPGGTIKLYVFVAIFGVFMMILAQMPSFHSLRHVNLISLVLCLAYSFCAVAACIYLGSSKGAPEKDYSIAGANTRDRVFGVFNAIAVIATTYGNGIIPEIQATVAAPVTGKMFKGLCLCYAVVVTTFFSVAISGYWAFGNQSQGTLLSNFMVGGRAVIPEWLLLIIELFTLLQLSAVAVVYLQPTNEVLEGLLSDPKAGQYAARNVAPRVLSRTAAVALGTTIAAMVPFFGDMNALIGAFGFLPLDFAVPAVFYNVTFKPSKKGAVFWLNTTIAVVFSALAVVASVAAVRQIILDANSYKLFANV

SEQ ID NO: 141689 - protein, 143 aa, Oryza sativa
  unsure (1)..(143): unsure at all Xaa locations
  Clone ID: PAT_MRT4530_4276C.1.pep
QPAASDGRVLCRXLISSPCGGTKERGGGHGRPAGRLWRARPLPGRRXXXTXAKXVLGNLHTLHNILIPTLSVLSXXAPPPXSLTXXPVXTADAPPASSTKVVXWRLLRXXXTXMXFXTCLXEXSXXQNXPXTXXXPQDXRPXL

SEQ ID NO: 141690 - protein, 535 aa, Oryza sativa
  Clone ID: PAT_MRT4530_42770C.1.pep
MRCAFLHNDKEAPVIISDKLSEDKTQRLLSMLEKHRAILGYSLQDLRGINPALCTHRIPIKPENMIKDIMEVFMDDFSVYGKTFVDYVSKWVEAMPCSATDANHAKKMFIEIIFPRFGTPRMVISDGGSHFIDKTFRDLLRDMGAKHNVAIPYHPQTSSQAETSNKQIMNILQKTIVYGKSCRLPVELEHRAYWAIRNWNMDFEGVGEWRKMQLAELEEWREKAYHNSKIYKERTKRWHDKRIKNKKFKPGDKVLMFNSRVKLFGHRKLQSKWEGPFDVIDTSSHEAITLRDDSGDEVLHKYTTPTATPSTTKGDCFCNWGVRSPGGGYGNSLLWPLTTSEKEGAAESRSPPPMKVKRHSMPPPIMRAPGQFEDNEVKSQEPSVHKLAAQVNKLRKENIELRDSNAELEVELAELRNNVDTLSRDRQSLTPTPLHIVGSWVSLFRKGRRQWQGRAMAAVGWTAAGSGGGRWSGGGLFVSPVVAGCGKGRRRPDLGATAAAGKGQRLAAVKEAVVRGHGIDDEDCDGDGRRSRQRR

SEQ ID NO: 141691 - protein, 204 aa, Oryza sativa
  unsure (1)..(204): unsure at all Xaa locations
  Clone ID: PAT_MRT4530_42771C.1.pep
MSQEGADLSQDVDESPYHTAVVTTNNLVRSIKAEKSNSSSSSGKPVETDIGLKVASPTMFGFNTKIEGTGKNMAVKREEGEGGGRPGVSSGVSTRDTNGKGKNAMDMEHALHIWTERERRKKMKNMFSTLHGLLPKIPGKTDKASIXVGEAIGYIKTLXEDVVQKLETIKXTERVRAHXWXGGXAAAAVAANGXXGEGSSHSHS

SEQ ID NO: 141692 - protein, 350 aa, Oryza sativa
  Clone ID: PAT_MRT4530_42772C.1.pep
MSQEGADLSQDVDESPYHTAVVTTNNLVRSIKAEKSNSSSSSGKPVETDIGLKVASPTMFGFNTKIEGTGKNMAVKREEGEGGGRPGVSSGVSTRDTNGKGKNAMDMEHALHIWTERERRKKMKNMFSTLHGLLPKIPGKVANAIEMVAFSLMFLVLTDKASIVGEAIGYIKTLEDVVQKLETIKTERVRAHQWAAAAAAAVAANGGGEGSSHSHSQPPRHATAVTVAVAEPAPVAAAVNAQAPQKKAAAAAAPTLQTWSAPNITLTMAGVDAFINMCLPRQRASFTTVAFVLEKHQIDVVTSTISADHDKSLFSVHVRLNEASLQSTEGLTPEAKYKLAVSELMVRLAE

SEQ ID NO: 141693 - protein, 93 aa, Oryza sativa
  Clone ID: PAT_MRT4530_42773C.1.pep
AQLLSAAIIAIASPFAGRQRPPPLPPPLPASQSEREMRKGEKMVKREEADMAMLTYGSLVGPMLTQPPPRSKPESKPMKGWAFGLSVISVFEK

SEQ ID NO: 141694 - protein, 50 aa, Oryza sativa
  Clone ID: PAT_MRT4530_42774C.1.pep
FLLISKFEICYPINMPLHLFRLTMAMCGQFEKWIKMVRTIVRIGINNFGL

SEQ ID NO: 141695 - protein, 69 aa, Oryza sativa
  unsure (1)..(69): unsure at all Xaa locations
  Clone ID: PAT_MRT4530_42775C.1.pep
SYLLSNNDAGLTKMSSTKPMVVRSGSYYPALGRFTLRNMTQTVAVGVINNTDKXTPAGAYSTNAVDKKK

SEQ ID NO: 141696 - protein, 64 aa, Oryza sativa
  Clone ID: PAT_MRT4530_42776C.1.pep
GGVVAPSIFKSFAQGGGSPATLGGFPPGAFFANGGVFFFKNAPGGGVWAKKFFVPKRGSSFNQA

SEQ ID NO: 141697 - protein, 73 aa, Oryza sativa
  Clone ID: PAT_MRT4530_42777C.1.pep
MHRLLSSSRTSHELSDVADMKLRSGFVEPAESSDSLVEMWTEDGDGVQVYPDGATSRRIAPPLSPRKPHQDVV

SEQ ID NO: 141698 - protein, 98 aa, Oryza sativa
  Clone ID: PAT_MRT4530_42778C.1.pep
LHTQVQFQQSNHGKSGVSGHPILALTQQFNFFARLAKSSLSQFNHLIIKFHCRGGPNIFRQRRSPVSVHQAISHVPSNPGHIVIIRQNYNTKPILALP

SEQ ID NO: 141699 - protein, 97 aa, Oryza sativa
  Clone ID: PAT_MRT4530_42779C.1.pep
PQPPQLAALTPSDRRRPAPHQTAAAAGLHLHERAPAWLYITSPPLPQLAAVSPHRSAPTRTGRAATAALHHNERAPAGLCLTPPPPPQLAAAARTHK

SEQ ID NO: 141700 - protein, 125 aa, Oryza sativa
  Clone ID: PAT_MRT4530_4277C.1.pep
MSFAATRMMAAARRAFHSKAAEDVRRHLDAMEKANLERLPQLLDPIIRQRAARDVHRNTHRIKIYANPCIGRPPPEGHIWYDVAWAKNLGLVFFVTSFFGMYDVLFEETQQSDHHMSSSLPMPPS

SEQ ID NO: 141701 - protein, 284 aa, Oryza sativa
  unsure (1)..(284): unsure at all Xaa locations
  Clone ID: PAT_MRT4530_42780C.1.pep
MGRAPCCDKKGLKKGPWTPEEDKLLVDYIQANGHGSWRLLPKLAGLNRCGKSCRLRWTNYLRPDIKRGPFTAEEQKSIVQLHGIVGNKWSMIAAQLPGRTDNEIKNYWNTHLKKQLRRMGLDDPPPGPAAGCPAARHMAQWETARLEAEARLSLLSSSGAAATTTITAATTTTSASSSSTTAGPVAAAATSPADVFXPPLELQHRGLLPQASRGGGGVVVPFAGGRHEGRCEAGGGGGAGRGRLVGGVQRGGGGDHGGGRVPDVPRLRRRGAGPVPRPFTFTVL

SEQ ID NO: 141702 - protein, 72 aa, Oryza sativa
  Clone ID: PAT_MRT4530_42781C.1.pep
PALGGQQFPYQGINIVQAKGQQVQLHQFGDLHFDRNLGQAQTLLAFNGPPKNGIPPREYGAPRTLTPPGGVL

SEQ ID NO: 141703 - protein, 33 aa, Oryza sativa
  Clone ID: PAT_MRT4530_42782C.1.pep
RTDRRRQLATKSCTLAYEQEKQLGPSYQDGTKK

SEQ ID NO: 141704 - protein, 91 aa, Oryza sativa
  Clone ID: PAT_MRT4530_42783C.1.pep
KNNQIWQHPPLGGQQSPYQGINIVQAKGQQLQPHQVGDLPLDRKLGQAQTLLAFNGPPKKGIPPRDKGAPRTNTPPGGVLEKVLPEKGVGS

SEQ ID NO: 141705 - protein, 115 aa, Oryza sativa
  Clone ID: PAT_MRT4530_42784C.1.pep
ERHKGWPIALRLIIVIKGNLLHNAPHRCLNLSNPNSLLECGNKVSQRHLTTCVYEFICSSMYILLGNLLLIANLSGNVNSAPRIVLFCMLLEITREIIQKTSNSSLFLISRVTLY

SEQ ID NO: 141706 - protein, 382 aa, Oryza sativa
  unsure (1)..(382): unsure at all Xaa locations
  Clone ID: PAT_MRT4530_42785C.1.pep
PDRCCRCRRRRSGGDDGGAISTSAGAGSGGGGGGGGXQQRTVPTPFLTKTYQLVDDPAVDDVISWNDDGSTFVVWRPAEFARDLLPKYFKHNNFSSFVRQLNTYGFRKIVPDRWEFANDCFRRGERRLLCEIHRRKVTPPAPAATTAAVAAAIPMALPVTTTRDGSPVLSGEEQVISSSSSPEPPLVLPQAPSGSGSGGVASGDVGDENERLRRENAQLARELSQMRKLCNNILLLMSKYASTQQLDAANASSAAGNNNNNNCSGESAEAATPLPLPAVLDLMPSCPGAASAAAPVSDNEEGMMSAKLFGVSIGRKRMRHDGGGDDDHAATVKAEPMDGRPHGKDEQSAETQAWPIYRPRPVYQPIRACNGYEYDRAGSDQD

SEQ ID NO: 141707 - protein, 440 aa, Oryza sativa
  unsure (1)..(440): unsure at all Xaa locations
  Clone ID: PAT_MRT4530_42786C.1.pep
PDRCCRCRRRRSGGDDGGAISTSAGAGSGGGGGGGGXQQRTVPTPFLTKTYQLVDDPAVDDVISWNDDGSTFVVWRPAEFARDLLPKYFKHNNFSSFVRQLNTYGFRKIVPDRWEFANDCFRRGERRLLCEIHRRKVTPPAPAATTAAVAAAIPMALPVTTTRDGSPVLSGEEQVISSSSSPEPPLVLPQAPSGSGSGGVASGDVGDENERLRRENAQLARELSQMRKLCNNILLLMSKYASTQQLDAANASSAAGNNNNNNCSGESAEAATPLPLPAVLDLMPSCPGAASAAAPVSDNEEGMMSAKLFGVSIGRKRMRHDGGGDDDHAATVKAEPMDGRPHGKDEQSAETQAWPIYRPRPVYQPIRACNGYEYDRAGSDQDGHVQLRTCVNNLLVTGAGTLDAGREYETNSLPRPRRAKNSNDVPGMPNSLGQAPSPVA

SEQ ID NO: 141708 - protein, 59 aa, Oryza sativa
  Clone ID: PAT_MRT4530_42787C.1.pep
MAFIEFSSSSSSSRVYCILDDNLWYFEDRIIRLSISDLFALEQESFWNSYRSREFSYIS

SEQ ID NO: 141709 - protein, 67 aa, Oryza sativa
  unsure (1)..(67): unsure at all Xaa locations
  Clone ID: PAT_MRT4530_42788C.1.pep
PLNLSTFLPFFIINTQPHRALYKITTFPKIHTTXSFLTLYENIFLHLPQPQLIHTSYFSNTLHYSIS

SEQ ID NO: 141710 - protein, 150 aa, Oryza sativa
  Clone ID: PAT_MRT4530_42789C.1.pep
MAACFRYAPSGPAGPSLATSVYETNLDLAALSWTRTSLGLSLCAVLRLSSPAIPEETDGVRPERRSGGRRRGGGGGDRRRHEVLRGARGTSGLGRRRPRRRVTLPTVLLLCAPRRPRRRVPAHRGAPQCRQICRIQPKKSCAAGRRCLSN

SEQ ID NO: 141711 - protein, 60 aa, Oryza sativa
  Clone ID: PAT_MRT4530_4278C.1.pep
MSLHSIAEHGLAYFGRWPAHCSQIWLYNGTYQKREKDYEQLQNSSDFFYSTLSLILAYKI

SEQ ID NO: 141712 - protein, 389 aa, Oryza sativa
  Clone ID: PAT_MRT4530_42790C.1.pep
MGVGRALSDAKPYVAMVLLQVGFAGMYIVSVASLKRGMNHFVLVVYRNLVATVLMAPFALLLERGVRPKMTLRIFLKIMGLAILEPVLDQNLYYMGAKLTSAGFASALVNILPAVTFLLAVLLRMEKVRLRSLHSQAKIAGTVFTVAGAVLMIMYHGPVVQFPWSSSASGSAGHHVDGAAAAAATASSASSWLNGTVMLVGSCVCWSGFFILQNNTLQSYPAELSLTALICVLGSAMSGAVALVAERRDMSVWVIGFDTRLFTAVYSGIVCSGVAYYVQGLVTRARGPVFVTAFQPLCMIITAVLGSTILKEEITLGSVIGAVIIVVGLYALIWGKGGDHADNGKPPAAAAAAPEKGLPLTTLQANGDGDGKLAVLVADVEMPAVKDVY

SEQ ID NO: 141713 - protein, 83 aa, Oryza sativa
  Clone ID: PAT_MRT4530_42791C.1.pep
MRLLTVVNGGRNRPRSSRAKPRRASARGRGRGTRRACALRRMVAFMRVKPLTLGSITHATLAGRTLAAHASLPVRDWKKYAPK

SEQ ID NO: 141714 - protein, 386 aa, Oryza sativa
  Clone ID: PAT_MRT4530_42792C.1.pep
MGYRAVCRCWRSATDDPRGASARDPRFRPRHWAMLDEVFQTDARLFANAATGRFLRMDLPLLGRGRRYRLVASAPGGDLVLAEASPPARGARPQPVHRRREARRHDALRGAAALRGRVRCPCHRRFAHPRPARRRLRQGLLRRPRQRRLLRVRGELRVRSHQAGRRRWPLRRRRRARVGGVDPGPRGHQDGAPSRRQNHKHMSREPRVPLLRGGIRGGSAAHLQDGQKDRADLQDEHGRGEGDRSLEEVKSIGGGRAIFVGATRCISINADKFNAIDGNRIYYQERDDLTSADIYMYELESEETTKIGGAIDSLNPVFLVSTEPPFSPIQLFCSYADEALRFRLEWEKIVQSLPERLPDDIMASMGADLMGDFEDEFEDFEYEFND

SEQ ID NO: 141715 - protein, 762 aa, Oryza sativa
  Clone ID: PAT_MRT4530_42793C.1.pep
MGTAHLSHLQYMGRLRGKVWVWRRSASGTRLGSERVLRRQVRRFDSVRSTTARAQNGNAGRSMTEERGCTMSDTEMPFKYSSGKAFPLGVSQVEGGLNFALFSQHASSVILCLKLPGRGTEDEKGADVVEFVLDQQKNKTGDIWHVIVEGLPASGVLYGYRVGGPQGWDQGHRFDSSTVLLDPYAKLVSGRKYFGVAEEKSSQHFGTYDFDSSPFDWGDDYRLPNLPEADLVIYEMNVRAFTADESSGLDSTSRGSYLGLIDKIPHLLELGVNAVELLPVFEYDELEFKRYPNPRDHMVNTWGYSTINFFAPMSRYASAGGGPVAASKELKQMVKELHKAGIEVILDVVYNHTNEADDAHPYMTSFRGIDNKVYYMLDLNKNAELLNFSGCGNTLNCNHPVVKELILDSLRHWVEEYHIDGFRFDLASVLCRGPDGCPLDAPPLIKEIAKDAVLSRCKIIAEPWDCGGLYLVGRFPNWDRWAEWNGKYRDDLRRFIKGDPGMKGVFATRVSGSADLYQVNERKPYHGVNFVIAHDGFTLCDLVSYNLKHNDANGEGGCDGCNDNFSWNCGVEGETNDLNVLSLRSRQMKNFHVALMISQGTPMMLMGDEYGHTRYGNNNSYGHDTCINNFQWEQLEQRRDGHFRFFSEMIKFRHSNPILRRDRFLNKNDVTWHEDCWENQESKFLAFTVHDHNSGGDIYLAFNAHDYFVDAVIPPPPHHKCWNRVVDTNLESPNDIVPEGVPFTGPKYRIAPYSSILLKAKP

SEQ ID NO: 141716 - protein, 188 aa, Oryza sativa
  Clone ID: PAT_MRT4530_42794C.1.pep
MRALDEKETKMVFEKLFKFTGPNLKHLLERPAVEGPDPQAGRYCLRLHKNRVYYASEALVRRATAVARPRLAGVGTPIGKFTHGGAFHLTVHALDLLAAHARRRVWLKPDTERSFLFGNSVPKSSLARITENTKANDGVVVMSMADVPLGFGIAARSAQDCRKADTNAVVVLHQSDAGEYLRREEELM

SEQ ID NO: 141717 - protein, 64 aa, Oryza sativa
  Clone ID: PAT_MRT4530_42795C.1.pep
KCIILLARVQPFMDPVDTVTHERMRPSFTVLRGLHIGKYFLFTVFVIVIEFTFFFIFCIFFVDI

SEQ ID NO: 141718 - protein, 43 aa, Oryza sativa
  Clone ID: PAT_MRT4530_42796C.1.pep
GAKECSHRGGFNTTSLFLHHLAHPIPPKRPPYFRQGGKGRYQR

SEQ ID NO: 141719 - protein, 75 aa, Oryza sativa
  unsure (1)..(75): unsure at all Xaa locations
  Clone ID: PAT_MRT4530_42797C.1.pep
NSXXKLSVARSXGSFCXYXLAKLXIRFAPXNAQHIVTXLVTCPTFRRXXRWRHEMITGEXLQXKDXXKNWCSGLS

SEQ ID NO: 141720 - protein, 48 aa, Oryza sativa
  unsure (1)..(48): unsure at all Xaa locations
  Clone ID: PAT_MRT4530_42798C.1.pep
ASTSDTXPLLWGGFQNYSAGFSMTTDMADDPLDPPTEPQPQTLPAEAA

SEQ ID NO: 141721 - protein, 54 aa, Oryza sativa
  Clone ID: PAT_MRT4530_42799C.1.pep
IRKHLEWTGNAKRSKFRLIHVESRIHRFARYYKRTKKRPPTWKYRSSTASNVVA

SEQ ID NO: 141722 - protein, 385 aa, Oryza sativa
  unsure (1)..(385): unsure at all Xaa locations
  Clone ID: PAT_MRT4530_4279C.1.pep
RCFHRRPEPLPPPAGERRLARPCRRYPQRRHALPHPVYHSSSPIHRRSAVPPSSQGARRHLARRQPPPSAIWPLGEHSPPSPSSSLSPPPNPGSGYPYGGAGGYGAPPPPYGSSPAPSAPPYGAKPPKEGKTSSSSAPYYGSGGGYGAXGSGGGYGAPSTQRPYGSGGGYGAPPSSQPYGAPYGAPPPSSAPYGAPGGYGSPFASLVPSAFPPGTDPNVVACFQAADRDGSGMIDDKELQSALSGYSQSFSLRTVHLLMYLFTNTNVRKIGPKEFTSVFYSLQNWRSIFERFDRDRSGKIDATELRDALLSLGYSVSPTVLDLLVSKFDKTGGKNKAIEYDNFIECCLTVKGLTEKFKEKDTAFSGSATFTYEAFMLTVLPFLIA

SEQ ID NO: 141723 - protein, 48 aa, Oryza sativa
  Clone ID: PAT_MRT4530_427C.1.pep
LVCFLLMSESTSFHVLSSSEQHLICMALADRYTPNIHSTGGSILKIRR

SEQ ID NO: 141724 - protein, 767 aa, Oryza sativa
  Clone ID: PAT_MRT4530_42800C.1.pep
MMTAFLHHLQNPPQHNAPPPPQHSKLAEFLRIRPPTFSSSNNPVDALDWLHAVGKKLDTVQCSDEEKVIFAAHQLQGPASLWWDHFQATQPEGQPITWARFTAAFRRTHVPAGVVALKKREFRELKQGNRSVMEYLHEFNNLARFALEDVHEDEEKQEKFLAGMDPELSVRLVSGDYPDFQRLGGLKYTSQKFYALNFRLLQPPRHFLWLWKSKVFSKYRSTKNDIGETIEDFDEVEKLGQGFTSADPLEEVDIGDGTKPRLTFVNKNMKADYKPYKQPPHRFNPLLYYRVKEEIDRLLKAGFFRPCRYAEWVSSIVPVKKKGIGKIRVCIDFRDLNKATPKYEYPMPIADMMINDASGHKVISFLDGNAGYNQIFMVEEDMYKTAFRCPGFVGLFEWVVMTFGLKNAGATYQRTMNLIFHDLLGIILEIYIDDIVVKSDGMEGYRADLSLAFERMRRYGLKMNPLKCAFGVSAGKFLGFMLHERGLELDPKKIEKIPDFKAPTCKREVQKLLAKVNYLRRFIYNLVGKIDAFVPILRLKKEADFTWGAKQQEAFEGLKKYLSTPPVVRAPKAGMPFRFYIAAEDKVIGAVLTQEEDGKEYIITYLNHRLLDAETSLAGVSHVFLIGLGLRRKPLNRGKQEDSFGETAKNDHVDHSDLESSNLPDPGKKNVPKDLEALAGAKKDVPEEVEFIEMNSNDLDNKMRRNIGKRNRQDDNGSKTKKSSNRNVQGHGTSRSVKGRTTELTPDPTKHAMGRGATRLTLPHGFV

SEQ ID NO: 141725 - protein, 397 aa, Oryza sativa
  Clone ID: PAT_MRT4530_42801C.1.pep
MVTTRRSAATGEGSHPEGSNHNNHDSPPPPPPPPPPPPPDTNSILTQILAQQANMMAAFIHHIQIPPQHNAPPPPPPPQHSKLAEFLRIRPPTFSSSNNPVDALDWLHAVGKKLDTVQCNDEEKVIFAAHQLQGPASLWWDHFQATQLEGQPITWARFTAAFRRTHVPAGVMALKKRKFRELKQGNRSVMEYLHEFNNLARYAPEDVHEDEEKQEKFLAGMDPELSVRLVSGDYPDFQRLVDKSIRLEAKHKELESHKRRLANFRNQQGANQRVRYTNPYPGGSSSQQQQQQPRSAPRPQFVVRVSQPQQQQSQQGTRAPRPPAPAVQPGQGRRDAQGQQRLCFNCFEPGHFADKCPKPRRQQGQAPPRPNNGGKDVIPGRVNHVTAEDVLTTPDVI

SEQ ID NO: 141726 - protein, 89 aa, Oryza sativa
  unsure (1)..(89): unsure at all Xaa locations
  Clone ID: PAT_MRT4530_42802C.1.pep
WASSEPTHDTLCANRLKSTXPTPVSLSTHVFFQRWIKIATRHLTGMCEWPIGDNCSLQVDPTLSLRIAFHFXRCIDVKRIYFPVICHGY

SEQ ID NO: 141727 - protein, 731 aa, Oryza sativa
  Clone ID: PAT_MRT4530_42803C.1.pep
MTGFVLELRGMCVVLGYPHGVDYQARPLPKQEGEDAEPHAGWEVTAVILSGSPERTSLAVTAGGDSFPAACQNAALLAIGTLHQRYPDELQHSPYRYHPRRGGARDYATFRDASSEDDATVVHLARMVEAYDAARIDFHQMVRRGMVENNLKILELRQENLQLKKDLDALEAQLHQLKIAQGEISRPKRRRVCRSQKITARKSTSRPELVRQSLAWTCFVETPRAEPAPVVPQEGEASGVGSSEGALLLTFRPGPSQRSSSLFAGSMWGFQMVTTRRNVNTGEGNQPEGSNPNHQGNPPPPPPPDTNAILTQILAQQANMMNAFLHHLQNPPQQNAPPPPPQHSKLAEFLRIRPPTFSSSNNPVDALDWLHAVGKKLDTVQCSDEEKVIFAAHQLQGPASLWWDHFQATQPEGQPITWARFTAAFRRTHVPAGVVALKKREFRELKQGNRSVMEYLHEFNNLARYAPEDVREDEEKQEKFLAGMDPELSVRLVSGDYPDFQRLVDKSIRLEAKHKELESHKRRLANFRNQQGANQRVRYTNPYPGGSSSQQQQQQQPRSAPRPQFVVRVPQPQQQQNQQGTRAPRPPTPTVQPVQGRRDAQGQQRLCFNCFEPGHFADKCPKPRRQQGQAPPRSNNGGKDVIRGRVNHVTAEDVLTTPDVIVEKKDKTKRMCVDYRALNEVTIKNNVSRQNTNDRPDFSNLSKCQNGSGMKLGWISSPDFQKPKVDMILYG

SEQ ID NO: 141728 - protein, 96 aa, Oryza sativa
  Clone ID: PAT_MRT4530_42804C.1.pep
NTLGYGRRICLPTRCRTRLAEAPCSYGPGGTLVCPCLVHRYHVWSSTRRAGSGPCRADPPAAAAPAPPPSPPPSPCSTPPPLPTTSTPPCPRPAPP

SEQ ID NO: 141729 - protein, 83 aa, Oryza sativa
  Clone ID: PAT_MRT4530_42805C.1.pep
DPFRANLINLVNSQDFLCTPDPVIKASVVPHLIAWPVSPLGTLFLLTKSVPKSFVFLKKKKKKKKKKKKKKKKKKKKKKKKQK

SEQ ID NO: 141730 - protein, 86 aa, Oryza sativa
  Clone ID: PAT_MRT4530_42806C.1.pep
VSEQKRLYAALCKVHTGGEGAIAIPPFPTPSRRLLSSPLPGGHPPWRLPAAKGHNTVGFFKRPGSEVKMGQKHAWVGPASQSGPVP

SEQ ID NO: 141731 - protein, 344 aa, Oryza sativa
  Clone ID: PAT_MRT4530_42807C.1.pep
MMNAFLHHLQNPPQQNAPPPPPQHSKLAEFLRIRPPTFSSSNNPVDALDWLHAVGKKLDTVQCSDEEKVIFAAHQLQGPASLWWDHFQATQPEGQPITWTRFTAAFRKTHVPAGVVALKKREFRELKQGNRSVMEYLHEFNNLARYAPEDVREDEEKQEKFLAGMDPELSVRLVSGDYPDFQRLVDKSIRLEAKHKELESHKRRLANFRNQQGANQRVRYTNPYPGGSSSQQQQQQQQPRPAPRPQFVVRVPQPQQQQNQQGTRAPRPPTPAVQPVQGRRDAQGQQRLCFNCFEPGHFADKCPKPRRQQGQAPPRSNNGGKDVIRGRVNHVTAEDVLTTPDVIV

SEQ ID NO: 141732 - protein, 129 aa, Oryza sativa
  Clone ID: PAT_MRT4530_42808C.1.pep
QSISWFICAKSKCVSWNVHGFFWLSSSGSAPGLLSLPLQLRSSSSAVPKLTVPPMPSVPIPKVTIPPTAAGTIPSLPIPAIPTTIPTIPTVPVTLPPMPSIPTTIPSIPTTIPTTIPTIPGFQMPPIPF

SEQ ID NO: 141733 - protein, 233 aa, Oryza sativa
  Clone ID: PAT_MRT4530_42809C.1.pep
MVMPMVTTRKSAATGEGSQPEGSNHNNQGSPPPPPSSPPPPPPDTNAILTQILAQQANMMAAFLHHIQNPPQHNAPPPPPQHSKLAEFLRIRPPKFSNSNNPVDALDWLHAVGKKLDTVQCSDEEKVVFAAHQLQGPASLWWDHFQATQPEGQPITWARFTAAFRRTHVPAGVMALKKREFRELKQGNRSVMEYLHEFNNLARYAPEDVREDEEKHEKFLAGMDPQLFVRLVF

SEQ ID NO: 141734 - protein, 63 aa, Oryza sativa
  Clone ID: PAT_MRT4530_4280C.1.pep
ARWPRCLDPLVDSLAATMAQEERRRPLSSSHRSLVACHLDPLAAPKLAPVAFSATAMGCEAGR

SEQ ID NO: 141735 - protein, 154 aa, Oryza sativa
  Clone ID: PAT_MRT4530_42810C.1.pep
MASSGCHLLVLLLAFSAFHCSYAARHLLDTAAAAAAPEAAPAQPSMPTVPTTLPPIPSIPAVPKLTVPPMPSVPIPKVTIPPTAAGTIPSLPIPAIPTTIPTIPTVPVTLPPMPSIPTTIPSIPTTIPTTIPTIPGFQMPPIPFMSSPPKTTSP

SEQ ID NO: 141736 - protein, 175 aa, Oryza sativa
  Clone ID: PAT_MRT4530_42811C.1.pep
MVTTRRNAATGEGSHPEGSNHNNQGRGQTPPPPPPPPPPDTNVILTQILAQQANMMAAFLHHIQRPPQHNAPPPPPQHSKLAEFLRIHPPTFSSSNNPVDALDWLHAVGKKLDTVQCSDEEKVIFAAHQLQGPASLWWDHFQATQPEGQPITWARFTAAFLRTHVPAGVMALKKR

SEQ ID NO: 141737 - protein, 230 aa, Oryza sativa
  Clone ID: PAT_MRT4530_42812C.1.pep
MNPNDGNPEGGEIPQPDPTTLVEVMAKQTQLLEAIAQNQGNKGQGNHAEFMRVRPPTFSKTEEPMDAEDWLRAIEKKLALVRTDEQEKVTFETHRLEGLANEWWEAYQASIDDPAHIITWKEFRTAFKNTFIPNAIIRMKKNEFRRLRKGFMTVQEYLNKFTQLARYAASDIQDEKENIERLIEGLRDELRGPMIGQDHENFQSLVNKVVRLENDQKMIEGFRKRRINLQ

SEQ ID NO: 141738 - protein, 495 aa, Oryza sativa
  Clone ID: PAT_MRT4530_42813C.1.pep
MKILELRQENLQLKKDLDALESQLHQLKLAQGEDSRPKRRRVCRSQKITARKSTSRPELVRQSLAWTCFVETPRAEPAPVVPQEGEASGVGSTEDALLLAFRPGPSQRRNVSTGEGNQPEGSNPNPQGNPPSPPPPDTNAILTQILAQQANMMTAFLHHLQNPPQQNAPPPPPQHSKLAEFLRIRPPTFSSSNNPVDALDWLHAVGKKLDTVQCSDEEKVIFAAHQLQGPASLWWDHFQATQPEGQPITWAHFTAAFRRTHVPAGVVALKKREFRELKQGNRSVMEYLHEFNNLARYAPEDVREDEEKQEKFLAGMDPELSVRLVSGDYPDFQRLVDKSIRLEAKHKELESHKRRLANFRNQQGANQRVRYTNPYPGGSSSQQQQQQQQSRSAPRPQFVVRVPQPQQQQNQQGTRAPRPPTPTVQPVQGRRDAQGQQRLCFNCFEPGHFADKCPKPRRQQGQAPPRSNNGGKDVIRGRVNHVTAEDVLTTPDVIV

SEQ ID NO: 141739 - protein, 53 aa, Oryza sativa
  Clone ID: PAT_MRT4530_42814C.1.pep
MALMSTASCAIANVWQVTAATVGIGRATRPKPLEKHFSMVAIAGALAPKVAQT

SEQ ID NO: 141740 - protein, 60 aa, Oryza sativa
  Clone ID: PAT_MRT4530_42815C.1.pep
MAPPQPPAAACRSKSAPSKSARVVLNSPVWPDSRFPEIGVKVMNRVHDTPAMSGEGTSKS

SEQ ID NO: 141741 - protein, 716 aa, Oryza sativa
  Clone ID: PAT_MRT4530_42816C.1.pep
MTGFVLELRGMCVVLGYPHGVDYQARPLPDQEGDDAEPHAAWEVTAVILSGSPERTSLAVTAGGDSFPAACQNAALLAIGTLHQRYPDELQHSPYRYHPRRGGARDHATFRDASSEDDATVVHLARMVEAYDAARIDFHQMVRRGMVENNLKILELRQENLQLKKDLDALEAQLHQLKIAQGEDSRPKRRRVCRSQKITARKSTSRPELVRQSLAWTCFVETPRAEPAPVVPQEGEASGVGSSEAPSLFAGSVWGFQMVTTRRNVNTGEGNQPEGSNPNPQGNPPPPPPPDTNAILTQILAQQANMMTAFLHHLQNPPQQNAPPPPPQHSKLAEFLRIRPPTFSSSNNPVDALDWLHAVGKKLDTVQCSDEEKVIFAAHQLQGPASLWWDHFQATQPEGQPITWARFTAAFRRTHVPAGVVALKKREFRELKQGNRSVMEYLHEFNNLARYAPEDVREDEEKQEKFLAGMDPELSVRLVSGDYPDFQRLVDKSIRLEAKHKELESHKRRLANFRNQQGANQRVRYTNPYPGGSSSQQQQQQPRSAPRPQFVVRVPQPQQQQNQQGTRAPRPPTPAVQPVQGRRDASGPQRLCFNCFEPGHFADKCPKPRRQQGQAPPRSNNGGKDVIRGRVNHVTAEDVLTTPDVIVEKKDKTKRMCVDYRALNEVTIKNNVSRQNTNDRPDFSNLFKYQNGSGMKLGWISSPDFQKPKADMILYG

SEQ ID NO: 141742 - protein, 906 aa, Oryza sativa
  Clone ID: PAT_MRT4530_42817C.1.pep
MRIGRRPGRPQGVRVGRFINAAGTTGFPTGKRAETAMTMITPSYLGDTIEYSSFRQEQQQAQQRLGIKELPLSGKKLTWSQECSNPTQTKIDRAFCCLESDILFDSAQMSALSTSCSDHAPLFITGCVEREQNNSFRFESYWLKFPDFLQITEDSWNRPIQTSNPFVRLHLKLKRLARDLRRWKATKIGDIRLQLIIANEVVYQLDVAQEERTLSDAEQSLRKSLKSRILGLAAIERTRLRQRARITWLKLGDVNSKFFQIKANGRKRKNHILLLHTPSSVAVTKSQKEEKLNRYFTQKLGSFVIREKSLNWSSLDLPTVDLSDLDEEFFEEELKEAISDLPSEKAPGPEGYIGAFFKQAWSIIKTDLMQAVSFFGDMGYYRLHDLNCAHICLIPKKTDASKAEDFRPISLMHSSAKIIAKLLANRLAPKLGYLVSQSQSAFIRKRAIHDNILFVQNMIKSFHRAKKPTLFLKVDISKAFDTVNWAYLLEVLQNFGFSQKWCNWISNLFGTSSSMVLLNATPESEIDHARGLRQGDPLSPMLFILAMEPLYKLFEKAEAHGFLSTLQRQRRFRCSLYADDVALFLKPKREEMLVLRRILSAFADVSDLHTNMDKTEIYPISCNEVDLEDCLSIFPGKVSTFPCKYLGIPIHTRKLRKIDLQPLVDKVGSRIPGWKGRFFSSAGREILKSFSLEGDDPEKVNGGSCLVNWNAVCRPKSLGGLGILNLEKFAMALRLRWLWFEWKDEIYCKRSICKPKPRTASSGNGLRMEFIQQKAPMKHSSKDQINWHASISEGEFWTCTGVKQISQAYSVTKKYQHGAHVHRVMRDCERVAGDGGNGWHQESDEVGNEVPRGTAYRGVQLGWRMRAQAGQSRWRSTSPWWQSLVHWHPQWRRHEGQAKAVLASTS

SEQ ID NO: 141743 - protein, 148 aa, Oryza sativa
  Clone ID: PAT_MRT4530_42818C.1.pep
MRWLLLALFLVALVSNGAAVHGAFNRFSFPEDFIFGTGSAAYQYEGAVNEGGRGPSIWDTYAHIPGKVEDGSNGDVAVDFYHRYKEDLNFVTDMNMDAFRFSIAWSRILPNGTISGGINKEGIAFYNSLINEVISRGLKPFVTIFHFD

SEQ ID NO: 141744 - protein, 391 aa, Oryza sativa
  Clone ID: PAT_MRT4530_42819C.1.pep
MVEAYDAARIDFHQMVRRGMVENNMKILELRQENLQLKKDLDALEAQLHQLKIAQGEDSRPKRRRVCRSQKITARKSTSRPELIRQSLAWTCFVETPRAEPAPVVPQEGEASGVGSSEVVWGMVMPMVTTRRNVNTGEGNQPEGSYPNPQGNPPPPPPPDTNAILTQILAQQANMMTAFLHHLQNPPQQNAPPPPPQHSKLAEFLRIRPPTFSSSNNPVDALDWLHAVGKKLDTVQCSDEEKVVFAAHQLQGPASLWWDHFQATQPEGQPITWARFTAAFRRTHVPAGVVALKKREFRELKQGNRSVMEYLHEFNNLARYAPEDVREDEEKQEKFLAGMDPELSVRLVSGDYPDFQRLVDKSIRLEAKHKELESHKRRLANFRNQQGANQR

SEQ ID NO: 141745 - protein, 69 aa, Oryza sativa
  Clone ID: PAT_MRT4530_4281C.1.pep
MPNLLVLSSPTGLIGSQLGRCILRSIPVSSFLYVAASSYAVRLALREELCPASPFVLDSEKHHQVKKKN

SEQ ID NO: 141746 - protein, 79 aa, Oryza sativa
  Clone ID: PAT_MRT4530_42820C.1.pep
WFFKSPVGGLPVKISFGFSPSFVWPLPKMKTPLKEIPPGYLWNLKTPFFPGFPQLCLIKPLKMFTHFPLFFPFGNPLTC

SEQ ID NO: 141747 - protein, 1502 aa, Oryza sativa
  Clone ID: PAT_MRT4530_42821C.1.pep
MVTPMVTTRRNVNTGEGNQPEGSNPNHQGNPPPPPPPDTNAILTQILAQQANMMNAFLHHLQNPPQQNAPPPPPQHSKLAEFLRIRPPTFSSSNNPVDALDWLHAVGKKLDTVQCSDEEKVIFAAHQLQGPASLWWDHFQATQPEGQPITWARFTAAFRRTHVPAGVVALKKKEFRELKQGNRSVMEYLHEFNNLARYAPEDVREDEEKQEKFLAGMDPELSVRLVSGDYPDFQRLVDKSIRLEAKHKELELHKRRLANFRNQQGANQRVRYTNPYPGGSSSQQQQQQQPRPAPRPQFVVRVPQPQQQQNQQGTRAPRPPTPTVQPVQGRRDASGPQRLCFNCFEPGHFADKCPKPRRQQGQAPPRSNNGGKDVSRGRVNHVTAEDVLTTPDVIVEKKDKTKRMCVDYRALNEVTIKNKYPLPRIDDLFDQLKGATVFSKIDLRSGYHQLRIREEDIPKTAFTTRYGLYEFTVMSFGLTNAPAFFMNLMNKVFMEYLDKFVVVFIDDILIYSQSEEDHQHHLRLVLGKLREHQLYAKLSKCEFWLSEVKFLGHVISAKGVAVDPETVTAVTDWKQPKTVTQIRSFLGLAGYYRRFIENFSKIARPMTQLLKKEEKFGWSPQCEKAFQTLKEKLVSSPVLILPDTRKDFMVYCDASRQGLGCVLMQDGHVVAYASRQLRPHEGNYPTHDLELAAVSDLNLRQRRWLELIKDYDVGIHYHPGKANVVADALSRKSHCNTLNVRGIPPELNQQMEALNLSIVGRGFLAALEAKPTLLDQIREAQKNDPDMHGLLKNMKQGKAAGFTEDEHGTLWNGKREKYWWVSMKREIAEFVALCDVYQRVKAEHQRPAGLLQPLQVPEWKWDEIGMDFITGLPKTQGGYDSIWVIVDRLTKVARFIPVKTTYGGNKLAELYFARIVSLHGIPKKIVSDRGSQFTSHFWKKLQEELGTRLNFSTAYHPQTDGQTERLNQILEDMLRACVLDFGKTWDKSLPYAEFSYNNSYQASIQMAPYEALYGRKCRTPLLWDQVGESQVFGTDILREAETKVRIIRDNLKVAQSRQKSYADNRRRDLEFAVDDFVYLRVTPLRGVHRFQTKGKLAPRYVGPFRITARRGEVAYQLELPASLGNVHDVFHVSQLKKCLRVPSEQADSERIEVREDLTYVEKPVKILDTMERRTRNRVIRFCKAGPPAALADGWDPPVIALLAPRPPPRPCPSAAAAANPAAPVRPACNQEGGITPRNPLPRFPLFPLSLSLGFARNQSRIHRRRNQWRPNPPRAIPPSPAALSFPRRYLNVARAPLFRFRRSPLALAVGIVLAPCSSLSAVAAELRCAVVAPVLLPTRRPLPRHRRIAVDLVRASVSLADCRSAVVIVIPNRAAAFFRSVRRFRRLRCLGVSRGPSPSFPPSLLSLGCRSAAPLVAGSDHRGAGAPLPSAVPARPPSGAPSRLPSGPGRQPPAPAGAADARDPRRRPPPAACARSTVDRAADAWAPLPVDPVRAPAPRLTQ

SEQ ID NO: 141748 - protein, 177 aa, Oryza sativa
  unsure (1)..(177): unsure at all Xaa locations
  Clone ID: PAT_MRT4530_42822C.1.pep
HPYCILHIPTSFISSLPPRRRGGRGPIRGTAQSEEXLGGGVAWSEERHGWRRSRRSGAGGARGGGEEECPSSXAQVADGGRQPVGVEAEGEAAAVAVERGGGRRWPADTDASGDVVAPAESRAPSISSLPASPLLRRANASSPTPFCPNPNLPAAREQVPSAATSWCLPPPQPHRRH

SEQ ID NO: 141749 - protein, 67 aa, Oryza sativa
  Clone ID: PAT_MRT4530_42823C.1.pep
KNYTCESIRTVLNILVHIKFMFLACCTCHCGSILPVTVKKQVGRLKDVSFGRKYHVPFYKKHLTNFC

SEQ ID NO: 141750 - protein, 114 aa, Oryza sativa
  Clone ID: PAT_MRT4530_42824C.1.pep
MLEAVIPAVWSAVHGWFTPAVLFLVLNIVIGTIAVTSKVTASSSTAGGGGEGPLCPCCSEAAEWWAGVLDLGARDEATTAGGVKCGGREESPKVEGVSEGELEGGSVFHAVHTE

SEQ ID NO: 141751 - protein, 352 aa, Oryza sativa
  Clone ID: PAT_MRT4530_42825C.1.pep
MASSAPSAAAGATPPDPLRRDRILSSKLYLDVPGSKAPVVYSPAYDIAFLGIEKLHPFDSSKWGRICKFLTKEGHLEKNRVVEPLEATKDDLLVVHSESYLNSLKSSLKVASIVELPPVAFIPNWLVQQKLLYPFRKQVGGSILSAKLALERGWAINVGGGFHHCSAEQGGGFCAYADISLCIQFAFVRLNISRVMIIDLDAHQGNGHEKDFANDGRVYTLDMYNAGIYPYDHVAKRYIDQKVELVSGTKTEDYLDQLDKALKVAESRFQPQLIVYNAGTDILDGDPLGRLKISPQGVVIRDEKVFRFAKDQSIPLLMLTSGGYMKSSARVIADSIINLSNKNLIELGSQLG

SEQ ID NO: 141752 - protein, 60 aa, Oryza sativa
  Clone ID: PAT_MRT4530_42826C.1.pep
RKKKKRLPLPEFKQAPLARVPFLGFPVQAPPPGKGPPTIGAPPLRDPFHPPFFDPFSSSF

SEQ ID NO: 141753 - protein, 807 aa, Oryza sativa
  unsure (1)..(807): unsure at all Xaa locations
  Clone ID: PAT_MRT4530_42827C.1.pep
MVFLDYRQCFKHQSSHPVQGDPAVVYAKAGSYLTGEVQAGRMQGGGPLSPDEHRATSPPGIMHHQPAMTIVVAVDRDRNSQLAVKWVVDHLLTGASNIILLHIAVHPPAANHGFAMAEATHGALEAEMREIFVPFRGFCTRNGVHVSELVLEEADVSKALIEFITVNKIQSIALGASNRNAFTKKFKNADVPSSLMKGAPDYCNIYVVAKGKSVNVRLAKCGVDGGCGGGGGYEGDSSIRSLYTRRCSRGKLPPATPSPDSSRRSVDSRTLPELTTRPPFRERSLPSSSSKPVVLSSRAAPDCGGGGVDGSYRSTRRSASNESFVGDLDFGQSSRFSSMDFCDSLDMSSLSASPRESSSPLSAPQREVEVEMRRLRLELKQTMDMYNAACREAINAKQRTKELQLLKLEEARRLEEARHAEEAALAMAEMEKTKCRAAMEAAEAAQRLADLEAQRRRNAEVRARREADEKVRALDAISSHDFRYRRYNIDDIELATERFSDELKIGEGGYGPVYRASLDHTPVAIKVLRPDAQQGRKQFQQEVEVLSCIRHPNMVLLLGACPDYGCLVYEYMDNGSLEDRLFRRGGTPXPIPWSQRFRISAEIATALLFLHQTKPEPLVHRDLKPANILLDRNYVSKISDVGLARLVPPAVADSVTQYRLTATAGTFCYIDPEYQQTGKLGVKSDIYSLGVLLLQVLTARPPMGLTHHVEKAIDAGTFAQMLDVTVKDWPVDDAIGFAKLALKCTEMRRRDRPDLATVILPELNRLRNLGHAYEARMSAAAADAAAHAQDNVGSPTVVGASWRTAES

SEQ ID NO: 141754 - protein, 54 aa, Oryza sativa
  Clone ID: PAT_MRT4530_42828C.1.pep
IYKQSIQCNGSCLCECDSILQSVREIVRTLCETGDKHGGWKFMWSLLYVLPFAK

SEQ ID NO: 141755 - protein, 41 aa, Oryza sativa
  Clone ID: PAT_MRT4530_42829C.1.pep
MANMGMTSPIRGDEDISGGKDNEAAGKEDEDAISGGIINQR

SEQ ID NO: 141756 - protein, 854 aa, Oryza sativa
  Clone ID: PAT_MRT4530_4282C.1.pep
MSSMNALLVTLTNMDGLSDQQKEWRNKDAIEHRDRYKLSESVPTATPTHVVAIDPQHLALNEEEDGLVGIEGPKQKIIRMLMDEEEGSRKLKVISIVGSAGIGKTTLAKQVYLEIKGRFDCSAFVSLSQNPSMNKIFTHILSQVGFKTRRPLHREYDLIDELKQYLRGMRYLIVINNIWSESVWDTICLAFALRKCGSRVIITTCIEDLGSVCRPNFYGHIYKVEPLNDFDSRMLFFRRVFSNEDACPDHLRKVSEEILRMCGGVPLAITSVASILAGQGDMMIEKWERILSSRGYELETDPTIGWMRHVLSFSYSNLCPELRTCLLYLSTFPEYCSIRKDDLIRQWIAEGLVKEKFGCDQYEIAEIYFNNLIKRSIINPVDIDDCGMVMSCRVHDLMIDLIISKAIEENFIAILDDQHTMRGSHEARRFTLHFNRDLENTEQNLVLTRSVHHQTRSISFLGPIQCMLVISEFKYLRLLQIEVYYSNIDSYDLTHMCEFFQLRYFRIRGILCKLPEKIGGLKYLETFDIDDNVKNIPSDVCKLSSMAHLTLPKHAKIPSGIDKLVALRTLKVSTSYDTSIEFYEGFGSLRKLRELELGATNYMSRDKVVSLAASLMKLGSCSLRSLILRNGDLSLEAGDRLNFWSPPPLHLRRLHVFEVVFSYVPDWIAKLDKLTSMVIRIREISKDGFGVLARLPCLLFLRLSVHRVKEEDATIVVCSRTFQHLKEFWFRYKVPCLVFEPLAMPRLQILNIQFDEECLYGRDDGVPCEPAGIEHLTNLMQISAHIHLAHHWMWQTPALPRRKVKHFSERHDEDGHGQVEEEAPVYKKAAEAMLTRATSKHPGIHYVNIQFIQM

SEQ ID NO: 141757 - protein, 137 aa, Oryza sativa
  unsure (1)..(137): unsure at all Xaa locations
  Clone ID: PAT_MRT4530_42830C.1.pep
KKGGGGWEHGAGAMGSLGEADGKKENEEEDXGMNYIGAERSGTAGSGSISPELVGEVGGGERERGGIRXESRPSRDVGASGSEGVDAGKAGRVGVGRGEGGEGGRRARGVAVAGSGRRPEVGEGTDRWAPPVSARGR

SEQ ID NO: 141758 - protein, 103 aa, Oryza sativa
  unsure (1)..(103): unsure at all Xaa locations
  Clone ID: PAT_MRT4530_42831C.1.pep
STLEDPRFSEQRNKISDITDDVIIAAFTKGIRHEDLVGKFGRKPPKTFAEQYAKNARKNHVGLDGDQSTSKKXDDDDDAPTGFQDHHKELNHIFGGPLAYESK

SEQ ID NO: 141759 - protein, 773 aa, Oryza sativa
  Clone ID: PAT_MRT4530_42832C.1.pep
MSLKRWAKGICSEAKIKYHMALDIIQRLDVAQERRELTQAEYRLRLGLKRRLFGFAVIERAWKKQAARLTNIKEGDANTKYFHRRINARKRKNHIFRLRKQNGWAVTHTEKEHTIAEHFRQVMGRPEPRECDLNCQSLGLTPVDLSGLDDPFTKTEIHKALSEMPVDKAPRPDGFTGKFFKHCWDIIKSDVVAVFNALHDMRHTHFNLLNSANVVLIPKMDGTEGIGDYRPISLIHGFAKLFSKVLAIRLRPLMHSLIPTNQSAFIRERSIHDNFMYVRNMVRKHHRTRRLIHLFKLDISKAFDSVRWDYLLTLLQNRGFPQRWREWIAGLLSTSTSKIILNGTPGEAIRHGKGLRQGDPLSPLLFILAIDPLQRLLDKATDLGAISKLRGRVICFRTSMYADDAVVFINPQKEDVRVFTDLLRRFGQVSGLCTNLQKSHVVPIRCDNLDLDDILDGIPVTRANLPMKYLGLPLTTARLRRVDLQPLFDKSMNRIAGWRGRHIGLAGRSTLVKSVLTSQPVFLLTGLKASKESLEALDKQRRKFLWAGGEALTGGKCKINWTRTCLPTGFGGLGILNLEKFARALRLRWLWQEWKSPEKAWVGSGTPCDDTDKLLFAAATSITIGNGATVSFWESAWWQGRRMKDVAPLVYAVSKKKNSTLQHALQSDQWLLDLGLPVDVGWTTELIDQLVTVWTAIQTIELTEHENDQICWKLTSHGQYTTASAYNAQLLGTTTNNFNNLIWKPWAPRKCKTFAWLVIQNRVWTSDRLCTRG

SEQ ID NO: 141760 - protein, 65 aa, Oryza sativa
  Clone ID: PAT_MRT4530_42833C.1.pep
SNNTSCTINTQLFQYDDYRFSILCKSIYIRISTEQEPSKVGLLELDSASMECPSIKPSCRFLQPG

SEQ ID NO: 141761 - protein, 656 aa, Oryza sativa
  Clone ID: PAT_MRT4530_42834C.1.pep
MTGFVLELRGMCVVLGYPHGVDYQARPLPEQEGEDAEPHAGWEVTAVILSGSPERTSLAVTAGGDSFPAACQNAALLAIGTLHQRYPDELQHSPYRYHPRRGGARDYATFRDASSEDDATVVHLARMVEAYDAARIDFHQMVSRGMVENNLKILELRQENLQLKKDLDALEAQLHQLKIAQGEICRPKRRRVCRSQKITARKSTSRPELVRQSLAWTCFVETPRAEPAPVVPQEGEASGVGSSEAPSLFAGSGWGFQMVTTRRNVNTGEGNQPEGSNPNHQGNPPPPPPPDTNAILTQILAQQANMMNAFLHHLQNPPQQNAPPPPPQHSKLAEFLRIRPPTFSSSNNPVDALDWLHAVGKKLDTVQCSDEEKVIFAAHQLQGPASLWWDHFQATQPEGQPITWARFTAAFRKTHVPAGVVALKKREFRELKQGNRSVMEYLHEFNNLARYAPEDVREDEEKQEKFLAGMDPELSVRLVSGDYPDFQRLVDKSIRLEAKHKELESHKRRLANFRNQQGANQRVRYTNPYPGGSSSQQQQQQQQPRPAPRPQFVVRVPQQQQQQNQQGTRAPRPPTPAGQPVQGRRDASGPQRLCFNCFEPGHFADKCPKPRRQQGQAPPRPNNGGQDVIRGRVNHVTAEDVLTTPDVIVEVQNCSR

SEQ ID NO: 141762 - protein, 659 aa, Oryza sativa
  Clone ID: PAT_MRT4530_42835C.1.pep
MTGFVLELRGMCVVLGYPHGVDYQARPLPEQEGEDAEPHAGWEVTAVILSGSPERISLAVTAGGDSFPAACQNAALLAIGTLHQRYPDELQHSPYRYHPRRGGARDYATFRDASSEDDATVVHLARMVEAYDAARIDFHQMVRRGMVENNLKILELRQENLQLKKDLDAVEAQLHQLKIAQGEDSRPKRRRVCRSQKITARKSTSRPELVRQSLAWTCFVETPRAEPAPVVPQEGEASGVGSSEVVWGMVTPMVTTRRNVNTGEGNQPEGSNPNHQGNPPPPPPPDTNAILTQILAQQANMMTAFLHHLQNLPQQNAPPPPPQHSKLAEFLRIRPPTFSSSNNPVDALDWLHAVGKKLDTVQCSDEEKVIFAAHQLQGPASLWWDHFQATQPEGQPITWARFTAAFRRTHVPAGVVALKKREFRELKQGNRSVMEYLHEFNNLARYAPEDVREDEEKQEKFLAGMDPELSVRLVSGDYPDFQRLVDKSIRLEAKHKELESHKRRLANFRNQQGANQRVRYTNPYPGGSSSQQQQQQQQPRSAPRPQSVVRVPQQQQQQNQQGTRAPRPPTPAGQPVQGRRDASGPQRLCFNCFEPGHFADKCPKPRRQQGQAPPRSNNGGKDVIRGRVNHVTAEDVLTTPDVIVGRSCGSLCLTPTTTS

SEQ ID NO: 141763 - protein, 35 aa, Oryza sativa
  Clone ID: PAT_MRT4530_42836C.1.pep
FPWELPGFNMLIIHVMVHIPLLIRPASLAPQNDFQ

SEQ ID NO: 141764 - protein, 664 aa, Oryza sativa
  Clone ID: PAT_MRT4530_42837C.1.pep
MTGFVLELRGMCVVLGYPHGVDYQARPLPEQEGEDAEPHAGWEVTAVILSGSPERTSLAVTAGGDSFPAACQNAALLAIGTLHQRYPDELQHSPYRYHPRRGGARDYATFRDASSEDDATVVHLARMVEAYDAARIDFHQMVRRGMVENNMKILELRQENLQLKKDLDALEAQLHQLKIAQGEDSRPKRRRVCRSQKITARKSTSRPELVRQSLAWTCFVETPRAEPAPVVPQEGEASGVGSSEAPSLFAGSGWGFQMVTTRRNVNTGEGNQPEGSNPNHQGNPPPPPPPDTNAILTQILAQQANLMNAFLHHLQNPPQQNAPPPPPQHSKLAEFLRIRPPTFSSSNNPVDALDWLHAVGKKLDTVQCSDEEKVTFAAHQLQGPASLWWDHFQATQPEGQPITWTRFTAAFRRTHVPAGVVALKKREFRELKQGNRSVMEYLHEFNNLARYAPEDVREDEEKQEKFLAGMDPELSVRLVSGDYPDFQRLVDKSIRLEAKHKELESHKRRLANFRNQQGANQRVRYTNPYPGGSSSQQQQQQQQPRSAPRPQFVVRVPQQQQQQNQQGTRAPRPPTPTVQPVQGRRDASGPQRLCFNCFEPGHFADKCPKPRRQQGQAPPRSNNGGKDVIRGRVNHVTAEDVLTTPDVIVGRSCGSLCLTPATTS

SEQ ID NO: 141765 - protein, 640 aa, Oryza sativa
  Clone ID: PAT_MRT4530_42838C.1.pep
MSWHRAGVLLLGAQSCLPVPGVPAMAGSINRRGLDLTGFVLDLRGMCVVLGYPHGVDYQGKQLPEQEGDDAEPHAAWEVTAVILTSSPERTSLAVTAGGDSFSAACQNDALLTIDTLHQRYPDELQHSPYRYNPRRGGARDYATFRDASSEDDTTIMHLARMVEAYDAARIDFHQMVRRGLVKNNMKILELRQENLQLKKDLDALEAQLCQLKVAQGEVCRPKCRRVCCSQKITARKSTSRPELVRQSLAWTCFVETPRAAPAPVVPQEGEASGVALSLFAGSVWGFQMVTTRRNVNTGEGNQPEGSNPNPQGNPPPPPPPDTNAILTQILAQQANMMTAFLHHLQNPPQQNAPPPPPQHSKLAEFLRIRPPTFSSSNNPVDALDWLHAVGKKLDTVQCSDEEKVIFAAHQLQGPASLWWDHFQATQPEGQPITWARFTAAFRRTHVPAGVMALKKREFRELKQGNRSVMEYLLEFNNLARYAPEEVREDEEKQEKFLAGMDPELSVRLVSGDYPDFQRLVDKSIRLEAKHKELESHKRRLANFRNQQGANQRVRYTNPYPGGSSSQQQQQQQPRSAPRPQFVVRVPQPQQQQSQQGTRAPRPPTPAVQPGQGRRDVQGQQRLCFNCFEPGHFADKCPKL

SEQ ID NO: 141766 - protein, 342 aa, Oryza sativa
  Clone ID: PAT_MRT4530_42839C.1.pep
MVAGGGHRHGGAAAGRGEGRGKRNGRSTVHPGSTATTGTATGAEEGGGAARVDEDGGVPAVGGRNGGVDEVGEDAAKPKKATPKQEKMVTTRRSSATGEGSHPEGSNHNNQGSPPPPPPPPPPPPPDTNSILTQILAQQANMMAAFLHHIQNPPQHNAPPPPPPPQHSKLAEFLRIRPPTFSSSNNPVDALDWLHAVGKKLDTMQCNDEEKVIFAAHQLQGPASLWWDHFQATQPEGQPITWARFTAAFRRTHVPAGVMALKKREFRELKQGNLSVMEYLHEFNNLARYAPEDVREDEEKQEKFLAGMDPELSVRLVSGDYPDFQRLVEKSIRLEAKHKELE

SEQ ID NO: 141767 - protein, 356 aa, Oryza sativa
  Clone ID: PAT_MRT4530_4283C.1.pep
MASLTDLVNLNLSDTTEKIIAEYIWIGGSGMDLRSKARTLSGPVTDPSKLPKWNYDGSSTGQAPGEDSEVILYPQAIFKDPFRKGNNILVMCDCYTPAGEPIPTNKRHNAAKIFSSPEVASEEPWYGIEQEYTLLQKDINWPLGWPVGGFPGPQGPYYCGIGADKSFGRDIVDSHYKACLYAGINISGINGEVMPGQWEFQVGPSVGISAGDQVWVARYILERITEIAGVVVSFDPKPIPGDWNGAGAHTNYSTKSMRNDGGYEIIKSAIEKLKLRHKEHISAYGEGNERRLTGRHETADINTFSWGVANRGASVRVGRETEQNGKGYFEDRRPASNMDPYIVTSMIAETTIIWKP

SEQ ID NO: 141768 - protein, 73 aa, Oryza sativa
  Clone ID: PAT_MRT4530_42840C.1.pep
HAADAWEKKKKNFKKKKKKKKSAGGKKKKKKKPQPKKKKKRGARTRGTRHPTPGRRRNRPPWGPPGCTSLPLF

SEQ ID NO: 141769 - protein, 656 aa, Oryza sativa
  unsure (1)..(656): unsure at all Xaa locations
  Clone ID: PAT_MRT4530_42841C.1.pep
MAGSVTRRGLDMTGFVLELRRMCVVLGYPHGVDYQGRPVPEQEGDDAEPHAAWEATAVILAGSPERTSLAVTAGGDSFPAACKSAALLAIGTLHQRYPDELQHSPYRYHPRRGGARDYATFRDASSEDDATIMHLARMVEAYDAARIDFHQMVRRGMVENNMKILELRQENLQLKKDLDAMEAQLHQLKIAQGEDSRPKHRRVCRSQKITARKSTSRPELVRQSLAWTCFVETPRAEPAPVVPQEGEASGVGSSEGALLLTFRPGPSQRRNVNTGEGNQPEGSNPNPQGNPPPPPPPDTNAILTQILAQQANMMNTFLHHLQNPPQQNAPPPPPQHSKLAEFLRIRPPTFSSSNNPVDALDWLHAVGKKLDTVQCSDEEKVIFAAHQLQGPASLWWDHFQATQPEGQPITWARFTAAFRRTHVPAGVGALKKREFRELKQGNRSVMEYLHEFNNLARYAPEDVREDEEKQEKFLAXGMDPELSVRLVSGDYPDFQRLVDKSIRLEAKHKELESHKRRLANFRNQQGANQRVRYTNPYPGGSSSQQQQQQQPRPAPRPQFVVRVPQPQQQQNQQGTRAPRPPTPTVQPVQGRRDASGPQRLCFNCFEPGHFADKCPKPRRQQGQAPPRSNNGGKDVIRGRVNHVTAEDVLTTPDVIV

SEQ ID NO: 141770 - protein, 420 aa, Oryza sativa
  unsure (1)..(420): unsure at all Xaa locations
  Clone ID: PAT_MRT4530_42842C.1.pep
CFPPQSKIRKTYCSTHPPQHIPGGVPRNRPTSFFSSNNPXDALDWLHAVGKKLDTVQCSDEEKVIFAAHQLQGPASLWWDHFQATQPXEGQPITWARFTAXFGRTHVPAGVVALKKREFXELKQGNRSVMEYLHEXNNLARYAPEDVREDEEKQEKYLARMDPELSVRLVSGDYPDFQRLVDKSIRLEAKHKELESHKRRLANCRNQQGANQRVRYTNPYPGGSSSQQQQXQQQPRSAPRPQFVVRVPQPQQQQSQQGTRAPRPPTPTVQPGQGRRDASGPQHLCFNCFEPGHFADKCPKPRRQQGQAPPRSNNGGKDVIRGWVNHVTAEDVLTTPDVIGGTFLIHFIPATIFVXDSGASHSFIFVPFVGRNQFGIEKLKKPXLFITTPGGVMTTKYYXPAGPIEIKGIPFSFPLSLFRA

SEQ ID NO: 141771 - protein, 57 aa, Oryza sativa
  Clone ID: PAT_MRT4530_42843C.1.pep
MELGSWASKVAAKWRRLTLMRAVVVVLDQMSTLGAPGDNRVGEKEAWQGRHCRFADI

SEQ ID NO: 141772 - protein, 85 aa, Oryza sativa
  Clone ID: PAT_MRT4530_42844C.1.pep
SLSSCIQHSIGVIVLPISASQLPLCTGRRGYHGPHWCSWWHIVDSCAASSLALAASLKVIQRHEFCCVCSSSPPPSTPSTCSTHV

SEQ ID NO: 141773 - protein, 41 aa, Oryza sativa
  Clone ID: PAT_MRT4530_42845C.1.pep
FLIRVGLPISDARTSVVCGNINPAWIYRLCSVNMLCCNITL

SEQ ID NO: 141774 - protein, 61 aa, Oryza sativa
  Clone ID: PAT_MRT4530_42846C.1.pep
ARGNTNIVLYLKWVIQDLRGFRALQKSYLWCLTQTIKTAAFIDSLLGPNNNLLGLLRFQSN

SEQ ID NO: 141775 - protein, 81 aa, Oryza sativa
  unsure (1)..(81): unsure at all Xaa locations
  Clone ID: PAT_MRT4530_42847C.1.pep
CKYPAAKRARVNXFRHTRPAHEKWRGKPVVPAALMNRPNRREKPVAYWAPLRIGEKPGKNREPKAAKGRNPKKPLAGLFKR

SEQ ID NO: 141776 - protein, 112 aa, Oryza sativa
  Clone ID: PAT_MRT4530_42848C.1.pep
HEKGLRTIATDMNVQMTGLKQPRAIFLDKGKKAKEGQMGKKNCLGYGHNQTNRIWQPGKQIQGLSMGGFLKVPPGGDKGAPPGTLPFGTGQPPFLPPCTGGSDDHGGIIEGG

SEQ ID NO: 141777 - protein, 275 aa, Oryza sativa
  unsure (1)..(275): unsure at all Xaa locations
  Clone ID: PAT_MRT4530_42849C.1.pep
MSTSTNPSSAPMAEFPEHLSHQIAIPSLCYPNQFFLGPIGNPDPTLFTNAETNRXIPFRXTNPSLGHWSGTFKSWPSSVKPWPDWYIRVSASKQTHWEELGIXSQCLALTIANTNKDESMLSAATYFWSDTFNAFLFGQGQMTPTLLDITMLTGLDITSSANPVSLNTKSKFSYKTRSIGGWIGYIKMNMGNGPVTLQEHVTFLMMWLEKFLFCGPSCSPTTNWQHLAEALVDERQFPLGKYLLGAIYQTLSSATTRIASDVVICHALKFPLSCF

SEQ ID NO: 141778 - protein, 69 aa, Oryza sativa
  unsure (1)..(69): unsure at all Xaa locations
  Clone ID: PAT_MRT4530_4284C.1.pep
GEVVAPXLEYRLYSDPSRPFRYASGILQSYXFLLSFQIGNRSKKRVCDRAWLRCFISVCNAIERGWFMQ

SEQ ID NO: 141779 - protein, 70 aa, Oryza sativa
  Clone ID: PAT_MRT4530_42850C.1.pep
SKVHHRSLNLYRCVIPVPKLTNRLFRSSNLFDCVIPVPKLADHSFRSTNLFSCVTPVPKLGFEYHIDQIG

SEQ ID NO: 141780 - protein, 402 aa, Oryza sativa
  Clone ID: PAT_MRT4530_42851C.1.pep
MTTDLLLLLLLLSSSRLALAAAFGVWINGAASSSPQSQEYEALQALKAAVVEDPRGALASWQGPNVCAYRGVYCSAPPDDAAASGAVVAGIDLNRANLRGTLPAAVSLLAHLTFLHLNSNRLAGQPPDSLRDLQYLTELDLSNNLFSGPFPAAALLIPSLVYLDLRFNAFSGGIPAEAFAKSSLDALFLNNNQFDGEIPETLWSSPATVITLANNRLTGPVPSAYGYGGRVREVLFLNNKLTGCIPEELGFLPTIEVLDLSYNSLSGHLPPTLSCLAGIEVLNIAHNQFTGELPDLVCDLKRITNLSVSFNFFSGISQHCNRLAGRSVFDFVGNCVPGRGLQRPPPECDGGPGDGGLSCLRSIPVTRPVPCAQASVSVGVGVIVGGAMPSFGAGGVVTVTVP

SEQ ID NO: 141781 - protein, 171 aa, Oryza sativa
  unsure (1)..(171): unsure at all Xaa locations
  Clone ID: PAT_MRT4530_42852C.1.pep
MLSPSTRGGQKARARELGSGLARAREARLGSKIKRAEPELSPQLVCKSSRARASSQAAQETENPTLPXRSLTLPIPHPTQAQARRRSRARXRLAAIGERSCRAAAXRLPPLRRRPAVSLPSAAAAPPPSPTLPLASLPSAARARRPLRRRPYLLLTSQAGSSRLKLLYKPS

SEQ ID NO: 141782 - protein, 196 aa, Oryza sativa
  Clone ID: PAT_MRT4530_42853C.1.pep
VAAERERERPTKSPSQANAASQPLVPLIVKSVKNPRSAVCKTALMTCADIFKAYGDLMVDSIDPLLVQLFLKSSQDKRFVCEAAEAALISMTSWIAPSALLPKMQPYLKNRNPRIRAKASMCFSKSVPSLEAARKLALELQAFYEKSQASSSGEADAGAESWEAFCQSKLSPLSAQAILRVTSTTKEGVAVGVTST

SEQ ID NO: 141783 - protein, 346 aa, Oryza sativa
  Clone ID: PAT_MRT4530_42854C.1.pep
MSDSALKDLNLAQSAELEKTKDSSAKSCITKPVLNGNKCNNTEENAPPVLPDAVTNGCEAGNADVEYIDSESLTDLEDAGATLSTLVARLDSKDWVMTCEALNNVRQLAIFHKDRLQELLEPLVPLIVKSVKNPRSAVCKTALMTCADIFKAYGDLMVDSIDPLLVQLFLKSSQDKRFVCEAAEAALISMTSWIAPSALLPKMQPYLKNRNPRIRAKASMCFSKSVPRLGVEGIKEYGMDKLVQIAATQLSDQLPESREAARKLALELQAFYEKSQASSSGEVDDAPATSPDADADAGAESWEAFCQSKLSPLSAQAILRVTSTTKEGVAVGVTSTPPKEGVTVGC

SEQ ID NO: 141784 - protein, 116 aa, Oryza sativa
  unsure (1)..(116): unsure at all Xaa locations
  Clone ID: PAT_MRT4530_42855C.1.pep
MSDSALKDLNLAQSAELEKTKDSSAKSCITKPVLNGNKCNNTEENAPPVLPDAVTNGCEAGNADVEYIDSESLTDLEDAGATLSTLVARLDSXDWVMTCEALNNVRQLAIFHRDRL

SEQ ID NO: 141785 - protein, 192 aa, Oryza sativa
  Clone ID: PAT_MRT4530_42856C.1.pep
ARCATLIGSLCHLKHLRYLELGYTNISALPQNIGKMKFLEHIGLRGCHSLAELPSSITELPKLRHLSIDETKINAIPRGFKRLENLEMLWGFPVHIIIENTGEYRCSLEELGPLSKLRKLKLIGLENVPYSSMATLAKLKTKENLICLELWCTSGVTVSGRVKESIAMADQEQIVDVFDKLYPPLCLEELTI

SEQ ID NO: 141786 - protein, 168 aa, Oryza sativa
  unsure (1)..(168): unsure at all Xaa locations
  Clone ID: PAT_MRT4530_42857C.1.pep
WACSGHGRXAAPARRHRRLSSAMAHGGCSKXWWRQRRWRPTRWRSTELRDGVEMAHGDERRTPELRWREKRRLERERGLSLGALPAAAAREGDGDDDGAAPDGGTKQRWRRLLTRRPCGLAARPARARSAAAWAGDIERRRRPGRGGTWARGLASPGLQLKKERESWR

SEQ ID NO: 141787 - protein, 50 aa, Oryza sativa
  Clone ID: PAT_MRT4530_42858C.1.pep
FVKTQLGIINNSFYTSRHCYRPLRLGTKHSFLVPNTSTLNNGFTSLHCTI

SEQ ID NO: 141788 - protein, 655 aa, Oryza sativa
  Clone ID: PAT_MRT4530_42859C.1.pep
MEQGGPCDGLCRFRIHLGTRGDCPLPAGDGVKPEVWCAWLEGVMRRVLSRPLSEYHKAASVSIFNKRRQPIRLDIDVDLDCIRIKSTGMLVHPKASFGPALELSRSPRPRVFSQHYPNVPEYSTVPPLSGELPHHFRLEVHGYVGTCLANTVVEASGGSADHACQEAAYLMMARLRDRHNYIFYNTAYRFHPRRASGDDASTFRPTAGENNTTFGHMCAVMRGMDRMHSDLHKASKALNDGKLVRIIALKDEIARLKKENAQLKGLPAPGGVRIRTTPRKSTTAPVRIQLAPKNPPLPAAPPAAPVAPAPAPAPVPVSAPASALSFAPASAARGPASGNGGWLPTTPSGSRDHSSSSSSGSELGSGPGRPSPEPTCRRGPASSSSLCRRPKPPPTEPAPAAPQAHTADAKSRKPRHQIRSRRFSKACTVRPNPSYSLPYKYHRPPPLFPPFSKAAAISTVSSRRHRCFVPPSGAAPSSSPSPSRAAAAGKAPRLSPLSLSSRRFSLHLNSGVRLSSPCAISTPSRSSVLRHRVGLHLLCLHHYLLQPPCAIADESRRCRRAGAAGPAMARARPGRVMEQLLLAFSPIVAQKKREFRALHQGNRTVSEYLHEFNHLARYAPEDVRTDVEKQEKFLAGLDDELTNQLISRDYANFEN

SEQ ID NO: 141789 - protein, 78 aa, Oryza sativa
  Clone ID: PAT_MRT4530_4285C.1.pep
ASCLSIGCCVRASIASRRASSTRMILQVRTGSRTAAGDHGKPASSAPDSRSQLLQQDKRSLEATMPVPVRWVVSNPLC

SEQ ID NO: 141790 - protein, 325 aa, Oryza sativa
  Clone ID: PAT_MRT4530_42860C.1.pep
MRKCHTSSCLRPNTAFPHETPFPHTDKKVPMANLNSYHLATWADSAKTRNPTGPGSSHENMWLHVRLRSMTYEVKSLIDQGNLPNYNSTQLNSRLTQRPYPATITQIHYHLTRTGGSSAAASAAFVGDGARRLRQTAAEAEEVEANAVAQHRAPGRRGDGARRREADAGVEVERETAARKGERAQPRGFTSGGGTGRRWREEQKAKSQDVTLLKNSEELTKKEHPFITYINKTEVNKVMVHIEEVEVNQISMKVLTQPQFLNDDVMDAYIQCLRYKEKEIRGDGKAFLELALKIGLLNVEGAHVEIFLPINIKQTHWHLAVLNTK

SEQ ID NO: 141791 - protein, 595 aa, Oryza sativa
  unsure (1)..(595): unsure at all Xaa locations
  Clone ID: PAT_MRT4530_42861C.1.pep
MGNTCVGPSISKNGFFQSVSTVLWKARQDGDDALPGANGAPDGGGQGRLPAPPPPTSDAPLAVQNKPPEHVKIVSTTDTASAEQDASKSSAGSDSGEAARPRPRVPPVKRVSSAGLLVGSVLKRKTESLKDKYSLGRKLGQGQFGTTYLCVERATGKEFACKSILKRKLVTDDDVEDVRREIQIMYHLAGHPNVISIRGAYEDAVAVHLVMELCAGGELFDRIVQKGHYTERKAAELARVIVGVVEVCHSMGVMHRDLKPENFLFADQTEEAALKTIDFGLSIFFRPGQVFTDVVGSPYYVAPEVLKKKYGQEADVWSAGVIIYILLCGVPPFWAENEQGIFEEVLHGRLDFQSEPWPSISEGAKDLVRRMLVRDPKKRLTAHEVLRHPWVQVGGLAPDKPLDSAVLSRMKQFSAMNKLKKMALRVIAENLSEDEIAGLKEMFKMIDTDNSGQITFEELKVGLKKVGANLQESEIYALMQAADVDNSGTIDYGEFIAATLHMNKIEREDHLFAAFQYFDKDGSGYITADELQLACEEFGLGDVQLEEMIREVDEDNDGRIDYNEFVAMMQKPTMGXRRRSPAGCRTVSASASGRP

SEQ ID NO: 141792 - protein, 111 aa, Oryza sativa
  Clone ID: PAT_MRT4530_42862C.1.pep
RTSVGAGRWGAFSPHPPSPGVGAGSPQSPARSRPPPQIRRLPAFSSTVKSSFSPLSPSSSSVFFLTPSPLRFSPSSSPVTPRMVCRRPFWGWESSPLSYPLQWSSHSFFDH

SEQ ID NO: 141793 - protein, 116 aa, Oryza sativa
  Clone ID: PAT_MRT4530_42863C.1.pep
LTRKQTPAQKKDTVLSLLMLNYIVYLAQKITLYSSTNWDWEAVKDTITEHVFTSSYIIFCSVSGTKFPVELLTTWIGLPQVYCLNPLPIYYLLHSIRSYYILPKQRTLHHNLQFQN

SEQ ID NO: 141794 - protein, 68 aa, Oryza sativa
  Clone ID: PAT_MRT4530_42864C.1.pep
IARTSILMALDDFYAAHTNYSTKIVLHIRDSGSNNVQAASAGKCSEVLWYNLVAIWMFLFSTIFCGDE

SEQ ID NO: 141795 - protein, 299 aa, Oryza sativa
  Clone ID: PAT_MRT4530_42865C.1.pep
MAKAGARGAGQWWMKAAGMASAEGAKAAATDFATGSVSAAGGSRVRRGEEVVSSGDGGGWWRGDVEADGMWRLSCGLVGGEVGGVCRRRRPGAVHAVAEGRRGGRWRCGVAASGVELAGDDCACPAAAATVGDRGCGWRRHGGLGRLAEGVANGCIWPAQQCFEERSETGLALRGVADGSGGRYDARGVAGEDGGWLRARGTADGGRPDWRERRTRWRRPAWRERRGRRWRRRPRCEEELPIGVARSTAHEGLPAGGAGTQWSHMSTEVERWWSLVSYEISFFIRVQKLFCQYPVKHMM

SEQ ID NO: 141796 - protein, 142 aa, Oryza sativa
  unsure (1)..(142): unsure at all Xaa locations
  Clone ID: PAT_MRT4530_42866C.1.pep
LSRIRLEDKWAENTKFTRPXRPKFTSLRRGAEEEAACQSLGRLGQPRVRPNQPXRHPMQGLAGWSGLLPYGGWRDCRVVFGXISEVHRLLNIIICGYMLWIRQDGPLMVTTQYGVSAPLLVIIFLVMSLRNTNIGITFFSLS

SEQ ID NO: 141797 - protein, 582 aa, Oryza sativa
  Clone ID: PAT_MRT4530_42867C.1.pep
MLALTTPAPPSLLHALASLNVLLLVAYLLLFLLAKLAAGLHRRGHGSCDEHQVTETSGREEFAGADDIAGVQQQQAEMLFWFDEAVFEDTALLGGEGKDQLMYDAATTPPTPTPARCLQVESTFPMVESTRRISPHHRQCSFSHEEPKAAAAAAAATASSQKDIIPAAVPSPENVPVEAGEEDGHGEHGEEDDEEEKRFRGDDVKLFVNSRALADTKKLLLEGAMAGKGGVQREREEESRLGASTLTSESTSKSSVEWRSSTVTKDSETEYPFSSSSRRSSSRWESYALFRKYDEDMVYFHRVGAQKLTETESYRSIKYQPRSVSERIVQKLTPKPRPAIGLRDPYPELERVYVAQICLTWEALNWNYASFRRHAGDIAARCCPARVAQEFQQFQVLLHRFIENEPYEYGLRPEVYARMKNSSPKLLLVPEFRDEEDEKDDLISAVQFLYILEESIRTFMAFLRADKRSHYQMFREMVKRRTSSMDQTLVITLKKANKKKKSRLKDLTRPRRCLRRTKLREEEEMSILLGLIDLKIVARVLRMPEITDQQLHWCEEKMNRVKVDPAQGKMQRDPSPLFFPAH

SEQ ID NO: 141798 - protein, 64 aa, Oryza sativa
  unsure (1)..(64): unsure at all Xaa locations
  Clone ID: PAT_MRT4530_42868C.1.pep
FXXLYFLLFFIFSKGSFLMTHSFIFIVPFSIHPKGALKGPETPRLKNPKPLNHPFFIKPPGFSL

SEQ ID NO: 141799 - protein, 110 aa, Oryza sativa
  unsure (1)..(110): unsure at all Xaa locations
  Clone ID: PAT_MRT4530_42869C.1.pep
LSIPKSLYPFTXSSHXKQYDWGCNTCSVWPXQSSHLNPPKPHHRLNKAXKXTGLCNLAPICSAMLSMPLLHTTSMIYTKNLTAGLPDPSLDLLYPGELXALPATTTTKDE

SEQ ID NO: 141800 - protein, 283 aa, Oryza sativa
  Clone ID: PAT_MRT4530_4286C.1.pep
MRWDAAEAEEVLERIWDLHDRLSDAILAVSRAHFLLPPPPPPPPPPPSQPSAPPAREGRNGYVFVKGLKGGGGGGGGGVGDGVGVGSAKAAAAEAMAEARSLHAIRTALEDLEEHLEFLHTVQSQQRAEQDAAIARLEQSRLVLAMRLAEHQGKKYRVIDEALAFVGEVGDKSRFISPEDVRATHNQSGEDVMDSGSNGSSIMGNVLSCSLSLAKNSFRVDKIGSALGNAAAFAVSMFAFLQLHQVAFGSKSPAMDYRRHSYHSGSSLQSGKGKQLEVYLARG

SEQ ID NO: 141801 - protein, 58 aa, Oryza sativa
  Clone ID: PAT_MRT4530_42870C.1.pep
VQLEKPSAFVGIVYTHMPDPRVFTNRHGYKSKAYFNRNVHHSYISRLIGDIQGRLTNW

SEQ ID NO: 141802 - protein, 449 aa, Oryza sativa
  Clone ID: PAT_MRT4530_42871C.1.pep
MRVFGRGDLITDPKEIAWQYLRSDFVVDAVAALPLPQILIWFVIPAIKYSTDEHNNNILVLIVLAQYFPRLYLIFPLTYEIVKTTGVVAKTAWQGAAYNMLLYMIASHVCCYGQTITVSTYIGETLYCIFLAVLGLVLFAHLIGNVQTYLQSITVRVEEWRLKQRDTEEWMRHRQLPHELRERVRRFIQYKWLATRGVNEESILQALPADLRRDIKRHLCLGLVRRVPFFSQMDNQLLDAICERLVSSLCTQGTYIVREGDPVTEMLFIIRGKLESSTTNGGRTGFFNSTTLKSGDFCGEELLGWALVPKPTVNLPSSTRTVKALIEVEAFALQAEDLKFVANQFRRLHSKRLQHTFRYYSHHWRTWASCFIQAAWRRYKRRKMARDLSMRESFCSMRSDDSNGEDDSPPKQNLAMKIMSGSRKGPQNMKELPKLRKPDEPDFSAEPCE

SEQ ID NO: 141803 - protein, 130 aa, Oryza sativa
  Clone ID: PAT_MRT4530_42872C.1.pep
RTVKALIEVEAFALQAEDLKFVANQFRRLHSKRLQHTFRYYSHHWRTWASCFIQAAWRRYKRRKMARDLSMRESFCSMRSDDSNGEDDSPPKQNLSMKIMSGSRKGPQNMKELPKLRKPDEPDFSAEPCE

SEQ ID NO: 141804 - protein, 395 aa, Oryza sativa
  Clone ID: PAT_MRT4530_42873C.1.pep
RWQDNQPNNGTSVTSRLSSDRCQELWYKRILDPSSDFILTWNHIFLFSCFVALFIDPLYFYVPKISYGTPNSCIGTDRHLAITVTFFRSISDLLYFTHIIIKFRPAYINPSSTMRVFGRGDLITDPKEIAWQYLRSDFVVDAVAALPLPQILIWFVIPAIKYSTDEHNNNILVLIVLAQYFPRLYLIFPLTYEIVKTTGVVAKTAWQGAGYKMLLYMIASHPFIFFQVLGALWYLLSVDRQTACWKSNCKNETGCDIKFLDCDVIPNQNWASKTAIFNTCDATNTSISFDYGMFQPALFNQAPGQRFLMKYFYSLWWGLQNLSCYGQTITVSTYIGETLYCIFLAVLGLVLFAHLIGNVQTYLQSITVRGEEWRLKQRDTEEWMRHRQLPHELRE

SEQ ID NO: 141805 - protein, 143 aa, Oryza sativa
  Clone ID: PAT_MRT4530_42874C.1.pep
MAEQQWSNQYSFLYHDKKIVLHPMSPKDILHADVAKAAKSKGGSHKNAQSAGKKTEINLKTKCLLATKSDINELIALPSVAYASEYSYVFPKEVPPGLPPVRGIEHQIDLITGASLPNCAPYRTNPEETKEVQRQIQELHDKR

SEQ ID NO: 141806 - protein, 168 aa, Oryza sativa
  unsure (1)..(168): unsure at all Xaa locations
  Clone ID: PAT_MRT4530_42875C.1.pep
VTHLPHISDPNMYFKSRVTYMTHLNKFNDPSCILLFFLRGSNSVKRDQSDVRFVDILHRNRQHSCPXVAAPRRHVTITLLLSVCQVGPTSVHVVVVTRSPAREARPRSAAPSARRGPPRRRRRGEPRAHVVEERAPQLGRRRRGDEGGRPAPRWPPRRVHXGAEEHVP

SEQ ID NO: 141807 - protein, 77 aa, Oryza sativa
  Clone ID: PAT_MRT4530_42876C.1.pep
FCASFFSLVVPFLSASQKGAPSALHMSVAFFVPTLSFHLEVSPFFPFSFFPPPFSFFRSHFPSFLLNRFPLLGEYPH

SEQ ID NO: 141808 - protein, 337 aa, Oryza sativa
  Clone ID: PAT_MRT4530_42877C.1.pep
MGCSISGLNALYDAATGGGDVWINERRFRVLRQIGEGGFAFVYLVREHQASADAARGRSPSLASEDGTYAMKKVLIQSKEQLDLVKEEIRVSSLFNHPNLLPLLDHAVIAVKNQQGDWNHEAYLLFPVYIDGTLFDNAKVMQSRKEFYSTIDVLRIFQQLCEGLKHMHSFDPPYAHNDVKTGNVLITHRKGQAPLATLMDFGSARPARKEIRSRAEALRLQEWAAEHCSAPYRAPELWDCPSHADIDERTDIWSLGCTLYAIMYNVSPFEYALGESGGSLQLAIVNCTLKWPAGPSPPYPDALHQFITWMLQPQPAMRPHIDDIILHVEKLMEKYSS

SEQ ID NO: 141809 - protein, 92 aa, Oryza sativa
  unsure (1)..(92): unsure at all Xaa locations
  Clone ID: PAT_MRT4530_42878C.1.pep
PPPPSXXPPPESPGSSSIRISPFPPXPPPRPNRPDLDRSDREKKHTHQKKNPPQKTTNXSISGWKKGSPQRESEQLGGARXWWXSXXELNSR

SEQ ID NO: 141810 - protein, 36 aa, Oryza sativa
  unsure (1)..(36): unsure at all Xaa locations
  Clone ID: PAT_MRT4530_42879C.1.pep
TGHCHGRQKSGNNFXDPSDRGFKKGNADSGFPFDPI

SEQ ID NO: 141811 - protein, 224 aa, Oryza sativa
  Clone ID: PAT_MRT4530_4287C.1.pep
MAAAAQRDDVESRRDGGENEKRPLLEKRSAGDGGGGSGGNGMSPVQRAISQTYQSTAHLAKLLPTGTVLAFQLLSPIVTNQGHCDVEANRAMAGALIALCALSCFVLSFTDSFRDAATGGAVRYGFATPAGLWVIDGGAPLDPQAAAAYRLRLLDLVHAVVSVMVFAAVALFDQNVVSCFYPVPSEGTRQVLTALPIAIGVVGSMLFVSFPTTRHGIGFPLSPR

SEQ ID NO: 141812 - protein, 40 aa, Oryza sativa
  unsure (1)..(40): unsure at all Xaa locations
  Clone ID: PAT_MRT4530_42880C.1.pep
RAKRTSAVKQLKAQHRLIPSGPSIXNKALELWSLFDLSNA

SEQ ID NO: 141813 - protein, 57 aa, Oryza sativa
  Clone ID: PAT_MRT4530_42881C.1.pep
MAQCDGGPPAIGLGAPDHGAVKPVGYLNAGHKWPGFSSAVSSFLGFFNFRFKYRTPV

SEQ ID NO: 141814 - protein, 55 aa, Oryza sativa
  Clone ID: PAT_MRT4530_42882C.1.pep
RPRVRPRVRILTPSSFYAPSLLLLLCAPCYFFTYRRRQQILRLTGDDDGSDHDWR

SEQ ID NO: 141815 - protein, 124 aa, Oryza sativa
  unsure (1)..(124): unsure at all Xaa locations
  Clone ID: PAT_MRT4530_42883C.1.pep
RIGKPPKPPGGRGNPGGMPPPRIXFDKYPPGYFGKVGMRYFPRVSNRFPCPPVNVERLWSMVAPQAGAGAGKAPVIDVPQFGYPKVLGKGMLPPKRPLVVKAQLISKVPQKKIKAPGGAVLLPP

SEQ ID NO: 141816 - protein, 93 aa, Oryza sativa
  Clone ID: PAT_MRT4530_42884C.1.pep
GPCPPNSLSIAASFPASSTASPPATAAYDVDWRHQSRPPALGGRLTVPTRAPSMSCAAECDTRTFKHPSTRRRRRPRCLQLRRGPGQAAAIGA

SEQ ID NO: 141817 - protein, 90 aa, Oryza sativa
  Clone ID: PAT_MRT4530_42885C.1.pep
RNRPRGGLVGRPRRCPAAGDRRKRRMIKNRESAARSRARKQARVNNRETEVEQLKQENKMLRVKYEQLRKTVEVPAPVRRTLQRVLSAPF

SEQ ID NO: 141818 - protein, 801 aa, Oryza sativa
  Clone ID: PAT_MRT4530_42886C.1.pep
MDALASEEYASQSKLLQEFTNAPSIDGAWVFQTNNEDRSTAMYSISQTNLLANNKRKYILFSHIMRNGTNLLDFQWSPFPIQMDGVSAVVPSPSGSKLLVVRNGEKGSPTKLEIVDQSHVEKEIHVAQSVHGPLYTDEWFHGISWNQEETLIAYIAEDSPEPKPVFDDTGYRKEGSSEKDCNNWKGQGDWEEDWGETYSKKGRPSLFVLDINSGEVRAAKGISRSLSVGQVVWAPPSSCGRQKYLIFVGWLEHNGFQNTPRKLGIKYCSNRPCSLYSTLCPFEESDVDNAPASDSKLEPASVAINLTPSISSAFFPRFRTLNHARKILHGKSLIIFNSKDGKLLVFLSANRAVDSGAHNATDSLHKINWPSDWKMDQYLEITDVSIYLTSELCQIPIVMCPQDGCFPGLYCSSMLSNPWLSDRCTMILTSAWRSTEVILSIDVLSGKATRISPENSEYSWSALAVDGHNVLVGPSGPIDPPQIKYGHQVSLKDQTCTWVWDEVNNNPLMAANNKVKALLSHHQFSILKIPVTNPSDDLSDGSKLPFEAIFVSCKDSSHKPTILVLHGGPHSVSVSSYSKTSAFLASLGFNLLIVNYRGTPGFGEEALQSLPGKVGSQDVQDCLTALDYVIEGGLIDASKVAVIGISHGGFLTTHLIGQAPDRFMVAAARNPVCNLSLMIGTTDIPDWCYAVACGSEGRQHASESPSPDHLRLFYQKSPIAHISKVKAPLLMLLGGADLRVPISNGLQYARALRERGGEIRIMMFPDDIHEINIPQSDFESFLNIGVWFKKHLSISASDASA

SEQ ID NO: 141819 - protein, 98 aa, Oryza sativa
  Clone ID: PAT_MRT4530_42887C.1.pep
SRIGANRGDDFLLYMELDQNPMVVKPDEGINKTDNAERLQGNTTMGEGQLARHKDYGARRREGQLTTLLDYWRRKESWRELSLTTCARAPGTSGSGPG

SEQ ID NO: 141820 - protein, 1030 aa, Oryza sativa
  Clone ID: PAT_MRT4530_42888C.1.pep
MNPQAEGDAAAAAAVLGADPAGLTALLGDLTSPANEARSRAEGMFHALRASHPDALALRLAHLLLSPAHPSAPMAAVLLRRLISPGSQAFVYPGLSPATQSSLRALLLSAASATGLSKSISKKLSDAVAELASFLLPSNAWPDLLTFLYKSIASPSSPPALQESALNILARLASHLAAGFPNLHALLLSALSHPSSADVRVAGLNAAISLIQSLPSAADRDQFQDLLPAMMRALAESLNCGNEGSAQEALEMMIELAGAEPRFLRRQLPDVVGSMLQIAEAPGLEDGTRHLAVEFVVTLAEARERAPGMMRKLPRYVGRLFAVLMTMLLDVQDEPAWHAAVSEEEDAGETGSYVFAQECLDRLAIAVGGNTILPVAAELLPSFFASEEWKRRHAALVTIAQIAEGCARVMIKNLEQAHAASAILNFSENCRPDILTPYLDGIVGKLLSLLQTGNQMVQEGALTALASAADSSQEHFQKYYDAVMPYLKSILMNATDKSNRMLRAKSMECISLVGMAVGKQKFKDDAKQVMEVLMTLQGSQMEADDPITSYMLQAWARLCKCLGQDFLPYMNVVMPPLLQSAQLKPDVSVTSAGPEDENGESDDEGVETITLGDKRIGIRTSLLEEKATACNMLCCYADELKEGFFPWIDQVATTLVPLLKFYFHEEVRKAAVSAMPELLRSAKLAIEKSHRKEPDTQICASMLESLNESIQLSGTLLEEGQVRSIVDGIKEVITASALRRRERTDRAKAEDFDSEEEDLLREENEQEDEIFDQIGDCLGTLVKTFKTYFLPFFDELSVYLTPMLAKDKTVEERRIAICIFDDVAEHCREAAVRYYDTYLPSLLEACTSENPDIRQAAVYGIGICAEFGGSAFRPHTGEALSRLYNVIKHPNALDLDNAMAYDNAVSALGKICQFHRDGIDASQVVPAWLSCLPIKNDLIEAKIVHEQLCTMLEKSDRELLGHNNQYLPKIVSIFAEILCAGKDLATEQTFSKMVNLLRQLQTTLPPSVLASTWSSLQPQQQLALQSVLSS

SEQ ID NO: 141821 - protein, 194 aa, Oryza sativa
  Clone ID: PAT_MRT4530_42889C.1.pep
TSRVFVQQRTMEGQSQLNPDASPFIPSSLSLFTYNDSKRQAESSSMNDPSARACRPSMCEENDMDPLALTKSVLLMFPNISEEFIDELLQANEFDICLTVDMLHELNSQNMLHGDAIMGFPTFPDVKKFHGNLGLPDGDLSESNSSLDQSLQKGMSLTTSGAKSASAMIPDNISLHDKLGVQKDDKPAIASTTN

SEQ ID NO: 141822 - protein, 663 aa, Oryza sativa
  Clone ID: PAT_MRT4530_4288C.1.pep
MVSEKAKSNKRKKLECIISRLPRDLIEQVFLSLPVKTLLNCIGVCKQWRSIIQDPKFVTSHLQLAPHCALLFFPRELVSSCGLYPSEAILIDEAWSQSIWDVPVIGPDDFLCGSSNGLVCLYTHTTTIKIANLATGECLHLAKPAKNLTDDHFSFYSFGFHPLTKEYKVTHFLASSHETRIRAKVDSFDGVQVYTLGDEKWKYIGAPEALSLNCVKNSGVVNVDGTMYWLTEDQGTSWHHAVMSFDLNKESFGRIQLPTAALEDSAFYGPRRYWIKEIDGKVCIATCQTSDNQPILLRGEIQIWALDINLEQKWIQKYIIQPSAQHIPGPNIVHRDKIVLQHDARNLCSYELLGKNVEVKLSNMEKLLDFSPRKPGSMQVYTFVKSLVRLDSYKKASIVRRPKRKVTTKNLRTTINRLMQRLPDDEALKCIGMKIDQMLHYLPEDCPNQACDDVFRTARSWLSDQGTSISTADASFWFDLQHFLLGGGDRASGFAISSGWEVDLGGSRQLGGSDVAVPVPRRFPRAVGGRAGKRAGADVRAKRMTVSAAEATGCSYSQRRRHCCWWHEQEAEAMPRAAATRAGKGGGGRTGGSDDGGGNWHMRQKSAVTTTLRILSCCSRHRDVAATAMVDPQLHPCPRHCSEAIEKAAEPETQIGVGPTIFG

SEQ ID NO: 141823 - protein, 310 aa, Oryza sativa
  Clone ID: PAT_MRT4530_42890C.1.pep
MKGGVIRSGGGVGGIGVGGGGGGGGAGGGLMRTRLRLPVVLLSCSLFFLAGFFGSILFTQDPQGEEELDTPMRRERLMEAAWPGMAYGESGEPEPSLIPYQILSWQPRALYFPQFATSQQCENIVKTAKQRLMPSTLALRKGETEESTKGIRTSSGTFLSSDEDPTGTLAEVEKKIAKATMIPRHHGEPFNILRYEIGQRYASHYDAFDPAQYGPQKSQRVASFLLYLTDVEEGGETMFPYENGENMDIGYDYEKCIGLKVKPRKGDGLLFYSLMVNGTIDPTSLHGSCPVIKGEKWVATKWIRDKSKAV

SEQ ID NO: 141824 - protein, 166 aa, Oryza sativa
  unsure (1)..(166): unsure at all Xaa locations
  Clone ID: PAT_MRT4530_42891C.1.pep
ARSTRRGARVRRGRGARARLAXDADAASPRAASRLAVDRASEQSGGERRTGVSLTRSRPRWRLCGCHADRREEDDDAPANRRPTAAASGGAINGDAGEGEHTGRASTRLRESIPCAGLGGNAPREAGDERRYRARAATVASTQRAAARLGAAPADYGGSTHATTES

SEQ ID NO: 141825 - protein, 181 aa, Oryza sativa
  Clone ID: PAT_MRT4530_42892C.1.pep
LNPLDAYNQKLVKQIEVEPVLAENDVNGAYVVLKEPVVGKGKLKAKIEIHVQTEKETKKKVVTIQAGDDLYEKSGKNESYRHGFIINELCVCRFPPFGEIHLSNGQVLTQSEDDDLLRDEIMKKQMECTIKEHLAKEKWLNSKGIKVLSLFFIDKVANYRDNGKFYRWFNEIYERETGKSA

SEQ ID NO: 141826 - protein, 404 aa, Oryza sativa
  Clone ID: PAT_MRT4530_42893C.1.pep
MEEEREVQEQVPQVAGVESQSKRASASLTPASSKATAGAAAVGRAARIPASRSRGSATTNKAMATPTVAPSSRAKASNPSMSVEMVIMSDGEEDEENSFDLNDEMIVEHKGFNTLMKWMNSSYEFIGRKTIKNECMKSKLAARKNGQFDSDYSHVRCAAHIVNLVVNDGLQPIQPLINNLRNTVKYFKRSPARSTYPTANVFYPYIVKVKISILAAQTQAQARLAEAAKLGQQTGLYEPDPNDVFLLNMTDAMMDKFNKYWENTNNIMVIATVLDPRFKMRYITWCFGQLFDKTRSEIEVAAITNELGKLYNMYEAICRQKQGENSPHIAHSASSSRDTRMSLVSIVPSGLQSFLESNAAESSKSELLIYLDELNVPIDDSTFNVLNFWKVDAHRFSVVSNMAK

SEQ ID NO: 141827 - protein, 70 aa, Oryza sativa
  Clone ID: PAT_MRT4530_42894C.1.pep
KNKIRLYLKSYGLKKIQESYRNDHLNATYKKTQELEKRDRYKYPPPPTHLPLQKKRGWTLCQNSSKFFMF

SEQ ID NO: 141828 - protein, 311 aa, Oryza sativa
  Clone ID: PAT_MRT4530_42895C.1.pep
MEFITPIVRPASAAAGGGEVQESGGRSLAAVEKEHMFDKVVTPSDVGKLNRLVIPKQHAEKYFPLDAASNEKGLLLSFEDRTGKPWRFRYSYWNSSQSYVMTKGWSRFVKEKRLDAGDTVSFGRGVGEAARGRLFIDWRRRPDVVAALQPPTHRFAHHLPSSIPFAPWAHHHGHGAAAAAAAAAGARFLLPPSSTPIYDHHRRHAHAVGYDAYAAATSRQVLFYRPLPPQQQHHPAVVLESVPVRMTAGHAEPPSAPSKRVRLFGVNLDCANSEQDHAGVVGKTAPPPLPSPPSSSSSSSGKARCSLNLDL

SEQ ID NO: 141829 - protein, 199 aa, Oryza sativa
  Clone ID: PAT_MRT4530_42896C.1.pep
MNGPAEIDCTVTFTIAGKNPVTLRITGSRSTDWEFFPDWSEDVTEKLEFLTTVHQSITECQRLENMLYAYGARVWALPIFTHQVYLDKPTKPGDKTLSLATTGFDFYVGGRAVLMNGNKREMVDITGIEPDKLEIKRSLLNRFDTSTVVYPLRSAVLTDMPQLTRLSDEVATAQIRLQIHEHNGYAADIRHLPTYRGHP

SEQ ID NO: 141830 - protein, 77 aa, Oryza sativa
  Clone ID: PAT_MRT4530_42897C.1.pep
LKQWGLPPPSPMAAISVCYGFQMTFSRGHVILQCVVGWNMSSFFYNSSCCLSCTLRFYLLWSFQTLNFVGHINTRPV

SEQ ID NO: 141831 - protein, 162 aa, Oryza sativa
  Clone ID: PAT_MRT4530_42898C.1.pep
GEERRGGGGSGGGGRGARERERGRGVSIPWGEGGGWGGLVRRTRDSKPFFFTFAALCGVVPGVVGYGVMQLTSSRNDQLEAHLRSTARPETAMMGQVNRERLAEFLGELQRKEDTNDRYVAALKGETLTRKRYERIQPVNKEGTPESPPVKEQATTESVKAK

SEQ ID NO: 141832 - protein, 73 aa, Oryza sativa
  unsure (1)..(73): unsure at all Xaa locations
  Clone ID: PAT_MRT4530_42899C.1.pep
LGGRVRIRPGLVTPRWGWGGGPFXSKGGVVGVFPNGELGVQFQWRDGLWIGDPPHIVFFYFPPLPRGFKGFCL

SEQ ID NO: 141833 - protein, 43 aa, Oryza sativa
  Clone ID: PAT_MRT4530_4289C.1.pep
RCSSRLVVCRKEKTIFAFLSVLFIFTVVWNKAACELVVHFSNF

SEQ ID NO: 141834 - protein, 45 aa, Oryza sativa
  Clone ID: PAT_MRT4530_428C.1.pep
MEYEHQGNPGRCAFTLWIDNVNPTYDGQKITESETLVEYQREKEH

SEQ ID NO: 141835 - protein, 158 aa, Oryza sativa
  Clone ID: PAT_MRT4530_42900C.1.pep
MSILWEKSAGWRWLVRRTRDSKPFFFTFAALCGVVPGVVGYGVMQLTSSRNDQLEAHLRSTARPETALKSGKSLFAVNADYQPYELPKMMGQVNRERLAEFLGELQRKEDTNDRYVAALKGETLTRKRYERIQPVNKEGTPESPPVKEQATTESVKAK

SEQ ID NO: 141836 - protein, 119 aa, Oryza sativa
  Clone ID: PAT_MRT4530_42901C.1.pep
FLGALFHCSGSEPAQKYPLPVQISPFLQYWDIHPRGPHEYVHLYGTRTYIYCTGYTHAHFSAETRIVVNLASLAEGEASPWQHGGGGAHLPGTNTYTFVAITNSQSKDPSSSHGQLRER

SEQ ID NO: 141837 - protein, 84 aa, Oryza sativa
  unsure (1)..(84): unsure at all Xaa locations
  Clone ID: PAT_MRT4530_42902C.1.pep
LDCVLVFSKPGAQKCTYKKRRGDWNPCFRLQVLTCKHRPLSSRRAPCLKLLAHGQRIVSLADIASATNLAASLILAKLLLLGSX

SEQ ID NO: 141838 - protein, 120 aa, Oryza sativa
  unsure (1)..(120): unsure at all Xaa locations
  Clone ID: PAT_MRT4530_42903C.1.pep
VLFPVXXLGCSFCSLXFPALSPLPWVXRVCFXVAAAASWGCRLGXPVXAVVACFRLVXXWALFLXFVGAXALWPAWGVLGLFCXLVSSRFSRRXLXSCLXLLCSPVVVCVXXFVFVLVPL

SEQ ID NO: 141839 - protein, 78 aa, Oryza sativa
  Clone ID: PAT_MRT4530_42904C.1.pep
LRILFVLMWIVSLTIWSYLSFSASLGLGMFVGFQCFHGHGTQNVSNVQILGCDLEDGYLFETMEALDVPLAYTLVSLC

SEQ ID NO: 141840 - protein, 151 aa, Oryza sativa
  Clone ID: PAT_MRT4530_42905C.1.pep
MGGTGAAGVGGPAAHLSRVRTGAEKKRAQRQRGIEGKERSAAHLSHARSGAKQKRARARRRAGRRRSTGAGEGSATTSGGGIGRADGNERLVWRSKGGIPSQLPPPIQDGDDADDKDEGAMEEEVTGDGVEAEAKAEAELISGAECIRWSA

SEQ ID NO: 141841 - protein, 1056 aa, Oryza sativa
  unsure (1)..(1056): unsure at all Xaa locations
  Clone ID: PAT_MRT4530_42906C.1.pep
MAQSMVPVFARENYDIWSIKMRTLLLSQGLWDIVENGYQEYSAGETLTAEQKKSLVEDRMSDAKALFLIQQGVAESLFPRIIGAKKSKEAWDKLKEEFQASQKVLAVKLQTLRRQFQNLQMKESEKVKDYFSRVIEIVNQMRLYGEDINDQKVVKKILISLPEKYEYIVAAIEESKDLSTLTIQQLMSSLESHEERKLQREGSSVENAFQSKLSFRPQNSRFRGNFQKNGFPMRDRGFQKNGFSRQNEYGQERREKGTSSSNLWCDICQKSSHTTYMCWKKMTCNKCKRKGHIAKYCRTREINRANFSQEKEKSEEMVFSCHTAQEEKDDVWVIDSGCTNHMAADPNLFREMDSSYHAKIHMGNGSIAQSKGKALEIFKKFKAMVENQSNRKIKVLRSDQGGEYISKEFEKYCENAGIRRQLTAGYSAQQNGVAERKNRTINDMANSMLQDXRSPTKAVPNRTPFEAWYGQPHMQGTHEVEYHPPSPQSSSPRSSSSASSDSSPSSEEQISXTPESAPRRVRSMVELLESTSQQRGSEQHEFCNYSVVEPQSFQEAEKHDNWIKAMEDEIHMIEKNNTWELVDRPRDREVIGVKWVYKTKLNPDGSVQKYKARLVAKGFKQKPGIDYYETYAHVARLETIHTIIALAAQKRWKIYQLDVKSAFLNGYLDEEIYVEQPERFSVQGGENKVFRLKKALYGLKQAPRAWYSQIDKYFIQKGFAKSISEPILYVKKTGTDILIVSLYVDDLIYTGNSEKLMQDFKKDMMHTYEMSDLGLLHYFLGMEVHQSDEGIFISQRKYAENILKKFKMDNCKSVTTPLLPNEKQKARDGADKADPTIYRSLVGSLLYLTATRPDIMFAASLLSRYMSSPSQLNFTAAKRVLRYIKGTAYYGIWYKPVKESKLIGYTDSDWAGCLDDMKSTSGYAFSLGSGMWSWSTKKQNIVALSSAEAEYVAASKAVSQVVWLRRIMEDLGEKQYQPTTIYCDSKSAIAINENPVSHDRTKHIAIKYHYIREAVDRQEVKLEFCRTDEQLADIFTKALSKEKFICDRELIGVCKK

SEQ ID NO: 141842 - protein, 1142 aa, Oryza sativa
  unsure (1)..(1142): unsure at all Xaa locations
  Clone ID: PAT_MRT4530_42907C.1.pep
MAQSMVPVFAGENYDIWSIKMRTLLLSQGLWDIVENGYQEYSAGETLTAEQKKSLAEDRMSDAKALFLIQQGVAESLFPRIIGAKKSKEAWDKLKEEFQGSQKMRLYGEDINDQKVVEKILISLPEKYEYIVAAIEESKDMLTLTIQQLMSSLESHEERKLQREGSSIENAFQSKLSFRPQNSRFRGNFQKNEFPMRDRGYFQKNGFSRQKEDGQERREKDMAILQNIAELEKLIGLIFHKKRKXSEEMVFSCHTAQEEKDDVWVIDSGCTNHMAADPNLFREMDSSYHAKIHMGNGSIAQSEGKDFSCKILDRKNNRLVAKINMEKNINFLLRMNHPTQMALRSEIDISDLWHKRMGHLNYRALKLLRTKGMVQGLPFITLKSDPCEGCVFGKQIRASFPHSGAWRASAPLELVHTDIVGKVPTISEGGNWYFITFIDDYTRMIWVYFLKEKSAALEIFKKFKAMVENQSNRKIKVLRSDQGGEYISKEFEKYCENAGIRRQLTAGYSAQQNGVAERKNRTINDMANSMLQDKGMPKSFWAEAVNTAIYILNRSPTKAVPNRTPFEAWYGKKPVIGHMRVFGCICYAQVPAQKRVKFDNKSDRCIFVGYADGIKGYRLYNLEKKKIIISRDVIFDESATWNWKSPEASIVEPQSFQEAEKHDNWIKAMEDEIHMIEKNNTWELVDRPRDREVIGVKWVYKTKLNPDGSVQKYKARLVAKGFKQKPGIDYYETYAPVARLETIRTIIALAAQKRWKIYQLDVKSAFLNGYLDEEIYVEQPEGFSVQGGENKVFRLKKALYGLKQAPRAWYSQIDKYFIQKGFAKSISEPTLYVNKTGTDILIVSLYVDDLIYTGNSEKMMQDFKKDMMHTYEMSDLGLLHYFLGMEVHQSDEGIFISQRKYAKNILKKFKMDNCKSVTTPLLPNEKQKARYGADKADPTIYRSLVGSLLYLTATRPDIMFAASLLSRYMSSPSQLNFTAAKRVLRYIKGTADYGIWYKPVKESKLIGYTDSDWAGCLDDMKSTSSYAFSLGSAEAEYVAASKAVSQVVWLRRIMEDLGEKQYQPTTIYCDSKSAIAISENPVSHDRTKHIAIKYHYIREAVDRQEVKLKFCRTDEQLADIFTKALSKEKFVRDRELIGVCKK

SEQ ID NO: 141843 - protein, 1143 aa, Oryza sativa
  unsure (1)..(1143): unsure at all Xaa locations
  Clone ID: PAT_MRT4530_42908C.1.pep
MAQSMVPVFAGENYDIWSIKMRTLLLSQGLWDIVENGYQEYSAGETLTAEQKKSLAEDRMSDAKALFLIQQGVAESLFPRIIGAKKSKKAWDKLKEEFQGSQKVLAVKLQTLRRQFQNLLMKESEKVKDYFSRVIEIVNQMRLYGEDINDQKVVEKILISLPEKYEYIVAAIEESKDLSTLTIQQLMSSLESHEERKLQREGSSIENAFQSKLSFRPQNSRFRGNFQKXNGFPMRDRGYFXKNGFSRQKEDGQERREKEXLKLLRTKGMVQGLPFITLKSDPCEGCVFGKQIRASFPHSGAWRASAPLELVHTDIVGKVPTISEGGNWYFITFIDDYTRMIWVYFLKEKSAALEIFKKFKAMVENQSNRKIKVLRSDQGGEYISKEFEKYCENAGIRRQLTAGYSTQQNGVAERKNRTINDMANSMLQDKGMPKSFWAEAVNTAIYILNRSPTKAVPNRTPFEAWYGKKPVIGHMRVFGCICYAQVPAQKRVKFDNKSDRCIFVGYADGIKGYRLYNLEKKKIIIIRDVIFDESATWNWKSPEASSTPLLPTTTITLGQPHMHGTHEVEDHTPSPQPSSPMSSSSASSDSSPSSEEQISTPESAPRRVRSMVELLESTSQQRGSEQHEFCNYSVVEPQSFQEAEKHDNWIKAMEDEIHMIEKNNTWELVDRPRDREVIGVKWVYKTKLNLDGSVQKYKARLVAKGFKQKPGIDYYETYAPVARLETIRTIIALAAQKRWKIYQLDVKSAFLNGYLDEEIYVEQPEGFSVQGGENKVFRLKKALYGLKQAPRVWYSQIDKYFIQKGFAKSISEPTLYVNKTGTDILIVSLYVDDLIYTGNSEKMMQDFKKDMMHTYEMSDLGLLYYFLGMEVHQSDEGIFISQRKYAENILKKFKMDNCKSVTTPLLPNEKQKARDGADKVDPTIYRSLVGSLLYLTATRPDIMFAASLLSRYMSSPSQLNFTAAKRVLRYIKGTADYGIWYKPVKESKLIGYTDSDWAGCLDDMKGTSGYAFSLGSGMCSWSTKKQNIVALSSAEAEYVAASKAVSQVVWLRRIMEDLGEKQYQPTTIYCDSKSAIAISENPVSHDRTKHIAIKYHYIREAVDRQEVKLEFCRTDEQLADIFTKALSKEKFVRDRELIGVCKK

SEQ ID NO: 141844 - protein, 1167 aa, Oryza sativa
  Clone ID: PAT_MRT4530_42909C.1.pep
MAQSMVPVFAGENYDIWSIKMRTLLLSQGLWDIVENGYQEYSAGETLTAEQKKSLAEDRMSDAKALFLIQQGVAESLFPRIIGAKKSKEAWDKLKEEFQGSQKVLAVKLQTLRRQFQNLLMKESEKVKDYFSRVIEIVNQIRLYGEDINDQKVVEEILISLPEKYEYIVAAIEESKDLSTLTIQQLMSSLESHEERKLQREGSSIENAFQSKLSFRPQNSRFRGNFQKNGFPMRDRGYFQKNGFSRQKEDGQERREKEEKDDVWVIDSGCTNHMAADPNLFREMDSSYHAKIHMGNGSIAQSEGKGTVAVQTADGPKFIKDVLLVPDLKQNLLSIGQLLEHGALKLLRTKGMVQGLPFITLKSDPCEGCVFGKQIRASFPHSRAWRASAPLELVHTDIVGKVPTISEGGNWYFITFIDDYTRMIWVYFLKEKSAALEIFKKFKAMVENQSNRKIKVLRSDQGGEYISKEFEKYCENAGIRRQLTAGYSAQQNGVAERKNRTINDMANSMLQDKGMPKSFWAEAVNTAIYILNRSPTKAVPNRTPFEAWYGKKPVIGHMRVFGCICYAQVPAQKRVKFDNKSDRCIFVGYADGIKGYRLYNLEKKKIIISRDVIFDESATWNWKSPKASSTPLLPTTTITLGQPHMHGTHEVEDHTPSPQPSSPMSSSSASSDSSPSSEEQISTPESAPRRVRSMVELLESTSQQRGSEQHEFCNYSVVEPQSFQEAEKHDNWIKAMEDEIHMIEKNNTWELVDRPRDREVIGVKLETIRTIIALAAQKRWKIYQLDVKSAFLNGYLDEEIYVEQPEGFSVQGGENKVFRLKKALYGLKQAPRVWYSQIDKYFIQKGFAKSISEPTLYINKTGTDILIVSLYVDDLIYTGNSEKMMQDFKRDMMHTYEMSDLGLLHYFLGMEVHQSDEGIFISQRKYAENILKKFKMDNCKSVTTPLLPNEKQKARDGADKVDPTIYRSLVGSLLYLTATRPDIMFAASLLSRYMSSPSQLNFTAAKRVLRYIKGTADYGIWYKPVKESKLIGYTDSDWAGCLDDMKSTSGYAFSLGSAEAEYVAASKAVSQVVWLRRIMEDLGEKQYQPTTIYCDSKSAIAISENPVSHDRTKHIAIKYHYIREAVDRQEVKLEFCRTNEQLADIFTKALSKEKFVRDRELIGVCKK

SEQ ID NO: 141845 - protein, 89 aa, Oryza sativa
  Clone ID: PAT_MRT4530_4290C.1.pep
VARRRALVRETEAAGLLSLFASWRASSSFVVVEDGDDDEVVSHGRIKPDTLDDESSSLVMLDREWRMAEHGDINGLLAKRPSSSPPTPP

SEQ ID NO: 141846 - protein, 1350 aa, Oryza sativa
  Clone ID: PAT_MRT4530_42910C.1.pep
MAQSMVPVFAGENYDIWSIKMRTLLLSQGLWDIVENGYQEYSAGETLTAEQKKSLAEDRMSDAKALFLIQQGVAESLFPRIIGAKKSKEAWDKLKEEFQGSQKVLAVKLQTLRRQFQNLLMKESEKVKDYFPRVIEIVNQMRLYGEDINDQKVVEKILISLPEKYEYIVAAIEESKDLSTLTIQQLMSSLESHEERKLQREGSSIENAFQSKLSFRPQNSRFRGNFQKNEFPMRDRGYFQKNGFSRQKEDGQERREKELEKLIGLIFHKKRKKSEEMVFSCHTAQEEKDDVWVIDSGCTNHMAADPNLFREMDSSYHAKIHMGNGSIAQSEGKDFSCKILDRKNNRLVAKINMEKNRNFLLRMNHPTQMALRSEIDISDLWHKRMGHLNYRALKLLRTKGMVQGLPFITLKSDPCEGCVFGKQIRASFPHSGAWRASAPLELVHTDIVGKVPTISEGGNWYFITFIDDYTRMIWVYFLKEKSAALEIFKKFKAMVENQSNRKIKVLRSDQGGEYISKEFEKYCENAGIRRQLTAGYSAQQNGVAERKNRTINDMANSMLQDKGMPKSFWAEAVNTAIYILNRSPTKAVPNRTPFEAWYGKKPVIGHMRVFGCICYAQVPAQKRVKFDNKSDWCIFVGYADGIKGYRLYNLEKKKIIISRDVIFDESATWNWKSPEASSTPLLPTTTITLGQPHMHGTHGVEDHTSSPQSSSPMSSSSASSDSSPSSEEQISTPESAPRRVRSMVELLESTSQQRGSEQHEFCNYSVVEPQSFQEAEKHDNWIKAMEDEIHMIEKNNTWELVDRPRDRKVIGVKWVYKTKLNPDGSVQKYKARLVAKGFKQKPGIDYYETYAPVARLETIRTIIALAAQKRWKIYQLDVKSAFLNGYLDEEIYVEQPEGFSVQGGENKVFRLKKALYGLKQAPRAWYSQIDQYFIQKGFAKSISTDILIVSLYVDDLIYTANSEKMMQDFKKDMMHTYEMSDLGLLHYFLGMEVHQSDEGIFISQRKYAENILKKFKMDNYKSVTTPLLPNEKQKARDGADKADPTIYRSLVGSLLYLTATRPDIMFAASLLSRYMSSPSQLNFTAAKRVLRYIKGTADYGIWYKPVKESKLIGYTDSDWAGCLDDMKSTSGYAFSLGSAEAEYVAASKAVSQVVWLRRIMEDLGEKQYQPTTIYCDDLAGGPRWRVQLGRRDATATNIPSADNLPGFTDTLEDLVAKFDAVGLDHGDLVALQGAHTFGRAQCLFTRENCTAGQPDDALENLDPVTPDVFDNNYYGSLLRGTAKLPSDQVMLSDDPYAAATTAPFVRRFAGSQKSFFRSFAASMIKMGNISPLTGMDGQIRQNCRRINTYY

SEQ ID NO: 141847 - protein, 90 aa, Oryza sativa
  unsure (1)..(90): unsure at all Xaa locations
  Clone ID: PAT_MRT4530_42911C.1.pep
NCQFLRHQFCHQLRMFAKHFFCRAIKSVQVFVQQLGLQQFCRVFFDXSQAQAQVFLALNNPSILGFSPRXNLAPCSIPPGGGFWFLIVPV

SEQ ID NO: 141848 - protein, 709 aa, Oryza sativa
  Clone ID: PAT_MRT4530_42912C.1.pep
MASGSEPIECQVLVLRVSIHCEGCKKKVKKVLQHVPGVFRCDVDARSNKVIVTASRNMDANILVAKLRKSGKQAEPWPEEPKQQQPPPPPAESQSQETKNQSDESSKPSDQPAEKPGPDKAEGSAAEPNNPQPSPEPTKSTDETPKPNQEIQEPSNAKANTDANASGNASDETKEAAATGEQSSEPKGKVKQHRERPIDARVTMEYGGGSHVNYMPQPQPVPVMSYNVARPTASAAYYAAPPAPAPMSMPMPMARPGPSSQGYIDEEYSPSYYNRSSPYEPYYYPQPSPYRYQHYQQSSADDYYYGAPQQRSAFSPPRDAYDEGSPRAATGEDARQVVVDETDTGHSLGFRATRLQRRAAAASRMGFDFGVRGVERKGIEAGAAEWRGRRARRRRAGGAGDGEARRRVQTLTGRAALPREETAKAQAELGLSGIAGMAHWTETRVGWNVNPIRVRVGPEWDSQVRSEWAGSRLRGGKKYTEAGDGRRCWEEAAGGRGEEEVRQPASRRRRQRRRQHPRFRRRGTALLGGRGGSKSRHPRFPDHDAAASAMASVKAPAPQEQKVEGESSDASLAVGGGFELPPACGGHSAAIGPADRHGLLLLLLRGGGRLRAPARVRIPLGGTWRGRPPWSPPPSPLGGRRGIHGRRRRRGERRRQAVAVGAGESGGATPSSPADAAARCSLLFRWRPPGRRAADLVRPPRRHLAPFTR

SEQ ID NO: 141849 - protein, 1258 aa, Oryza sativa
  unsure (1)..(1258): unsure at all Xaa locations
  Clone ID: PAT_MRT4530_42913C.1.pep
MAQSMVPVFAGENYDIWSIKMRTLLLSQGLWDIVENGYQEYSAGETLTAEQKKSLAEDRMSDAKALFLIQQGVAESLFPRIIGAKKSKEAWDKLKEEFQGSQKVLAVKLQTLRRQFQNLLMKESEKVKDYFSRVIEIVNQMRLYGEDINDQKVVEKILISLPEKYEYIVAATEESKDLSTLTIQQLMSSLESHEERKLQREGSSIENAFQSKLSFRPQNSRFRGNFQKNGFPMRDRGYFQKNGFSRQKEDGQERREKELEKLIGLIFHKKRKXSEEMVFSCHTAQEEKDDVWVIDSGCTNHMAADPNLFREMDSSYHAKIHMGNGSIAQSEGKDFSCKILDRKNNRLVAKINMEKNRNFLLRMNHTTQMALRSEVDISDLWHKRMGHLNYRALKLLRTKGMVQGLPFITLKSDPCEGCVFGKQIRASFPHSGAWRASAPLELVHADIVGKVPTISEGGNWYFITFIDDYTRMIWVYFLKEKSAALEIFKKFKAMVENQSNRKIKVLRSDQGREYISKEFEKYCENAGIRRQLTAGYSAQQNGVAERKNRTINDMANSMLQDKGMPKSFWAEAVNTAVYILNRSPTKAVTNRTPFEAWYGKKPVIGHMRVFGCICYAQVPAQKRVKFDNKSDRCIFVGYADGIKGYRLYNLEKKKIIISRDAIFDESATWNWKSPEASSTPLLPTTTITLGQPHMHGTHEVEDHTPSPQPSSPMSSSSASSDSSPSSEEQISTPESAPRRVRSMVELLESTSQQRGSEQHEFCNYSVVEPQSFQEAEKHDNWIKAMEDEIHMIEKNNTWELVDRPRDREVIGVKWVYKTKLNPDGSVQKYKARLVAKGFKQKPGIDYYETYAPVARLETIRTIIALAAQKRWKIYQLDVKSAFLNGYLDEEIYVEQPEGFSVQGGENKVFRLKKALYGLKQAPRAWYSQIDKYFIQKGFAKSISEPTLYVNKTGTDILIVSLYVDDLIYTGNSEKMMQDFKKDMMHTYEMSDLGLLHYFLGMEVHQSDEGIFISQRKYAENILKKFKMDNCKSVTTPLLPNEKQKARDGADKADPTIYRSLVGSLLYLTATRPDIMFAASLLSRYMSSPSQLNFTAAKRVLRYIKGTADYGIWYKPVKESKLIGYTDSDWAGCLDDMKSTSGYAFSLGSAEAEYVAASKAVSQVVWLRRIMEDLGEKQYQPTTIYCDSKSAIAISENPVSHDRTKHIAIKYHYIREAVDRQEVKLEFCRTDEQLADIFTKALSKEKFVRDRELIGVCKK

SEQ ID NO: 141850 - protein, 111 aa, Oryza sativa
  Clone ID: PAT_MRT4530_42914C.1.pep
MEVISDTASLEVDSLQLPEESSLALKSNLTFVETLFEQWLSLPESNRLETSLVNEAKSGAPSNVPGNCSSPNAASNSLPSMFPAGTAPPLSPRSTSGAPRIVKQRAGPSNL

SEQ ID NO: 141851 - protein, 671 aa, Oryza sativa
  Clone ID: PAT_MRT4530_42915C.1.pep
MDEKVKMESKLSSAAAFVEGGVQDACDDACSICLEAFCDNDPSTVTSCKHEYHLQCILECQELLEAVEQERNIRANRLNTAAVFHHPVLGDFEVPVGADDAELEERIIQHLAAAAAMRQDEDHEQSSDLGSAHPFAALAAVDQGHMSGGSQLYVGHSDQEGSLADEGAVAAAQAIRAGEKWPQAAAMGAPVCGALVCFFVLLVARAAAETAPVERPTLPSADVAIDGNGNGARAGAGKAAGAGAVGGGIVSNSVLVALLDSHYTELAELVEKALLLQTLEDAVGKHNVTIFAPRNEALERDLDPEFKRFLLEPRNLKSLQSLLLFHVLPARLPSGSWSAVSHPTLSGEEVELAAAANDGAMRVAHAAVTRPDAVLRPDGVIHGIERLLVPRSVQEDFNRRRSLADISAVLPTGAPEVDPRTHRLKKPAPPVPPGAPPVLPIWDAMAPGPSIAPAPAPGPGSGKHHFDGHSQVKDFIQTLLLYGGYNELADILVNLTSLATEMGRLVSEGYVLTVLAPNDEAMARLTTDQLSEPGSPENILYYHMIPEYQTEESMYNAVRRFGKVRYDTLRLPHKVVAREADGSVKFGHGEGSAYLFDPDIYTDGRIAVQGIDAVLFPPADTKTAPDTAPVRRAPAVTGTRKKNKLRRGKLLEATCQMAGILGQRLRFASCQ

SEQ ID NO: 141852 - protein, 216 aa, Oryza sativa
  unsure (1)..(216): unsure at all Xaa locations
  Clone ID: PAT_MRT4530_42916C.1.pep
GGRRSTGKGPTGEEEGKKVTRVLEWEGCVVLPVPTATADEAWVLLSDFLAFHRWHPRVAKCRLASPSAAAALAMFETQNHKLYCEGTPCGDGTPPDWAHEMLLEHDAARRFFRYEMNGNSMGFGVFFAMFRVIVVVPDAAAGDAPGCELRXEFEGDPVRGTAKESNVAALTSRLDELSADDAALAAAERAVAQAALAAPLRAAADEVSALRARLAA

SEQ ID NO: 141853 - protein, 76 aa, Oryza sativa
  Clone ID: PAT_MRT4530_42917C.1.pep
FTALTVITIKKILQCYDKYLEADFKAEAAKAGHPEWELPDDAGEYNDTPEKTRFFADNGTYVTEKGKFFLTWYSNK

SEQ ID NO: 141854 - protein, 118 aa, Oryza sativa
  unsure (1)..(118): unsure at all Xaa locations
  Clone ID: PAT_MRT4530_42918C.1.pep
LFYPCFNETTKSPNLAVPDPIEKPSLXGLQAAAARGREERRLGPARGGVGRGQARRGGPEEQRLRRRGGAAALRSGGSVGTAAPRIASAGRRGGRRPRDXGASERSGAALSACRRGPA

SEQ ID NO: 141855 - protein, 917 aa, Oryza sativa
  Clone ID: PAT_MRT4530_42919C.1.pep
MRLSSSSGSVLPAQAASPEAVEEQKCLNSELWHACAGPLVSLPAVGSRVVYFPQGHSEQVAASTNKEMESQIPNYPNLPPQLICQLHNVTMHADAETDEVYAQMTLQPLSPQELKDPYLPAELGSANKQPTNYFCKTLTASDTSTHGGFSVPRRAAEKVFPPLDFTQQPPAQELIAKDLHGNEWKFRHIFRGQPKRHLLTTGWSVFVSAKRLVAGDSVLFIWNDNNQLLLGIRRANRPQTVMPSSVLSSDSMHIGLLAAAAHAASTNSRFTIFYNPRASPSEFVIPLSKYVKAVYHTRISVGMRFRMLFETEESSVRRYMGTITGISDLDAARWPNSHWRSVKVGWDESTAGERQPRVSLWEIEPLTTFPMYPSPFPLRLKRPWPTGLPSLHGGKDDDLTSSLMWLRDSANPGFQSLNFGGLGMNPWMQPRFDASLLGLQPDMYQTIAATAFQDPTKQVSPTILQFQQPQNIGGRANTLLPSQILQQVQPQFQQQQYLQNINETTIQGHAQSEFLQQQLQRCQSFTEQKPQLQTQQQQQESQQQQQQQSQCMQVPQHQQMQQQKNMTNYQSVPNALSPFSQLSSPSQSSPMTLQTVLPFSQPQSYPDTSMSSLSPSNTSTMHNALRPFSSEAPSHLSMPRPTAVPVPDPWSSKRVAVESLLPSRPQVTSQMEQLDSTAPSIPQSSALAPLPGRGCLVDQDGNSDPQNHLLFGVNIDSQSLLMQGGIPSLQGENDSTAIPYSTSNFLSPSQNDFPLDQTLSSADCLDESGYVPCSQNSDQVINRPPATFVKVYKSGTYGRSLDITRFSSYHELRRELGRLFGLEGQLENPLRSGWQLVFVDREDDVLLVGDDPWQEFVNSVSCIKILSPQEVQQMGKPFELLSSAPGKRLGSSCDDYVSRQESRSLSTGIASVGSVEF

SEQ ID NO: 141856 - protein, 191 aa, Oryza sativa
  unsure (1)..(191): unsure at all Xaa locations
  Clone ID: PAT_MRT4530_4291C.1.pep
MSTQLVFPSASNGGCPLGVSRNNFRKVVLGVGAGHLQGKKCFSGGSSRPSKLECSANSRRVGPRRTKDALYDLHPEISMLYGEDNGAVAAPGKEQDIVKTTERLEDVSASHRYSEPRIKVIGXGGGGSNAVNRMIESDGKGVEFWIVNTDFQAMRMSPIDPDNKLQIGQELTRGLGAGGNPEIGMNAAKES

SEQ ID NO: 141857 - protein, 68 aa, Oryza sativa
  Clone ID: PAT_MRT4530_42920C.1.pep
PPRVGGLSRGGGPPLVGPPLARVFPGCRRGALGRAGAPLPAFCGVGLPPGPGGVCFWLGFPRAPRTGP

SEQ ID NO: 141858 - protein, 337 aa, Oryza sativa
  Clone ID: PAT_MRT4530_42921C.1.pep
MASAAAAAAAEWEEAERKVLVARKAAFGLPTACPTCLPVLLYLRMCNVPFDIHVDSSFPDADHIPYVEFGECVAFNNEKGGVIEYLKEEKIVDLNSKHPSVSYSDVLSTKAMVMTWLSDALQYELWLASDGSIPHDIYFSDLSWPIGKILYWKKTREVKQQLGITKLNAAEKEEEIYQKANAAYDALSTRLGDQIFLFDNSPTDVDALFLGHALFVLNVLPDTSVLRSCLQKYDNLVNFTKHLKVQLLEADSDSSATGLGSTDPSSSSTPRKRASSGRSYKPKPRAKKERTEEEKKFRRKAKYFLATQLVAVLLFLSLMGGADSSELDDEDGVDYED

SEQ ID NO: 141859 - protein, 258 aa, Oryza sativa
  unsure (1)..(258): unsure at all Xaa locations
  Clone ID: PAT_MRT4530_42922C.1.pep
WIPRAAGXRXEIAEAVNXRLXSXRAPGPQLXPXRSRXXXHXXXQXXAXXXXXPXXTXXXXXXXXXARXXXXXSXXXXAXXFXXXRXXEXXXXTXXXXXXXXXXXXXLNXXLXXXXXXLXXXXXXXXXXXXXXXXXXXXXXXXXXXXXXXXXXXXTXXXXXXXPPSXXXXXXXXRXXXXXXXXXEFDXXXXLXXXXKXXXXMXXIXXXXXXXXXCXXXXCXXXXXXXXXHXXXXXXXXXXXXXXGXXXEXXXXWXXXLG

SEQ ID NO: 141860 - protein, 98 aa, Oryza sativa
  Clone ID: PAT_MRT4530_42923C.1.pep
CSAFGNPVERQVLIGEMLGSSNESEHLEVMMKDQFANYVVQKVLETCDDQQREMILTRIKAHLNTLKKYTYGKHIVARVEKLVAAGEKRLGLQPSTAA

SEQ ID NO: 141861 - protein, 193 aa, Oryza sativa
  Clone ID: PAT_MRT4530_42924C.1.pep
MAHSHLLPTRLKRSEVLCRGRTVATSRHLPLRPSVVFSDATTSRKECALSGAEYPCGSGVAETWETPPGEIRAADLGGKNRLKKLRAVDFHESVIIWHIATDMILYGRESSMSGGDNAENKKDAERVRSIRAISNYLMFLLVTQPDMLPGIPQNLENRGQLISSGVKVDNLGSGRMGRMLDYGASMMKTPPPV

SEQ ID NO: 141862 - protein, 94 aa, Oryza sativa
  Clone ID: PAT_MRT4530_42925C.1.pep
VPLKGKSLRLRTVTATHFRCGKDEEVDFDHINAHGVQVNYTDAHASYEHEGIYIYIYVDMNVFIFFYMYSAKRLQCTLNVRGRDETYATQHVLF

SEQ ID NO: 141863 - protein, 493 aa, Oryza sativa
  unsure (1)..(493): unsure at all Xaa locations
  Clone ID: PAT_MRT4530_42926C.1.pep
MASLRAATGLPFSPRPACCRPPSSPGSRRGFVFPPRFAPGVFLFFPLDSAGGGGVARRRAYPRIEATARHGARKENPKVRNRRLQKKFNGTATKPRLSVFCSNRQLYAMLVDDHNKKILFYGSTLQKAICGDPPCGAVEAAGRIGEELIRACKELDITEISSYDRNGFARGEKMMAFEVPDLVELECIDWARKEINIKYEIRDNRKGYKAGALKKGMEHIYTQQCDFVAIFDADFQPESDFLLKIIPFLVHNPKIGLVQTRWEFVNYDVCLMTRIQKMSLDYHFKVEQESGSSMHSFFGFNGTAAVWRVSATINEAGGWKDHTTVEDMDLAVRXVKSELPSTFKAYRHRQHRWTCGXSVWKKLHLLYSFFFVRRVVAPILTFLFYRVVIPLSVMVPEISIPVWGMILFENVMAMHRMRAALTGLLETMNVNQWVVTEKVGDHVKDKLEVPLLEPLKPTDCVERIYIPELVVAFYLLEGFSGRNATGVNRSKDV

SEQ ID NO: 141864 - protein, 65 aa, Oryza sativa
  Clone ID: PAT_MRT4530_42927C.1.pep
MEHYFAVYMVCIFVGHSLVVLTTIRVDGYGCEVKARPSKLGLIISSVLVLVIQLSKDLARSTSAC

SEQ ID NO: 141865 - protein, 511 aa, Oryza sativa
  Clone ID: PAT_MRT4530_42928C.1.pep
MEGQWGRWRLAAAAAASSSGDQIAAAWAVVRARAVAPVLQFAVWACMAMSVMLVLEVAYMSLVSLVAVKLLRRVPERRYKWEPITTGSGGVGGGDGEDEEAATGGREAAAFPMVLVQIPMYNEKEVYKLSIGAACALTWPPDRIIIQVLDDSTDPAIKDLVELECKDWARKEINIKYEIRDNRKGYKAGALKKGMEHIYTQQCDFVAIFDADFQPESDFLLKTIPFLVHNPKIGLVQTRWEFVNYDVCLMTRIQKMSLDYHFKVEQESGSSMHSFFGFNGTAGVWRVSAINEAGGWKDRTTVEDMDLAVRASLKGWQFLYVGDIRGVSVWKKLHLLYSFFFVRRVVAPILTFLFYCVVIPLSVMVPEVSIPVWGMVYIPTAITIMNAIRNPGSIHLMPFWILFENVMAMHRMRAALTGLLETMNVNQWVVTEKVGDHVKDKLEVPLLEPLKPTDCVERIYIPELMVAFYLLVCASYDLVLGAKHYYLYIYLQAFAFIALGFGFAGTSTPCS

SEQ ID NO: 141866 - protein, 175 aa, Oryza sativa
  Clone ID: PAT_MRT4530_42929C.1.pep
MASLRAAPGLPFSPRPACCRPPSSPGVQFFTPASAGGAGGVGRRRSYPRIEATARHGARKENPKVRNRRLQKKFNGTATKPRLSVFCSNRQLYAMLVDDHNRKILFYGSTLQKAICGDPPCGAVEAAGRVGEELIRACKELDITEISSYDRNGFARGEKMMAFEVPVSQYGFLPR

SEQ ID NO: 141867 - protein, 40 aa, Oryza sativa
  Clone ID: PAT_MRT4530_4292C.1.pep
TSAGESRSSWDHTMLPHGHQRGGYQGSTQTLAMMGSKGLT

SEQ ID NO: 141868 - protein, 71 aa, Oryza sativa
  Clone ID: PAT_MRT4530_42930C.1.pep
MGASAPAVSALLPLDGSAPGVAYAGHAAPIDEAWEAFVDEAEDDSAGAEEEDVGVGGWRPELKKKRAGNRS

SEQ ID NO: 141869 - protein, 139 aa, Oryza sativa
  Clone ID: PAT_MRT4530_42931C.1.pep
MATPNLNNNIDDLENPNADDILDLEKGLNAHVHEGTSMRKNKKKKKNDDDDDDDDSADAQSAMGLMMLFLYYVFYVFYMMATCEEWWHAALGIGIATAFLLLSFCCLMPRNNKPANSQKKKKTPSTTQTDLSTILLSHP

SEQ ID NO: 141870 - protein, 142 aa, Oryza sativa
  Clone ID: PAT_MRT4530_42932C.1.pep
MEGPPRFWGPWAAARPEPPPPKGRPCGPVTQEAWLTVTGAGTPPAPSHDKDDGTALARPHRHCAFPCEGAAASACSEGGEDGNGAVAQEVWLTVTGAGTLPLPHPMRTTSPWGAPTSAQPRRHHASPCGSVGPGGRREEAAW

SEQ ID NO: 141871 - protein, 81 aa, Oryza sativa
  Clone ID: PAT_MRT4530_42933C.1.pep
RKDQRGRGKKRASERKPTGVQRKGYEAESPRIEFRFLLCICFSFFFFFVFFFFFFFFFKRIASRSMSKYLDRTNIAIQSGN

SEQ ID NO: 141872 - protein, 118 aa, Oryza sativa
  unsure (1)..(118): unsure at all Xaa locations
  Clone ID: PAT_MRT4530_42934C.1.pep
RNPDSRNTAWCGCCVGADSIRREFSLRMRESMDVRFISSVHKTTRKKGFSSSLLGRXFNFAWQDNCGDTREGGALLQVESKGRNRKDSEVSCLXEPGRGLSGXKCVSGEKGSTQVRVH

SEQ ID NO: 141873 - protein, 80 aa, Oryza sativa
  unsure (1)..(80): unsure at all Xaa locations
  Clone ID: PAT_MRT4530_42935C.1.pep
TANNPNQHHLIQGHQGDPIHSHNYTXRYMDASIIPTIIRHVVPSVQSFLRQLTXLTYLHYRGPDTSGAGAGQRRCSAGGR

SEQ ID NO: 141874 - protein, 153 aa, Oryza sativa
  Clone ID: PAT_MRT4530_42936C.1.pep
MDPEAVRRSLEPTALSKEVVGPASASLRYDAFALTGVRIDAAEHGRLLCSFVVTPRIASPAGYLLSGVTATLADQLGSGVFLSSGIGTSGVSLELNLSYVDVASIGEEIEVEGKLLRAGKSVGVVSVDFRKKKTGKLIAQARHTKYLAVSSKL

SEQ ID NO: 141875 - protein, 145 aa, Oryza sativa
  unsure (1)..(145): unsure at all Xaa locations
  Clone ID: PAT_MRT4530_42937C.1.pep
SPCGYNRSDLRLTTVNLVASGSRQIACRLSSRRMTRALRLAVSLSNTTHRKTRASPPGVFDSTDRERRLPPASINPERXPHVSLLRVAHRKVRATRPKCPTHRLVHQSLPPPSTRAPHLVVSLLKATIKLFRLPSEVSDSIDQIP

SEQ ID NO: 141876 - protein, 288 aa, Oryza sativa
  unsure (1)..(288): unsure at all Xaa locations
  Clone ID: PAT_MRT4530_42938C.1.pep
GGGGLGVVNLKIQNAALLMKHLVKIYTAADISWVNLMTNSYLTAKVPHLLNKGSFCKDDSVQAMCARPLEDSFMLPLSYQAYCEYINLQEELIHLQLEQGRGDLWCFFWNNNCFTRKRFYKLNFAAIQAPRPLIWIWKTKYVMKIKVFAWLFFXDRLNTRNMLDRRHCAKQDDDLSCVLCSNNHRETRDHLFFNCPFSKACWQFLEISWNDNLQFYQRIAFARWQSNQPDFLEIFFVAAXHIXKQRNGFIFRNIQPSFNSWKALFTNEILLHLCRMKDPLKQSVSNWL

SEQ ID NO: 141877 - protein, 793 aa, Oryza sativa
  Clone ID: PAT_MRT4530_42939C.1.pep
METRTNEYSRKGAMWELERNLDQPMDAEAGRLRNMYREKTYPTILLLRLAFQSLGVVFGDLGTSPLYVFYNIFPHGIEDTEQVIGALSLIIYSLTLIPLVKYVFIVLRANDNGQGGTFALYSLLCRHAKINIIPNQHRTDQDLTTYSRRTYEEKSLAAKIQRWLEGHQFRKNLILILVLFGTCMAVGDGILTPAISVLSATGGIQVEEGRMRNDVVVIISVLILIGLFSMQHYGTDKVSWLFAPIVFVWFILIGILGAVNICKYDHSVLKAFNPVYVYRYFKRGKTSWTSLGGIMLSITGTEALFADLSYFPVQAIQIAFTVVVFPCLLLQYTGQAAFIAANTNQVSHAFYISLPAPILWPAFAVATAAAIVASQATISATYSIIKQALALGCFPRVKIIHTSKKYLGQIYSPDINWILMVFCIAVTAGFKNQSQIANAYGTAVIMVMLVTTFLMIPIMLLVWRSHWTLVVAFTVLSLLVEIPYFSAVVRKIDQGGWVPLVFAAGFMIIMYVWHYGTLKRYEFEMHSKVSMAWILGLGPSLGLVRVPGIGLVYTELASGVPHIFSHFITNLPAIHSTLVFVCVKYLPVYTVPPDERFLVKRIGPKNFHMFRCVARYGYKDIHKKDDDFEKMLFDSLILFVRLESMMEEYSDSDEYSTLMMSLPNNPGISNGGVTTTGTNNVMEVMSCTSTHDSIVPVNSRSDDTGSSQVMPASGQMAFQSVGDEIAFLNACRDAGVVHILGNTVIRARRDSGFVKKIVINYMYAFLRKICRENSAIFNVPHESMLNVGQVFYV

SEQ ID NO: 141878 - protein, 284 aa, Oryza sativa
  Clone ID: PAT_MRT4530_4293C.1.pep
MAALSYKPSEAKSFFRIWGGGTEESNQTSLQGQKGSGQKNTTNTDSKPPGPALTNANGEQKGISNLNVTLQSSLALYDDICRKENLKIKQAILGDLAFIELCLQNHLKALSIAKLLQQLPECSRMYVFLSHVYAAEALCALNRPKEAAEQLTVYLRDGDDIELPYSIENCEKALVEKDSDGEDSVAPVVTKLSSGESQYSESLKPEEAQGVLYIDLGMTAAVQGELEQANYMVSRGVALLPNNPRAVLASVYVDLLQGKAQEAIAKLRRCRTVRFRRHSVAVSS

SEQ ID NO: 141879 - protein, 709 aa, Oryza sativa
  unsure (1)..(709): unsure at all Xaa locations
  Clone ID: PAT_MRT4530_42940C.1.pep
MLPLLPIHQQLVLEMCCLVSEVQVVLAVVVMDHMGEELQRVSTEYNQLQMEASEDENSCRSRPSLSTLFSIVGAVAPSSLRGSNIHHLSSTNAPPSLRTAATGASLTPRGSGHRCFYVHQHQRCPSLPPSARQQPAPAAASPSRASADAPPSLHMAAPGVAAPPRAGAALPLRCHSQRRCSSAHHDAAPSSARPGRPPSLPLLADTAPPLPPFTNHAPASHATAAAAAATLHIRCTNGSKLAVRADLGLSVGAFKAIVAESCDVPAPQQRLIYKGRILKDEQTLASYGVETDHTIHMVRGAAPPPASTAPPAANNVTPAINATTASNSPAVGFGGLLHGLGGSGSANSGGLGSFGSGLPELSQMQQQLSENPTLMREIMNMPLMQNILNSPDLIRNIIMNNPQMREIVDRNPDLAHVLNDPSILRQTVEAARNPELMREMMRNTDRAMSNIESSPEGFNMLRRMYETVQEPFLNATTMAGEGDRSSNPFSALLGNHGSNQARDPAANSPTTTSESTTGSPAPNTNPLPNPWSTTAGAAQGATRPSPVTNARSATAGGLGGLSSTDLGGMLGGGSDTSFLSQVLQNPTMMQMMQNIMSNPQSMNQFLNINPXEFVRQLTSPETLQQLISFQRWSGNTNLNNLMSMFSGLGAGGGLGVPSAPNVPPEDLYAAQLAQLQEMGFFDTQENIRALIATAGNVHAAVERLLGNIG

SEQ ID NO: 141880 - protein, 196 aa, Oryza sativa
  Clone ID: PAT_MRT4530_42941C.1.pep
GGLGGLSSTDLGGMLGGGSDTSFLSQVLQNPTMMQMMQNIMSNPQSMNQLLNINPNVRNMMESNTQLREMFQNPEFVRQMTSPETLQQLISFQQSLMSQLGQQQAGPERTQSGAGAGNTNLNNLMSMFSGLGAGGGLGVPSAPNVPPEELYATQLAHFQEMCFFDTQENIRALIATCGNCHAAVERLLGKLADRLV

SEQ ID NO: 141881 - protein, 676 aa, Oryza sativa
  Clone ID: PAT_MRT4530_42942C.1.pep
MTTPRRRADPSPPPARRLLHRLGSAASGLQTLAYSSKKEGGGGDMGPRNGGSSSNRRPGFVDSSSWRYFDSRVVGITRGDIPRHAWTVLHMLKRKVIPARVSFKEDPARILRGLRIAARLGFEFSSETSAAIRELSLSITDIDKALVSSRERERVLRIFEGLDTDLTSYEGTRGMQEIDYKLLKDGHPGEVRFVLGQVIMDTMSEELPRVSTEYDQLNMEASEDDLADGSRPSLSTLFSIVGAVAPSSLRGATSITSPPPVGADVVPPSLAPTAAAADASPPRARADAPPSLRTVATGASLTPRGSGHRCFYVHQHQRCPSLPPSARQQPAPAAASPSRASADAPPSLHMAAPGVAAPPRAGAALPLRCHSQRRCSSAHHDAAPSSARPGRPPSLPLLADTAPPLPPFTNHAPASHATAAAAAATLHIRCTNGSKLAVRADLGLSVGAFKAIVAESCDVPAPQQRLIYKGRILKDEQTLASYGVETDHTIHMVRGAAPPPASTAPPAANNVTPAINATTASNSPAVGFGGLLHGLGGSGSANSGGLGSFGSGLPELSQMQQQLSENPTLMREIMNMPLMQNILNSPDLIRNIIMNNPQMREIVDRNPDLAHVLNDPSILRQTVEAARNPELMREMMRNTDRAMSNIESSPEGFNMLRRMYETVQEPFLNAPTMAGE

SEQ ID NO: 141882 - protein, 34 aa, Oryza sativa
  Clone ID: PAT_MRT4530_42943C.1.pep
TSSIVNDFSFVGNLILPLFLVLSTYRSLCLLVTN

SEQ ID NO: 141883 - protein, 237 aa, Oryza sativa
  Clone ID: PAT_MRT4530_42944C.1.pep
MAMKTLSIKLLIDTKAQKVCFAEAGNDVVEFLASLLCLPMSTIINLLTKERMVGSMGNVLDSMEKLEDKHVTTNQSKQRYLSPTAAPNALCPLQQLLDTELNANTSFFTCEGKLNSYSTTKVPCGYFSVSKGAVCPVCSTQMHRAIPHVKTVGFVVGTATYTVRDDLSMTPASSVSSVSLLAQCGVKDLSALQERTVKIGKEEVLEILLASLKSKTVLTDVFLPKRKVSCKREASGL

SEQ ID NO: 141884 - protein, 254 aa, Oryza sativa
  Clone ID: PAT_MRT4530_42945C.1.pep
VTFLLSACARLRSLVHGREIHGYAVRNLAALDLPLLNALVSMYGRCGRLVNARMVFDSIGSMKSVVSWTCMINACCENGKPAEALQVFEQMRLAGVKVDEVTLLAVISACTMLDCRSELGEWVEEYAHENGFLENTRVANALIHMHGKMGRVRRSCEIFDSITVRTVVSWTAIIHALAVHGHGVAALVQFSQMLRQGFQPDELVFLSVINACSHSGLVNEARQLLKSMVEERHITPWMEHYGSMVDPLCKSGML

SEQ ID NO: 141885 - protein, 263 aa, Oryza sativa
  Clone ID: PAT_MRT4530_42946C.1.pep
MSSANPPSASAIEFPEHLAEALVEKRQFPLGKYLLGALYQTLSLASAKIAVDSVIGIGDDEGNKIATRQCQSFGEAASTYAGSELSDVLFSDWLNHFYDGFPRDSRIWFGYQHSEDFKLPADFSTRSEDYGSPLHSRHNTPPRAGSEENPGAPGITMGYITYRLAAGHSGGLAQRGTPGRRDRGAGGEKEAGRRGSTEAGGCEEATAGVGSLAGTLGEAGKKRWRHQEEIGAPMARPAVHLLGRLCMGGEHAVPSWDRDRVGS

SEQ ID NO: 141886 - protein, 669 aa, Oryza sativa
  Clone ID: PAT_MRT4530_42947C.1.pep
MEGGVGGEVDHLAGERATAQFDVEHMKVAWAGSRHAVDVADRMARLVASDPVFRKDNRTMLPRKELFKDTLRKAAHAWKRIVELRLTEEEANLLRLYVDQPGYVDLHWGMFVPAIKGQGTEEQQKKWLPLAYRFQIIGCYAQTELGHGSNVQGLETTATFDPKTDEFVIHSPTLTSSKWWPGGLGKASTHAVVYARLITEGKDYGIHGFIVQLRSLEDHSPLPGVTLGDIGGKFGSGAYNSMDNGVLRFDHVRIPRDQMLMRLSQVTKEGKYVHSDVPKQLLYGTMVFVRQTIVADASKALSRATCIAVRYSAIRKQFGPQTGGPETQVLNYKTQQSRLFPLLASAYAFRFVGEWLKWLYTDVTHKLEAKDFSTLQEAHACTAGLKAVTTSATADGIEECRKLCGGHGYLNSSGLPELFAIYVPACTYEGDNVVLLLQVARFLMKTVSQLASGKQPVGTTAYMGNIQYLMQCKCGVNTAEDWLNPAAIREVFEARALRMAVNCAQNINKAPSQEEGFYELSPDLLEVAVAHIQLIIVTKFIEKLEQDIPGEGVKEQLCILCNVYALYLVHKHLGDFLSTGSITARQGALANEQLGKLYAQVRPNAVALVDAFNYTDHYLGSVLGRYDGNVYPALYEEAWKDPLNDTDVPDGYQEHLRPLLKQQLKLSRL

SEQ ID NO: 141887 - protein, 107 aa, Oryza sativa
  Clone ID: PAT_MRT4530_42948C.1.pep
LNMKIVAPRGGSKRTKGTRKQKPWHPSNVAEERLYSINCPGFLATKTWLITSRNKPHIQSFSPHLSKPGSIFSHTLCSCRSFSQTVSIQDTRQHRRVFLNLGRTIRV

SEQ ID NO: 141888 - protein, 617 aa, Oryza sativa
  Clone ID: PAT_MRT4530_42949C.1.pep
MASAAAHAATATAAAVLLVVFLAPLAAASDSDHKYQSEEKVMLWVNKVGPYNNPQETYNYYSLPFCHPSNNPVHKWGGLGEVLGGNELIDSQIDIKFGRDVDKGTICSIELDPDKAKQLSDAIESSYWFEFFIDDLPLWGFVGEADRNSDNKYFLFTHKNIVIRYNGNQIIHVNLTQESPKLIDAGKALDMTYSVKWEPTNVTFAHRFDVYLDYPFFEHQIHWFSIFNSFMMVIFLTGLVSMILMRTLRNDYAKYARDDDDLETLERDVSEESGWKLVHGDVFRPPRSLALLSALVGGGTQLSALILLVILLAIIGMLYIGRGAIVTTFIVCYALTSFISGYVSGALYSRHGGKNWIKAMIMTASLFPFMCFGIGLVLNTIAIFYRSLAAIPFGTMVVVFILWAFISFPLALLGTVVGRNWSGAPNNPCRVKTIPRPIPEKKWYLTPSVIALMGGLLPFGSIFIEMYFVFTSFWNYKVYYVYGFMLLVFLILIIVTICVTIVGTYFLLNAENYHWQWTSFFSAASTAVYVYLYSVYYYHVKTKMSGFFQTSFYFGYTLMFCLGLGTLCGKLFYTGSMLKPKNLMVSTDTGSNFGPGAVGYLGSTLFVRRIYRNIKCD

SEQ ID NO: 141889 - protein, 39 aa, Oryza sativa
  Clone ID: PAT_MRT4530_4294C.1.pep
CCCSYRIPCVCANLSHLHPVTHLRDTRTHNLSGMCSVST

SEQ ID NO: 141890 - protein, 175 aa, Oryza sativa
  unsure (1)..(175): unsure at all Xaa locations
  Clone ID: PAT_MRT4530_42950C.1.pep
KRRYSLIGPLGRLRSSSEPSSQSLPVKSERESRGGAFRPPPQQFRRRMLVLTTEFGNLSIGDGYKTEAESKXRPFRKQRKNRLKSESAATRIGRVXSDKVSRLSRFRQYDSFGXKSAAKIYGILEFVRDKSRVRQGHILIKLTGTLTNLKAXFWTYTEVKQIFQASCFSHQQLDT

SEQ ID NO: 141891 - protein, 148 aa, Oryza sativa
  Clone ID: PAT_MRT4530_42951C.1.pep
MAGRGQCKNQIGAKLLRLGNHHVAAARHDDLLSPDAGHEGTRRSRRRTAKSPPDVIEPGSETRQEFQELIADSVAETGVSDFFRFVSALDLSSRRCAATRNLSRFYDFSTVSLIGGWAAYSQIFRLPRFNPDNFVFHQSVAGGINWAV

SEQ ID NO: 141892 - protein, 108 aa, Oryza sativa
  Clone ID: PAT_MRT4530_42952C.1.pep
PTRPFFFFLIFSPFNSCIISLYEQTCVNNRKLFCIKKKKKKKKKKKKKKKKKKKKKKKKKKKKKKKKKKKKKKKKGGARFKGPNFTSPGWEGKNFFLGHLNLISGAAF

SEQ ID NO: 141893 - protein, 67 aa, Oryza sativa
  Clone ID: PAT_MRT4530_42953C.1.pep
HNFLSLRFILPRARASTRTTSWFFLAVVHIGVAFSHALNFQEIVGVPFCVPCILFSTCNLGQFILCL

SEQ ID NO: 141894 - protein, 36 aa, Oryza sativa
  Clone ID: PAT_MRT4530_42954C.1.pep
KNTIYFSSIWILTRSLKFYKSHYFLTAMGLQHSFPY

SEQ ID NO: 141895 - protein, 964 aa, Oryza sativa
  Clone ID: PAT_MRT4530_42955C.1.pep
MEGGSNDFPGDLLRAVLQRLPPPDLARAACVCRLWRGVASDRAVLEAAFASPWGVRRVVGEPETRAFWRAASLARFALSHTVRRGDTVPGIALKYSIQYHRMLGGLKDKLTGKNGNKIKGLAVLMSRKLLDPRDFTASLLDNVHEVFGNSITCQLVSATVADQNNEGRGIVGSEANLEQGLTDLPSVSQGESKLTVRFNWEMDKHGVPGAIIIKNHHSTKLFLKTITLHDVPGCDTIVFVANSWIYPVGKYHYNRIFFANNSYLPSQMPEALRPYREDELRYLRGEDRQGPYQEHDRIYRYDVYNDLGEPDRDNPRPVLGGSQKHPYPRRGRTGRIPTKKDPNSESRLSLLEQIYVPSDERFAHLKMSDFAGYSIKAIVQGILPAIRTYVDLTPGEFDSFEDILKLYRGGLKLPSIPALEELRKSFPVQLIKDLLPVGGSYLLKFPKPDIIKENEVAWRTDEEFAREILAGLNPMVIRRLTEFPPKSTLDPSKYGDQTSTITPAHIEKNLEGLSVQQALDSNRLYILDHHDHFMPFLIDINSLDGIFTYATRTLLFLRDDDTLKPLAIELSLPHIEGNLTSAKSKVHTPASSGIESWVWQLAKAYVAVNDSGWHQLISHWLNTHAVMEPFVIATNRQLSVTHPVYKLLQPHYRDTMTINALARQTLINGGGIFEQTVFPGKHALAMSSAVYKNWNFTEQGLPDDLIKRGIAIKDPSSPSKVKLLIKDYPYATDGLAIWQAIEQWVTEYCAIYYPNDGVLQGDVELQAWWKEVREVGHGDLKDADWWPKMQSLPELTKACTTIIWIASALHAAVNFGQYPYAGYLPNRPTISRRPMPEPGSKEYTELDENPEKFFIRTITSQFQTILGVSLIEILSKHSADEIYLGQRDTPEWTSDPKALEAFKRFSRQLVEIESKVLNMNKDPLLKNRVGPANFPYTLMFPNTSDNKGAAEGITARGIPNSISI

SEQ ID NO: 141896 - protein, 68 aa, Oryza sativa
  Clone ID: PAT_MRT4530_42956C.1.pep
RVFREIFRGLAIHKPPNLEGLILGCNPLKPPIEGNFLKEYKPVSGTSPLIGKSLHQAGLSSIPNYMRN

SEQ ID NO: 141897 - protein, 292 aa, Oryza sativa
  Clone ID: PAT_MRT4530_42957C.1.pep
MAGGGGGDRAPSSSSTAMISRLLPPGFRFRPTDGELVAHYLARKAADAGFTSAAIRDADLYRAEPWDLLPPPRCDAAAEEEEEEEERCGYFFCTRSFRWPSGTRTNRATATGYWKSTGKDKAVLHGGGGGGGRPVGVKKTLVFYRGRAPRGEKTSWVMHEYRLLHGGAAATASSSPTPTTVVARSEWVICRVFVRKTPDGNNDRGTTEHHLPSDDAHLRSSPAPANSVDGAGHASCSFFSGANESMAPSDHFNIGDDMILHGHDEEELLMMNCSSAFDLPELLDYESFSLDL

SEQ ID NO: 141898 - protein, 91 aa, Oryza sativa
  Clone ID: PAT_MRT4530_42958C.1.pep
MDVRKIYARERSFERGGMKTKTEEVEALGLSFELREKTISSTVKVSGATVEIMDTPYPYDMYIRLGVRLKVVKVSAVSLLALFKEKKKQRS

SEQ ID NO: 141899 - protein, 193 aa, Oryza sativa
  Clone ID: PAT_MRT4530_42959C.1.pep
MEERHRRASALHIKKWGGLGREKRRGRDKHCAKPTAAASSSHHMPLSRQQHSSLLLLILMPRRHHCRWSLRRAIDCTLSTSPLCHRAGQSLAVYDEGDLMEKDIRQLEAIARNGEPNAAEDGFTQSAKKRRKKKKSSDPAVATRQSMRIIRDGVPVAMKAQKRTSEKNDISVIWIGAIFFSLFFVGFLSLFSG

SEQ ID NO: 141900 - protein, 370 aa, Oryza sativa
  unsure (1)..(370): unsure at all Xaa locations
  Clone ID: PAT_MRT4530_4295C.1.pep
MGAFCSKQNPSGQQPHCCNHSSSSNAAPKGNNRFAKFGDDYHTLEQVTDALAHAGLESSNLIVGIDFTKSNEWTGRVSFNNQSLHSLGHISNPYEQAISIIGQTLSRFDEDNLIPCYGFGDGPTSFAPMIETAIGIVDSSGGQYHVLLIIADGQVTRSVDTGNGQLSPQERETIDAIVKASDYPLSIVLVGVGDGPWDMMRQFDDNIPSRAFDNFQFVNFTEIMSRPVPASKKEAEFALSALMEIPEQFKAAINLQLLGXPPPVRDFQQYYGCSTVKETRTRSGFPQRKELPPPVRGSDIGDHAXPICRLEARNLAFGCGHQTCADLGTDRYGSPHLAEGHLPKNRALVTMRSCRQLGAFQAHTYTSWTL

SEQ ID NO: 141901 - protein, 323 aa, Oryza sativa
  Clone ID: PAT_MRT4530_42960C.1.pep
MRWCGLRLLPLVCLLVIAAAAEEDKTNILQADKNNDNNIAHSDGGKTGRHDETNPNTVHHDEGKNDPDGNNKKDKSTEVISTAKYAAAVHHVDKDINTAKSSHVTDFSQDPLIKGCDPSHTCVIENKKFIACLKVPGEDSLALSLLMDNKGMDPLYVGITTPEFVTSAEDTIHVQANDHNETQVTIFNNGAPNMTIILRVAEETCNISIHRAIAREISQVMPMRLTSKYMLVPVFLLIGAVVACIKLRRRGIQDGGPAYQKLDAAELPLSTGGKKEADQSDQWDDNWGDEWDDEAPLTPTRHMPNLSSKGLASRRSTKDGWKD

SEQ ID NO: 141902 - protein, 448 aa, Oryza sativa
  unsure (1)..(448): unsure at all Xaa locations
  Clone ID: PAT_MRT4530_42961C.1.pep
AETPRVGGRSKTSGSPGLQEYGTRGNQPPQHNHNDDRTTTPEHTTTPTTKKTRHPHQAETPRHTTTQLKPQTHNTNPNNNPYKGRNTDPHAPTPPXPPTHTTTHTTPNPTPTATHTHRTNKPPHTSTPQTPPHRPQPSHPTTHTPTKTKQQNQTTTTTQPKTTKRHTNTNTPTPTPQKTTKPXTTTTHPPTPPTTTTNHENNPQRKTRTEANNKAPTTPNNHRTQDHTHAHPPTPRTTSPTHKNTPTTRNTHPAHSRPQDKQHPQRTAHSTPPPGPTHTHDTPAPPHTKPPHTQTDTHTQEATXTPNTRPTKNKNKTSKHKTTPHTHQHTQPPSTHTQPTXRDTHTQRPNDPHTHAQRTHNTSDRDTPXRRHTKPPRXYKRNTATHRTHTPTPTHDSNDTSTKQREREXTHTARAKTDSQQRPRQNRPTRATTADAHARPTRAHRRTP

SEQ ID NO: 141903 - protein, 107 aa, Oryza sativa
  Clone ID: PAT_MRT4530_42962C.1.pep
GVQVGDPNSPFCSGIISMNPLLYPNDDSNQIKNAVKEDVSGPWRVSGFCSECVSSSDFSSSLSTACSVEIGSGSHTGLSLPLVRSRANVHHLDDQGGRQVPHPPRHP

SEQ ID NO: 141904 - protein, 54 aa, Oryza sativa
  unsure (1)..(54): unsure at all Xaa locations
  Clone ID: PAT_MRT4530_42963C.1.pep
PTRPRDCVPTSPAEPPATCRYRRAQHRLVVVLESAXLNSHQTKTRTLHNLRHRR

SEQ ID NO: 141905 - protein, 323 aa, Oryza sativa
  Clone ID: PAT_MRT4530_42964C.1.pep
MQRKSSGGGGGGSGMCDLPMDCIACIASLTSPGDACRLAAAAAALRPVADSDDVWGSFLPPEWAGDGDALDGKPGGREGESKKEMFLRLCDLPVLLDGGKLYWAFSSLISLLSLHQSFSLEKRSGAKKYMMRARALGFGWSGYPYGGLVWIQNHPDSRFSEVAILSHLCWLDIYGIFNTKHLSNGTSYGAYLVYNVQFLHTEDQNGGYKEQDATASGSSSTSSICSHECNHLMPQKHLRSLLFNMDYDGSSFVKTNNNQKKELKYVGICVRSDGWMEQEISTEISVVKQNNEENGDISIEFRGLTGSHQCQIIVEGIEIRPKN

SEQ ID NO: 141906 - protein, 96 aa, Oryza sativa
  unsure (1)..(96): unsure at all Xaa locations
  Clone ID: PAT_MRT4530_42965C.1.pep
GXXRXRXGSPPPPHPXEKXXLXXLGGEMSKMAEEKXLAAPATVXGGMQSSGDLQAXSAAAXRXGPVKTLXXXGRWGSTSPHXHXTPKXXQQRXRQX

SEQ ID NO: 141907 - protein, 1229 aa, Oryza sativa
  Clone ID: PAT_MRT4530_42966C.1.pep
MACAPSSHLVHMDVLAVIFLEERSEKSSLCFEFGGRESRGRKPPSGSRKSSSILMTSDELAGEGEVDGAELILSLPEDVLGLISAHLRPRDLLALSAASRSLRNAVSTADKAWLAQCRRLLPTASHLLAWRTALAHSSLAVCRFLHSAAPLLGLWAHQNPELGNLVLALPGFLSLVAVRSIPQELSPRLLWAPVFELLADHRGHPAFLFLHGAAHDSLFPGLLSSSLHPLANTLFLEAHTSTSTSHFSRLAFADRRRLLNALVAASRLTLPPDVATAPLFARSDADLPLLAARREAMLRLHSQSGGGMVRRAEIEALLIGARKTAALPADTAGDKMRLRRTFSVVAGFVRNSLRQMVTRSASANSRAEYAHPKHLPLDEFLRAGESVGLSLRGARMRLSIYRNWPSMHDNRFVLYKLTTQAPMPGREYAGLWGGTFGWPPGRPEDERKPGKALFFLLLSYEEDSEGKLQLIATKVLEGTHYVVHPNGSSMFIVRVGEPSTETFPWQTDEESRAVEINRSFAGEGIATGYGFRYPGSKPGSLFVLLDGRLAFVWRENKAVLTLQRLDLEDMIRRGERVPSLPPIPNFAYLTKSYSNVFAVAPGSTSFPASPRFIYFGNSVVSKIRRFMLNFRYKLKCQNLANELQSQIQPPDDNIMSIDYLRAIATSTAVMVEYKWRSKRNATSCIWAFGGVWSVDFGPARPLPLMANGANSKKDAKAQHWISWRDTLHGFLQSPAISQGGGIQTCIRHALQHNPCLLTNGVVVHTEFKGNPAHSQGEEAKVQHPNGAAGGKVVSADAAIQDAAAAASSEANKAMCNNALFDILVSQKFALLCHLLLGTFHVNKPGDVIDLEKIDAKMRNGDYAHNPALFDDDIQQMWEKFEQVGQEMTGLASNLSTISRVSYQKQASGFSEAEVAEHRIEEISLPGAVHVVTKESTTTVQLAPCDSSHSTIPKRTVPPGRDLCPCDGCGTKVDVEEGLICDECDTMYHFACVKLLNPDIKQVPAIWHCSTCSFKKKELAADTTNNVAHDCLHGGNCVLCDQLELVKTEEEDPKLPIKIELAEEREGSSVSSMGEDNEPDLSTTALSNLCKHCGTCEDDDKRFMVCGHPYCVYKFYHIRCLKTSQLAIEQQKKLGCWYCPSCLCRGCFQDKDDDQIVMCDGCDEGYHIYCMRPARNTIPKGKWYCTFCKIRRAAEGMHKYEDSVLKIHGNSKHACNVNQSKDSEGDGTEK

SEQ ID NO: 141908 - protein, 254 aa, Oryza sativa
  unsure (1)..(254): unsure at all Xaa locations
  Clone ID: PAT_MRT4530_42967C.1.pep
GRGAPPTPPLAPPLAAPPPPLPVRHTFPLLEDKGLSSLAGGGRRRRRTSTPPPLSCTDAACVDPSLDWSIPSVLVTTASAKPAAEQKAMEGGEQEALDEMEKKVHKYSRGKAAYLGTLRDKKLKGQLAAREKLYGHSAKAAVQTEKWLLPTEGGYLEPDDDGLEKTYRYQQTSLREDVDLLSSRKPFDMILPLLGPYTLGYTGNGRYMVVGGRKGHVAMMDMLNLELVKEFQVRETVRDVAXLHNEQLYAVPQK

SEQ ID NO: 141909 - protein, 64 aa, Oryza sativa
  Clone ID: PAT_MRT4530_42968C.1.pep
TPAPGSSARASRASCSSPADRTSCVYPCTYVRICVPVGSRGGHVRAYLYGYIRGGCVRGYPEFS

SEQ ID NO: 141910 - protein, 75 aa, Oryza sativa
  Clone ID: PAT_MRT4530_42969C.1.pep
EPTTRKSIIASGRKGSLQARWPSACKPTTVKIADLRRRGGRPPVKIIFAGGRWLVRSACEKRNRPPAKKKLPLVK

SEQ ID NO: 141911 - protein, 96 aa, Oryza sativa
  Clone ID: PAT_MRT4530_4296C.1.pep
DTGNGQLSPQERETIDAIVKASDYPLSIVLVGVGDGPWDMMRQFDDNIPSRAFDNFQVCSVPASKKEAEFALSALMEIPEQFKAAINLQLLGYFTV

SEQ ID NO: 141912 - protein, 379 aa, Oryza sativa
  unsure (1)..(379): unsure at all Xaa locations
  Clone ID: PAT_MRT4530_42970C.1.pep
FNLNISEIXNIIVSLLERSDRNRAIVIASPDEAYEPDNIGIGIIAGLAYASIELNQKAKCIRPIIFLRVNIFRSLSKEDPDYSRNIEGQVIRLHWDWAQLLMLSAKRMKVAFKLDIEKDQRVWDRCTADDLKGRNGFKRCLQFTLYRPRDLLSLLNEAFFSAFRENRETIINTDLEYAAKSISMARLEDLWKEYQKIFPSIQVITSAFRSIEPELTVYTCLKKIEASFELIEENGDPKITAVLQWRPAGGLPQSLYSVGFVGIRDKNTSSYSFCHDGRTPDKGFESNEKLLIHPCYWLGLNLNRNALAPEEAEEINDEYDINIISDNSAIRNKTIGQITTHLDQIPIGNEGATDLTMVFKTLRIVLLPTNSMKFHQWPS

SEQ ID NO: 141913 - protein, 79 aa, Oryza sativa
  unsure (1)..(79): unsure at all Xaa locations
  Clone ID: PAT_MRT4530_42971C.1.pep
GSASARLRRRRRRQRARXGGLERERDRDRDQKRGRQRRLSPERCGGGGVGGGGGEDLETMAKNDGGVGTGMPRQWRRRS

SEQ ID NO: 141914 - protein, 148 aa, Oryza sativa
  Clone ID: PAT_MRT4530_42972C.1.pep
ATHMNFRGPDKILSAPTKSTTSRLISLYNLAIATIHYKKEAWFRRLCMPYTGILINALRSCRSQGSYRRSERTVLRMEETSAILCRPSDPRGCVVAGWKPQRARREQRFVSEFLCGKVCLLRMWMHVCRGHLRSVRWTVVLPVGAWSL

SEQ ID NO: 141915 - protein, 82 aa, Oryza sativa
  Clone ID: PAT_MRT4530_42973C.1.pep
MAPRTSPHQEPCVTILDTTRVSLKYNPTTMISDLTSGHKLHGGLIEERCVESGVIWKEAPESRNHEDNIPEEDGGGGGRLEA

SEQ ID NO: 141916 - protein, 1148 aa, Oryza sativa
  Clone ID: PAT_MRT4530_42974C.1.pep
MAPPSGKPGAISLPKPPVIFNGLNFREYALHMQIHMCSQRLWGYLISDRPCPPCPTLPAEPAIPAYADENTKRGLLDDLAAAMEAYQIDLSLYETWLEQEAYAKAILVGSMEVDISLDIAGLASSELMWTRLRQQYEPRNDAMFLAIVNEAQSLRQLDATVDEFFRKMSAVWRQMDLQGADVCHTCTCCQRQRVQTETTRLYEFLSRLRPEFEPVRAQLLARRPRPSLLETLPELRAEETRCREAGIGIAQQSTSVLVAQGLPSQVHVSAQPVVVPSPLPVAASAPSTPSGIVCGYCSKTGHTASMCYKKKRDQSRRTSQGSRQGSSQSSSQQITSTEQELVRLLRRLMTTASTSTHGSAAQASSLPPPPPSSSGILSSWFLDSGASFHMTPDSTHLSSMSPPDTPLTVQTANGTSLPVVGRGTLSTSSFRVPTVSHVPKLTMQLMSAGQIIDHGCRIILEADSCCVQDRRIGLLVGTGPRRHDSQRLWELDWLHLPSDASTSQSVGSTASALATSSTTTFAQWHRRLGHLSGARLSTLIGSGVLGPVSGDTALHSHRRFLAEQGTLPQFSCPGAHAQNGTAERKHRHILETARALMISSHLSPHFWAEAVSTAVFLINRQPSSVLHGCTPYERLFGTPPRYSHLRCFGCVCYVLLSPRERTKLTAQSVECVFLGYSTKHKGYCCYDPVARRMRISRDVTFDESRPYYPRSSTCDQSSTVKSISFLTLPDWSFPSLPPVPSPSPHLPLVSTPSPSLSPPPSPMPSSPILPSPPPSTLLDAPHELSPFPLHYSRRSRPLVELSSPSILGPAPAPASRYDLRDRHAIRPAPKYGFTAAAIVEPTTYREAIAHQEWQQAMAEEIAALERTKTWDVVPAPTHVTPITCKWVYKIKTRSDGSLERYKARLVARGFQQEHSRDYGETFAPVAHMTTIRTLLAVASIRQWSISQLDVKNAFLNGELHEEVYMQPPPGYSVPDGMVLRLCRSLYGLKQAPRAWFERFSSVVTDIGFKASDHDPALFVHTSCGRTLLLLYVDDVIITGDDSRFINLVKKRLSDQFLMSDLGPLRYFLGIEFSSMSSGFYLSQEKYIQDLLARSGLTDKRVVDTPMELGIHLRPNDGEPLQDPTRYRHLVGSLVYLGVTRPDISQFTF

SEQ ID NO: 141917 - protein, 323 aa, Oryza sativa
  Clone ID: PAT_MRT4530_42975C.1.pep
MDPRDLIPRERFSMRLGEDEVRKERMFCGCRHGRVLLLDRKQNEIVLWDPDTGDHRRVGIPPEIDGKEKIVWNEAALCAAADDDGHVHGGFSCCPFNVALVGVASNNTQMFACFYTSETGRWSNLIFTPAPFLVFAFVDPGILVGHSLYWFPTGLGSAILQFDLDRQTLAVIEWPSNPNCYSHYMSQIFLAEGGYLGLVTLSYDSLQIWERKVCSEGVTRWVLQRTAELNKVLELGSGVKTSHLVRLGYAEDVKVMLLCADSSVFMLQIDSLQSRKLWETNIMSSLHPYASTYVAANYGLRKFGKVSRLLTVIGKVQRWITGA

SEQ ID NO: 141918 - protein, 93 aa, Oryza sativa
  Clone ID: PAT_MRT4530_42976C.1.pep
DSWAIALDMMLCGRMFYSAGSLAVSCSIFRFHYIPFFHCYQLQAAFLNWTRIQFSSTCIFCSSIKKQVLLNLLFFLFFFPLCFAYPTLFACSI

SEQ ID NO: 141919 - protein, 53 aa, Oryza sativa
  Clone ID: PAT_MRT4530_42977C.1.pep
GLGGAAVQLQRRLLLVGLRRVLVLSRDHRPVDRVFLLVQALLQISYFLFDTPS

SEQ ID NO: 141920 - protein, 273 aa, Oryza sativa
  Clone ID: PAT_MRT4530_42978C.1.pep
SRGGRAGERRPRCRQPRRLHGAVHLLSATPAEDAEERPTRRPPQAERRESAKLRINRALNQSGPVGRAFGSRFGIVAMLFTRTESFIRDQCDVADDWVNTVAAGASAGALYRIASGPRSMIVAGILGGVLSGAAVAGKPMLQRFAPKHRDGIHFVNLSHPKRNEAERLSREEEVAVGDSGAGWGRRPARREEGAAVGDMVAGLSPSARAPLLAVHGTAVNAHLRLHPRGQPVRPNSVAGHVAVGDVVAGLSPGAPAPPPAIHGAAINAHPRLH

SEQ ID NO: 141921 - protein, 35 aa, Oryza sativa
  Clone ID: PAT_MRT4530_42979C.1.pep
RIILIEAALCKNHTFCCVRHIHYCTRFILFRSITH

SEQ ID NO: 141922 - protein, 403 aa, Oryza sativa
  unsure (1)..(403): unsure at all Xaa locations
  Clone ID: PAT_MRT4530_4297C.1.pep
MLCHGIKNETALLLADWHEFSQILGRDEKDKLTPLSQIGFRGPTSTGSGLQLTISSIHVLTESRGELHPDPRFRVINAVSLAVEDDADNTTEIMRCLYCPFSCNCRNLDRVAGCDINVXFLERQKLLNHLINEICSIDPDIIVGWEIQLGSLGFFAEGAGIGLLKRISRTPPNQMKHPPMNPVEESCQEFPGASSADDVIDDASESNWSHTHASGIHVDGRIILNLWRLMRAEIKLNNYSLEAVADEVLRKVPLVPTKILNRWFATGPGRGRYRCIEYVNNXSSLNLEILNILDLVNRTSVLACVFSIDFFSVLSRSSLYRVESXSMLLRLAHTQNYLAISPGNXQVASQPVMECLPXMEPESGFCSDPXESFYPSMIISIYLVFHSLIGVFRPSICTFHLPV

SEQ ID NO: 141923 - protein, 199 aa, Oryza sativa
  Clone ID: PAT_MRT4530_42980C.1.pep
MSRAVDAQQEPTEGRRFYSPDRPEGLAFPTSYRALYDLPTSPECLFEEDKFRQTRTWGENLTFYTGVSYLAGATSGALVGLRRAAAEAERGESAKLRINRALNQSGSVGRAFGNRFGIVAMLFAGTESFVRDQRDGADDWVNTVAAGASAGALYRIASGPRSMIVAGILGGVLSGAAVAGKPMLQRFAPKLSARLDYLR

SEQ ID NO: 141924 - protein, 589 aa, Oryza sativa
  Clone ID: PAT_MRT4530_42981C.1.pep
MDGLVYHYDGNNYFVPSSQFGGSSRNHHPPPSAIMLNSGGASADGGGYYNSGTFSGGEGTGPAGSKSRFSYEELTGITSNFSRDNVIGEGGFGCVYKGWLSDGKCVAVKQLKAGSGQGEREFQAEVEIISRVHHRHLVSLVGYCIAAHHRMLIYEFVPNGTLEHHLHGRGMPVMDWPTRLRIAIGAAKGLAYLHEDCHPRIIHRDIKTANILLDYSWEAQVADFGLAKLANDTHTHVSTRIMGTFGYLAPEYASSGKLTDRSDVFSFGVVLLELITGRKPVDQTQPLGEESLVEWARPVLADAVETGDLSELVDPRLEGAYNRNEMMTMVEAAAACVRHSAPKRPRMVQVMRVLDEGSMTDLSNGIKVGQSQVFTGGSDAADIQQLRRIAFASEEFTGEFEQRTTNSNSESRPMNRIPEIGDAPGGCRRRYTMQGQKLRRCWCIEKVQREQPMRLHSTLHRRLVENLRPWLFALAGSGRGGKDDDHHGPQRRGRGGGIRRGGVRRGVALFFALSAAFIGINARADQPGLDLREVEVQTIKEIMCDTKSNAHEEETKFKEDAACRVRIGYWQHRLLSASADTGSDREKPL

SEQ ID NO: 141925 - protein, 97 aa, Oryza sativa
  Clone ID: PAT_MRT4530_42982C.1.pep
ERRGDPFFRAGLEKKPPQGENWGGFILLSPETSFKKHYLGGLFWDQIKNPGGNGGGKLGGGGPGFFPLGFLGLRACCWEKRGLKNGGAFSTGRNPPF

SEQ ID NO: 141926 - protein, 161 aa, Oryza sativa
  unsure (1)..(161): unsure at all Xaa locations
  Clone ID: PAT_MRT4530_42983C.1.pep
GWLLVFLTTRDKSASAXNTAVALHLRVTPKGXKLXGTITRTGFRAVTPYRLPLTNPWDTQQTKRSFSESRAECTDSSGTPPEFLLESYTYRGRSRXSTKLPGTPPELFSLSTYFLMYKRYNRASCNLPQSCVYWNESLSSFYRLQMTVMAMKNDQNTLQQS

SEQ ID NO: 141927 - protein, 33 aa, Oryza sativa
  Clone ID: PAT_MRT4530_42984C.1.pep
HWDNIIGIHGHLVSCWPSGSDNMINRDNRGISY

SEQ ID NO: 141928 - protein, 87 aa, Oryza sativa
  Clone ID: PAT_MRT4530_42985C.1.pep
KRLGFPPYINETKHRNKLIINSQNQEIYGCQLNSPEKMTNKGPNYIVLFFNSGHKTTNLYPTESTTNSFEGFWSQNTLPTDINPKIR

SEQ ID NO: 141929 - protein, 99 aa, Oryza sativa
  Clone ID: PAT_MRT4530_42986C.1.pep
HVVDKNDRSDTGRISNGQPRSHVAPVSAGSGDPPKHRSRVLRFAAARTCIHRCVSCVLRADNLSTYREKESLRSHPKPPAELAKGGLRGLPVRSQELRH

SEQ ID NO: 141930 - protein, 696 aa, Oryza sativa
  Clone ID: PAT_MRT4530_42987C.1.pep
MGVHPFAKAANGFVMQADAPDAKLADVQAVADAIHGNTKLANIQAVADVIHGNAKLADVQAVPDAIHGNTKVFDIQAVADAKPDVQAVPGAIHGNTKVADNSVVADAIQGNTKLTDVHPFMEGDCSIKLADAQVRNKAVDGFDATNMSPLVARCLAHHLAKVSVQRVWQGNYPEMFKPVLDAFGQPHRRIYIAFDFEFAADAFTNMHCWPGCTKTNYEYLRRYVNGGDVVQMGLAFVFEDEVDEEPTFTAMALEINFDFTVELRKYNGEAISFLSEQGHDLTEHRDRGVVPHFVYTGLLSHLPFGNSSVTWIAYHGDYDFGFFLRLLQGGCRGSSHLPLELPTFLHQLRLNFPRLYDIRVLGQLVQHGFRGSLTAIADLLGVNRFGRGHHAGVDALLTLSCFFQIVSCLSASGDHQLHRLDSRQGLLAGIAQVNKAIKDARHIGDRTSNIDVIKVQAGNLDEEAQRIQELVPSNFNIIGVEVMHPQLGNRSYAIGAQQNYESMKTYLKDADSFEIVIAFVNSEGMLAYDCVWKFCISSTPRSGCLHPRQFTRLMASCGATSNPNVSWVTFHGAHGIASLISSFSAPQDLPSDWPSYVEQRRAYFPGMYDVALIVHRYPDIGILPTTGCKGGLFDVARALDLNFIKDDNPVTRVLLTLRCYMRLADRGDFPDKQSAVQGQLMENCCWNCPAKRMEHA

SEQ ID NO: 141931 - protein, 57 aa, Oryza sativa
  unsure (1)..(57): unsure at all Xaa locations
  Clone ID: PAT_MRT4530_42988C.1.pep
LLSXEDLVPXPTPEQWPVEPHNSLAMIQVTTFTCGGFXIGLRTNHAXADXTGAAQFM

SEQ ID NO: 141932 - protein, 40 aa, Oryza sativa
  Clone ID: PAT_MRT4530_42989C.1.pep
SVMELHPSGTRWSNESRAHVDVVRRRPRRPQAYSHLVRVI

SEQ ID NO: 141933 - protein, 148 aa, Oryza sativa
  unsure (1)..(148): unsure at all Xaa locations
  Clone ID: PAT_MRT4530_4298C.1.pep
DLISHLHTLAHHPCIPEWRGLHPSWGSTXCLYAYRELHPDTVTDIVLRGISLLRKTEPACFYEAXAATLLPHALEPFEDFLPLDERNCSIAYYSGRLTSFSADHQAELPKRRSIRNIITARLIPYHNIINLWEYDKFSLVFAKVENHY

SEQ ID NO: 141934 - protein, 72 aa, Oryza sativa
  unsure (1)..(72): unsure at all Xaa locations
  Clone ID: PAT_MRT4530_42990C.1.pep
QTDWVPPVRPQVLRLSDRLTRWSRHKKGLPAACXGVGAKSEVWYTWLKGVMRRVLSQSLSGVSAFIKPSLTP

SEQ ID NO: 141935 - protein, 154 aa, Oryza sativa
  Clone ID: PAT_MRT4530_42991C.1.pep
FFFFFFFFFFFFVFFFFFLKGTHNYFFASNPFPFFLFMILQKRNTIYLFVPPPPTYARLRKTGLGFALKNKEKPLLKTQVGRNTSGGPPPKRLCELPLEKEKEKNPPTLLPVGGRNNKFFFGKEPKQEASMLSKEPREKLFFCPWKNNGGGGGF

SEQ ID NO: 141936 - protein, 143 aa, Oryza sativa
  Clone ID: PAT_MRT4530_42992C.1.pep
MADARVADFDLNVRIEEDDNIGIDLNLPLDEFGAVDFGYVQNLARHVVEAPIQVKHRRKEMSEELRKVVYQVLLAKSKDGVLEKKHSRIVADHFGLHIQSVQRLWKRGLGMENVFLMGKLVVFHLSLIDMLLEVVGIVFVEKK

SEQ ID NO: 141937 - protein, 487 aa, Oryza sativa
  unsure (1)..(487): unsure at all Xaa locations
  Clone ID: PAT_MRT4530_42993C.1.pep
MDHDPKERLLLPPRAAAAAAANGPHRRAAPAAGGGGGGVAIDVHGLKRRGGGRRSWVRVDAATGASEAVEVAKPALMRRLDLPARDLRLLDPLFVYPSAILGRERAVVCNLERIRCIITADEALILRDPDVAGGGAETEEAVRRYVAELQRRLVDRADDLPFEFIALEVALEAACSFLDAQVRDEIEQLMDDDGDMAEMYLTEKKRRMEASLLEEQAFQGMGNRFRLGSRAAAPLLQLCYISGSCVADDAPEDAVGFRYKGTEAVAEAWEGCGGGGGGGEEARRGAHIAALAQCAGRDAQXQELLLRSGLSLDASCSSDASTDSFCSRASTGRIGRPTFGARKKKTLCQTDHKIVSMLEREVGLASANDVPGLKRRWGHEIKEQPSGGGYTHIHGHGELAGAKRIAPRSTLHAEQNRPAQPSGPRTVQNATGSKPIQPRDGAGAVAGKRKRSKRASKNPRARXSLPYLNTNRELNSPRNRGDDEEEQ

SEQ ID NO: 141938 - protein, 428 aa, Oryza sativa
  unsure (1)..(428): unsure at all Xaa locations
  Clone ID: PAT_MRT4530_42994C.1.pep
MDHDPKERLLLPPRAAAAAAANGPHRRAAPAAGGGGGGVAIDVHGLKRRGGGRRSWVRVDAATGASEAVEVAKPALMRRLDLPARDLRLLDPLFVYPSAILGRERAGVCSLERIRCIIAADEAVMLRDPGVEXAGVGREEAVRRYVAELQRRLVDRADDLPFEFIALEVALEAACSFLDAQAVELEADAYPLLDELTTKISTLNLERVRRLKSKLVALTRRVQKVRDEIEQLMDDDGDMAEMYLTEKKRRMEASLLEEQAFQGMGNSGFGSSFSAPVSPVSSPPASRRLEKELSFARSRHDSFKSADSSQYSIEELEMLLEAYFVVIDYTLSKLTSLKEYIDDTEDFINIQLDNVRNQLIQFELLLTTATFVVAIFGVVSGVFGMNFEVDLFNVPHAFEWTLVITGVCGLVIFCCFIWYFKKRRFFPL

SEQ ID NO: 141939 - protein, 97 aa, Oryza sativa
  Clone ID: PAT_MRT4530_42995C.1.pep
NLTNHMEGLRQGDPLSPLLFILAIVPLQRLLDNATDLKLLSKLGGRSARLRILLYADGATVFIKPVKSEVQAFFQPGYAKLGPSNWVSPTQLSKNPR

SEQ ID NO: 141940 - protein, 50 aa, Oryza sativa
  Clone ID: PAT_MRT4530_42996C.1.pep
KNLMKISLRASVTIPPICSTGMIASILQLISSRPRAAPRRNTATTMLKQR

SEQ ID NO: 141941 - protein, 377 aa, Oryza sativa
  Clone ID: PAT_MRT4530_42997C.1.pep
MAARPETAATQLKGNKDLAEPCESLALTTQIDATRAQYSPYISPVCTTNCQLQKARVQWKKQMVAVQTVHAALLPSTTTTRRRPSPGRLPRRSPIRARAGSSETSSPRGRENWRVQEALARVAEIQVLKVRIASFLDDCSENLLWLAENAALDATAQDSLRVLDLDGAADDEIMERLYYEGVSVESIGEEAKHEHVLVARESGRYRTRRNVYLGVMGLIWVGLMQTTVFAAPNVELDKFAALCLIFLAHIVQVCFKEETDKKQVDLLRSNRYYYCSTAIAKHERDRGPFLLRPVQFSAGEAFSIHLQHPLMAHDSFHRKGQAKYRAWTDEHIAPTNHTNSLTLSHRSEACRDALDGTRTAATPARTDPSRASDAESS

SEQ ID NO: 141942 - protein, 207 aa, Oryza sativa
  unsure (1)..(207): unsure at all Xaa locations
  Clone ID: PAT_MRT4530_42998C.1.pep
MGGASELVGLPALLPKPHLLDPSPCVLAASIPSASLFAHAERSRQVMMVVTVEMALLGGLLSTAGPMGFASCSVMAPVGLAYGHHHCQRGQPPPDLPLYRLAQLAAAHAINRFRPGGRQPKMGRDGPAHGSAKPGGSAEPILASSDEGFGVDVQDCIPMTIGGHFGQFPFHNRHNYLYXKDFTFSLHSHTSSKSSXYSLNFSLVVSS

SEQ ID NO: 141943 - protein, 518 aa, Oryza sativa
  Clone ID: PAT_MRT4530_42999C.1.pep
MAGGGSIANDGEAAAGGNGGGDEVTFTVVMSCLTAGAVGLLLGYDIGVTGGLTQMESFLQAFFPEVLRKMSSAKQDAYCIFDSQVLNAFVSSFYLSTMVASLVAGHLTKTLGRRNSLLIAGVLFFAGTLLNLAAVNISMLIIGRILLGVAVGFSSLAAPVYLAEISPARWRGAFTSSIGLFANFGFLMADMINYRATTMARWGWRLSLGAGIVPALIVIVGAASIPDTPNSLALRGRLDEARDSLRRIRGAGVAAADVDAELKDIVRAAEEDRRYESGALRRLLRREYRPHLVMAVLITVFYEMTGGVVVSIFTPLLFYTVGFTSQKAILGSIITDVVSISSVAVAAVVVDRRGRRTLFMVGGAVLILCQVAMAWIFGAELGTDGGRAMPRGYAVAMVAVVCMYAAGLCVSWVPLSSVVTSEIFPLEVRSAALGLGGAISSALTFMQSQSFLEMLCSFKYGAFAYYAGWLVMMTAFVAAFLPETKGVPIESMGAVWAQHWYWKRFVKLAPAKQADGPE

SEQ ID NO: 141944 - protein, 276 aa, Oryza sativa
  Clone ID: PAT_MRT4530_4299C.1.pep
MVAMADAGEDGMMDMGDGGGCVGRGYNGEMDAGDGGGRGGRGRQLRQMWARTEGGMPATVATVKEEDSAMEHHRHRGAVVLVVAAAAMAMAMSAVRGDFAADRAECADKLMALSTCLTFVQDGASGGAAAPTPDCCSGLKAVLAASRKCLCVLIKDRDDPNLGLKINVTKALSLPQLCNAPANISDCPRLLNLPPNSKDAQIFEQFAKQQAAMQGSPSASPGGSSAPAAGAQKSGAAVLRWLGVDGVGGGGARAVALLLFLLSSAVAVAAPLLLVF

SEQ ID NO: 141945 - protein, 115 aa, Oryza sativa
  Clone ID: PAT_MRT4530_429C.1.pep
LHDDERRRETPAGSSEGQRGRVGGGGGFPATGSGNGRVVGLLLGAAMRRRATAKLGDGGNNGEWRLEVDGRQRRSGSRRRAASGGLRRKGTGGRGSPRHLWFDRLLHLIGDKLRH

SEQ ID NO: 141946 - protein, 272 aa, Oryza sativa
  unsure (1)..(272): unsure at all Xaa locations
  Clone ID: PAT_MRT4530_42C.1.pep
QRASLLLSMFLILGPAIVFSYQMESTIHRSQQRMHRAAQLIVIITTAADLFFLFMTSARDPGIVPRNTRXPPEVDEFLGSTTPSMEWSSGRTPRMRFRRSKDVTVNGFTVKVKFCETCLRYRPPRSSHCSICNNCVEKFDHHCPWVGQCIGLRNYRYFFLFVATSTFLCIFVFIFSWVNVYYERGYNGGSIWKALRKEVYSFVLIIYTFIVVWFVGGLTVFHLYLISTNQTTYENFRYHYNKDNPYRKSIAANFVDVFFTKIPPPQNNFRSW

SEQ ID NO: 141947 - protein, 554 aa, Oryza sativa
  Clone ID: PAT_MRT4530_43000C.1.pep
MSGGGSIANDGEEAAGGGGGGRGEVTFTVVMSCLTAGAGGLLLGYDIGVTGGVTQMESFLQAFFPEVLRKMSSAKQDAYCIFDSQVLNAFVSSFYLSTMVASLVAGHLTKTLGRRNSLLIAGVLFFAGTLLNLAAVNISMLIIGRILLGVAVGFSSLVIDRYQPINTFVHTYIYLFVGREVFMRSLHVFALLLWSQAAPVYLAEIAPARWRGAFTASIGLFGNLGFLMADMINYRATTMARWGWRLSLGAGIVPAVIVIVGAAFIPDTPNSLALRGRLDEARDSLRRIRGAADVDAELKDIVRAAEEDRRYKSGALRRLLRREYRPHLVMAVLIMVFFEMTGAIVVAIFTPLLFYTVGFTSQKAILGSIITDVVSIVSVAAAAAVVDRHGRRRLFMVGGAVLILCQVAMAWIFGAQLGADGGRAMPRGYAVAVVALVCTYTAGLSVSWGSLSSVVTSEIFPLEVRSAALGLGGTISSALTFMQSQSFLEMLCSFKYGAFAYYAGWLVMMTAFVAAFLPETKGVPIESMGAVWAQHWYWKRFVKLAPAKQADGPE

SEQ ID NO: 141948 - protein, 115 aa, Oryza sativa
  Clone ID: PAT_MRT4530_43001C.1.pep
MSYLLSYISKMLCIKIPSEARQASEDGGSGGLTECSVCLSRIRVGEATRRLPCRHAFHRDCVDRWLLSCRRTCPLCRVYVVVDGNKPGVAAKHTGEPPLAEDMVIWFSAMLVPGF

SEQ ID NO: 141949 - protein, 292 aa, Oryza sativa
  Clone ID: PAT_MRT4530_43002C.1.pep
GAAGIGTRLSAHTRYIKGKDRQLRRREWLNFPGSRRSGSCSSPSTPAWRSTAPTATPAPSSSSASPTWTLSRYSPASGSMRAWTSTRLVAAGSRLPSGPSRRSSPSCSAIKSPKSCRLSSRSSCGRWQRPRHAAASMPSSSTKRSSRSTWPCRPRRARRPPIATMAPPNRDSRLGACRRRRVSKSAPLATHDVRSRSQLDCSLIFLGFSLPCSKVFAVTSTVLACRCDQISRSRARQIRCCRGTRRTCLKFLGQEKWNHSKHDVKKVAGAPCLQIGRVLATSRRHFGESVAS

SEQ ID NO: 141950 - protein, 77 aa, Oryza sativa
  Clone ID: PAT_MRT4530_43003C.1.pep
MVTEWPIESRDVRRRWRRRLGGRSGEANKPVVREHVIGEGLLGVGLHMGLTSSAAQKSFVSTSMSLPNLHTSMSELL

SEQ ID NO: 141951 - protein, 97 aa, Oryza sativa
  Clone ID: PAT_MRT4530_43004C.1.pep
APKWAHLSWQFAICPICVLRVADQAANTVRVTCWASVLYGQLIVKRHRNFSHKVQAHKEDVTRRGSYACMPYARANGNLTNCRCNVRSSYLLLKLCV

SEQ ID NO: 141952 - protein, 88 aa, Oryza sativa
  Clone ID: PAT_MRT4530_43005C.1.pep
MASTKVQRIMTQPINLIFRFLQSKARIQIWLFEQKDLRIEGRIIGFDEYMNLVLDDAEEINVKKDTRKSLGRILLKGDNITLMMNTGK

SEQ ID NO: 141953 - protein, 129 aa, Oryza sativa
  Clone ID: PAT_MRT4530_43006C.1.pep
QQAPPQPQMPQMPRDKRAEFMRGHPPTFAHSSDPMDAEVWLRTVERELHTAQCDDREKVLYGPRLLRGAAQSWWESYLATHAHPNAITWEEFTGSFRQYHVPAGLMTVKKEEFLALKQGSSSVSELRDR

SEQ ID NO: 141954 - protein, 126 aa, Oryza sativa
  Clone ID: PAT_MRT4530_43007C.1.pep
MERGGPCDGLCRFRIHLGTRGDCPLPAGDGAYGSPLARGPHRAEPGRDQGEEQEKLEQVFPELRSPCGGGPRTRPSAPAIADDEVIVPDPGLTRLFVSQRETQILEEIEWRNQAIRQRQARVVVPL

SEQ ID NO: 141955 - protein, 944 aa, Oryza sativa
  unsure (1)..(944): unsure at all Xaa locations
  Clone ID: PAT_MRT4530_43008C.1.pep
MPFGGSAREGHAGTLLQHHLIHGVGLAAAGKLVSSSSAAAAAAGAGGFWEPRSVLDHRHSPSPSPPTSASTLSSPLADVAALAGANAKNVSVSPPPPGWGTGGGGGGGEEVVAAKEEWVHQLTPLDMGLGAGEGWDAAGNVLSDAAAAATSGMAPDNTFLRWIIGGGEDASAAMAGVMDPPVLELDHGGGGXRRRARRVRAVRAAAGXEDTKPVVPFAAGHPPPNFLLQHHHHHPQPHAAFFGAHHPSFDAAPPPSKRHHPMAAAPAPKLPPFPAGGFVPALKPKAEAANDEAAAAVEQLAEAAKLAEAGDAFGAREILARLNYRLPAAPTAGTPLLRSAFYFKEALRLTLSPTGDAPAPSASTPYDVVVKLGAYKAFSEVSPVLQFAHLTCVQAVLDELGGAGCIHVLDFDIGMGEQWASLMQELAQLRPAAALKVTALVSPASHHPLELQLIHENLSGFAAELGVFFHFTVFNIDTLDPAELLANATAGDAVAVHLPVGPAHAAATPAVLRLVKRLGAKVVVSVDRGCDRSDLPFAAHLFHSFHSAVYLLESIDAVGTDPDTASKIERYLIHPAIEQCVVASHRAASAMDKAPPPPWRAAFAAAGFAPVQATTFAESQAESLLSKLGSASASACADAECHVAMVLYCPLIKERERKRWNVHLVIVLVELNTPQAEKNQREVGGYGGEKNKILSEYNLLPLPVLEMQRKGGNHGVKRPCFTEMAAKHLRVRTGTSRTAAATLDGYTTLTWDSAPEWPWHRMHKPDRLRWAHWRVTGEPQCAAGAVAIGQASGHTGVRDTAGANWQETCIVVTEMDVKLADKFRKKWYHSSKLQKRRCTVGLIKQDLKVQNQGGESEASRHKGLQISFRQVQISLRKPNRKCKHSGQTVKLINENCYYLSTKRNNLKIKEVNYICYIYAEELHPLKVMFRNTQAKICQIDVQKS

SEQ ID NO: 141956 - protein, 181 aa, Oryza sativa
  unsure (1)..(181): unsure at all Xaa locations
  Clone ID: PAT_MRT4530_43009C.1.pep
MLSSLVFGCKGGMGWNEPTFRGVXFRGEWDGLVXPGEEYFSQIRDQPIQPNVADELVPPTAGSSEANGSGDGGGLGNGGSGGLGDGGSRGGDGGGGFGDGDGCGGRSGDGAXRRRGHRRRRRGRGSQGRRGGGACHWRRLRWWRGRSRRCGHGAAACERRRRGSDEARRWRRRSRDGGRRR

SEQ ID NO: 141957 - protein, 116 aa, Oryza sativa
  unsure (1)..(116): unsure at all Xaa locations
  Clone ID: PAT_MRT4530_4300C.1.pep
KRRNWKNLGVTKLNRLEQNPLFPSWLKNKKARTKRPSKQFPTLNGKWNPPCSGPXTPAVVGVTPRVTVKFASPQAPVLSPFFPSFFATFTGFPRKVLNRGLLXGFQFRALRNLNPK

SEQ ID NO: 141958 - protein, 100 aa, Oryza sativa
  Clone ID: PAT_MRT4530_43010C.1.pep
LAGQSPSPPPQPPPVASASSSPPLAPSPSPSPPVAASPLGPVGGRRSATTDGRADPLPPSPPPPDLPPHPSPSPNPPPPSPPRDPPSPRPPLPPLPSPPP

SEQ ID NO: 141959 - protein, 234 aa, Oryza sativa
  Clone ID: PAT_MRT4530_43011C.1.pep
MHRLISSPSLMASAAASWCWWSPLLARGGPVVRRVSRFPWEPRNMTTISRVKGDESYRRLPSQEKKHTAITQEVSYIKYDVLGQSAKQDGCDEDDRRSETEEHVEEDEVLDPEEYTVNNILPKSRHRDGSIYRDIMDTPWKREFHIADRNETRLEAMRFSNPTNCVIRSNGTCMSHVHCHMLQILSLELAKITLDGGSLELYGYIAVRDDLDPVLNYIVNCSKDDPIILEHGSL

SEQ ID NO: 141960 - protein, 187 aa, Oryza sativa
  Clone ID: PAT_MRT4530_43012C.1.pep
LNIPNDPLSKATVLALLKCISIYLASTAALPKGYCENIASKEWLKTTIGYRCPDECILFDPKYTRICKEDGPFIDEAFYGSEITSFKDVLRKIGVIVDIKCGHDLVARHLRNHKDSATISRIYMYLKDCNWEPENKTSNWVWLPNGSGSGEWVSAPSCVLHDRDNLFTSHLHVLDKYYDNKLLDYFS

SEQ ID NO: 141961 - protein, 83 aa, Oryza sativa
  Clone ID: PAT_MRT4530_43013C.1.pep
NSMVVCVLFGNRSCPLHDPFFSPTPCPVCVSGSPIVPFQWLLCEIRQHLDNAFRLPGRRAVPDVYFRALLRSSPTKLRAQAYR

SEQ ID NO: 141962 - protein, 112 aa, Oryza sativa
  Clone ID: PAT_MRT4530_43014C.1.pep
AGWSNLCASKARNKLVVGLHPLQLSKQSLCSIFAAAGECRGTATVEKHMATWRSIDGFDDRPASLACGLGLSLALTCLSSHRPDIARAAFSLAFYMLTCSADGSVYSSVMNI

SEQ ID NO: 141963 - protein, 140 aa, Oryza sativa
  unsure (1)..(140): unsure at all Xaa locations
  Clone ID: PAT_MRT4530_43015C.1.pep
SSGLNGQIPPCITNLTLLARIHFPDNQLSGQIPPELGQLEVIDLESNKLTGGIPGELGMLRNLSVLNLAGNSLTGNIPISLGSSTXLFLGGGIPPALFNSTSLRRLNLGWNNFTGSIPDVSNVDSPLQYLTLSVNGLTGT

SEQ ID NO: 141964 - protein, 194 aa, Oryza sativa
  unsure (1)..(194): unsure at all Xaa locations
  Clone ID: PAT_MRT4530_43016C.1.pep
SSGLNGQIPPCITNLTLLARIHFPDNQLSGQIPPELGQLSRLGYLNLSSNSLSGSIPNTLSSTYLEVIDLESNKLTGGIPGELGMLRNLSVLNLAGNSLTGNIPISLGSSTSLXLGGGIPPALFNSTSLRRLNLGWNNFTGSIPDVSNVDSPLQYLTLSVNGLTGTIPSSLGNFSSLRLLSLAVNDFTNTLPFG

SEQ ID NO: 141965 - protein, 45 aa, Oryza sativa
  Clone ID: PAT_MRT4530_43017C.1.pep
SSIHIHMFAHSSCSLNLYIRLDCYNSDMYTCSLKLQLFNDHCSNK

SEQ ID NO: 141966 - protein, 105 aa, Oryza sativa
  Clone ID: PAT_MRT4530_43018C.1.pep
MASAGALMMVTFFFDLTWRSNSKHCTSNFPATITRLAGMSTVTLSTPGTATAGEDSDVEAPLPLPPAPPATAAFSAAASSSFSFTEETDGGGHRRPAAAHVVSDQ

SEQ ID NO: 141967 - protein, 153 aa, Oryza sativa
  unsure (1)..(153): unsure at all Xaa locations
  Clone ID: PAT_MRT4530_43019C.1.pep
TPPRPQGFSAHRASICGSASAHPSARGRASAPRPLHCSADHRQVATPPMTLSCRQGSRRHRDSSPSMRDVTRFHLFVRRRRLRRPPQESRTAAVDRDEEGQAIIEIVARVGTPAEKGTGHSKLVRHYDSEAXWNNVSLFTSTPPSSLVCWSWC

SEQ ID NO: 141968 - protein, 1537 aa, Oryza sativa
  unsure (1)..(1537): unsure at all Xaa locations
  Clone ID: PAT_MRT4530_4301C.1.pep
MDKQWMDKPRHSREYSEGLDIFLQHEFSSAVGNKIQCPCKKCAGSFWRDESEVHEHLICEGFLRGYKPLMFHGEGSSFVNSAEYDEVGDVESSEHDDISDLLRDLACGLDDRGEFEDEGNSDVTNEDLNALKMLSDDYGQELYAGCDKFSKLHFIVKLLHIKLLGGWSDKSFDLLLNLLIEAFPKGSALPKNYNEAKKTVKCLRLGYVSIHACKNDCILYWKDDANANSCPKCETSRWKSENKSLNGKRIHKVPNKVLRYFPIKRRFQRLFACSRTAALTRWHDEERTQDGLVRHPADSPLWKDFDHKHPEFASDPRNIRCALATDGFNPFRSMNISYSIWPVIIIPYNFPPWICMKQPNFIISLLIPGRYAPGSDMDVFMEPLVDDMYDMFVHGVRTFDASKGEYFQLRAAILCTISDYPGLGYVAGCTTSGEGACIECHQFTRSLRLKNGSKTSYMGHRRFLHANHPFRFDADSFDGVVELESAPVPLSGKEILKQTEGMQTSFGKDPSGKKVTKKRKRKEGEPINIWKRRSIWFKLPYWKDLLLRHNLDVMHIEKNVCDNIINTLLGTDKKSKDNLNSWLDLQALGIRSDLHPIEVEDKFYLPPAPYSMNSEEKKLFCKVLNGVKFPDGYASDIRRNVQVNEKKIIGLXSHDNHVILQQLLPLAVRRILPENXFLMRCKGYVRTRSHPEGSIAESYLFDESLTFCSRYLHGVTRFTRRVRNDEGLPMEVQSTTPFFRNIGRGKHIDYLSSTGLQNKREIDRVHHETFHEWFRLHVTEMGDDEPEEIKILAKEPIMAANKYNSYTINGFNFHTQSYDEGRPVQSSGVSLMAETTCFERGNNDCRVVGNKIYYGIIKEIIELNYSNRGNIVLFKCDWVDNRIQDKWVKTDQFGITTVNFKHLFNTGDNISDEPFILASQAIQVYYVQDPVDTEWFAVRQSKPRDLYNMSETEKDDLGNDTEVSIILPDVHPNSTMNISVEETVFVRTDIDGIIVEANKPKTKNNGTGKRKVTDGRNMVPCGDHNLRSRSRNNLEENVDENVGDDPEYQPEEDAMDDNEVDVEEILELEKVQQKKKEGRGITQKLNIISRVGEAKIKITLNEFGQPVGLDSEEFATTVGTFVRKKIPVACGDWRDVDVKDKLKVWEDVQKHYEINEYGLHFVLETSHMIWKDYKADLKKKHFDANLTDEELMDRRDLRVNEAQWKWLINHWRSPEAVARSIRGKANRGMLRMLHTAGSKSHARVGHDMGVKTGRPPRRDEVFVETHKRKNGEIIPEAAETVEMLKEAAEVNPELKNKTIQEGDLYSRVCGTKEPRGRVRVLGKGPTPQDVGTPGTRSRMPTRLQLEIESHRQTKQEVVCLNKRMDDMQQRFNIMEHMVMSQGVQNIETSSHHASNSRHAEVGKDVILYAVLRSDTPVAKATIVSIDPSSLVGGQPLGVEFYEVVVNVVLKRDALLPRPYDDMQTMADAQYTSIAWPNNRLNVSKRSAMSKSANSKSAVNTACPLIVSTTDVRSMGYPKATAYAHRVIMSGHLSQPPG

SEQ ID NO: 141969 - protein, 153 aa, Oryza sativa
  Clone ID: PAT_MRT4530_43020C.1.pep
MAARGRSRRRSRKFQGWRWRRRASGRRGRWWCTAPPTRRRSRRGSRPRLRGTSPSSASPPAPSSHLNKPRRRLLRLSRRRRRLLRRISTAATTGSTAAGTAFGTRRPTSAMRTPVAAPSTKLTHCTARTGLRSTCGPSSQVRSGCSQATSRLL

SEQ ID NO: 141970 - protein, 419 aa, Oryza sativa
  Clone ID: PAT_MRT4530_43021C.1.pep
MAASTTCPARSMASVSRALRPRPHAAIASAAVRTAARLGGGLGIVCSMPSYGRKEKEEWGLTIASAPATTAAPALRSCQLLCKAEANISSNLPESIPSEANQYEKIVELLTTLFPVWVILGTIIGIYKPSMVTWLETDLFTVGLGFLMLSMGLTLTFEDFRRCMRNPWTVGVGFLAQYLIKPMLGFAIAMTLKLSAPLATGLILVSCCPGGQASNVATYISKGNVALSVLMTTCSTIGAIVMTPLLTKLLAGQLVPVDAAGLAISTFQVVLLPTIVGVLAHEYFPKFTERIISITPLIGVLLTTLLCASPIGQVSEVLKAQGGQLIIPVALLHVAAFALGYWLSKVSSFGESTSRTISIECGMQSSALGFLLAQKHFTNPLVAVPSAVSVVCMALGGSALAVFWRNRGLPANDKDDFKE

SEQ ID NO: 141971 - protein, 201 aa, Oryza sativa
  Clone ID: PAT_MRT4530_43022C.1.pep
MVRGKVQMRRIENPVHRQVTFCKRRGGLLKKARELSVLCDADVGVIIFSSQGKLHELATNGNMHNLVERYQSNVAGGQMEPGALQRQVAEQGIFLLREEIDLLQRGLRSTYGGGAGEMTLDKLHALEKGLELWIYQIRTTKMQMMQQEIQFLRNKEGILKEANEMLQEKVKEQQKLYMSLLDLHSQQPTQPMTYGNRFFSI

SEQ ID NO: 141972 - protein, 937 aa, Oryza sativa
  Clone ID: PAT_MRT4530_43023C.1.pep
MEDALDLMGPKTKVSFPKRALRTVGLMDPRPQHILLIQELDERLKILLELWDQFRDQSGEDTPATTKPDETAGPRVPLGCRLAPVGIQHHKDDLIDLLQHVDGQPKQLRVISIVGFRGVGKTTLANEVYCHDDGSDGEPFDCKAFVRVAWSAPLAAESKDDAARLLKETVYQLHCASADINDNTDIMTLRETICKFLEDKRYLIVIDDVRKDEVWAEIEGAFPKESSSRIIVTTSVQSVAKKCSLGGFMYRLEGLNEVDSDKLLWQLVGCDRNELPQDVQSHSVDIVRKCDGLPLALTGVAEYVRLKLEDLRRGELRCSAIVRDLGNNLAGRLHNAAFKAAHATLKECYEGLYSHDLKTCLLSVSMFPKNYSIRRKSLVRRWMAEQLVPVPFDGQEHASTVADKNFEKLVDRIMIQRADDEEDPAPAVVPGAVKNKCRVQGVLLDFLHNKSVSSKFARLIQNGEHLQTTSGDNNLGPRRLAIVYDPKANRAGGGNSNKAKLAEMVEGLDLSHVRSLTAAGTELSDFKLKRCKVLRVLDLDGCTGITGGVLRRICKLKVLRYLSLRGTTIDACGLPAEIAEMRFLETLDVRDIVIVVRGSKSKAEEDHVATITLPCNVLCLPYLKYLFGAFELPRDIAGPARGGLALWPKAARASGGAAAQACKLHTLAGIFIGGGDREGHQRLQNLFGLMHQDRLKKIKIWWNKKGVKGSKPKPTTAHTDLLVKFLENRCFTLESLSLDFGDESLDFLDFAPVNAHLPCKIESVKLRGKLSKLPAFITANEHTMLDHALSKLYLSYTGLSCEALLLLQCLPNLKYLKLIEDNSNFTDGTLTLNDARGFRSLRGLHVQAPKLPKVIIVVSGKDKTVAMKHLTTLQLLCKDISGFQAAHIDYFHRLEQVVLLKSSLDINEKTAMEWEEARKKHMNRPRIDTIECRGQDQ

SEQ ID NO: 141973 - protein, 505 aa, Oryza sativa
  unsure (1)..(505): unsure at all Xaa locations
  Clone ID: PAT_MRT4530_43024C.1.pep
SQRAHKDKYPIPVVDELLDELHGATIFSKLDLRSGYHQVRMHSDDVHKTAFLTHDGLYEFLVMPFGLTNAPATFQSLMNDVLWPFLRRFVLVFFDDILIYSPSWTSHLQHLRTIFTALRAARLFVKRAKCSFGDASIAYLGHIVSLHGVAMDASKIQAVVEWPRLRSPKDLRGFLGLAGYYRKFIPDFFTVACLXAPLTQLLRKDRFTWSPPADDAFQRLKLALTTVPVLALQDFRSAFTVXCDASGMGFEAVLLQGAGPIAYFSRPVATRHQALAAYERXELLALTTPVFDLLHDLRTATSSDPVLLALRDEIAAGTRGAPWTVTDGFVTYKRRIYVPPGSPWLSTIVAAAHEEGHEGIQKTLHRLRRDFHTPNDRHLVSDFVQGCITCQRNKTEHLHPAGLLRPLPILMAVWSDVAMDFVEGLPRVAGKTVILTVVDRFSKYAHFIALAHPYTAETVARAFFADIVRLHGVPVSIVSDRDPVFTSAFWTALLLATGTKLACLQ

SEQ ID NO: 141974 - protein, 73 aa, Oryza sativa
  Clone ID: PAT_MRT4530_43025C.1.pep
MPFFSASDSCMRFRDSCTASMINVKKHPPRLARLVRLRNGEYEHGHKRRMGCGLEIQTETIDQIRHPKTEKGN

SEQ ID NO: 141975 - protein, 502 aa, Oryza sativa
  Clone ID: PAT_MRT4530_43026C.1.pep
MSDELGKLVSRTLLARSKNGKLGKKDTSIVAAQFGLGIQSVQRLWKRGKIQLANSIPVVVSSLKKGRVGRKKIPVDLEALRSIPLKERTTIEDVSAKLNMSKSKIQRYLRKGFLRRHSSSIKPYLTEANKKSRLKWCVDMIKRDLHGGPRFKDFFDFVLIDEKWFYLSQKSEKYYLLPEQDDPHRTCKNKNYIPRLMFLCVCARPRFRDGNCIFDGRISCFPLVTYQPAMRGNVRTGRVRGDLVLKPITSITREVIRDFMINKVLPAIRAKWPKEDVGKPIFIQQDNAPSHLNLDDSDFCEHAKQEGFDIRLICQTPNSPDFNILDLDFFRAIQAIQYNKNAKTIEALVPTVEEAFMEYSAHKANRMFVTLQSVLMEAMKMKPRLLSDSGASSCNSGAKESGTSSDSGASTESGASSCKSGVKESSTSSDSGASMESGASSCNSSVKESGTSSDSGASMESGASSSSATVFLGQRCFWAVAFVVNKKDERGKSAWWNRRVRS

SEQ ID NO: 141976 - protein, 102 aa, Oryza sativa
  unsure (1)..(102): unsure at all Xaa locations
  Clone ID: PAT_MRT4530_43027C.1.pep
AGTRACAGTLYSGRPTRSVEHEGCRYISFXTNANYMVSHLAGKNLVVXAMPDDETVNADRISREQARNLKNNTGEELGAYTPRDGQQIYSGILNEAENEVLE

SEQ ID NO: 141977 - protein, 163 aa, Oryza sativa
  Clone ID: PAT_MRT4530_43028C.1.pep
MASGENNVEEELRKTRKPLGNREAVRKYREKKKAHAAFLEEEVKKLRTTNQQLLRRLQGHISLEAEVVRLRALLFDIRGKIDAEIGTFPFQKQCSFGSVTCTDHSPCFNTSTEVAVREESSRPTIVDCGIDGTGIISHELDIPKMVNSVDVIPSFVNSASLTE

SEQ ID NO: 141978 - protein, 457 aa, Oryza sativa
  unsure (1)..(457): unsure at all Xaa locations
  Clone ID: PAT_MRT4530_43029C.1.pep
MTPTLLDITMLTGLDVTSSANPISLNTKNTFEFKTKSIGGWTGYIGAYMCKGSVSSREHVAFLLMWLEKFLFCGSSCGPTTNWRFLAEALETKKQIPLGKILLGYLYQMLSNALDKIVVGSVVGAGGSWWLLQPWLNLVDMKAVNRPAVTKAEFPRLEPITDNDGEXKTHRRCMSYGEYASTPADSGSKLSAELLKDWFCSFYDGLWKXQESASMYMTYLFPYVIPQKKKTAVKKKSAPMPPPSSPPGQPETSNRTPSAASSHNVEEEEPPAAPAIPVLPDPFSFDIKDYLDEETEEDTTSKALAPLSDDVKKILEDISHWLGSSLDSLVADCGSIRTRFKEIQLLIPDDLANNITPAIYLELHQFKLERAKQRLADRQERKYIEATIQANQQLVHEEKSKLDQLPEGPISSNIDRLEARKIVLMAQLQECNAELDLEHKKLTDLPKAVEEQKAKLK

SEQ ID NO: 141979 - protein, 90 aa, Oryza sativa
  unsure (1)..(90): unsure at all Xaa locations
  Clone ID: PAT_MRT4530_4302C.1.pep
RSDTPVAKATIVSIDPSSXLVGGQPLGVEFYEVVVNVVLKRDALLPRPYDDMQTMADAQYTSIAWPNNRLNVSKRSAMSKSANSKSAGVV

SEQ ID NO: 141980 - protein, 229 aa, Oryza sativa
  Clone ID: PAT_MRT4530_43030C.1.pep
MMFAEKKKTAVKKKSAPMPPPPTPPVQPETSNRTPSAASSHNVEEEEPPAAPVIPDLADLFSFDIKDYLDEETEEDTSSKALAPLSDDVKKILEDISHRLGSSLDSLVADCGSIRTRFKEIQLLIPDDLANNITPAVYLEQHQFKLERAKQRLADRRERMDIEATIQANRQLVYEEKSKLDQLSEGLISSNIDRLEARKIDLMAQLQECNAELDLEHKKLTDLPKAVEE

SEQ ID NO: 141981 - protein, 890 aa, Oryza sativa
  unsure (1)..(890): unsure at all Xaa locations
  Clone ID: PAT_MRT4530_43031C.1.pep
MHSDSTLKGDKYAGLMENFSPRTLLNSILRITVLTSDGSTARPKPIQKYCQNVCDISSIVSPLIEDLCESPEEQLNEVLRELGTAINRASGLIGNWQQTTSKIYFIWQIESXISDIQGCSLQLCQLVNSLLPSLTGRACTCIEKLQDINYENMFDLVKESSLELVETDTTSPENLSRLSSSLSLSTNLEFYMEAVSLENLRARAMRSENREEMDLADKMIPLVNYMHDHLLRETQLLSINGVPIPADFCCPLSLELMSDPVIVASGQTYERVYIKLWLDEGFTICPKTRQRLGHSNLIPNYTVKALIANWCESHNIRLPDPMKSLKLNFPLAASALQDSSTTGSSPLHPTVAAKGNIPGSPEADLYMRSLNRASPPHSVVHQNSHAHVNHAGHEASIKQSSENANGSASDVSRLSLAGSETRESSLEERNAGSIGQTSEQSIEEAFQASNLDRDSHDHVGSSSVNGSLPNSGQLDAECDNGPSERTNYSSDASGEVTDGPSASSAPQREHLIPSRLADVRSRGQFVRRPSERGFPRIISSSSMDTRSDLSAIENQVRKLVDDLRSDSVDVQRSATSDIRLLAKHNMENRIIIANCGAINLLVGLLHSPDSKTQEHAVTALLNLSINDNNKIAIANADAVDPLIHVLETGNPEAKENSAATLFSLSVIEENKVRIGRSGAIKPLVDLLGNGTPRGKKDAATALFNLSILHENKARIVQADAVKYLVELMDPAAGMVDKAVAVLANLATIPEGRTAIGQARGIPALVEVVELGSARGKENAAAALLQLCTNSSRFCSIVLQEGAVPPLVALSQSGTPRAREKVSHFSSFPLSIRNAAKHILNIYAKARHFSHNVLNMLLGLTGTGSSQLLSQPKAREFSKEMTFSEFFVGIH

SEQ ID NO: 141982 - protein, 246 aa, Oryza sativa
  Clone ID: PAT_MRT4530_43032C.1.pep
MSRGTGAGYDRHITIFSPEGRLYQVEYAFKAVKSAGVTSIGVRGKDSVCVVTQKKVPDKLLDHTSVTHLFPITKYIGLLATGLTADARSLVYQARNEAAEFRFKWGYEMPVDVLAKWIADKAQVYTQHAYMRPLGVVAMVLGYDEEKNAQLFKCDPAGHFFGHKATSAGLKEQEAINFLEKKMKDDPQFSYEETVQIAISALQSVLQEDFKATEIEVGVVRKDDRVFRALTTEEIDQHLTAISERD

SEQ ID NO: 141983 - protein, 51 aa, Oryza sativa
  Clone ID: PAT_MRT4530_43033C.1.pep
FFFFTSPTIQAHSIYKSFFVYKGYTEPSKYIMKAMGSSYNKIYYRKDSKQN

SEQ ID NO: 141984 - protein, 124 aa, Oryza sativa
  Clone ID: PAT_MRT4530_43034C.1.pep
MAGGAAWTLRAGSNAASRAERRQACSEQGAAKQARRLERRWAKQCGCRQPQSEWCVANQCRRPPAPQRRRGPTDHGSGGSGDGGGQETGGVAGAASLHHVDLELRVSLFILFDTIVLLSTDLLL

SEQ ID NO: 141985 - protein, 172 aa, Oryza sativa
  Clone ID: PAT_MRT4530_43035C.1.pep
SWPCAPRPCPAARPSHRRAPSPAPPHVPPPSPSRRRVSPSHHRSPRAPRRCRCRAVSIPPRAIAVPSTPLPRRAPSCRRATLHRIAVVCRVVSSPSPPRALPPSPPRRAPCRATSRPAPLPRRARHCRHAAVPLARRHVPLPRPEPRAAAPCHLSPSRRRRAPRRRAASPSS

SEQ ID NO: 141986 - protein, 64 aa, Oryza sativa
  Clone ID: PAT_MRT4530_43036C.1.pep
GSPGRNTLPGNQTTHFFAHGTLCVNGMGCDPKNLQHQGHHCTTARSRQVVYSIKHRRLTRFGGY

SEQ ID NO: 141987 - protein, 176 aa, Oryza sativa
  Clone ID: PAT_MRT4530_43037C.1.pep
VPQQRQLDGEDRAVPPSRAGELLPRPPPAELPLHHPPLAPASSCRAVPRLGHRSEEEERWSHRRCFGHAATALLGFVPRDNPTLPPCFLVPLSSYFPSTSSFFLIGGRCTRFRGVQKRPWGRYMAVICDPVKKARVWLETPSPSSTTISTTTTTSPTHPTPLPSLARPATTSLSST

SEQ ID NO: 141988 - protein, 210 aa, Oryza sativa
  unsure (1)..(210): unsure at all Xaa locations
  Clone ID: PAT_MRT4530_43038C.1.pep
LRWTMTILGPTIFRYFSSGGRCTRFRGVQKRPWGRYMAVICDPVKKARVWLETYDSAEEDTXAYDAARAYDVAARALXGPKAKTNFTLXSLTPSPSSTTISTTTTTSPTHPTPLPSLARPATTSLSSTIESFGTRPRPVLLPRLSPSXILDGDCHNDCGLSASMVDEDCTDATASLSCQLTFQFDLNLPPIGAIWLDRGGWRLHITARRL

SEQ ID NO: 141989 - protein, 89 aa, Oryza sativa
  Clone ID: PAT_MRT4530_43039C.1.pep
ITDADSPMPDFRLIQPSSIRQYSGTRIPHKHVNQSWKNSMNCGYRNNMLKMYTRQRFQLFQHANRCTTEKKREDNTSANTKMCLTRFRI

SEQ ID NO: 141990 - protein, 105 aa, Oryza sativa
  Clone ID: PAT_MRT4530_4303C.1.pep
MHVGPREALYVRKNVCDHRRGQHPRGRAKTKVTALPRGSKDKWIGATPAVLRARGWTIRAAARVVTRRLPRHVAGHMHRGIGIIRGRAGPERSERERLRLRASGR

SEQ ID NO: 141991 - protein, 119 aa, Oryza sativa
  Clone ID: PAT_MRT4530_43040C.1.pep
MGLVPTSIGGFDWYLPVKDRGTSLTQYRYQGLVPRNNPGIRSGALLLGVRRAGFWLGPLGVVAASRSVTGEVSHTSARDTERGSGLGESLLGVVAGGAGEVSRVRGLDTGRRKKHSCSE

SEQ ID NO: 141992 - protein, 38 aa, Oryza sativa
  Clone ID: PAT_MRT4530_43041C.1.pep
MPPWQLDGPVAVWAWPWSAIVVHGGLLALGSAVEQCLS

SEQ ID NO: 141993 - protein, 65 aa, Oryza sativa
  Clone ID: PAT_MRT4530_43042C.1.pep
FLVFTTDNMPFTASDICKIILAIILPPVGVFLERGCGADFFINILLTILGYIPGIIHALYIILKY

SEQ ID NO: 141994 - protein, 90 aa, Oryza sativa
  Clone ID: PAT_MRT4530_43043C.1.pep
AIVNCGPREDSTRMGSAGTVRRQPVDVSPLRRVNQAISLLTTGAREASFRNVKSIAECLAEELINAAKGSSNLYAIKKKDELERVAKNNR

SEQ ID NO: 141995 - protein, 588 aa, Oryza sativa
  Clone ID: PAT_MRT4530_43044C.1.pep
MNSMLLRPLPSAGASGGRGSPGRGRVVGSAVSFGGRGRWRRGVAVVAAGAGAEASWMEEAGVAVLEEGVRRNPAVSDSYRPPGMPRPNATVLEAQARVCTGPEQTRPLGEEQAMRVLDTILRSGMGELKDEPVSSAQLGAFFAGMTIRANSFPEATQWSEGERRAMSLFWPRLVNVLPPEVKFIADPEGTIMGANGLTGPRYVGQSTAEMRLVSALREVLAGGHLGYEEVQGVLKDVLPVELASANSTMVNEALLAAFLIGQRMNRETDRELKGYCLAFDDELGPTPVADVKSLTHYGEPYDGNTRFFRSTLFVAAVRACYGEACLLHGVEWMPPKGGITEGQMLKFMGANTHLSTLQAKTLLEDENTGFAYLGLQEACPPLYSIIGLREHIKKRPPLATSEKVQQFVRARGRESMVAGFYHVGYEDPLLMLMRRRTVHAGLVVKGEEGALSMTTKERSAHASKGLPVNHCSGFRIPNSTDFSETDGISREGFSVIVNAQELGFESTETPRTDRSVLKNLELGLAALSGEKGPAYDRIVLNAAMVDHLLGCTGAEDIKSALDRAREAIDSGKALSRLMNYIKISHKVS

SEQ ID NO: 141996 - protein, 281 aa, Oryza sativa
  unsure (1)..(281): unsure at all Xaa locations
  Clone ID: PAT_MRT4530_43045C.1.pep
MRKRERENPCGICGHYHKYELGEVCGVCGHRPPASAGAQAAAGXPQAAAPRQDSAFPSEILKDFLFLGSYDNASRSELLKTIGISHILNTVPLCQNLYRNSFTYHCLQDEKTLQFDDAIQFLEQCERDKSSDYICYMTTITRSAAFVIAFLMKTKGWRLSQCFQWVKERRPQVQLADAAQRQLIEYEQKLFNSTVGIPAQAFVPTDAFPSLGFGFPKPSGDIQVPIFNQQAPASIFERVSPHNIPSNFTFGAERTTEVKLPDNNSFGVVNSSGGDSMMDSS

SEQ ID NO: 141997 - protein, 39 aa, Oryza sativa
  Clone ID: PAT_MRT4530_43046C.1.pep
MAAPTAGVAEPPMARKNKDLTLHAPSDVHGFIDPSVYAS

SEQ ID NO: 141998 - protein, 84 aa, Oryza sativa
  Clone ID: PAT_MRT4530_43047C.1.pep
GQHEAEGSLLLQEACMIDLQVLIFWVTGWVSCSSGVGSCNRYEILEFHLLAPKRPFAQSVTTNRASFAKVVVLDFIHHYINKVY

SEQ ID NO: 141999 - protein, 41 aa, Oryza sativa
  Clone ID: PAT_MRT4530_43048C.1.pep
PRVSSRHRKLLVLIRKRCCIDWEKEATLALDRVFSSSLPVA

SEQ ID NO: 142000 - protein, 112 aa, Oryza sativa
  Clone ID: PAT_MRT4530_43049C.1.pep
DFSTHVTSQVQIQHRVHQGWLSDDGGKSDVADATTSGSALLMAENTCAELPIDGLEQLLMQISDDQQTVEMLSGFSASVPQSQLQHDYHQGCLGVHREEVVLQILPLLVVLW

SEQ ID NO: 142001 - protein, 1344 aa, Oryza sativa
  Clone ID: PAT_MRT4530_4304C.1.pep
MDKQWMDKPRHSREYSEGLDIFLQHEFSSAVGNKIQCPCKKCAGSFWRDESEVHEHLICEGFLRGYKPLMFHGEGSSFVNSAEYDEVGDVESSEHDDIFDLLRDLACGLDDRGEFEDEGNSDVTNEDLNALKMLSDDYGQELYPGCDKFSKLHFIVKLLHIKLLGGWSDKSFDLLLNLLIEAFPKGSALPKNYNEAKKTVKCLGLGYVSIHACKNDCILYWKDDANANSCPKCETSRWKSENKSLNGKRIHKVPNKVLRYFPIKRRFQRLLACSRTAALTRWHDEERTQDGLVRHPADSPLWKDFDHKHPEFASDPRNIRCALATDGFNPFRSMNISYSIWPVIIIPYNFPPWICMKQPNFIISLLIPGRYAPGSDMDVFMEPLVDDMYDMFVHGVRTFDASKGEYFQLRAAILCTISDYPGLGYVAGCTTSGEGACIECHQFTRSLRLKNGSKTCYMGHRRFLHANHPFRFDADSFDGVVELESAPVPLSGKEILKQTEGMQTSFGKDPSGKKVTKKRKRKEEEPINIWKRRSIWFKLPYWKDLLLRHNLDVMHIEKNVCDNIINTLLGTDKKSKDNLNSRLDLQALGIRSVLHPIEVEDKFYLPPAPYSMNSEEKKLFCKVLNGVKFPDGYASDIRRNVQVNEKKIIGLKSHDNHVILQQLLPLAVRRILPENVSAALIRVSNFFKQIYSPVIRVSDMQKLEAEITETICLLEKIFLPSFFTIMIHLMVHLPAQARIAGPVHFRNMYPGERFLMRCKGYVRTRSHPEGSIAESYLFDESLTFCSRYLHGVTRFTRRVRNDEGLPMEVQSTTPFFRNIGRGLAGKCCVALDHKNWLQAHSKHIDYLSSTGLQNKREIDRVHHETFHEWFRLHVTEMGDDEPEEIKILAKEPIMAANKYNSYTINGFNFHTQSYDEGRPVQSSGVSLMAETTCFERGNNDCRVVGNKIYYGIIKEIIELNYSNRGNIVLFKCDWVDNRIQHKWVKTDQFGITTVNFKHLFNTGDNISDEPFILASQAIQVYYVQDPVDTEWFAVRQSKPRDLYNMSETEKDDLGNDTEVSIILPDVHPNSTMNISVEETVFVRTDIDGIIVEANKPKTKNNGKGKRKVTDGRNMVPCGDHNLRSRSRNNLEENVDENVGDDPEYQLEEDAMDDNEVDVEETLELEKVQQKKKEGRGITQKLNIISRVGEAKIKITLNEFGQPVGLDSEEFATTFGTFVRKKIPVACGDWRDVDVKDKLKVWEDVQKHYEINEYGLHFVLETSHMIWKDYKADLKKKHFDANLTDEELMDRRDLRVNEAQWKWLINHWRSPEAVARSIRGKANRGMLRMLHTAGSKSHARVGHDM

SEQ ID NO: 142002 - protein, 946 aa, Oryza sativa
  Clone ID: PAT_MRT4530_43050C.1.pep
MADIVLGLTKSVVEGTVIKVQSAILEENQLKERVQHDLVFITDEFQMMQSFLNVVGRGQANNNVVRTWVTQKSAWWHRLFPSFMAPVLPSCLAPVLPLDEAVADIKQIKARVEDVSQRNMRYNLISDSGSKPVGPAAGGSSASDALVEVRDIAKELSGSGDLAELLTNNDGDLQVISIWETEGDHGESSIIRNVYDDPEIKRNFECLAWIKIMHPFDLSEFFQALRSQFYTNSGQQRQGAEVKLFTKFRTEVYKKRYLIVLEDLNTVSEWESIRSNLPNMRNGSRVVVSTQKVEIASLCTGHPFQVSQIRRFSYYHCVCMFFKEISAANELDRMKPKQEIKGIDTVQAIWRCKNLLMCFGSFRGEFRFGVISVWGIAGVGKSTFVRTIYNSHDQFEMYGWVNVSHPFNLRDLACSLLLDLHQNGRCFLWLGEKDIDMFRTKDPIQECHKLLHKHKFLIVIDGLQSTEEWDLIKSTLLSGNSESFIIVITNEESVARHCAVEDNFVFNVNGLKADAALYLFIKEFCVLQQFGQSITFLKFTLPLLAYLSGILVYGSAHCMSDTELRLMLGKANTPGMTEEISPLLKKHGQDRLLYKQNIDLTPEMIDEAKLIIKKCGGLPKQTSRSGNRIVWCEVNSFFHEYIMSQQMDDNHIFSLQGRCSLTSQRTGRHLVIGSTWERDKIVFMSIDFSRLRSLTVFGKWESFFISDNMKLLRVLDLENASDVTNDDLERVVSLPRLKFLSLRGCKMVSRLPDSLGGLRQLQTLDIRHTSIVRLPTVIVKLHKLQYIRGGTKVTLGEEGTSASLAAAETETQPKCRSTHALLSWLPDLCRGRHAGDPCSGIEVPRGIEELTALHTLGVVNVGVAGGKAFLKELKNLTQLRKLGVSGINWKNIQELCSAVSCHRYLESLSVRLDKDEHGSSDDRLKEDLRNRIAEHPNKLVLKLKME

SEQ ID NO: 142003 - protein, 113 aa, Oryza sativa
  unsure (1)..(113): unsure at all Xaa locations
  Clone ID: PAT_MRT4530_43051C.1.pep
LPWICGESSSLILWCSDPVLRVWDPRKPGTLAPXCFQFSSHKSWISACKWHPSSWFHLVSSSFDGKVXLWDLRTACHWLLWSHTQDQVLCADWWKGDSVISGGLIPTVYSFRD

SEQ ID NO: 142004 - protein, 300 aa, Oryza sativa
  Clone ID: PAT_MRT4530_43052C.1.pep
MASPPPGAHRAASSSGALAPAAFPAASHFASRAAAPFLRQQPHPGGGGDSDGDNAVEEVDEGDDDEDDEEEEAELADGAPCSSQQRCASTPGIGRAGMNRGNGMRQIEEEQQWQHSHIYNCGNEQYGHASSREDEPSTIPREMRVENGYGVIGRREGGPASSYWDLLRAHLSDPLTWKACGKCGQPITEDSIRPNLALRLAVQAFKREEESAKSLKRRRERLEQCSKLCSFSEMRTNVAMMNQIQLRFLETLAFVSGNKRTPERFVGRVAVVTAQCLNGWYVVKTLDNAESVKLQYRSLA

SEQ ID NO: 142005 - protein, 159 aa, Oryza sativa
  Clone ID: PAT_MRT4530_43053C.1.pep
GGPASSYWDLLRAHLSDPLTGILMDDAMILSCGHSYGSNGMQHIYRMKACGKCGQPITEDSIRPNLALRLAVQAFKREEESAKSLKRRRERLEQDKCGNDEPNPTEISRGKGVQFPFAVFDRVIIKGNKRTPERFVGRVAVVTAQCLNGWYVVKTLDNA

SEQ ID NO: 142006 - protein, 532 aa, Oryza sativa
  Clone ID: PAT_MRT4530_43054C.1.pep
MVNKISPWDQQEKMALRSNGALVKSLSFKEWEGGEQTKTNSVNHKNRPSLINVVVDNRRNSDIFMAESSPIVSSSPKCELDAAAVKVQKVYKSYRTRRNLADCAVVVEELWWKALDFASLKHSSISFFNGEKPETAASRWARARTRAAKVGKGLSKNGKAQKLALQHWLEAIDPRHRYGHNLHIYYGVWSRSESTEPFFYWLDIGEGKEVNLDRCPRNKLQSQCVKYLGPKERQEYEVVVESGRLVYKQSGVFVHTSDDSKWIFVLSTTKALYVGQKKKGSFQHSSFLAGGAITSAGRLVVKDGILKAIWPYSGHYLPTEENFREFISYLQENGVDLADVKRCPMDKDDEYPLLTKPDVTAASIAATKNVEKVAAATAAAAERLTETVSDDTDHAAVDEDGSMSEGEDEDADVPTATKEDEHKATSSSAASTTAAAAAAENHLPCRWSTGTGPRIRCVRDYPQDLQSRALEHVNLSPRLAAAGVAPATRKRDPVPSPRPSPGMILSPRLASVGFRPPVVALTLPDFKRSRLQ

SEQ ID NO: 142007 - protein, 86 aa, Oryza sativa
  Clone ID: PAT_MRT4530_43055C.1.pep
MAKPRLLALLLLLALSFSHGVVVATVAKARDVQLVKLVRRYVRWRSVFQAGIGMVSTVADYSDPKTNTNPRGGVLPPTNPNSPPAH

SEQ ID NO: 142008 - protein, 122 aa, Oryza sativa
  Clone ID: PAT_MRT4530_43056C.1.pep
VSVTNDIALKICSTTEQLYHSEEHLKALARFCAFQLAKILIDNGFSWDNLTMLRFYYSVEHPVTADVMSRVFSEAFAELEEGGVGSCTPDGVPIFNIVPVSASGCFTSLSDIISCELLASKV

SEQ ID NO: 142009 - protein, 486 aa, Oryza sativa
  Clone ID: PAT_MRT4530_43057C.1.pep
MAQPQKRVYEAWKGNNRFLFGGRLIFGPDAKSLLVSVSLIVVPVLVFCVFVARHLRHQFSTYNAGYAIPAVAVLFMIYVVATWYCILSTRLNTALLSFFCVHLQDPGIVPRASHPPEEEFAYGNPLNGGTPGRLQFPRVKEIMVNGMLVKVKYCDTCMIYRPPRCSHCSICNNCVERFDHHCPWVGQCIGQGLFGKARTPKFNSVHFVGALQPTPLLFRVELKLFGWVPALGERNYRFFFLFVSSSTLLCIYVFAMSALYIKFLMEEGYPTVWKALKHSPASLVLMIYCFIALWFVGGLTGFHSYLICTNQTTYENFRYRSDNRPNVYDQGCLNNCLGVFCSKTKPSKHKFRAYVQEEVRAPVVNFGRQMEEEPAGGPRAKVEDDLEIGSDLLQISQRRNYGDVDLEMGSQDCSEMEGIPNAKLAIGSESQIPAIGSEVRVRHSSWDRRSGNWDMSLDVIGRSASDVIRRSASGHEAAPPFQTETH

SEQ ID NO: 142010 - protein, 1067 aa, Oryza sativa
  Clone ID: PAT_MRT4530_43058C.1.pep
MRLLVQVSEARNLPAIDGGGGLSDPYAKLQLGRQRGKTRVAKRTLSPTWDEEFAFRVVDLKDELVVVVVDEDRYFSDDFLGQVRVPLSAVLDADNRSLGTQWYQLLPKSKKSKIKDYDMKRYYAAVLQIHPACAVLDGLPRDDDLASYSDKSTELQKGSSLPNIPIEIPTSVSGGDETEIIKEDRSNGVPSFVNRLYQFFSAKPKDAEASASAPPLTTGDGNSDILEETPSTSSELPDNQDYETGVTMSFDEQLKAFGSCHEGNEIPENLSGGVLIDQVYAVAPSDLNGLLFSPSSDFLQSLAEMQGTTGLEIQQWRLENDGEVLKRVVSYTKAPTALVKAVKATEDVSYLKADGDIYATLADVSTPDVPFGNSFRVEVLTCIMPGPELPDNEKSSRLVVSWRLNFIQSTMMKGMIENGAKQGLKDNYIQFSELLARNIRPVDSKDAAATDKVLSSVQPEQESDWKLAFRIFGNFTVVSSLVAFIYVFSHIILASPSIIQGLEFPGLDLPDSVGEVVVCGVLVLQGQRVLNMIARFIQAKRQREIFEFDAMEDPPSVMKINVYDFDGPFDEVESLGHAEVNFLKSNLSELSDIWIPLKGKLAQACQSKLHLRIILNNSRGTEVMKDYLDKMEKEVGKKIAVRSPHTNSAFQKIFSLPPEEFLINDFTCHLKRKMLTQGRLFLSPRIIGFYTNLFGHKTKFFFLWEDIEDIQVMPATLYSMGSPSLLIILHKGRGMDARHGAKQLDNEGRLKFHFQSFVSFNVAHKTIMALWKARSLTPEQKVQLVEEESEMKDLQNNESDSFLGIEDAKMSEVFSSTKPFDVSTLMSIFEGGPLEHQVMEKIGCMEYSVSPWESVRADAYQRQIHYKFDKRLARHEGEVMSTQQKSPLPDKNGWLVEEVMTLEGIPVGEYFNILHKIILIVSKFPPKLHMRYQLEQISSKPKACNVQVSIGIAWLKSCKNRKKIAQEFLNKRFGILPILFKIDHSKLWGFKILHCLELDGRESANKSPCRLPSRRTTQALRLTIYLSNAAHRKVRTTPSGVFDSTDQECRLPPASINPKRAAARLPG

SEQ ID NO: 142011 - protein, 690 aa, Oryza sativa
  Clone ID: PAT_MRT4530_43059C.1.pep
MDRWLRPAKQPAWSRPVSSSALARSQRLTAGKVFDTTPLRRLCVLHTVSWIVSSRQVARFSTGVDNANPGAHCRLSELFRPVRTETSCVIIGRALECGRWSESVELELEGLHVELDPFVVNKVLRGLLDSGMAVRFYWWAESRPGFYHNNFAIAYIISLLFVDDNFALLSEFLGRVRSQGVAFHRSLYRVLLAGYARAGKFDSVIETFDEMVTSGCREFGVDYNRFIGVMIKNCCFDLVEKYYNMALAKGFCLTPFTYSRWITALCQSNRIELVEELLTDMDKFGCFPDFWACNIYVHYLCGHNRLYDALQMVEKMTMKGTGPDVVTYTTVVSCLCDHRRFSEAVGLWEEMVRRGLKPDVVACGALIFGLCKNQKVDEAFELASRMLTLDIQLNVSIYNALISGFWRAGSIEKAYKTVSFMQRNGCEPDVVTYNILLNHYCSIGMTDKAENLIRKMEMSGVNPDRYSYNILLKGLCKAHQLDKAFAFVSDHMEVGGFCDIVSCNILIDAFCRAKKVNSALNLFKEMGYKGIQADAVTYGILINGLFGIGYSNLAEELFDQMLNTKIVPNVNVYNIMLHNLCKVGHFKHAQKIFWQMTQKEVSPDTVTFNTLIYWLGKSSRAVEALDLFKEMRTKGVEPDNLTFRYIISGLLDEGKATLAYEIWEYMMENGIILDRDVSERLISVLKLKNN

SEQ ID NO: 142012 - protein, 38 aa, Oryza sativa
  Clone ID: PAT_MRT4530_4305C.1.pep
DGAGRALRRPLSLPDSPRHDRGLPSCPRLWAVDQIHRD

SEQ ID NO: 142013 - protein, 663 aa, Oryza sativa
  unsure (1)..(663): unsure at all Xaa locations
  Clone ID: PAT_MRT4530_43060C.1.pep
MADPTTPADAQPEQAHAAEKPPAAPLTPEEAEAEAETAGSGDDEEYVSDPDDALLPEMRRREASDDEGSEEGRARIGSDRGDGDDGDXGPAVRRDYGARDRFQHADGPVRQSPRSGGTSLNSSGFAASTVNHGQSSVVRTQGGNGIPSNNQSTSSLHQNPRAPTHQQSHTSVVHQKSGQVQTQSRGRRRRMFGGRKLWDAKDDQAWVHDRFEEMNLHEEHYEDKRMSRGRFRGRGGGGRTRGTGHGFARGGKYRGYNEDINNNHQNRPQKVVRGRGPRRYEAVAKNNRDVVGFQRKQPARSRESAATSPPFYPSGASNPDFSVPAQRRDNMQAGGSNKVFPSSMKMDDNAKVQSGPAVRRDYGARDRFQHADGPVRQSPRSGGTSLNSSGFAASTVNHGKTNSQEAGRGSFMYGGAQVIGAAGAIGLAQGEQNFPGTPALLPVMQFGSQHPGGVGVPTVGMALPGYVAQQQMGMGNNEMTWESIANKGASPPRNDIVNEEVDQRQNKPRRQAQREAGFTEQRSLPASIEGFRMAARGLKKAFRWFPHSNEDHHHLEEDEGSSERRGLLRSHLEQVVPVTDLEDEPNASSSAVKEPKTVALKVSMHCHCCARKVEKQILKMEGVVSFKVELENKKVTVVGNVSPMEVLESICKVMKSAQILAAA

SEQ ID NO: 142014 - protein, 91 aa, Oryza sativa
  Clone ID: PAT_MRT4530_43061C.1.pep
MHGDESETRNASKLARLRSAQLYWPYIYADIIVDMVVTLICAVLQFDQDLVDPVLNVKFYYNTFAGHCLHNKVKGERCIKYLQVRRVWGIF

SEQ ID NO: 142015 - protein, 35 aa, Oryza sativa
  Clone ID: PAT_MRT4530_43062C.1.pep
LVHSWLKGINLFVGGSKDLFYLVVRVSVTSVVSLR

SEQ ID NO: 142016 - protein, 261 aa, Oryza sativa
  Clone ID: PAT_MRT4530_43063C.1.pep
MASLGANSHGRVLHTCTLSPKPVTALSRSMAAIPGHHVFQSPRARIAVRASTERATWLPGLDPPPHLDGTLPGDFGFDPLGLGEEPANLKWYVQAELVHCRFAMAGVAGILATDLIRVSGINNLPVWFEAGATKFDFANTTALFFVQLLLMGFAETKRYMDFINPGSQAEEGTFLGIEAALAGSQPGYPGGPLFNPLGLAKDIENADEAKLKEIKNGRLAMVAMLGFIVQASVTHVGPIDNLLTHLSDPFNKNIIHTLSSS

SEQ ID NO: 142017 - protein, 201 aa, Oryza sativa
  Clone ID: PAT_MRT4530_43064C.1.pep
MANRDTTSSCVTFVNAVAQLKLVVGAWACASRTPCSYSHVIIVSTLVPKIVRLHLPGIHLDDDAKATASLPLDTTIKPPPSWGYTRFYDGGMLFNQGHELREPLPFSKSALSFSPPRATRFLPSVATLSKLVEMKDWAPAIIASALFALLCPGGILQMPGRNRPVDFMNMKTSLASIVVHAVIYGLLLMLFLVILEAHLYI

SEQ ID NO: 142018 - protein, 439 aa, Oryza sativa
  Clone ID: PAT_MRT4530_43065C.1.pep
MRRGGAPRSSPTESRAASMLPLGGARGEGWIDMGSNLKYRAGLVLIVAVVLIWVTSAEVTQGIFTKYKQPFAITYLGASLMIIYIPLSFLKDFICNLLRRSSSSSRVSKVTNKSSFGGCAPLKNGEFQKMLEMESQKTIVINYTDVDIPVIEETKPLICGITEFDDVLKEQELSTKEIAMYGLYLCPIWFVTEYLSNAALARTSVASTTVLSSTSGLFTLFIGVLLGQDSINAAKVIAVFISMAGVVMTTMGQTWASDESEISNSGATQRTLLGDMFGLLSAMSYGLFTVLLKKFAGEEGEKVDVQKLFGYLGLFSLVLLWWLVWPLTALGIEPKFTIPHSAKVDEVVLANGLIGSVLSDYFCCAIFDMELLVRALSVVWTTPLVATLGMSLTIPLAMVADMIIHGRRYSAVYIFGSVQVFSGFVIANLADRFSRFLGL

SEQ ID NO: 142019 - protein, 116 aa, Oryza sativa
  Clone ID: PAT_MRT4530_43066C.1.pep
MAVGPKRGAALSPTRGRQNDVQRAGQRVSSGGRWRRGLWRERWSPSGGAEGVRQQEAAGRAATRATARRVQVAGHLARGVCEAAEGHGSGVPARHGEEPATTGARCDCARDDAALD

SEQ ID NO: 142020 - protein, 100 aa, Oryza sativa
  Clone ID: PAT_MRT4530_43067C.1.pep
ICCRENQWRLSRRWPPPATRCSRCRLSWWPRMFITAGVGEMEIDRVQEASTNSPMAVQLPPVLQPGKTTVPCDRSTVSPPHVLPPSYNVLTRRRKYVIYR

SEQ ID NO: 142021 - protein, 184 aa, Oryza sativa
  Clone ID: PAT_MRT4530_43068C.1.pep
TQVYVGTRRTYVVLSLHQKKALEINLHISRYTCTAVEKTNDIKLNSSCMCVHKSAKLSWIQQSSVNYVLPPFHNISHSSIVRIHMDVNKSRYINMRNAKMIYIMRWRKYMCEGLTVDRSQGTAVFPGCRAGGSWTAIGEFVDASCTRSISISPTPAVINIRGHHERRQREQRVAGGGQRRDKRH

SEQ ID NO: 142022 - protein, 1342 aa, Oryza sativa
  Clone ID: PAT_MRT4530_43069C.1.pep
MSNTGDKEKETPVNTNGGNTASNSSGGLFLGYNLITLFQLEVLLLMFIAMSTLCHYVIVDAYSTLSMLMLITFTTITGSNPIVNIMFIILLFWIKICRIMTKFPTIQKPDRSFSVVGFAAALKPHAFDGSNYKRWKARALLWLTAMQCFYVSRGKRSEPPLSPEEEAKFEASDCLFRGALISVLADNIVDVYMHMPSGKDMWDALEAKFGVSDAGSELYVMEQFYDYKMVDDRSVVEQAHEIQMLAKELENNNCELPDKFVAGGIIAKLPPSWSDFATSLKHKRQEFSVPDLIGSLGVEEKARAKDVRGKKVEGGSSANMVQKKNPHASHNNKKVKPDVKPKAATNFKKKSKGKAKGDCFVCGKSGHWAKDCPKRKDRKSANMIISEGGGTSGYGKILPTVLSVFHSPDWWVDTGANIHVGRGSSLLMGNGSLAAVHGVGTVDLKFTSGKTVQLKNVQHVPSIKKNLVSGSLLCREGFRLVFESNKCVVSKYGTFVGKGYDSGGLFRFSLNDMCNNHNAVNHISENDESNVWHSRLCHVNFGCMTRLANMSLIPKFTLVKGSKCHTCVQSKQPRKPHKASEARNLAPLELVHSDLCEMNGVLTKGGKKYFMTLIDDCTRFCYVYLLKTKDEALHFFKIYKAEVENQLERKIKRLRSDRGGEYFSNEFASFCEEFGIIHEMTPPYSPQSNGVAERKNRTLTEMVNAMLDTAGLSKEWWGEAVLTACHVLNKIPMKHKEVTPFEEWERKKLNLSYLRTWGCLAKVNVPIAKKRKLGPKTVDCVFLGYAIHSVGYRFLIVNSGVPDMHVGIILESRDATFFENEFPMKYTPITSSKETVMPHEHFAPIEHNDQTPEENPEEDNIVDTRKSKRQRVAKSFGDDYIVYLVDDTPRTIEEAYSSPDADYWKEAVRSEMDSIMSNGTWEVVERPYGCKPVGCKWVFKKKLRPDGTIEKYKARLVAKGYTQKEGEDFFDTYSPVARLTTIRQAPKQWHEKFDTTLTSAGFVVNEADKCVYYRYGGGEGVILCLYVDDILIFGTSLNVIEEVKDYLSKSFEMKDLGEADVILNIKLQRGDEGGITLVQSHYVDKVLSRFGYSDCKPAPTPYDPSVLLRKNRRIARDQLRYSQIIGSLMYLASATRPDISFAVSKLSRFVSNPGDDHWQALERVMRYLKGTMSYGIHYTGYPKVLEGYSDSNWISDADEIKATSGYVFTLGGGAVSWKSCKQTILTRSTMEAELTALDTATVEAEWLRELLMDLPVVEKPVPAILMNCDNQTVIIKVNSSKDNMKSSRHIKRRLKSVRKQKNSGVIALDYVQTARNLADQFTKGLPRNVIDSASREMGLIPT

SEQ ID NO: 142023 - protein, 104 aa, Oryza sativa
  Clone ID: PAT_MRT4530_4306C.1.pep
HPVLLGCPRTRRNAHPPLANRRRPHPLKKKKRKRREVEGPPVNLFRIELSKSRPVNFSAQISGRNGPDSPRQVRPNLKFRDTDGSSVVDTASDGKSTAEISSWL

SEQ ID NO: 142024 - protein, 847 aa, Oryza sativa
  Clone ID: PAT_MRT4530_43070C.1.pep
MATVCPCARLPTGMSSVYLVVSECVALAPASETTRCCDVCTDGRAIRFLESVRRDYSLFVNIYFTFTNMSNTGDNGNTGYKEKEAPVNINGGNTASNSNGGPFLGVLADNIVDVYMHMPSGKNMWDALEAKFGVSDAGSELYVMEQFYDYKMVDDRSVVEQAHEIQMLAKELENNNCELPDKFVAGGIIAKFPPSWSDFATSLKHKRQEFSVTDLIGSLGVEEKARAKDNRGKNIEGGSSANLVQNKNPHASHNNNKKKVKPDVKPKATTNFKKKGKGKAKGDCFVCGKPGHWAKNCPDRKDKKSANMVISEGGGTSGYGYFLPTVLSVFHSPDWWVDTGANIHVGRGSSLLMGNRSLAAIHVFDIAVYLLKTKDEALHYFKIYKAEVENQLERKIKRLRSDKGGEYFSNEFTSFCEEFGIIHERTPPYSPQSNGVAERMNRTLTKMVNAMLDTAGLSNEWWGEAIFTACHVLNKIPVKHKEVTPFEEWERKKLNLSYLRTWGCLAKVNVPIAKKRKLGPKTIDCVFLGYAIHSVGYRFLIVNSGVPDMRVGTITESRDAIFFENEFPMKNTPSTSSLEPVLPHEHFAPIKHNEQTLEGNPEEDSIVDTRKSKRQRVAKSFGDDYIVYLVDDTPRTIEEAYSSPDADYWKEAVRIVERPYGCKPVGCKWVFKKKLRPDGTIEKYKARLVAKGYTQKEGEDFFDTYSPVARLTTIRVLLALAASHGLLVHQMDVKTVFLNGELEEEIYMDQPDRYVLKGQEGMVCKLLKSLYGLKQAPKQWHEKFDPTLTSAGFVVNEADKCAYYRYGRGEGVILCLYVDDILIFGTSFNVIEEVKDFLSKSFEMKDF

SEQ ID NO: 142025 - protein, 1052 aa, Oryza sativa
  unsure (1)..(1052): unsure at all Xaa locations
  Clone ID: PAT_MRT4530_43071C.1.pep
MRKEKIPHQAPFAIQAAQLLGRAIGAGLFAITPAGERGMCCKAIKLGNARVFPVTTFEPPVSPEEKVKFEALDCLFRGALISVLADNIVDVYMHIPSRKDMWNALEAKFGVSDAGSELYVMEQFYDYKMVDDRSVVEQAHEIQMLAKELENNKCELPDKFGAGGIIAKLPPSWSDFATSLRHKRQEFRVSDLIGSLGVEEKARAKDNRGKKVEGGSSANMVQKKNTHASHNSKKVKSDVKPKARTNFKKKGKGKAKGDCFVCGKSGHWAEDCPERKDRKSANMVISEGGGTSGYGKILPTVLSVFHSPDWWIDTGANIHVGRGSSLLMGNGSLANIHVWVVHGVGTVDLKFTSGKTVQLKNVQHVPSIKKNLVSGSLLCREGFRLVFESNKCVVSKYGTFIGKGYDSGGLFHFSLDDMRNNNNVVNHISENDESNVWHSRPCHVNFGCMTRLANMSLIPKFTLVKGSKCHTCVQSKQPRKPHKASEARDLAPLELLHSNLCEMNGVLTKGGKKYFMTLIDDCTRFCYVYLLKTKDEALHYFKTYKAKVENQLERKIKRLRSDRGGEYFSNEFTSFCEEFGIIHERTPPYSPQSNGVTERKNRTLTEMVNAMLDTARLSQEWWGEAVLTACHVLNKIPMKHKEVTPFEEWERKRLNLSYLRTWGCLAKVNVPIAKKRKLGPNTVDCVFLGYAIHSVGYRFLVVNSEVPDMRVGTIIESRDATFFENEFPMKNTPSTSNHETVIPHKHFAPIEHNDQTPEGNPEEDNIVDTRKSKRQRVAKSFGDDYIVYLVDDTPRTIEKAYSSPDADYWKEAKKLRPDGTIEKYKTRLVAXGYTQKEGEDFFXDTYLPVARLITIRVLLVRAASHGLLVHQMDVKTAFLNGELEEEIYMDQQDRYVLEGQVGMVCKLLKSLYGLKQAPKQWHEKFDTTLTSTGFVVNEADKCVYYRYGGGEGVILCLYVDDILIFGISLNVIEEVKDFLSKSFEMKDLGDADVILNIKLLRGDEGGIAQSHYVDKVLSRFGYSDYKPAPTPYDPSMLLRKNRRIARDQLRYS

SEQ ID NO: 142026 - protein, 504 aa, Oryza sativa
  Clone ID: PAT_MRT4530_43072C.1.pep
MDAAAVAAAASSQQPAAAPPLAGRVAIVTGASRGIGRAIAAHLSALGASVVVGYASSAAKADALAAGLPRAVAVRADVADEAGVRSLFDAAESAFGAGAPHIVVANAAVLDDKYPTLVDTATADFDRTFAVNTRGAFLCLREAAHRLPRGGGGRIVAITSSVVGSHPTGYSAYTASKAAVEAMVRTMAKELKGTRITANCVAPGATATDMFFAGKSEERVDEIKATNPMGRLGEAGDIAPVVGFLCTDAAEWVNGQVIRVNGGGCRSWRACTASVDFDYMHAAIARASTPPLPLQPANERACRCRRRQPTHACAAAFSPICAAAPEDSDMVDRKEEAVELEDAAHRPHVEVREADEHPRRVRPPLEALRQHAVRDGVCVPRAAYVERSFLVESPPGSPPGTGDRRGLMQVELLRPVAAAEEEGFKVRMLDECGETWEEADDIGDVAVVVDASGAGAASTGECPRLRLSTMYFAVDPAGKTHIITPVLRRSLPRPRRLASPVVAT

SEQ ID NO: 142027 - protein, 1941 aa, Oryza sativa
  Clone ID: PAT_MRT4530_43073C.1.pep
MAAELVGEGDGGRRRRSGVEAAGSNGWRCGGGGCRWIGQAAVGWRRRRRLVVGGEAPDLRPPNVLRLAVVRQERRRRLAIGTRRRKWPTVRGEAAVAGSVPCKNERQQLQAGAAAAAAAGGISIEYPFCVEPGCYHPGFNLTCNHSYSPPRLFLGDGTVQVLEIAIPQATVRINSGRMVFNSTGNHAVNRSLLDQVGRPYFVAASNRIALLSCNARVDVRAAGRNNNKTSTKLLSSCTAICPTDDGGGATTILDIGPEGPCSGIGCCETSMLLAGSSTAAYSIQVQNLQEQAVVLNRTDDLVYLVDERFNYTLDMSFGYSSPEELPARLDWYINSSSACPLPASAPECRSAHSYCDSTYDNKAYICRCSEGYEGNPYVPDGCHDTDECSSGYCSYGECRNTPGSFICNCPRGYEGNPSPKDGCKARDLGLRIGLGVGGGTILLLLALSAPFISSKMKLRKMKRMKETFFRQNHGLLLGRLVSQNADIGQRMIMTLQELEKATDNFDKSREIGGGGHGVVYKGILDLQVVAIKKSRIVVKREIDDFINEVAILSQVNHRNVVKLLGCCLETEVPLLVYEFISNGSLDHHLHVDGPISLPWDDRIRIALEVARALTYLHSATTIPIFHRDIKACNILLDENLISKNCSLEKGPCIGLITVKVLCYILPRFIDKMSYKATRNRMPKPEGEIKATNLRAFNSSSVEIPSGVDFELGNTTTGTVSSSLPWDDRLRIAFEVVRALSYLHSAASMPIFHRDIKYSNILLDDSLTAKLLTRKKPIGGTFDNGDGLVSHFVSLVSKGNLYDIIDSQVREEEDGEVQEVATLAATCTKFKGEERPTMREVEMENDLQENRSAMKKCPDLKIERRFLGSARRDYSLFVNIYFTFTNMSTTGDNNNTGDKEKEPLVNTNGGNTASNSSGGPFSGYNLLTLLPFVLRFLQLFIAMSTLRSLIYVDAYSILSMLMLYTSSTITGSTQITNVMFIILLFWIKICRIMTKFPTIQKPDRSFSVVGFAATLKPHAFDGSNYKRWKARALLWLTAMQCFYVSRGKRSEPPLSPEEEAKFEASDCLFRGALISVLADNIVDVYIHMPLGKDMWDALEAKFRVSDAGSELYVMEQFYDYKMVDDRSVVEQAHEIQMLAKELENNNCELPDKFVAGGIIAKLPPSWSDFTISLKHKRQEFNVTDLIGSLGVEEKARAKDNWGKNIEGNSSANLATTNFKKKDKGKGKGDCFVCDKPGHWAKNCPDRKDKKSANMVISEGGGTSGYGNFLPTVLSVFHSPDWWVDTGANIHVGRGSSLLMGNESLAAVHGVGTVDLKFTSGKTVQLKNVQHVPSIKKNLVSGSLLCRDGFRLVFESNKCVVSKYGTFIGKGYDSEGSKCHTCVQSKQPRKPHKASEARNLAPLELVHSDLCEMNGVLTKGGKKYFMTLIDDCTRYCYVYLLKTKDEALHYFKIYKAEEWWGEAIFTACHVLNKIPVKHKEVTLFKEWERKKLNLSYLRTWGCLAKNEFPMKNTPSTSSQEPVLPHEHLAPIKHNDQTPEENPEEVNIVATRKSKRQRTAKSFGDDYIVYLVDDTPRTIEEAYSSPDADYWKEAVRSEMDSIMSNGTWEVVERPYGCKPVGCKWVFKKKLRPDGTIENLNVIEEVKDFLSKSFEIKDLEVADVILNIKLLRGDEGGITLVQSHYVDKVLSRFGYSDCKPAPTPYDSNVLLRKNGRIARDQLRYSQIIGSLMYLASATRPDISFAVSKLSRFVSNPGDDHCQALERVMRYLKGTISYGIHYTGYPKILEGYSDSNWISDADEIKATSGYVFTLGGGAVSWKSCKQTILTRSTMEAELTALDTATVKAEWLRELLMDLPVVEKPVPAILMNCDNQTVIIKVNSSKDNMKSSRHVKRRLKSVRKQKNSGVIALDYVQTAKNLADQFTKGLPRNVIDSASREMGLRPT

SEQ ID NO: 142028 - protein, 185 aa, Oryza sativa
  unsure (1)..(185): unsure at all Xaa locations
  Clone ID: PAT_MRT4530_43074C.1.pep
MRKTTATRMTGRRRPWSSEMLRIDCAWKSVKPTSIPAVCVHREKLYANTRYGMVYAFAELXYVERSFLVESPPGSPPSTGDRHGLMQVELLRPVAAAEEEGFKVRVLDKCGETWEEADDIGDVVVVVDASGAGAASTRECPRLRLSTMYFAVDPTGETRVCTYSLAAAGSYVSPTSPAVQFKSKD

SEQ ID NO: 142029 - protein, 68 aa, Oryza sativa
  Clone ID: PAT_MRT4530_43075C.1.pep
QRRTARPLRERRRPGRRERERPSCRRRCRQPGRGRRARGPPGQAAGHCPAGKGEQKREAASPPQSPRA

SEQ ID NO: 142030 - protein, 696 aa, Oryza sativa
  unsure (1)..(696): unsure at all Xaa locations
  Clone ID: PAT_MRT4530_43076C.1.pep
AAVRWEAAGGGGAXPPPDPAGGEAGVRRREAGATGFINGDNYASQSSGGPFSGYNLSILLFTALILIVFLFSAMFSMHCCMMDVYAYYILSMIRSLHLFNNCTSLFPVKVMIIILIIWIKICXIVTIFPTIQKPDRSFSVVGFAASLKPHAFDGSNYKRWKARALLWLTAMQCFFVSRGKLSKPPLSPEEEAKFEAADCIFRGALISVLIDNIVDVYMHMPXRKEMWDALEAKFGVSDAGSELYVMEQFYDYKMVDDRSVVEQAHEIQMLAKELENNRYELPDMFVAGGIIAKLPPFWSDFATSLKHXRQELSVTDLIGSLGVEEKARAKDNRGKKVEGSSSTNLVXKKNPQASHNNKKVKPDVKPKATTTFKKKGKGKAKGDCFVCGKPGHWAKDCPKRKDRKSANMVISKGGGTSGYGKFLPTVLPICHSPDWWVNTGVNIHVCADISLFSSYQVGRGSSLLMENGSLAAVLGVGTVDLKFTSGKTVQLKNVQHVPSIKKNLVSGSLLCRHDFRFVFESNKCVVSKYGTFIRKCYDSGGLFRFSLDHVSNDDESNVWHSRLCHVNFGCMTRLANMSLIPKFALVKGSKCHTCFQSKQPRKPHSASEARNLAPLELVHSDLCKMNSVLTKGGKKYFMILIDDCTRFCFVYLLKTKDEALHYFKIYKAEVENQLERKIQRLRSDRGGDRLTDTFRF

SEQ ID NO: 142031 - protein, 300 aa, Oryza sativa
  unsure (1)..(300): unsure at all Xaa locations
  Clone ID: PAT_MRT4530_43077C.1.pep
MEQILREKLSSTKAALLVLDDVWEDKARDQLEKLFRVLKASKTRSKILLTTRTQSVQLITGCKELKLRLHELDDDENLDLFWRYAFAGQEVGAEDYLELRKIGAEIAKKLGGTPMTTGIDFFKICVILEQQQQGECKRLTNPEDSRDVKSSVRHISIAAPDPAPVGIGSGAAPVGVGSGAAPVGGDAPPPPIAAAATPDMAMSSRAGGTPQKPDHPPTRCRSQAKVWFRRHCXLPISRARKRSEAGKREQLRRGEGETNTGKEAKKSDRTRGLLIYQEKERGRAVAEGIVGTWVSGCKRI

SEQ ID NO: 142032 - protein, 38 aa, Oryza sativa
  Clone ID: PAT_MRT4530_43078C.1.pep
FSLVPFFYAYIEIICNMMFTTVNIEYWTQCSMETHFQC

SEQ ID NO: 142033 - protein, 979 aa, Oryza sativa
  Clone ID: PAT_MRT4530_43079C.1.pep
MSQVGDSLVSEYSGALISVLADNIMDVYMHMPSGKDMWDTLEAKFGVSDAGSELYVMEQLYDYKMVDDRSIVEQAHEIQMLAKELENNNCELPDKFVAGGIIAKLPPSWSDFATSLKHKRQEFSVSDLIGSLGVEEKTRAKDNRGKKVEGGSSANMVQKKNPHASHNNKKVKPDVKPKATTNFKKKGKGKAKGDCFVCGKSEHWAKDCPERKDRKSANMVGRGSSLLMGNGSLAAVNGVVTVDLKFTSGKTMQLKNVQHVPSIEKNLVSGSLLCREGFRLVFESNKCVIFKSGTFIGKGYDSGGLFRFSLDDMCNNNNVVNHISENDESNDEALHYFKTYKAEVENQLERKIKRLRSDRGGEFFSNEFTSFCEEFGIIHERTPPYSPQSNGVAERKNRTLTEMVNAMLDTAGLSKEWWGEAVLTTCHVLNKIPMKHKEVTPFEVWERKKLNLSYLRTWGCLAKVNIPIAKKRKLGPNTVDCVFLGYAIHSVGYRFLIVNSRVPDMRVGTIIESRDATFFENEFPMKNTPSTSSQETVIPNEHFAPIEHNDQTPEGNPEEDNIVDTRKTSHGLLIHQMDVKTAFLNGELEKEIYMDQPDGYVLEGQEGMVCKLLKSLYGLKQAPKQWHEKFETTLTSAGFVVNETDKCVYYRYGGGEGLILCLYVDDILIFGTSLNVIEEVKNFLSKSFEMKDLGEADVILNIKLLRGDEGGITLVQSHYVDKVLSRFGYSDCKPAPTPYDPSVLLRKNRRIARDQLRYSQIIGSLMYLASASRPDISFAVSKLSRFVSNPGDDHWQALERVMRYLKGTMSYGVHYIGNPKVLEGYSDSNWISDADEIKATSGYVFTLGGGVVSWKSCKQTILTRSTIEAELTALDTMTVEAEWLRELLMDLPMVEKPVPAILMNYDNQTIIIKVNSSKDNMKSSSNIKRRPKSVRKQKNSGVIALDYAQTAKNLTDQFTKGLPCNVIDSTSRGMGLIST

SEQ ID NO: 142034 - protein, 176 aa, Oryza sativa
  unsure (1)..(176): unsure at all Xaa locations
  Clone ID: PAT_MRT4530_4307C.1.pep
MAKNVMRLAILAMAQLVLLWPATTAGQRAVLPSKCGDVDIPSPFGVGDEXAWPGPDNFTVXCKHSFSPPRXPNTXNIEIMNISVAAGEMRVYSPVVSQCYNSSNTTDSDRFELLQLNVTDTPFLVAPERNEFTAIGCATLGWLQGRDDGNYLTGCISTCASLETGTDDGEPCTGLG

SEQ ID NO: 142035 - protein, 177 aa, Oryza sativa
  Clone ID: PAT_MRT4530_43080C.1.pep
MQCFFVSRGKLSEPPLSPEEEAKFKAADCLFPGALISVLADNIVDVYMHIPLGKDMWDALEAKFGVSNAGNELYVMERFYDYKMADDRSVVEHAHEIQMMPKKLENNNCELPNNMAVGDFVSIYTQLNIELAEQAAQWPVWPASSDMTGEHRASSWTATPAVKDSAEAAAAWRVGRC

SEQ ID NO: 142036 - protein, 53 aa, Oryza sativa
  Clone ID: PAT_MRT4530_43081C.1.pep
AVVRAFIATSLLRCYYGDIVCLTKNKRERDRHLEGLHKKAKARGASLIVGNDN

SEQ ID NO: 142037 - protein, 60 aa, Oryza sativa
  Clone ID: PAT_MRT4530_43082C.1.pep
SHHSSLYSNLIHHSLIHILIHHHTHHSTTIHTPSYYSCSDKSQLILIFPKYSAQQSSRRR

SEQ ID NO: 142038 - protein, 1394 aa, Oryza sativa
  unsure (1)..(1394): unsure at all Xaa locations
  Clone ID: PAT_MRT4530_43083C.1.pep
AAKSFPGSVHLHSQVYRTSRCFWNSVRLRTCTGRRAIKFLGSASSATAPVLRDYYCYIDAFVNMSTEIGDKEVNDINGGNTASKSSGGTFLGSFSVVGFAASLKPHAFDGSNYKKWKARTLLWLTAMHCFFVSRGKPSEPPLSPEEEAKFEASDCLFRGVLISVLVDYIVDVYMHMPSGKDMWDALEAKFGVSDAGSERYVMEQFYDYNMVDDRSVVEQAHEIQMLAKELGNNNCELPDKFVADGIIAKLPLSWSDFATSLKHKRQEFSITDLIGSLGVEEKARANDNRGKKIEGGSSANLVQKKNPHTSHNNNKKVKLDVKPKATTNFKKKGKGKAKGDCFVCGKPGHXAMDCPERKDKKSANMVISEGGGTLWYGKFLPTVLSVCHSPDWWVDTGANIHVCADISLFSSYQVGRGSSLLMGNGSLVAVHGVGTVDLKFTSGKIVQLKNVQHVPSIKKNLVSGSLLCRDGFRLVFEYNKCVISKYGTFIGKGYDSGGLFRFSLNDMCNKVVNHVSDDNDESNVWHSRLCHVNFGCMTGLANMSLIPKFTLVKGSKCHTCVQLKQPRKPHKASEARNLAPLELVHSDMCEMNGVLTKGGKKYFMTLIDDCTRFCYVYILKTKDEALHYFKIYKAEVKNQLERKIKRLRSDRGGEYFSNEFTSFCEEYGIIHERTSPYSPXSNRVAERKNRTLTEMVNAMLDTAELSKEWWGEAILTACHVLNRIPTKHKEVTPFEEWERKKLNLSHLRTWGCLAKINVPIAKKRKLGPKTVDCVFFGYAIHNVGDRFLIVNSGVPDMRVGTITESRDATFFENEFPMKNAPSTSSQEPILSPEHFVPIKHIDQTLEENPKEDNIVATRKSKRQRTAKSFGDDYIVYLVDDTSRTIEEAYSSPDADYWKEAIRCEMNSIMSNGTWEVVERIYGCKLVGCKWVFKKKLRPDGTIEKYKAMLVAKGYTQKEGEDFFDTYSPVARLTTIRVLLALAASHGLLVHQMDVKTAFLNGELEEEIYMDQSDGYVLEGQEGMMCKLLKSLYGLKQAPKQWHEKFDNTLTSAGFVVNEADKCVYYRYGGGEGVILCLYVDDILIFGTSLNVIEEVKDFLSKSFEMKDLGVADVILNIKLLRGDEGGITLVXSHYVDKVLSRFGYSDCKAAPTPYDPSVLLRKNRRIARDQLRYSQIIGSLMYLASATRPDISFAVSKLSRFVSNPGDDHWHALERVMRYLKGTMSYGINYAGYPKVLEGYSDSNWISDADEIKATGGYVFTLRGGVVSXKSCKQTILTRSTMEAELTALDTATVEAEWLRELLMDLPVVEKPVPAILMSCDNQTVIIKVNSLKDKMKSSRHVKRRLKSVRKQKNSGVIALDYVQMAKNLADQFTKGLPRNVIDCASRKMGLRPT

SEQ ID NO: 142039 - protein, 66 aa, Oryza sativa
  Clone ID: PAT_MRT4530_43084C.1.pep
AHPPWLDSQWYSESTSMKGEFMPSSFTIMSASGQRREKAIIPERRYYPSIRHSEQVPVVPEHHYLR

SEQ ID NO: 142040 - protein, 54 aa, Oryza sativa
  Clone ID: PAT_MRT4530_43085C.1.pep
MQRRRRRRCVRRLAAVLSSAFGVVGGGADDGKVPRARGGLVSGEKSGGSASIVA

SEQ ID NO: 142041 - protein, 65 aa, Oryza sativa
  Clone ID: PAT_MRT4530_43086C.1.pep
TYYVSSKDNICQAIHLKRSRENTTVGGLHSHRCYNNFGYFKGYTINPKLKRSLVAKNLRNQIAGH

SEQ ID NO: 142042 - protein, 285 aa, Oryza sativa
  Clone ID: PAT_MRT4530_43087C.1.pep
VVVVVAVWSCTGEIERKGWFVGWIPATAGVSSRRVEGTTSSTPDAAAVAWTRRRSPRCCGSRRRRRGSVVALARFMACRSSRRRRPSCRPCLRRRRISGRRRFPVEVERGERRPRRRRRRRRTACRSLPSRSSPASPRRPSPGHPRARGSTTSSPPPPPSAPPLPPPAAGTRPRSRPTSSARSRRSTTLPRSRLSPRPPRPRRRRPTLPLQPPPPPQPRRRWRHPATGTTSRRRRPSAAAARRRPSRPAPARRPTQRLNWSTMRRARRSPSPQRRHLRRRRRRRR

SEQ ID NO: 142043 - protein, 192 aa, Oryza sativa
  unsure (1)..(192): unsure at all Xaa locations
  Clone ID: PAT_MRT4530_43088C.1.pep
MGAGALGVVAMVAAAVVVAMAGVNSEGDALSALRRSLRDPGGVLQSWDPTLVNPCTWFHVTCDRDNRVTRLDLGNLNLSGHLVPELGKLDHLQYLELYKNNIQGXTIPSELGNLKNLNKLWDLYKKATFLGTIPPNTFGKLIVPFVDVSSNDLCGTIPTSGPFEHIPLSNFEKNPRLEGPELQGLAVYDTNC

SEQ ID NO: 142044 - protein, 67 aa, Oryza sativa
  Clone ID: PAT_MRT4530_43089C.1.pep
RSMSDLSAQIEESGYETATAADHWMSKGKSADRPWVWSTTDDYGYDAVKAMTQHNGGAPAGGKPGPD

SEQ ID NO: 142045 - protein, 334 aa, Oryza sativa
  Clone ID: PAT_MRT4530_4308C.1.pep
MPRSHHLLAAAVAAVVVVVMGWSARPCEASLYQPPPPAMAYHDGAVLEGAVPVSVLYYGAFPPHHRAVVADFLMSLSPRGRDHQPHTFGAPGPAPPPTVARWWGTVERYVRKAGRGGGAGVARVVLASQVDDEGCSLGRRLSRAQVERLAARLGVAPGGVAVVLTAADVAVEGFCSSACGAHGSSAPGGGAVHVWVGDASAQCPGRCAWPFHAADYGDADAGRHRRAHGHDVALRAPNGDAGVDGVVINLAALMAGAVTNPYGRGYFQGDAAAPVEVAGACPGVYGRGAYPGYPGAVRVDAATGAGYNVVGRNGRRYLVPALVDPDNYSCLIMT

SEQ ID NO: 142046 - protein, 157 aa, Oryza sativa
  unsure (1)..(157): unsure at all Xaa locations
  Clone ID: PAT_MRT4530_43090C.1.pep
HHPTEVNQQHSNIGAQFKVHIHSSHHHPFVPCRVRHTSNSFPDLQATPRAGHPXACSLRQMLGFANLLFRPEERTXSCNIVWMGVLGGTPXKLGDVQYLNMYAPLVPNVPTGSPFALSSCRXLWLDPIXLLSELVLVVDTCWIAXLPVGSPRXGAGE

SEQ ID NO: 142047 - protein, 1270 aa, Oryza sativa
  Clone ID: PAT_MRT4530_43091C.1.pep
MSAPTDLALCFGTSAPSGLALRDDSFDLNRTLFYDEPNYEAFDDEGAMKSQSVKSLTVEEVIESQGMGVDVNMQKKEAVDANEGRSQESEKVEINVELQKEEAVEANKASRLESEGVEVNVELQKEEAIEVNEARSQAVPIVGNHVDDDNEVADGSMGGGGEERTTDAQLASLVRFCFRDKIYTRRECEETLLMNGLSVDLLHEHSEEYDNTHEEEGYEVEYAVDSDDDHPVAKMSQEEREVFEKLVGRNPEVVQFEDVSNSELAVVDGGVTYNGIIDAMGEEPKKGLEFKSLELLQIWLQSYSISVHRPFHVKHSNTSKKYTVACIEESCEWQVRARKTKDGRWRVTGVGKEHTCCSTEASGKHLQLTSKFIGNRLQPFVRAEPTLTPATIVEAVEAIWHYRPSYGKAWRAKQVAMKNIWGDWDEAYVRLPTLLNAIKAKNPTMHYVVEPHPERSRPVDGVMRRVFGRAAWIFGQCVEAFNHMRPVIAIDGTFLTEKFQGTLLTAIGSDAGLQLVPLAFALMKDLERICQINEKSEFEKEVKHLIDFLEPRPKKWLLDIMPQRHKWARSCDPGGRRFGFMTSNMVESFNNVLRGIRRLPVTAIVAYTFSKCNTWFVDRHKFVTDALHKHERWPKRIKKELDIQKARTLGQRTTCFDFPTAKYEVTEQGGVTEGGVQWGGRHYTVVATANTCTCQYPELHHMPCSHMFTVCRLRRMDAEAPPRICFEASNIALQRTYSPRFEPYLDPTQWPSYDGEVFVPDLSKMIVTPGRRRTKRFINDMDRGYKGIGLCRSQKPNDGNSERVVPNRMAHALALEPQYEERHRARGIAEGGGLKPLQIRGHLAGDMPFDNRYIPRLRAAKLLPFITMAQRPMPVYNGPALTALVDRWRPETHTFHLPCGELTVTLEDVAMNLALPIQGRAVTGDTSSGNWRLTVANYLGVEPPEAPAGHRLTKTSGVVWQPYEHIGIDINAMCYIPEDMKFLRCPLICFYAVEWQLIHRVLRQFGLRHPIPEPFPTGLDLHKLDRRKNKKITDWHAHHLHLIERWDNTTANVLPHGVEHNKTYFDEYLAWLMRNYRLFLRPAWTLADIATDPEDVEEMNEYDTHTRAGATVEYGPVHDRVARELMRSVNDAGVALGTPAGSENEVGILRSALQRLKQQSRMLAARLGCRSTDAVDPQPRLTRTQAGETSQQRAEEEGEEEHDEGEEEHEEGEEGDGQSDEEEEEQPEETGSSQLAGAPQPSQPSQGRPQRKRAPVDRYTPSTSGRRGRH

SEQ ID NO: 142048 - protein, 392 aa, Oryza sativa
  Clone ID: PAT_MRT4530_43092C.1.pep
MERHLFLHGGNTQGDSGLVLSTDAKPRLKWTPELHQRFVDAVNQLGGAEKATPKTVMRLMGIPGLTLYHLKSHLQKYRLSKNLQGQANVGTTKNALGCTGVADRIPGTSALAMASASAIPQAEKTIQIGEALQMQIEVQRQLNEQLEVQRHLQLRIEAQGKYLQAVLEQAQETLGKQNLGPASLEDAKIKISELVSQVSNECLSNAVTEIRESSSIHRLEPRQIQFVESSANNCLTAAEGFKEHRLQNHGVLKAYDDSTLFCRKQSQDQESQYSLNRSLSERRMGHLYSGKQYHKSEGSDSDTEVLHEYITPQKNGGGSTTSSTSGSKEINVEKLYLDEPSCKRQTVDYQRESKLLDFDQQSSGKNLDLNTHNIDDNDQGYRHFDLNGFSWS

SEQ ID NO: 142049 - protein, 971 aa, Oryza sativa
  Clone ID: PAT_MRT4530_43093C.1.pep
MARLGLAVCAVSFHLCLLLSSTSSLRLNPTTEDTANHGRRTAYHFQPAKNWQNEQSNSGSNFEGMSVKQLIFGGKPSFEELVCHTKDVLGWSNQSIAIQGRYDVGAGPISHKDNSFDLNRTLFYDEPNYEAFDDEGAMKSQSVKSLTVEEVIESQGMGVDVNMQKKEAVDANEGRSQESERVEINVELQKEEAVEANKARGWINGGRWRRAYNGCSISIHEVVQFEDVSNSKLAVVDGGVTYNGIIDAMGEEPKKDEHIGIDINAMCYIPEDMKFLRCPLICFYAVEWQLIHRVLRQFGLRQPIPKPFPTGLDLHKLDNKKNKKITDWHAHHLHLIERWDNTAANARELMRSVNDAGVALGTPAGSENEVGILRSALQRLKQRSWMLAARLGCRSTDAVDPQPRLTRTQAGETSQQRAKEEGEEEHDEGEEEHEEGEEGDGQSDEEEEEQPEEIGSSQLAGAPQPSQPSQGRPQRKRVPVDRYCLTSAPNRMALRLYTEGNGRHALSADAVGAEMFNLSAIGPGAEVGVQICNYVRFVFINESTFTLEATFFKSTSTRSNGGDESSSPPSPIDTWTPQRPLYHNGMYHLFYKYNPHSALWDIGNLSWGHFVSGDLLNWAALDTALDPTSPFDANGCWSGSATILPGGLPAILYTGIDAGKEQVQNVAFAKNPSDPLLREWEKPAYNPVIALPPDVPGDNFRDPSTAWLGRDGLWRIAVSAEVDGVASTLVYRSEDFVRWERNAAPLHASRAAGMVECPDMFPVAENGEDGLDTSTNGAGGVRHVLKLSVMDTLQDYYMVGTYDDAADAFSPAEPERGDDCRRWRRLDYGHTFPRKMWIAKDGKQLLQWPIEEIETLRRKRAAGLRRGTRLGAGAVQEIVGVASSQADVEIDHSVVESFGGGGRACITARVYPEHVATSSSHLYVFNNGSDDVKVAKLEAWDLATATVNVVVGDHHGLAAPALELEPTRTTQ

SEQ ID NO: 142050 - protein, 1632 aa, Oryza sativa
  Clone ID: PAT_MRT4530_43094C.1.pep
MPKLELLIAVHRDIAAAAESLDYLIRAFTTAQHPPPAPGSPISLESVRLRLTACVLDDADEDDDGAYHFAGDELLRVTSLQHAGNALLHKQLGGGIVEDKVRGLGELLLGLATSMITEGPIPSVLFDDVPVQHPPLSKAKLLQFMQQAKRQILDVWDARISGPNFDGMRGQTAPVHAAGEAPNLDPDLSAKVDGAEVEHLSANRIGAEYLTALRRTAQLVASKLDRTDCRDDSFDLNRTLFYDEPNYEAFDDEGDMKSQSVKSLTVEEVIESQGMGVDVNMQKKEAADANERRSHESERVEINVELQKEEAVEANKSSRLESEGVEINVELHKEEAIEVNEARSQAVPIVGNHVDDDNEVADGSMGGGGEERTTDAQLASLVRFCFRDKIYTRRECEETLLMNGLSVDLLHEHSEEYDDTHEEEGYEVEYAVDSDDDHPVAKMSQEEREVFEKLVGRNPEVVQFEDVSNSELAVVDGGVTYNGIIDAMGEEPKKGLEFKSLELLQIWLQSYSISVHRPFHVKHSNASKKYTVRARKTKDGRWRVTGVGKEHTCCSAEASGKHLQLTSKFIGNRLQPFVRAEPTLTPAAIVEAVEAIWHYRPSYGKAWRAKQVAMNNIWGDWDEAYVRIPMLLNAIKAKNPTMHYVVEPHPERSRPVDGVMRRVFGRAAWIFGQCVEAFNHMRPVIAIDDTFLTGKFQGTLLTAIGSDAGLQLVPLAFALVERENNYNWEWFISMIRRCLIGPKREVCIISDRHQGILRSINNVIPGHRPIHHRWCMRHLCANFYSAGATQIQMKDLERICQINEKSEFKKEVKHLIDFLEPRPKKWLLDIMPQRHKWARSCDPGGRRFGFMTSNMAESFNNVLRGIRRLPVTAIVAYTFSKCNTWFVDRHKFVTAALQKREKWPKRIKKELDIQKARTLGQRTTCFDFPTAKYEVTEQGGVTEGGVQWGGRHYTVVATANTCTCQYPELHHMPCSHMFTVCRLRRMDAEAPPRICFEASNVALQRTYSPRFEPYLDPTQWPSYDGEVFVPDLSKMIVTPGRRRTKRFINDMDRGYKGIGLGWSQKPNDGNSERVVPNRMAQALALEPQYEERHRARRIAEGGGLKPLRIRGHLAGHMPFDNRYIPRLGAAKLTPFITMAQRPMLVYNGPALTALIDRWRLETHTFHLPCGELTVTLEDVAIILALPIQGRAVTGDTSSGGDMASWMWLRLLGDWTEAGQYSWGSAALACLYRQLCDACQRLSNTSNLAGCVWLLQIWMWIRLPVGRPMWHNHPQWPWQQEERRPTVAFLWELVPQPVVGRKNEAYYHYTNEMDCLQPQHVVWQPYEHIGIDINAMCYIPEDMKFLRCPLICFYVVEWQLIHRVLRQFGLRQPIPEPFPTGLDLHKLDRRKNKKITDWHAHHLHLIERWDNTAANVVPHGVEHNKTYFDEYLAWLLRNYRLFLRPAWTLADIATDPEDVEEMNEYDAYTRAGATVEYGPVRDRVARELMRSVNDAGVALGTPAGSENEVGILRSALQRLKQRSRMLAARLGCRSTDAVDPQPRLTRTQAGETSQQRAEEEGEEEHDEGEEEHEEGEEGDGQSDEEEEEQPEEIGSSQLAGAPQPSQPSQGRPQRKRAPVDRYTPSTSGRRGRH

SEQ ID NO: 142051 - protein, 598 aa, Oryza sativa
  unsure (1)..(598): unsure at all Xaa locations
  Clone ID: PAT_MRT4530_43095C.1.pep
MARLGLAVCAASFHLFLLLAXTSSLRRAPTEADTANHARRTAYHFQPAKNWQNDPNGPMYHNGMYHLFYQYNPHSALWDIGNLSWGHSVSGDLLNWAALDTALDPTSPFDANGCWSGSATILPGALPAILYTGIDASKEQVQNVAFAKNPSDPLLREWEKPAYNPVIALPADVPGDKFRDPSTAWLGRDGLWRIAVSAEVDGVASTLVYRSKDFVRWERNAAPLHASRAAGMVECPDLFPVAERGEDGLDTSANGAGGVRHVLKLSVMDTLQDYYMVGTYDDAADAFSPAEPERGDDCRSWRRLDYGHVYASKSFFDVRKNRRVLWAWANESDSQADDVARGWSGVQTFPRKMWLAKDGKQLLQWPIEEIKTLRRKRAGLWQGTRLGAGAVQEIVGVASSQADVEVVFKIPSLEEAERVDDPNRLLDPQKLCGEKGAAVRGGVGPFGLLVMASGDLHEHTAVFFRVFRHHDKYKLLMCTDLTKSSTRAGVYKPAYGGFVDMDIDDHKTISLRTLIDHSVVESFGGGGRACITARVYPEHVATSSSHLYVFNNGSDAVKVAKLEAWDLATATVNVVVGDHHGLVAPALELEPXTHDAVI

SEQ ID NO: 142052 - protein, 175 aa, Oryza sativa
  Clone ID: PAT_MRT4530_43096C.1.pep
LDRRKSKKITDWHAHHLHLIERGDNIAANVVPHGVEHNKTYFDEYLAWLLRNYRLFLRPAWTLADIATDPEDVEEMNEYDTHTRAGATVEYGPVRDRVARELMRSVNDAGVALGTPAGSENEVGILRSALQRLKQRSRMLAARLGCRSTNAVDPQPRLTRTQAGETSQQRAEEEG

SEQ ID NO: 142053 - protein, 146 aa, Oryza sativa
  unsure (1)..(146): unsure at all Xaa locations
  Clone ID: PAT_MRT4530_43097C.1.pep
IRHHVCRVHAADIFHLSLLADYYCSGELRLTVDHNILIPNVNNHNVXFFLPHPLLHKFSPQPSLYAQVACLPCTGQSLPARHALHLTPKPPWRLAAFTSPTFATNLPLFLVPPPGWVSRFPLANPVCSPNTHSCPAQCFQCSPQII

SEQ ID NO: 142054 - protein, 276 aa, Oryza sativa
  Clone ID: PAT_MRT4530_43098C.1.pep
MHGDRHADLDPDLSAKADGAEVEQLSANRIGAEYLTALRGGWTERRNVSADRLGAELRDLSAIGSGAEMDRLVRLHYGGSVVEQSNSGNNFEGMSVKQLIFGGKPSFEELVCHTKDVLGWSNQSIAIQGRYDVGAGPISHKYMLDLNGELEWNTYVDIVLGSQFKSLEVVASKLDRTDCRDDSFDLNRTLFYDEPNYETFDDEGDMKSQSVKSLTVEEVIESQGMGVDVNMQKKEAVDAKKERSQESERVEINVELQKEEAVEANKASKLESEGVE

SEQ ID NO: 142055 - protein, 53 aa, Oryza sativa
  unsure (1)..(53): unsure at all Xaa locations
  Clone ID: PAT_MRT4530_43099C.1.pep
MARLGLAVCAXSFHLCLLLSSTSSLRLNPTTEDTANHGRRTAYHFQXAKNWQN

SEQ ID NO: 142056 - protein, 42 aa, Oryza sativa
  Clone ID: PAT_MRT4530_4309C.1.pep
MVQFVWFLCEPAQMDIELLPRSVVLVFLYPQSMKGVKMPGFQ

SEQ ID NO: 142057 - protein, 105 aa, Oryza sativa
  Clone ID: PAT_MRT4530_430C.1.pep
MDDDEKPTVAAGARGSKVAGTGAVDACLVTAAMAGASLLACWAVAFHPSNSQRSPAVRSARSARGSQPLCCRARPPLASALADSARRRPEEGRREERKEKKRKRK

SEQ ID NO: 142058 - protein, 90 aa, Oryza sativa
  unsure (1)..(90): unsure at all Xaa locations
  Clone ID: PAT_MRT4530_43100C.1.pep
LGXTIXGDRXXTSPESKXKSGIXKGKMGKXKDISTXKNQGXXRSHWKTEVHDRKMAYQISPSNDTLLVKPGSSMLLLPVGWSALKNWTAL

SEQ ID NO: 142059 - protein, 54 aa, Oryza sativa
  Clone ID: PAT_MRT4530_43101C.1.pep
HVTSSSHKHHRQHSTKISKSRSHRKRIAMTRNPRENPGTCHSAVSAVASSSPVA

SEQ ID NO: 142060 - protein, 48 aa, Oryza sativa
  Clone ID: PAT_MRT4530_43102C.1.pep
RTRGRTHRPTRSAMQATMVGRHVYHQALDDAVDSYQTMPILTKDADLS

SEQ ID NO: 142061 - protein, 266 aa, Oryza sativa
  Clone ID: PAT_MRT4530_43103C.1.pep
MEVAAADSSGGDRYRSHLTGDGEKNTVWRHGAPPTYDAVNSLFEAERTQEWPAGSLEETVQNAIKTWEMELSHKAKLEDFKSVSPGRFRLSVNGGRPLTGEETLAVGSYNALLTSPILPGAGAYDAAAETFESSHDLFRAAFPRGFAWEVIRVYSGPPVITFKFRHWGHMDGPYKGHAPTGDKVEFYGVAVLKVDEQLRAEDVEVYYDPGELLGGLLKGPLLVPSAEEEDARQLGERLGEAATVSASGAAPQAQACPFLASAKREV

SEQ ID NO: 142062 - protein, 222 aa, Oryza sativa
  unsure (1)..(222): unsure at all Xaa locations
  Clone ID: PAT_MRT4530_43104C.1.pep
RPGRDQGRAFMAMSRQRKLYTNIPSSRWGDDGSYMCSLWTEVVFKHPKTFETLAMDPEKKREIIDDLDMFKNGKEQHRRVGKAWKRGYLLHGPPGTGKSTMVAAMANYLGYDVYDMELTSVHTNTDLRKLLIQTTSKSIIVIEDVDCSSNLTGRRKATXRRGRRRRRRQDDHQESDRSRRRRRRRRXDSKVTLSGLLNFIXRLWSAFXEERLIVLTTNHVED

SEQ ID NO: 142063 - protein, 138 aa, Oryza sativa
  unsure (1)..(138): unsure at all Xaa locations
  Clone ID: PAT_MRT4530_43105C.1.pep
KKKKKKKKKKHKQKKTXQKKIKTKKQTTQKKNKSKKEKKKKNNKKKNKKYKQNKKTTTKKKKTKITRNKKKNHNNQINKNKNNKKQKKNKNIYISIKNKXKKPSTKKITQTIQQIIKKILPQLQRGIIPPKRSRHGAR

SEQ ID NO: 142064 - protein, 1266 aa, Oryza sativa
  Clone ID: PAT_MRT4530_43106C.1.pep
MEGAVPPKPHLRLRSAPGRRVIRFLGSASRTTARLLIAMSGVAAATAGGGGTPPTGAGSGAGAPGGAVNDNNNGGNSASPSSGGPFSGYTLLLLLLLLALFLFPLLALSLYYVRYVLVPVLHNASSMLSCYWYVPVPDIHDAHSMLLVMLRSPYTAYAMIIALTFWIKICRLMTIFPTIQKPDRSFSVVGFAAALKPHAFDGSNYKRWKARALLWLTAMQCFYVSRGKRSEPPLSPEEEAKFEASDCLFRGALISVLADNIVDVYMHMPSGKDMWDALEAKFGVSDAGSELYVMEQFYDYKMVDDRSVVEQAHEIQMLAKELENNNCELPDKFVAGGIIAKLPPSWSDFATSLKHKRQEFSVPDLIGSLGVEEKARAKDVRGKKVEGGSSANMVQKKNPHASHNNKKVKPDVKPKAATNFKKKGKGKAKGDCFVCGKYGHWAKDCPERKDRKSANMVISEGGGTSGYGKILPTVLSVFHSPDWWVDTGANIHVGRGSSLLMGNGSLAAVHGVGTVDLKFTSGKTVQLKNVQHVPSIKKNLVSGSLLCREGFRLVFESNKCVVSKYGTFVGKGSKCHTCVQSKQPRKAHKASEARNLAPLELVHSDLCEMNGVLTKGGKKYFMTLIDDCTRFCYVYLLKTKDEALHYFKIYKAEVENQLERKIKRLRSDRGGEYFSNEFASFCEEFGIIHEMMPPYSPQSNGVAERKNRTLTEMVNAMLDTAGLSKEWWGEAVLTACHVLNKIPMKHKEVNVPIAKKRKLGPKTVDCVFFGYAIHSVGYRFLIVNSGVPDMHAGTILESRDATFFENEFPMKYTPSTSSKETVMPHEHFAPIEHNDQTPEENPEEDNIVDTRKRKRQRVAKSFGDDYIVYLVDDTPRTIEEAYSSPDADYWKEAVRSEMDSIMSNGTWEVVERPYGCKPVGCKWVFKKKLRPDGTIEKYKARLVAKGYTQKEGEDFFDTYSPVARLTTIRVLLALAASHGLLVHQMDVKTAFLNGELEEEIYMDQPDRYVLEGQEGMVCKLLKSLYGLKQAPKQWHEKFDTTLTSAGFVVNEADKCLYYRYGGGEGVILCLYVDDILIFGTSLNVIEEVKDYLSKSFEKKDLGEADVILNIKLQKGDEGGITLVQSHYVDKVLSRFGYSDCKPAPTPYDPSVLLRKNRRIVRDQLRYSQIIGSLMYLASATRPDISFAVSKLSRFVSNPGDDHWQALERVMRYLKGTTSYGIHYTGYPKVLEGYSDSNWISDADEIKATSGYVFTLGGGAVSWKSCK

SEQ ID NO: 142065 - protein, 208 aa, Oryza sativa
  unsure (1)..(208): unsure at all Xaa locations
  Clone ID: PAT_MRT4530_43107C.1.pep
PSCASFFFVARGGFQEKRGAASHGDYDEQDRRVKGAEVFVGGLPRSVTERALREVFSPCGEIVDLRIMKDQNGISKGYGFVRFAERECAYIAKRQINGFELQGKRLAVDLSLDQDTLFFGNLCKDWGIEEFEELIRKALEDVVSVDLAMARNHDSSVGKRRLNRGFAFVRXSSHAAAARVLRIGSRTDFLLGGLHPSINWAEKESHVD

SEQ ID NO: 142066 - protein, 133 aa, Oryza sativa
  Clone ID: PAT_MRT4530_43108C.1.pep
DNTRKEANSTRSNVLKLLCLFFMTISTALALSCSPESFRNNLQKTKAKDFQHKRLLLDDNTDLALLEHVVEGSSLPLLVPVMHLPQTTSDQPKGEPNADLLHHARPLEGRMCNSATCHLLAVELRCLAAGGGG

SEQ ID NO: 142067 - protein, 1294 aa, Oryza sativa
  unsure (1)..(1294): unsure at all Xaa locations
  Clone ID: PAT_MRT4530_43109C.1.pep
MQYFFVSRGKPSEPPLSPEEEAKFEAADCLFRGALISXVLADNIVDVYMHMPLGKEMWDALEAKFRVSDPSSELYIMEQFYDXEMVDDRSVVEQAHEIQMLAKELENNRCELPYKFVAGGIIAKLPPSWSDFAISLKHKRQEFTVTDLICSLGVEEKARAKDNRGKRVEGSSSVNXASHNNKKVKPDVKLKATNTFKKKGMGKPKGDCFVCGKPGHXAKDCPKRKDRKFANMVISEGGRTSGYGKFLPTIVSVCHSPDWWVDTGANIHVCANISLFSSYQARRGSSLLMGNGSLAAVLGVGTVDLKFTSGKTVQLKNMQHVLSIKKNLVSSSLLCRDGFRLVSESNKCVVSKYETFIGKGFDSGGLFRFSLDNMCNKIVNYVSNDDESNVWHSRLCHVNFGCMTHLDNMSLIPKFTLVKGAKFHTCVQSKQPRKPHREFEARNLAPLELIHSDLCEMNGVXTKGGKKYFMTLIDDCTRFCYVYLLKTKDEALHYFKIYMAEVENQLERKIKRLRSDRGGEFXSNELTSFCEEFGIIHERMPPYSPXSNGVAKRKNCTLTELVNAMLDTAGLSKESWGEAILIACHVLNRIPTKHKEVTPFEEWERRKLNLSYLLTWGCLAKVNISIGXKLGPKTVDYVFLGYAIHSVGYRFLIVNSGVPDMRVGTITESRDATFSTSSEEPILTPEHFAPIEHIDQTPEGNPEEDNNVATRKSMRQSTAKSVCDDYIVYIVDNTPRTIEEAYSSPNANYWKEAVHSEMDSIMSNGTWEVIERPFGCKPXGCKXVLKKNLRLDGTIEKYKARLVAKGYTQKEGEXFFDIYSSVACLTTIRVLFATAASHGLLVHQMDVKIAFLNGELEEEIHMDQPNGYTLEGQEGIMCKLLKSLYTLEAVEVLKQAPKQWHEKFDKTLTSAGFVVNEADKCVFYRYGGGERVILCLYVNDMSIFGTSLNLIEEVKDFLSKSFEMKDLGVADVILNIKLLRGDEGGITLVQSHYVDKVLSRFGYSDCKAAPTPYDPSVLLRKNRRIARDQLRYSKIIGSLMYLASATRPDISFAVNKLGRFVSNPGDDHWHALERVMRYLKGIMSYEIHYVGYPKVLEGYSESNWIFDADEIKATSGYVFTLGGGAVSWKSCKQTILTRSTMEAELTALDTATVKAEWLRELLMDLPVVEKPVPAILMNCDNQTVIIKVNSSKDNMKSSRHVKRRLKCLRSSVRLRTCTGRRAIKFLGSASSATALVLRGYCCYIGAFTKMSTEIGDKKMNDINGGNTASKSSAHRDGGCQAHPGTPGGFATGGG

SEQ ID NO: 142068 - protein, 104 aa, Oryza sativa
  unsure (1)..(104): unsure at all Xaa locations
  Clone ID: PAT_MRT4530_4310C.1.pep
MTPGAHMSVPLSGVPARRRPPPTPARRSRPPTRRRTRPWRRSPRPCRRRARARPCPPCQWPRPSTPTRRRRRXSPARPSPAPPTPXXPRAPTPCTPRTPAAARR

SEQ ID NO: 142069 - protein, 1440 aa, Oryza sativa
  unsure (1)..(1440): unsure at all Xaa locations
  Clone ID: PAT_MRT4530_43110C.1.pep
MSAPGAGAAATGGDGAPGAGGGAPGSGGGAANNNTNGGNSASQSSGGPFSGYIPVLLLFLLLALYCFVPVPDVHDTFSILLRYCYVPVPDIHSYVPIHDAHDSMLLVMLYVSTRSPYTVYAMIIVLTFWIKICRFMTIFPTIQKPDRSFSVVGFAAALKPHAFDGSNYKRWKARALLWLTAMQCFYVSRGKRSEPPLSSEEEAKFEASDCLFQGALISVLADNIVDVYMHMPSGKDMWDALEAKFGVSDAGSELYVMEQFYDYKMVDDRSVVEQAHEIQMLAKELENNNCELPDKFVAGGIIAKLPPSWSDFATSLKHKRQEFSVSDLIGSLGVEEKARAKDVRGKKVKGGSSANMVQKKNPHASHNNKKVKLYVKPKAATNFKKKGKGKAKGDCFVCGKSGHWAKDCPERKDRKSANMVISEGGGTSGCGKILPTVLSVFHSPNWWVDTGANIHVCADISLFSSYQVGRGSSLLMGNGSLAAVHGVGTVDLKFTSGKTVQLKNVXHVPSIKKNLVSGSLLCREGFRLVFESNKCVVSKYGTFVGKGYDSGSLFRFSLNDMCNNHNAVNHISENDEPNVWHSRLCHVNFGCMTRLANMSLIPKFTLVKGSKCHTCVQSKQQEFGKPHKASEARNLAPLEFVHSDLCEMNGVLTKGGKTYFMTLIDDCTRFCYVYLLKTKDDALHYFKIYKAEVENQLERKIKRLRSNRGGEYFSNEFASFYEEFGIIHERTPPYSPQSYGVAERKNRTLTEMVNAMLDTAGLSKEWWGEAVLTACHVLNKIPMKHKEVTPFEEXERKKLNLSYLRTXGCLTKVNVPIAKKRKLGPNTVDCVFIGYAIHSVGYRFLIVNSGVPDMHVGTMLESRDATFFENEFPMKHTPSTSSXETVMPHEHFAPIEHNDQTPEENPEEDNIVDTRKSKRQRVAKSFGDDYIVYLVDDTPRTIEEAYSSPDADYWKEAVRSEMDSIMSNGTWEVVERPYGCKPVGCKWVFKKKLRPDGTIEKYKARLVAKGYTQKEGEDFFDTYSPVARLTTIRVLLALAASHGLLVHQMDVKTAFLNGELEEEICMDQPDGYVLEGQDGMVCKLLKSLYGLKQAPKQWHEKFDTTLTSAGFVVNEADKCVYYRYGGGGVILCLYVDDILIFGTSLNVIEEVKDYLSKXFEMKDLGEADVILNIKLQRGDEGGITLVQSHYVDKVLTPTPYDPSVLLRKNRRIARDQLRYSQIIGSLMYLASATRPDISFAVSKLSRSVSNPGDDHWQALERVMRYLKGTMSYGIHYTGYPKVLEGYSDSNXISDVDEIKATSGYVFTLGGSAVSWKSCKQTILTRSTIEAELTSLDTAIVEAEWLRELLMDLPMVEKPVPAILMNCDNQTVIIKVNSSKDNMKSSRHIKRRLKSVRKQKNSGVIALDYVQTARNLADQFTKGLPRNVIDSASREMGLIPT

SEQ ID NO: 142070 - protein, 245 aa, Oryza sativa
  unsure (1)..(245): unsure at all Xaa locations
  Clone ID: PAT_MRT4530_43111C.1.pep
PAGIGRGIKMRSEQSLAYEAVVEQETFRQWQRLNGRPKPGVSELMNDKLEYHIGLDYAEELSVQTQWAQDKKGLDHGAFITLGDQELIDRHSESRGISPTRLRGLPDDIKSAPNPLSALQPRANWTNMPLYADSFTETVSAIVHHNGVGILKTHRSTWWDRPWYFQHLRQLLHIRLRAKGEAEEPLATVQTPNGRVRYWATSAENTSKYPRRMRNSXKHXLXKMNFGEMCRKRASXRGPPLECMM

SEQ ID NO: 142071 - protein, 1420 aa, Oryza sativa
  Clone ID: PAT_MRT4530_43112C.1.pep
MASDKLRRAARFLGSARRDYSLFVNVYFVFTNMSNTGHNSNTGDKEKETPVNTNGGNTASNSSGRPFLGYNLITLFQLEVLLLMFIAMSTLCHYVIVDAYSMLSMLMLITFTTITGSNPIVNIMFIILLFWIKICRIMTKFLTIQKPDRSFSVVGFAATLKPHAFDGSNYKRWKARALLWLTAMQCFYVSRGKRSEPPLSPEEEAKFEASDCLFRGALISVLADNIVDVYMHMPSGKEMWDALEAKFGVSDAGSELYVMEQFYDYKMVDDRSVVEQAHEIQMLAKELENNNCELPDKFVAGGIIAKLPPSWSDFATSLKHKRQEFSVPDLIGSLGVEEKARAKDVRGKKVEGGSSANMVQKKNPHASHNNKKVKPDVKPKAATNFKKKSKGKAKGDCFVCGKSGHWAKDCPERKDRKSANMIISEGGGTSGYGKILPTVLSVFHSPDWWVDTGANIHVGRGSSLLMGNGSLAAVHGVGTVDLKFTSGKTVQLKNVQHVPSIKKNLVSGSLLCREGFRLVFESNKCVVSKYGTFVGKGYDSGGLFRFSLNDMCNNHNAVNHISENDESNVWHSRLCHVNFGCMTRLANMSLIPKFTLVKGSKCHTCVQSKQPRKPHKASEARNLAPLELVHSDLCEMNGVLTKGGKKYFMTLIDDCTRFCYVYLLKTKDEALHFFKIYKAEVENQLERKIKRLRSDRGGEYFSNEFASFCEEFGIIHEMTPPYSPQSNGVAERKNRTLTEMVNAMLDTAGLSKECIRKTPFEEWERKKLNLSYLRTWGCLAKVNVPIAKKRKLGPKTVDCVFLGYAIHSVGYRFLIVNSGVPDMHVGTILESRDAIFFENEFPMKYTPSTSSKETVMPHEHFAPIEHNDQTPEENPEEDNIVDTRKSKRQRVAKSFGDDYIVYLVDDTPRTIEEAYSSPDADYWKEAVRSEMDSIMSNGTWEVVERPYGCKPVGCKWVFKKKLRPDGTIEKYKARLVAKGYTQKEGEDFFDTYSPVARLTTIRVLLALAASHGLLVHQMDIKTAFLNGELEEEIYMDQPDGYVLEGQEGMVCKLLKSLYGLKQAPKQWHEKFDTTLTSAGFVVNEADKYVYYRYGGGEGVILCLYVDDILIFGTSLNVIEEVKDYLSKSFEMKDLGEADVILNIKLQRGDEGGITLVQSHYVDKVLSRFGYSDCKPAPTPYDPSVLLRKNRRIARDQLRYSQIIGSLMYLASATRPDISFAVSKLSRFVSNPGDDHWQALERVMRYLKGTMSYGIHYTGYPKVLEGYSDSNWISDADEIKATSGYVFTLGGGAVSWKSCKQTILTRSTMEAELTALDTATVEAEWLRELLMDLPVVEKPVPAILMNCDNQTVIIKVNSSKDNMKSSRHIKRRLKSVRKQKNSGVIALDYVQTARNLADQFTKGLPRNVIDSASREMGLIPT

SEQ ID NO: 142072 - protein, 133 aa, Oryza sativa
  Clone ID: PAT_MRT4530_43113C.1.pep
MVAEGGRAQIVWVGPNANATRRPPPKIFLLDGSEFLLRLLFPPSKSSTMVELVLGAHSSSTQVATASLLGGGLLVFLRRGSSETSRATHPTLINLVDASLLIAANSLSSVVAWAEQPLEPTSSSDYPHHRHRH

SEQ ID NO: 142073 - protein, 1352 aa, Oryza sativa
  Clone ID: PAT_MRT4530_43114C.1.pep
MSNTGDKEKETPVNTNGGNTASNSSGGPFLGYNLITLFQLEVLLLMFIAMSTLCHYVIVDAYSTLSMLMLITFTTITGSNPIVNIMFIILLFWIKICRIMTKFPTIQKPDRSFSVVGFAAALKPHAFDGSNYKRWKARALLWLTAMQCFYVSRGKRSEPPLSPEEEAKFEASDCLFRGALISVLADNIVDVYMHMPSGKDMWDALEAKFGVSDAGSELYVMEQFYDYKMVDDRSVVEQAHEIQMLAKELENNNCELPDKFVAGGIIAKLPPSWSDFATSLKHKRQEFSVPDLIGSLGVEEKARAKDVRGKKVEGGSSANMVQKKNPHASHNNKKVKPDVKPKAATNFKKKSKGKAKGDCFVCGKSGHWAKDCPERKDRKSANMIISEGGGTSGYGKILPTVLSVFHSPDWWVDTGANIHVGRGSSLLMGNGSLAAVHGVGTVDLKFTSGKTVQLKNVQHVPSIKKNLVSGSLLCREGFRLVFESNKCVVSKYGTFVGKGYDSGGLFRFSLNDMCNNHNAVNHISENDESNVWHSRLCHVNFGCMTRLANMSLIPKFTLVKGSKCHTCVQSKQPRKPHKASEARNLAPLELVHSDLCEMNGVLTKGVKKYFMTLIDDCTRFCYVYLLKTKDEALHCFKIYKAEVENQLERKIKRLRSDRGGEYFSNEFASFCEEFGIIHEMTPPYSPQSNGVAERKNRTLTEMVNAMLDTAGLSKEWWGEAVLTACHVLNKIPMKHKEVTPFEEWERKKLNLSYLRTWGCLAKSRDATFFENEFPMKYTPSTSSKETVMPHEHFAPIEHNDQTPEENPEEDNIVDTRKSKRQRVEKSFGDDYIVYLVDDTPRTIEEAYSSPDADYWKEAVCSEMDSIMSNGTWEVVERPYGCKPVGCKWVFKKKLRPDSTIEKYKARLVAKGYTQKEGEDFFDTYSPVARLTTIRVLLALAVSHGLLVHQMDVKTAFLNGELEEEIYMDQPDGYVLEGQEGMVCKLLKSLYGLKQAPKQWHEKFDTTLTSAGFVVNEADKCVYYRYGGGEGVILCLYVDDILIFGTSLNVIEEVKDYLSKNFEMKDLGEADVILNIKLQRGDEGGITLVQSHYVDKVLSRFGYNDCKPAPTPYDPSVLLRKNRRIVRDQLRYSQIIGSLMYLASATRPDISFAVSKLSRFVSNPGDDHWQALERVMRYLKGTMSYGIHYTGYPKVLEGYSDSNWISDADEIKATSGYVFTLGGGAVSWKSCKQTILTRSTMEAELTALDTATVEAEWLRELLMDLPVVEKPVPAILMNCDNQTVIIKVNSSKDNMKSSRHIKRRLKSVRKQKNSGVIALDYVQTARNMADQFTKGLPRNVIDSASREMGLIPT

SEQ ID NO: 142074 - protein, 394 aa, Oryza sativa
  Clone ID: PAT_MRT4530_43115C.1.pep
MASSSSPCKLVSCGDNRHFMFRVDGAAIRRPVGRIVKETCEIGNGYTCEASLFVPSLLGERKVMMILAVTVNSDRAQSLARAHKVFIDMALLDDTKSPVLPPFARSVMSPSAAAGSSPKLPPPVAGSNLAASCKLVASRDHLLANCVKGGILAALCWVVFVPSSPRSPYSLLAHCLATMSNGRDLTDVCFDVDGKSFHAHRLIMARQSEVFRAELLGSMAESKMECITISDMSASTFKHMLHYIYCNDLPTCVKDTDDQSSWIFELQHLLVTADRYGVDTLKDLCEDTLCADITTDTVTSTLELAETRSYPKLRTSCLVFLSNTQNFAEVATTKEYYNLIQSYPSVLSEIRNRFKRPRPSLMLAPSTVTENQNKRPRLSPKLTPSADTKDENNP

SEQ ID NO: 142075 - protein, 154 aa, Oryza sativa
  unsure (1)..(154): unsure at all Xaa locations
  Clone ID: PAT_MRT4530_43116C.1.pep
MSGVAAATAGGGGTPLTGARSGAGAPGGAVNDNNNGGNSASPSSGGPFSGYNLLLMLLLLALSLYYVRYXARYVLVPVLHDASSMLSRYCYVPVPDIHDAHNMLLVMLRSPYTAYAMIIALTFWIKICRLMTIFPTWYTPEILSGRTQFPRRLH

SEQ ID NO: 142076 - protein, 1438 aa, Oryza sativa
  unsure (1)..(1438): unsure at all Xaa locations
  Clone ID: PAT_MRT4530_43117C.1.pep
MSGVAAATAGGGGTPPTGAGSGAGAPGGAVNDNNNGVNSASPSSGGPFSGYTLLLLLLLLALFLFPLLALSLYYVRYVLVPVLHDASSMLSRYWYVPVPDIHDAHSMLLVMLRSPYTAYAMIIALTFWIKICRLMTIFPTIQKPDRSFSVVGFAAALKPHAFDGSNYKRWKARALLWLTAMQCFYVSRGKRSEPPLSPEEEAKFEASDCLFRGALISVLADNIVDVYMHMPSGKDMWDALEAKFGVSDAGSELYVMEQFYDYKMVDDRSVVEQAHEIQMLAKELENNNCELPDKFVAGGIIAKLPPSWSDFATSLKHKRQEFSVPDLIGSLGVEEKARAKDVRGKKVEGGSSANMVQKKNPHASHNNKKVKPDVKPKAATNFKKKGKGKAKGDCFVCGKSGHWAKDCPERKDRKSTNMVISEGRGTSGYGKILPTVLSVFHSPDWWVDTGANIHVCADISLFSSYQVGRGSSLLMGNGSLAAVHGVGTVDLKFTSGKTVQLKNVQHVPSIKKNLVSCSLLCREGFRLVFESNKCVVSKYGTFVGKGYDSGGLFRFSLNDMYNNHNAVNHISENDESNVWHSRLCHVNFGCMTRLANMSLIPKFTLVKGSKCHTYVQSKQPRKPHKASEARNLAPLELVHSDLCEMNGVLTKGGKKYFMTLIDDCTRFCYVYLLKTKDETLHYFKIYKAEVENQLQRKIKLLRSDRGGEYFSNEFASFCQEFGIIHEMTPPYSPLSNGVAERKNRTLTEMVNAMLDTAGLSKELWGEAVLTACHILNKIPMKHKEVTPFEEWERKKLNLSYLRTWGCLAKVNVPIAKRRKLGPKTVDCVFLGYAIHSVGYRFLIVNSGVPDMHAGTIFESRDATFFENEFPMKYTPSTSSKETVMPHEHFAPIEHNDQTPEENPEEDNIVDARKSKRQRVAKSFGDDYIVYLVDDTPRTIEEAYSSPDADYWKEAVRSEMDSIMSNGTWEVVERPYGCKPVGCKWVFKKKLRPDGTIEKYKARLVAKGYTQKEGEDFFDTYSPVARLTTIRVLLALAASHGLLVHQMDVKTAFLNGELEEKIYMDQPDGYVLEGQEGMVCKLLKSLYGLKQAPKQWHEKFDTTLTSAGFVVIEADKCVYYRYGGGEGVILCLYVDDILIFGTSLNVIEEVKDYLSKSFEMKDLGEADVILNIKLQRGDEGGITLVQSHYVDKVLTPTPYDPSVLLRKNRRIVRDQLRYSQIIGSLMYLASATRPDISFAVSKLSRFVXNPGDDHWQALERVMRYLKGTMSYGIHYTGYPKVLEGYSDSNWISNADEIKATSGXVFTLGGGAVSWKSCKQTILTRSTMEAELTALDTATVEAEWLRELLMDLPVVEKPVPAILMNCDNXTVIIKVNNSKDNMKSSRHIMRRLKSVRKQKNSGVIALDYVQTARNLADQFTKGLPRNVIDSASREMGLIPT

SEQ ID NO: 142077 - protein, 1304 aa, Oryza sativa
  unsure (1)..(1304): unsure at all Xaa locations
  Clone ID: PAT_MRT4530_43118C.1.pep
DNTNGGSSASQSSGGTFTGSFSVVDFAATLKPHAFDGSNYKRWKARALLWLTAMQCFYVSRGKRSEPPLSPEEEVKFEASDCLFRGALISVLADNIVDVYMHMPSGKDMWDALEAKFGVFDTGSELYVMEQFYDYKMVDDRSVVEQAHEIQMLAKELENNNCELPDKFVAGGIIAKLPPSWSDFATSLKHKRQEFSVIDLIGSLGVEEKARAKDIWGKKVXGGSSANMVQKKNPHASHNNKKVKHDVKPKATTNFKKKGKGKAKGDCFVCGKPGHWAKDCPEHKDRKSANMVISEGGGTSGYGKILPTVLSVFHSPDWWVDTGANIHVCADIFLFSSYQVGRGSSLLMGNGSLAAVHGVSMVDLKFTSGKTVQLKNVQHVPSIKKNLVSGSLLCREGFKLVFESNKCVVSKYGTFIGKGYDSGGLFRFSLDDMCNNNNVVNHINENDESNVWHSRLCHVNFGCMTRLANMSLNPKFTLVKGSKCHTCVQSKQPRKPHKASEARNLXPLELVHSDLCEMNGVLTKGGKKYFMTLIDDCTRFCYVYLLKTKDEALHYFKTYKAEVEKQLKRKIKRLRSDRDGEYFSNEFTSFCEEFGIIHERMPPYSPQSNGVAERKNRTLTEMVNAMLDTTGLSKEWWGETVLTACHVLNKIPMKHKEVTPFEEXERKKLNLSYLRTWGCLAKVNVPIAKKRKLGPNTVDCVFLGYAIHNVGYRFLIVNSGVPDMRVGTIIESRDATFFENEFPMKXTPSTSSQETVIPHEHFAPIEHNDQTPEGNLEEDNIVDTRKSKRQRVAKSFGDDYIIXLMDDTPKTIEEAYLSPDADYWKEAIRSEMDSIMSNGTXEVVERPYGCKLVGCKWVFKKKLRLDGTIEKYKARLVAKGYTQKEGDDFFDTYSPVARLTTIRVLLVLAASYGLLVHQMGVKTAFLNGELEEEIYMDQPDGYVLEGQEGMVCKLLKSLYGLKQAPKQWHEKFDTTLTSAGFVVNEADKCVYYRYGEGEGVILCLYVDDILIFGTSLNVIEEVKDFLSKSFEIKDLGEADVILNIKLLRXDEGGITLVQSHYVDKVLSRFGYSDCKPAPTPYDPSVLLRKNRRIARDQLRYSQIIGSLMYLASATRPDISFAVSKLSRFVSNPGDDHWQALERVMRYLKGTMSYGIHYTGYPKVLEGYSDSNWISGADEIKTTSGYVFTLGGGAVSWKSCKQTILTRSTMEAELTTPDTATVEAEWLRELLMDLPVVEKPVPAILMKLIVSLLRQRVDSSPGFSLPSSSSTVANGNDDGNRSGWRWWRRRMATTTASRQPQPKEA

SEQ ID NO: 142078 - protein, 716 aa, Oryza sativa
  Clone ID: PAT_MRT4530_43119C.1.pep
MFVGNAKRTYTDSKAPWGQMNNRQQRDRTAKGEEFFWQCTHKTHLAAAGRAVRAARTQHNCTYIWSFALLRDSLAQLHLELSTRRTYMPRHAQSQQSATCMHAWIYTARHAMHCAKTLETSKRSGTFATNSQENNAEAMHFACAPCVGVHTPMRGPAALDRAPRSPRLSPRGGRWGRCRCRAQGRPRARSRDRLPTTAARCAALANFTTQRHHARTSSPFLVGRKDAAKASTAVDLHDETKLARVVSCSRSHSPFRTWLSPFSSSVPVHASLWARGSRSGPVNIAVVVVLRFLIVVKKLAQVEVLEGSPPSEQLRKRQEPVAAFAHPAASVASAYGASPVGRWRESEAPPPNFSRAPPRAVAAVPPPPSPDPQLLPTHMAAAAAAASVASQAQAVLRGRLCDQAVVHSALRSSPDTNYSKLKYLVASSVSEACNNSVLLLGPRGCGKAAVVDMVLDDLKKDHPDAISVEIARQLCLEHQLSFSKMASSDDNTEFMIDMLRECGLAHKTIIFVLEEFDLFAQGKQRLLYSLLDAMQSLTSQAVVIGVSCRLDADQLLEKRVRSRFSHRKLLFVPSSVDSLQRLMEHLLALPEDSPLPTKYVREYNARITVSFAQCDMSLYVLTKPAEWMLNVFFSMLKRSHGGKLAMALFLRLNGTAFEHLLDRELISFADNKGRNQALEYRPVKLLISSRELAESLKLNTTCPAVLQKLLDRERYM

SEQ ID NO: 142079 - protein, 228 aa, Oryza sativa
  unsure (1)..(228): unsure at all Xaa locations
  Clone ID: PAT_MRT4530_4311C.1.pep
MASYHFGFRDNDDVFSTTLPGKSFVQRSSTYRSRSFAFGHVSITFGNVGRARQWRGGAAVVSGHRGPARRRASVAAARGXRRRGGPAAWGRSGVGARRRAGAAAASGPGGVGARRRRASAAAWRHGGVASSXGGGGVAVATAWRRGGVVRRRGELEAWATFVAVATASSAAAVASNGGSHPSDAAAASAAEAARTAKRQRETTAVSAWGCPRHGGGEGEAEIEKRLSG

SEQ ID NO: 142080 - protein, 106 aa, Oryza sativa
  unsure (1)..(106): unsure at all Xaa locations
  Clone ID: PAT_MRT4530_43120C.1.pep
GGLRRGAAAAPPPYWWITGASFRKSCFNLSNVMSAGMGMLSVQYVLSXACGLAWRSISPIFGAICFYTGNLNNRCMRTDHCVRSYPDIGHLVMNLECKLRWECVKA

SEQ ID NO: 142081 - protein, 1293 aa, Oryza sativa
  unsure (1)..(1293): unsure at all Xaa locations
  Clone ID: PAT_MRT4530_43121C.1.pep
MAHLELEPEPVPGTSTPMEAILPHNPVEGHSRGISFSCCXALLILLVAMLILLVATCYVPVPDVHDAYSILVMLHVPVPDVHAFSILLVMLYVVTRSSYTVHAMIIVLTFWIKICQYMTIFPTIQKPDKSFSVVGFDAALKPHAFDGSNYKRCKARALLWLTAMQCFYVSRGKRSEPPLSPEEEAKFEASDCLFCGALISVLADNIVDVYMHMPSEKDMWDALEAKFGVSDAGSELYVMEQFYDYKIVDDRSVHKRQEFSVSDLIGSLGVEEKARAKDVRGKKVEGGSSANMVQRKNPHASHNNKKVKPDVKPKAATNCKKKGKGKAKGDCFVCGKSGHWAKDCPECKDRKSANMVISEGGGTSGYGKILPTVLSVFHPPDWWVDTGANIHVERGSSLLMGNGSLAAVHGVGTVNLKFTSGKTVQLKNVQHVPSIKKNLVSGSLLCREGFRLMFESNKCVVSKYETFVGKGYDSGGLFRFFLNDMCNNHNVVNHISENDESNVWHSRLCHVNFGCMTRLANISLIPKFTLVKGSKCHTCVQSKQPRKTHKASEARNLAPLEFVHSDLCEMNGVLTKGGKKYFMTLIDDCTRFCYVYVLKTKDETLHYFKIYKAEVENQLERKIKRLRFDRGGEYFSNKFASFCEEFGIIHERTPPYSPQSNGVAERKNRTLTKMVNAMLGTAGLSKEWWGEAVLTVCHVLNKIPMKHKEVTPFEEWERKKSNLSYLRTWGCLAKVNVPIAKKRKLGPNTVDCVFLGYAIHSVGYRFLIVNSGVPDMHVGTIIESRDATFFENEFPMKHTPSTSSQETVMSHEYFAPIEHDDQTPEENPNEDNIIDTRKSKRQRVAKSFGDDYIVYLVDDTLRTIEEAYSSPDADYWKEAVHSEMDSIMSNGTWEVVERPYGCKPVGCKWVFKKKLRPMMDVKTAFLNEELEEEIYMDQPDGYVLEGQEGMVCKLLKSLYGLKQAPKQWHEKFDTTLTSAGFVVNEADKCVYYRYGGGEGVILCLYVDDILIFGTSFNVIEEVKDYLFKSFEMKDLGEADVILNIKLQRGDEGGITLVQSHYVDKVLSRFGYSDCKPAPTPYDPNVLLRKSRRIARDQLRYSQIIGSLMYLASATRPDISFAVSKLSRFVSNPGDDHWQALERVMRYLKGTMSYGIHYTGYLKVLEGYSDSNWISDADEIKATSGYVFTLGGGVVSWKSCKQTILTRSTIEAELIALDTAIVEAEWLRELLIDLPVVEKPVPAILMNCDNQTVIIKVNNSKDNMKSSRHIKRRLKSVRKQKKLRSDSIGLCPNG

SEQ ID NO: 142082 - protein, 80 aa, Oryza sativa
  Clone ID: PAT_MRT4530_43122C.1.pep
FSPMIILQQAQHLIMDVQNKRDGLMCHVIHLPYNPQAAFPIPATCCLFLVHGTVVLSCFYTREGILLSFCSYNTSTAFHG

SEQ ID NO: 142083 - protein, 1253 aa, Oryza sativa
  Clone ID: PAT_MRT4530_43123C.1.pep
MLLRYCNVPVSDIHDAHSMLLHDASSMLLRYCNIPVPDIHDTHSMLLVMLRSPYTAYAMIIVLTFWIKICRFMTIFPTIQKPDRSFSVVGFAAALKPHAFDGSNYKRWKACALLWLTAMQYFYVSRGKRSEPPLSPEEEAKFEALDCLFRGALISVLADNIVDVYMHMPSGKDMWDALEAKFGVSDAGSELYVMEQFYDYKMVDDRSVVDQPHEIQMLAKKLENNNCELPDKFVAGGIIAKLPTSWSDFATSLKHKRQEFSVSDLIGSLGVEKKARAKDVRGKKVEGGSSANMVQKKNPHASHNNKKVKPDVKPKAATNFKKKGKGKAKGDCFVCGKSGHWAKDCPERKDRKSANMVISEGGGTSGYGKILPTVLSVLHLPDWWVDTGANIHVGRGSSLLMGNGSLAAVHGVGSKCHTCIQSKQPRKPHKSSEARNLAPLELVHSDLCEMNDVLTKGGKKYFMTLIDDCTRFCYVYLLKTKDKALHYFKIYKAEAENQLERKIKRLRSDRSGEYFSNEFASFCEEFGIIHERTPPYSPQSNGVAERKNRTLTEMVNAMLDTSGLSKEWWGEAVLTTYHVLNKIPMKHKEVTPFEEWERKKLNLSYLRTWGCLAKVNVPIAKKRKLGPNTVDCVFLGYAIHSVGYRFLIVNFGVPDMHVGTILESRDATFFENEFPMKHTPSTSSKETVMPHEHFAPVEHNDQTPEENPEEDNIVDTRKSKRQRVAKSFGDDYIVYLVDDTSRTIEEAYSSPDADYWKEAVRSEMDSIMSNGTWEVVELSYGCKPVGCKWVFKKKLIPDGTIEKYKARLAAKGYTQKEGEDFFDTYSPVARLTTIRVLLALAASHGLLVYQMDVKTAFLNGELEEEIYMDQLDGYVLEGQEGMVCKLLKSLYGLKQAPKQWHEKFDTTLTSAGFVVNETDKCVYYRYGGGEGVILCLYVDDILIFGTSLNVIEEVKDYLSKSFEIKDLGEADVILNIKLQIGDEGGITLVQSHYVDKVLSRFGYSDCKPAPTPYDPSVLLRKNRRIARDQLRYSQIIGSLMYLASATRPDISFAVSKLSRFVSNPGHDHWQALERVMRYLKGTMSYGIHYTGYPKVLEGYSDSNWISDADEIKATSGYVFTLGGGAVSWKSCKQTILTRSTMEAELTALDTATVEAEWLHELLMDLPVVEKSVPAILMNCDNQTVIIKVNSSKDNTKSSRHIKRRLKSVRKQKNSGVIALDYVQTARNLADQFTKGLPRNVIDNASREMGLIPT

SEQ ID NO: 142084 - protein, 120 aa, Oryza sativa
  Clone ID: PAT_MRT4530_43124C.1.pep
MAIGMHERKQLRPGVVLSVIGSSSSSPIPAMNKGRGFKRVVKVGGGVKKEGKGVFPRLRGAVVATVRAVVGSGQRAMEDSGGTVGAMGLEVVAGRVGIERRQQMRLVMIGATGDEEGPTG

SEQ ID NO: 142085 - protein, 100 aa, Oryza sativa
  Clone ID: PAT_MRT4530_43125C.1.pep
NRAPPGPSVARASPQKKNTPSKWWFRGPPLEFPPFSNSSSFGPPLGPVCFRRFFHIPPGGPFWFKPPFFPLGFTLSWAYLFPPPCCALGVFPFPKKQTIM

SEQ ID NO: 142086 - protein, 437 aa, Oryza sativa
  Clone ID: PAT_MRT4530_43126C.1.pep
MAAMAGGSKPLRLKDLLELDCESCSAAGFRCYPRRLCVAGGAAEAAAPPMRHRLVADRSSSAMRRPKLSSLSKSLSRRLRGGFWRRREEEDEEAAAAAAAPPATASSTAPAVASCCSSSSDSETSESSNSTGGRKSRSHSDYSEISSASSDDSLHAAGEPSTTGADHEVMKRGSKEEDEEEEADDKEQLSPVGVMDFPFDEDDDDAAAVDEDERVAAGACSFSFSDSLAQLQRRKMQLQPKIRRLGSMAELSGVDLEARFAASESDRLAGIVPVQHQCITDDVAAAPPRHDDHRNDGVSQKDPDDDEDSLLDLLADTVSVGVVDDVTERLLLDFFVEAKCSSRNIELHAPTSLLRERRRRENGETMRLAKAWLEGTGTPWTLNDVLYHGEDVMAEMERSRRWMHAGEEEREAGVVVAAMAMDELLHELVSDLIALPK

SEQ ID NO: 142087 - protein, 649 aa, Oryza sativa
  Clone ID: PAT_MRT4530_43127C.1.pep
MKKDVAELKALKGEVKEIKGLLLELCKQKSVEEQGEAGANAAAATAKGKSAPATTADAAGPSSTAAMNTTSSEVRFAIEAISGNPMGMVSQGVGTGPGMTNSNQFFDLPRPQPTVPPFGSQGLGTHFGPQQNFSIPQFGGMQGRPTVGAPSNFCGSQGIDSTLHTGFNRGVNPGNTGVHIFDQQRNILGGHMGDGNHYAEAIIKGPRLEIPLFSGEDPIDWLKQCEKFYEISGTPAEQWVNLAIAHLQGKAMKWYRGIGIPWQLITWPQWCAMVSTRFSAADTHEAVELFQNVKQYNQTVEQYIDKFEEYVDLGLLESYWYTKNYERAANARKNLLNFNRNRFQNQAGPIQGRNVVNRGQPREQVEKKEERKCWFCKEPWFPKHQCKVKKALNALLMEGEEGKDEGEEGELTGNQEDCKLEKEEAPPDDENQEELMFVSHNAVYGTTRPDTFSVIIQINGRRAVGLVDSGSTSTFMDQDYAVRNHCPLVSTDAKKVVVAGGGELKSEVQVPELVYQIQGETFSNKFNIIPLKGYDVILGADWIYKYSPITLDLKKRELGITKGEKTVITRVKEEETSHEIPEDIKEILQEFPAVLKDPKGLPPRRNCDHVITLKSGAEPPNLRPYRVPHYQKEAMEKIIAELIESKEIQ

SEQ ID NO: 142088 - protein, 89 aa, Oryza sativa
  Clone ID: PAT_MRT4530_43128C.1.pep
DHSSNQLFIATGTISTVALGGLNLLQCPETLRKLKVKFFFEMAPGWKGGHRLGYQWPIGYSKPLDNTRDSIYSYKKRVGTHAGLIKWAN

SEQ ID NO: 142089 - protein, 65 aa, Oryza sativa
  Clone ID: PAT_MRT4530_43129C.1.pep
MPIQRELTRGASVRGSKLRTYKCITTNLTSILSGIICISLEIILEAGAQPDEMLKLRLHVHRGTR

SEQ ID NO: 142090 - protein, 205 aa, Oryza sativa
  Clone ID: PAT_MRT4530_4312C.1.pep
MREEARTMVATRSTTSRRCLTWWWLACCCFVSWVASSSWTAAACVAVSSLPGFDGPLPFSLETGYVEVNESTGVQLFYYFVRSEKNPDLDPLLLWLTGGPGCSSISGLAHEIGPFQFAAKRYYSGGLPIIIYRPETWTKVSNIIFVDSPVGAGFSYAATEEGSKSSDTNAVKQLLIFLRKRRLIPTCKSKKTSKNKVDGNSIANE

SEQ ID NO: 142091 - protein, 198 aa, Oryza sativa
  Clone ID: PAT_MRT4530_43130C.1.pep
MHLYYIWAGSVAREDKMKKDNHDVGTQTHIRQQAQDPTTTREPNQATVYPPPKRPTNQTQHRREIRRAERHRKIPLTPPPPPHTHTHTPSTSNQSTTIPRYSDPKTPTAKAPGAPARGPINAARRRIASGNQRPERMTASASPTPNLPEGSDREGGRRPAQVYLGCLPRARPPESGGGVCARRGEGSLSGGGGGGGGG

SEQ ID NO: 142092 - protein, 148 aa, Oryza sativa
  Clone ID: PAT_MRT4530_43131C.1.pep
MLFLKELPIWQAFGFSLLTGALAGSTLYAVCVLLLCCVDRRRRHAGAPPPDPKIWLPDHAHHRRRRDESSEMECSICLGELEEGERCCTLAACRHEFHKECIYRWLANRNTCPLCRHIPLPPASSPPPAPPPHHASPPPSNVPPAAHV

SEQ ID NO: 142093 - protein, 115 aa, Oryza sativa
  Clone ID: PAT_MRT4530_43132C.1.pep
FKAVHRSWIIITPIINKAWTPQRPPWAYLRHFTVWCSRARTTADDNGRRRRRGRSGRDVRVDDDGDAPAVFDRNKGRDEDGDDLAIPTAAFPRDDDDRSGGGARLDSRRRRRRTG

SEQ ID NO: 142094 - protein, 70 aa, Oryza sativa
  Clone ID: PAT_MRT4530_43133C.1.pep
TMQTPARSEHQVAASTTPLTAGCQSGCSIWCWSSFVPSPSTGMPPGMPSTSSSERRSSPPRPSSSSHCRG

SEQ ID NO: 142095 - protein, 35 aa, Oryza sativa
  Clone ID: PAT_MRT4530_43134C.1.pep
AYTVHNITNMYPSYCKIKHAVVGSSIEYVVCALKV

SEQ ID NO: 142096 - protein, 143 aa, Oryza sativa
  unsure (1)..(143): unsure at all Xaa locations
  Clone ID: PAT_MRT4530_43135C.1.pep
XYPSQKGKTPXNAKPYSHETLGEPRRGRPSPPGTTSRGGSTPTSTGPTVPRGRHPGTPTATPAAASAPRPRANLSRGRSPIPRRRIQIXXXIIRLPCPTPRSPTLRLPRRWRTRWMCMGRGRAPTPAPEGWELPRRRTRRTTT

SEQ ID NO: 142097 - protein, 102 aa, Oryza sativa
  Clone ID: PAT_MRT4530_43136C.1.pep
VLLVPASKSRARRAASHPAKATRSGDMVCLACLLPLFLIPVVNAVPLLFHLILVTPQSLSPLSLYLSLSSLCVSVCLSLFVQSDLLTNGYLMVCCSTSERVI

SEQ ID NO: 142098 - protein, 105 aa, Oryza sativa
  Clone ID: PAT_MRT4530_43137C.1.pep
MRWKSKGRALTTGIKKRGSKHARQTYQSKSCWIRTRGIRTMSPDRVAFAGWLAARLALDLEAGTRRTLLLNREWGIGDLEEGRKEASANLSEGTGAMLWAGRGLS

SEQ ID NO: 142099 - protein, 394 aa, Oryza sativa
  Clone ID: PAT_MRT4530_43138C.1.pep
MADARSAPESLPPAFLEFLQENGLDPMMYSMVDTIPRYIRLKPGMEPHIPEIQSELTCHLNKVSWLPDFYAIPPQVQIASSMAYQQGKIYGIDAASGAAVLALDVQPGEHVLDLCAAPGAKLCMLADMLGGRGSLTGVDVAKHRLAACRTMLQKYSLGDRCRLFVADGTSFSILPVNSSLGNGEGSTCHKDNGSTLSEWTSKRSWKDRQKSKKARMAGSPHLTSTSEPELIYYGKHSGLVGLRKCDAIRPSADDEAQTSGYDKVLVDAECTHDGSIKHIQKFEFWGWKTLDRRVLDAERTDDLLHLQLRLLTNGFKLLKTGGSLVYSTCSLTVAQNENVVQQFLCKHSSAELQKIDSADSWPCRSGSIFKTLRFDPATSQTSGLFVAKFTKLQI

SEQ ID NO: 142100 - protein, 104 aa, Oryza sativa
  Clone ID: PAT_MRT4530_43139C.1.pep
MAVFAATPSSSTVPSLPPRSPSSLSVAPPVAPLSPPPPCVARSPPSPPVAPLSPPPPCVARSPPSLPVAPLSPPPPCRAHSPPSPLVAPLLPPPPCPMRSRPSS

SEQ ID NO: 142101 - protein, 1302 aa, Oryza sativa
  unsure (1)..(1302): unsure at all Xaa locations
  Clone ID: PAT_MRT4530_4313C.1.pep
MLNPVALLRSASSRSSSSRFLLAPTSSIEDLYDNETNSCYSEESCSTMSGSHHSTLDRLYTWEKKLYKEVKAGERLRIDYEKRLNHLRNQDVKGDEPSSVDKTRAALRSLHTRMKVSIHTVQSISARIEVLRDEEMQPQLMELIRGLSRMWRTMAERHKAQKRTIDDAKLLFLQRHPTAAAATATAIALSAPDAATPPPAAVALECEIRAWRGALETWLSAQRAYARALAAWARRCLGIGGARRRGHRPPAALAAGGPRVCYGMGAPGSTRRWKGWVMEGLDFFVAGVGSVCSGVATGMEGMAGRVLCAGMAAVTGAMAEFADASADGYDALVSAVAAGAPGRRKEEPTCGPQIWDVGLHVFRYFERVMATESAVRLIGGTGSGNWSKDFGAFDSSLGSLSGEGLGFVDNNSGVYGGWRESVPNRSGSAPPSMEGSLAALGHMIGQQSGNLEATLGGKLGNVADSSKSEEQLRADPAYCDYYGSKVNLNPRLPPPLMSRESRRFMNRVGKVKEWRGRKPLXLYDSSTHPSNSNTGDGISDHSDINSSTNFSIDAVKTSGLNSWTPVPVTNTVRSTHSNSISSTSVPSSSSPDNNPSMQTSQQEKPSIDIKHGNDVPGSGSILTELDTVNSNMKNLRISLDSHDTIHVKQQWPDNVLQQFGPSPLVQGDPIQMIPQGTHLPHVPFVENLSHTQLKLPTGDMQQFLPPPGMTTPFYAKFXPASVLPTPFGTAGYALSGSALPPVMTSYAPQVSVATPVDSPITPSFSGRPSGFPSPGNLSAGAEFVQPYKMYGQQLGVTMQPSVPDPNFFQFFQHPSLLSYAGINQYNTMGPRVSVVGNPADSFDPQKVLSQPAYPSDQRLQLPRTGIYNSPAARRGGAAPNYQGMTPYVGAPMTYPTSPVFQGQTFTGVFSPGRRNDSVRFQTPSRNMTAYSGVQGQREREKFDDPKACSFLEELKSNRARRVELSDIAGHIVEYSADQHGSRFIQQKLENCTAEEKASVFSEVLPHASSLMTDVFGNYVIQKSFEHGTPEQRRDLATKLVGHVLPLSLQMYGCRVIQKALEVMELDQKIELVRELDGNIMRCVRDQNGNHVIQKCIECVPTEHIGFVVSAFRGQVASLSMHPYGCRVIQRVLEHCGGDSQGQCIIDEILESACVLAQDQYGNYVTQHVLERGRGHERTQIISKLAGQVVTMSQNKFASNVIEKCFQHGDMTERDLLIREIVKQTEGNDNLLAMMKDQYANYVVQKILETCNEQQRELLLSRVKGHLQALRKYTYGKHIETPSQILEKLAYFFTGGVCLEPSR

SEQ ID NO: 142102 - protein, 66 aa, Oryza sativa
  Clone ID: PAT_MRT4530_43140C.1.pep
FPRNYLPHTSLLFTDPETFTNNLMLKVIQSKCAILGALDLLFPKLLFHNSFIFFESVWFNSGVSIF

SEQ ID NO: 142103 - protein, 277 aa, Oryza sativa
  Clone ID: PAT_MRT4530_43141C.1.pep
MAMKGPGLFSDIGKRAKDLLTKDYTYDQKLTVSTVSSSGVGLTSTAVKKGGLYTLDVSSVYKYKSTLVDVKVDTESNISTTLTVFDVLPSTKLVTSVKLPDYNSGKVEMQYFHENASFATAVGMKPSPVVEFSGTAGAQGLAFGAEAGFDTATGKFTKYSAAIGVTKPDYHAAIVLADKGDTVKVSGVYHLDDKQKSSVVAELTRRLSTNENTLTVGGLYKVDPETAVKARLNNTGKLAALLQHEVKPKSVLTISGEFDTKALDRPPKFGLALALRP

SEQ ID NO: 142104 - protein, 1419 aa, Oryza sativa
  Clone ID: PAT_MRT4530_43142C.1.pep
MSGVATAAIGGGGAPPPTGAAPPPTPTGAGSGAGAPGGGAVNDYNNGGNSASPSSGGPFSGYNLLLLLLLALLLFPLLALYCVRYVLVPVLHDASSMLSHYWYVPVSDIHDVHSMLLVMLRSPYTAYAMIIVSISWIKICRIMTIFSTIQKPDRSFSVVGFAAALKPHAFDGSNYKKWKARALLWLTAMQCFYVSRGKRSEPPLSPEEEAKFEASDCLFRGALISVLADNIVDVYMHMPSGKDMWDALEAKFGVSDAGSELYVMEQFYDYKMVDDRSVVEQAHEIQMLAKELENNNCELPDKFVAGGIIAKLPPSWSDFATSLKHKRQEFSVPDLIGSLGVEEKARAKDVRGKKVEGGSSANMVQKKNPHASHNNKKVKPDVKPKAATNFKKKGKGKAKGDCFVCGKSGHWAKDCPERKDRKSANMIISEGGGTSGYGKILPTVLSVFHSPDWWVDTGANIHVGRGSSLLMGNGSLAAVHGVGTVDLKFTSGKTVQLKNVQHVPSIKKNLVSGSLLCREGFRLVFESNKCVISKYGTFVGKGYDSGGLFRFSLNDMCNNHNAVNHISENDESNVWHSRLCHVNFGCMMRLANMSLIPKFTLVKGSKCHTCVQSKQPRKPHKASEARNLAPLELVHSDLCEMNGVLTKGGKKYFMTLIDDCTRFCYVYLLKTKDEALHYFKIYKAEVENQLERKIKRLRSDRGGEYFSNEFASFCKEFGIIHEMTPPYSPQSNGVAERKNRTLTEMVNAMLDTARLSKEWWGEAVLTACHVLNKIPMKHKEVNVPIVKKRKLGPKTVDCVFLGYAIHSVGYRFLIVNSGVPDMHAGTIFESRDATFFENEFPMKYTSSTSSKETVMPHEHFAPIEHNDQTPEENPEEDNIVDTRKSKRQRVAKSFGDDYIVYLVDDTPRTIEEAYSSPDADYWKEAVRSEMDSIMSNGTWEVVERPYGCKPVGCKWVFKKKLRPDGTIEKYKARLVAKGYTQKEGEDFFDTYSPVARLTTIRVLLALAASHGLLVHQMDVKTAFLNGELEEEIYMDQPDGYVLEGQEGMVCKLLKSLYGLKQAPKQWHEKFDTTLTSAGFVVNEADKCVYYRYGGGEGVILCLYVDDILIFGTSLNVIEEVKDYLSKSFEMKDLGEADVILNIKLQRGDEGGITLVQSHYVDKVLSRFGYSDCKPAPTPYDPSVLLRKNRRIARDQLRYSQIIGSLMYLASATRPDISFAVSKLSRFVSNPGDDHWQALERVMRYLKGTMSYGIHYTGYPKVLEGYSDSNWISDADEIKATSGYAFTLGGGAVSWKSCKQTILTRSTMEAELTALDTATVEAEWLRELLMDLPVVEKPVPAILMNCDNQTVIIKVNSSKDNMKSSRHIKRRLKSVRKQKNSGVIALYYVQTARNLADQFTKGLPRNVIDSASREMGLIPT

SEQ ID NO: 142105 - protein, 1050 aa, Oryza sativa
  unsure (1)..(1050): unsure at all Xaa locations
  Clone ID: PAT_MRT4530_43143C.1.pep
MACLELEPEPLRTSTPTEAILPHNPAEGHSRGISFXLLLTHSFIALLVLLVASQLQLLGSASRTIARPPCMRLEPELPPVPLLLELEMARLELEPELLRTSTPTEAILPHNPTEGHSRVGFAAALKPHAFDGSNYKRWKARALLWLTAMQCFYVSRGKQSEPPLSPEEEAKFEASDCLFRGALISVLADNIVDVYMHMPSGKDMWDALEAKFGVSDAGSELYVMEQFYDYKIVDDRSVVEQAHEIQMLAKELENNNCELPDKFVAGGIIAKLPPSWSDLATSLKHKRQEFSVSDLIGSLGVEEKARTKDVRGKKVEGGSSANMVQKKNPHASHNNKKVKPDVKPKAATNFKNKGKGKAKGDCFVCGKSGHWAKDCPERKDRKSANMVISEGGGTSGYGXRGSSLLMGNGSLAAVHGVXFCYVYLLKTKDEALHFFKTYKAEVENQLERKIKRLRSDRGGEYFSNEFASFCEEFGIIHERTPPYSPQSNGVAERKNRTLTEMVNAMLDTAGLSKEWWGEAVLTACHVLNKIPMKHKEVTPFEEWERKKLNLSYLRTWGCLAKVNVPIAKKRKLGPNTVDCVFLGYAIHSVGYKFLIVNSRVPDMHVGTIIESRDATFFENEFPMKHTPSTSSQETIMPHEHFAPIEHNDQTPEENPEEDNIVDTRKSKRQRVAKSFGDDYIVYLVDNTPRTIEEAYSSPDADYWKEAVRSEMDSIMSNGTWEVVERPYGCKPVGCKWVFKKSLGLMMDVKTAFLNGELEEEIYMDQLDGYVLEGQEGMEVKDYLSKSFEMKDLGEADVILNIKLQRGDEGGITLVQSHYVDKVLSRFGYSDCKPAPTPYDPSVLLRKNRRIARDQLRYSQIIGSLMYLASATRPDISFAVSKLSRFVSNPGDDHWQALERVMRYLKGTMSYGIHYTGYPKVLERYSDSNWISDADEIKATSGYVFTLGGGAVSWKSCKQTILTRSTMEAELTALDTATVEAKWLRELLMDLPVVEKPVPAILMNCDNQIVIIKVNSLKDNMKSSRHIKRRLKYVRKQKXLRSDSIGLCPNG

SEQ ID NO: 142106 - protein, 290 aa, Oryza sativa
  Clone ID: PAT_MRT4530_43144C.1.pep
MVLEDNSSSKSLYYVSEALAGPKTQFTELEKIAYALVMAYRKLRHYFLAHDITVPTSYPTGAAAIITSPTGRTTSFAARLEFSATNNTTEHKAILQVLRKARAMKAEAHFRGIVVTGVPRATRADVDTLAKMAAANSLMPPHVLYERNAEAAAAVVAWEESVAARDAEAAVAWDAAAAAAATWDAEAVVAAAAWDAEAVAASWDTEPAVVWDTELGGTRDNPVPSWQRCPPGGVEEARRGGGGDEARRGERGGDMGGGWRMEWNGFVGTVEGGRRRRCLLVSRSRLASRR

SEQ ID NO: 142107 - protein, 1397 aa, Oryza sativa
  Clone ID: PAT_MRT4530_43145C.1.pep
VALASPLLISCAHERLEGAVPPKPHLCLRSAPGRRVIRFLGSASRTTAHHHVWSCHRHCWRRWYAADRSSIRSWCARRCRERQQQRRQFATAGGGGTPPTGAGSGAGAPGGAVNDNNNGGNSASPSSGGPFSGYNLLLLLLLLALSLYYVRYVLVPVLHGASSMLSRYCYVPVPDIQDAHSMLLVMLRSPYTAYAMIIALTFWIKICRLMTIFPTIQKPDRSFSVVGFAAALKPHAFDGSNYKRWKARALLWLTAMQCFYVSRGKRSEPPLSPEEEAKFEASDCLFRGALISVLADNIVDVYMHMPSGKDMWDALEAKFGVSDAGSELYVMEQFYDYKMVDDRSVVEQAHEIQMLAKELENNNCELPDKFVAGGIIAKLPPSWSDFATSLKHKRQEFSVPDLIGSLGVEKKARAKDVQGKKVEGGSSANMVQKKNPHASHNNKKVKPDVKPKTATNFKKKGKGKAKGDCFVCGKSGHWAKDCPERKDRKSANMIISEGGGTSGYGKILPTVLSVFHSPDWWVDTGANIHVCADISLFSSYQVGRGSSLLIGNGSLAAVHGVGTVDLKFTSGKTVQLKNVQHVPSIKKNLVSGSLLCREGFRLVFESNKCVVSKYGTFVGKGYDSGGLFRFSLNDMCNNHNAVNHISENDESNVWHSRLCHVNFGCMTRLANMSLISKFTLVKGSKYHTCVQSKQPRKPHKASEARNLAPLEHVHSDLCEMNGVLTKGGKKYFMTLIDDCTRFCYVYLLKTKDETLHYFKIYKAEVENQLERKIKRLRSDRGGEYFSNEFASFCEEFGIIHEMTPPYSPQSNGVAERKNRTLTEMVNTMLDTAGLSKEWWGEAVLTACHVLNKIPMKHKEVTPFEEWERKKLNLSYLRTWGCLAKVNVPIAKKRKLGPKTVDCVFLGYAIHSVDYRFLIVNSGVPDMHVGTILESRDATFFENEFPMKYTPSTSSKETVMPHEHFAPIEHNDQTPKENPEEDNIVDTRKSKRQRVAKSFGDDYIVYLVDDTPRTIEEAYSSPDADYWKEAVRSEMDSIMSNGTWEVVERPYGCKPVGCKWVFKKKLRPDGTIEKYKARLVAKGYTQKEGEDFFDTYSPVARLTTIRVLLALAASHGLLVHQMDVKTAFLNGELEEEIYMDQPDGYVLEGQEGMVCKLLKSLYGLKQAPKQWHEKFDTTLTSAGFVVNEADKCVYYRYGGGEGVILCLYVDDILIFGTSLNVIEEVKDYLSKSFEMKDLGEADVILNIKLQRGDEGGITLMQSHYVDKVLNHFGYSDCKPAPTPYDPSVLLRKNQRIVRDQLRYSQIIGSLMYLASATRPDISFAVSKLSRFVSNPGDDHWQALERVMRYLKGTMSYGIHYTGYPKVLEGYSDSNWISDADEIKATSRYVVILGGGAVS

SEQ ID NO: 142108 - protein, 1217 aa, Oryza sativa
  Clone ID: PAT_MRT4530_43146C.1.pep
MSNTGDKEKETPVNTNGGNTASNSSGGPFLGYNLITLFQLEVLLLMFIAMSTLCHYVIVDAYSTLSMLMLITFTTITGSNPIVNIMFIILLFWIKICRIMTKFPTIQKPDRSFSVVGFAATLKPHAFDGSNYKRWKARALLWLTAMQCFYVSRGKRSEPPLSPEEEAKFEASDCLFRGALISVLADNIVDVYMYMPSGKEMWDALEAKFGVSDAGSELYVMEQFYDYKMVDDRSIVEQAHEIQMLAKELENNNCELPDKFVAGGIIAKLPPSWSDFATSLKHKRQEFSVPDLIGSLGVEEKARAKDVRGKKVEGGSSANMVQKKNPHASHNNKKVKPDVKPKAATNFKKKSKGKAKGDCFVCGKSGHWAKDCPERKDRKSANMIISEGGGTSGYGKILPTVLSVFHSLDWWVDTGANIHVGRGSSLLMGNGSLAAVHGVGTVDLKFTSGKTVQLKNVQHVPSIKKNLVSGSLLCREGFRLVFESNKCVVSKYGTFVGKDYDSGGLFRFSLNDMCNNHNAVNHISENDESNVWHSRLCHVNFGCMTRLANMSLIPKFTLVKGSKCHTCVQSKQPRKPHKASEARNLAPLELVHSDLCEMNGVLTKGGKKYFMTLIDDCTRFCYVYLLKTKDEALHFFKIYKAEVENQLERKIKRLRSDRGGEYFSNEFASFCEEFGIIHEMTPPYSPQSNGVAERKNRTLTEMVNAMLDTAGLSKEWWGEAVLTACHVLNKIPMKHKEITPFEEWERKKLNLSYLRTWGCLAKVNVPIAKKRKLGPKTVDCVFLGYAIHSVGYRFLIVNSGVPDMHVGTILESRDATFFENEFPMKYTPSTSSKETVMPHEHFAPIEHNDQTPEENPEEDNIVDTRKSKRQRVAKSFGDDYIVYLVDDTPRTIEEAYSSPNADYWKEAVRSEMDSIMSNGTWEVVERPYGCKPVGCKWVFKKKLRLDGTIEKYKARLVAKGYTQKEGEDFFDTYSLVARLTTIRVLLALAASHGLLVHQMDVKTAFLNGELEEEIYMDQPDGYVLEGQEGMVCKLLKSLYGLKQAPKQCHEKFDTTLTSAGFVVNEADKCVCYRYGGGEGVILCLYVDDILIFGTSLNVIEEVKDYLSKSFEMKDLGEADVILNIKLQRGDEGGITLVQSHYVDKVLSRFGYSDCKPAPTPYDPSVLLRKNRRIARDQLRYSQIIGSLMYLASATRPDISFAVSKLSRFVSNPGDDHW

SEQ ID NO: 142109 - protein, 740 aa, Oryza sativa
  Clone ID: PAT_MRT4530_43147C.1.pep
MVLLLLLLLALPAAAGGLAADGQALLAFKAAVLRDPEGALADWDASTAADPCAWNGVSCGAGSGAGGADRRVVALSLPRKGLVGSLPASPLPASLRHLNLRSNRLFGELPAPLLSAAAGLQSVVLYGNELYGPIPPELGDLPYLQILDLSSNSLNGTLPPAILRCRRLRSLALGWNNLTGALPQGFARGLSALEHLDLSHNRFSGAVPEDIGNLSRLEGTVDLSHNQFSGQIPASLGRLPEKVYIDLTYNNLSGPIPQNGALENRGPTAFVGNPGLCGPPLKNPCSPDAMPSSNPFVPKDGGSGAPGAGKNKGLGKVAIVAIVLSDVVGILIIALVFFYCYWRAVSSKEKGNGGAAGSKGSRCGKDCGCFSRDESATPSEHTEQYDLVPLDQQVRFDLDELLKASAFVLGKSGIGIVYKVVLEDGLTMAVRRLGEGGLQRFKEFQTEVEAIGKVRHPSIVTLRAYYWSYDEKLLIYDYIPNGSLSAAIHGKPGTMTFTPLPWDGRLKIMQGVAKGLSFLHEFSPKKYIHGDLRPNNVLLGSNMEPYISDFGLGRLANIAGGSPFTQSDHAGIEKAQSQQSDASFCIEEKKPSADVLDPSLARDSEREDEMIAALKVALACVQANPERRPSMRHVAETLDHLNVSLEFIVVDLGRGMEELQACKAWSLGVLEPEQPWGCVPLQDQVALKRCPIKFGPLDLHPTVMFSSSSIATGGGSRGRGGRGDLEGWFGRQPPGGGLWA

SEQ ID NO: 142110 - protein, 58 aa, Oryza sativa
  unsure (1)..(58): unsure at all Xaa locations
  Clone ID: PAT_MRT4530_43148C.1.pep
RQTKNSGRLGRRPQALDGRHEIDTKAFIIQELLFXVWEKLSKTEYNHRTXQDTPTSAE

SEQ ID NO: 142111 - protein, 157 aa, Oryza sativa
  Clone ID: PAT_MRT4530_43149C.1.pep
MYGMSRCLRNSVRLRTCTGRWAIKFLGSASSATALVLRGYCYCIGTFTKMSTEIGDKKMNNINGGNTASKSSGGTFSGVLADKIVDVYMHMPSGKDMWDSLEAKFGVSDANSERYVMEQFYDYNMVDDRSVVEQAHEIQMLAKELGNNNYELPDKFY

SEQ ID NO: 142112 - protein, 122 aa, Oryza sativa
  Clone ID: PAT_MRT4530_4314C.1.pep
MVVVVMVPVTYRSDDPTDSWGGLGIARDLAQKLAERMAMKHQKELHIANSRAARAKLNGAATKFTQMLELSSILELFLMRERRSVVISNSDPEDSANHRRDVSSNHLPARKLVETDLEKASI

SEQ ID NO: 142113 - protein, 1160 aa, Oryza sativa
  unsure (1)..(1160): unsure at all Xaa locations
  Clone ID: PAT_MRT4530_43150C.1.pep
MSAPGAAAAAGATVAIPEDGAPGAGAAANVNVNGGSSASQSSGGTFSGSFSVVGFAAALKPHAFDGSNYKRCKARALLWLTAMQCFYVSRGIRSEPPLSPEEEVKFEASDCLFRGALISVLADNIVDVYMHMPSGKDMWDALEAKFGVSDTGSELYVMEQFYDYKMVDDHSVVEQAHEIQMLAKELENNNCELPDKFVAGGIIAKLPPSSSDFATSLKHKRQEFSVSDLIGSLGVEEKARAKDNRGKKVERGSSANMVQKKNPHASHNNKKVKPDVKSKATINFKKKGKGKAKGDCFVCGKSGYWAKDCPECKDRKSANMVGRGSSLLMGNGSLAAVHGVGTVDLKFTSGKTVQLKNMQHVPSIKKNLVSGSLLCREGFRLAFESNKCVVSKYGTFVGKGYDRGGLFRSSLDDMCNNHNVVNHISKNDESNVXIRNSVMTPPYSPQSNWVAXRKSRTLTEMVNAMLDTAGLSMEWWGEAILTACHILNKIPMKHKEVTPFEEWKRKKLNLPYLRTWGCLAKVSVPIAKMRKLRPNTVDCVFLGYVIHSVGYRFLIVNSGVPNMRVGTIIESRDATFFENEFPMKHTPSTSSQETVIPHEHFAPIEHNDQTPEENPEEDNIVDTRKSKRQRVAKSFGDDYVVYLVDDTPRIIEEAYSSPNADYWKEAVRSEMDSIMSNGTWEVVECPYGCKPEGCKWVFKKKLRPDGTIEKYKARLVAKGHTQKEGGDFFDTYSPVARLTTIRLVLALATSHGLLVHKMDVKTAFLNGELEKKIYMDQPDGYVLEGQEGMVCKLLKSLYGLKKAPKQWHEKFDTTLTSAGFGVSEADKCVYYRYGGGEAVILCLYVDDILIFGNSLNVIEEVKDFLSKGFEMKDLGEANVILNIKLLRGAEGGITLVQSHYVDMVLSRFGYSDCKPALTPYDPSVLLRKNRRIARDQLRYSQIIGTLMYLASATRPDISFAVSKLSRFVSNSGDDHWQALERVMRYLKGTMSYGIHYTGYSKILEGYSDSNWISDADEIKATSGYMFTLGGGAVCXKSCKQTILTRSTMEVELTTLDTTTIQAEXLRKLLMDLPVVEKPVPAILMNCDNQTIVIKVNSLNDNMKSSRHIKRRLKSVRKQKNSGVIALDYVQTAKNLADQFTKGLPCNVIDSALREMGLIPT

SEQ ID NO: 142114 - protein, 579 aa, Oryza sativa
  Clone ID: PAT_MRT4530_43151C.1.pep
MAGGGWSSLPADLLREVSGRLYSDADHLHIHQVCTHWRAATLPVSACRPWVVAGRALQRGLVTIGDYSLRLPGGGAERMDAGLRRAPPGLRHCCGASRGWLALTDDARSPTRLALWEPLSGAEIPLPCLSPITRVSLSGDPLASPGWVAMVSQLKGREGQKTLVCRRGDAAWTMLFEHGTSEIGSVVFHGGKVYYIDIMSNIVVCDLDADGASGAKCTQFFHVRTSVSMLCSCDKFHPERGVHLVACDGEVLLVVLRWGGHPSLAEIYKPEWKGNHQLGLGERVMDLGDHSLFVGRGDTFSLSAKEFPAIKRNCVYYADKNYKQQHWISVFHLEQPDVLEEIPYPEELKEDMTNWMPHSCKHCRWQISVTEIACLNAHSIHYPHIDGHPGARPPVAAILPWLAVAVRRRPPPRRPLSVRHPPPLFPSLSLLAAPGRATAPVVCRRLCAATPVAGKGGRDGAGRALRRPLSLPDSPRHERGLPAALRGVGANSIEFPVLGRMAQDILTIPASTVSLESVFSTGSRLVSEFRSQLTPETTKALVCLQDWIRESGSSSELSTESIFDSKVVLQVSFEAQFSP

SEQ ID NO: 142115 - protein, 1423 aa, Oryza sativa
  unsure (1)..(1423): unsure at all Xaa locations
  Clone ID: PAT_MRT4530_43152C.1.pep
MKNGIDEIFRDTKKDAIVMSSTKSELQNERIFVPIVLDTNILQASENNQGNEKEKKYEVEKDLSIAPCMLEECSIDQAPIISKEEKRDTDNGVITTQGMGGAQNQRYQQGNNNRVPDDPYAKVKFKIPSFSGYYDAEKYSDWEMIVEQKFSAHLVPDQHRVRQASSEFKDFAIMWWARLADDGILPTTWKELKVAMRDIFVPPSYLRDLSKKLMRLEQRDKSVQDYYGELQKGLMRCSIVKGTEDSICRFYMGLRRKIQDIVDNKEFNTVNQLFQFAMLAVKELQGRDQQVKNKASTYIPRAKPSLGLPKPISFWTTPLASKRPVASGVSAAPKPPSPRPAVSGKGSSQVSTKSASSIASTGRTSRIRCHHCHGFGHVQKICPSQRAYVATVDCYICTSDVEDVEVEEKKDGEQKDLSIAPCMLEECLIDQAPIISEDEKKGNDNGATTNQGISLLDEVNLVSARLITRGDVVLRLRGSVACSFRSQIELCRDSAQIDCLSIPIGRSGPNILIIRGKRSEPPLSPEEEVKFEASDCLFRGALISVLADNIVDVYMQMPSRKDMWDALEAKFGVSDAGSELYAMEQFYDYKMVDDRSIVEQAHEIQMLAKELENNNCELPDKFVADGIIAKLLPSWSDFATSLKHKRQEFSVSDLIGSLGVEEKARAKDNRGKKVEGGSSANMLQKKNPHASHNNKKVKADVKPKATTNFKKKGKGKAKGDCFVCGKSGHWAKDCPERKDRKSANMVISEGRGTSGYGXRGFSLLMGNGSLVAVHGVGXKHCVTFKTYKAEVENQLERKIKRLRSDRGGEYFSNEFTSFCEEFGIIHEMTPPYSPQSNGVAERKNRTLTEMVNAMLDTAGLSKEWWGEAVLTACHVLNKIPMKHKEVTPFEEWERKKLNLSYLRTWGCLAKVNVPIAKKHKLGPNTVDCVFLGYAIHSVGYRFLIVNYGVPDMRVGTIIESRDATFFDNEFAMKNTPSTSSQETVIPHKHFAPIEHNDQTPEGNPEEDNIVDTRKSKRQRVAKSFGDDNIVYLVDGTPRTIEEAYSSPDADHWKEAVRSEMDSIMSNGTWEVVERPYGCKPVGCKWVFKKKLRPDGTIEKYKARLVAKGYTQKEGEDFFDTYSPVARLTTIRVLLALAASHGLLVHQMDVKTAFLNGELEEEIYMDQPDGYVLEGQERMVCKLLKSLYGLKQAPKQWHEKFDTTLTSVGFVVNEVDKCVYYRYGGGEGVILCLYVDDILIFGTSLNVIEEVKYFLSKSFEMNDLGEVDVIFNIKLLRGDEGGITLVQSHQVDKILSRFGYSVYKPAPTPYDPSVLLRKNRRIARDQLRYSQIIGSLMYLASATRPDISFVVSKLSRFVSNPGDDHWHALERVMCYQKGTMGYGIHYTGYSKVLEGYSDSNLISDADEIKATSGYVFTLGGGAVS

SEQ ID NO: 142116 - protein, 108 aa, Oryza sativa
  unsure (1)..(108): unsure at all Xaa locations
  Clone ID: PAT_MRT4530_43153C.1.pep
GKVATCVLIIMHTSTAVGILKMMHWGAXLLHKLLTCGVNDAGYTVLRPFLRHDVVHERGERRPTSECVGIDGXRLLVGNKVNVPRGRRDDVKAKREGCHAYKPISLPC

SEQ ID NO: 142117 - protein, 2259 aa, Oryza sativa
  Clone ID: PAT_MRT4530_43154C.1.pep
MSGVAAAATGGGGAPPPTGAGAPPPTGAGSGAGAPGGGAVNDYNNGGNSASPSSGGPFSGYNLLLLLLLLALFLFPLLALYCVRYVLVPVLHDASSMLSRYWYVPVSDIHDAHSMLLVMLRSPYTAYAMIIVSISWIKICRIMTIFPTIQKPDRSFSVVGFAAALKPHAFDGSNYKRWKARALLWLTAMQCFYVSRGKRSEPPLSPEEEAKFEASDCLFRGALISVLADNIVDVYMHMPSGKDMWDALEAKFGVSDAGSELYVMEQFYDYKMVDDRSVVEQAHEIQMLAKELENNNCELPDKFVAGGIIAKLPPSWSDFATSLKHKRQEFSVPDLIGSLGVEEKARAKDVRGKKVEGGSSANMVQKKNPHASHNNKKVKPDVKPKVATNFKKKGKGKAKGDCFVCGKSGHWAKDCPERKDRKSANMIISEGGGTSGYGKILPTVLSIFHSPDWWVDTGANIHVGRGSSLLMGNGSLAAVHGVGTVDLKFTSGKTVQLKNVQHVPSIKKNLVSGSLLCREGFRLVFESNKCVVSKYGTFVGKGYDSGGLFRFSLNDMCNNHNAVNHISKNDESNVWHSRLCHVNFGCMTRLANMSLIPKFTLVKGSKCHTCVQSKQPRKPHKASEARNLAPLELVHSDLCEMNGVLTKGGKKYFMTLIDDCTRFCYVYLLKTKDEALHYFKIYKAEVENQLERKIKRLRSDRGGEYFSNEFASFCEEFGIIHEMTPPYSPQSNGVAERKNRTLTEMVNAMLDTAGLSKEWWGEAVLTACHVLNKIPMKHKEVTPFEEWERKKLNLSYLRTWCCMAKSRDATFFENEFPMKYTPSTSSKETVMPHEHFAPIEHNDQTPEENPEEDNIVDTRKSKRQRVAKSFGDDYIVYLVDDTPRTIEEAYSSPDADYWKEAVRSEMDSIMSNGTWEVVERPYGCKPVGCKWVFKKKLRPDGTIEKYKARLVAKGYTQKESEDFFDTYSPVARLTTIRQAPKQWHEKFDTTLTSAGFVVNEADKCVYYRYGGGEGVILCLYVDDILIFGTSLNVIEEVKDYLSKSFEMKDLGEADVILNIKLQRGDEGGITLVQSHYVDKVLSRFGYSDCKPAPTPYDPSMLLRKNRRIARDQLRYSQIIGSLMYLASATRPDISFAVSKLSRFVSNPGDDHWQALERVMRYLKGTMSYGIHYTGYPKVLEGYSDSNWISDADEIKATSGYVFTLGVEAELTALDTATVEAEWLRELLMDLPVVEKPVPAILMNCDNQTVIIKVNSSKDNMKSSRHVKRRLKSVRKQKNSGVIALDYVQTAKKLADQFTKGLPRKRSEPPLSHEEEAKFEASDCLFRGALFSVLADNIVDVYMHMPSGKDMWDALEAKFGVSDAGSELYVMEQFYDYKMVDDRSVVEQAHEIQMLAKELENNNCELPDKFVAGGIIAKLPPSWSDFATSLKHKRQEFSVSDLIGSLGVEEKARAKDNRGKKFEGGSSANMVQKKNPHASHNNKKVKPDVKSKATTNFKKKGKGKAKRDYFVCGKSGHRAKECPERKDRKSANMVGRGSSLLMGNGSLAAVHGVGSKCHTCVQSKQPRKPHKASEARNLAPLELVHSDLCEMNGVLTKGGKKYFMTLIDDCTRFLYVYLLKTKDEALHYFKTYKAEVENQLERKIKRLRSDRGGEYFSNEFASFCKEFGIIHERTPPYSPQSNGVAERKNRTLTEMVNAMLDTAGLSKEWWGEAVLTACHILNKIPTKHKEVTPFEESERKKLNLSYLRTWGCLAKSRDATFFENEFPMKHTPSTSSQETVMPHEHFAPIEHNDQMPEGNPEEHNIVDTHKSKQQRVAKSFGDDYIVYLVDDTPRTIEEAYSSPDADYWKEAVRSEMDSIMSNGTWEVIECPYGCKLVGCKWVFKKKLRPDGTIEKYKARLVVKGYTQKEDEDFFDTYSPVARLTTIRVLLALAASHGFLVHQMDVKTAFLNGELLNVIEEVKDFLSKSFEMKDLGEADVILNIKLLRGDEVGITLVQSHYVDKVLSRFGYSDCKPAPTPYDPSVLLRKNPRIARDQLRYSQIIGSLMYLASATRPDISFAVSKLSGFVSNSGDDHWQALERVMRYLKGTMSYGIHYTGYPKVLEGYSDSNWISDANEIKATSRYVFTLGGGAVSWKSCKQTILTRSTMEAELTALDTATVEAEWLLELLMDLPVVGKPVPAILMNCDNQTMIIKVNSSKDNMKSSRHIKRRLKSVRKQKNSGVIALDYVQTARNLADQFTKGLPRNVIDSASMEMGLIPT

SEQ ID NO: 142118 - protein, 162 aa, Oryza sativa
  unsure (1)..(162): unsure at all Xaa locations
  Clone ID: PAT_MRT4530_43155C.1.pep
SQVAQSTQQLRLHCDATSKLKXTNKIDTDEAHQPKLPRSHFLHIASINNPIRRLQCIIVAELHRTRTVKQLRLYPTVTKXKDDEHPQALEVLQESTXWLGCTRKVLAARRIDAKTTPPRKGMTPKGIVAVMPAHGLARFSPAIPNQSXIQPLCSTTVAGPPR

SEQ ID NO: 142119 - protein, 1337 aa, Oryza sativa
  unsure (1)..(1337): unsure at all Xaa locations
  Clone ID: PAT_MRT4530_43156C.1.pep
MSGVAAAAIGGGGAAPPPTPTGAGSGAGAPGGGAVNDYNNGGNSASPSSGGPFSGYNLLLLLLLALLLFPLLALYCVRYVLVPVLHDASSMLSHYWYVPVSDIHDAHSMLLVMLRSPYTAYAMIIVSISWIKICRIMTIFPTIQKPDRSFSVVGFAAALKPHAFDGSNYKRWKARALLWLTAMQCFYVSRGKRSEPPLSPEEEAKFEASDCLFRGALISVLADNIVDVYMHMPSGKDMWDALEAKFGVFDAGSELYVMEQFYDYKMVDDRSVVEQAHEIQMLAKELENNNCELLDKFVAGGIIAKLPPSWSDFATSLKHKRQEFSVPDLIGSLGVEEKARAKDVRGKKVEGGSSANMVGRGSSLLMGNGSLAAVHGVGTVDLKFTSGKTVQLKNVQHVPSIKKNLVSGSLLCREGFRLVFESNKCVVSKYGTFVGKGYDSGGLFRFSLNDMCNNHNAVNHISENDESNVWHSRLCHVNFGCMMRLANMSLIPKFTLVKGSKCHTCVQSKQPRKPHKASEARNLAPLELVHSDLCEMNGVLTKGGKKYFMTLIDDCTRFCYVYLLKTKDEALHYFKIYKAEVENQLERKIKRLRSDRGGEYFSNEFASFCEEFGIIHEMTPPYSPXQVAERKNRTLTEMVNAMLDTAGLSKEWWGEAVLTACHVLNKIPMKHKEVTPFEEWERKKLNLSYLRTWGCLAKVNVPIVKKRKLGPKTVDCVFLGYAIHSVGYRFLIVNSGVPDMHAGTIFESRDATFFENEFPMKYTPSTSSKETVMPHEHFAPIEHNDQTPEENPEEDNIVDTRKSKRQRVAKSFGDDYIVYLVDDTPRTIEEAYSSPDADYWKEAVRSEMDSIMSNGTWEVVERPYGCKPVGCKWVFKKKLTPDGTIEKYKARLVAKGYTQKEGEDFFDTYSPVARLTTIRVLLALAASHGLLVHQMDVKTAFLNGELEEEIYMDQPDGYVLEGQEGMVCKLLKSLYGLKQAPKQWHEKFDTTRTSAGFVVNEADKCVYYRYGGGEGVILCLYVDDILIFGTSLNVIEEVKDYLSKSFEMKDLGEADVILNIKLQRGDEGGITLVQSHYVDKVLSRFGYSDCKPAPTPYDPSVLLRKNRRIARDQLRYSQIIGSLMYLASATRPNISFAVSKLSRFVSNPGDDHWQALERVMRYLKGTMSYGIHYTGYPKVLEGYSDSNWISDADEIKATSGYAFTLGGGAVSWKSCKQTILTRSTMEAELTALDTATVEAEWLRELLMDLPVVEKPVPAILMNCDNQTVIIKVNSSKDNMKSSRHIKRRLKSVRKQKNSGVIALDYVQTARNLADQFTKGLPRNVIDSASREMGLIPT

SEQ ID NO: 142120 - protein, 109 aa, Oryza sativa
  Clone ID: PAT_MRT4530_43157C.1.pep
FFFFFFDLTCHHATSCQCPPFHPFVHHSHTLDLSTSSLQLSPTVLCECIQFHFILSHLTSKTAVTSTPLALLSHCIICACTIGTCQCPTHHCVKHPVHKCHCAGTRSLD

SEQ ID NO: 142121 - protein, 1255 aa, Oryza sativa
  Clone ID: PAT_MRT4530_43158C.1.pep
MSGVAAAAAGGDGGGGAPPTGAGAGAPGGAVNDNNNGGNSASPSSGEPFSGTFSVVGFAAALKPHAFDGSNYKRWKARALLWLTAMQCFYVSRGKRSEPPLSPEEEAKFEASDCLFRGALISVLADNIVDVYMHMPSGKDMWDALEAKFGVSDAGSELYVMEQFYDYKMVDDRSVVEQAHEIQMLAKELENNNCELPDKFVAGGIIAKLPPSWSDFATSLKHKRQEFSVSDLIGSLGVEEKARAKDVRGKKVEGGSSANMVQKKNPHASHNNKKVKLDVKPKAATNFKKKGKGKAKGDCFVCGKSEHWAKDCPERKDRKSANMVISEGGGTSGYGKILPTVLSVFHSPDWWVDTGANIHVGRGSSLLMGNGSLAAVHGVGTVDLKFTSGKTVQLKNVQHVPSIKKNLVSGSLLCREGFRLVFESNKCVVSKYGTFVGKGYDSGGLFRFSLNDMCNNHNAVNHISENDESNVWHSRLCHMNFGCMTRLANMSLIPKFTLVKGSKCHTCVQSKQPRKPHKASEARNLAPLELVHSDLCEMNGVLTKGGKKYFMTLIDDCTRFCYVYLLKTKDEALHYFKIYKAEVENQLERKIKRLRSDRGGEYFSNEFASFCKEFGIIHERTPPYSPQSNGVAERKNRTLTEMVNAMLDTAGLSKEWWGEAVLTACHVLNKIPMKYKEVTPFEEWERKKLNLSYLRTWGCLAKVNIPIAKKRKLGPNTVDCVSLGYAIHSVGYRFLIVNSGVPDMHVGTILESRDATFFENEFPMKHTPSTSSKETVMPHEHFAPIEHNDQTPEENPEEDNIVDTRKSKRQRVAKSFGDDYIVYLVDDTPRTIEEAYSSPDADYWKEAVRSEMDSIMSNGTWEVVERPYGCKPVGCKWVFKKKLRPDGTIEKYKARLVAKGYTQKEGEDFFDTYSPIARLTTIRVLLALAASHGLLVHQMDVKTAFLNGELEEEIYMDQPDGYVLECQEGMVCKLLKSLYGLKQAPKQWHEKFDTTLTSAGFVVNEADKCVYYRYGGGEGVILCLYVDDILIFGTSLNVIEEVKDYLSKSFEMKDLGEADVILNIKLQRGDEGGITLVQSHYVDKVLSRFGYSDCKPAPTPYDPSVLLRKTRRIARDQLRYSQIIGSLMYLASTTRPDISFVVSKLSRFVSNLGDDHWQALERVMRYLKGTMSYGIHYTGYPKVLEGYSDSNWISDADEIKATSGYVFTLGGGAVSALDTATVEAEWLRELLMDLPVVEKPVPAILMKAVQYQSRF

SEQ ID NO: 142122 - protein, 197 aa, Oryza sativa
  Clone ID: PAT_MRT4530_43159C.1.pep
MEEHGKVHRFLVCCCSGTGNRAHYRIARSQLSLGLKRTKAFFCGITTSPGSVGPLLLLSHEPANGTTTTTTTTNDDHQQDGMMPSSSKPRNNTTTDADADAADDAERAYIGKISAPLIAIVIGFGVMFLFLAKSETVRRDKTILFGYSAAAFVISIFGVCHILDYGRLWFRRRNAANNNTRVHPSVSSQLPPQMDMC

SEQ ID NO: 142123 - protein, 113 aa, Oryza sativa
  Clone ID: PAT_MRT4530_4315C.1.pep
MARQFMGTAQHYPQRRAKGDVDLGGRDRLAMALTASHRTDTGPGESATAARAALGRTQSHGREQGPAHSMVHPCRSLQPAASAGGMATERSNSRELARPRKCDRMMFAEACVS

SEQ ID NO: 142124 - protein, 55 aa, Oryza sativa
  Clone ID: PAT_MRT4530_43160C.1.pep
MADGAGGGVLIRAASIDLRSPVIDLVNLSAGLDCSLDRFITSCVKNFVPKLPFED

SEQ ID NO: 142125 - protein, 196 aa, Oryza sativa
  Clone ID: PAT_MRT4530_43161C.1.pep
RRRGSPGTGTSTSGHPPPPPPCCSGTSPARRSTRSPASGSPPPPPSGTTRTSSAPPATSRSPSATNRRRRCPACPGSRCPAASSATTSRTAAAASRRRVETVAGRGLTTTTAAVMASAAPRAATAWLRGTPGSAGGFPGSRGSGGRGPPTRPRRRLPSSSVSSLPTASPSSQKQPRRARRRRRAWMPVTPSSSSSL

SEQ ID NO: 142126 - protein, 63 aa, Oryza sativa
  unsure (1)..(63): unsure at all Xaa locations
  Clone ID: PAT_MRT4530_43162C.1.pep
VWVFFFFFFFXIKIYSRSFHIFHSHLPHPTTFSRSKSHSYIKSKRDQVKQKQKPSPAGKIKRR

SEQ ID NO: 142127 - protein, 626 aa, Oryza sativa
  Clone ID: PAT_MRT4530_43163C.1.pep
MAMRLFPSSSPLPPPPPLLPSPSAKAPPSAPFSLSLRLRRARVAASAAAAAGGPERGAGGYEGDAEGEGSSGAFDRGMSEIARKVPLFEPARGDAAAVAGERPLPINLELWLYRAKVHTRKYEFADAEKLLNQCIMYWPEDGRPYVALGKLYSKQSRFDKARAAYERGCQAAQGENPYIWQCWAVLERKGGNIRRARELFDAATVADAKHIAAWHGWAILEIKQGNIKKARNLLAKGLKYCGGNEYIYQTLALLEARAERFEQARTLFQQATQCNPKSCASWLAWAQVEIRAENNAMARKLFEKAVQASPKNRFSWHVWALFEAEQGSIDKARKLLKIGHAVNPRDPVILQSLALLEYNYSSPNTARVLFRKASQIDPRHQPVWIAWGWMEWKEGNARTARTLYQRALSVNSTNECAARCLQAWGVLEQRAGNYTAARRLLRSSLNINSQSEVTWMTWAALEDEQGDPVRAEEIRNIYFQQRTEVVDDASWVMGFLDIIDPALDSVKKLLNIDQPSGPATRDNPKSTGEPSNTATVRTSADAEFSGGSRAEGSDASDLANADDKESDDAAETPESDFDVDGFIRRRLALDPAELDAVLEGSDPRGVVSRRRTQRLPRKPLPLLPVP

SEQ ID NO: 142128 - protein, 241 aa, Oryza sativa
  Clone ID: PAT_MRT4530_43164C.1.pep
MGRPRGGTSKGKQKIEMCCIDGKEKRQVTFSKRRRGLFKKASEISTLSGASIAIVSFSKAGNVFAFGSPSVDAVLRRHVVAGPSTSTSHAHAGGDVFADDGGDNPEVLNALKRATDEAAAEVAAEDARQSGVEGKITEAMAAGRRRFWWDAANVEALGEAELPVFERALHKLRGAVAQGGNNPIQERWDRIPAQGSPGGSYGWEDLSPTGKLYNQPPFAYRLPVMQSIVSDQLGVVRAMLL

SEQ ID NO: 142129 - protein, 104 aa, Oryza sativa
  unsure (1)..(104): unsure at all Xaa locations
  Clone ID: PAT_MRT4530_43165C.1.pep
MQKKIIAPPPPXSSQPPPPLLSSPSPSPXPPVEPSRPDPPPXPPPPPPPSSVPDPPVETAVAISATLQIRRPPSSSPSHPPPPPHEVGSCSWICLRRPDLPLAV

SEQ ID NO: 142130 - protein, 57 aa, Oryza sativa
  Clone ID: PAT_MRT4530_43166C.1.pep
KLQCPSPSKISPFSSTLNNICHFSYCHYSIMHHTSYSSNQTPPLLLNNLSTSYSYFK

SEQ ID NO: 142131 - protein, 49 aa, Oryza sativa
  unsure (1)..(49): unsure at all Xaa locations
  Clone ID: PAT_MRT4530_43167C.1.pep
CFLTSSTANSKVFNIYHVMSLNCGSCRALLSFLXQHPHLYHSPPPPDKT

SEQ ID NO: 142132 - protein, 253 aa, Oryza sativa
  Clone ID: PAT_MRT4530_43168C.1.pep
MESAPASRVRREDVARAVAALLRWLQHHPTPAPEPIYLLVTLKRAPARRFEHTLRLPRSPFPSISLVSDRLPADLPDDIDPLPSPALGSLPPAARRGLVLVDRRLRVRPGGKGKAAAKAARVVPVDLADQAWAESAREAARRVELRVEGGTCRAVRVGHAAMAREEAVENVVAAVEAAAACVPRKWRNVRALHVKAPESVALPLYSAVGTGGGDDGGNGEAEDAKRKGVAVKEQGIVKRRKKSSSVSVGGDQL

SEQ ID NO: 142133 - protein, 52 aa, Oryza sativa
  unsure (1)..(52): unsure at all Xaa locations
  Clone ID: PAT_MRT4530_43169C.1.pep
CYVRTLGPNLWYGYNDAGIGDTIVDPLKDTLGPLLNILIXLMAVKSLVFAPF

SEQ ID NO: 142134 - protein, 77 aa, Oryza sativa
  unsure (1)..(77): unsure at all Xaa locations
  Clone ID: PAT_MRT4530_4316C.1.pep
VRVTDYPRLVXKPKRCDFVAACVIRIAHGLDQGIADAMGMNILFLLIKWPEEGLRSGLWEFPSVLVNEETGALNRRK

SEQ ID NO: 142135 - protein, 331 aa, Oryza sativa
  Clone ID: PAT_MRT4530_43170C.1.pep
MDNLGHRENGRQRPDQYKGLHTQWMMPQTQRHLKDHQSMNLLALMNDRDNAIRERDHALAEKKAAIAERDMAFTQRDAAMAERNAAVVERDNALAALELARTNGLNMNNGNGFPQGSLSGSKNIHHHDQLSHAQSSPLQLADSPYDHAREMHISEAYPISTAPGSAGKAKRPKKNSSQASPLKRPSGVLRKTKKPSGDWKNVGMSGCGDDSAHASVMKNEWKDQNLGLNQVAFDDSTMPAPACSCTGKLRQCYKWGNGGWQSSCCTMNISMYPLPVMPNKRHARMGGRKMSGGAFTKLLSRLAAEGHDLSTPVDLKDHWAKHGTNRYITIR

SEQ ID NO: 142136 - protein, 61 aa, Oryza sativa
  Clone ID: PAT_MRT4530_43171C.1.pep
QSMIYTGDWLQVYDEQWTIYAQLAVNLGSLIPSMILLPVLTLLLCDVELKDRSDFLQTHHH

SEQ ID NO: 142137 - protein, 63 aa, Oryza sativa
  Clone ID: PAT_MRT4530_43172C.1.pep
RQCVTTHNVVSLVANRSGGLIQSNTMWIWGCNSHCTEACFTGQHLPMSLGIWVTCQLTKHRRC

SEQ ID NO: 142138 - protein, 362 aa, Oryza sativa
  Clone ID: PAT_MRT4530_43173C.1.pep
MTPHLPVSPSSSHHLLDAAPTPASPAHAQHRRRRRRRMCGGGRGRGGGAHQVRCCAAAAPQPRVATGAGLRGAAATTRVFVVSDLHTDYRENMDWVLRLPVGGGGGGGDGVGIDALVVAGDVAETRDNFARTMAALRERFGAVFYVPGNHDLWLRRENGRYSFDKEKDVNSVRVPSLEMACKDFHACQWPPDLANEDEALALYFDKLNDRNQDAIEEVKKSSKQILTFSHFVPRQELCPEKRMLYYPNLPKVIGSDFLERRLRTIHDNTKHGAACHVFGHTHFCWDSVVDEIRYVQAPLAYPRERKRRMNGGDGWLPFCIYRDGFNPEIYPALWSDYYNKNRREPENTQLAPWVAKYFSKYY

SEQ ID NO: 142139 - protein, 60 aa, Oryza sativa
  Clone ID: PAT_MRT4530_43174C.1.pep
CQQPMASQNHYTVDNRTMFLFPCPLISTCTEVHKDYMLLHPRMPKRGEKKRWLWGKAIIT

SEQ ID NO: 142140 - protein, 67 aa, Oryza sativa
  Clone ID: PAT_MRT4530_43175C.1.pep
MKKIERREEKSRRGKRAFYSTGTPLVRCDSDSFFAAGPPDSWSITHRQKTTPGFLVGGVSQQKRFGD

SEQ ID NO: 142141 - protein, 48 aa, Oryza sativa
  Clone ID: PAT_MRT4530_43176C.1.pep
SPFYWCVQGVCVKNMVFSNGLWGVPRPGCSLKNDIFFGKWGESFVPIL

SEQ ID NO: 142142 - protein, 134 aa, Oryza sativa
  unsure (1)..(134): unsure at all Xaa locations
  Clone ID: PAT_MRT4530_43177C.1.pep
VCVLRLPVGGGGGGGDGVGIDALVVAGDVAETRDNFARTMAALRERFGAVFYVPGNHDLWLRRENGRYMDSLEKLTALLDACSELGVDTGPRIIGDLGIIPLFSWYHKSFDKEKDVNSVRVPSLEMAXCKDFHA

SEQ ID NO: 142143 - protein, 176 aa, Oryza sativa
  unsure (1)..(176): unsure at all Xaa locations
  Clone ID: PAT_MRT4530_43178C.1.pep
APQPRVATGAGLRGAAATTRVFVVSDLHTDYRENMDWVLRLPVGGGGGGGDGVGIDALVVAGDVAETRDNFARTMAALRERFXAVFYVPGNHDLWLRRENGRYMDSLEKLTALLDACSELGVDTGPRIIGDLGIIPLFSWYHKSFDKEKDVNSVRVPSLEMVTFFSPNGLICYSLL

SEQ ID NO: 142144 - protein, 235 aa, Oryza sativa
  Clone ID: PAT_MRT4530_43179C.1.pep
MPVDELDDGDEDGELYGDEEGELEDDEASRHGPQMATAAVAVLGRRHRRPRPGRRCHPCLVVDAAARALAAAAARALAAAAARAWSSMPPPTPTPWPSTPLPLPTQPRPRPCQLNRALAPGAMAPPPPLPMWVNFLKRSCRAKRGDQKEVSKNGTEIPFDYSSTSTYNPNDPTKEDDVNQHKNAQAANAIFSTLSGSEFNRVDGIESTKEIWYTLQNVHEAMDSVRESKVEILKG

SEQ ID NO: 142145 - protein, 64 aa, Oryza sativa
  Clone ID: PAT_MRT4530_4317C.1.pep
ALRLNMLCLLYVLLISSYFQVFYNTAQYYRAYYGHKTVQLFYNEMVEYEAYILYTALAKCFNYL

SEQ ID NO: 142146 - protein, 1385 aa, Oryza sativa
  unsure (1)..(1385): unsure at all Xaa locations
  Clone ID: PAT_MRT4530_43180C.1.pep
MSGVAAATAGGGGTPPPTGAGSGSGAGAPGGGAVNDYNNGGNSASPSSGGPFSGYNLLLLLLLLALFLFPLLALYYVRYVLVPVLHDASSMLSRYWYVPVPDIHDAHSMLLVMLRSPYTAYAMIIVSFSXIKIYRLMTIFPTIQKPDRSFSVVGFAAALKPHAFDGSNYKRWKARALLWLTAMQCFYVSRGKRSEPPLSPEEEAKFEASDCLFRGALISVLADKIVDVYMHMPSGKDMWDALEAKFGVSDAGSELYVMEQFYDYKMVDDRSVVEQSHEIQMLAKELENNNCELPDKFVAGGIIAKLPPSWSDFATSLKHKRQEFSVPDLIGSLGVEEKARAKDVRGKKVEGGSSANMKKGKGKAKGDCFVCGKSGHWAKDCPERKDRKSANMIISEGGGTSGYVGRGSSLLMGNGSLAAVHSVGMVDLKFTSGKTVQLKNVQHVPSIKKNLVNGSLLCREGFRLVFESNKCVVSKYGTFVGKGYDSGGLFRFSLNDMCNNHNAVNHISENDESNVWHSRLCHVNFGCMTRLANMSLIPKFTLVKGSKCHTCVQSKQPRKPHKASEARNLAPLELVHSDLCEMNGVLTKGGKKYFMTLIDDCTRFCYVYLLKTKDEALHYFKIYKAEVENQLERKIKRLRSDRGGEYFSNEFASFCEEFEIIHEMTPPYSPQSNGVAERKNRTLTEMVNAMLDTAGLSKEWWGEAVLTACHVLNKIPMKHKEVTPFEEWERKKLNLSYLRTWGCLAKVNVPIAKKQKLGPKTVDCVFLGYAIHSVGYRFLIVNSGVPDMHAGTILESRDATFFENEFPMKYTPSTSSKETVMPHEHFAPIEHDDQTPEENPEEDNIVDTRKSKRQRVAKSFGDDYIVYLVDDTPRTIEEAYSSPDADYWKEAVRSEMNSIMSNGTWEVVERPYGCKPVGCKWVFKKKLRPDGTIEKYKARLVAKGYTQKEGEDFFDTYSPVARLTTIRVLLALAASHGLLVHQMDVKTAFLNGELEEEIYMDQPDGYVLEGQEGMVCKLLKSLYGLKQAPKQWHKKFDTTLTSAGFVVNEADKCVYYRYGGGEGVILCLYVDDILIFGTSLNVIEEVKDYLSKSFEMKDLGEADVILNIKLQRGDEGGITLVQSHYVDKVLSRFGYSDCKPAPTPYDPSVLLRKNRRIARDQLRYSQIIGSLMYLASATRPDISFAVSKLSRFVSNPGDDHWQALERVMRYLKGTMSYGIHYTGYPKVLEGYSDSNWISDADEIKATSGYAFTLGGGAVSWKSCKQTILTRSTMEAELTALDTATVEAEWLRELLMDLPVVEKPVPAILMNCDNQTVIIKVNSSKDNMKSSRHIKRRLKYVRKQKNSGVIALDYVQTARNLADQFTKGLPRNVIDSASREMGLIPT

SEQ ID NO: 142147 - protein, 82 aa, Oryza sativa
  Clone ID: PAT_MRT4530_43181C.1.pep
MELGDKAVGFILTLTSLSIFTYYTFWVIILPFVDSDHFVHKYFLPQEYAILIPVLAGVILLSFLSVFMGLVMLKSKKKKKTT

SEQ ID NO: 142148 - protein, 1269 aa, Oryza sativa
  Clone ID: PAT_MRT4530_43182C.1.pep
MSAPGAGAAGVAVGGDGVPGAGAGGGALGARAGATNNNINGGNFASQSSGGPFSGYILLLFLLLALYRYVPVPDIHDAFSMLALYCYVPVPDIHDAFSVLLRYCYVIHDAFSMLLVMLSLDYPTLRWKAHALLWLTAMQCFFVSRGKRSEPPLSPEEEAKFEASDCLFRGALISVLADNIVDVYMHMPSGKDMWDALEAKFGVSDAGSELYVMEQFYDYKMVDDRSVVEQAHEIQMLAKELENNNCELPDKFVHKRQEFSVSDLIGSLGVEEKARAKDNRGKKKKNPHASHNNKKIKLDVKSKAATKFKKKCKGKAKGDCFVCGKSGHWAKDCPECKDRKSANMVISEGGGTSGYGKILPTVLSVFHSPDWWVDTGANIHACADISLFSSYQVGRGSSLLMGNRSLAAIHGVGTVDLKFTSGKTMQLKNVQHVPSIKKNLVSGSLLCREGFRLVFESNKCVISKYGTFVGKGYDSGGLFRFSLNDMCNNHNVVNHISENDESNVWHSRLCHVNFGCMTLLANMSLIPKFTLVKGSKCHTCVQSKQPCKPHKTSEARNLAPLELVHSDLCEMNGVLTKGGKKYFMTLIDDCTRFCYVYLLKTKDEALHFFKTYKAEVENQLERKIKLLRSDRGGEYFFNEFASFCEEFGIIHERTPPYSPQSNGVAERKNRTLTEMVNAMLDTAGLSKEWWGEAVLTACHVLNKILMKHKEVIPFEEWERKKLNLSYLRTWGCLAKVNVPIAKKRKLGPNTVDCMFLGYAIHSVGYRFLIVNSGVPDMYVGTIIESRDATFFENEFPMKHTPSTSSQETVMPHEHFAPIEHNDQTPEENPEEDNIVDTRKSKRQRVAKSFGDDYIVYLVDDTPRTIEEAYSSPDADYWKEAVRSEMDSIMSNDTWEVVERPYGCKPIGCKWVFKKKLSPDGTIEKYKARLVAKGYTQKEGKDFFDTYSPVAHLTMIRVLLALAASHGVLVHQMNVKTAFLNGELEEEIYMDQPDGYVLEGFVVNGADKCVYYRYGGGEGVILCLYVDDILIFGTNLNVIEGVKDYLSKSFEMKDLGEADVILNIKLQRGDEGEITLVQSHYVDKILSHFGYSGCKPASTPYDPSVLLRKNRRIARDQLRYSQIIGSLMYLASATRPDISFAVSKLSRFVLNPGDDHWQALERVMRYLKGIMSYGIHYTRYPKVLEGYSDSNWISDADKIKATSGYVFALGGGTVSWKPCKQTILTRSTMEVELTALDTATVEAEWLRELLMDLPAGDQVFGECFPHDCSS

SEQ ID NO: 142149 - protein, 1185 aa, Oryza sativa
  Clone ID: PAT_MRT4530_43183C.1.pep
MSAPGAGAAAAAGGDGGGGAPPGAGAGGGAPGAGAGGANNNTNGGNSASQSSGGPFSGSPYTAYAMIIVLTFWIKICRFMTIFPTIQKPDRPFSVVGFAAALKPHAFDGSNYKRWKARALLWLTAMQCFYVSRGKRSEPPLSPEEEAKFEASDCLFRGALISVLADNIVDVYMHMPSGKDMWDALEAKFGVSDAGSELYVMEQFYDYKMVDDRSVVEQAHEIQMLAKELENNNCELPDKFVAGGIIAKLPPSWSDFATSLKHKRQEFSVSDLIGSLGVEEKARAKDVRGKKVEGGSSANMVQKKNPHASHDNKKVKPDVKSKATTNFKKKDKGKAKVDCFVCDKSGHWAKDCPERKDRKSANMVISEGGGTSGYGRERFLLVDGKRVACGCSWCWYGRSEVYFGKDRAAEERAACPFNKEESSSKCHTCVQSKQPRKPHKASEVRNLAPLELVHSDLCEMNGVLTKGGKKYFMTLIDDCTRFCYVYLLKTKDEALHFFKIYKAEVENQLERKIKRLRSDRGGEYFSNEFASFCEEFGIIHEMTPPYSPQSNGVAERKNRTLTEMVNAMLDTAGLSKEWWGEAVLTACHVLNKIPMKHKEITPFEEWERKKLNLSYLRTWGCLAKHFAPIEHNDQTPEENPEKDNIVDTRKSKRQRVAKSFGDDYIVYLVDDTPRTIEEAYSSPDADYWKEAVRSEMDSIMSNDTWEVVERPYGCKPVGCKWVFKKKLKPDGTIEKYKARLVAKGYTQKEGEDFFDTYSLVARLTTIRVLLALAASHGLLVHQMDVKTAFLNGELEEEIYMDQPDGYVLEGQEGMVCKLLKSLYGLKQAPKQWHEKFDTTLTSAGFVVNEADKCVYYRYGGGEGVILCLYVDDILIFGTSLNVIEEVKDYLSKSFEMKDLGEADVILNIKLQRGDEGGITLVQSHYVDKVLSRFGYSDCKPAPTPYDPSVLLRKNRRIARDQLRYSQIIGSLMYLASATRPDISFAVSKLSRFVSNPGDDHWQALERVMRYLKGTMSYGIHYTGYPKVLEGYSDSNWISDADEIKATSGYVFTLGGGDVSWKSCKQTILTRSTMEAELTALDTATVEAEWLRELLMDLPVVEKPVPAILMNCDNQTMIIKVNSSKDNMKSSRHIKRRLKSVRKQKNSGVIALDYVQTARNLADQFTKGLPRNVIDSASREMGLIPT

SEQ ID NO: 142150 - protein, 1460 aa, Oryza sativa
  Clone ID: PAT_MRT4530_43184C.1.pep
MSGVAAATAGGGGTPPPPTGAGSGSGSGAGAPGGGAVNDNNNGGNSASPSSGGPFSGYNLLLLLLLLALFLFPLLALYYVRYVRYVLVPVLHDASSMLSSMLSRYWYVPVPDIHDAHSMLLVMLRSPYTAYAMIIVSISWIKICRLMTIFPTIQKPDRSFSVVGFAAALKPHAFDGSNYKRWKARALLWLTAMQCFYVSRGKRSEPPLSPEEEAKFEASDCLFRGALISVLADNIVDVYMHMPSGKDMWDALEAKFGVSDAGSELYVMEQFYDYKMVDDRSVVEQAHEIQMLAKELENNNCELPDKFVAGGIIAKLPPSWSDFATSLKHKRQEFSVPDLIGSLGVEEKARAKDIRGKKVEGGSSANMVQKKNPHASHNNKKVKPDVKPKAATNFKKKGKGKAKGDCFVCGKSGHWAKDCPERKDRKSANMIISEGGGTSGYGKILPTVLSVFHSPDWWVDTGANIHVCADISLFSSYQVGRGSSLLMGNGSLAAVHGVGTVDLKFTSGKTVQLKNVQHVPSIKKNLVSGSLLCREGFRLVFESNKCVVSKYGTFVGKGYDSGGLFRFSLNDMCNNHNAVNHISENDESNVWHSRLCHVNFGCMTRLANMSLIPKFTLVKGSKCHTCVQSKQPRKPHKASEARNLAPLELVHSDLCEMNGVLTKGGKKYFMTLIDDCTRFCYVYLLKTKDEALHYFKIYKAEVENQLERKIKRLRSDRGGEYFSNEFASFCEEFGIIHEMTPPYSPQSNGVAERKNRTLTEMVNAMLDTAGLSKEWWGEAVLTACHVLNKIPMKHKEVTPFEEWERKKLNLSYLRTWGCLAKVNVPIAKKRKLGPKTVDCVFLGYAIHSVGYRFLIVNSGVPDMHAGTILESRDATFFENEFPMKYTPSTSSKETVMPHEHFAPIEHNDQTPEENPEEDNIVDTRKSKRQRVAKSFGDDYIVYLVDDTPRTIEEAYSSPDADYWKEAVRSEMDSIMSNGTWEVVERPYGCKPVGCKWVFKKKLRPDGTIEKYKARLVAKGYTQKEGEDFFDTYSPVARLTTIRVLLALAASHGLLVHQMDVKTAFLNGELEEEIYMDQPDGYVLEGQEGMVCKLLKSLYGLKQAPKQWHEKFDTTLTSAGFVVNEADKCVYYRYGGGEGVILCLYVDDILIFGTSLNVIEEVKDYLSKSFEMKDLGEADVILNIKLQRGDEGGITLVQSHYVDKVLSRFGYSDCKPAPTPYDPSVLLRKNRRIARDQLRYSQIIGSLMYLASATRPDISFAVSKLSRFVSNPGDDHWQALERVMRYLKGTMSYGIHYTGYPKVLEGYSDSNWISDADEIKATSGYAFTLGGGAVSWKSCKQTILTRSTMEAELTALDTATVEAEWLRELLMDLPVVEKPVPAILMNCDNQTVIIKVNSSKDNMKSSRHIKRRLKSVRKQKNSGVIALDYVQTARNLADQFTKGLPRNVIDSASREMGLIPT

SEQ ID NO: 142151 - protein, 169 aa, Oryza sativa
  unsure (1)..(169): unsure at all Xaa locations
  Clone ID: PAT_MRT4530_43185C.1.pep
LYTTSPLTXRPPXPHGWGNSAPSATPTCTYRLTDXDYPTTIWDLGPQFIHGGHATXRLWTRSGRALDRFXTSTRYRQHHXRHPGLGTRLVSILXLXHTHFAPSGHTALTPTHFGGPSGIRFDRHXDFXRLYPRALEQXLXLGPHPHMXCLGPLGTSEQPSWGGCFGLFF

SEQ ID NO: 142152 - protein, 453 aa, Oryza sativa
  Clone ID: PAT_MRT4530_43186C.1.pep
MDTKLGALALMLPLLLLISATRVAYGGIQPTPPPASFQAALVRIEPAGINYTRAVQRSRSRLSMLAARAVSNAGAAPGESAQTPLKKGSGDYAMSFGIGTPATGLSGEADTGSDLIWTKCGACARCSPRGSPSYYPTSSSSAAFVACGDRTCGELPRPLCSNVAGGGSGSGNCSYHYAYGNARDTHHYTEGILMTETFTFGDDAAAFPGIAFGCTLRSEGGFGTGSGLVGLGRGKLSLVTQLNVEAFGYRLSSDLSAPSPISFGSLADVTGGNGDSFMSTPLLTNPVVQDLPFYYVGLTGISVGGKLVQIPSGTFSFDRSTGAGGVIFDSGTTLTMLPDPAYTLVRDELLSQMGFQKPPPAANDDDLICFTGGSSTTTFPSMVLHFDGGADMDLSTENYLPQMQGQNGETARCWSVVKSSQALTIIGNIMQMDFHVVFDLSGNARMLFQPPTA

SEQ ID NO: 142153 - protein, 149 aa, Oryza sativa
  Clone ID: PAT_MRT4530_43187C.1.pep
MEGRISSATLVVAAVLAMLVLVPAAARAERFVVGDAARWTWGYNYTDWVIKKGPFFQNDSLVFMYDPPNATTHAHSVYMMRNAADYQSCNLKAAKLVANVMQGAGSGYEFVLRKRKPHYFVCGERGGIHCTMGQMKFIVKPKSSACRDD

SEQ ID NO: 142154 - protein, 42 aa, Oryza sativa
  Clone ID: PAT_MRT4530_43188C.1.pep
WVTIIYFIRDRNNPNYRVDKNYTALMACTRPNYKHNAFTRAD

SEQ ID NO: 142155 - protein, 110 aa, Oryza sativa
  Clone ID: PAT_MRT4530_43189C.1.pep
TTEYKREQQNSKITDEIPSERGSTRSVSELALSLPDCFCGVEPVIVNNNNNNNNNNNNNNNNNNNNNNNNNNNNNNNNNNNNNNNNSSSSSNTNNHENLYEQDNRNMKYF

SEQ ID NO: 142156 - protein, 89 aa, Oryza sativa
  Clone ID: PAT_MRT4530_4318C.1.pep
SQCMLSIYLQTWHINKEASTIKSAYVPHSRVTNRLHTLHRCERGQRYTHCVLCTQGRAREGHKDAWIRTDCAIARTKDAQNSNTMAKHV

SEQ ID NO: 142157 - protein, 105 aa, Oryza sativa
  Clone ID: PAT_MRT4530_43190C.1.pep
VPRPGGSHASLASFTFPSFPRIAASDAASACLLVHGGFFFFLRRFGDPCCAGLVVIRSRTEEERAGDPSGAGESGHIIDATVEDAEKMPSQLRTRSDSSARVFMS

SEQ ID NO: 142158 - protein, 52 aa, Oryza sativa
  Clone ID: PAT_MRT4530_43191C.1.pep
MAMDRDANCAVQRTTELELDRKAARLEGIPRLLMKSKSSLNNLAFDINSKKL

SEQ ID NO: 142159 - protein, 895 aa, Oryza sativa
  Clone ID: PAT_MRT4530_43192C.1.pep
MRSVSELVWSPDEGLSIKIAASSLSTRKTSLHWNADTLSIVISSPQQSGAGESGHIIDATVEDAEKMPSQLRTRSDSSARVFMSSPSRIRNTDAQQSTSIRSHGQDSKYCGGMDVMNEGKETSDNFCVDKLEKEDEVGSCPTRYCNDTSHSLGSASRKEVMPIIAEKQAFCATTVHDERSWAANAWRARLVKAISQKDSVLPKNADNIHSTSAFGSIGNTENMPGKLTSMLGNRNDSSQDQAMQEKHKDGLIVARCESVSAVNPVARCELASGVNPLARHESTSGCNPRKLEKGKEKLIYDMSNCVSNTNEGDDSNESIESCPSTKAPKRKHGQFSAAEMTSGNKRCRREDNESSCSGLFHKNDSSFFNWMSTLTNGVKVFDETTAVPLNQKFSAATGEEFPTNPVPLQNNCGVPLQSVGFNSLFQSLYSQNVMITSRNTCHQSESSYTANRLTLGFKSSKPVSMGRETLNVATETLAAGRIQMDSYGDRGAFQNQMGIFPLRAERNQNGFHGSSSNAASGHKDDFSESLWVSRLLPKTPMKVMDTTRCDEETDFCSANPKGLGDSSSPQDFNVEKELNNSQYFTSKGSDNETTSSKCAAPQDENKPSETMASIFAKRLDALRHANTSAVHVAITCDHGTPKGRNHKTSSFVVSYNSHDEQESGQKTHKSSGGEGRIVLWTGDKGKEQLSPGNDKELGEKVLSKHENQNCEGSSDGKVVPPKCNLETNTYIEEIDRKRLQNKEGAPNSMENQPDNKQMVPYGIVPNDVYDEASVVFGALQRLRLSRSDIIRWMRSPVMHTTLDGFFLRLRFGKWEEALGGTGYHVARINGVLDKNRLSVTIRNSTCQVDSRFVSNHDFHQDELKAWWSAAMKSGWKLPSQEELNTKLRERELLRF

SEQ ID NO: 142160 - protein, 142 aa, Oryza sativa
  Clone ID: PAT_MRT4530_43193C.1.pep
HASVSVDSEGADFKALVFEYMKNGNLEMWLHPKKHEHSQRNALTFSQRVNIVLEVAFALDYLHNHCVPPLIHCDLKPSNILLDLDMVAYVSDFGSARFLCPKSNLDQESVTSLGCLKGTVGYIPPGEIPSFCKFFFPKDFFL

SEQ ID NO: 142161 - protein, 87 aa, Oryza sativa
  Clone ID: PAT_MRT4530_43194C.1.pep
ARSLARAHPLSFPFSAPPPLQRRWGVAPTVAGDRNPFTAAAAVGRRRPCSVPPRRDATRHFWTGTCHDLVEGIFGIGTGWWGGWMDE

SEQ ID NO: 142162 - protein, 177 aa, Oryza sativa
  Clone ID: PAT_MRT4530_43195C.1.pep
MSKKTVIKADLIGRACKSEILAIVATIKGIKSMDIDAEKCTLTVVGIVDPVRIVRKLRKKCFSACIVSVEDDKPKEEEKKDPCKEAKEKLEKAWKEYCEKCNVKLKPGCPCSCSTPCSFPPIGCHDRGICPPPCPPPCPLPCPPPCPLPCPPPCPPRGYGYGCYYEERYPGGECVIQ

SEQ ID NO: 142163 - protein, 199 aa, Oryza sativa
  Clone ID: PAT_MRT4530_43196C.1.pep
MDPASEELEQRSRYLSSLIRRTKLHAAPALAPPPPTPPPEPETKLQLEMEPQPERVEEAAKKPAAVAAVVEKREVKGGGGGGGQAGKGKGKEKEMEKGKEERKVSVRVRAADMPLAMQRRAVRLAFDAVAAMPRLDSKRLALALKKEFDATYGPAWHCIVGTGFGSYVTHSVGGFLYFSVDKVYVLLFRTAVEPLGHPQ

SEQ ID NO: 142164 - protein, 102 aa, Oryza sativa
  Clone ID: PAT_MRT4530_43197C.1.pep
ASQEPGRRRGPSRQGKPVSRHPLDIPGSCWLAEGAWRPFRSRTTSAGLPLVSAKLPIGHPPYPYLWFLVWFAYQASNPTGIKSICRNNLSLYFLIIESCQRY

SEQ ID NO: 142165 - protein, 78 aa, Oryza sativa
  Clone ID: PAT_MRT4530_43198C.1.pep
AKLSYTSRDPYFHGLVPKCLLLAYAWVMIIILHWLVKGDGLFCVSDVFAIVRTSQGVIKEAICMCLMNSMTLIDNMLM

SEQ ID NO: 142166 - protein, 170 aa, Oryza sativa
  Clone ID: PAT_MRT4530_43199C.1.pep
MYVCISNQAKLHVRSSSDFSQYVCSIADSGIVEKKLFVSILRAAPFIEKLEIHFSMNLLILDESHEDHPIRQQLGRCEYNNLKNMRIIGYKGSRDQVEFLLHVVENAPALEVLTLEAAGIEYQEVSFVLNEAWIDRITQSADRSALIAQQYLREKLSSKTQLCIKTTSSR

SEQ ID NO: 142167 - protein, 147 aa, Oryza sativa
  Clone ID: PAT_MRT4530_4319C.1.pep
FFFFFFFPDQVSLFLFPFISSRNIPTGGFLLLFFIHIFRHNYERFPQGHPTISGCATNHWQWYLLWPGAIRTLGTPRMLALPALAAIRCNSTCNRHVIPSPNEAEHHGHSLISTTSRWHQHHWHRSVHAHKSKFYHLNWGPFHHFHL

SEQ ID NO: 142168 - protein, 91 aa, Oryza sativa
  unsure (1)..(91): unsure at all Xaa locations
  Clone ID: PAT_MRT4530_431C.1.pep
LPDRRRRRWRHGGEVRRGGGEAPGHGGGEAPGHGSGXSWGSGHGSGGAAAECGVGGGEEKGKKKKKKRGNGXGGKGNGSGIYRARGRGDRL

SEQ ID NO: 142169 - protein, 64 aa, Oryza sativa
  unsure (1)..(64): unsure at all Xaa locations
  Clone ID: PAT_MRT4530_43200C.1.pep
TTLCALFLNTSIEKSELVAYTSTIFALFALTALSAPAXTALTTMHYFPPTLTMATMDPGRQCMM

SEQ ID NO: 142170 - protein, 86 aa, Oryza sativa
  Clone ID: PAT_MRT4530_43201C.1.pep
MRGCLVKLHDTTRCGSPVQMTGLSANTTDRKDTSTRKPCSRGTTDVKHIQRDQDEFLPAYTNTLSAANIRWSKPRMSLCILTLIWR

SEQ ID NO: 142171 - protein, 215 aa, Oryza sativa
  unsure (1)..(215): unsure at all Xaa locations
  Clone ID: PAT_MRT4530_43202C.1.pep
LITREDLVVKAKGLALQGAEIAKSLLSSSTSVLGGSANLMLSITLHIVSGAAEVLNFVSQLMVFLWVLYYLITVEGGGATEQVIDLLPLSKQVKDRCVEVIDHAISSVLLATAKIAIFQGCLTWLLFKLFKVHFVYTSTVFAIISALLPILPPWLSSIFAAXQLLMEGRYVLAIVVTVVHLIIMDYGTTVIQXDIPGVQWDISLGLSIIGGHGHC

SEQ ID NO: 142172 - protein, 56 aa, Oryza sativa
  Clone ID: PAT_MRT4530_43203C.1.pep
FCFFFFFWVFFFFFFFFFFFFFFFFWKRRNDSHYNGGGANKVKGPQIFQRSRGALL

SEQ ID NO: 142173 - protein, 93 aa, Oryza sativa
  Clone ID: PAT_MRT4530_43204C.1.pep
MSSRGGGDSGGGLTGGRRPLVQQGHEQDAFAAARLSQRAQCSTLRCHCGGRLGFAKVRGEASMTPCLTRLRPVSFFSPEISSGVRGRFCEQQY

SEQ ID NO: 142174 - protein, 94 aa, Oryza sativa
  Clone ID: PAT_MRT4530_43205C.1.pep
MPLLGRLPTRTRPPPLFLWCLLVIQNMSRYMRDGEAASSDEQEGEVPVLHDDAAEAGEDGVVEGARVHGEDAGHGAIDVATTASLRCEVHVDER

SEQ ID NO: 142175 - protein, 387 aa, Oryza sativa
  Clone ID: PAT_MRT4530_43206C.1.pep
MASEWEMAMGVDLGMGMSTYHNASGGIAAAPMMGHHGGGGGGGGYSAAHHHHHHYYGMPHQAAMGDAMRVDDLLDLSNTPGAHDFFPASAAAAAAGDHGHHHHHHIGGMGEPSGATPSATSSDHQTSMLSFADDFYIPTEDAAELEWLSKFVDDSYSDMPNYQSSAHAAMAAAAASAANNGGGSSAGQDSCLTAAPGRGARSKRSRATAAAAAAWHSLVPRPPSQSSPSSSCSSSDFPSSNKPSGTARPNGSGGGSRGKKSPGPAGAEVGMEAGVRRCTHCASEKTPQWRTGPLGPKTLCNACGVRFKSGRLMPEYRPAASPTFVLTQHSNSHRKVMELRRQKELLIIRGSHRDAAAAAAAAAAAAAAGSAAATGRPELMFRDYGVC

SEQ ID NO: 142176 - protein, 51 aa, Oryza sativa
  Clone ID: PAT_MRT4530_43207C.1.pep
QFSSAGVLSDPIGVCSNAHDFSYFRCVPPLVRFSSSLVFLYLTSLVFSSVQ

SEQ ID NO: 142177 - protein, 94 aa, Oryza sativa
  Clone ID: PAT_MRT4530_43208C.1.pep
SFVDQMVEDRESAIINAKSDMDENKVVWTDKGYMIGIILSVLQVLTGIASFVTQAGHVIAFTFKSTAIGLYTPILITISQLVGTFLSVPMLKYF

SEQ ID NO: 142178 - protein, 67 aa, Oryza sativa
  Clone ID: PAT_MRT4530_43209C.1.pep
ASQAICCHMDMSQLNLTMKRKTQTECVCINQISSWTSLSLLAAINNLSLKHKKGNHELTLLRIGRNP

SEQ ID NO: 142179 - protein, 87 aa, Oryza sativa
  Clone ID: PAT_MRT4530_4320C.1.pep
MYGLLANFKNIFDKFTFKDSSAAAKDYEKKDEAGTDAANKAAGSDSDDDDKQGTRQKEGIFERYVFCLSVCLQWLKCGFVNHPVIRI

SEQ ID NO: 142180 - protein, 59 aa, Oryza sativa
  Clone ID: PAT_MRT4530_43210C.1.pep
KIIFRICSPCYCCMQCSRRFDPLSQSYREYQLQSHLLLQHQLQSHLLLQQQELAHAVGS

SEQ ID NO: 142181 - protein, 57 aa, Oryza sativa
  Clone ID: PAT_MRT4530_43211C.1.pep
RYGSPSLNVVVVKGLGTSGKNPACWSGRHEVDADGAELSLILLCMDAWSTGNRTVLQ

SEQ ID NO: 142182 - protein, 212 aa, Oryza sativa
  unsure (1)..(212): unsure at all Xaa locations
  Clone ID: PAT_MRT4530_43212C.1.pep
WTTPWRHCGRRRQQLARRGRWASRPTDGEESAGARRERRRQWATRRRRRRQHGRTAPPPRPGRPTASSAQSATASASSEASEARASHPGQCSSVTASPPPGPPRSPSTPSSTTTSVSPTADGVPSFASRRNRRSPTRXVRGRRRRLGTRRRRRLGRRRPGKRCCRWAALEELGRRQCRSRQLSRRLLSRLAPLASCGSSLSTSGSKPSERMR

SEQ ID NO: 142183 - protein, 316 aa, Oryza sativa
  unsure (1)..(316): unsure at all Xaa locations
  Clone ID: PAT_MRT4530_43213C.1.pep
MEKWPFVVWGKLIAVDLSIPANKIEKRLATWKSGHLSYGGRAILPKTTHHKMDNLRTRFFLEXLENKIKYHMIRWKELCRPKDLGGLDFINTKVMNEALLCKWIFKIESEXNDPCCRLLRTKYCAKGGFFQSTDIGVSQFWXRGLHEFKHWMRAGSKYKSESGRSVFFWDDVWIGETPLKIQFPYIYSICREPRAAVKQICTNGEWNIELQGTHGEEDLDECNGLLEILRDVTLTEERDVMSWSLTKSGNFTTKSLYREIISGCVRDTRMQEILTIPVPYKXRMVKGRIQATKQLKAMKWPGEVSCKLCGSGGGGS

SEQ ID NO: 142184 - protein, 847 aa, Oryza sativa
  Clone ID: PAT_MRT4530_43214C.1.pep
MAFSHLLHALLVAAALPLLLLPRAAGNVLLAFLPMQLIGNAKRWSNSLLVNADAGEIGVCYGRDANNLIDPPAAVSLLKANGISAVRIFDADQTVLDAMANTGIKVMVAIPNADLAAAGQDLRSATDWVTNNVVPYRSRGTLINGVAVGNEVFRQRPELTGMLVSAMRNLHKALENLNLANDVKVSTPIAFDALKQSSPPSAGEFKDEIAQSVMKPMIDFLKQTGSYFMVNLYPYFAYVAQPDKISLEFATFRPNAGVLDGNTGIRYFSLFDAQLDAVYAAINRVSGGSLTVSMARRDGILSVQASESGHPSGGTFPLFSMLAAADTDSIATIADAQAYNNGLIRRVVSGASGMRDVSAYIFSLFNENEKPGPAIERNFGLFYPNGQKVYEVDFRGGGGGGACPTKTSWCVARTDVGSAALQSALDFACGNGADCSAIRQGSVCFEPNTLVAHASYAFNDYYQRKGQASGTCNFSGAASIVFKPSPSPRWLGATGIDRLVLVLVRWPSVAISTHHHREDENAKARLDHLEDGLLHGDIVAAGDSSLHGEEDGEQGSTDVGRREVASHLMAAARRARCEAPHSASRPTDGEESAGARRERRRTLGGQKGAGGTNKHTQGRRCSFSARGRSPHSLLSTVCHGIGLVGGERGTRIPPRSVLQCHSLSSAWAAALSFDTFIDHHLRLANRRWGPKLCIPPESAFADTVSAWSPETPRNATAAASGKAATGKALLSLGGTRGARAAPVSVSPVVASSPLPPCAASLVWLFLIHFGKQTVGEDAEEPPPLLLPRCPSPATTEPLPLLLPRRSSSAATATTSAVTGRYRPPPVPPCHAQLASLPREDRKSEREE

SEQ ID NO: 142185 - protein, 140 aa, Oryza sativa
  unsure (1)..(140): unsure at all Xaa locations
  Clone ID: PAT_MRT4530_43215C.1.pep
MAAAAAVESVVVVHNVAKRHNVGTLARSATAFGVAEVVVVGRRDVSAFGSHGATSHXRFRHFASLPLARAYLKDERGCDICGVEITHNALPVTAHPFRRSTAFLFGNEGTGLSQKECEICDFFVYIPQYGGGTASLNVTV

SEQ ID NO: 142186 - protein, 259 aa, Oryza sativa
  Clone ID: PAT_MRT4530_43216C.1.pep
MAAAAAPRSSGKEALPAALGSASEPPRLFDGTTRLYICYFCPFAQRAWIIRNFKGLQDKIELVGIDLQDKPAWYKEKVYEQGTVPSLEHNGKIMGESLDLIKYIDSHFEGPALLPEDPEKRQFADELIAYANAFTKALYSPLISKADLSAETVAALDKIEAALSKFGDGPFFLGQFSLDVSKVDIAYVTIIERIQIYYSHIRKYEITNGRPNLEKFIEEINRIEAYTQTKNDPLYLLDLAKTHLKARPLPETNAQPPQL

SEQ ID NO: 142187 - protein, 90 aa, Oryza sativa
  Clone ID: PAT_MRT4530_43217C.1.pep
HTRVCVQNERGCDICGVEITHNALPVTAHPFRRSTAFLFGNEALFQLKGTGLSQKECEICDFFVYIPQYGGGTASLNVTVAASIVLHHFG

SEQ ID NO: 142188 - protein, 79 aa, Oryza sativa
  Clone ID: PAT_MRT4530_43218C.1.pep
MEERMCGPEFLRMIARFLGEQRVPHKKACKKRRTTTLQAAVVASHPVIVGLAREVAGECRGLPLTLITISMEEENAGML

SEQ ID NO: 142189 - protein, 531 aa, Oryza sativa
  Clone ID: PAT_MRT4530_43219C.1.pep
MAMASHHLAQPPTRAALSSRPTYPLSSHHHSSRLQLPLVSGARRSRLSPAVATSPVAAPAMDAVADWGLTTLEEADPEVYDLVEREKRRQRAGVELIASENFTSLAVMEALGSPLTNKYSEGMPGSRYYGGNEVIDEVEELCRARALAAFHLDPEAWGVNVQPYSGSPANFAAYTGLLQPHERIMGLDLPSGGHLTHGYYTAGGKKISATSIYFESLPYKVSSETGYVDYDKLEEKAMDFRPKLIICGGSAYPRDWDYARFRAIADKCGAMLLCDMAHISGLVAAQEAANPFQYSDVVTTTTHKSLRGPRSGMIFYRKGLKPPKKGQPEGALYDYEDRINFAVFPSLQGGPHNHQIAALAVGLKQTMSPGFKSYIKQVKANAVALGNHLMSKGYKLVTDGTENHLVLWDLRPLGLTGNKVEKVCDLCSITLNKNAVFGDSSAMSPGGVRIGTPAMTSRGLVEEDFVQIAEFLHQAVTICLDVQKERGKLLKYFNEGLENNKDIEDLRAEVEKFATSFEMPGFRVSDMKYKD

SEQ ID NO: 142190 - protein, 299 aa, Oryza sativa
  unsure (1)..(299): unsure at all Xaa locations
  Clone ID: PAT_MRT4530_4321C.1.pep
KSEFKMQDLCKTKYCLSLXLEHIPEGVLVHQSTYTXKVLEQFCFKKKSFENPHGRPREEEEEVLGSEFPYLSVIGALMYLANCTRLDIAFVGNLXWKGIKDILCYLQGSKDMGLFYRNNQDLTLVGYADVGYLLHPHIAKSQTGYVFLCGGTTISXKSSKQNIVAIALNHSXIFALYEASCKCAWLCRMIHHIQQSCELNTIQTPTIIYEDNAACVTQVEMGYVKSNLTKHINPKFFYAHELHKTNEXKVLHTKSCENLADLFTKSLPTXPFERCIQGIGMMRLREVQKENFANSLAKL

SEQ ID NO: 142191 - protein, 32 aa, Oryza sativa
  Clone ID: PAT_MRT4530_43220C.1.pep
KAYVLSLNRSLFLRYTKLRCSRITRILVREML

SEQ ID NO: 142192 - protein, 115 aa, Oryza sativa
  Clone ID: PAT_MRT4530_43221C.1.pep
MRRGGCRQRGGGREDAATLDISAAESADGRMRPVEAACERSGGAAVAAGDVVIGSPPPPARRPFSPPVALSRRRPFSLPLIPIGHRAPPSPLVATRRAILLAGSCPSLHRQLAEK

SEQ ID NO: 142193 - protein, 74 aa, Oryza sativa
  Clone ID: PAT_MRT4530_43222C.1.pep
MAQLRVGDGMEESSGADVHSPEAALVDVMVLTNHDSGDMAATICARRRGSGVFMCTRQQPDMEEQKSSRVMGIL

SEQ ID NO: 142194 - protein, 74 aa, Oryza sativa
  unsure (1)..(74): unsure at all Xaa locations
  Clone ID: PAT_MRT4530_43223C.1.pep
HAYYLQDRLRAGVRSARGGVGEHTEQHVAGLDRTANLLLYMTRCYPGLPQQKLAPHXHSFGDTGNLALQPVYTL

SEQ ID NO: 142195 - protein, 124 aa, Oryza sativa
  unsure (1)..(124): unsure at all Xaa locations
  Clone ID: PAT_MRT4530_43224C.1.pep
MAVWAEITLKPWGQHGELVTGKTRVEELELKDSLWVLMPAGAWRSTSSGGRHGRGQGRGWRVGMGLWESSXGGSRGRASGRHRRRLKSSQEMACECGRKSRSSHRTSSLSLXTGRHDGNKVELA

SEQ ID NO: 142196 - protein, 89 aa, Oryza sativa
  Clone ID: PAT_MRT4530_43225C.1.pep
GSDLPEHYHKQHKLHMSTGCRHPHTFTRTNFSASPEHHWPMRQDSTCIPESPSDAHCQVVSVRLQKPLGAAAAAAPMHTRQQHPCTQQQ

SEQ ID NO: 142197 - protein, 46 aa, Oryza sativa
  Clone ID: PAT_MRT4530_43226C.1.pep
MALVKLSLSASLAWPPAFLVLVLINRKGAVFTLETESNIIAFVEQI

SEQ ID NO: 142198 - protein, 204 aa, Oryza sativa
  Clone ID: PAT_MRT4530_43227C.1.pep
MADEEHEVYGQEIPLDGEDVDMGAPGDEAAKMQELDEMKRRLKEMEEEANALREMQTKVAKEMQGLDPNASSSESKEEMDARSVYVGNVDYACTPEEVQQHFNSCGTVNRVTILTDKFGQPKGFAYVEFLEVEAVQEAVKLNESELHGRQIKVAPKRTNVPGMKQPRGGRGFGGHPYMRPYGAPFYNPYGYGYPRFRRPRRPYF

SEQ ID NO: 142199 - protein, 420 aa, Oryza sativa
  Clone ID: PAT_MRT4530_43228C.1.pep
MGICCSKGKEELEEEGFPWKHDAFFHDQLWSAGVSMHTKQGWKGANQDAMTTCQDFAGHKGQIFCGVFDGHGPLGREVARHVRDVLPVKLSSSLALKTEQDPSSNTDKETLEKSDCTSLSDTSNEKQLLSTWKNIFVKTFEDVDEDLRQHSGIDCICSGTTAVTVVRQGDHLIIANLGDSRAVLCTRDSKDRPISVQLTTDLKPNLPSEAERILNSKGRVFAMDDEPDVPRMWLPDQDAPGLAMARAFGDFCLKSHGLICTPEVYYRKLSAKDDFLVLATDGIWDVLSNKEVIKIVSSATDHSKAAKQLVERAVRTWRRKFPTSMVDDCAVVCLFLKPSPSSSESTPGDAKPPQAVSFTGSFRKVLGGGGGEAEEGTNVWRALEGVARVNSVVRLPRMGAVLSWRRRSTSLEEDDEARID

SEQ ID NO: 142200 - protein, 169 aa, Oryza sativa
  Clone ID: PAT_MRT4530_43229C.1.pep
PTYIPVGSGTSVITSLISRDIDTVVRRCPSYMSLKMLPFKSTWSIFSFTSAHRRRSGPASTSWWCPMCEFFTFVAWFAPTLPIMPIFDLTEKSAKAPTKCLSCMQPNVLQQLAMDWVFGADRRAPPWRIWGKERGDGKRGRGKRRPFTCGVCCWLRQVKHGQLSMLTTI

SEQ ID NO: 142201 - protein, 300 aa, Oryza sativa
  Clone ID: PAT_MRT4530_4322C.1.pep
MSGRNPEEKENKVVRVRDRWRSVEVHAAADGGEIGGNGGITFVALVLGLALGASLGAILSLVLIAGAAHREAADVALRHLRSGTPARSRASPTFAEQITHKTKNQNLDSPPQDPPTSCGSVHRDQHRRIPRCQEMNTTTSRSRTETKPRSHRRRRGKHYQESSRRRRLPAEDAGVDGNFILLSAARSVIDEPGTADVDTCNEPQCASPRLRMTGSAGEEVVAARSGDHGLPSTGFSPTALRRNQMPLPSPFFFLSPRKLGWSTQCSTQEVVVGLRHGELIIRPPQAHHDGEKKARRSSWV

SEQ ID NO: 142202 - protein, 198 aa, Oryza sativa
  Clone ID: PAT_MRT4530_43230C.1.pep
MQANTEDKLYWKHTKNGECNTKSAYKEVYKSCRTDFDRFPINSHVALIIAFVINNDPNKTNLSRLLIVMWQLWKARNDLKFYGIFKEPSQDDVQSEACKRKMDSIPNGIRCYLDATWDNGRTGIGIFFHFPHNHTVIFIKATSDKAHSSLQAELLALQLSLEIAIFLNFAGVTFLTDNATIADTTMKRNFMEDLGDWS

SEQ ID NO: 142203 - protein, 94 aa, Oryza sativa
  Clone ID: PAT_MRT4530_43231C.1.pep
KPGHQCLSYRAAPVRCYHGWYSSNHFLLLLAQFHNISKSFCRKHTAQMELISLSLRCTTSIPHCLSYSPHMQPILSGFINEIQHKQMKRCILLF

SEQ ID NO: 142204 - protein, 150 aa, Oryza sativa
  Clone ID: PAT_MRT4530_43232C.1.pep
MPVFYRYRSEVNTFSVPVQKPFVSVAKLKRLITATVRNGHGHSRGGGPKKSVTLYSDNTGEEYADEAELIRVNTKRRNKLLYDRMRDIVFVKLNSQLINKRDNKDRDPLEKEVNDAVSNDENEFINGIVPFSNELAEDDPQDGASQGESS

SEQ ID NO: 142205 - protein, 66 aa, Oryza sativa
  unsure (1)..(66): unsure at all Xaa locations
  Clone ID: PAT_MRT4530_43233C.1.pep
XXXSQRAIXCRMAAFNAGFPXTXPXXXVNRQCXFGLQAVANXAXNIKAGLXNIXIAAXLESMXVNQ

SEQ ID NO: 142206 - protein, 378 aa, Oryza sativa
  Clone ID: PAT_MRT4530_43234C.1.pep
MAKPRPRAEEISRPSRSLSKAVRRRADAVSAKLAARGLGAFVWQKKLERDLARGILPDIVSLRDERRRCLARRREAAGVNSSAAASRRRSPPPILDASRARAAAEEEAKEAAFLLDQSRLRAEARLSTGRGASVEELKELGEEIAAYADLDRANEPFWAAAKAMCNAEIEQAATGTGTAGHGDRALHSAVFADVKSVVEGKSLDELDAMQHAIAARMATGEAKVVEHWQEVTELIRVEKAKKYLEQHYTCDAPPPPPDNDGGGEDADEEGSETLRPVALPPPPGPELRKPKYIARVRSGFEWNKYNRAHYDHDHPPPKTVKGYKFVLYYPDLAGGKPPQYTVDEDGSNSGGGETCVIRFHAGWPYEDVAFRIVNKEWD

SEQ ID NO: 142207 - protein, 82 aa, Oryza sativa
  unsure (1)..(82): unsure at all Xaa locations
  Clone ID: PAT_MRT4530_43235C.1.pep
GATREREEGRRQAGPXGSDSGEGGPRRIGSTDRGGAAHHVAAEPMAPIYPRVDRTATGASRPGRAGPGQTGPVVMACDGAVQ

SEQ ID NO: 142208 - protein, 362 aa, Oryza sativa
  Clone ID: PAT_MRT4530_43236C.1.pep
MENKVKCKACETLLTKNSSGTTTHWRRHLEQCDYHKLQQKSIKQQNINFPSLDEGDVDLDAPCVSVPGYYDPTKIRDANYRWLPTPEEWNLYCEVNDALSVIHAATEEFSGSTYPTSNLFYSHIVDIKRVLGQLLKSKDPILKEMANAMLEKFEKYWGPECNTLFAVALVLDPRFKMGMINYTFPALYEETVLPKKLANVESTLKSLHASYESELQSTSKENDATTQSTSTSLGTTSSHFFAASQFHEYMKSKNAASLPKSDLKRYLDDPVEDIPAKSFNLLQWWRMNELKYPIVAKLAKDILTIPITSVSSESAFSTGGQVISDYHSSLLPSTAQALEDDTNSIILVPTQASTANSVVGSN

SEQ ID NO: 142209 - protein, 936 aa, Oryza sativa
  Clone ID: PAT_MRT4530_43237C.1.pep
MDADEAKYIPLTSTILGCSSAPLTTAVDLAKHRPSFASPVQEEPHGGQQQPTASAMSVNLQRQLSIEIESPSNRDGIAATEAQPNQQLVPGEVRGEEGQEGNPTKATRKKKSPLWDFFEECTVPSKKKKGEMENKVKCKACETLLTKNSSGTTTHWRRHLEQCDYHKLQQKSIKQHNINFPSLDEGDVDLDAPCVSVPGYYDTTKIRELICKMIIVHELPFCLVEYTWFNVLLKRLNPSYKKVSRNTIRSDCMRLYESEKEKLKRTFKDVRKISLTCDLWTSNQTICYMSLVTHYIDADWSMHCRVINFLELEPPHTGVVIANAISDCLASWRIEDKIASITFDNASSNDSAANLLLAKFTKRGSLWFYGKFLHICCCAHILNLIVQDGLAVIKHIIDKVRDTIKYIKKSNNPAYKFSADIDSLNLKSDMGLAIDSCTRWGSTFKMLQSAFFYRSALDVYAAGDANYRWLPTPEEWNLYCEVNDALSVIHAATEEFSGSTYPTSNLFYSHIVDIKRVLVALVLDPRFKMGMINYTFPALYEETVLPKKLANVESTLKSLHASYESELQSTSKENDATTQSTSTSLGTTSSHFSAASQFHEYMKSKNAASLPKSDLKRYLDDPVEDIPAKSFNLLQWWRMNELKYPIVAKLAKDILTIPITSVSSESAFSTGGRVISDYRSSLLPSTVQALPRLSVAQKMLRRLPLRLAPTLAGGGGGAIPHRVLRGACTTAPASRPPPYPLSPSDLDAVSALLPRLVSAGNVPAAGRLLTAALLLPGSTERLPFSPLAAHLASMPTLTPAFALLTAIRHHPLRPSPLPLATPLLGHLLSRRRAREAASVVRWLCRPDSPQRPDSATFAVAVAGLCRLEDPRNALAALREMAVDGIRTSAKLRESVRDAMLQDARIEEAWALEAAMKQPDSGKLAELVQKLLEEWED

SEQ ID NO: 142210 - protein, 939 aa, Oryza sativa
  Clone ID: PAT_MRT4530_43238C.1.pep
MGTASLRYLSQIHRSYTDGEGDHNRPWRQGVAREVKQVGQCGMVKCQGSGCSSAPLTTAVDLAKHRPSFASPVQEEPHGGQQQPTASAMSVNLQRQLSIEIESPSNRDGIAATEAQPNQQLVPGEVRGEEGQEGNPTKATRKKKSPLWDFFEECTVPSKKKKGEMENKVKCKACETLLTKNSSGTTTHWRRHLEQCDYHKLQQKSIKQQNINFPSLDEGDVDLDAPCVSVPGYYDPTKIRELICKMIIVHELPFYLVEYTWFNVLLKRLNPSYKKVSRNTIRSDCMRLYESEKEKLKRTFKDVRKISLTCDLWTSNQTICYMSLVAHYIDADWSMHCRVINFLELEPPHTGVVIANAISDCLASWRIEDKIASITFDNASSNDSAANLLLAKFTKRGSLWFYGKFLHIRCCAHILNLIVQDGLAVIKHIIDKVRDTIKYIKKSNNRAYKFSADIDSLNLKSDMGLAIDSCTRWGSTFKMLQSAFFYRSALDVYAAGDANYRWLPTPEEWNLYCEVNDALSVIHAATEEFSGSTYPTSNLFYSHIVDIKRVLDFKFEGDRRYSHRVHEYRGATGWLQGDMVNLERHGLIPVGTSSGRDMKSKDPILKEMANAMLEKFEKYWGPECNTLFAVALVLDPRFKMGMINYTFPALYEETVLPKKLANVESTLKSLHASYESELQSTSKENDATTQSTSTSLGTTSSHFFAASQFHEYMKSKNAASLPKSDLKRYLDDPVEDIPAKSFNLLQWWRMNELKYPIVAKLAKDILTIPITSVSSESAFSTGGQVISDYHSSLLPSTAQALVNMDLAPSLDLIGSTGMGLNMQYKIAHIAVSNLPTIPLYVYEIQMTNLTKGKMAFSLPFSKQYINNHLSTPIDDLLVTLVGSAESFEMRLKKSKDKRATFTTRWNKLVQANLFELGDVCVFLFTEVDDDLCITLEVLN

SEQ ID NO: 142211 - protein, 68 aa, Oryza sativa
  unsure (1)..(68): unsure at all Xaa locations
  Clone ID: PAT_MRT4530_43239C.1.pep
HPASHRPRAALPPLMPSSVILRSGLPPQTPPPAARRRRLPCACCRCXRPPPPPPPQPQLGLGRKMGEE

SEQ ID NO: 142212 - protein, 78 aa, Oryza sativa
  Clone ID: PAT_MRT4530_4323C.1.pep
RDILLRTGPVSPPARYKGDVPGACSWRRAAHRNVRTTGQGCGLLLLPTQVLWIMPPVATIRLARDRSFEDPELAPFDG

SEQ ID NO: 142213 - protein, 72 aa, Oryza sativa
  Clone ID: PAT_MRT4530_43240C.1.pep
MATELGFGLAKERDSDERKTEKPKRVEIMADGGCGYHVPHRHRVKEIVREVRAIRLRVMRIFDSFFVYKVVV

SEQ ID NO: 142214 - protein, 76 aa, Oryza sativa
  Clone ID: PAT_MRT4530_43241C.1.pep
RNIRLWLPPDKSELNHLVASLFLSLQDRAKSELNHIWFLSFFFYMHYMAAQSVAKIRYLFLAHLAAGNLRPMQNCR

SEQ ID NO: 142215 - protein, 74 aa, Oryza sativa
  Clone ID: PAT_MRT4530_43242C.1.pep
MNQKEDAPGSPPLRCSARQMEIAARPSPRLGGGARSGGERERERDGRFLLLLRDTRPLRPYGVFGLRSSDSDPR

SEQ ID NO: 142216 - protein, 398 aa, Oryza sativa
  Clone ID: PAT_MRT4530_43243C.1.pep
LAGDGQRRGGSATESGKGKNGKGRRRRNSTTAFSTTTTGVSIHVSFCLARPPRLSYLCVHCPRPGDGEGAYRFTVDPRVLGTHTDVALLRVPHPNDGLHRGIKSYDYFVYTARPGPGASLLRLLPNPRVSPFRNEEVAIVRCSGGARYVIACLMPTIRRPMEFKVMRFDSDVGRWKSTAVSISEPVERDRVLPIPDTASQMVFHCTTKVITLGGTIGWVDLWRGILLCDDVLDQHLVLRDVPLPKPARSNRKSFCRGPPHHYRDITVVVQDSVPTCIKYVEMVTRPAPTTSSTAASDPTTTSSTRPAPARRSGCCPTRTPPPSAATRSPSSAARAAHWKANIWSRPIPAGSWKDWHRECTVDVTDIAVVDNVRYSELLPKICNDPEETLRRLLTGHPT

SEQ ID NO: 142217 - protein, 84 aa, Oryza sativa
  Clone ID: PAT_MRT4530_43244C.1.pep
TRVQQVRVHLFQNLSERTDNENTHLKKRLIQMGFDPMTHRPRTDFFAALPQLIALATLRDHLAGMACGGGGADHAGRRWWWRRH

SEQ ID NO: 142218 - protein, 489 aa, Oryza sativa
  unsure (1)..(489): unsure at all Xaa locations
  Clone ID: PAT_MRT4530_43245C.1.pep
MDDGDEPVPYVMDEGVLLPLLFPPPLPADDDATGGVSPSWVYLEDRAYVSPDAVSNSTTAFSTTTTGVSIHVSFCLARPPRLSYLCVHCPRPGDGEGAYRFTVDPRVLGTHTDVALLRVPHPNDGLHRGIKSYDYFVYTARGGPRPPXLRLLPNPRAXSPFRNEEVAIVRCSGGARYVIACLMPTIRRPMEFKVMRFDSDVGRWKSTAVSISEPVERDRVLPIPDTASQVVFHCTTKVITLGGTIGWVDLWRGILLCDDVLDQHPVLRDVPLPKPARSNRKSFCRGPPHHYRDITVVVQDSVPTCIKYVEMETRPGDRPPPRQRQPPQHSDDSDSDEEEDVAYYWKANIWSMPIPVGSWGDWQMECTVDVTDIAVVDNVRFSELLPKIGNDPEETLRRLVTGFPTLGMDGDVISFLSKINRLDDKGWVISVDLRSKTLQGVAELDERKNFLFERYYNTSEISKYLIKATGEAGTLVKTGVNSRVSKKKK

SEQ ID NO: 142219 - protein, 119 aa, Oryza sativa
  Clone ID: PAT_MRT4530_43246C.1.pep
METEPSTPMTQSSYFAGCMGSPAWLPAVQRSPARFHLLSRDAAAGRDDGGRRAWSRLLRRLVRESRSFCSLGSRHGGAMAAATTTFHYDAASYAKNFDDGRRAHYAASAQAPPPVAGAS

SEQ ID NO: 142220 - protein, 101 aa, Oryza sativa
  Clone ID: PAT_MRT4530_43247C.1.pep
CRASVGCSSALRSASSTGRGPVCRCVTSRARFASAGFRVVASSRFFGATCRCPVRAAQWPPLPHPPPSVSPFLLVCPSPGALGSRRERGLFAVAPGCAVSV

SEQ ID NO: 142221 - protein, 110 aa, Oryza sativa
  unsure (1)..(110): unsure at all Xaa locations
  Clone ID: PAT_MRT4530_43248C.1.pep
MNGGGLARAAAPAVVALALAAILSTPPPQPETFSNIPQTLSGGDGKQQVRIKRPKSAKALQCTSKCVATCIRGGEGPLNXPLVVFKGQFRSRQYXCSDVCNLIKDGEDGQ

SEQ ID NO: 142222 - protein, 2067 aa, Oryza sativa
  Clone ID: PAT_MRT4530_43249C.1.pep
MFKRQQSEHLQQAEKQAEQGQPSNSEQRSGDMRPPSMPPQGVPGQQLSSAGMVRPMQPMQGQAGMSNAGANPMAMAQLQAIQAWAKEHNVDLSNPANVTLISQILPMLQSNRMAAMQKQNEVGMASQQQSVPSQMNNDAPGHSNFPSQGAPSKPRQPLPPSTSVSGGAEPKMMNMSNMQMQQQLAAHNRDSSNDRAARPAMSMGNGGQMMHMPQSSGHANKIPEQPNPKNANSEAMQMQYARQLQQANRATAPSANSGETGGSQAPNQAARPPMGFTKHQLHVLKAQILAFRRLKRGDKKLPPEVLDLIMSGPPPDSQAQQVSGPPVTNRERSATSSADEHGRPVESGGIAPERSSLLKAPCLPKVEVSAPEDKTIPASGPMQVMKASPKEPLRIGPVSMPEQTNTTLIKSEQDPERGIQRTPGRSDYNGERGKSLPAESGSADAEQAKRAASSSSVPTPNRDVSRKYHGPLFDFPSFTRKHDSMVSANYNSNLALGYDVKDLLAQEGMIVLGKKREDNLKKISGLLAINLERKRIQPDLVLRLQIEEKKLKLLEFQARMRDEVEQEQQEIMAMPDRVYRKFVRQCERQRVELTRQVQQMQKASREKQLKSIFQWRKKLLEAHWAIRDARITRNRGVAKYHERMLREFSKKKDDDRNKRMEALKNNDVERYRQILLEQQTSVPGDAAQRYNVLSSFLTQTEEYLYKLGGKITAAKNHQQVEEAANAAAAAARAQGLSEEEVKAAAQCAGQEVMIRNTFSEMNAPRENTSVNKYYTLAHAVNERVTRQPSLLRAGTLRDYQLVGLQWMLSLYNNKLNGILADEMGLGKTVQVMSLIAYLMEFKGNYGPHLIIVPNAVLVNWKEVLAVKFNVLVTTYEFVMYDRSKLSRIDWKYIIIDEAQRMKDRESVLARDLDRYRCQRRLLLTGTPLQNDLKELWSLLNLLLPEVFDNRKAFQDWFSKPFQRDVPTHSEEEDDWLETEKKVIIIHRLHQILEPFMLRRRVEDVEGSLPRKVDCSALVTLSDAICHSALFVCYIVNSSCHLQESIVLRCRMSGIQGAIYDWIKSTGTIRVDPEDEKARIQRNAMYQAKTYKNLNNKCMELRKVCNHPLLSYPFMNYYGKDFIIRSCGKLWNLDRILIKLHRSGHRVLLFSTMTKLLDILEEYLQWRQLVYRRIDGTTSLEDRESAIVDFNRPNSDCFIFLLSIRAAGRGLNLQSADTVVIYDPDPNPQNEEQAVARAHRIGQTRDVKVIYMEAVVDNISSYQKEDELRNGGSGDLEDDLAGKDRYMGSIESLIRNNIQQYKIDMADEVINAGRFDQRTTHEERRMTLETLLHDEERYQETVHDVPSLQQVNRMIARTEEEVELFDQMDEEFDWTGDMMKHNQAPKWLRVSSTELDAVVASLSKKPLRNMAAGGISLDTNEKLEKRRGRPKGSGKYSIYREIDDDDFEESDDDSEERNTSSLPEEGEIGEFEDEEDNDDSVPDNKDQSEEEEPINDEGYDFSHGMGRRKAHRSEEAGSTGSSSGGRRLPPPAPSSSSKKLRSLSALDSRPGALSKRTADDLEEGEIALSGDSHLDLQQSGSWNHERDDGEDEQVVQPKIKRKRSIRIRPRPNAEKLDDRSGDGTVPQRGVHLAFQGDGDYDSQFKSEQAFADPASRQQDTVHRTVKQKRNMPSRKAPPATKAGKMTQLSGSGEGSAEHSKENWSNKVIESAGPNSSGTKMSDSMQRKVNLDCYLLALAKEPSMTPLISCGVFTLFYNHNNCKNVINKLWRRIDKEGHQIIPNISSWWRRNENSSFKGLASSTLDLQKIEQRVDGFEYGGVNEFIADMQQMLKSVVQHFSYRHEVRVEAETLHNLFFNIMKIAFPDSDFREAKGAMSFSNPGGGASGSAAQSTKQSASGQKRRSSTSEAEQHGSSTSRHNQHAPVGEVSGRAHTSKSEKDSRHSGPGSREQFTDSAGLFRHPTDMFIVKKKRDRRPSLGSPSSSGRTGPLSPTNAGRMGPAPSPRGARTPFQRDPHPSQQSMHSAGWGAHSVQQSDRGGSSSPGIGDIQWAKPTKRSRTDSGKRRPSHM

SEQ ID NO: 142223 - protein, 282 aa, Oryza sativa
  Clone ID: PAT_MRT4530_4324C.1.pep
MPNRFSHIAHQLVHAEKRESIFFVKMVRVPHCHAKIVEHLQNKFHMKPSEAEGTIKEPFFATGSMIYQDENFGYILTCAHILEDFYSANIVLSKEQANRWFKFLILCKHNEDHMKTIHPDLYESERDKRNYTVATVLKIDQRKDLMLLQFNLSTLYATQYAQRCRLPHQSLKLAENPSSAPNDVVMISWPPNRPDTVVIGQVSNQCRLFNQLTTERDKGYNMQFIELKINVEKGASGSPILNHAGDILAVYHGRIEGKGYAISHDDIYEFLYTRKILSQNLR

SEQ ID NO: 142224 - protein, 115 aa, Oryza sativa
  Clone ID: PAT_MRT4530_43250C.1.pep
MNGGGLARAAAPAVVALALAAILSTPPPQPETFSNIPQTLSGGDGKQQVRIKRPKSAKALQCTSKCVATCIRGGEGPLNVRKPLVVFKGQFRSRQYCLAECSDVCNLIKDGEDGQ

SEQ ID NO: 142225 - protein, 162 aa, Oryza sativa
  unsure (1)..(162): unsure at all Xaa locations
  Clone ID: PAT_MRT4530_43251C.1.pep
ASPRPVSRAPTPNPHLAVVVVAATSPRQIRCRRRGRRRCSPSPPDPPPPVRRPDSRRXRRGRRRLARSGDPAPGSGEPAAAKLATPSASSSAPSWGEEDGGVEPSRRGREEDSGVKPSALTVAPRHHHRCSLPPPDPPPPLLPAFARSATARARVTLICHRR

SEQ ID NO: 142226 - protein, 330 aa, Oryza sativa
  Clone ID: PAT_MRT4530_43252C.1.pep
MPLSYSAAAAAAPSPLAARSRGLLRRPPRSSPVVVQWYDDQYAVIDRVVDVAMRCKKIDQLRAVNGIPPYAPVSNRSLLSPVTLPIIRDANIKNDTRLRIFSGTANPSLSQEIASYLGLELGKINIKRRASAKNITAVIPYFGYARADRKSQGRESIAAKLVANMITEAGANRVLVCDLHSSQAMGYFDIPVDHVYGQVMNLIGDVRGKVAVMMDDMIDTADISLPNINILMKPIKLGTIAKGAELLHQEGAREVYACCTHAVFSPPAIERLSSGLFQEVIITNTIPLKEDKSFPQLTILSVANLLGETIWRVHDDCSVGHEPYSSLDID

SEQ ID NO: 142227 - protein, 496 aa, Oryza sativa
  unsure (1)..(496): unsure at all Xaa locations
  Clone ID: PAT_MRT4530_43253C.1.pep
MSYNHSPSITAETINQKVRIFTYEPCGEIVRHARRLEKEIYENPGSLPFQEIIYCNLGNPQALGQRPINFFREVLSLCDNPSLIDXHSFEARALCSPCALKRARKIIESLPGRDSGSYTSSQGVRGLREAVADGIAARDGFPSKPDNIFLTDGASSAINMMMQILIRSHEDGILCPLPEYPLYSASIILHGGTMVPYNLTEDSIWGLEIFEVKRCLEDARASGLTIRAMVVINPGNPTGQVLSITNQEEIVEFCRKEGLVILADEVYQENVYTENKRFNSFKKVARSLGYDHHDLSIVSFHSVSMGYYGECGRRGGYMEICGFGDDVIDEMYKLASLTICPNIAGQILISLVMDPPKLGDEAFEIFMVEKEETYSSLLKRAKALQKAFNGLEGVSCNKFEGAMYLFPRLRLPQAAIKAAQLEGVSPDVFYAHRLLDATGIAVVPGSGFHPDLVSSCKKVSGTSHIRCTILPGEETITAMVPSLQAFHEAFMDEFRG

SEQ ID NO: 142228 - protein, 154 aa, Oryza sativa
  unsure (1)..(154): unsure at all Xaa locations
  Clone ID: PAT_MRT4530_43254C.1.pep
MRRAWAPPRARSARRGPPRPRRRRRATRPRRRTAPACSAAGRGGRRGTRSPPPGRPPATGRTRPGXSHDPPPPPPPPPPTGTPSPPXTSATGTRTPPAAASTPPPPPPPSPYPPLPPPPPSPPPPPTTTTKSPPRTPPPPPPPARASSSPPADP

SEQ ID NO: 142229 - protein, 426 aa, Oryza sativa
  unsure (1)..(426): unsure at all Xaa locations
  Clone ID: PAT_MRT4530_43255C.1.pep
VRLHASHDLAPLSAAPPCTVAASVTDGQTSLLRPPSPAAAPPQPTRATPVPPHANCSYWAAIGPGRGPDPAAPTVVAADPTTTPSLPPLPPPSPPLDLAAPAADLASSSPPPPPHAVRTSPLSSPXPPPPSPPVIPPQRPPXPASPPRAPGAPPRQPRPRTVVGCTSMRHGCLSPTAEPPCSXPPPPAVAPPQPTRATPAPPQAPLXAAAGSSRGPDPAAHTAVAAVPTATPPLPPLPPPSPPLDLAAPTTDLASLSSQPPPPPTKKKPPSPXPVPPRHVTPPPPRPHVPSIPPPPXPPPPPPLPWPPPPLLSPAWXPPPPSPTPPARLPPXPSISRPPPPRTPPLPDPPPSPPPPPLFPPPPPPXSPVNPRHSQPFPHSPPPSPXPSLPLPLVAPPHRRRSSPPAVRRRSPPAPPPPRRHGAGPA

SEQ ID NO: 142230 - protein, 94 aa, Oryza sativa
  Clone ID: PAT_MRT4530_43256C.1.pep
VRLSGMEISDLTLELSDLSQEIADGVNKSAKVAQAVETGLGQMRDLAMQQATSMIEERANLQTIPNSAKKSNGSSTRQRRQEKGKDHSTDRMEP

SEQ ID NO: 142231 - protein, 573 aa, Oryza sativa
  Clone ID: PAT_MRT4530_43257C.1.pep
MASLTPGVLLKVLKNINSDVKVCGEYRSILLQVISIVPAITGSELWPDHGFFIKVSDSSHSTYVSLSKEDNELILSNKLQLGQFIYVEKVQSSIPVPVLVGVRPVPGRNPCIGNPKDLMQMSTPTGISEALAHQRKATKSAELSESEKENSQRKVVIKEQKAVVASRYMLGISSNNSKITNLNSSIDSDKSNGGSSICSANQKSAPTKFKQESKPQERPNTPSRSPAKIVSAKQEINKDTRKTSASSPSQNGSAVVKKQMSKDSKKESASEKNSPPKLYKTSPPTPTPTPPPPAMTSPPKLNLAAKPNGTSGTVTSTPTVKRRVTETVSWDSLPTSLIKSVKVVARRKTIALVVAAEAQREATAAASLLKGLGIFAEIRKSAEEDPHAAITKFFQLNRLIIQQSVFWKDYSSEPVKESRPEKEKPSRKASASQNKAVAGSTAKNSDDAYTSEKIDWAREDGFKEISRSWIILKKESQSWFLSFLEDALEAGFKFEGQNKNTRERVRGHSKGGDGQIAVRLSQLKETSNWLDQLHSEVDKSQDALVETIEQLKQKVYTCLLGTVETAASALEAR

SEQ ID NO: 142232 - protein, 152 aa, Oryza sativa
  Clone ID: PAT_MRT4530_43258C.1.pep
MNTQVDVENVDVVIKPRMVPAHQGWQTSLCDCFGDGCESFCLSAWFPWLSISCIGEIVDQGFTEWCCICFIYLIAAYFGVWWAYAGWYRGKLRAQYGLPESPLPDCLTHLFCHWCALAQEHRELAARGYNVLNGTYSLRFKIFDTVNFLAHV

SEQ ID NO: 142233 - protein, 106 aa, Oryza sativa
  Clone ID: PAT_MRT4530_43259C.1.pep
MGYRSLLNPDTDEDVRWGDSARLILTGDRTHLLAYTTLFFFLLFLPPFLSSLGREATIGTHGGKGEVGTEGGGKGMAGNGDRATGDGSHANDTGWQRPPWMVASLW

SEQ ID NO: 142234 - protein, 395 aa, Oryza sativa
  unsure (1)..(395): unsure at all Xaa locations
  Clone ID: PAT_MRT4530_4325C.1.pep
MDGAKSGKQCHVCQICGDGVGTAADGELFTACDVCGFPVCRPCYEYERKDGSQACPQCKTKYKRHKGSPPILGDESDDVDADDASDVNYPTSGNQDHKHKIAERMLTWRMNSGRNDDIVHSKYDSGEIGHPKYDSGEIPRIYIPSLTHSQISGEIPGASPDHMMSPVGNIGRRGHPFPYVNHSPNPSREFSGSLGNVAWKERVDGWKMKDKGAIPMANGTSIAPSEGRGVGDIDASTDYNMEDALLYDREGEPSQLAPVDIFVSTVDPMKEPPLVTANTVLSILAVDYPVDKVSCYVSDDGAAMLTFDALAETSEFARKWVPFCKKYSIEPRAPEWYFAQKIDYLKDKVQASFVKDRRAMKREYEEFKVRVNALVAKAQKXPEEGWIMQDGTPWP

SEQ ID NO: 142235 - protein, 520 aa, Oryza sativa
  Clone ID: PAT_MRT4530_43260C.1.pep
MAVRRRRPGPVAAAVLLLLAVATQAAASPIKTVVVVVMENRSFDHMLGWMKRLNPEIDGVTGGEWNPTNASDPSSGRVYFGEGAEYVDPDPGHSFQEIRQQIFGSDDASGPARMDGFVQQARSLGDNMTAAVMNGFSPDSVAVYRELVGEFAVFDRWFASVPSSTQPNRLFVHSATSGGATSNNPELLAKGYPQRTIFDNVHDAGLSFGVYYQDVPAVLFYRNLRKLKYLTKFHPFHGAFRDHAARGSLPNYAVVEQHYMDSKSHPANDDHPSHDVFQGQMLVKEVYETLRASPQWNQTLMVVTYDEHGGFYDHVPTPVTGVPSPDGIVGPPPYNFAFDRLGVRVPAIVISPWINKGTVVHGPNGSPTATSEYEHSSIPATVKKLFDLPQDFLTKRDAWAGTFESVVQGRTEPRTDCPEQLPMPMRIRLTEANEEAKLSEFQQELVQLASVLNGDHQLSSLQDTIRDRMNVREGIAYMRGAVKRFFETGMSAKRMGVDDEQIVKMRPSLTTRTSPAIEQP

SEQ ID NO: 142236 - protein, 41 aa, Oryza sativa
  Clone ID: PAT_MRT4530_43261C.1.pep
KHLVCSPFHHRNCELAPSLLIVVIFFFLARWRVCSYSLIIS

SEQ ID NO: 142237 - protein, 75 aa, Oryza sativa
  Clone ID: PAT_MRT4530_43262C.1.pep
PLLFPCLLCALGTLSAEHTLVVLQSPSPICDRPSNPFICPNYRKHLSNLEFHIHSVSTNRTVFYTCVAICLLTSI

SEQ ID NO: 142238 - protein, 707 aa, Oryza sativa
  unsure (1)..(707): unsure at all Xaa locations
  Clone ID: PAT_MRT4530_43263C.1.pep
MPPPRRRPPAPGLLILLIFLALASPGEVAGDDAAPGNVTASAPLPCSELSRVCTAFVAFPAAGEAANASVLESMFDAAPGDITADAAASPGYAFVRKNCSCLASRTYLANTTYTVPSAAAGATANATAADVAAAAYAGLAVPPPGGPALRPPRPGAVVALHLLCGCSSGPWNYLLSYVGVDGDTVQSLSSRFGASMDAIEAANGMAGPDPITTGKVYYIPLNSAIIHSGNLINQTSLFTHVPGQPYPVISPSSPTPAPAPAQNTFSGMXDVSEHHSTKFPYGWVIGSMGVALALIAIALLALVLCKLSQYNPQAPNNQGKSPDQSISHKFQLLKSGSFCYGSGRYLCCQFGNVKQSRTDGSDHHMNTPKGVVVDVFDREKPIVFTYQEILASTDSFSDANLLGHGTYGSVYYGVLRDQEVAIKRMTATKTKEFIVEMKVLCKVHHASLVELIGYAASKDELYLIYEYSQKGSLKNHLHDPQSKGYTSLSWIYRVQIALDAARGLEYIHEHTKDHYVHRDIKSSNILLDESFRAKISDFGLAKLVVKSTDAEASVTKVVGTFGYLAPEYLRDGLATTKNDVYAFGVVLFELISGKEAITRTDGLNEGSNSERRSLASVMLSALKNCRNSMYMGSLKDCIDPNLMDLYPHDCVYKMAMLAKQCVEEDPVLRPDMKQAVITLSQILLSSIEWEATLAGNSQVFSGLVAGR

SEQ ID NO: 142239 - protein, 55 aa, Oryza sativa
  Clone ID: PAT_MRT4530_43264C.1.pep
RHVVRRVHHSWLTQCLGSVNRLFLVAVCQCRRICEPGVSFGEQLKFASLVASRLF

SEQ ID NO: 142240 - protein, 166 aa, Oryza sativa
  Clone ID: PAT_MRT4530_43265C.1.pep
SVKKMMMMTMKMVQPWQPCFQWPRMVMWVSNDGSSSSSPSSPVRDGKDGSRTPNPPSSSWFSGSWRSSCRHVLSLSGLHPCPFDGAGAAAAASSSSAAAAWPLAWPARAERTAIAHATSTAASTHTRVDAAMAALASQQYIPKLSSEMSMRCAARSNRTRGSTREF

SEQ ID NO: 142241 - protein, 57 aa, Oryza sativa
  Clone ID: PAT_MRT4530_43266C.1.pep
LRFTGIKHCGSGELTQLSVSVCTTWNWKATVRAKLQKPIRPKKMLQAFFVTKRQGRR

SEQ ID NO: 142242 - protein, 122 aa, Oryza sativa
  unsure (1)..(122): unsure at all Xaa locations
  Clone ID: PAT_MRT4530_43267C.1.pep
QKKSRAPIFFLSQTSPRLCRHSSPIPSPPHEGVADSSAPNPGRRTPVPSSSSLIPPLTSPGPPPRLVGADPHLEPPLXPPISKTTSPPDPASSPSTSARRSRPHHCPRSSPSHHAARNRHVP

SEQ ID NO: 142243 - protein, 188 aa, Oryza sativa
  Clone ID: PAT_MRT4530_43268C.1.pep
MNFLYSTVNTLRDRYTPVSHKSTFRQTGQITPEEFVAAGDYLVYKFPTWSWGDADSPERRVSHLPPGKQFLVTRNVPCHRRLNDDFAGDAGHEEALVNDGDDFKGNAGDDEDGWLRTGGLASSQPLKVKEVRTVDDSGNVGDREVVEDDEIPDMEDEDDDEAIIRDSGADSRTALTDIHLVHHVLSIL

SEQ ID NO: 142244 - protein, 340 aa, Oryza sativa
  Clone ID: PAT_MRT4530_43269C.1.pep
MALSFLNTPPSKLAPKPSFPPPSRQFAPPQRQRSLLHLSLLLREQQPPRPVRSSSSTQAGAAPSPPSSREEAVSQARSCLAAALRKPLGKQRKQQRQPRFRAEIPVVDDSPGSLARLASDVFSSGLGLSRKGGGGGAPARLLLVWPSSEEMGVALREPHDWGESTAHAQLDAVAPDALSSCDAAVFLAPGRSQVEKMKAAADALDTKPVVMFNPAWSFDEEEEGFAGGARGFVGSFSVVYSFTGLEVRGLLSKKKGVLLRCVDGGRFGGESWVLMVEDDAAAPASEQFKVVSRLKRRPTIGEVETMLYNVMAANSPVTKSARFLRGLVSNVTGGRKEKKQ

SEQ ID NO: 142245 - protein, 1063 aa, Oryza sativa
  unsure (1)..(1063): unsure at all Xaa locations
  Clone ID: PAT_MRT4530_4326C.1.pep
SVPQKSGRHGSGQACQILGDGXDVCGFPVCRPCYEYERKDGSQACPQCKTKYKRHKGSPPILGDESDDVDADDASDVNYPTSGNQDHKHKIAERMLTWRMNSGRNDDIVHSKYDSGEIGHPKYDSGEIPRIYIPSLTHSQISGEIPGASPDHMMSPVGNIGRRGHPFPYVNHSPNPSREFSGSLGNVAWKERVDGWKMKDKGAIPMANGTSIAPSEGRGVGDIDASTDYNMEDALLNDETRQPLSRKVPISSSRINPYRMVIVLRLIVLCIFLHYRITNPVRNAYPLWLLSVICEIWFALSWILDQFPKWSPINRETYLDRLALRYDREGEPSQLAPVDIFVSTVDPMKEPPLVTANTVLSILAVDYPVDKVSCYVSDDGAAMLTFDALAETSEFARKWVPFCKKYSIEPRAPEWYFAQKIDYLKDKVQASFVKDRRAMKREYEEFKVRVNALVAKAQKVPEEGWIMQDGTPWPGNNTRDHPGMIQVFLGHSGGLDTEGNELPRLVYVSREKRPGFQHHKKAGAMNALVRVSAVLTNGQYLLNLDCDHYINNSKALREAMCFLMDPNLGRRVCYVQFPQRFDGIDRNDRYANRNTVFFDINLRGLDGLQGPVYVGTGCVFNRTALYGYEPPIKQKRPGYFSSLCGGRKKTKKSKEKSTEKKKSHKHVDSSVPVFNLEDIEEGIEGSGFDDEKSLLMSQMSLEKRFGQSSVFVASTLMEYGGVPQSATPESLLKEAIHVISCGYEDKSDWGTEIGWIYGSVTEDILTGFKMHARGWRSIYCMPKRPAFKGSAPINLSDRLNQVLRWALGSVEILFSRHCPIWYGYGGRLKFLERFAYINTTIYPLTSIPLLLYCILPAICLLTGKFIIPEISNFASIWFISLFLSIFATGILEMRWSGVGIDEWWRNEQFWVIGGISAHLFAVFQGLLKVLAGIDTSFTVTSKASDEEGDFAELYMFKWTTLLIPPTTILIINLVGVVAGISYAINSGYQSWGPLFGKLFFAFWVIVHLYPFLKGLMGRQNRTPTIVVVWAILLASIFSLLWVRIDPFTTRVTGPDTQKCGINC

SEQ ID NO: 142246 - protein, 468 aa, Oryza sativa
  Clone ID: PAT_MRT4530_43270C.1.pep
MATVDHLKRLCIDHYFQDEVDGAMDAHLEELAHGGDLLDATLAFRLMREAGHHVSPDEVLGRFTDGNGDFSMAYSKDIRGLLSLQDISHMNIGAEASLYKAKEFTSRNLQSAIDYLEPGLARYVRQSLEHPYHVSLMQYKARHHLSYLQTLPTRCTAMEELALANFKLNKLLHQMEMQEIKRWWMNLGLAQEIPVARDQVQKWYVWIMTAFQGASFSRYRIELTKIASFVYIMDDIFDLVSTQEERSCFTQAIKMWDFAAADSLPSCMRSCYRAIYTVTNDIADMVEREHGVNPINHLKKAWAVLFDGLMTEAKWLTDSHVPSSEDYLRNGVITSGVPLMFLHLLFMLGHDAAELIDNIPPVISCPAKIFRLWDDIGNAKEGLDGSYKELYLRENPGLAASEAEEHMRGMIAREWEKLNRESFFSGRAFPAGFTQAALNAARMVGVMHGHDGEQRLPVLEDYLRMVLF

SEQ ID NO: 142247 - protein, 680 aa, Oryza sativa
  Clone ID: PAT_MRT4530_43271C.1.pep
MARGPLDLWNAWGTQILVLLSLTLQILLLLFAGIRRRKSSAVVAVLRFILWLAYQLADSTAIYTVGHLSLSSAPREHKLVAFWAPFLLLHLGGPDNITAYSLEDNKLWKRHLVTLVVQVLGAEYVLYKNILESGGSIVVASILMFIVGTAKYGERTWALYRANFSSIQAALKKLPRTQLRGYQGYLWEEDGHIGTGSEEFLLQRAHSLFHICERGIVDSVIDVDKTETESKKVINRLQKSKPEWMWRVMEMELSLMYDTLYTKARVIHSMFGYLVRTASPLAVVASFLLFHFSGKRGHSRVDITITYTLLAGALLIETASTLNAVGSSWALSYLCKTEWSWLRHAALCARRWHRLRRAVVTVRQFIKTMTGGSSSLYGRSRRSSGNIGQYNLLYVRSSLEMDKTDRKLNRFATKLSFGDRWDNTYYSWTIKIPDKVRDRVVSMLSRHDLNTMGMLRHKWGEIGLNDLKYPGLFKELDHFDDNNSWHGVEFHESIISWHIATELVLFKLNANYEDEHVGPIRALSNYLMYLLVTRPDMLPGLPQNWLYEMTCENLDDICHGQLDPSDKSGVSAVLKKLIGRHGGTRPYKLDQTNQLADIILHWESRGHQPEIPRLKYAREIAKIVLEREEDKKDILFDLWTDFLIYAANRCNRESHARNLNTGGEFTTVVWLMIEHIYQTK

SEQ ID NO: 142248 - protein, 65 aa, Oryza sativa
  Clone ID: PAT_MRT4530_43272C.1.pep
IPGLGADIAEDVIRRVFTSVNARHHYTLEKMGHVVHILTFSLTTTCLLLNCAPCHTCVSSENKHV

SEQ ID NO: 142249 - protein, 87 aa, Oryza sativa
  unsure (1)..(87): unsure at all Xaa locations
  Clone ID: PAT_MRT4530_43273C.1.pep
VLRDLPXLHRLEIEEGAGIGIRVLQLRHLDKLMDIPPGIEFLPSLQRLCFVHISEDFLALLNRCSRLKHIQWWYSTHDQPLTKKSQS

SEQ ID NO: 142250 - protein, 282 aa, Oryza sativa
  unsure (1)..(282): unsure at all Xaa locations
  Clone ID: PAT_MRT4530_43274C.1.pep
MSGGGGGAASAVFYAEKYHPIQAGSIDGTDVAPHDNAVLRALLCSTAGLYDPFGDPKATGDPYCTVFVGRLSRYTDDETLRKEMSRYGRVKSMRLVRDIVTGASRGYAFVEYETDREMRRAYEDAHHSIIDGSEVLVDYYRQQLMPGWIPRRSGGGLGGKKESGQLRFGGRERPFRAPLRPIPYDELKRLGIPPPPEGRYMTRYQVPPPPRRKSSDIYREESPPKRRSKDRVDSSHYRRYCSPTQDDDSTVSTHRRKGSHDRREXNREEDKSIYQQRGRQLQ

SEQ ID NO: 142251 - protein, 86 aa, Oryza sativa
  Clone ID: PAT_MRT4530_43275C.1.pep
DVVPPPAAVIARSAVVRVAQTRSGRGEARSGVGEGGSATNVAGSAAPTARPPPPVTCRRRETPVSPAAGHPRGENAPPPPSLRPSS

SEQ ID NO: 142252 - protein, 418 aa, Oryza sativa
  unsure (1)..(418): unsure at all Xaa locations
  Clone ID: PAT_MRT4530_43276C.1.pep
RPPLRLPPPPRAFTPVPPAPSSPPRRPPPPPPPPPLPPPRSYPPXAAPRGALPPAPRAPPPHGPPPPPXSPRPRPPPSSPSPPPPSXAPGAAGPPPPPRPRPGDPPLHISPQRHPPLPPRPRRAPLPPPRPRARPPRERLLPVHRPRPLPRPRPRAPAXTPTSSPRGTPRTPSWPPPPPASASSTAPPPPAAAPPSPQPLGPPAPTIAVATPRAASANGSCHRPPPQPLGPPAPXKPPPASTGAVGPPPTSAXPLSSPPPSEGTPLTTPFHLPSSAVLAAGSWGEKKRRAGASLLPPTTARRPLPAWMRRCASSGRSHREVRCRQGRPDPIWPRRGQIRRRGRWIRNQRGRIRRTDRPAATSCDLPPPRNPGVPRRRASSWGERPAAAVLAAIQHCRSTSRSGLSSLPRFPRACFSNC

SEQ ID NO: 142253 - protein, 212 aa, Oryza sativa
  Clone ID: PAT_MRT4530_43277C.1.pep
WHDGSVRRSLGTRYMGRWMEFVRTGMRPVALSLRSQESHTYRMPRTCRSIEPHATQARGLARSAKSRSIDGGRARAVRYAVSRRNGRSRTHGARACAMRDCEEIIVFSCRGYHGRRSWSYVRPVRHAESPGSARGRTGRGMLARSPTTATVRACVCCVKETRLRMEGKGGVSEGDTCGGLGAGTDGRVGEWRGAMSFLPFCVRVGPMSEKQE

SEQ ID NO: 142254 - protein, 435 aa, Oryza sativa
  Clone ID: PAT_MRT4530_43278C.1.pep
MPPPPLLLAAAVAAAALPPPAAARRHASPPPPQPQHPDKAGGGNGVLTTALVAAAVLLVVLLLYLCVAIAVRRYRGRGPAPAAGPTNAAARAAAFLRRNGLHQHRPSFTYEQLRAATAGFDPSRKLGDGGFGTVFLAYLPPGGRPAAVKRLHVPPSPSPSFPSASATITKSFCNEVLILSALRHPHLVRLHGFCADPRALLLVYDFVPNGTLSHHLHRRCGVTAAAPPPPPLPWRTRLAMAVQIASALEYLHFGVKPAVVHRDVTSSNIFVEADMRARLGDFGLSRLLSPPDACATGAGRELVCCTAPQGTPGYLDPDYHRSFQLTEKSDVYSFGVVVLELVTGLRPVDVGRERRDVTLADWVVAKIQVGELREVVDQPVLGEGAGVMASVEAVAELAFRCVAPDKDDRPDAREALAELRRIQGMLPEVSGLKGS

SEQ ID NO: 142255 - protein, 72 aa, Oryza sativa
  unsure (1)..(72): unsure at all Xaa locations
  Clone ID: PAT_MRT4530_43279C.1.pep
KFYLDXHPPKFQQSHMMMYDFIFNKRTITMLQFSTRHHQQCQCSWEHYSPTVDXXYGWEVEGPPTPPQFEFV

SEQ ID NO: 142256 - protein, 76 aa, Oryza sativa
  unsure (1)..(76): unsure at all Xaa locations
  Clone ID: PAT_MRT4530_4327C.1.pep
CGQYEDEXLIKNAAYIVTPGKGMIAGDXSTGTIGKRVPSINVENVEENRRSIRELXLFCTPGTLHNLTEVILLKET

SEQ ID NO: 142257 - protein, 482 aa, Oryza sativa
  Clone ID: PAT_MRT4530_43280C.1.pep
MAKPSSAAAASGGGRGPAHHHRTRLLLLLLLAVAACASTAGFLLCGAMLDPCDVDARRGSGSSAAAVATTRTGAVAGNPLEFMRSKLMLLVSHELSLSGGPLLLMELAFLLRQVGSQVVWITNQRSEETNDVTYSLEHKMLSHGVQVLPARGHEAIDTALKADLVILNTAVAGKWLDAVLNDHVPQVLPKILWWIHEMRGHYFKLEYVKHLPLVAGAMIDSHTTAEYWKTRTHDRLKIQMPQTYVVHLGNSKELMEVAEDNVARRVLREHIREFLGVRSEDLVFAIINSVSRGKGQDLFLQAFYQGVQLIEQKKLKVPTMHAVVVGSDINAQTKFETQLRDFAVKNGIQDRVHFVNKTLAVAPYLAATDVLVQNSQARGECFGRITIEAMAFKLPVLGTAAGGTTEIVVDGSTGLLHPAGKEGVAPLAKNMVRLASHEEDRVSMGRKGYGRVKEMFMEHHMAGRIAAVLQEVLKKSREHSHS

SEQ ID NO: 142258 - protein, 198 aa, Oryza sativa
  Clone ID: PAT_MRT4530_43281C.1.pep
MPTVRRRHPDVHVKALEGIVSANTFFTVAVFIGITGTITPSSSIPPNCVAGDDIARNFFLFEILSFGFYLLSSLVAQGMKLAVTLLATDDFYGDGEQKPPPSDDCEEMPAWRAAAPRERRRAVLRFARPMMLLAAGCSIMGTFFLLLSMVDAIQLKFGLVSCNIPLAVGTTFALAVLVVAGLVFYGATVAYALTHYLP

SEQ ID NO: 142259 - protein, 201 aa, Oryza sativa
  Clone ID: PAT_MRT4530_43282C.1.pep
MADMWGLRCLTLVKIGLRSSSTSGLGSRRMSVGWCEADSAGDGSATTKGGANGFRRPSTCGGGARRSRGERCGMATPWPSSRRFGALAIVGDSGQFIEWRSVQSVLGFDFANKGMTRIYENAVWNSGASAPIICTVGCASGCVLLNVPGSQQMKVATEKRGGEGHPVPQGQDLHMTFYRTVQFHKATIWMGKNPAYPHVWA

SEQ ID NO: 142260 - protein, 134 aa, Oryza sativa
  Clone ID: PAT_MRT4530_43283C.1.pep
MEGSVAGPALLRPDLGGRGEGPGVAAARRWEPPPPPAGDRGEEERKTSKEILTTIAKIKVVEGYCYLSLPSPLSASYVYDRAPPANHVSMPTPPYSSSTPPQPPCVDATCTATLPRLHSHTCATFAPIAATPDA

SEQ ID NO: 142261 - protein, 47 aa, Oryza sativa
  Clone ID: PAT_MRT4530_43284C.1.pep
CLLSLQPVYIFQVCDAMLNLILQSPALCSSIVLFAKIMSFKFGINYL

SEQ ID NO: 142262 - protein, 343 aa, Oryza sativa
  unsure (1)..(343): unsure at all Xaa locations
  Clone ID: PAT_MRT4530_43285C.1.pep
TFVGRYRRKPPSGVQLDAAPVQSRCSFESNATAHAHRDVAYKXYINEMDCLQPTHAVEYHLPHRVMRQFGKRQEWPVEDISTGVDLHKXNIFYLYLLSLSMFNFISFDPYLTHHHLPLVKHCSKPATSSTINLCPGNKQTTAVLRPAAAAPRPAVVASGPAAAVLGAWDLAAWWPCAGVAEGAGASREHLGSVNEMGHALRSPKGGEDTENTLRNALKVRQRCRKLAVSLGCRSVGLDDVYQPRRVPPPLLQSAPISTCPSTARHSIRIEEREEVGGSSLSRIPQGRRKGQVQAPPSDDDEEEDEDYIIPYAEVIGMSQLPDAPQASQPTQYNLRSTRAAKKR

SEQ ID NO: 142263 - protein, 345 aa, Oryza sativa
  unsure (1)..(345): unsure at all Xaa locations
  Clone ID: PAT_MRT4530_43286C.1.pep
TFVGRYRRKPPSGVQLDAAPVQSRCSFESNATAHAHRDVAYKXYINEMDCLQPTHAVEYHLPHRVMRQFGKRQEWPVEDISTGVDLHKXNIFYLYLLSLSMFNFISFDPYLTHHHLPLVKHCSKPATSSTINLCPGNKQTTAVLRPAAAAPRPAVVASGPAAAVLGAWDLAAWWPCAGVAEGAGASREHLGSVNEMGHALRSPKGGEDTENTLRNLVVEKVRQRCRKLAVSLGCRSVGLDDVYQPRRVPPPLLQSAPISTCPSTARHSIRIEEREEVGGSSLSRIPQGRRKGQVQAPPSDDDEEEDEDYIIPYAEVIGMSQLPDAPQASQPTQYNLRSTRAAKKR

SEQ ID NO: 142264 - protein, 216 aa, Oryza sativa
  Clone ID: PAT_MRT4530_43287C.1.pep
AAAAAAEEKKPAAVPTLLPSLSVPAGMRRQELLLRSGLSLDASCSSDASTDSFCSRASTGRIGRPTFGARKKKTLCQTDHKIVSMLEREVGLASANDVPGLKRRCSWVTANTEPCYAAFHDEEWGVPVHDDKVLFELLVLSGALAELTWPTILNKRPIFREVFMDFDPVLVSKLSEKKIIAPGSPSSTLLSEQKLRGVIENARQILKIVEEFGTFD

SEQ ID NO: 142265 - protein, 119 aa, Oryza sativa
  Clone ID: PAT_MRT4530_43288C.1.pep
MECAFGCVFCIFMALMIPVFGNGDGSRTQCQKDIVGGVNIHGGAAYYRERRRGCLAGSASPPVGHRPPRPARCHPPRSLLDAACHGRHLPRRRARPCRPLATCPLPSAAGWEGRRRKGI

SEQ ID NO: 142266 - protein, 79 aa, Oryza sativa
  Clone ID: PAT_MRT4530_43289C.1.pep
FVLLVLSGALAELTWPTILNKRPIFREVFMDFDPVLVSKLSEKKIIAPGSPSSTLLSEQKLRGVIENARQILKVGPLHS

SEQ ID NO: 142267 - protein, 229 aa, Oryza sativa
  Clone ID: PAT_MRT4530_4328C.1.pep
MASLRLRHLSPSGATAPPSSFAQLRRPSSCLAGPRPLRSRLTRVYALSSNDIRVGSNLEVDGAPWKVLEFLHVKPGKGAAFVRTKMRNYITGNTVDKTFRAGSTIPEASISKETKQFTYKDGAQFVFMDLTTFEESRLNESDVGDRQKWLKEGMDCNLLYWNGRIIDFDLPITVRLTVTDTDPGQGDSAQGGTKPATVETGAVVTVPSFVNVGDDILIDSRTGQYMNRA

SEQ ID NO: 142268 - protein, 755 aa, Oryza sativa
  Clone ID: PAT_MRT4530_43290C.1.pep
MVGPGLYPEIGKKARDLLYRDYQTDHKFTLTTYTSNGVAITATSTKKADLIFGEIQSQIKNKNITVDVKANSDSNVVTTVTVDELTPGLKSILSFAVPDQRSGKFELQYSHDYAGVSASIGLTASPVVNLSSVFGTKALAVGADVSLDTATGNLTKYNAGLSFSNDDLIASLNLNNKGDSLTASYYHIVNHSATAVGAELTHSFSSNENSLTFGTQHTLDPLTVVKARFNNSGKASALLQHEWRPKSVWTISAEVDTKAIDKSSKVGRWVQRPSCSLSMNGCGAAVAGAGAVAVRETRALPAAGAAGDAVGQLREAVAALEAADPPASPSGIIRIEVPVRQRGDAVEWLHAQGDLRARCFFSARAAAPLPECPALAIASAGNGNGNGAGGVGGEQRQRPVSVAGVGSAVFFRGTEPFSLRDWRAIKRFLPRDCPLIRAYGAIRFDATSDHSVEWEEFGSFYFIVPQVEYNELEESSVLATTIAWDDSLSWTWQNAVKELQSTLQKISSSPIKVNNSTLQTTILNLNHVPTKASWDLAVTKALQMIKGKQRELVKVVLARCSRYITDTCIDPVELLACLKVEGQNAYQFCIQPPDAPAFVGNSMICDDVVVHPSKALRKLPRVQHLSAQLAARMRNEDDEFDILNTLHPSPAVCGLPTEEARQFIQDYEIFDRGMYAGPVGWFGGAESEFAVGIRSALLGKGHSTLVYAGAGIVEGTNPSFEWDELDLKASQFAKLLQYQEQHICLQEAENMGTVI

SEQ ID NO: 142269 - protein, 274 aa, Oryza sativa
  Clone ID: PAT_MRT4530_43291C.1.pep
MVGPGLYPEIGKKARDLLYRDYQTDHKFTLTTYTSNGVAITATSTKKADLIFGEIQSQIKNKNITVDVKANSDSNVVTTVTVDELTPGLKSILSFAVPDQRSGKFELQYSHDYAGVSASIGLTASPVVNLSSVFGTKALAVGADVSLDTATGNLTKYNAGLSFSNDDLIASLNLNNKGDSLTASYYHIVNHSATAVGAELTHSFSSNENSLTFGTQHTLDPLTVVKARFNNSGKASALLQHEWRPKSVWTISAEVDTKAIDKSSKVGIAVALKP

SEQ ID NO: 142270 - protein, 222 aa, Oryza sativa
  unsure (1)..(222): unsure at all Xaa locations
  Clone ID: PAT_MRT4530_43292C.1.pep
PTRPVLATTIAWDDSLSWTWQNAVKELQSTLQKISSSPIKVNNSTLQTTILNLNHVPTKASWDLAVTKALQMIKGKQRELVKVVLARCSRYITDTCIDPVELLACLKVEGQNAYQFCIQPPDAPAFVGNSPEQLFHRKYLNISSEALAGTRAKGKTRXDDFQIGQDLLLSSKEDNEFTIVRNSIKKKLEMICDDVVVHPSKALRKLPRVQHLSAQLPAGMRN

SEQ ID NO: 142271 - protein, 636 aa, Oryza sativa
  Clone ID: PAT_MRT4530_43293C.1.pep
MLLISHDVLDIMYPNDVFDRFWWTPVYSTEWLNISTNGTFMGYYSDDHIRVPRDVLRTAITTSATSVHLNITVHAASVGQLPPPTERAYFHFLHFASFEQQQHVSLVATNDSVLPPLLNAIEIYYSIPHDDTITSPDDVDAIMAIKTQYQVKKNWMGDPCLPKESIWTGLQCRQDGVESKIISLDLSYSNLHGAISADFSLLQSLRYLNLSYNNLNGSVPHSLTSSNCYIVFRYDTNDGDLCNGKSPKKKNISVLTVAIVTPIAAVLLVSAILIFCFCHKKRKQQMTLDQYSVQPTGISNSVSHVDIKGHVLMSDDHEFTYEELVKITNNFSECIGEGGFGPVYLGQLQRSIQVAVKMCSRKSVHGQGIKEFLAEVDSLKTVHYKYLVMLIGYCTNKNHLALIYEYMPNGSLFDHIRGKKANVQTMSWLQRARIVHEAAQGLNYLHSGCVLPIIHRDVKSHNILLGEDMHAKISDFGLSKSYINEAQTHISVTAAGTIGYIDPEYYFSSRLTMRSDVFSFGVVLLETVTGEPPIVPGVGHVVQRVKQKVSDGDISAIVDPRLEDAYDIGSVWKVVDIALLCTREVSDDRPTMTEVVEQLKHALALEEARHIDGHRDNGQGSIKPDLSANWGPLARE

SEQ ID NO: 142272 - protein, 181 aa, Oryza sativa
  unsure (1)..(181): unsure at all Xaa locations
  Clone ID: PAT_MRT4530_43294C.1.pep
MPSRPAAAGPTSRRTCSGKSPANSMTPSTCPASTPCARHGVTWSGCRRRSPNAPRCCRGSSPVAGPAASPARTSAPSSPTRRPPGTPRGRPPATCGWRPRTAPGYGSSPPTATGSSTPSPEPPSAGSLASLAPATMTTSATSTASSAATAPSWRTPLQKGSSTPXRSRQPSSAPATRHGRR

SEQ ID NO: 142273 - protein, 65 aa, Oryza sativa
  Clone ID: PAT_MRT4530_43295C.1.pep
NHSECHIGKTNQSRTMALVVAVVVTYTYIQDASRVLYTVMYYTDQQLYIRYTYHSNPTQNRTQNT

SEQ ID NO: 142274 - protein, 418 aa, Oryza sativa
  Clone ID: PAT_MRT4530_43296C.1.pep
MLYPERPSRVNGTATVDCSAYPLDCHPVCPGGSCYEIAEPPPPSPVVPRVDVAVDDHHLPVRLLLTVSLLSAFLFISLSVSTILLYRRRVVLRRRRRAATAPLPGDDGFGDGDEEAGGGGGDVHHVWYIRTVGLDEATITSIATAEYRAGVGWGGDCAVCLGEFRDGELVRLLPRCSHPFHAPCIDTWLRAHVNCPLCRSPVVVPSDLPATATEGEAEGGGQAEEHQVFDEISLSESRADVSEDSDTSSDTQSEDTAASPEDGGRVMPKPIRRSASMDSPLFLVVVPEAQDDAMRGDRKFPNGQEMKLFSVKEKDATGTSSSSCQAGRFGIGRSMSSSGQGFFFSRNGRSSSAVLPLFRKDSPDQGTSYQLFHFPRFFISISFGAQSKIWDHYINILMCLLLKLYSTFQILLSTDYFG

SEQ ID NO: 142275 - protein, 944 aa, Oryza sativa
  Clone ID: PAT_MRT4530_43297C.1.pep
MASRFWGQGDSDSEEEEQEIESEAGSESEDEGGDAGGRSNQNRYLRTTNASDSDESDSGQRVVRSLKDKRNEELKITVDQMRNAMKINDWVNLQESFEKLNKQLEKVVRVNESTTVPNMYVKALVLLEDFLAEALANKEAKKKMSSSNAKALNAMKQKLKKNNKQYENLIQECREHPERFEDDDVEDKDDDDETDDDASDADIEDPEKMVMSESEEEGDDDEEGDQDGGAWEKKISKKDKLMDKQFLKDPSEITWDIVDKKLKEIVASRGKKGTGRIERVEQLTFLTRVAKTPAQKLEILFHVISAQFDVNPSLLGHMPVNMWKKCVNNMLLVLDILQQYPNIVVDTSVEPDEKETQKGADYDGQIHVTGDLVAFLERLDSEFFKSLQCTDPYTKDYVQRLRDEPLFLVVAQNVQDYLERVGNFKAEAKVALRRVELVYYKPQEVYDAMRKLAEQDEDSREDDDADADEERQVVDDNRGPPPFVVIPEVVPRKPTFPESGRALMDALMSVIYKYGDERTKARAMLCDIYHHAISDKFSVARDLLLMSHLQDGVQLMDISSQILFNRVMAQLGLCAFRAGLIIEAHGCLSELYSTGRVKELLAQGVQQSRYHEKTPEQERLERRRQMPYHMHINLELLEATHLICAMLIEVPNMAASTYDRRKSMNRTFRRLLEISERQTFVGPPENVRDHVMAATRALRKGDYQKAFDVINSLEIWKLLRNKEHVLEMLKLKIKEEALRTYLLSYSSCYESLSLDQLTTMFDLSEQQAHSIVSKMMMHEELHASWDQPTKCIIFHNVDQTRLQGLLFQMSDKLSVLVESNERAYEAKTGGTLEGAPPRRRGGDGQDSSNLGKWQENFVSSQGRQGGGRSGYSGRVGGPGRGGGGYQRDRGSQGSRGGYGGGSRFQDGGRSRNQSGSMARGGDGGARMKFHFLVIDEKNAVDQRP

SEQ ID NO: 142276 - protein, 89 aa, Oryza sativa
  Clone ID: PAT_MRT4530_43298C.1.pep
PCRGNLHCSPGPKPNLQAFTFWGRAFSPGGGHHLVLHLLAIIQLFAIGSRQMDFILPGRGGPYDYGPQKFPISLKPPPLFCIGWLEPHY

SEQ ID NO: 142277 - protein, 85 aa, Oryza sativa
  unsure (1)..(85): unsure at all Xaa locations
  Clone ID: PAT_MRT4530_43299C.1.pep
KLVSSIVANSQEKKDKSSLTTMSSRCMKCKLCTKSLFIYKMLLGLITMRYTPLNTKFSVFSFLSISPPDQNQHYLASNKLIRRXQ

SEQ ID NO: 142278 - protein, 73 aa, Oryza sativa
  unsure (1)..(73): unsure at all Xaa locations
  Clone ID: PAT_MRT4530_4329C.1.pep
PGLSHYIFFVLNLYTSVTAVESLIYGLAMCXIPNFLTGTIISALIQGIFIAMMSXFRHLHNIXKPVWRYPTSP

SEQ ID NO: 142279 - protein, 766 aa, Oryza sativa
  Clone ID: PAT_MRT4530_432C.1.pep
MTSVTSDLLQSCSETMISFVHNMTASYADKSNESSVVSTSVVMFILAAVFFNLNLFSGVSDVSAVLNPTVRIFLSSALNLFLPVMSYLFSEAKQAPLGVGDSTTTTRDAHSDDLSLLARVILTWMLLVELLRKKVEAILITTGMHVYSSLISHATSVAWLGNLVFFNLQAAGKKALFGVLWVLCAAKLVQRVAITEIGKRSFAHGKNARLISSYMAQLPKLLEVDEHVAADGSRMERCNFAVMGEENMVLKAGPHGYELDLGLAAAVVTVGKIWQTKQHPRLKRLCLSFALFKLLRRRFENLPPATMKETDECRDLILDGMCKDAQATGDVPAEVALFQVLNDEVNFLAEYYHSVLPVVLASPYFFVVNYLCFPVVVFGLCVMTIVLCGNGNVLYAFKSLTNDNYAVSSGILSLTKCLWKNVVRSPLVFFSIVDVSICYLLFIVVVYEEVWEFVVFLLSNWFIVSLLCTFSAKPRRRESPTFRGSVRCILWLRRNLSHYPSLITIKQFTVLSTCCLSPRLPTATLPRHAKLAILERFRGGDPLSNGGAVLTSMGGRHRRFSRLSWACQSGAVAEVILTWHIATSLLETKQQQQLPTSASRSRRTAARLSRYCAYLVAFRPELLPDDREGTERIYKDLKKGIKAALGGARGYYLSSERSRHETIRALRVDASAAADMTVLERGAVLGKQLVEDDEAGDGAVWEMLADVWVELVVYVSPSRAEEHARGHEAALAQGSELVTLLWVLATHTGIARPDHDGEIDQPAAPA

SEQ ID NO: 142280 - protein, 135 aa, Oryza sativa
  Clone ID: PAT_MRT4530_43300C.1.pep
TNARSLPHPRPCKQKMPSNHQSARTRFREMPRKARDRLVEHRKTWEVHRKVSHKRVLARRLTRFDGALTYGHELLPQKWYIVNDSPIGVLGWEVGCATRCCDNWDEPEPDGLNVTTWCVMWPLTAIIAPLSSTYF

SEQ ID NO: 142281 - protein, 159 aa, Oryza sativa
  unsure (1)..(159): unsure at all Xaa locations
  Clone ID: PAT_MRT4530_43301C.1.pep
MAASLWRAVMGAGASSADTDTXTGGVEVWRSWERAGWLTKQGEYIKTWRRRWFVLKQGRLFWFKDSGVTRASVPRGVIPVATCLTVKGAGEPLNRQFAFELSTPAETMYFIADSEKEKEEWINSIGRSIVQHSRSVTDAEIVDYDSGRPAASVAADGDK

SEQ ID NO: 142282 - protein, 67 aa, Oryza sativa
  Clone ID: PAT_MRT4530_43302C.1.pep
RRTLLSMRTLLSRCTRAQMTVNQLSASTEACGGHRGVTCQMTLRSHRTTMTRCFIQHGITLADIHLM

SEQ ID NO: 142283 - protein, 227 aa, Oryza sativa
  Clone ID: PAT_MRT4530_43303C.1.pep
MTLEAPSSPIHWTFTCSTLTKTYHRPPKASPQHQCPTVDQPALAFVGSSMRPTTPPTPVASSAIVATADLPTIAGHADLPHCPCHPPAIIHAILSPSSLVASISHAYCSRLSPRAGRSRLSPHENLQIRQGHTVGAPDPVVAAPATAPCHGCSRSEHGGTRSTASLPACTITLPSLRHARCRAAFPVSKAELHRGMARCHPGSPLDFPTACSGGDEVEGRGEECGGG

SEQ ID NO: 142284 - protein, 106 aa, Oryza sativa
  unsure (1)..(106): unsure at all Xaa locations
  Clone ID: PAT_MRT4530_43304C.1.pep
FDEVGLYSTANANPVCGSLISVTVGAHTIGQTDCIFFRYRLYNFTVTGNADPTISPSALXSLRALCPPXGNGSRRVALDLGSPGAFDVSFFKNVRDGGAFLESVQW

SEQ ID NO: 142285 - protein, 68 aa, Oryza sativa
  unsure (1)..(68): unsure at all Xaa locations
  Clone ID: PAT_MRT4530_43305C.1.pep
PTIGLCYTDCPMRNVYIGIHANIKGRNCIVCLPXLLSLTVVLQRGDLLNGHSYPCYWCCSTLHFPQLG

SEQ ID NO: 142286 - protein, 46 aa, Oryza sativa
  Clone ID: PAT_MRT4530_43306C.1.pep
LLGEMRRDSFWSICGRFPVGIFGPTATRHRNDHMPGVCAAFSSPKA

SEQ ID NO: 142287 - protein, 56 aa, Oryza sativa
  Clone ID: PAT_MRT4530_43307C.1.pep
ALHTYAVVSCCQICIALLLANKHIGLFPRVDSALLVFQVLLLIDSNKLEVIFFKLL

SEQ ID NO: 142288 - protein, 48 aa, Oryza sativa
  Clone ID: PAT_MRT4530_43308C.1.pep
KDSQSKLCQHITGSNCNLYCTYFTIYTKTAMKKKQIEIKVYFSMIQNL

SEQ ID NO: 142289 - protein, 54 aa, Oryza sativa
  unsure (1)..(54): unsure at all Xaa locations
  Clone ID: PAT_MRT4530_43309C.1.pep
TGDGTELPNPWNIEHLRRFYPXWGSLVLNPALGGSGRLKSPXGAQNRAVPRDVV

SEQ ID NO: 142290 - protein, 62 aa, Oryza sativa
  unsure (1)..(62): unsure at all Xaa locations
  Clone ID: PAT_MRT4530_4330C.1.pep
FQERLTRSCMVCPDMFGSAMRHWLWAHAAEXLCACVSISIDDSIRVLPHLVDQIQSALSMCY

SEQ ID NO: 142291 - protein, 357 aa, Oryza sativa
  unsure (1)..(357): unsure at all Xaa locations
  Clone ID: PAT_MRT4530_43310C.1.pep
GLQFRLFCLEISMYTDDAVVFINPKKDDVQAFPALLECFXQATRLCTNIHKSQVMLIRYACLDLDDVLEGTPVTRASFPMKYLGLPVAMTRLRKADLHPLFDKSVGRLXGRNIGIVGQTTLVNSILTSQLVYFPIPLKFTKESLEVLEKXRKRFLWAGXDSITDEKCKVNXARTCMPTTYGGLGMLNLENFMRALRVRWIWHEWKXKKKAWVXLDTPCKISYRLLFTTATAITTGDGEVIXFLELGXMQGRRPKDMAPKVYAISKKKXPLREAIEDNTWLRDLNLSQXSTSTDMTVELLEQPVTIXIAVQNIKLNFKEKNEIKWKLICQGEYTALSTYEAQFFGLVNTNYEMLIWKP

SEQ ID NO: 142292 - protein, 59 aa, Oryza sativa
  Clone ID: PAT_MRT4530_43311C.1.pep
LIQLNYSLIPTKESTIQLHQHHSSEVVNHQIFWGLWQIQFQILQQEPAQQKKEIKKKEI

SEQ ID NO: 142293 - protein, 51 aa, Oryza sativa
  Clone ID: PAT_MRT4530_43312C.1.pep
MATPDGILRRPGFVMTSCIAGNIIGNRRSSPRAPVKSSGVTKWLSSQKVGH

SEQ ID NO: 142294 - protein, 142 aa, Oryza sativa
  Clone ID: PAT_MRT4530_43313C.1.pep
PPTPWFEEGPKPPPPAGGPPPHKPTNPPPHKLNNPPPDPKTLARTRPPWSGFPTRASEFLPQSQTPRRGTKGFRQAQNNVGEGFPGGPGNAWGGAPMGRNSLNGARQNCLGGAGGGGPLPLGIIGSGQKDPGEFGPAVLTYP

SEQ ID NO: 142295 - protein, 48 aa, Oryza sativa
  Clone ID: PAT_MRT4530_43314C.1.pep
ILFWSPRYFRSRIIERIFFQPEIDKKGTKLLIILFIVASQTCDKKKRV

SEQ ID NO: 142296 - protein, 78 aa, Oryza sativa
  Clone ID: PAT_MRT4530_43315C.1.pep
INSSTAICHGAYLVFINIYVGLWFGSQHCLSEFSPYVSIQLHHACLSLWYLFSTQASLNRLCFTNYNYPVDRVRAKFQ

SEQ ID NO: 142297 - protein, 79 aa, Oryza sativa
  unsure (1)..(79): unsure at all Xaa locations
  Clone ID: PAT_MRT4530_43316C.1.pep
TSPXCLGXXXFXNHMFCRASSQKKXHGPXXAVTXXCDIVAMXXXXGDGVIWGKHLHLWLXXXXXWAAHXEQYDNPIXGV

SEQ ID NO: 142298 - protein, 569 aa, Oryza sativa
  unsure (1)..(569): unsure at all Xaa locations
  Clone ID: PAT_MRT4530_43317C.1.pep
MPRQQQMHSFIYAAACLPAILPPNWQISTSSHPASPPSPSPPSSPTGSPWPSPPTLAEFLPGPRPXSSSTPTPCPCSLTPTRRPSSRRRRSPPLPRRPHPSPRSPPSSPPPRPSRWELRFRQTMSGFPPFSISDPTMPAPPPPPPAXTRPASAAPSRCPPPWTRPPTRRRPAASPPPRPRLPPPPPXPPPPRRRRPPPPPPPPWRRSPSSPCRACSRRRPRAAPPTSPRXSPPPPPPXPPPPPPETRRGRPIRPPPPVPSSTPRSPHSTPASVHCPPSPCPQPPLEPQARLAPQRQHAPGREAXPDSSAPTPPPXSPRRPPPPPPAETPPPTTTTPPPPPPPRRSRPRPPPPSTPRRQSCARSCPSRTRTSPAXEPPPRCAPPPPXPRSTAPRPPPASPPPTTPSPRRRPPPPPPPPPPPXPSPPPXPPALARRQPPVRDRTHLQKRASPLPTPRPSRRPPARRPRAPAPGCSSASPAPSXRDPGCPRPAPPAAPSRTCPPPPXPHRHLPPPHFAASPPLAPDSGGWARAPMRPRRGEIFVGRSFRPSPDTRQHPLTRTPCGRIEYNFV

SEQ ID NO: 142299 - protein, 181 aa, Oryza sativa
  unsure (1)..(181): unsure at all Xaa locations
  Clone ID: PAT_MRT4530_43318C.1.pep
LRESNGGGGGSPKEAAVVVPSSGDATLGGHLARRLVQVGVSDVFAVPGDFNLTLLDHLIAEPGLRVVGCCNELNAGYAADGYARARGVGACAVTFTVGGLSVLNAIGGAYSENLPLICIVGGPNSNDYGTNRMLHHTIGLPDFSQELRCLQPLTCYQAVVXNLDDAHDQIDRAISTVIRES

SEQ ID NO: 142300 - protein, 100 aa, Oryza sativa
  Clone ID: PAT_MRT4530_43319C.1.pep
MAPPGTFKTPPFWPAPKVSILAFLCKLFLKSSSPPGIGGSPLPTPVRDYCIPSFPFPPVFVIPPPPFFGSSKKKKKKKKKKKKKKKKKKKKKKKKKKKGQ

SEQ ID NO: 142301 - protein, 76 aa, Oryza sativa
  Clone ID: PAT_MRT4530_4331C.1.pep
KVKKGIEETGNPGLTICSLFWDVGDNHFKGGIANGLSHLDSKEILKSIYFPLKKIPKICKCFSGGQNFQPEGRGPA

SEQ ID NO: 142302 - protein, 122 aa, Oryza sativa
  unsure (1)..(122): unsure at all Xaa locations
  Clone ID: PAT_MRT4530_43320C.1.pep
MARSRRACTPPTTTTPPPPPPPRRSRPRPPPPSTPRRRSCARSCPSRTXPRRRGEPPPRCAPPPPXPRSTAPRPPPASPPPTTPSPRRRPPPPPPPPPPPXPSPPPRRRLSHAVSLRYAIAP

SEQ ID NO: 142303 - protein, 237 aa, Oryza sativa
  Clone ID: PAT_MRT4530_43321C.1.pep
MADGSDGPDVSPAAAAAAGGGGGGEIWGTLEELLLACAVSRHGTGSWDSVAMEVQTRSPLAARPGLTPTSCRLRFCHLHRLFSVVGGAELDDDDEEAEEGGPDASAADGWMDELRRHLGDELRRVVERRGRSIGTLRRKVKRLREEREQSIRGGGGGEGKPETANGGERLSGEEPGLPCRESKSPDREPAARAGDHSVGAEEAREAAAPTSLHPSREYGAAMSGTGPMSPPSKGHIE

SEQ ID NO: 142304 - protein, 720 aa, Oryza sativa
  Clone ID: PAT_MRT4530_43322C.1.pep
MNMSPRIPVVDLEDGWRDVLAGVAKLKCILDGSNVVHFVPDEYMHLYTTVYNMCTQKPPNDYSQVLYDRYKQALDDHIESVVLPSLNEKHGVFLLREIVQRWEKHKLMVRWLRRFFDYLDRYYVTRRSLDSLKDLGWSSFRDLVFDKLKSTVATIMIGMIDDEREGNLIDRPLLKNALDIYVEIGDSQLNYYSDDFEQSFLNGTTDYYSKKAQTWILENSCPEYMLKAALFELIDRRAEEILNKENSGCKVLLCDEKTEDLARMFRLFSRITDGLLPVSKIFKEHVIAEGMSLLKHATDAANSRKDEKKGVVVGLPEQDFVRSVIELHDKYMAYVTNCFQSNSVFHKALKEAFEVICNKDVVGCSSAELFAAYCDSILKRGGSEKLSDEAIDESLEKVVKLLTYLSDKDLFVEFHRKKLGRRLLFDKNTNDEHERILLSKLKQFFGGQFTSKMEGMLKDITLAKEHQSSFEEYVSNNPESNPLIDLNVTVLTTGYWPTYKNSDINLPLEMVKCVEVFKEYYRSDKQHRKLTWIFSLGNCVVIGNFDAKPVEFVLNTYQAALLLLFNEADKLSYSDIVSQLKLSDDDAVRLLHSLSCAKYKILNKEPSNRVISPEDEFEFNSKFTDRMRRIKVPLPQIDEKKKVVDDVNKDRRFAIDASLVRIMKSRKVLGHQQLVAECVEQLSRMFKPDIKIIKRRIEDLISREYLERDSENAQTYKYLA

SEQ ID NO: 142305 - protein, 120 aa, Oryza sativa
  Clone ID: PAT_MRT4530_43323C.1.pep
CRGSGGGASLLVITSVSREAAGGSAVPAKRATDASAAPAEREADASAEREGASSSSRPTSGKKKGGGARRAGERAAHGSGARDETSSSSRPTGGRKKGGGARRAGERAADGSGARDEASS

SEQ ID NO: 142306 - protein, 287 aa, Oryza sativa
  unsure (1)..(287): unsure at all Xaa locations
  Clone ID: PAT_MRT4530_43324C.1.pep
MPTPHTISGTSPFPRNSSTAAEMIVTEQEHLQPRHRRSRKRDRPPPTPPSGNIKAAPAPLPEGGGHGHEEEARDEDVDRFYALLDEVREMRELWRRNGDCVATKRTSVDGGQKKQDRQQLWRPTFVMEDFAFELKGSQVVQPEKKVDSAPNLDLSLSMXFFLFFFFVFVGSRANSPFTWHGKNAAFIHILQKKKGGLMSPPPFLLLNCVTAANLLQFPAAPRLRLRSKLATSASSYCCWPAAVHRLLTMVSLSLPAVLLTFATAQSERGTMVRALKREHERSDWPPP

SEQ ID NO: 142307 - protein, 39 aa, Oryza sativa
  Clone ID: PAT_MRT4530_43325C.1.pep
PGPLSFALWAMWKRRVKIQRKPSRRGHLLATLGHGGRRH

SEQ ID NO: 142308 - protein, 66 aa, Oryza sativa
  Clone ID: PAT_MRT4530_43326C.1.pep
MAPQDPNAPRENASDRDPRTEPNSHGKGHLGGPNRANGFGWSTNWLRAWTVVDCAGGQSLGASRLR

SEQ ID NO: 142309 - protein, 222 aa, Oryza sativa
  unsure (1)..(222): unsure at all Xaa locations
  Clone ID: PAT_MRT4530_43327C.1.pep
DLYKKKLAHQEQPLGKKRNMDPLISTKFLNGEQRAWTEPPRGDGKRRVAVHRXSTPTEHHIGSRTEKKNAKSCEPKTRIENKNVTTDKMRRSIGEKTMYLSSCGRLASAPXPGPLSFALWAMWKRRVKIQRKPSRRGHLLATLGHGGRRHPSSSRTEGRGEEEKTALEKRVAPPGRGGVGGGVAARGKVGARGMRRRSARPPPAVAAHASAHASAHASAHAS

SEQ ID NO: 142310 - protein, 212 aa, Oryza sativa
  Clone ID: PAT_MRT4530_43328C.1.pep
MTKPKNGCLKILACAGGGSDPSAGSDGDADDHVDENKAISDKSRWSFRRRSTRHRVLKNSDISEPETLSSSKAKAEIAPSNIYSSTYSYASEKPLQQEKPDEKILQQEKSDEKILQQDEPAEKILQQEKPDEKILQQDKPDEGPLNEEMPDEKLIEKPIDQPGDESIEKPADEPIESQLTRYLRSIEQPAERVTWKCQSKNQLERGNWNSHS

SEQ ID NO: 142311 - protein, 62 aa, Oryza sativa
  Clone ID: PAT_MRT4530_43329C.1.pep
MCKFILLGYVPSLYRGMGVHFDHAHVKVSKTTPYNLPLLYAVKLSLKNQTQKGKKKRENLLA

SEQ ID NO: 142312 - protein, 93 aa, Oryza sativa
  unsure (1)..(93): unsure at all Xaa locations
  Clone ID: PAT_MRT4530_4332C.1.pep
MADARSTPESLPPAFLEFLQENGLDPMMYSMADTIPRYIRLKPGMEAQIPEIQSELKCHLDKVSWLPDXYAIPPQVQIASSKAYQQGKIYGID

SEQ ID NO: 142313 - protein, 963 aa, Oryza sativa
  Clone ID: PAT_MRT4530_43330C.1.pep
MTKPKNGCLKILACAGGGSDPSAGSDGDADDHVDELQQLEYYGCYSCRPESMQDVRKGSGVYLLLKVLLTVYEKSSNRRRQPHHSVGEMGSGIFTGQPRGSVPTINKAISDKSRWSFRRRSTRHRVLKNSDISEPETLSSSKAKAEIAPSNIYSSTYSYASEKPLQQEKPDEKILQQEKSDEKILQQDEPAEKILQQEKPDEKILQQDKPDEGPLNEEMPDEKLIEKPIDQPGDESIEKPADEPIEKSADQITERSIEQPAERVTEVPIQEPTERVTETPIVKPNDNDVEEHTDKTDESIFVSSTEVKQEETVSLFDGSSEDHQEDCAETAAAVIQSGIRVHTEEQELPNDKDLVKLQAVIRGHLVRRQAAESLQCLLAIVKMQGLVRVHQAQQYGGKFQDSLICSSSEKLLNNGFALKLMDSMSTSKSIHIKCDPSEPDVAWKWMERWTSMIPPNTGGHLLEDRENNESVDEKIKGDAQHEENTLPLDSDISFLKLVPDDAEETLRPSDSHPLEVSACIPDRTSGMEIEDVPEPDLIEKFKEDVEKLTEPETENVAEQPLEVSVEQSTQTDTSREPIPLPEKPESSFDDTMDAYKTEQTSEMEGKKFMARKSCNPAFAAAQLKFEELTSNLTVSRSNSLDGANKPKVHTPRSQDNVSPKQSNDTSIPESSVGHDPKIVVAASECGTEISISSTLDSPDRSEADGGEIVLEIGSLEDRNHVGDNAEKDNSVLHSEVNTSGGAIEPEKEVQTDDTAIAANAIDPVPVEQPHLGQEKPDLHDELEKSVGSYVKTPEGTPLSRTTFAESHGTPSSEVSVNTKKSKSKRPKSHVSKRSLTSPSSDSVGRSSMDNLSKDYRLGRRESSGKVKSDHVDQEPRISNSTPLPSYMQFTESARAKASASVSPKLSPDVQDNNPRKRHSLPMTNGKQDSSPRMQRSSSQAQQNVKSNGAVPVPPNSSDRRWHI

SEQ ID NO: 142314 - protein, 54 aa, Oryza sativa
  Clone ID: PAT_MRT4530_43331C.1.pep
RTSLEFFFFFFVSCILLDVFLQSTYRSFANQKKTFSRINWLLTFPAKKKNWLLT

SEQ ID NO: 142315 - protein, 55 aa, Oryza sativa
  Clone ID: PAT_MRT4530_43332C.1.pep
RIFFGFGIQTSGTNSKSGSPRLNLTLNPRIPTNPGAVSGLLGHLGQGLVLGRAFL

SEQ ID NO: 142316 - protein, 323 aa, Oryza sativa
  Clone ID: PAT_MRT4530_43333C.1.pep
MEEGLPPGFRFHPTDEELVTYYLARKVSDFGFATRAIADVDLNKCEPWDLPSKASMGEKEWYFFSMRDRKYPTGIRTNRATDSGYWKTTGKDKEIFHGGALAGMKKTLVFYRGRAPKGAKTSWVMHEYRLQSKFPYKPAKDEWVVCRVFKKLQCHLAKPRPPHDDVDGDGASPPEMVDASSLGELGELDVSSILLGGFAPPSGELCHGGGGGDGFGAHRLHVGAYMSWLQAAAAANQGMFQWPAATQAGLVGGTVFAAAHKAAGTMPFGGGCSQQQARDVGVSLANVGGGDALFGGAPLAKVDMECGEQAPQLDMDDSTWRAF

SEQ ID NO: 142317 - protein, 146 aa, Oryza sativa
  unsure (1)..(146): unsure at all Xaa locations
  Clone ID: PAT_MRT4530_43334C.1.pep
HNSIISLEITNSLFSNSIVTDQTYILSYGLWNIRVLYTFTYTGCFRMRCRNPSXIMENISTGRVINLQSLQVLLGDQDDPRYKKDPWEGCKALNLMXNTPTIVYEAKAHRAKSSGDFIESIDYDLILVPTYPNTLIICSTSITRRR

SEQ ID NO: 142318 - protein, 260 aa, Oryza sativa
  Clone ID: PAT_MRT4530_43335C.1.pep
MGRSPCCEKAHTNKGAWTKEEDQRLIAYIRAHGEGCWRSLPKAAGLLRCGKSCRLRWMNYLRPDLKRGNFTDDEDELIIRLHSLLGNKWSLIAGQLPGRTDNEIKNYWNTHIKRKLLARGIDPQTHRPLLSGGDGIAASNKAAPPPPHPISVPAKAAAAAIFAVAKPPPPPRPVDSSDDGCRSSSGTTSTGEPRVRDLNLELSVGPTPSSPPAETPTSARPVCLCYHLGFRGGEACSCQADSKGPHEFRYFRPLEQGQYI

SEQ ID NO: 142319 - protein, 557 aa, Oryza sativa
  Clone ID: PAT_MRT4530_43336C.1.pep
MASRPRGRRLPPPHPPLIQEILDDDLFDVEVNYSDEEEEEEEEESDEEESESEDNEPEEVVPGQESIGEGCGPAIQARVSGAAAEKNACPVCMEAWASQGAHRICCIPCGHIYGRSCLERWLRHKGNTSATCPQCGKRFRPKDITNLYAPEVAVPNNDLEKEVLYLRGKAESLGETVMKHEKLIEEMNERLVELTSAQKRQILSEQRLMNVGSSKRQKEFFMDGLRVMAIDAFNQTILASGKAPGIGQEHVLYKFSMVSHHEARNIQLPLDTKTVRDICILPSGSAIFTSLGRKLSSFSMTADRVVLQCDLPCPGWSCSADESSRQICAGLQNGNLIIFDIRQTSRPLHSMVGLSTHPVHTLHTVIDNNGSRKFLSASSIGPCMWDTDGIQGRPKLLLGTDNQRVCISLACAPSSSDLLVASFRPKVETSEDATASQVYLSQTPTPSGGGKLGYHSFIRRAGNSSSFTEDRTCSTLVSEIRMSKSAIIPYGNNQHLFAYGDESLRGVRTWRLPSFEMHSDLSSLQQPVLDLRYAESSSGGRYLGYLSTEKLQVFRIR

SEQ ID NO: 142320 - protein, 92 aa, Oryza sativa
  unsure (1)..(92): unsure at all Xaa locations
  Clone ID: PAT_MRT4530_43337C.1.pep
YSGSWCAGWHRPAGIGGTDHAVVELQQAELQVSANKQELATATNAAEITHTLGLHSXPRRHWYIQSTCATXAEGSHEGLDXWLTNTIANTAG

SEQ ID NO: 142321 - protein, 65 aa, Oryza sativa
  unsure (1)..(65): unsure at all Xaa locations
  Clone ID: PAT_MRT4530_43338C.1.pep
FVFVFLSPVIEFDPIRSKGXGXQWXTXRSVRTLXYSDAEDNPNLLFCTTIYEVDLLCSWGGGLPL

SEQ ID NO: 142322 - protein, 42 aa, Oryza sativa
  Clone ID: PAT_MRT4530_43339C.1.pep
NYQDPVIIFSLQKRFRCIVVPNVSCSYRTVYTFKSGGSSLVA

SEQ ID NO: 142323 - protein, 69 aa, Oryza sativa
  Clone ID: PAT_MRT4530_4333C.1.pep
MWTAAAVAHGEVGMRGECCHCCRGEVSPLAVVDVEHQGGLDPAVPKLKPAECGISATAITVADESNCGA

SEQ ID NO: 142324 - protein, 224 aa, Oryza sativa
  Clone ID: PAT_MRT4530_43340C.1.pep
MPHTDTGLQLQARNEYALNLMTQTFAHFVLTRVHSPVGHPSRNCSKPSLNYGPSRIGVIHDGPEFYAHLTCLCDYISIGPSLPPSSVSTSSTAVSTTGHIRCRRVHHRLGAQPQPARPPPSLTKSGVAASTTAFVPSYNRCHRLRPRPHPAPPHPPPPPSPTPTGVVASVPDQVQRYCIHRRIRPQPQPAAPPPSPTKSDAAASSTASVTSHIRRHCLHSRSCS

SEQ ID NO: 142325 - protein, 108 aa, Oryza sativa
  Clone ID: PAT_MRT4530_43341C.1.pep
HLAWACTLNWSSGSWPYFAPSPPSPAWGPARMTSPGSLINLESQLAVARQYLPSPPIAVRAPSPGSLCPAPALSPLHPATESSRSKVNPIHLLSSECSAEVGCNPHYP

SEQ ID NO: 142326 - protein, 147 aa, Oryza sativa
  unsure (1)..(147): unsure at all Xaa locations
  Clone ID: PAT_MRT4530_43342C.1.pep
SISNTEWPNSSPLANCGPHALSLSHTSRSPLRLFLRSRLPHSPSLPPSSVSTSSTAVSTTGHIRCRRVHHRLGAQPQPARPPPSLTKSGVAASTTAFVPXQVQRYCIHRRIRPQPQPAAPPPSPTKSDAAASSTASVTSHIRRHCLH

SEQ ID NO: 142327 - protein, 188 aa, Oryza sativa
  Clone ID: PAT_MRT4530_43343C.1.pep
MQEKNGGGDSCFCSSSSWRRRLPRSPRRPVSRGFAAPLGPAALLEVPLGKVATVEACPARAFPLLRRPLVRSRHRLLVRSCRRPSVGATSSTPTAPESAREEKRAARSTARRTAAASPASAAREESTTREEKGGEGEAKGRRSREGDLLRVGGYGPHSLHCERPYYTAMRDLVLAGSFFASGALHDNG

SEQ ID NO: 142328 - protein, 47 aa, Oryza sativa
  Clone ID: PAT_MRT4530_43344C.1.pep
AYLNPPPLKPEHTYEHQINEQYDRLKLISSTLVSCTCSRSKPIHLFL

SEQ ID NO: 142329 - protein, 457 aa, Oryza sativa
  Clone ID: PAT_MRT4530_43345C.1.pep
MPAAADPAPPTPPPPPPPSLDLRTGGRILRRAAAHSLRPRSLPPLLLAALLLVLFRLALVAGTLRLASFADHDPALRSLLSRLSPPAPHAPPHPPPRHLPRRRSPFTSSSSSPPSLSDDDFLVGTLDPASSAPSRRRNASYYEFLFTPSSSSSSPKPYPLSLPHRLPSTAIPFTFVVRNETSPPKPAAGRDGGSELRLLDLTRRDAVAIINLLAMLSSVHVLAILGYITVHSVALGTVFASVAGQHLQGRPRRWFHFSGMAFRVRRLTGFAFLRWATRDAIVQMLCLWFFSEVHDQAQLFRLFVVAKLMPFSASVNPWLAATVGGPELDGFFIAWALLDAVVSVLFTVVPWVIVMDRDPRPPGRNAVKEGCYLVSLMATDATLIKCWQTVVCGSMGQLAMVTLGGKVLGGFLHSIGEVYFMVVWLMFYFSARCKEVRLGGRHFGLEDVAAALDGFRQ

SEQ ID NO: 142330 - protein, 69 aa, Oryza sativa
  Clone ID: PAT_MRT4530_43346C.1.pep
SNGGQRSARSSDEPTGDGLMRAACTYCLESRDADNEAVSTEATDAQHHSRLETQRLAEDELVRIRTRSG

SEQ ID NO: 142331 - protein, 161 aa, Oryza sativa
  Clone ID: PAT_MRT4530_43347C.1.pep
RTYPFRSLPSVRPSLPIHSSSGPSTCSRSIITYGEFLPVLYSQNSQGARARSSPVPGGGRRRRRQAAIRPASQRNHSRSNNARKRRRTTNKSGRSKVGCCYILFVRPPFFSLFFFLMRFLSCCPPAVSSAFPLFLLFSFIPCLWNVRVYSHLSLWSSLWRN

SEQ ID NO: 142332 - protein, 84 aa, Oryza sativa
  Clone ID: PAT_MRT4530_43348C.1.pep
MAGEHSRAAADSVRQTLMEKIADKPHLVGGGGGADSSADARKQATPSAPTPPASRRRRRPAQSRVLEADPRPEAGRPGAAGARS

SEQ ID NO: 142333 - protein, 123 aa, Oryza sativa
  Clone ID: PAT_MRT4530_43349C.1.pep
TPKFFPAPPQGKTFFSPPTKKGFFQLKKFGPNPKRTLAGRETCEKFPAFFETQNRKVSGGKKITLWPLLNPGEPPPLPGDPLFFWGGPLGRPPGFEHFNGGPAFKNPAKKEGPPIQPRGFDRA

SEQ ID NO: 142334 - protein, 403 aa, Oryza sativa
  Clone ID: PAT_MRT4530_4334C.1.pep
MEAPSASASAEERQRIERVARFVARDRDGDMAEALLLRLLKITRNARRWGFLDRDHPLHPYYLQQKVSEQCRILRPRPAAAAADSKFTQQELPACKPLLTPGIVVATFLLIGIIFVPIGLASLSASQEIVELVDRYDTNCVSTLDKVGFIQNTDTDKTCTRTLTVPKHMKSPIQIYYQIGDFYQNHRRYVKSRSDKQLRYKNAVHLTKDCDPEGNTVDGAPIIPCGLIAWSLFNDTYTISVNKKAIEVNKKDIAWKSDKTDKFGSDIYPSNFQKGSLIGGAKLNESIPLSEQEDLIVWMRTAALPTFRKLYGRIETDIMANDQLTVVIQNNYNTYSFGGSKALVLSTTSWIGGKNNFIGVAYLTIGGLCIFLAVGFVVLLYMVKPSGSHLKVKKLPYTPSIYF

SEQ ID NO: 142335 - protein, 97 aa, Oryza sativa
  Clone ID: PAT_MRT4530_43350C.1.pep
MKSKTNRSIQKARKTDNVQGGPNWVLVAGGVLLSTLSVKLGCKLKQLFDAKQRNSNTSKAQRRPGTCFSGNGVGVKQAPASPASKQMEPSLPLVKIP

SEQ ID NO: 142336 - protein, 341 aa, Oryza sativa
  Clone ID: PAT_MRT4530_43351C.1.pep
MKSKTNRSIQKARKTDNVQGGPNWVLVAGGVLLSTLSVKLGCKLKQLFDAKQRNSNTSKAQRRPGTCELHSNLYRFSDHLSCYHCNSGFSGNGVGVKQAPASPASKQMEPSLPLVKIPGPESSKENNGVMWISSPDRLEDPRKPFQYSNSSGSPCVSESGSDIYSKKEVIQKLRQHLKKRDEMIMEMQAQIADLKNSLNIQETHSTNLQSQLDSANRDLFESEREIQHLRKIIADHCVAEALSHDKPLLAGHWQSGATNGHANGYADSSSVDDPELHFIGLDKRKGEAERVEMLKREVGELKEVIEGKDFLLQSYKEQKVELSSKIRELQEKFSSQVPNIL

SEQ ID NO: 142337 - protein, 131 aa, Oryza sativa
  Clone ID: PAT_MRT4530_43352C.1.pep
MSLSEKLEAARVAVGKRKERELLAQAPANKALAEPGTNKPAPGPVPNNKLLAGHLAHEFLTRGTLQGRRVEPTKPSQAAALHPGEPVPEPEPDAAKRRRYAEVSWLLMASGARVPGVVNPTQLGRWLQIKE

SEQ ID NO: 142338 - protein, 238 aa, Oryza sativa
  Clone ID: PAT_MRT4530_43353C.1.pep
MATACTTTDGSGDVCLRPSASDGLPTHQACTSKAAPDGETRRRQHQRRRCCVVCLVVTIATLALLGVAVLVLSLTVFRVRDPATRLVSVRVVGVSPNLAPPSPQINVTLLLTVAVHNPNPASFTYSSDSGGHADLTYRGAHVGDAVVEAGRIPSRGDGAVQMEMTVLSSSFTGDVMAELIRDIEAGAVPFDASARIPGKVAVFGVLKLHAVAYSDCHVVFGVPEMGIRSQECHDHATL

SEQ ID NO: 142339 - protein, 103 aa, Oryza sativa
  Clone ID: PAT_MRT4530_43354C.1.pep
APRRPVVWCGAGRMAEPSKVIHIRNVGHEIAEADLLQLLQPFGNVSKIVMLRAKNQALLQMQDLHNSVSALQYYSTVQPSVRGRNVYMPISSHQELTTDQNSY

SEQ ID NO: 142340 - protein, 502 aa, Oryza sativa
  Clone ID: PAT_MRT4530_43355C.1.pep
MRQSIKGRALRHFTLSTGKSAGRNSSGRITVFHRGGGSKRLQRKIDLKRSTSSIGIVERIEYDPNRSSRIALVRWIEGVLPGRQRKFKTIEEFALPRKILESTTATIFCLFSFSSLSSPLAQGETASLSFGSSLGFPRIAVAGAKPAFFAERMREKKIGKKTFSLCEIRKWRTHCVLWAHRIKRKAALSWQSLRQQKTLELVGAAEHNESKLKADQGSLLPRQVLAYALCSGRPSYLHASRSFYKALLPVEASRFGSLPAKPPIGEGPKDGAYKVDRAPVTYILASHQLEAGNMVINCDCSKPSKSGFLRPAQNAHTYLRFQELGRTVNKGRVEGGSQLAASWPRPPAYRHEILDLNSKVGNSIPLADIRMGTWVHDIECHPGQGAKLARAAGTYAKIIKEPAPQCLVRLPSGVEKLIDSRCRATIGIVSNPNHGARKLRKAGQSRWSGRRPIVRGVAMNPVDHPHGGGEGRTKGGRPSVSPWGKPTKAGFRAGVGVGKRRI

SEQ ID NO: 142341 - protein, 53 aa, Oryza sativa
  Clone ID: PAT_MRT4530_43356C.1.pep
EEDHSLRSLLRLVIRGVVSSSVYALLHVFSPPHTACVAGGPRLTGGYVLCVIS

SEQ ID NO: 142342 - protein, 75 aa, Oryza sativa
  unsure (1)..(75): unsure at all Xaa locations
  Clone ID: PAT_MRT4530_43357C.1.pep
SSGLAQVVVCVFGYMFSSCCCDLKGRVYIVLVSFLLACAILXLFYIHLCTIPYLYSLTFLPFNKNPPLKYTXXXX

SEQ ID NO: 142343 - protein, 70 aa, Oryza sativa
  unsure (1)..(70): unsure at all Xaa locations
  Clone ID: PAT_MRT4530_43358C.1.pep
FFFFFFXEAQATDTPFIITQGVGNPTHITPQCNASHTPTSWWHTCAVHAIIPPGMGHHRSPGQGTPGCLP

SEQ ID NO: 142344 - protein, 592 aa, Oryza sativa
  Clone ID: PAT_MRT4530_43359C.1.pep
MEMEMSRSWQELGVVDTIYEDDHEEEEEEEEEEEEEEEEECFDSPTMSSSPAATSRSCSPPPAAEEFAMPAALRNAVRECGTGKCGFQSFINWNLHKYMDYNGIHQLNFSALRDPAKGLQVVRSLAIKFDAVLQDPITSQSSYLKRRLSECSDVAVDLPAGLTVDAFVDAVASCYGAEAALSPGSLAAAWAAADWLELRGEDGLARRAEDYFFQEVATDHGRAAAVLRACTAFLGGEAAGAGAALLVRCLETLASSGGADGRWLDDVAALPVEEFEVAVEAMRARFAHDHDLMYTIVDHYLQDLETNNLNLNHRGKLTEEEKSRVCYNVNCTKLSHHLFMHLVQNPRLPLRFVVQAMLVEQLHSHHSMLLSGGHHHHAGAAGAPSSAAPPASLLKSSLSGAFGACGGFAATAAAAGDAASSMTLGDILQRDAVLRQSAHIRASMQATTQRIDSLERELAGLRTRLRRSEQAAAAAATASAAIDRASAKSASFRIPRSRLWDGEDLAAPAAAVITKDTTNTRGLKSRLVLGFKNLFGRRPVTAAAAAPPTSGERAAARVSVNDKAMSTDAPELDADADADELTRPHRRNLSIV

SEQ ID NO: 142345 - protein, 87 aa, Oryza sativa
  Clone ID: PAT_MRT4530_4335C.1.pep
MSPPLPHHRVLQNGREKRDRGRDSDKAGSLSQWRGLWSEPRTAVGGSLGGGRTCSRQRLGLWRRRQSSRRSQPLLRSLPSTVPRPTA

SEQ ID NO: 142346 - protein, 42 aa, Oryza sativa
  Clone ID: PAT_MRT4530_43360C.1.pep
MAQPTTMETRCTKWVEALADEAIEEVELGVRRATDGGGKFSH

SEQ ID NO: 142347 - protein, 304 aa, Oryza sativa
  Clone ID: PAT_MRT4530_43361C.1.pep
MIKEMRSIEANKTWRLVDPPARQHPIGLKWVYKAKKDAAGNITKYKACLVAKGYVQRQGIDFDEVFAPVARLKSVRLLLAHAACEGRAVHHMDVKSAFLNELLEEVYVAQPPGFVVDGQEHKVLHLDKALYGLRQAQRAWYAKLDASLLMLGFHRSDSEHAVYMRGMGVHRLVVGVYINDLIITGGHSGELMQFKEEMKGTFQMSDLGLLKYYLGLEVNQSEDGITRFMEKPTVEHLAAVKRVLRYIASTIGYGCHYMRKKEAASLVGFSDSDLAGDLDTRKSTSGVFFFLGDNPITWQSQKQK

SEQ ID NO: 142348 - protein, 48 aa, Oryza sativa
  Clone ID: PAT_MRT4530_43362C.1.pep
MPDTHLAADWWTPPVRPFFHLQLPPESTPLMALSKPQGTSLSSPVMNK

SEQ ID NO: 142349 - protein, 51 aa, Oryza sativa
  Clone ID: PAT_MRT4530_43363C.1.pep
YILCNPLFLFYIHQLGRNQNLLEKLVYSLYFLSHFFRKAVHVSAIDLLFNM

SEQ ID NO: 142350 - protein, 537 aa, Oryza sativa
  unsure (1)..(537): unsure at all Xaa locations
  Clone ID: PAT_MRT4530_43364C.1.pep
ISATARSPSPELRKPNPRAIVFASTGSYLSPREGGKLMPRRANVIFTEAQFSLKTSGTPELLSLLITLRSERMGTRVYGTLDTVKHVGFRIISFGTRQMRALAELLAPKQSRVEPAPSSLRGPRAALFLCRRRRNSGRPSPVVXDLIGARRRHHPLRRFLLFPVHPSVEHDDRGNDDDTDDPKFXRRFFLTADNTVDLSPPCLLVGPKPLSLSSAQVGPVHRRARAHPPADRWGRRQPPAAAARNPSFAPPPFLSKIRPFLFVSGEIDXGETIFGISSTFSPLETSAKSVWNVFDSSSNRIGLFPPNPKPSFSSPAASLGKTAVVVXRRVAVLVRPFAVAEDRRSTIAAVDPKTAAVSSSSPSPSVDLPLLLWSMCMVSRYXSNPGIFHWMAVKSLLRYLRGTMNLALCYQGGSFHLVGYSDAEGSADKDGRXRQGYMFILEGGSISWCSKKEDCFSLSTMKSEYIACTAAVQEAIWLRRRLSTRAVITYSTHQTMPKFYLKHCGQSSSESSANSTSYCSTLASLSTSSLPLNSTTK

SEQ ID NO: 142351 - protein, 51 aa, Oryza sativa
  unsure (1)..(51): unsure at all Xaa locations
  Clone ID: PAT_MRT4530_43365C.1.pep
PRVRDKSKDLRAFALIFPSLLRGESGXARARVRAQPARQHPRLVGANLHAE

SEQ ID NO: 142352 - protein, 51 aa, Oryza sativa
  Clone ID: PAT_MRT4530_43366C.1.pep
MTYPSTTNLDRSISSRCEDAQAVARDAQAVAKEWRSTAAAVPAWRRGEEAA

SEQ ID NO: 142353 - protein, 456 aa, Oryza sativa
  unsure (1)..(456): unsure at all Xaa locations
  Clone ID: PAT_MRT4530_43367C.1.pep
EISGEDLRRGWRGCGFGGPARPNDLCAQAIRTDHPPIPCRSQARVWFEESSTGGEQGQHWHRGTSDQNRGEQRAAQGKNRDNTGTEAQAIRIGENREQHRGRTGTSDQNQGEQRATQGKNKDSTRENREQHRGDCLAQRRKRSESGRTESSTGEEQRRKRSESGRTESSTGEEQGQHXENTREEQGQHWGEQRAQGKNRDSTGEIVWHRGASNQNRVAQRRXDQKNRVAQRRKRSESGRTESSTGVAQRRKXQKNRVAQRRKRSESGRTESSKRSESSGGTEAQAIRIGENREQHNRVAQRRKRSDSTGEIVWHRGASDQNRVAQRRKRSESGRTESSHNRVAHREQHNRVAQRRKXQNRGEQSRKRSESGRTESSTEAQAIRIIGWHRGASDQNRGEQRRKRSESGRXREQHRGASDQNHRIEENREQHRGRTGTDQNRVAQRRKRSESGRTESI

SEQ ID NO: 142354 - protein, 151 aa, Oryza sativa
  Clone ID: PAT_MRT4530_43368C.1.pep
MKIACYYVRASGHQCSNLSSERSFSRDFCLFLGGGLQERNLRGYLLDKARIGWANEGRRRRRDFAAFARLKNAALRTKHGEAGLVADRSRAGRPLLPISSWTPSQCRGGQQQQQRPWGAPAEQEKKKKKRTLAWLLWPSLYQWGRDITVVE

SEQ ID NO: 142355 - protein, 67 aa, Oryza sativa
  Clone ID: PAT_MRT4530_43369C.1.pep
MDRSIASGVTKLPSNMDVGRRQRYRVIETESVVGVGCGEGARPPSEILPSARLASELLPHAQSPGET

SEQ ID NO: 142356 - protein, 485 aa, Oryza sativa
  Clone ID: PAT_MRT4530_43370C.1.pep
MVVTFTSRRSEPVLLRPARPTPRETKQLSDLDDQRTLRYYETVVGFFRRCDGGAAGAVGAPADPAKAIRAALAEALVYYYPVAGRLREVADGGGAGNRLVVDCTAEGVVFVEADADVRLEDFGQPLLPPYPCVGELLCDAGDTRAVVGKPLLLMQVTQLKCGGFVLGFHICHNIADGFGMAQLIMAIADLARGEPAPTILPVWRRDLLTAARLGSGAVARTPFASAAAASASASSPALQNGARRAAAPADAMLSTPPDRMVVEYFLFGPREVSYLRGQLPAHLADSTTVFELLTAVMWRCRTAALGYGPDLRVRLMITMNARGRWNAHTPLPRGFYGNAHVSPVAEAAAGDLLGRPLADTVELVRRTKRGMTRERMSAMVETVAQLREWPPSSMDRVYEVSDIKWTTVNLLKFGWAEFAGGGIPLAGDLTSKLGSDHTRCKNSAGEVSTVVSMLLPRVAMARFKKEMAVLLNKDDKKSLTIMSSL

SEQ ID NO: 142357 - protein, 54 aa, Oryza sativa
  unsure (1)..(54): unsure at all Xaa locations
  Clone ID: PAT_MRT4530_43371C.1.pep
EGXKAYKVLXIQIRTXMGLCEKALLWPGDGIMNHFSGEFVWRNKIVXCWPRHSM

SEQ ID NO: 142358 - protein, 68 aa, Oryza sativa
  Clone ID: PAT_MRT4530_43372C.1.pep
HASVLILHGRFDPVTTVPLSGGKKSVSRRRERVFPVCKPSAHPGGQLVASDRIKGIPRVMSSGELYSM

SEQ ID NO: 142359 - protein, 133 aa, Oryza sativa
  Clone ID: PAT_MRT4530_43373C.1.pep
GAEVESARSGDPGRYGDPAMTESAPPSDCTATPRVLCPLAFDMLVLHPRSIAIPAAVKGRCHQSRIHHLALLPLSLRMYNILGRGLASMLLFVSAVRLSHPLSFVLAAMAACKIQLMSSLLRMAATLQDSNVW

SEQ ID NO: 142360 - protein, 77 aa, Oryza sativa
  Clone ID: PAT_MRT4530_43374C.1.pep
MVGGGGGREEEEVGGGEVARAHGVPRGYGVGIVGYGAARGVWREEGRESVRLVTTARVSFGLGFEARRKRMARSRSE

SEQ ID NO: 142361 - protein, 160 aa, Oryza sativa
  Clone ID: PAT_MRT4530_43375C.1.pep
MGQGIQATVLPALQTDEPTTSLPKKTINASITSLFGPKKLEEPKIPIPPNVIEHLSRELYLEEKASKEVDFCKSAGLKSLDNLDELEEAPIELKRIGCMNGIWRRPKKGVGMFGAYYTDVRSMNHKIAFLDPAVVNFDKQCTSEAEIDRYLFDALAKLNG

SEQ ID NO: 142362 - protein, 37 aa, Oryza sativa
  Clone ID: PAT_MRT4530_43376C.1.pep
ISWFINNRQEKGSYVPLKNRIMRGFASYTKPRTAFKV

SEQ ID NO: 142363 - protein, 243 aa, Oryza sativa
  Clone ID: PAT_MRT4530_43377C.1.pep
MVLDTEIESLGTQAHWLHEWHCSYQVRSMNHKIAFLDPTVVNFDKQCTSEAEIDRYLFDALVKLNGCDHILLPYLSHHHWILLVINIDDSSICIYDSLRGIDKYQTILSALNRAYKKYRRSGRSYGRCKIDATEFRIFEHKYILRQLEATDLCGFYVMRYMLYFVEDGYNHRNAEKLGLDTSEILPHVFKALTDEFCGFICHHVVDPTGEYNINKVPQRVQSSVPPPRDQAAKKLAPRKRKTS

SEQ ID NO: 142364 - protein, 132 aa, Oryza sativa
  Clone ID: PAT_MRT4530_43378C.1.pep
MHQHPKTTTTATKRRPLILSQDETLASSAPPKRPSDAGSRMSLKRLADQDNKLLYSLNERDDYCEWQGEKSAQGREVSSVAQSKGLRSPFPPHTLTSLDQLRVLSLRNNSLCGPIPDLSPLGNLKTLGHDHN

SEQ ID NO: 142365 - protein, 54 aa, Oryza sativa
  Clone ID: PAT_MRT4530_43379C.1.pep
GGSQRQRSLSTGDGDEGFEGFLFSFFFLLFFFFSPIKPVIRNVYLFSFSCRLST

SEQ ID NO: 142366 - protein, 446 aa, Oryza sativa
  unsure (1)..(446): unsure at all Xaa locations
  Clone ID: PAT_MRT4530_4337C.1.pep
YLLLLSLSPHLFISLSQILSPRTEASGAGLERRRRRRAREAARGCGGGGPPPSGSRVGRPPPTWIRRRCPPPRRRRAPLGDDELGGGGSGSGAATTTAAGGGGELGRGGSGSGAATMTSATTTAVGGGGELGRGGSGSGAAMTTSATTTAAGGGDLGCGDDDLPAATTMAAGGGGELGRGGASVVASGGGGELGCVGLGSGEGXARRGSGGAELAAIGCRSRGNGGXGARGNGSDKGWPTATAGGWRLQLAGCLTATAGGAANSGGDRRGDCGARRRDTGGGCVGRRGSDSGGGVGRGAXGGLAGGSNGGAAGXRCGAVGRGSGRRSERRNGAAGSGMRRLAVRGGGRTGGRHARRRVRAGGGRRRRTSAKKLARRRXEMERRIPTKRAAAITLPRRPPPLRELLTFLVAAAVGAYWPEAAGEGSPEPPPRSPPLGITTGHADNRI

SEQ ID NO: 142367 - protein, 66 aa, Oryza sativa
  unsure (1)..(66): unsure at all Xaa locations
  Clone ID: PAT_MRT4530_43380C.1.pep
AXDRRXLVLEXPCRXXDSWSMAIDRSINQSVLXSPNATRQXVGRRRRESGXGGXXMEWQKKKQKEC

SEQ ID NO: 142368 - protein, 105 aa, Oryza sativa
  unsure (1)..(105): unsure at all Xaa locations
  Clone ID: PAT_MRT4530_43381C.1.pep
MATLRLTSVTLXPXVSPSXSGGAPRPXNFGRAARRVPLAPPXXAXRRGDLARRRAAAXAXXGVREALSEVASENDKLEATVXNLEKLEKIFAEEDIAEXFENRCR

SEQ ID NO: 142369 - protein, 130 aa, Oryza sativa
  Clone ID: PAT_MRT4530_43382C.1.pep
MNKDKVHDKETHRTSNDISHKTSVDKVKAPNLFERAKEEVEALVGAVHDKMEHNSSPHGNNADLHKDSKDESKVSMNKIETHKNETHGTSDDINENTPVERVKGPNVFERAKEEIEAIVEAFHPKKGSDK

SEQ ID NO: 142370 - protein, 135 aa, Oryza sativa
  Clone ID: PAT_MRT4530_43383C.1.pep
MPAPPSPRLELLNLRYFTVDLSLDHIAKVKSTFFASTGHRCYSFDVCVAKTWQARTRALVAAGDAEQECIMRVCFFANTRHLILKADGVAAMGFYSNCFYPVAATGSRGEVRLTAKFSVVELVVVEQQVLGSGGR

SEQ ID NO: 142371 - protein, 84 aa, Oryza sativa
  Clone ID: PAT_MRT4530_43384C.1.pep
SVLERHCANPCFPGGATHIFLFPPRFFVGAPPFIFDQVFPPWIKLRSFFFGFWPPIFLFWGVRSYYVPLLPFSHPKFILLNTFH

SEQ ID NO: 142372 - protein, 88 aa, Oryza sativa
  Clone ID: PAT_MRT4530_43385C.1.pep
MKPRRRVAVLRWRGGGCGLRNGFKAFCKNIPLISHNHYAKVKWRDVAGGIARGKRETVRSREMKERDRAISLNQSAIPDDARVTYQGQ

SEQ ID NO: 142373 - protein, 58 aa, Oryza sativa
  Clone ID: PAT_MRT4530_43386C.1.pep
MTTSPFAALHRLLGCRLDLQCAIPPHHQERKEIPAFFSYSCLVLLSFGSKSVQGSQQA

SEQ ID NO: 142374 - protein, 119 aa, Oryza sativa
  unsure (1)..(119): unsure at all Xaa locations
  Clone ID: PAT_MRT4530_43387C.1.pep
KTNFACNRWIGRNRTLDRCLHRLLDLLRRLLEVNSAAAAAAGKDDIDAIAATGNDDIDAAAAGNDDIDAAAAGNDEFDAAXACFNAAVGKDSATAGNNEFEAAAAAAGNHDIDATAGRL

SEQ ID NO: 142375 - protein, 653 aa, Oryza sativa
  unsure (1)..(653): unsure at all Xaa locations
  Clone ID: PAT_MRT4530_43388C.1.pep
QSKWEYIVDXLMSDPGTLIPSDGAGLGREFEDSLFADSHHVNKDDCNTQLGSSFSEVSSSMYGSFENESLEKVSTPSNFGHSDPYGITTGQTGSQGSAVSGSFGELSISTSTSENLPVIHESRNTDHTMSTQSKDKSSAANNSSSSSPSSSEVGGAPAVRRMKVKDVSEYMISAAKENPQIAERIHAVLLENGVVPPPDLFSEESREQPKDLIVYDTSLFQTKDEMIKRMNELESTTNADFCHGPSVPHPPGHELQTKAVPYRIPLDLKPIQGLGTYHPSDSRNSTGSSHMYEPSAPPQEDPLQLIKQMPVAAAAVATAAVVASSMVVAAAKSNSDIKLDVPVAAAATAAAVVATTAALNKQYEYLEPGCQLLSLPSSSGANELIPKGRHDFWDNQLEIDHGQTSVPEKEKDLVEVPQEAERVSDKSVGTESSRSDIALDGVAEFEIQWEEITLGERVGLGSFGEVYKGEWHGTEVAVKKFLQQDISSDALDEFRTEFQIMKRLRHPNVVLFMGAVTRVPNLSIVTEFLPRGSLFRLIHRPNNQLDERRRLRMALDVARGMNYLHNCSPVVVHRDLKSPNLLVDKNWVVKVCDFGLSRMKNSTFLSSRSTAGTFSQLAFAKYICIFXRCDVFSYGVILWELFTLLQPWEVKLL

SEQ ID NO: 142376 - protein, 235 aa, Oryza sativa
  Clone ID: PAT_MRT4530_43389C.1.pep
MGSGPGLSVARLLSFSLSFFSYRLLPPDRAGAAGAAQRARQGRRRATRRRPGEGAARLRRPPAGGHGVGRRGGEQRRTAAMAGHGWLGRAPGWLVHGKLAGGIMVAGPARLRALVAEIEGGSSFYGTRRDLRSVDLPIDGGTTKIGCSGGAEKKVQHAHKMLDEMYPRKKKRKRGEDELVGAGRCGEGRGGMGLYRGRRGEVAGAVMADGTRAACGARGERRRDMSAGAARGSAR

SEQ ID NO: 142377 - protein, 295 aa, Oryza sativa
  Clone ID: PAT_MRT4530_4338C.1.pep
MLTSEVPSPRDPELVERLILDLLDPELKRHAPSELRKKREMFQNLALLLWNSFGIVASLLQEIIVVYPALSPPTLSLGASNRVCNALALLQCIASHSETRTHFLQARIPLYLCAFLETDDKAKQFEYLRFNRCLTKQTLERVDDPKIINFLLENEFVPLCLHNMTIGSQLSMPVATFITEKIVVDDAGLAYVCANADRFYAVGAALATVVTSMVDQPSKRLLKHVIRCYLRMSENPRGFAALQTCLPPQLKDGTFNSCLRDDPSGRHLHQQLLVKMTSGKKGGGAGNSAGRMSWG

SEQ ID NO: 142378 - protein, 158 aa, Oryza sativa
  Clone ID: PAT_MRT4530_43390C.1.pep
RTYNSEKFTLGALLRKPVTHPLDGDGSAVNAGDAAGHALPQQLLPEPRVATPNLKNLAQHEFEMISFHPQTSNFKNPQKTNSPHPKMISGGIRGGKKGGETNRDGRGEERGEEVAEVGEILEPLIVLLLPEPLVPARAHTGQPSHQRDPSAAAPASRE

SEQ ID NO: 142379 - protein, 69 aa, Oryza sativa
  Clone ID: PAT_MRT4530_43391C.1.pep
MYLKIGTYFIITRSLQRTAACPPFGSMAAATSPREHMVAAMPPKLNDGMTRSSHNDLGAVASTPSDEQW

SEQ ID NO: 142380 - protein, 150 aa, Oryza sativa
  unsure (1)..(150): unsure at all Xaa locations
  Clone ID: PAT_MRT4530_43392C.1.pep
RKKYLQNGGVFQCGTEGSSQFWRGVVLNARKWKNFGSAWQVGEGSRIWFWHDIWLGTCPLKIILELFEICNQQDIILAELKQRGVGELTLRRSFGLSELEQWREIRDIIENLTLNTNPDTLLWSLSAXKKYTTKIETRYSTFADLQVYNK

SEQ ID NO: 142381 - protein, 316 aa, Oryza sativa
  Clone ID: PAT_MRT4530_43393C.1.pep
MGRAPCCDKATVKKGPWSPEEDAMLKNYIEEHGTGGNWIALPHKIGLKRCGKSCRLRWLNYLRPNIKHGDFTPEEDSIICSLYISIGSRWSIIAAQLPGRTDNDVKNYWNTKLKKRLLGRRKDRGGGHHHRSQSTADDLPAGGDGGMNDGGGGGGERSLSASAMERIQLCMQLQELQNPLSIHHNPLLSHQWPSKATIDDQNHNNVTVAEHGMSSSVSDHHRLDGQQLESGAGAAAMQQASPSSGGENSNVVVAIEAELQELLYAGGGAIVDGGAPPQGDVDWWSYDQGKQSPVTCWDFTPETSSIFQDYATVYDI

SEQ ID NO: 142382 - protein, 73 aa, Oryza sativa
  Clone ID: PAT_MRT4530_43394C.1.pep
MAADREGARRRGGPCGAIVVAARCCRGGPRADDLDTVSSAGCGGDGYDHGLSLAFAGRAPLPVKKNRSTSIHT

SEQ ID NO: 142383 - protein, 696 aa, Oryza sativa
  Clone ID: PAT_MRT4530_43395C.1.pep
MKKKSIDLKTLWDRHSKSRKVGLGSGSGSTTQPVRIDSEVAVPSVQPITDANESPVQIQITAVEVVPEVAASDAARDVTEPETEVASNDPDIATAVTQQEQPSTWSPIRDWSPIRDGDDEETEYDSSDEAIYDIDLLCHDPGRRIAIKNYDVNERNSVIRGYIALGPCQPRSHNFPIRKIGDAFVNRGFRNWHMRKRIAKHVGGMTSFHNVAQDKYNHFLAPKTNIVESFAATNEQDKARYMARLTYSMKCLKFLLRQGLAARGHYESEKSLNKGNFLEMLSMLAENFEEVGKVVLNNAPKNCKLTAPEIQKQIANCCAKETTKLIMEDLGDEYFAILADESSDVYQKEQLALCLRYVDKKGRVVERFLGVVHVENTTSLTLKAAIESLLMEHSLSLSKVRGQGYDGASNMKGHANGLKKLIMDECPSAYYVHCFAHQLQLTLVAVAKENPDCVWFFEQLRFLLNLLGNSCKKTEMLRVAQAQRIVEELDLGDIETGKECANAQTVLTIFQSFEFVFMAHLMQTVLGFTSDLNHALQKRDQDIVNAVGLILLTKFQLQQLREDPGWDDFLQEVQSFCVKHKIKIPDMDSFYRPVGRDRRFFIKIKNMHRFHVDMFLSVIDRQLQELNERFDEVNTDLLLCMAAFSPIDNFASWDKDKLIKLARFYPNDFSSTEMNHLPSALKLFLTEMRIDERFRK

SEQ ID NO: 142384 - protein, 1037 aa, Oryza sativa
  Clone ID: PAT_MRT4530_43396C.1.pep
MKKKSIDLKTLWDRHSKSRKVGLGSGSGSTTQPVRIDSEVAVPSVQPITDANESPVQIQITAVEVVPEVAASDAARDVTEPETEVASNDPDIATAVTQQEQPSTWSPIRDWSPIRDGDDEETEYDSSDEAIYDIDLLCHDPGRRIAIKNYDVNERNSVIRGYIALGPCQPRSHSFPIRKIGGKPRRFLPSWYDEFKWLEYSVEQDAAFCFICYLFKHKINNSGGDAFVNRGFRNWHMRKRIAKHVGGMTSFHNVAQDKYNHFLAPKTNIVESFAATNEQDKARYMARLNYSMKCLKFLLRQGLAARGHYESEKSLNKGNFLEMLSMLAENFEEVGKVVLNNAPKNCKLTAPEIQKQIANCCAKETTKLIMEDLGDEYFAILADESSDVYQKEQLALCLRYVDKKGRVVERFLGVVHVENTTSLTLKAAIESLLMEHSLSLSKVRGQGYDGASNMKGHANGLKKLIMDECPSAYYVHCFAHQLQLTLVAVAKENPDCVWFFEQLRFLLNLLGNSCKKTEMLRVAQAQRIVEELDLGDIETGKGLNQEMGLGRPADTRWGSHYKTVMHVLSLYPSIQKVLIMVGKDRSFGAECANAQTVLTIFQSFEFVFMAHLMQTVLGFTSDLNHALQKRDQDIVNAVGLILLTKFQLQQLREDPGWDDFLQEVQSFCVKHKIKIPDMDSFYRPVGRDRRFFIKIKNMHRFHVDMFLSVIDRQLQELNERFDEVNTDLLLCMAAFSPIDNFASWDKDKLIKLARFYPNDFSSTEMNHLPSALKLFLTEMRIDERFRKVKNLANLSIMIVETKLHNRHEIVYKLLKLVLTGIPNFLILAPPLFTATYPPNRRMVISCGRDTYDGSHSQPPKPATKETARERKKPRITDSSLPQRPKPPTAEPPPPPAFLFLASFDDERSRFIGGGHQHRLPLPRRLLLWRWDCREHLRSCALHLPAADVQEDRPERIDGAVLGDAVHLLATQLPHLSLVRPPLRLLRRRPRRHRQLHRRPLPARLHRHLHRIRRRQEQGEGVQPAGYGVRRVRSNCVC

SEQ ID NO: 142385 - protein, 523 aa, Oryza sativa
  Clone ID: PAT_MRT4530_43397C.1.pep
MDEFKGPGEKEKEEEAGDKAAAEEAGDGFQVVRGKKKKRPNGGSASGAGSGTMMAKDKAAAAAAAEPWTKAKVSFHDPNIPRPQDVYAIRVNNYNVPFDHVWLERTEDGSRPIHPLEKLPMEQFIDRNVPESEPVKPADLEDTPFTLVEDKNGLADLAKKLKSVNEFAVDLEHNQYRSFQGLTCLMQISTRTEDFVVDTLKLRIYIGLYLKEHFKDPTKRKVMHGADRDIMWLQRDFHIYVCNLFDTGQVQKRSNEICLQLYEKELLTDTSYLHIYGLQEHDLDAKQLAVVYALHQWRDYIAREVDESTGYVLPNKALIEIAKKMPTDTAELKRMVKSKYPFVDENLDQVVGIIWNATESSYAFESRAEQLKKERLEQLTDRVQTISSPEMKTSMNLSGQIRSMDKEILSDNIHQQVAQATFQELKRPMALGAVGNSTSGGQRDFFGGFSNKSEKMEKAKSYPAFYYPQLPQYSPEVGYGFQSINRTMAGTAQSPTGNKERDLQNPRRRQSFPPSGNISDTHQ

SEQ ID NO: 142386 - protein, 106 aa, Oryza sativa
  unsure (1)..(106): unsure at all Xaa locations
  Clone ID: PAT_MRT4530_43398C.1.pep
MKWKFLKPPSMPYNQYAIRQPPSPITAFQLRTTKSWQTSSAGGPTKLTIKDINXLFQPIAQANYKLXKFGDLYFDRNLAQAQALLAFNVXPSRYGYLXPRYYGGTQ

SEQ ID NO: 142387 - protein, 627 aa, Oryza sativa
  Clone ID: PAT_MRT4530_43399C.1.pep
MAYEIEDWIDEAMHHLTKDDSNSGFISKIIFRLNRMRTQNRMANQINEVKTRVVEMSHRHKRYKLDASISTSDYTAIDPRLCALYADAEALVGMDGPRDEITKWFMGADQQLMVVSVLGIGGLGKTALANEVYKKIGGQFDCHAFISISQKPDIMCPPQNNHASRVITTTRIEKVAMECCSYRCEFIYKMKPLNEHDSRRLFFNRIFGSENACPERFKGVSTGILQRCGGLPLAIVSVSSLLANPATSVDRQWEYVSNSLSDKFGIMPALDGMRNILHLSYKNLPYHLKTCFLYLGIYPEDYIIRKSDVVRQWITEGFVHKAQVQDAEDVAGSYFNELVNRSMILPTDIDYQNNVVSLFSDAVHQMSLDLTGIRQLFQLRYVKIEANIHVQIQLPAQIQELKLLESIDIEWGSVCIPPDIVHLPHLIHLVIPEGTGLPDGIGNLKSLITLRSFDLGENSLHNIRSIRELTNLKDLNLCYSGKNVVSNMETWIDVLRSSLEKLSNLKYLHLYWPGTCENGLCSLNPPSRHLQRLEMAYWWFSKVPKWIGGLHELHVLKLAVKEVSDDDITLLAQLPSLTNLGLRMRGAPKQKIIIYKKAFPVLRYFKFWCSTPCLVFEASVMSEELRN

SEQ ID NO: 142388 - protein, 219 aa, Oryza sativa
  Clone ID: PAT_MRT4530_4339C.1.pep
MGTGAGGGGSGRMGDKAGYPDERIEQEAAAAAAESTTTTGAVTVAAAIPMALPMMTRDGSPVLSGEEQVISSSSSPEPPLMLPQAPSGSGSGGVASGGMRENAQLARELSQMRKLCNNILLLMPNSARSATARRGVGGSNGEATLGGSAPSARLASPPSQIQPKGGGGGQWPVTRGGKQRREVGGSAPTSQIRLSALLSRIQKRHGGGWRRRLHAVAKG

SEQ ID NO: 142389 - protein, 89 aa, Oryza sativa
  Clone ID: PAT_MRT4530_433C.1.pep
MLEFWTLDFPLASILVHKSTNYYYYYYYQFRIADIMAKGGLVVPAKASCGRCEMSNCRVDDANKHEHTLLIAKDQLGQVVTISSQFINP

SEQ ID NO: 142390 - protein, 59 aa, Oryza sativa
  Clone ID: PAT_MRT4530_43400C.1.pep
MAPRFPSLARQESGDAGRRLRKKAGKSFEDLKSFQVNVSYGFHGYRGYRAVTVLTAGAR

SEQ ID NO: 142391 - protein, 69 aa, Oryza sativa
  Clone ID: PAT_MRT4530_43401C.1.pep
GTRSRDQQQQEQQEQEKPQRPRERTRRVRFAADVVEPSSDATSTAAGTSPAAPNRQWATPPPPHHRLGL

SEQ ID NO: 142392 - protein, 206 aa, Oryza sativa
  unsure (1)..(206): unsure at all Xaa locations
  Clone ID: PAT_MRT4530_43402C.1.pep
MSYRVDPRTSISQYSIHPVYGYPPSIVPCQVGVLGAQCSIDMTSSYSDTCIYTNFGPGDPTXASLVWIQVGSIFFPVYAATPISSSPISVRNKNGAAATTRSDTTPAGPLVPMEKRMPATTTSDKRPQVAETHPSTENQAPIRISSQRSTTWCVIHKTANHSLMDCKVVQQVKAELEVCKEHNIQHISPSRTTRCPIHRSRGHELS

SEQ ID NO: 142393 - protein, 496 aa, Oryza sativa
  Clone ID: PAT_MRT4530_43403C.1.pep
MDAAATRVSTRLRRSTQTHAAYTVHVADRRVIALVTAHPAYARRWVHTTRWLHHRLLRSGRLLVGLGVQWTPLRRPLHRGSPPPPPATLQLCVGHRCLVFHLAHADAIPAALRRFLADPRITFVGSGASNDRRMLSAYYDLHVASARELRAVAAMGNASMEAMADRFLGYPGIAKPTNVSMSAWHAPYLSIEQVEYACVDAYLAFRLAVHLCPAPARQPVLRAPPPPPPAPRAPVYHHPLPLGPRVAVLAAPAPRPARHAPVRARVAPPVYRAVARAEPAAAQTHWALVATAVDDDASESEYSSKITDNVRPRVAASDSDIEEEDDDGLSMIHSSSYASDDHVFSSDDFELVGHGLLSSDDEDGYEDFVLGMGALNIDIDDDDDYNGNTGSIGILTVQSYNEHSSIGILTVENYDMAGTEEMFVRNGVATLEELEEDDIVTGAGTVTVDEGGGGYEAFEGNSQAFDDVEEGGYVEDDWYDEDEEELLDYDTSGGFY

SEQ ID NO: 142394 - protein, 145 aa, Oryza sativa
  Clone ID: PAT_MRT4530_43404C.1.pep
MNDHVPSESWQYSNDAQPAVDGPTAAHSAPPAVLSPAAAALLHSAGRRALARLLRPRSPPLDNEEDDKFEFSVYAVAAVLSAADELFFGVRHMPMLPPLRPPSPSCSPPPCLEVRSVVGIGGAICSCLCPRSWATVRRRIRLVGI

SEQ ID NO: 142395 - protein, 27 aa, Oryza sativa
  Clone ID: PAT_MRT4530_43405C.1.pep
MITRVCWFEVVILYFFKLICQSRPLMY

SEQ ID NO: 142396 - protein, 140 aa, Oryza sativa
  Clone ID: PAT_MRT4530_43406C.1.pep
MEIQQYHAILRHRHSVAIAVRRCQESGRLARLTILLMASALCPRRRYGVDIASLGATMAKGNATGSRGRGPHAPYPTKSRRKQQKEGRWSLRLWRSIPRDISIPGGDPSCCLRLSCACTIVLVLCTCAIVLVLCTCAIIL

SEQ ID NO: 142397 - protein, 77 aa, Oryza sativa
  Clone ID: PAT_MRT4530_43407C.1.pep
TPVCILVSAALFAFAHLTPGQFPQLFILGVALGFSYAQTHNLLTPITIHAFWNSGVILLLTFLQLQGYDIKELLGAS

SEQ ID NO: 142398 - protein, 424 aa, Oryza sativa
  Clone ID: PAT_MRT4530_43408C.1.pep
EYARRDAPTITAVAADTSPPPPSPASSSPPPLSFPPPPPPPSSPPPPALPVVDDHSDTQRSLRRLRQLTDSPYTLGPAVTGYDARRAEWLRDHTEFPASVGRGRPRVLMVTGSAPRRCKDPEGDHLLLRALKNKVDYCRVHGFDIFYSNTVLDAEMSGFWTKLPLLRALMLAHPETELLWWVDSDVVFTDMLFEPPWGRYRRHNLVIHGWDGAVYGAKTWLGLNAGSFIIRNCQWSLDLLDAWAPMGPPGPVRDMYGKIFAETLTNRPPYEADDQSALVFLLVTQRHRWGAKVFLENSYNLHGFWADIVDRYEEMRRQWRHPGLGDDRWPLITHFVGCKPCGGDDASYDGERCRRGMDRAFNFADDQILELYGFAHESLDTMAVRRVRNDTGRPLDADNQELGRLLHPTFKARKKKTSRAARPM

SEQ ID NO: 142399 - protein, 1080 aa, Oryza sativa
  Clone ID: PAT_MRT4530_43409C.1.pep
MEMLRRNLKRQASRSLSAFAVSSPRAGAVAAADADQENLHPNLAAASPPMSPAAKNSSAAPGASPRSSKPVPTSAAPPSKAAAEGEQASAPANEAPAVKVVVRVRPTVSRPVDGKDLFFVRKTSPCSVAVGDRSFAVDGFLDDRASQADAFDLIGVPMIESALAGFNSSLVCYGQSGTGKTYTMFGALAAMVDSSSDHADRGVVPRVFQNLFAQIQGRQESSPEKQTSYQCRCSFLEVHNEQINDLLDPSQRNLQIRENAGNGIHVENLTDEYVSTVEDVNQILMKGLSNRKVGTTSMNLKSSRSHVIFSCVIEAWSKGFSNGFSSSRTSRITFVDLAGPDNDELDGGNKHCTREERYVKKSLSKLGCRTTTLSTLRFGERAKLMSNKAVVNEISEDDVNGLSDQIRQLKDELIRTKSGDTEPCKNGYFSAQNARESLHNLRVSLNRSLILPHIEVDSEEEMDVDEEDVQELRDQIRKLHSSSEDTFDDFMDAESGDDTPCSKGNPKTSEEDDQPVIDDCEDPIQEEHEVLSSTKVDQDLVSDRKSFLSVSASPHLSPMQDPTLCSSPKIHNKARKSITSPGLSPSKLSVSDCPGDEVSRKSAVRSSLQSSKLSPTDSLAASLQRGLHIMEYHEQNQGPRKSFVGLSFDHFALNPRQSVAKVSSGVLASPERKGATSSALCSSCKKAIDTDGNQKDNINAEKQIVIATSVVPEVKDDITASTIASKRQTELEALCEEQADKIKELSNLVDQYKKCSEDAQNSDGTEPTKELVDEAKVGEQHGELNVNDREELLSEIQRLKDQLKQQAGESTNVSLLEHLRNGSTDQEYELDREREKWMESESKWICLTEELRVDLESNRMLAEKTEMELSNEKKCTAELDDALQRAIYGHARIIEHYAELQEMYNDLLERHRRVMEGISEVKRAAAKAGRKGCGTAFAAALAAELSTVRIDREKERAQLKEQNRRLRIQLRDTAEAVHAAGELLVRLREAEEASTQEKERSAAMQQENDKLKKQLEKMKKKHEMEMETMKHFLADSRLPESALGGFYRQESEDVPEYNNHATSTCDDDQSWRAAFTSAYE

SEQ ID NO: 142400 - protein, 146 aa, Oryza sativa
  Clone ID: PAT_MRT4530_4340C.1.pep
EEEYVVAELPHLAELPCELRVLPHATGRDAAGAGAGWRLRQHERGLRGRAGGYDLLLAGQHRGAIPRHHRQRHRDRGRDRDRPRRRRRWHRRRASSPSIRQRRPRPHHTPPPPPPPPARSAHPGNRPCRPWICSAVDWVPASLPEL

SEQ ID NO: 142401 - protein, 310 aa, Oryza sativa
  Clone ID: PAT_MRT4530_43410C.1.pep
MAVDWIWERRRREEEYNHQMSQDELQQPGQVQWTPAPEEKSEIAVQFFTAPYPCQNGQLDHGEHHALGGIGACSSVHWQPDRGTCYWPPPLSGDGGGGSGSGSSGTGEGSYIGERCYYVGEPDVPIGLNLLVGDNDGAGVVLRDAAPQAKRRTQAGHGGDLGRQKKKARVSDKRNQESMQSGSCSDNESNCSQVNRRKVDRVAGGGNGKVPARRRSATIAQSLYARRRRERINGRLRILQKLVPNGTKVDISTMLEEAVHYVKFLQLQIKVEVQIVCHDQMLSSDELWMYAPIVYNGMDLGIDLNISPPR

SEQ ID NO: 142402 - protein, 117 aa, Oryza sativa
  Clone ID: PAT_MRT4530_43411C.1.pep
SGIRFLGRDGFESCCSEACAVLSKARSITIRALCTKGNSQSNPHRSYDHALPRATHPGSHYPNDSPHVVSSSHPGTTTYSPLDSSATHSTHSPRSYSPTARGNDDPGQTQTASLRGK

SEQ ID NO: 142403 - protein, 89 aa, Oryza sativa
  Clone ID: PAT_MRT4530_43412C.1.pep
CSLSGVCIHDSRALSADLSNSCCKKGALKKLAPNLHLCKPAYCLISSLHHLRRCLLLLGLCQSGRVAAVGTKAGGGSPVAVTDGPTGCA

SEQ ID NO: 142404 - protein, 908 aa, Oryza sativa
  Clone ID: PAT_MRT4530_43413C.1.pep
MNIPGAKYLGTGRSGPLAGYVLTLAQVGLKADLFCSGYDMGRNLFICYSPAIDRGRRRPVAGRAPQPPPPPPPPPPRGAERRAPPARTSQHGHCPGILHGIIAVCRKRDASDALLVVVTVGIASGAVMASLRPSPSRRLYPPCLRHPQKLSNEHYGEGWNDTVVTLIPKVQSPERLKDLRPISLCTVVYKLASKVLSNRLKLILPDIISPNQSAFVPQRLITDNVLLAYEMTHFMQTKRTGREGYAALKLDMSKAYDRVEWSFLEKMMVRLGFAEGWVKLIMRCVSTVTYRIKVNGDLTDQIIPSRGLRQGDPISPYLFLICAEGFSSLLYAAEERGDLSGVKVCQQAPSVSHLLFADDSLLLFKVNERSAQCLQNVLNLYESCSGQIVNKDKSSIMFSKNTSQADRKMVMEILDISTEARNEKYLGLPVYMGRSRAKTFAYLKERVWKKIQGWKEKLLSKAGKDILIKAVAQAIPTFAMSCFDLTKTLCDEISAIICRYFWSQQETENKMHWLSWDLLCRRKKKGGLGYRDLHLFNLAMLARQGDWDVSLVRDIFWEEDVANILSIPVRTDMEDFAAWHYDTRGIFSVKSAYHVLEDQRERTSVRQTDTLCLVCKRFDEDGGHCFLKCKPVRLCWSLLQKENIRLDLMNLNSAKDVVRHILSLGEECCMEVVLLLWNWWFARNKINAGEHGFSPEEVVFRVKNMLHELSALKPVEQRRGNTEIKRWLPPQRGKLKLNVDGAFHADRKTGGWGFVLRDEVGHALCAGAGRLEFVSDAISAEAKACLAALLAILVQGVSVVDIESDSDLLVSAIKSSSHDLATGATIFTEIKTVLQSQFPSFEVYFAPRSCNNVAHELARLGVSWDPDQSYVWVDPLPEFVRAKVIRDSTESSSFHDVKLDLVGYVLST

SEQ ID NO: 142405 - protein, 88 aa, Oryza sativa
  Clone ID: PAT_MRT4530_43414C.1.pep
PGVFFPGWGPPVPPQAENPVFWVRPVPRGIPGYAPLFFSKVFPKGLGAKLQVFSPDFIDGDFFNACAGVPKARVYGPALNCMAGPCSN

SEQ ID NO: 142406 - protein, 51 aa, Oryza sativa
  Clone ID: PAT_MRT4530_43415C.1.pep
YFKTAAPFFFYLYFFKFIFFFFFYFYFFFFFFFFYIIYFFFFFIFFFPTRP

SEQ ID NO: 142407 - protein, 504 aa, Oryza sativa
  Clone ID: PAT_MRT4530_43416C.1.pep
MVQLEELISCLPPPPATTITHRKMLARRKTMEMAVVSDPAPAAVTNLNYAGATRSSPVAANIRGTPVMRDVLSHLPVKMVRELGPLFASEFWLSTVMEIDDEQLLPQNGEQVDLIERVGSVLSTQDGPFPTVRLTNLCFQPFGVQELHCIDDDESAFIILMSWFNLFNSKKVTKFIFLNRAQPTAKLLFVPENILKWWRLETLYLCQIRFKDPSGTIDFHLPNLAELGIVNCEFHHDTLMKMVAQCPKLERLSLAFLEFSTKIHFESNSLKRMVLWNYSARDSVRIVAPKLCRLILHNVGTSEPQPHDEHPDPGDHRTMVLSMNSEIDMDLEVLGYIDLNSHVPLLSEGQSCKSVRTLGVQLGFGHDNEFHTMRRLLKYFPSVENLYIQSTKLDNVTIDLTEDRIIDLFEPIEDRKIMMVVYEAFKGSDHELCLASVLLQRLPSLQKMTIFYDREISDLVINKSHSSLQAAMLGATVELNFCACPESSWTLQEALNADHLASKP

SEQ ID NO: 142408 - protein, 73 aa, Oryza sativa
  Clone ID: PAT_MRT4530_43417C.1.pep
IWRPHTPTLIKIIPPPFYFIDQTKLKLNICPGSIHRSIGSLVGIHLRAVHGLRNLVGAPPTTASPPVTLTPTT

SEQ ID NO: 142409 - protein, 129 aa, Oryza sativa
  Clone ID: PAT_MRT4530_43418C.1.pep
MVAAAEFPSYVSVPPSDLHRHLGKLLTSGDGTDVTLEAGGETYKAHRSVLAARSSVLKAELLGPMAQPRSTAAATPTRINDIEAPVFRAMLHFIYTDHLSSTMATDGFEHLTTSCPAILKELMSKLVVH

SEQ ID NO: 142410 - protein, 101 aa, Oryza sativa
  Clone ID: PAT_MRT4530_43419C.1.pep
MASFSRRAVGLSHDTRNVLVVRVDGPANMYAHRWSIGGGGGMSTWGGKERLLRCAMADEQVLHSPTFLLDLPLSQMLELAPGPSDREQRLELLLSSDDEGG

SEQ ID NO: 142411 - protein, 90 aa, Oryza sativa
  Clone ID: PAT_MRT4530_4341C.1.pep
FSLVAMATRHTLASIRIYYTHQLQGWCAIVCACSGMENEQRRNDEQRIHLLYRTTSSAGCSVIKFSSQDPARPSTISTERIIVNCVQLYR

SEQ ID NO: 142412 - protein, 323 aa, Oryza sativa
  Clone ID: PAT_MRT4530_43420C.1.pep
MGCVSSKILSKSGSFQEKVVSHGFKGSNLIEEIILSTPKKSNGDQFLALLRTSTSSASAAASRAKDAADQSTTAAAVAAEEFVKIETINVSELLAGLEEEEEEEERDDGERCSAQACVLDGAVATPARATSFRTVEEFDALVTRSGSSEVAEAASSADQDATGAKPSEQEEAATAAAGNKRRARARQLGELKVPLPPAFDFSKSGSLRDWLLQGGQIFSPGSYVTPKFGTTSPAPSPPPPQERGGVLHNAGEPQPQHTVFDPELVAQFEQAMERLSEDEERVLEKILEAMGAAAEEEEEEEATATATARLEMPSHRPVMVVQE

SEQ ID NO: 142413 - protein, 30 aa, Oryza sativa
  Clone ID: PAT_MRT4530_43421C.1.pep
MGCVSSKILSKSGSFQEKVVSHGFKGSNLI

SEQ ID NO: 142414 - protein, 291 aa, Oryza sativa
  Clone ID: PAT_MRT4530_43422C.1.pep
MDASSVALYGQLKAAQPFFLLAGPNVIESEEHVLKMAKHIKGITTKLGLPLVFKSSFDKANRTSSKSFRGPGLEEGLKILEKVKATYDLPVVTDVHESHQCEAVGRVADIIQIPAFLCRQTDLLVAAAKTGKIINIKKGQFCAPSVMANSAEKIRLAGNQNVMVCERGTMFGYNDLIVDPRNFEWLREANCPVVADVTHALQQPAGKKLDGGGVASGGLRELIPCIARTSVAVGVDGIFMEVHDDPLNAPCDGPTQWPLRNLEELLEELIAIARVTKGKKPLKIDLTPFKE

SEQ ID NO: 142415 - protein, 93 aa, Oryza sativa
  Clone ID: PAT_MRT4530_43423C.1.pep
DQHECDPMTMSKPGNRSIAVVEDDGWWCTTGTSTTGAPSTASRWSASAGHHRLRDAAHGNTRPGATPVRSTGLAPAVMHLRSRPSTRMTSLAS

SEQ ID NO: 142416 - protein, 482 aa, Oryza sativa
  Clone ID: PAT_MRT4530_43424C.1.pep
MYGLQVLADDIQDDAGNVTREGTSVLFKVLSAFAFRDISLTKIESRPHRHRHPIQFVDGANVGTAKHFEYMFYIDFQASMAEVRAVGDTGVHLLPPRARQLPHGHDAMDDDRSTRLMLKFSEIRDRVVVFRQLCPSSSFAITSWKLRTVPTTMAIQGQIPFVQRLAFVFRSVSKSLERLGAAPPTKSFWTRNHLLKLQNSLDIAWQSLSLMERTFHRLESKQVDKVASLAAVAAAATDAANRDRLESKQVDEVSANKACVHSAVIIFLAVSNERAAYGALSAYRSSLEICRANMTVFNDMHVSVNDKLLDVAGAGEKLQANIRIASGMTRILAIFLGPWIQRINGAEGIPPTMRIAFSFCMHLVILVIWKLSDHKHFQVQQQLKDPWPHPHPVVPVAAVLPAAAEYAPSLIVKPKEEFNAAAVVYGGGGMPEHEASTAASYTSYERRSLAPPPQEHSILEWEISLPLPGVAATAVEREYRER

SEQ ID NO: 142417 - protein, 287 aa, Oryza sativa
  unsure (1)..(287): unsure at all Xaa locations
  Clone ID: PAT_MRT4530_43425C.1.pep
MAAPDYAIPPLSPTASSVVHRCARIAGVEVEQLLRRFEPEKGDQPLVYARSVVEYCSYIALCVETKRHDYLSDSEFHSLTYDMIIAWEAPDDETDAALQLRVAYQGVLXPGAYSEAAAAKAYPFCDAIPCDQFEVAFQAVELWIADRAVFPVENSRAVVPVEHPXGELTLNAMGLNVAREAFDDTAAAAEHVVAAGLRDTAAIASSRAADLYGLQVLADGIQDDAGNVTRFVMLAREPIIPRTDRPFKTSIVFAHDREGTSVLFXLSASAFRDISLTKIESRPHRSS

SEQ ID NO: 142418 - protein, 268 aa, Oryza sativa
  Clone ID: PAT_MRT4530_43426C.1.pep
MAIQGQIPFVQRLASVFRSVSKSLERLGAAPPTKSFWTRNYLLKLQNNLDIAWQSLSLMERTFHRLETKQADKVASLAAIAAAAIDAANRDRLESKQVDKAADKACVHSVVVFLAVSNERAAYGALSAYRSFLEICRANMIVFNDIQISVNDRLLDVAGAGEKLQANIRLASGMTRILAIFLGPWIQRINGAEGIPPTMRIAFSFCREHMWSIKTCADTPFLLLGCGAFSLRRRLKLSMAAMRCLQLQSSEASETFYDWDAWEALPSL

SEQ ID NO: 142419 - protein, 419 aa, Oryza sativa
  unsure (1)..(419): unsure at all Xaa locations
  Clone ID: PAT_MRT4530_43427C.1.pep
VAQWDPHVDAAFALLMQGNLLRARRPIAFAPRPAPPENFGGPGPWHSSAIHSHLDRASIDQWLAGGREXEDKNKXVNEKLILFSRKDCIGLRINPASCKAAFKAAIKFGIRCLGFSLSSGNTNYYKXWRSAWKTLRKWSSDLYXPTCFYASMGVMTALGNVGSILAGWMELSDDVTVVSVXDNLNHLSLIDRMPPDEQWIEVLTFASKHYDMNDLDYLFLLSMDGDFASLPELDKXQKLCAFELQVRNQRLDLVWXARIGVSCQRQSEHPLVPPNSCQVADNSQLLLIXSDDIKRLVDALTPWLPHKHDIQIYALVLVDAINTGISLYCSTINMNMKHXMKNYKKKNSSSSCLCVWHMLRSGFHVTPIRPPTVPQNSCRLRITLSASHSLDDIKRLVDALSPWLPDKHDEQTYVMASKL

SEQ ID NO: 142420 - protein, 558 aa, Oryza sativa
  Clone ID: PAT_MRT4530_43428C.1.pep
MGGGAAAGNSRGISHRGLRGESNDGGGQRRRCRQGREARRHRRPPLPICCRRPEEKRIEERKEAPPTPATSSPFLSRRIGSKRWPPGKQLGMAGHLLPFARGHVHLRELEDLEQRHEPLAPEPVADTLQGGREAALSRHPPLAVAVRRMMETLPAPRPTQIPRSTAIRPPCATPFSRAHWQTTCAAILATTTTTNAKAYGAPRVNGDSIKPALSDHAAPPLDLDLLPVSNLPRPLTITDLSPAPMHGSQLRVAYQGVPGAYSEAAAAKAYPSCDAIPCDQFEVAFQAVELWIADRAVLPVENSLGGSIHRNYDLLLRHRLHIVGEVQLPVHHCLLALPGVRRDLLTRVISHPQALAQCELTLNAMGLNVAREAFDDTAAAAEHVAAAGLRDTAAIASSRAAELYGLQVLADGIQDDAGNVTRFVMLAREPIIPRTDRPFKTSIVFAHDREGTSVLFKVLSAFAFRDISLTKIESRPHRHRPIRLVDDANVGTAKHFEYMFYIDFQASMAEVRAQNALSEIQEFTSFLRVLGSYPMDMTPWEYSSSSSPSPAPGGDTSR

SEQ ID NO: 142421 - protein, 200 aa, Oryza sativa
  Clone ID: PAT_MRT4530_43429C.1.pep
MPLVSRYVVEVVVGDTERRRQGTRSGGGGGRGGGGGGCGHDEQLSPWRGDGRRQGRAVGGRGRRTRRQHAQCAETLLRQREFAAPSSVSRVNCRRLLVPRLPPTREREKEDRPPPASLWPDLGGEGRGAANVVVHAAAALPRPPSGRIWEGRGGEPSPLQQEPPTSPPQREPPTSPPQREPPTSPSTPPPCGPHKVRLRK

SEQ ID NO: 142422 - protein, 383 aa, Oryza sativa
  Clone ID: PAT_MRT4530_4342C.1.pep
MSCGSDGGCRDGGGSEEFRRPRPSKVAAGDLVEPARCSDAAASPASWIDKKLLVDPKNLFIGSKIGEGAHGKVYKGKYGEQIVAIKVLNNGTTPEEKATLEARFIREVNMMCKVKHDNLVKFIGACKEPLMVIVSELLPGMSLKNYLNSLRPSQLDIHTAIGYALDIAHAMECLHANGIIHRDLKPDNLLLTANRKKLKLTDFGLAREETVTEMMTAETGTYRWMAPELYSTVTLQRGEKKHYTNKVDVYSFGIVLWELLTNKMPFEGMSNLQAAYAAAFKQARPPLPEETPQELVFIVQSCWVEDPAMRPSFSQIIRMLDAFLMTIPPPPPSESNEDAESEETASSLNGKNSAVSSIVSRATSKLSVVRHLFASKKAGNGRT

SEQ ID NO: 142423 - protein, 85 aa, Oryza sativa
  Clone ID: PAT_MRT4530_43430C.1.pep
MRATREEAVRWGGAWRQREGMGRGDDMAAWPTKLPGTARPKLGRAWAEASRADTAQPTRWAVPSQSTGVIHGPILLGSCRAGLKA

SEQ ID NO: 142424 - protein, 165 aa, Oryza sativa
  unsure (1)..(165): unsure at all Xaa locations
  Clone ID: PAT_MRT4530_43431C.1.pep
DRKYPNGSRPTRAAGIWYXKAPGTNKPVAPRGRTLGIKKALVLYAGKAPGGVNTEWIMHESRLANDGRASTGAKKGSLRLHDWVXLCRMYINKNEWDKMQQGKEVKEQASDMGTPTRWGETRTLESEIVDSDPFPELHSFPAFQLAPPPAQAMMVPNIRIDGRRH

SEQ ID NO: 142425 - protein, 60 aa, Oryza sativa
  unsure (1)..(60): unsure at all Xaa locations
  Clone ID: PAT_MRT4530_43432C.1.pep
KSRSVFSXYVAENDPGISYHASAVSCAACASRCPTLPPLNLYLFLCFFARDSRSSYGIKK

SEQ ID NO: 142426 - protein, 149 aa, Oryza sativa
  Clone ID: PAT_MRT4530_43433C.1.pep
MAGGFRVLHLVRPFLAFLPEVQSADRKIPFREKVIYTVISLFIFLVCSQLPLYGIHSTTGADPFYWMRVILASNRGTVMELGITPIVTSGMVMQLLVGSKIIEVDNSVREDRALLNGAQKLLGILNAIGEAVAYCLSGMYGSVSQLGTG

SEQ ID NO: 142427 - protein, 103 aa, Oryza sativa
  unsure (1)..(103): unsure at all Xaa locations
  Clone ID: PAT_MRT4530_43434C.1.pep
GRPWSIVRTGTMLREEQRSSAVGIPCEKVNRVRILGGQLXSTVGIGTKLREELRSRRSRRLGDKVGYEMAYGGWTSCGRDLRNRFHEVCVQASVFAKEIGRGN

SEQ ID NO: 142428 - protein, 48 aa, Oryza sativa
  Clone ID: PAT_MRT4530_43435C.1.pep
IGVFFFIFFGKKQMLEAGYSVGGGKKAFRKKIYGGHEMTLKQVVVLPF

SEQ ID NO: 142429 - protein, 47 aa, Oryza sativa
  Clone ID: PAT_MRT4530_43436C.1.pep
ICLSAFARSNGGHPTEPLLSTVVFERNGTKNALLRLQMSFLALVLRA

SEQ ID NO: 142430 - protein, 75 aa, Oryza sativa
  Clone ID: PAT_MRT4530_43437C.1.pep
TINPIIGNEPLSIPCGRAAPITPIQQIYHIRRDEPCTQISPLKKEPLLTRDRLTFHRSPTPSLGHGRTTSMGTKW

SEQ ID NO: 142431 - protein, 434 aa, Oryza sativa
  Clone ID: PAT_MRT4530_43438C.1.pep
IMGFLQSSDLASSLRLLADMQAAGLRPSGAAYARLIRALARAGRTLEAEALLLEMRRLGLRPDAAHYNALLEGLLSTAHLRLADRLLLQMADDGVARNRRTYMLLLNAYARAGRLEDSWWVLGEMKRRGIRLDTAGYSTLVRLYRDNGMWKKATDLIMEMQELGVELDVKIYNGLIDTFGKYGQLADARKVFDKMCAEGVKPDITTWNSLIRWHCRVGNTKRALRFFAAMQEEGMYPDPKIFVTIISRLGEQGKWDEIKKLFHGMRNRGLKESGAVYAVLVDIYGQYGHFRDAHDCVAALKAENLQLSPSIFCVLANAYAQQGLCEQTVNVLQLMEAEGIEPNLVMLNLLINAFGTAGRHLEALAVLQHIKDSGMSPDVVTYTTLMKAFMRAKKFEKVSEVYKEMEGAGCTPDRKAREMLNDASIVLEQRGMLH

SEQ ID NO: 142432 - protein, 118 aa, Oryza sativa
  unsure (1)..(118): unsure at all Xaa locations
  Clone ID: PAT_MRT4530_43439C.1.pep
FALLAIAACSASAQXDVLGQSYRQYQLQSPVLLQQLFLNPCGEFXXHLYGISSTPFLQSTSFQLXNNQFXQHLSLFAQPSHFXDINXCQXIXXHLQLQXFXDLFFDRNLAQTQTXLAF

SEQ ID NO: 142433 - protein, 68 aa, Oryza sativa
  unsure (1)..(68): unsure at all Xaa locations
  Clone ID: PAT_MRT4530_4343C.1.pep
FFFFQTDKAVXFLIVXLALQAPNTGLWSHPFSLHFQFTTTQHVGVPHHCALARQCLYSITHHNFNPLP

SEQ ID NO: 142434 - protein, 157 aa, Oryza sativa
  unsure (1)..(157): unsure at all Xaa locations
  Clone ID: PAT_MRT4530_43440C.1.pep
PLKAYFRNDSFHGVNIISAMVDINIARVNGAVLLPTWRGGAEEHTRINHRKNKFKXKKYVACGIFXNSTEKLLTSKTQSYKRNLEVLISPNPAEXGRIGCNXFCRCSWIYYLPDSEGRGRGCARCASSASAPPIHRIWDGREGRGGNRREREGPPPL

SEQ ID NO: 142435 - protein, 427 aa, Oryza sativa
  Clone ID: PAT_MRT4530_43441C.1.pep
MLAAAAALLLLVCAASLRCSAAVGSALAAPKKLLSGGVSIEEPRGGGAGGGGGGEECDLFDGEWVWDDGYPLYASRDCPFLDVGFRCSENGRPDDSYTKWRWRPSRCDLPRFNARNMLEKLRNRRVVFVGDSIARNQWESLLCMLAAAVPDKSSIFEVNGNPITKHMGFLIFKFREYNCTVEYYRSPFIVLQGRAPAGAPAVVKYTIRVDAMDWMSGRGKWKDADLLIFNTGHWWNHEKTIKGGAYFQEGNEVKMEMTVRDAYQRSMQTLFHWLRNEVNTNKTQIIFRTYAPVHFRLDISYRGGDWKTGGTCHLETLPDVTPIKSLEPWADLLEPINHVLGNSITTKLVGLDILNVTQMTALRKDGHLSVYLSPSGPASHHRQDCSHWCLPGVPDAWNELLYALFLRRKMVMPHNVSSVGAKRLNTG

SEQ ID NO: 142436 - protein, 164 aa, Oryza sativa
  Clone ID: PAT_MRT4530_43442C.1.pep
MAARPALARLDVSTVAAGAGKQQLVHARRRRRPAHAHRLPVPGAGSAIRLACSSPFLGGSNGSRSLKHNAAAGEKSAADHAAGALEDELIQKENSGGDAAAGASPPSSCDNHGAPQQIEVTADTNDGDKEKTNGPARDVHIKAKLLGYNLEPGSGPHYNHLGPV

SEQ ID NO: 142437 - protein, 342 aa, Oryza sativa
  Clone ID: PAT_MRT4530_43443C.1.pep
MGNPPELYHRILNIPRETSPQEIRAAYKSLVKKWHPDKHPPSSKPEAEARFKAITEAYEALLDQQENRAVFGVCCNDGRAGEKAMACGVVGGGGAHIARTRSDDFGARMAPGTPAREFKKVYSSGNSGGRRAFAEFSSSIMRKAPPLERKLDCTLEELCHGCKKEVKFTRDVVTKNGVAGLITFNGFTILDRSIVKKEVSQMVLVKPGWKKGNKITFEGMGDERPGCLPADAVFVISEKKHPVFKRVGNDLVLKAEVPLVSALTGWSFSFRLLSGKKVSCSFQDEIICPGYEKIIKGEGMPIADQKGARGDLRVKFEIAFPKQLTDEQRDGLAQILRGCAWD

SEQ ID NO: 142438 - protein, 205 aa, Oryza sativa
  Clone ID: PAT_MRT4530_43444C.1.pep
MGEESPAAGGGAAAAAAGKPSGTALPRRGKSCKGCLYYSSMLRSRGFNPVCVGIPRSIPQVPSYVVDEPREEAAAQGHDLRQFKYACAGYSMFVVDNKDGRSGEKEGKTLLPYCQGLELLVDSRLVEKKSPNNEPATASYRKEAATSSRQQGQRPGQLTGQDFYARFRKSAGLVASGVAKNLNKTAIYIKENVADILYPDRRPPK

SEQ ID NO: 142439 - protein, 268 aa, Oryza sativa
  Clone ID: PAT_MRT4530_43445C.1.pep
MANHRAVIAAVLVFCLCFVQVARCDVVAAAVSPSSPEQAQELQMLRAKVASLEDEISGRKEETLQLENVVREKSAQIAALVSELEVLQVPNVADDESVLKANAHNEMLEKQVLRLGSDLEDQVKKGESLEARASEAEKSLLELTQKLDHAEKINMEQKKKIEELNHSLRQVQDKLFEVEREAKLKAEELMKIRPPLLYSVHLAKDLASDKWQLHGKPVLDALAQKISENLAHAQTLVEPHMQTTQNIGFRIISSIDLLGVKNDVHPID

SEQ ID NO: 142440 - protein, 47 aa, Oryza sativa
  Clone ID: PAT_MRT4530_43446C.1.pep
ASNTHDLEKGVHEATVRSPISESVDARVGTAGPVVYMHVVDTNIILV

SEQ ID NO: 142441 - protein, 184 aa, Oryza sativa
  unsure (1)..(184): unsure at all Xaa locations
  Clone ID: PAT_MRT4530_43447C.1.pep
WLRYKIGSSLQKCRQGGSTQQTGLHLTRWWVWTLDLNILSCKVNSKSSVLVSPSTSLDISTPSNSTTLSTINIMSDDQLEQFKEEDLALAINKLSRAMNNVRFRKSRGXVHCFEYRELDHIHSYXPKLGRAKKXDNRDKFNDDKPKSTYKGRRSKQTLKKVLNQVYAVFEPSNDVDHTPITMRR

SEQ ID NO: 142442 - protein, 73 aa, Oryza sativa
  Clone ID: PAT_MRT4530_43448C.1.pep
VVLQEGSIEHNSGRIFLKKSGRINVNVPSPHRETEDLLFFIDPSYYELHQLKTVSSWNHLSRSGTSSLSLPLD

SEQ ID NO: 142443 - protein, 274 aa, Oryza sativa
  Clone ID: PAT_MRT4530_43449C.1.pep
MATSTAAPRHSCAKLSVAVEDPKAGGGGAVFVKATWHPTRFSLAVTDGGAAWVAQASDAEVRLRAEQWDQPVADYLALAERYLAFQQPSSTYSFHDAANGNRRLSWTFEKQGTKLEWRWKLQPAPNTQQTIAEILDFLMDANIRLSEEVVRKTQSFDKLKQESEKCLQQSERFNIEKAEFEQSTFSKFVAVLNSKKAKLRQLKDKLTEFESADKAPKEEDENSTDKTELFEEASDKDASVNDEPSETGGGDLHSSPEKTAATSRGGRGRKRTRK

SEQ ID NO: 142444 - protein, 652 aa, Oryza sativa
  Clone ID: PAT_MRT4530_4344C.1.pep
MAAGGEDDRLSDLPDDLLRRILHFVPFREAASTSLLSRRWGSLWRSSGAVNLVEHVEDEEEEDVNLVEHVEDEEDFDLGDEEDDDEVTAEEPSARRRDAFLRAAGAALTAADGDISCDHVTRLSVDVDGPDGYCITNFLDCDESAAAYDIFTGMDVLHTVVSHPAARLVEELCLRVASESDSYGVHRRRRDKEEEPSTDLGVYGLSLAFLPFEKLRVLDIAGCNNLSLPPPPAAAAAAAAFPRLQTLRLRRCAAKVTHLQRLIDAAPGLATAHLESVVFNTDDNNDNQSYNHRDTGACSSISLRCPAATSLALEWCGSTDYKFYYAHSRYSDDDDSCGGSIAIDAPKLRSFRYKGLPRPFHLKSPAPETTTTTTAVSLHFNSDYYLKEDTARVHSWRFIGNFTNAKTLKLKVDNLDHLAVADKASRSKLLCVLPNLVSVELEAAQLMNTKMNTKKSAVAIANLLRCCPVLSEFTMKLNSATTCTDRYWPNHRGRFQPDFYDSVDHFMRRKSNTTTAISSIDSRKGDGDRHVDEVPDIPALSRRSFTCLQRSLKKVSLKFKWSGDDCFGVQLVKFFAQNAMVLEEMRIDSGDRKLCDHMNLNVERWVGADSTKISLKRKNFANSTWEFSRTCPDSTPELETSTTSFIVLPLER

SEQ ID NO: 142445 - protein, 91 aa, Oryza sativa
  unsure (1)..(91): unsure at all Xaa locations
  Clone ID: PAT_MRT4530_43450C.1.pep
MPFPSMKRAFSSRISLRLNSALDKIEDDNPVVLILDLQPPLKKSEASVKKMYHIQAKTVCVMIRPGVXKKAYVKLSPGYNAFNVANQIGII

SEQ ID NO: 142446 - protein, 420 aa, Oryza sativa
  unsure (1)..(420): unsure at all Xaa locations
  Clone ID: PAT_MRT4530_43451C.1.pep
MAASSADLADDGFPAPRLFSQGVSYTYDDVIFLPGYIGFPADAVDLSTRLSRRIPLSIPCVASPMDTVSEAAMAAAMASLGAAAVVHCNTEPHLQASIVRAAKSRRLPFVSSVPLFSPASTPSLSDFAGHDYGLVTERGDSLSKLVGVAVAAETSSRQAPLPVSEYMRPAPRSVCESFYFEVGXPRNSIYQIDMIKYAKKMYPEVDLIGGNVVTIAQAQNLVASGVDGLRVGMGSGSICTTQEVCAVGRGQATAVYKVASYAKDHNVPVIADGGISNSGHIVKALSLGASTVMMGSFLAGSHEAPGTYEYKDGHRVKKYRGMGSLEAMTKGSDARYLGDTLKLKVAQGVVGAVADKGSVLRFIPYTMQAVKQGFQDLGASSLQSAHELLRSETIKLEVRTGAAQVEGGIHGLVSYEKKAF

SEQ ID NO: 142447 - protein, 75 aa, Oryza sativa
  Clone ID: PAT_MRT4530_43452C.1.pep
FDLVFLVGILVTVFLSNDATAVVLTPAVYAAAKAAGARPLPYLFICAFIANAASFVLPISNPANLVVYGSQMPPL

SEQ ID NO: 142448 - protein, 127 aa, Oryza sativa
  unsure (1)..(127): unsure at all Xaa locations
  Clone ID: PAT_MRT4530_43453C.1.pep
MISLRRWAGTACLGQRGRWSGCALPSSETDVEAHKYNAENNYMDLITDTGILGTKGRPTQITFTQPTYRQTYFCLATCRCMLPXRLIGDFLASTIGLPVLPSQSTTSAYINKGANMLITAAACRDAN

SEQ ID NO: 142449 - protein, 130 aa, Oryza sativa
  Clone ID: PAT_MRT4530_43454C.1.pep
MRQMIRRLSRVGDCSSPSSPPPFSPAPRRGGGGGGSSGKRSSSAAAAHEGVPEGHVPVYVVGEGDGGEAAAAERFVVRAELLGRPALAELLRRAAQEYGYDHHGPLRIPCRADVFRAALAAAGDEDDDSE

SEQ ID NO: 142450 - protein, 140 aa, Oryza sativa
  Clone ID: PAT_MRT4530_43455C.1.pep
MHVRDGEASCPASSRYVSWRRRSTRMWTRSSGQKKSAWPWSIGRRSAQMRVVASKESVGTAVVARQRSATAGIPGAEDGRIIEVTDGEIKRRRQDERRLIEMGATTGIGLYRNGRRMDAARWSEQYETKTKGKYKYPNYP

SEQ ID NO: 142451 - protein, 205 aa, Oryza sativa
  Clone ID: PAT_MRT4530_43456C.1.pep
MTDRQAMAMGSSDGDVLYARCLVSLPRLRPLNVFALWFMSAPYGKLSRPGWGPTVPAALAWCLMESPTLWLPPLVLSTTTTSLSTPTLRVTILPAALYMLHYVHRTLVHPIRLLRLRRAPVPMPILIIMFGFGFNLLNAYIQARSWALDAVPPATAAPLTVARCLVGLALFVWGMWTNIAADRELLRLKEAGKGYQIPKDGLFDV

SEQ ID NO: 142452 - protein, 195 aa, Oryza sativa
  unsure (1)..(195): unsure at all Xaa locations
  Clone ID: PAT_MRT4530_43457C.1.pep
DVESGPPPLAVKAAVLDGGTTVRSPREMECAKASAGGAARIRVXPVELGFKAGVAGGAVRGQRKDCGVRRREPLRRGVVRRKGPSRRQNAPHGAGAGRESAEVSCTCMQHAPVHATYTRRMGIKCMCMQPNHTRAETASVSIDAEMATRDKGDRGAGLPARRWRSRDRVGGGDGATRVHGSWRRRAGARGRRRWW

SEQ ID NO: 142453 - protein, 56 aa, Oryza sativa
  Clone ID: PAT_MRT4530_43458C.1.pep
LKRTPAKFVVWQFLGPPIFTFIVSKVYITVLRAASCTKRGYLHKTQFVVKFNLGGL

SEQ ID NO: 142454 - protein, 191 aa, Oryza sativa
  Clone ID: PAT_MRT4530_43459C.1.pep
LNIRRSAMTYAQINSANQIIWPNFFTITQKPSNFTPMATWNPPQSLELSSSIPQPHIQQSVHRRRAQPGGRAEEAHEEQDEAGLPRPWRNPRNSGSPGPGCGTKAGAARSRGSGPCRRTRGSGRGRGDGGHGTRTRQLHVSTPKQRWVLIVYSRFDILVIVHVQCTYSRNVCAHITFTDAKIWTTNRILTG

SEQ ID NO: 142455 - protein, 254 aa, Oryza sativa
  unsure (1)..(254): unsure at all Xaa locations
  Clone ID: PAT_MRT4530_4345C.1.pep
HADPGHLRHAALQPPRRIRPMGPDREQPRLGNLSLSGRPANAFTVXEAPHKEGEELFEHSDRLANHGKDDPAASALHTAAKPNGGLAEANAPPPPRRPPTATQAAQRRWSRLQPATSAWPTRRCRRLRAALAPSRASQETSPRLGLPGRAAVAKPPHRCCRAGQAAPARRLRARASRTTLPQAPAASALGPSTPPASSGSGEVRGKEWRRGRLGFLAPRAARARATRGVFLKFSFKDVSCWPLGSWELGSKSSA

SEQ ID NO: 142456 - protein, 697 aa, Oryza sativa
  Clone ID: PAT_MRT4530_43460C.1.pep
MPRNSGGGASAILLPLFLSALLLRCFVCYADGGGGGSLDADVAALSDFRLAADRSGALASWDLAANPAPCGTWRGVSCAGGRVTRLVLEGFGLSGDAALPALARLDGLRVLSLKGNGLTGAIPDLSPLAGLKLLFLAGNSLSGPIPPSIGALYRLYRLDLSFNNLSGVVPPELNRLDRLLTLRLDSNRLSGGIDGIALPVLQDFNVSNNLLTGRIPVAMAKFPVGAFGGNAGLCSAPLPPCKDEAQQPNASAAVNASATPPCPPAAAMVASSPSAKPAGAATSGKGKMSCAAVVAIVAGDFAVVGLVAGLLFCYFWPRLSGRRSARRLREGEKIVYSSSPYGATGVVTAAGGTFERGKMVFLEDVSSGGGKRFELDDLLRASAEMLGKGGCGTAYKAVLGDGSVVAVKRLRDATAAAASKKDFEHHMAVLGRLRHPNIVPLNAYYYARDEKLLVYEFMPNGSLFSLLHGNRGPGRTPLDWAARMRIASAAARGLAYIHHASRRGSGTPRLAHGNIKSTNILLDKAGVGRLADCGLAQLGSSPAAAAARSAGYRAPEAPPPPRPWASQKGDVYAFGVVLLELLTGRCPGSELPNGGVVVELPRWVQSVVREEWTSEVFDLELMKDKGIEEEMVAMLQLALSCASAAPDQRPKIGYVVKMIEEIRACGEASPSHESMDESSGVSVSDSPAVSEGGAISQ

SEQ ID NO: 142457 - protein, 164 aa, Oryza sativa
  unsure (1)..(164): unsure at all Xaa locations
  Clone ID: PAT_MRT4530_43461C.1.pep
SLSLFFLPSSSLLSFFLFFFSLLRPAARSTGWSGGSNGSVVAIKRLRNATAAEAASKKDFGHHMAVLGRLHHPNIMPMAEPENFHAYYYARDEKLLVEHLLLRHSIAGNHGXGPLDWAAWMRIASAAAHGLAYIHHASRRGSGTPRLVHGNIKSTNILLDKAGV

SEQ ID NO: 142458 - protein, 48 aa, Oryza sativa
  Clone ID: PAT_MRT4530_43462C.1.pep
FLCFSPRVQILVFFNLVSWNKKLTCIRYNYMNLTGIKYNLLSDYVSLG

SEQ ID NO: 142459 - protein, 108 aa, Oryza sativa
  Clone ID: PAT_MRT4530_43463C.1.pep
MDGSKPACDDAPAPWRVDLLWPLPRSGGEGASHTTVPVAGGSATTGPVAGSSSPRHGNWSGDGSCGRDDDNGFGSGDDDGSFDCSDGGSGFSCSDSSWNCDDGSGFGS

SEQ ID NO: 142460 - protein, 94 aa, Oryza sativa
  unsure (1)..(94): unsure at all Xaa locations
  Clone ID: PAT_MRT4530_43464C.1.pep
XVXGXXCXXKGXXLGXKGXYVHVXGXGGWGXXXXGGXXAGXRKRFXVECXXPXXXYXGRXRPXGFFFLPSXSLSXXCTIHTVQTLLCGVMVNTL

SEQ ID NO: 142461 - protein, 601 aa, Oryza sativa
  Clone ID: PAT_MRT4530_43465C.1.pep
MAEAAAGGEVRRRGGCCGGGGGGGGLFPEESFASWGAYGRALMETGPRLVERPTARSAAAVEVNEVRGRSGAEMKRNLTWWDLAWFGVGAVIGAGIFVLTGQEARDAAGPAVVLSYAVSGVSAMLSVLCYTEFAIEIPVAGGSFAYLRVELGDFVAFIAAGNILLEYCIGGAAVARAWTSYFATLLNHRPNDFRIHAASLAADYSRLDPIAVAVIAVVCALSVLSTKASSRFNYALSIAHLAVLVFIVTAGLSRARLSNLTADFAPFGARGVFAASAVLFFAYVGFDAVSTMAEETRDPARDIPAGLVGAMAVTTAAYCALAATLCLMQPYREIDPDAPFSVAFSAAGMGWARYVVAFGALKGMTTVLLVSAVGQARYLTHIARAHMAPPCLARVHPRLGTPVNATVAMLAATAAIALFTDLGVLANLLSISTLFIFMLVAVALLVRRYYATGETARGDRNRLAGCLAVIVASSVATAAYWGLGGDGGGWAAYAVAVPAWLAATLFLQLRVPMARTPEKWGVPLVPWLPSASIFINIFLLGSIDGRSFMRFGVWTAALLAYYFFFGLHASYDTAKALAAEVAAGKVEEGGSKPAVGGAAGN

SEQ ID NO: 142462 - protein, 1825 aa, Oryza sativa
  Clone ID: PAT_MRT4530_43466C.1.pep
MDASDKTFADVVKLLTSWLPRRSNPDNVSRDFWMPDHSCRVCYDCDTQFTIFNRRHHCRRCGRIFCGKCTTNSIPASSGPDRNIDEGDKIRVCNFCFKQWEQERAAANKQMMPLLSPSLSEASLFSTKSAITINSVSTTAGSYSTGHYQHVARASSISPPKSSQDKVCHDMLDTHVPEKSMSAVSNKDETSSVHFGYYTNRSDDEEEECSAYCSDRQVQHQQHNDHYYGPDEFDELESSYNPTISPTVEENVISKEVSSHATDQGFPSTLPVTKMDDEPDPDNSSECGAASSIYALESTDTNPLDFEKNELFWFPPEPEDEEDEMEVGLFDDDDDDEPVADSEQRRIRSSSSFGSGEFRNRDRSSEEHKKVMKNVVDGHFRALISQLLQVENISLHEGDETGWLEIVTSVSWEAANFLRPDTSQGGGMDPGGYVKFTYYLKPASNCFFSTVVKGVVCKKNVAHRRMTSRIEKPRLLLLAGALEYQRVTNQLSSIDTLLQQETDHLKMAVAKIVAQKPNLLLVEHTVSRYAQDLLLEKNISLVLNIKRPLLDRIARCTNAHIVPSIDLLPSQKLGHCELFYVDKYVEHSVNSNNTAKKMPKTMMFFEGCPKPLGCTVLLKGGSMDELKKIKHVVQYGIFAAYHLALETSFLADEGATLPEIPLESPLTVALPDSRSTADSSISTVPGFTFNVSNSRQTTDGFEHPVAGSIRSTDPGGTDVPPVSNECTTQTRTTFSHSSGTWSANGGSLNSKTVDRIEKATATSATTSGVLMDHSYTYSTLEKNWYSGDYHEYGSTMSDVKTMTTVLANSNGSCHHGTSEASTNITNFANLKEPFDGSIDLANVENVTNSNVVMVQPVPSTAVQNQETNQGHESTSNKEEIMASDHQSILVALSIRCVWKGTICERSHMLRIKYYGNFDKPLGRFLRDCLFNQGYQCISCDKPPEAHVHCYTHQQGSLTISVRKHTEFVLPGERDGKIWMWHRCLKCPWSNGFPPATLRIVMSDAAWGLSLGKFLELSFSNHAAASRVASCGHSLHRDCLRFYGFGKMVACFRYAPINVHSIHVPPYKLDFSHQPLDWIQKEANEVIDRAKVLFDEISRALHQHSDKRAHSGSLNMECGNHIVDLEGILRREKLEFEGCLNKVIKKETQKIQPDILEINRLRRQLLFHSYLWDQRLISAARSDRSHQEPYNFKPADKEMVQSIGSIAEQNAIEKPQSEISATEASFKDHKYVECLQESIDGGNSPGVDPCNSCPNHDQQIAISESDLIQRGSKTPLHSSVSINVESVPLESDIVARRTLSEGQFPSLLDVSNALDAKWTGKNDPVPSSAIVPDCVASSEDSEEHVTDTPSYASVFLNKLGDSAEDQSNWLGMPFLQLYRALNKQWCRSNRFDALNEYTPVHVSFLRTVERQVGPKFLFPIGVNDTVVGIYDDEPTSIISYALASHEYHLQLSDELESDTTDNSLSVTDLRGASLTESVDETASELLRSFVSTEDNILYLSGGKNPSPSDPLAYRKASHIKVNFGDEGPLGQVKYTVICYYAKQFDALRRICCPSERDFVRSLSRCKKWGARGGKSNVFFAKSLDDRFIIKQVTKTELESFMKFAPEYFGYISESIVTGSPTCIAKILGIYQVKSLKGGKEMKMDVLVMENLLFERHVTRLYDLKGSTRSRYNPDSNGSNKVLLDQNLLEAMPTSPIFVGNKAKRLLERAVWNDTAFLAGGVTLWQSIGVMDYSLLVGVDEKKHELVMGIIDFMRQYTWDKHLETWVKTSGILGGPKNVAPTVISPKQYKMRFRKAMSTYFLVVPDQWSPPAVVPSKQGAENNQDND

SEQ ID NO: 142463 - protein, 72 aa, Oryza sativa
  Clone ID: PAT_MRT4530_43467C.1.pep
CMQLLGRMPHCNCDTSYQMMQSMQQGICAGLGQHQMMMNMAMQMPYMCNMAPVNFQLSSCGAGGSKRWVHVL

SEQ ID NO: 142464 - protein, 56 aa, Oryza sativa
  Clone ID: PAT_MRT4530_43468C.1.pep
SKSNFTFLDHSVIALQSTSLPFRVKLKPFGYALKLYQKGSPNTDTDTQLTVLLMLS

SEQ ID NO: 142465 - protein, 101 aa, Oryza sativa
  Clone ID: PAT_MRT4530_43469C.1.pep
TRETQLGWYLQHLNTGGYHKTEKTWITDNNAQDKDTTLTLGMKRGAHPIHSAILCLELGGAEGHHEVLTGLMLHTLDRMDPYGCVRTLAFPRDGSRYLAPE

SEQ ID NO: 142466 - protein, 103 aa, Oryza sativa
  Clone ID: PAT_MRT4530_4346C.1.pep
SCLGVSPGWCGLSRLWPRARPCWLSCSCAAALLAFLVVALSAPHVWLQYLVSNVVSGLLLLLGGICGVCPGACLSRYRPRGGLAMVVSIKPARGGFQHKKKKT

SEQ ID NO: 142467 - protein, 304 aa, Oryza sativa
  Clone ID: PAT_MRT4530_43470C.1.pep
MYVNNCPSHASRMAAAAARYDVEKGGRKREGEEERCGSPAAVAQYPQREGEREWVPWLVPAILVANVVVFAVAILQKMGALVWDKVVHEHQGWRLVTCIWLHAGVVHLLANMLSLVLIGLRLEQQFGYMRIGIIYLVSGIGGSVLSSLFIRNSISVGASGALFGLLGAMLSELFTNWTIYTNKAAALVTLLIVIAINLAIGILPHVDNFAHIGGFLTGFLLGFIFLMRPHYGWMQRYVLPSSVKYTSKKYLAYQWILLAVASVLAVIGFAVGLSMLFRGVNANERCHWCHYLSCIPTSRWTCGN

SEQ ID NO: 142468 - protein, 147 aa, Oryza sativa
  Clone ID: PAT_MRT4530_43471C.1.pep
MSRRSTRPHYRDISSSAHRPVAGGGRRLELQSVVTDASRAIVVVPNTTPPSPATTTASLPTPPSTPRTATTPISVYMAFLAAEITCWRIIGKRSALRMRREYLKAVLRQEIGFFDTEVSTGEVMHSISGDVAQIQEVMGEKVLFKKL

SEQ ID NO: 142469 - protein, 100 aa, Oryza sativa
  unsure (1)..(100): unsure at all Xaa locations
  Clone ID: PAT_MRT4530_43472C.1.pep
SGQGIIISKILASRNWVLAEKPIQADVAAESAMGHGRRPLVRPEHIPQRTIKXIXPLPSPPPPRVRSRARGVVVVVGLEGVKLGSFARAEERRGEEQMGA

SEQ ID NO: 142470 - protein, 118 aa, Oryza sativa
  Clone ID: PAT_MRT4530_43473C.1.pep
AKKKTGGAPTPGGETNRAKTKLEKITFCPRRPWGSKAPIKSLTHNRNPFLGGGGRHYPPREMGRYSPESPNFLIKPRGFGFCKLPTKQGRGFLLFFLPKGSQELLLPLKNLLQGLFGR

SEQ ID NO: 142471 - protein, 43 aa, Oryza sativa
  Clone ID: PAT_MRT4530_43474C.1.pep
LVKRFFDSFERLQKAFGIMDDNQIGSSYVDTKIIIEEVMAKMA

SEQ ID NO: 142472 - protein, 231 aa, Oryza sativa
  Clone ID: PAT_MRT4530_43476C.1.pep
MAMAAPLTLVVVAAAVAVVFVGGGVEGWVLKEGFYEQSCPRAEALVKHYVEQHVPLAPSVAATLIRTHFHDCFVRGCDASVLLNGTDGAEAEKDAAPNLTLRGFAFIDRIKSVVESECPGVVSCADILALATRDAISVIGGPFWRVATGRRDGRVSIKQEALDQIPAPTMNFTDLLSSFQSKGLDLADLIWLSGRQRQRFRRPALPIAGARRRAGWSSLRATAQYRVGGKP

SEQ ID NO: 142473 - protein, 149 aa, Oryza sativa
  Clone ID: PAT_MRT4530_43477C.1.pep
HASVEFVADEGTVIMPRWMMRGMRLDDGGLVVVRSASLPKGSYAKLQPHTGDFLDTANPKAVLEKTLRSFTCLTTGDTIMVAYNNKEFLIDIVETKPASAVCIIETDCEVDFAPPLDYKEPEKVQQKPSVPSSKAASEDQDQIKDEPEF

SEQ ID NO: 142474 - protein, 106 aa, Oryza sativa
  Clone ID: PAT_MRT4530_43478C.1.pep
MEAGPTRDRSEPFVSTAAPGRFGGTDGANGYPRADPARGLIRHRRRLPAVDLTATTAAAASRGGSSSTDGASGYLRADPARGPIWQRIRRRRQRRLPAVDPVATRM

SEQ ID NO: 142475 - protein, 39 aa, Oryza sativa
  Clone ID: PAT_MRT4530_43479C.1.pep
ANVFGAEIVPISNGTGADIMPAWRASRDVARSQRQYIWR

SEQ ID NO: 142476 - protein, 80 aa, Oryza sativa
  unsure (1)..(80): unsure at all Xaa locations
  Clone ID: PAT_MRT4530_4347C.1.pep
KFSTXXQGMDGLISFNQNKAIKSFDSXFVVXVNTLFVRSFLTFKLGYFPCLHMVPYNGRSLVLKTRFMFXLSYISLILVP

SEQ ID NO: 142477 - protein, 88 aa, Oryza sativa
  Clone ID: PAT_MRT4530_43480C.1.pep
ALVRVYTKKRGYLPDFGDPIILTQGRNGCTVQSVCEQIHKDLVRDFKFAFCWGKSAKFSPQRVGLSHLLQDEDVIQILKKTGGAGNKK

SEQ ID NO: 142478 - protein, 71 aa, Oryza sativa
  Clone ID: PAT_MRT4530_43481C.1.pep
MANGLHLSVTSPVSLSPCVVAVPPPSRFLGPKHTGLGSAANVALSCAILSQSPSSICLSLTKFDPILALER

SEQ ID NO: 142479 - protein, 65 aa, Oryza sativa
  Clone ID: PAT_MRT4530_43482C.1.pep
GLPSRGLLLLIQLALVFTNVSWLEGSSTDWVVVEFFHLKPSMTISFRILVSCKLVLIYIHDTSHL

SEQ ID NO: 142480 - protein, 279 aa, Oryza sativa
  unsure (1)..(279): unsure at all Xaa locations
  Clone ID: PAT_MRT4530_43483C.1.pep
PPRRPPTPTSSSAAPPQPAPPSPRSPPLRRTSLLFAAPPPPATPPRLQSPVRHQYGVAWSPPRRSPPTTPRAPPKHPRPXPPPIRSRIAPDPRTARIAHPSPRYPRSSSIARRPSPPAXPPPTRSPSSSPHCSPLQCPLAPRSRIHPPRFICRTRPIPSAELHASLPLSSQHLYLSPSALIYLIHEGLSSNPVERGRNRTAATSSLLCHDLPPRCPLRPRCPRRQLHLFAIAPQLHNFFFFGSFWFCRVNCSKLMRFLIMAAVRWVVLAYIVRRQLRRQ

SEQ ID NO: 142481 - protein, 33 aa, Oryza sativa
  Clone ID: PAT_MRT4530_43484C.1.pep
LWDLLGRFHLLLHVEKVIVNMGIMPLVFQKQTI

SEQ ID NO: 142482 - protein, 66 aa, Oryza sativa
  Clone ID: PAT_MRT4530_43485C.1.pep
LLNWMGTCTRAIVKIICLCLLGASHDMRYTSEPANVVIGIKTLLSSANASAGRDRYSASRPARACQ

SEQ ID NO: 142483 - protein, 67 aa, Oryza sativa
  Clone ID: PAT_MRT4530_43486C.1.pep
MQTTHPEWTNPAAAGPQVFDGQRRGCRAQQFRGGAMASGKMDTPQQRLHLPKSKDYCQGKNQSISKD

SEQ ID NO: 142484 - protein, 56 aa, Oryza sativa
  Clone ID: PAT_MRT4530_43487C.1.pep
PPPASYRSNQRSNRDEEKSFPICTRGAMEEKGDWSSMVEKSERWPAAAAVRAIPAG

SEQ ID NO: 142485 - protein, 222 aa, Oryza sativa
  Clone ID: PAT_MRT4530_43488C.1.pep
MQSLLRRVYLAGSHGSAAKLLDRAASGVAQSGANLLSIKHLSSCSWIRPFGNSIVSGDSVHSHGFCVNTMPMRGLSTVGSAEVSVEEESSDSPGVEHPPRIKFKRPDKTARHIMNILNKEAVDKVRGEREIPDVQPGCIIQMRLQVPENKRRESTLKGIVIGRRNAGINTTFRLRRLVAGVGVESVFPLYSPNIKEIKVLDRKKVRRAKLYYLRDRMNALKK

SEQ ID NO: 142486 - protein, 1025 aa, Oryza sativa
  Clone ID: PAT_MRT4530_43489C.1.pep
MLREADERAAEGGRRVPLDGRRALLGGRRQEVSVFGLLGSSEVAGLAERPTTEILASRRPLVGFSNVIKKVDDIIDGGITPLACAAYNGSVTSMKTLLQAGANVQISKPIGKAIVADLTSSESMVQILLDSGANADAIDEDDVHTAARVTALRERMFNALENINYLLADICCKALRNDDKGKEVMCLKAALALNPQNERAESLLRHGPAAGRADTGPTPIGPGRSSEDATTATGKKMNPLPALASRLWEASIRKLKYSTILRGSVVPSGGTFDGPAAATGNAAGGDPITLTPSLSVSSSTSNTIYQYDDGDEDIDSVLDDVDTDDDDVDEASLGEPSHSDQLLPSGDFYQGDLRCDLPHGAGKYLWTDGSMYEGSWRGGRAAGRGKFSWSSGAIYEGDLAGGYMHGQGTYIGELGDTFAGLWANNLRHGRGTQAYVNGDVYDGHWRDGLQDGHGQYIWRGGHEYIGTWKAGEMHGRGTVIWADGDRYDGAWEDAKPKGQGTFRWSDGGMYIGLWCQESGETQGKGVYYPPSGGPAVPLPREPKGVITKLLEELEMSEGKTVSLLPSQKVLTWPGVEPVTKKPVWLPPEVAADQGMWRPPEVGADQGRRSSRRNNMSSDIDSLVEGEDGGEESRNDRSWVRTPSCMRAPTMPKPGKKQGETISKGHKNYELMLNLQLGIILDVPIIATHFSAERTMSLRGGGESAGSDSPCRREEAKSRTPRPQPGSAGERSAAASAEMSSRGGSKSCGGDSLQPGEAGEHGVAPSAAAVETSSEVAKVRGQAATPYSAAPFDESMLVQHSTGKAMGNREADVAAVGLGPKNSGLKICPARSLGRRRGGGREGAAGHAVDAVAEEEDAGHRAAAGSGGEGVSWRGGGRPRYTTADSLAFVAASLGKGRWRGGGGWRRWVAERSSLRRVIGAATLRDTVTPLLVPCYDLATAAPFPLLPCWSRSSSPVPTPSRGQLRLQRTTTVVVVVVAIPNLLTGRHYPERRSKNRVESKSATIKDQINWHAHTPKGKLLDLHWS

SEQ ID NO: 142487 - protein, 82 aa, Oryza sativa
  Clone ID: PAT_MRT4530_4348C.1.pep
MAKGWTARLTRRGGECGNGWEWRGFTGEVGEVEEEREAGFKNGIPAVSMQSQTREVYWGAESGQHALAPHLREAADRRLGRT

SEQ ID NO: 142488 - protein, 71 aa, Oryza sativa
  unsure (1)..(71): unsure at all Xaa locations
  Clone ID: PAT_MRT4530_43490C.1.pep
CKTSTTVVWPDLSVSXDNYDLGETLTTRLQPYKTLLCCALAIDTPLHGLLISPVQINPIPASKSKKQARTR

SEQ ID NO: 142489 - protein, 570 aa, Oryza sativa
  unsure (1)..(570): unsure at all Xaa locations
  Clone ID: PAT_MRT4530_43491C.1.pep
MNPLPALASRLWEASIRKLKYSTILRGSVVPSGGTFDGPAAATGNAAGGDPITLTPSLSVSSSTSNTIYQYDDGDEDIDSVLDDVDTDDDDVDEASLGEPSHSDQLLPSGDFYQGDLRCDLPHGAGKYLWTDGSMYEGSWRGGRAAGRGKFSWSSGAIYEGDFAGGYMHGQGTYIGELGDTFAGLWATNFRHGRGTQAYVNGDVYDGTCATACRXGHGXYIWRAGHEYIGLXKAGXMHARGTVIWADGDRSPPRXQGKGVYYPPSGGPPVPLPREPKGVITKLLEELEMSEGKTVSLLPSQKVLTWPGVEPVTKKPVWLPPEVAADQGMWRPPEVGADQGRRSSRRNNMSSDIDSLVEGEDGGEESRNDRSWVRTPSCMRAPTMPKPGKKQGETISKGHKNYELMLNLQLGIILDVPIIATHFSAERTMSLRGGGESAGSDSPCRREEAKSRTPRPQPGSAGERSAAASAEMSSRGGSKSCGGDSLQPGEAGEHGVAPSAAAVETSSEVAKVRGQAATPYSAAPFDESMLVQHSTGKAMGNREADVAAVGLGPKNSGLKICPARSLVLGS

SEQ ID NO: 142490 - protein, 241 aa, Oryza sativa
  Clone ID: PAT_MRT4530_43492C.1.pep
PRPVRSFDNTLVTKFFGLHCVKITGAIQKKVRFVIMGNLFCSNYSIHRRFDLKGSSHGRTTDKPIDQIDETTTLKDLDLNFIFRLEGSWYEDFCRQLDKDCEFLEQERIMDYSLLVGVHFKDRCKDSSSPDNETTQTALEDEERRKAPVKLGISMPSRVENVVKNPESESQLIGEPTGEFQDVILFFGIIDILQDYDISKKLEHAYKSMQYDPNSISAVDPKQYCKRFRDFIYRAFSEDLQ

SEQ ID NO: 142491 - protein, 772 aa, Oryza sativa
  Clone ID: PAT_MRT4530_43493C.1.pep
MNPLPPPASRLWEASIRKLKYSTILRGSVVPSGGTFDGAAAAAATGGDPVTLTPSLSVISSTSNTIYQYEDGDDDIDSVLDDVDTDDDDVDEASLGEPSHSDQLLPSGDFYQGDLRGDLPHGAGKYLWTDGSMYEGSWRGGRAAGRGKFSWSSGAIYEGDLAGGYMHGQGTYIGELGDTFAGLWANNLRHGRGTQAYVNGDVYDGHWRDGLQDGHGRYIWRGGHEYIGTWKAGEMHGRGTVIWADGDRYDGAWEDAKPKGQGTFRWSDGGMYIGLWCQESGETQGKGVYYPPSGGPAVPLPREPKEVITKLLEELEMSEGKTVSLLPSQKVLTWPGVEPVTKKPVWRPPEVAADQGMWRPPEVGADQGRNSMSSDIDSLVEGEDGGEESRNDRSWVRTPSCMRAPTLPKPGKKQGETISKGHKNYELMLNLQLGIRHAVGRQSAPASLDLKSSAFDPKEKVWTRFPPEGSKHTPPHQSCDFRWKDYCPLVFRTLRKLFDVDPGDYMLSICGDDALLELSSPGKSGSFFYFTNDDKYMIKTMKKAEVKVLLRMLPAYYKHVRSFDNTLVTKFFGLHCVKITGAIQKKVRFVIMGNLFCSNYSIHRRFDLKGSSHGRTTDKPIDQIDETTTLKDLDLNFIFRLEGSWYEDFCRQLDKDYSSSPDNETTQTALEDEERRKAPVKLGISMPSRVENVVKNPESESQLIGEPTGEFQDVILFFGIIDILQDYDISKKLEHAYKSMQYDPNSISAVDPKQYCKRFRDFIYRAFSEDLQ

SEQ ID NO: 142492 - protein, 49 aa, Oryza sativa
  Clone ID: PAT_MRT4530_43494C.1.pep
MGGTMNWATRIRVVLEAAQGFDCLEGIVCKNRDFFVRATHPHAKVACGA

SEQ ID NO: 142493 - protein, 77 aa, Oryza sativa
  unsure (1)..(77): unsure at all Xaa locations
  Clone ID: PAT_MRT4530_43495C.1.pep
PPVGAGXRRXXVWRXPSPXPXVGGSWRDPAACXXAHRGGXSRRPPAADXQSPXNRLSHPQXFIVAADPXKVEMEGKV

SEQ ID NO: 142494 - protein, 734 aa, Oryza sativa
  unsure (1)..(734): unsure at all Xaa locations
  Clone ID: PAT_MRT4530_43496C.1.pep
MNPLPPPASRLWEASIRKLKYSTILRGSVVPSGAAFDGAAAAATGGDPVTLTPSLSVSSSTSNTIYQYEDGDDDIDSVLDDVDTDDDDVDEASLGEPSHSDQLLPSGDFYQGDLRGDLPHGAGKYLWTDGSMYEGSWRGGRXAGRGKFSWSSGAIYEGDLAGGXYVNGDVYDGHWRDGLQDGHGRYIWRGGHEYIGTWKAGEMHGRGTVIWADGDRYDGAWEDAKPKGQGTFRWSDGGMYIGLWCQESGETQDKGVYYPPSGGPAVPLPREPKEQKVLTWPGVEPVTKKPVWRPPEVAADQGMWRPPEVGADQGRRSSRRNSMSSDIDSLVEGEDGGEETRNDRSWVRTPSCMRAPTLPKPGKKQGETISKGHKNYELMLNLQLGIRHAVGRQSAPASLDLKSSAFDPKEKVWTRFPPEGSKHTPPHQSCDFRWKDYCPLVFRTLRKLFDVDPGDYMLSICGDDALLELSSPGKSGSFFYFTNDDKYMIKTMKKAEVKVLLRMLPAYYKHVRSFDNTLVTKFFGLHCVKITGAIQKKVRFVIMGNLFCSNYSIHRRFDLKGSSHGRTTDKPLDQIDETTTLKDLDLNFIFRLEGSWYEDFCRRCILSHGPENTFFLVTDSSSPDNETTQTALEDEEKRKAPVKLGIGMPSRVENVVKNPESESQLIGEPTGEFQDVILFFGIIDILQDYDISKKLEHAYKSMQYDPNSISAVDPKQYCKRFRDFIYRAFSEDVQ

SEQ ID NO: 142495 - protein, 67 aa, Oryza sativa
  Clone ID: PAT_MRT4530_43497C.1.pep
FLQKYLSQWQHNEKWKTKASCRQNDLWLKNNDEARGDAEVFILLLAGLLQVISSGNLHCPRSNVESM

SEQ ID NO: 142496 - protein, 440 aa, Oryza sativa
  Clone ID: PAT_MRT4530_43498C.1.pep
MNPLPPPASRLWEASIRKLKYSTILRGSVVPSGAAFDGAAAAATGGDPVTLTPSLSVSSSTSNTIYQYEDGDDDIDSVLDDVDTDDDDVDEASLGEPSHSDQLLPSGDFYQGDLRGDLPHGAGKYLWTDGSMYEGSWRGGRAAGRGKFSWSSGAIYEGDLAGGYMHGQGTYIGELGDTFAGLWANNLRHGRGTQAYVNGDVYDGHWRDGLQDGHGRYIWRGGHEYIGTWKAGEMHGRGTVIWADGDRYDGAWEDAKPKGQGTFRWSDGGMYIGLWCQESGETQGKGVYYPPSGGPAVPLPREPKEVITKLLEELEMSEGKTVSLLPSQKVLTWPGVEPVTKKPVWRPPEVAADQGMWRPPEVGADQGRRSSRRNSMSSDIDSLVEGEDGGEETRNDRSWVRTPSCMRAPTLPKPGKKQGETISKGHKNYELMLNLQLGIR

SEQ ID NO: 142497 - protein, 112 aa, Oryza sativa
  Clone ID: PAT_MRT4530_43499C.1.pep
HASEITGAIQKKVRFVIMGNLFCSNYSIHRRFDLKGSSHGRTTDKPIDQIDETTTLKDLDLNFIFRLEGSWYEDFCRQLDKDCEFLEQERIMDYSLLVGVHFKDRCKDMFTL

SEQ ID NO: 142498 - protein, 56 aa, Oryza sativa
  unsure (1)..(56): unsure at all Xaa locations
  Clone ID: PAT_MRT4530_4349C.1.pep
VSLPVYGWKXINNRQTRHDDRHLLVTTHRATPYRDTGHHTLXLATGLLNFNHPGYT

SEQ ID NO: 142499 - protein, 55 aa, Oryza sativa
  Clone ID: PAT_MRT4530_434C.1.pep
SMMCDTVFCVFPVCSSSFDLTGRALLLFLFHLISVCISLLWEPVSLAAVGLGICE

SEQ ID NO: 142500 - protein, 267 aa, Oryza sativa
  Clone ID: PAT_MRT4530_43500C.1.pep
MSSKSSPRELTGKKKLTKHDDEALRFIELAENGTDPATIDASEAKVDDIIDGGITPLACAAYNGSVTSMKTLLQAGANVQISKPIGKAIVADLTSSESMVQILLDSGANADAIDEVMFEDPPIIAAAKRKQMNVVQLLLSSSTPIEGVDWSLNGIIAYTESVTFKAEDDVHTAARVTALRERMFNALENINYLLADICCKALRNDVSTTEWDRLRNLNLLYLSHSFHGQKPVLSSDAIVNMALVYQKQDKGKEVMCLKAALALAPPK

SEQ ID NO: 142501 - protein, 173 aa, Oryza sativa
  Clone ID: PAT_MRT4530_43501C.1.pep
MDRSVIVAACKVTRPDPQTDGRAYVVVVRGDRPQTPGPYIGRHEAHGHVAVRAKNRAGHTGSQLASPRGVVRGGTYVPAGLPRPRAADTGSPFAECCQPSRRCCAYAYSTGTRRLGPVASSRFGATRDEAMTPCTYAPSPRSRSTVAASGPGTREIVRFSGSPTNRQRDISRG

SEQ ID NO: 142502 - protein, 152 aa, Oryza sativa
  Clone ID: PAT_MRT4530_43502C.1.pep
MENGNLCRLLELGAVVLAERSCLQKYQFSHGDVVLFKCPSDHRELFVKRLIALPGEWMQLPGTPDIIKIPEGHCWVEGDNAACSWDSRSFGPEVDGIKDSMGGVRVSSASGMIGPPRIPLGLIKGRVAHVIWPPSKIGRVDTKMPENRISPL

SEQ ID NO: 142503 - protein, 491 aa, Oryza sativa
  Clone ID: PAT_MRT4530_43503C.1.pep
METSYREEEARRKASLLHCIFFFLLGALAMAAAIAVLHESSYWEWRCNRLTDIVVDGDDGDGPSSSEVVDGGGEWGMVRTRGAQFVVGGGRPFYVNGFNTYWLMVLAVDPSTRGKVTEVFRQAAAVGLTVCRTWAFNDGGWRALQKSPGVYDEEVFKALDFVVSEARKHKIRLILPLINNWDDYGGKAQYVRWAQAAAAGAGADAFFSDETVRGYFKSHVTAVLTRVNAYTGVAYRDDPTIMAWELMNEPRCASDPTGDTLQAWIAEMAFHVKSVDPAHLLGVGAEGFYGPSSPPARLRVNPNADVALAGADFVRNHRVLGVDFASVHVYPDTWLPAGATKEAQLRFATSWVEAHIADAEGALGGMPVLFAEFGVSTRGARAAFNATSRDAFIEAVYGAMLRSTRRGGGGAGALLWQVFPEGTDYMDDGYAVVLPRAAATAGIVAAHSRRLQSFNSRCAWSCRWGCNKRDNDTAETTTAEADVDVSFHHEL

SEQ ID NO: 142504 - protein, 84 aa, Oryza sativa
  Clone ID: PAT_MRT4530_43504C.1.pep
GEDHRHVRGGRGARERVRPGDERRRARELRPAAASGRHRQRGGLGGGGGGGNRARRDKAGGTGDGGGGRQEGRWRRRRAATGDA

SEQ ID NO: 142505 - protein, 157 aa, Oryza sativa
  unsure (1)..(157): unsure at all Xaa locations
  Clone ID: PAT_MRT4530_43505C.1.pep
RARPPTHATRRAAAGSQISRQARQRRVQQPPATWSCRASHGEDHRHVRGGXAGARERVRPGDERRRARELRPAAASGRHRQRGGLGGGGGGGNRARRDKAGGTGDGGGGRQEGRWRRRRAGSRISGFAVRGCFSGLGGAAIGGVRWPQLLRDHRDEL

SEQ ID NO: 142506 - protein, 78 aa, Oryza sativa
  unsure (1)..(78): unsure at all Xaa locations
  Clone ID: PAT_MRT4530_43506C.1.pep
GHGDAILLELAIPYPSVFSVVDSHGDAKWDIVTRADRTQKLLCSVSMDXIVINPTGTDAETPLVGGQTHGNPELVSLL

SEQ ID NO: 142507 - protein, 139 aa, Oryza sativa
  unsure (1)..(139): unsure at all Xaa locations
  Clone ID: PAT_MRT4530_43507C.1.pep
RXRXPPHXXIXSSRLPPXXRXXPLXQGXIPLPPXLXLHHXGXXSTSWXPHLVATLHLVVTXTWWXPPAXYPDXLXTXGGMGITVEENWKXLVEXPXGSSPIGXTNFFSWHGGNXGXXSMKLWCXGMXTXXXRXXFXLGT

SEQ ID NO: 142508 - protein, 263 aa, Oryza sativa
  Clone ID: PAT_MRT4530_43508C.1.pep
MGQLRVLVLGNNPLGGPIPPVLGQLQMLEELQVMAAELVSTLPLQLADLMNLSVLNLAYNKLSGNLPLAFARLQAMRVFRISSNNLTGDIPSSNSSVWTATCSLEISHQSLGVGSSGNSSNCSSGSAFCRLLSLENLDLSNNKLTGKLPDCWWNLQNLQFMDLSHNDFSGEISALGTSYNCSLHSPRPSFPVAIFTVLPYGTPHDQASTIVARADLLDTSCRGIPLSLAIMAFHAGTRVGLPPLMLHRASNSNQIWFRGGGST

SEQ ID NO: 142509 - protein, 109 aa, Oryza sativa
  Clone ID: PAT_MRT4530_43509C.1.pep
KTRKKGSWRAEEDALLTRLVAQHGPHRWSIISGAIPGRSGKSCRLRWCNQLSPAVQHRPFTPQEDALLAAAHARHGNKWATIARLLPGRTDNSVKNHWNSNLRRSCSNF

SEQ ID NO: 142510 - protein, 141 aa, Oryza sativa
  Clone ID: PAT_MRT4530_4350C.1.pep
MKLEVMPKQRAMEAEQREEAMEMSGLELWKHEKPASMVVFLPPPPPPPPLVPAAAAAAAAACGEEATLVPPLNFAMVDDGIFRSGFPAADNFRFLKSLNLRSIVYLCPEPYPETNAEFLAKNGIKLHQFGIEGRKEPFVTI

SEQ ID NO: 142511 - protein, 50 aa, Oryza sativa
  Clone ID: PAT_MRT4530_43510C.1.pep
EPWKQDKGSAGDDRDDFLTRHRIAKCDCLRGCELRLDSVVVGQDPTPNKT

SEQ ID NO: 142512 - protein, 65 aa, Oryza sativa
  Clone ID: PAT_MRT4530_43511C.1.pep
EEAKSQGDGLWSNYLDIEHVKTMCQGMPSDSWHGENMKHPILGNGLSHEDITEVPNTTNFLNAVD

SEQ ID NO: 142513 - protein, 111 aa, Oryza sativa
  Clone ID: PAT_MRT4530_43512C.1.pep
MARALGDAASDCNSARGGIFAKKSFAFGVIRYIISESLRLAPSPSPSTSFEANMEKVRRRALLSSSPLVPPLHVVNLPPSSLPSSTCLGFRMGKKEGERGCRRPYGGEAPL

SEQ ID NO: 142514 - protein, 229 aa, Oryza sativa
  Clone ID: PAT_MRT4530_43513C.1.pep
MARPLYPMMLESPQLRWAFVRKVYAILSIQMLLTIAVASVVVFVRPVALFFVSTPAGFALYIFLIILPFIVLCPLYYYYQRHPVNLLLLALFTAAISFAVGLTCAFTKGEVILESAILTAAVVVSLTAYTFWAARRGHDFSFLGPFLFAAVMILMVFALIQVFFPLGRVSLMIYGGLAALVFCGYIVYDTDNLIKRYSYDEYVWAAVALYLDVINLFLSLLTLFRASDS

SEQ ID NO: 142515 - protein, 214 aa, Oryza sativa
  Clone ID: PAT_MRT4530_43514C.1.pep
MGDVSLNPPINAEPLTKGDQFLDLMSDGWTNERHSLYISSMEASFMEQLYRHDHHGLDRNRSHAGGAIGFRVHREGVCDNLRSERNDAHAHDGGMSCFPENPWIRRFRPRDAGVNRKNDAVGFSVDDDESGTDMVRQRVRVHGREAKSCAGGILADKSTGCSIRKITRSDKKPAKTRSFVETERKIGEHGLGWNLAQLVVVMGTCAAASPQLTN

SEQ ID NO: 142516 - protein, 129 aa, Oryza sativa
  unsure (1)..(129): unsure at all Xaa locations
  Clone ID: PAT_MRT4530_43515C.1.pep
RRSDEVMHVLDGKILGNPDLIIDNYSDSILVACXLLAHKMGATHCTVGHALETTKSHYSDLYWKTTEDHYHFXCQYTTDLLAMYHADFIITSTFQEIAGNKDTAGQHESHMAFTMPGLYRDVHSIDATD

SEQ ID NO: 142517 - protein, 106 aa, Oryza sativa
  Clone ID: PAT_MRT4530_43516C.1.pep
SDWARFSTAPLLSPKLFAFRGPDVVVDGRICANPEPGHRLDTVDDRGSSRSPPPPNTDEIMVFLPFFRFGLGLPAGDFLRGLLHFYGINIHHLSPNSILQIAIFIH

SEQ ID NO: 142518 - protein, 142 aa, Oryza sativa
  Clone ID: PAT_MRT4530_43517C.1.pep
MAEQRAARERSGGRQGSARSREARGDDSGGKIGSRVRLPWRGGKFGCWMRLPAPAKVKVIGRAPVRRRVRKLVRHPVRRFPGQSRRRSLLLLARRAGDESDDTEEVTDTSASFATKEGVVAAKTDDVAARRPRTVAAAARCW

SEQ ID NO: 142519 - protein, 133 aa, Oryza sativa
  unsure (1)..(133): unsure at all Xaa locations
  Clone ID: PAT_MRT4530_43518C.1.pep
IXWVXWVFSKSVTAQXLGSGLKGLGVGAFSLXWTAISSFLFSPLISPFFATANIFVGFVLFLYVLVPIAYWGFDLYNAKTFPIFSSXLFMSNGTSYDITAIVXNDKFELDIDALQIXLAGINLSVFFALALWV

SEQ ID NO: 142520 - protein, 663 aa, Oryza sativa
  unsure (1)..(663): unsure at all Xaa locations
  Clone ID: PAT_MRT4530_43519C.1.pep
SRRRTAPSTPPGSQACAPPRPPFPRSIPPPELASPRAPPELSLDTPRSSCTLDEGRNGIILAVRGAGAXAGDESDDTEEAKDGGGGGAVLVTVDGDVELEMETLLKASAYILGAAGSSIVYMAVLDDGAVLAVRRIDSDDASPAAWREGWPSSTTRSSCGNVRPSNILLDADMEPLLTDLRIYRLIRGGGTLKPAAAAAPGQFGSKRSAKCLPDLSPPGARPLAGPSGSGDAAAQYQERSEPELMLSSNNHTLVYTCDNVRCSARTATTRSASSTACSAARGVYSSTPPERNCKAAMEAGDGRGGGAEEEEEEQVMSEVHLGCPPRFSGLYVSRFSFSSRPLGPSAGSDGGECSGVREQVAASSSSCGSPDAVTVDEDGDLVLDRRRRNRGRSDHVLTVQHGITSSLRSVGLQVWKAALLLTDFVLHKSFTSSEFNGVTAIEIGAGTGLVGLALARVAKKIFITDRGSDILDNCLANVQLNSSMLKFDEAKACVRELDWKMSWPPPVFKCDSSDPSSKYLWYTSEIEAAEKATTLFAADVIYSDDLTDLFFSIAKKLMSHGAEKVLYLTLEKRYNFSMDELDVVANGYKHFRSFFTVQDESGALDDNSCRPDFVGEQMDLAEVPQYIREYDRGKDLEMWKIMMMITMTAKHAQVPTAESYNHE

SEQ ID NO: 142521 - protein, 54 aa, Oryza sativa
  Clone ID: PAT_MRT4530_4351C.1.pep
PPVFILLFRRSILGRRRRSRRSALSRLGWQPGTSASASKCPRTHTAAQWSRLAA

SEQ ID NO: 142522 - protein, 153 aa, Oryza sativa
  Clone ID: PAT_MRT4530_43520C.1.pep
MVERWCGLVASMPSPAQRHAAGFVAKINDNSHSLPHLGRRGEKGKEAATLSLSLLAATLSRHCRASPSSVSLFLHGKIVFTCCPSWKERSGPPQRSRGHHFARVPAALSSLSLSPASCCCSPSSSPSARLLLPAFGEEDRGEKAGEGTLVQRR

SEQ ID NO: 142523 - protein, 26 aa, Oryza sativa
  Clone ID: PAT_MRT4530_43521C.1.pep
FYTYHQKFTELSFLGDAPSTHLIKPR

SEQ ID NO: 142524 - protein, 121 aa, Oryza sativa
  Clone ID: PAT_MRT4530_43522C.1.pep
MPRLLLFCLVSSQLAMTAVMGRPFPLFYGGGGGAAASIADAPTSSSSSDGGGGGGHLLHVYSLLESSFAESPMSSHHRNHSPFDRKFAGGKVILGGLAAAIFAAVFCYIRITRRKKIEPKS

SEQ ID NO: 142525 - protein, 726 aa, Oryza sativa
  Clone ID: PAT_MRT4530_43523C.1.pep
MRGRSCPTRSSPAPLPPLIAIGNIFAAHVTIVFLAGVRRRRAIGLPITILWAANQLGRWAATYALSKLALGSTPQELELVTLWGAFLLLHAAGPDNITAYSLEDNVLSTRQKVEMILQVSGAAFAMYKNIVIRSGSGTMVWISSFMFIMGIFKYWERAKAMQLANLENLRSSIKKKKETRRRRSLRNIRRPSSSKHDNDEEALLVAHGLLDITKGAFVDSSINEHQIPVYAGRRREIFPKSGWGMMYKVVDMELSLMYDILYTKAAMVHTWHGYAMRAASPFATSMAFMLFWFDSKQGQRMTDVLITYVLLGGTVLLDIIWLLRAVASTWTYSFLNDRPHLWVHHALLCSGKWRQLHRSIVSLDPSLILAKEPSSYRKWSGKIGQYNLLHECTRDKDQRTREYLSSVVKKVASEGMWMEYEYHNLRVEDMEEVEEEEKKKKEAEKKPKLLMMLPEHHNVENIRKLEEALDFLPEFQESILIMHIATDIVFMYTKFEQNAASSKSKDNVKMIKALSDYMMFLVAVRPTMLPGLKLRSLYEATKEALAKIWSKKESSRCSSRTRQKCLANILRCMENKKRGTRPDKSDNWRLGYRTRNWEPDYTTDLYNVSIVLSDGIKLADHLLQWLHGNCWVKFPECEYSYEAKFAQMFPKLREILNERPMSDHPDKWSQLLEHIFLEWVRLLINASVKCTRDSHAKQLSRGGELTTIVWILVEHAGLFRVDRQKR

SEQ ID NO: 142526 - protein, 123 aa, Oryza sativa
  Clone ID: PAT_MRT4530_43524C.1.pep
FFFVFFLFFRFCPFPFFFFFFLGRENLFFLQEDPKKRPPILALAIIKPWIGKFLNFNIPGKKSKGFDGVFFFRGGCQKKGKLKLELQRWLREVPILRLGHQGWGGGSPWPTGNKGERVPLGEQ

SEQ ID NO: 142527 - protein, 735 aa, Oryza sativa
  Clone ID: PAT_MRT4530_43525C.1.pep
MPGWMVRTVFLLNSWVIRALVVFSFAAHVTIIFLAGVRRRRAIGLPITILWAANQLGRWAATYALSKLALGSTTQELELELVTLWGAFLLLHAAGPDNITAYSLEDNVLSTRQKVEMILQVSGAAFAMYKNIVIRSGSGTMVWISSFMFIMGIFKYWERAKAMQLANLENLRSSIKKKKETRRRRSLRNIRRPSSSKHDNDEEALLVAHGLLDITKGAFVDSSINEHQIPVYAGRRREIFPKSGWGMMYKVVDMELSLMYDILYTKAAMVHTWHGYAMRAASPFATSMAFMLFWFDSKQGQRMTDVLITYFLLGGTVLLDIIWLLRAVASTWTYSFLNDRPHLWVHHAFLCSGKWRQLHRSIVSLDPSLILAKEPSSYRKWSGKIGQYNLLHKYTHDKDERTRDYLSYVVEKVASEDISMEYEYHNLRGIHISVDFKKNLLDCIWDYMYLAYPVEDVEEKKKEKEEKKKKKKKGTAEKKPDPPMKPAEHHNIENIRKLEEALDFLPEFQESILIMHITTNVVFMYTESEQNAESSKSKDNVELRSLYEATEDALAKIWSKKESSRCSSRSRQKCLADILRCMENKRREKRPDKSDNWRLGYRTRNWQPDYTTDLYSISIVLSDGIKLADHLLQWLHRNYWVKFPKSEYSYEAKFAQMFPKLRKILNGRSMYDYPDKWSRLLEHIFLEWVRLLINASVKCTRDSHAKQLSRGGELTTVVWILVEHAGVFRVDRQKR

SEQ ID NO: 142528 - protein, 100 aa, Oryza sativa
  unsure (1)..(100): unsure at all Xaa locations
  Clone ID: PAT_MRT4530_43526C.1.pep
ESPATTRRSAAARRGRGIVDGVEEKLDLGEEKLAATREVMSXYGNTRSSTIFLAMEEMRRRSEERGMATAGEGLEWGMLIAFGPGLTXETMLLRALPRNN

SEQ ID NO: 142529 - protein, 179 aa, Oryza sativa
  Clone ID: PAT_MRT4530_43527C.1.pep
MPLLHISLPPHRLLLVAGGRRRRRRLLLLPPSPRRVCVRAAASVELEVAAAAGEYGLPFPSERAAHHRELAAAAAAVERACRLCVDRKLGTGVSCSRFPGNTLGEMFNEQLIFMKHALSRSSNADNSSNVLVESISSAVADNVSNTDSLLTHDDVLRAIDKGGKDSASFDSNPATYWVG

SEQ ID NO: 142530 - protein, 445 aa, Oryza sativa
  Clone ID: PAT_MRT4530_43528C.1.pep
MPLLHISLPPHRLLLVAGGRRRRRRLLLLPPSPRRVCVRAAASVELEVAAAAGEYGLPFPSERAAHHRELAAAAAAVERACRLCVDRKLGTGVSCSRFPGNTLGEMFNEQLIFMKHALSSKCECLTFHCEEKARMLIVHVDRSRDHCFQLQRSFPSIPLVAEEDSASLRSSNADNSSNVLVESISSAVADNVSNTDSLLTHDDVLRAIDKGGKDSASFDSNPATYWVLDPIDGTQGFSKVDDTLYVVGLALVVNGKVVAGVMGSPNWASDTIANRKDDSIASRYDRGILMIAHEGCGAWTKRLYDEFGQFTTSKDTWNRCFVDSCSVVHKARYCLSDNQTWNMIPLSVVFNSTTDESKPRDENELLTSYVFSGSLCKYLTVAYGRASVFVLKARTKSLKVTDWRGEPLDLEADLTGRRDIYPHGGILITNGVLHNKLAELIKANY

SEQ ID NO: 142531 - protein, 546 aa, Oryza sativa
  Clone ID: PAT_MRT4530_43529C.1.pep
MVVQLMLFFHDKFMAPMAEEPLPFVLIMIIILLLLVLLHYYLSASTRRSSAASKSNDDVLPPSPPRLPVIGHMHLVGSNPHVSLRDLAEKHAADGFMLLQLGQVRNLVVSSPRAAEAVLRAHDHVFASRPRSAIADILAYGSSNISFSPYGDYWRKARKLVAAHLLSPKKVQSLRRGREEEVGIAVAKLHKVAAAGAAVDMRELLGSFTNDVLCRAVCGKSSFRREGRNKLFMELAAGNADQYAGFNLEDYFPSLAKVDLLRRVVSADTKKLKEKWDSVLGDIVSEHEKKSSLRRDDQVQMDDDDQEEQESDFVDILLDRQQEYNLTRHNIHAILMDMFAAGTDTSYIALEFAMSELIRKPHLMTKLQDEVRKNTTTKMVSEDDLNNMPYLKAVVKETLRLHPPVPLLLPRLSMAQCNANGYTIPANTRVIINVWALGRDARCWENSEEFMPERFMDSGDTIDNVDFKGTDFQFLPFGAGRRICPGMNFGMASVELMLSNLMYCFDWELPVGMDKDDVDMTDQFALTMARKEKLYLIPRSHVIKIT

SEQ ID NO: 142532 - protein, 142 aa, Oryza sativa
  Clone ID: PAT_MRT4530_4352C.1.pep
PRASAKAMPKPPFPPVKGPAKPKNLAPQKTFLIPRAQKPNPPPKHPGSHPILCPVFWGPFPQEPIFLVEALSNPDLPLFFNLLFAYFINPLGFSWKVNVCPLFKIGCKPVYLFLQVKIVPFKKKKKKKKKKKKKTPKKKKTQ

SEQ ID NO: 142533 - protein, 76 aa, Oryza sativa
  Clone ID: PAT_MRT4530_43530C.1.pep
WFFNNFGFLFIFFLFFLLFYLFNFFVTSKITTYTIRFNYTKDQQIHLLTLYIKETNTIFKSDNYRPEKYPKIWADL

SEQ ID NO: 142534 - protein, 96 aa, Oryza sativa
  unsure (1)..(96): unsure at all Xaa locations
  Clone ID: PAT_MRT4530_43531C.1.pep
MRVTERLRALLSWSGRLWXVKWRWATRLGEVEGELGDATPSPRVEQVVLSVPLSLSAVXLNAGRVERWRRRWTGRGQAREAARWAQTTATPFGVVP

SEQ ID NO: 142535 - protein, 45 aa, Oryza sativa
  Clone ID: PAT_MRT4530_43532C.1.pep
LVAAFRSMCMVISSLYWLGGSQFPVWSMPTRSCAIDVLLWIAICV

SEQ ID NO: 142536 - protein, 99 aa, Oryza sativa
  unsure (1)..(99): unsure at all Xaa locations
  Clone ID: PAT_MRT4530_43533C.1.pep
XXPFYAXLXXAXPXNVXMTXMAQXXQAXMXQQQMMMAXAXXRRXGAPRTQVFXHHQLQQQHLQANPANPXFGNPFAAAAAAHHPYGAAAAAGNGYTGLI

SEQ ID NO: 142537 - protein, 80 aa, Oryza sativa
  unsure (1)..(80): unsure at all Xaa locations
  Clone ID: PAT_MRT4530_43534C.1.pep
XSQXNARXSCEELLHAHRRVADXGARAAGQAEGEPREDGRAEEDEPRXTIXRRAFAGWNASATKTRQRGTRRGRTPXRLA

SEQ ID NO: 142538 - protein, 189 aa, Oryza sativa
  Clone ID: PAT_MRT4530_43535C.1.pep
MARPRRGGGRGASSGFTANGNDARLPLSLLPIASVHEKFFMCCMDGCDDDVVASATGLGALACVAHPGVLRHAQRLNRAYLLTPAVAAGLLAAVLLISLVDFSTFSASSQTLLPRPFRARAYDPGQNRDAAAGAVHGAPHSRAQWNAALGCPAFAEKHRSWSPNPVALQDPEATPCSELLVHVPPRSRA

SEQ ID NO: 142539 - protein, 124 aa, Oryza sativa
  unsure (1)..(124): unsure at all Xaa locations
  Clone ID: PAT_MRT4530_43536C.1.pep
MEPHPEDDLMNENNPRPLDENDLRPPTRPTRLGPYXTNIKKDENEIKEMAXKKINDLCEINDSDTGLAPPSLWDLFSDMHMMHYELPLQVARFTNIISPITHYAKYAIIAYQNTKIVVRLVLPV

SEQ ID NO: 142540 - protein, 37 aa, Oryza sativa
  Clone ID: PAT_MRT4530_43537C.1.pep
SDTKVIRYLLEVKMFNTRYLQTMPYITRHFVIHDSTN

SEQ ID NO: 142541 - protein, 367 aa, Oryza sativa
  Clone ID: PAT_MRT4530_43538C.1.pep
MQPSSRDTVAGGGGEGTQDDFFDQMLSTLPSAWADLGGGGGGAAGKSPWEVDPAAAAAASQVFDESALLASRLRHHQIGGAGGGGGEKPVMLQLSELHRQAGGGEEDGSGAFSPLPLFTDRTNVPPREEMEGGFKSPNAAAGGEHALFNGFGVHGGSGGAGQPPFGQLRRERIAERMKSLQELVPNANKTDKASMLDEIIDYVKFLQLQVKVLSMSRLGGAAGMAPLVASMSSEGNSNGSSNGGGGKASKGGTGGEGGGGGGGGGGGGTGGGMRVTEQQVAKMMEEDMGTAMQYLQGKGLCLMPISLASAISSATSSASLLSRPSIRHAGAPPQTMLDAAGPTSPAAMSNGDDPRHAKADGGAGGTQ

SEQ ID NO: 142542 - protein, 174 aa, Oryza sativa
  Clone ID: PAT_MRT4530_43539C.1.pep
VDRFNRGGSTRDPETLDKLHRPFLATVSAEAERRRLERTDRTSTSFSPLVPLAKYTLSRVPVLILALSVSDPNVPLGPVVDESYTLSVLLDSGSADISATTPWGMGRHPLCPPPAHRRFVRRPRSLVAVVRRSAAAQTRCLSRPPPAHRAHSVKKKGKRRGGEENKEEKRTMCN

SEQ ID NO: 142543 - protein, 42 aa, Oryza sativa
  Clone ID: PAT_MRT4530_4353C.1.pep
MATSSLLTKIKEEETRIQQRRKLHSEQFAPFHADTSPIRNMR

SEQ ID NO: 142544 - protein, 54 aa, Oryza sativa
  Clone ID: PAT_MRT4530_43540C.1.pep
MLYFNARLRFACSPAPLRYRAGQPPPSPVVGVDLDATSAKPGKNIAEGPPVNGL

SEQ ID NO: 142545 - protein, 154 aa, Oryza sativa
  unsure (1)..(154): unsure at all Xaa locations
  Clone ID: PAT_MRT4530_43541C.1.pep
MGTHKWAGGGPKFFQAPDKTPKGGEPLGGTGGPNPFGGINPQKGPQXPPGPKAPKKKRKTPRPFYPSEQSSQLIKPRGLERGGGLAPGGWSGTQGPPPPCGETPPPGSRAEELVLSGNALSPAPIFPPPGPPGAKGPPPLGPRGKGKRPPRGGG

SEQ ID NO: 142546 - protein, 102 aa, Oryza sativa
  Clone ID: PAT_MRT4530_43542C.1.pep
LEGIVRPPALSCLQKRQDAELALTRAGPCRAVDGTAGPTRLRFLRLDCRATARPHSEVLSCYRTGRACAIPPKGSNRRLLDYCHWLGTRLGLYRINRSGYRN

SEQ ID NO: 142547 - protein, 122 aa, Oryza sativa
  Clone ID: PAT_MRT4530_43543C.1.pep
MAETGTKGDTDSLPPAGCVAGWAGSTVTSRRGRHAAPLWATSPVWASPRVPHLPPCFVRQRYSCRWRSPRIVPRPSEQRRRGFAGHVKLTDEKAMYVPPLPIPRARARSCKALGILGGPVLD

SEQ ID NO: 142548 - protein, 127 aa, Oryza sativa
  Clone ID: PAT_MRT4530_43544C.1.pep
MAAAARFLAVLLLVLAVAAASSAAASLAGGGDRHLQLGMLSTGGECRGTVGECLEGGDVDGEEGELGSASGEAHRRVLAGRGYISYQSLRRDSVPCSRRGASYYNCRPGASANPYHRGCSRITRCRG

SEQ ID NO: 142549 - protein, 491 aa, Oryza sativa
  Clone ID: PAT_MRT4530_43545C.1.pep
MANPPPLVVLLQLLLLPLLSTAITLPLYRNLPPVPADTDHPHHHPLSRLAAASLARAAHLARPRPRSRQGTAPPPSVRASLYPHSYGGYAFTVSLGTPPQPLPVLLDTGSHLSWVPCTSSYQCRNCSSLSAASPLHVFHPKNSSSSRLIGCRNPSCLWIHSPDHLSDCRAASSCPGANCTPRNANANNVCPPYLVVYGSGSTAGLLISDTLRTPGRAVRNFVIGCSLASVHQPPSGLAGFGRGAPSVPSQLGLTKFSYCLLSRRFDDNAAVSGELILGGAGGKDGGVGMQYAPLARSASARPPYSVYYYLALTAITVGGKSVQLPERAFVAGGAGGGAIVDSGTTFSYFDRTVFEPVAAAVVAAVGGRYSRSKVVEEGLGLSPCFAMPPGTKTMELPEMSLHFKGGSVMNLPVENYFVVAGPAPSGGAPAMAEAICLAVVSDVPTSSGGAGVSSGGPAIILGSFQQQNYYIEYDLEKERLGFRRQQCASSS

SEQ ID NO: 142550 - protein, 42 aa, Oryza sativa
  unsure (1)..(42): unsure at all Xaa locations
  Clone ID: PAT_MRT4530_43546C.1.pep
IKKXITESRGRKYTKXXSLLLATMYTHTNTTLASYPVYTYCT

SEQ ID NO: 142551 - protein, 292 aa, Oryza sativa
  Clone ID: PAT_MRT4530_43547C.1.pep
MEVKGSEEDLDPLSGDLPPQAAVSGSRAIGGGPHRLSAPRSHGSTAGDDGRGGASKLPLLLAWIRRRRGWEWRIRRILPLPHGSCRLFGPLSCGSTVDGDGRGGSGDLFPSRTYPRLLSTRLSRGSVGGGDGRGGSGDLFPSRTDPIVSSRRRRQEGRKRQPPHCCQFRPLPHRALLSLPYRKIGYGTASEALACKLQFIFVRRDYFNEEPFLRILLEHYQSSIEMTRREFLNGYWKLYLLRALTLEPCYDGPTNGGEACRLKLPRILEAVWACGLVDVWKVYILPLPYWII

SEQ ID NO: 142552 - protein, 152 aa, Oryza sativa
  Clone ID: PAT_MRT4530_43548C.1.pep
RRGAAWTLSPVSAREEPEGAAPGGLEKERRARQSSSRRAMHKIACTPGNEKALVEREGAGSSREMAHKKQMYRHRHRSSSASVGWIPRRFSGQFPLPGRRPRRVVPLPKRGPCSGRNPAGREPNQEEPREKLSPPPSPSRSLSFWVKVNNLP

SEQ ID NO: 142553 - protein, 78 aa, Oryza sativa
  unsure (1)..(78): unsure at all Xaa locations
  Clone ID: PAT_MRT4530_43549C.1.pep
NQQAVAQMPPLVLHFDDGADMSLNGGNYLTTFPNEGLVCMAIMSSSDVSIIGNIMQANFXFLHDLDSMTLSFQATDQC

SEQ ID NO: 142554 - protein, 230 aa, Oryza sativa
  unsure (1)..(230): unsure at all Xaa locations
  Clone ID: PAT_MRT4530_4354C.1.pep
MAVLGVGAAVRLRLRVLGRHLRLRGRRRTRRRRGGGGVEDEEEGGREAVVLVSGMGGSVLHARRRSNPRFDLRVWVRILRADADFRKYLWSLYNPDTGYVEPLDDDVEIVVPEDDHGLFAIDILDPSWFVEILLLSVVYHFHDMIDMLVDCGYKKGTTLFGYGFDFRQSKRIDKVIVGLXAKLETAYKASGGKKVNIMSHPLGVPLLSSVRSVPHNASVHLCGWRWHSSY

SEQ ID NO: 142555 - protein, 449 aa, Oryza sativa
  Clone ID: PAT_MRT4530_43550C.1.pep
MAMRGDPKQRRASASAPHGGAAHHVADKLRRHSTFLLLLLLLWFALSLYLFLSATPPPPRPAFLPSTSTPRPALRIYVYDLPARFNRHWVAADARCATHLFAAEVALHEALLAYAGRAARPDDATLFFVPVYVSCNFSTDNGFPSLSHARALLADAVDLVRAQMPYWNRSAGADHVFVASHDFGACFHPMELFVIIHFELGVNAKSNLALGQEDVAIADGIPEFLKRSILLQTFGVQGTHVCQEADHVVIPPHVPPEVALELPEPEKAQRDIFAFFRGKMEVHPKNISGRFYSKKVRTELLQKYGRNRKFYLKRKRYGNYRSEMARSLFCLCPLGWAPWSPRLVESVLLGCIPVIIADDIRLPFPSVLQWLDISLQVAEKDVASLEMVLDHVVATNLTVIQKNLWDPVKRKALVFNRPMEEGDATWQVLRELEILLDRSQRRHVESWKR

SEQ ID NO: 142556 - protein, 123 aa, Oryza sativa
  unsure (1)..(123): unsure at all Xaa locations
  Clone ID: PAT_MRT4530_43551C.1.pep
DCPTVGSTHINIRLLFLVVVRDRXTAVRGLRRHRRPRPPPPTAATPSPAATAAAVRAVVRHVRRRHLRCHRPRPPPASAPSPAVAYXHRSPRRRPPRPPPLAQALQKNEQRMGEGGGRRKRRM

SEQ ID NO: 142557 - protein, 41 aa, Oryza sativa
  Clone ID: PAT_MRT4530_43552C.1.pep
VVIGADAFSRGSVKSSAPLTHSTNRFVHPTHMSKYHIAHFG

SEQ ID NO: 142558 - protein, 143 aa, Oryza sativa
  Clone ID: PAT_MRT4530_43553C.1.pep
IPHPKPARDASAAAAPGVPHPPPLHLPGRRPRRPPLGPPLAASILHVAPARTLQCLPVPIRLLPPRQAPLPPPAPPLPTPLPPVPPVAPSPLLAAPVLVRPLLARRLAPRSPVRRAPPPLLVAATSPAQALRPPPGHLRTRWT

SEQ ID NO: 142559 - protein, 76 aa, Oryza sativa
  Clone ID: PAT_MRT4530_43554C.1.pep
MAVADERWLAADETKALLRASLPDTGHHLNQQGGAGAGTTWWRWRQNATREFKVELAPPAVVFQKVKCKLATADKN

SEQ ID NO: 142560 - protein, 64 aa, Oryza sativa
  Clone ID: PAT_MRT4530_43555C.1.pep
AKIYPTVALCYYWLVLVSNKPWLSGNSYPAQNSTVNEIIKYFCSLYVEFGIFFQIPSVQIISST

SEQ ID NO: 142561 - protein, 133 aa, Oryza sativa
  Clone ID: PAT_MRT4530_43556C.1.pep
MGMVEAELGEQWQQRRMSLGMGAEAMGWEGHRCRPPHRLAYIQSPSPSKLRKTTHTSFGSKLKCDGHYQLHPAVAANLHVELDPAIESTVAEWSPRRSCRVPSSEMAAVCDLDSIATTGGLMGMAFHRCSARL

SEQ ID NO: 142562 - protein, 419 aa, Oryza sativa
  Clone ID: PAT_MRT4530_43557C.1.pep
MVLFCAKFFYREVFKNINNASTSLVRVYARLGRLGDARKMFDGMPVKTVVSWNVLLDGIVRASDLDAAWEVFVEMPERNVVSWNTVIAGFVRHGWVQEAVDLFAEMTVVYGLAPDEATMVGFVSAVRDMGVLGIGRCAHGYVIRREFSLDGALGVALINMYTRCGSMGDAFRCFSSVASKNVEQWTSVIGGFAAHGHPEMALRLFTEMRQLGIEPNGVTFLAVLNACSHGGLVNEGFKYFNLMRSMGIKSTMQHYGCLIDLLGRAGFLEEAFELASSLPEDPGLVIWSSLLAACQSHGNVEMAEVAARKLAHAEPRHGSSYVLLSNTYARAGQWEDLKRTRRKMEEYGVMKQPGLSWIELDGRVHSFVSADKLHTESEDIYQMLEDLKVNLVSAGSEPEISTILVQVRGMNKVVFLPPS

SEQ ID NO: 142563 - protein, 70 aa, Oryza sativa
  Clone ID: PAT_MRT4530_43558C.1.pep
ILLKPNQVEFLRFKWTQPQQPKCQSKFLHPGKLATQTARSHDVHVGRRVIYPGRPTSRWSYLSTYLPRAV

SEQ ID NO: 142564 - protein, 273 aa, Oryza sativa
  Clone ID: PAT_MRT4530_43559C.1.pep
LVFYVRVDGLADLWVAEEDAYCFCVDALAAARLLAGGLDATARALRRDPALGALWGALTDGLVRRALADLCARSGVPLGRTLLSLPTDAMAAILSRLEDGEDLMVVECTCTALRRLVAELDAVLWKPMYEDVVDARRFAGVVRADDESPEMSWKERFTAAIHRPIPINIGPHAATVNLAWLLDLEAAIVEMWHNDHVPVPPQHPVVPLSDDDRSDSPELPPESVPRRRRRQWRAMPRDFSHGRALVHGGHNNQRRGGAGAVHSPSSRYRWSRR

SEQ ID NO: 142565 - protein, 77 aa, Oryza sativa
  Clone ID: PAT_MRT4530_4355C.1.pep
MVELTIKEHHQNPPRIMRDRVGNYEGIGEDEEFGRKERGWLKVRDDEWDPHAIEREHTCPGWGARRRKDGLSPRERE

SEQ ID NO: 142566 - protein, 1331 aa, Oryza sativa
  Clone ID: PAT_MRT4530_43560C.1.pep
MARGSALLDGSVLPPSRIVSERQAGLPRRFMPESATGREIVTLGEGRPAPCYPGRSVFFLPFAMAGLVPPFSSFFMEVLEFYDLQMAHLTPNAVMTLAIFAHLCEMFIGVRPSLRLFRWFFTVQPVSPPSVVGGCYFQPRGPVLNRYIPCVLRKKWDDWKSDWFYTPLADEACLRLPSQPPAQASSWRAPVDLGDGYDAILDRLAGLRSQGLTGAMVYGDYLRRWIAALQRRARGAWEYTGSEDYMRTHQGVRWDWAPKDFKIVVQRVLNLSSVEASLIPQGVLPLCSDPDRASILTIMQAVGASEERAPRGHDGAGGSRRGEQSTPGGGRASGPRDEGPGSSRPTDARGKRKQEGTPSPSPPRGGGAARASSRRPEGAVPSSQPEGERKKKRLRKMGGTEPSRGNLISPPRWSFNRPPRSEIPSRPSRHSKSGQSEAEDPAAAEARRRESDRREAADRLREAEEAAWEAARARQAEEATREEARLRQAEATTSSEATRETDRQEAADRLREAEEAARVAVRARQAEEAAREEARLRQAEATTTSKAARDEAAGASLGPTPSGDAQDKPGPGDVPESGTSIGGPSRAASSPRRLFPTPSVAPLSAEPLLQALAVANTTVLDGLSAQMEALQAERAELDAAWARVEEGRRSVEAMVEVGRNAHRRHASELEARRKVLREIAKEVEEERGAALIATTVMNEAQDTLRLQYGSWEAELGKKLDAARGVLDAAAARGRRAAETEAASRRREEALEARAMVLEERACVVERDLADREAAVAIREATLAAHEAACAEEESALRLREDALTERERALEEAEAAAQRLADSLSLREAAREEQARRNLEGARAERAALNQRAAELEAQARELDARARSGGAAAGENDLAARLAAAEHTIADLQGALDSSAGEVEALRLAGEVGPGMLRDAVSRLDRAGRQAGLWGGRTVKYAANQGGLAQRLSEMAGTLQRLPEELEGTIKSSSRDLARGAVELVLASYQARDPDFSPWTALDEFPPGTEDGARAQVRDAADHIVHSFEGSAPRLTFALNSDEEGDDGGVGGSGDEAGDPGASDLNKGSCPGPSPQMARVGAGAWGDPHVETGQAGSVVTEGPDVALMVAPQALLVARGSEGRAPPSLLQVVEVISVKLILISLTVHGGPRGPQGELGWENRFRAVDEEERRFPGCSAWCGSVRPEHRWQLLDPRIVVLLEDVEGLGFKASEDFRIGALHLAVASGGLGRLMDLLGVELTRSASPDQVDRNIESCRPIETLSKGFANQGARGGVGSAFAFMDIGKKLDALFPRNALQEDSVSRAPIEGPFYQHVAFGDALDAFTPFAVLG

SEQ ID NO: 142567 - protein, 1045 aa, Oryza sativa
  Clone ID: PAT_MRT4530_43561C.1.pep
MARGSAPLDGSMLPPSRIVSERQAGLPRRFMPESATGREVVALGEGLPAPHYPGRSVFFLSFAMAGLVPPFSIFFMDILEFYDLQMAHLTPNAIMTLAIFAHLCEMFIGVRPSLRLFRWFFTVQPVSPPTVVGGCYFQPRGQGLTGAMVFGDYLRRRIAPLQRRARGAWEYTGPEDYMRTHQGRKWDWDPEDFRMVVQRVLNLSSVEASLIPQGVLPLCCDPERANILTIMQEVGASGERAPRGHDGAGGSRRGEQSTPGGGRASGPRDGGPEGSRPADAREKRKQEARSCRAPPPPARHPKSGGSEVEETATAEARRREADQREAADRLREAEEAAQEAVRVRQAEEAAREEARLRRAGESVREAEAARARQAACQAPDPTPPEATTTSEATHDEAAGAPLGPDPSGDAWDEPASGDAPESGTSIGGPSRAAPTPRRLSPLPSAAPLSAESLLQALAAANSTVLDGLSAQMEALQAERAELDAAWARVEEGRRSVEAMVEAGRKAHRRHASQLEARRRDLAEIAREVEEERETALIATAVLDEARDDLRLQYGSRAAELEEKLDAARGVLDAAAARERRAAENEAASRQREEALEARATALEERARALDAKERDLADREAAVAAREATLAAHEAACAEEESALRLREDELTERGRALEEAEAVAQRLADSLFLREVAREEQARRNLEGARAERAALDQWAAELEARAKELDARAHSGGAAAGQGDLAARLAAAEHTIAELQGALDLSAGEVEALRLASEVGPGMLRDAVSRLDRAGRQAGLWGRRYAKYAANQGGLAQRLSEMAGTLKRLPEELEETIKSSSRDLARGAVELVLARYQARDPDFSPWAALEEFPPGTEDGARAQVRDAADHIIHSFEGTAPRLAFALDSDEEGGDDGADDSDDKEGARGSEGRAPSSLFQIVEVVSAKLILISLGIHGDPRGPQGELRWEDRLRAVDEEERRFPGCSAWRGSVRPEHRWQLLDPRVAVLLEDVVGLGFEALEDFRVGALHLAVASGVGGGGEAELDAHVFAVVTEEFTSCHDRK

SEQ ID NO: 142568 - protein, 517 aa, Oryza sativa
  Clone ID: PAT_MRT4530_43562C.1.pep
MASHAVTDALLLPRSEGAVAGAVDFRGRPASRASTGRWSAAMFVLGVEIAERFAYHGVSANLISYLTGPLGESTAGAAAAINLWSGVATMLPLLVACVADAWLGRYRTIVLASLLFVVSMGMLTLSSALPAFHGDGGGCSYTSKSLSCAPSTAQVAIFYVSLYLVALAEAGHKPCAQAFGADQFDQNDAKESVSRSSFFNWWYFGMCSGTVMTTMVSSYIQDNIGWGLGFGIPCLVMAFALAMFLLGTRNYRYYVSTQSSPFARLARAFVALIRGSKDEYVLIDFLSDVDSSTFFTKQAATLDRRIGESFRVPPAALQTFISVTIIAFIPVYDRAFVPVARRFTRASSGITMLQRIGTGLVLALAAMVVAALVEARRLGVARDAGMVDDPKAALPMSLWWMVPQYVLFGLSDVFAMIGLQEFFYDQVPDALRSLGLAFFLSIFGVGHFFSSFIISAIDGATKKSGASWFANNLNRAHLDYFYWLLAGLCAVELVAFVFVSRVYVYKKRVPHNGCDVM

SEQ ID NO: 142569 - protein, 1731 aa, Oryza sativa
  unsure (1)..(1731): unsure at all Xaa locations
  Clone ID: PAT_MRT4530_43563C.1.pep
MGSVFGIDDFVFPPGQVFRFGNLDFITNDFGKISLLDSDSNQSGRGQISAPFGIPNSAEVYPKVISAELVSNHSDKIQSTPTRPDQDDGAYPPILMKLPDDLAAVFTTRAXLPVGLGGIRLQPRSGLAPAKSASYSSHSAQFRRTNWTATLAPPASSHDQPRTXSTMTSAIATTTATSTTSTRALKITTPLSTSVFSWLTTRRKNSAKPEKQKGDXTKTMIAASVLVNSASVRTPTGSRVPHLRSQDYHQPSLSIAGAGSNCRSRGHEERSVHSPPERHRERRVERPRSPPRRRPVDLRDTINQRRAARGYAPHHSPNRYDDDVDGVAAFSSDLRRVDWPAGFKPTRIKKYDGTTNPESWLTVYGLAIRAAGRDSKAMANYLPVALADSARSWLHGLPHGTIGSWAELCDHFIANFHGTFECPGTQFDLYNVIQKSGESLRDYIRRFSEQCNKISDITDDVIIAAFTKGIRHEDLVGKFGRKPPRTVKQMFEKANEYAKDEDAIIASKQSSTTWKPKKDTPTTGGSGSTNRKDRKRKPEELVATTTHSSRQRSRVNTFDKIMNSQCPHHPNSNHATKDCFVYKQIAEQYAKNARKASDGDQSASKKKDDDDDAPTGFQDHRKELNHIFGGPLAYESKRKQKLTEREINAVQPDTPQYLRWSETTIKFDRSDHPDRVVHPGRYPLVLDPVVRNVKLRRSLIDGGSALNILFAKTLDDMQIPRTELKPSNAPFHGVIPGLSAMPLGQITLPVTFGTRENFRTENVCFEVADFEKPYHAILGRPALAKFMAVPHYTYMMMKMPSPRGVISLRSDIKQAITCDKESCEMAQTREITIAREDIRLAATTASEGEVPATKMPKSGESDAKTKKIPLDPSDSTKKAVIGAELDYIFAWKPSNMPGIPRKVIEHSLHVKEDAKPIKQRLRRFAQDRKDAIKEELTKLLAAGFIKEVLHPDWLANPILVRKKMGQWRMCVDYTDLNKFCPKDPFGLPRIYQVIIKSDCLKTSFITPFGAYCYITMPFRLKNAGATYQRMIQRCFSTQIGRNVEAYVDDVVVKTKQKYDLITDLEETFASICAFRIKLNPDKCIFGVPSGKLLGFMVSHRGIQANPEKINAILNMKPPSSQKDVQKLTGCMAVLSRKLSHYFQGHSVTLVTSFPFGDILHNREANGRITKWAIELISLDISFKPRTSIKSQALADXSPSGPSAKKICPRRRWSIGPCXFDGSKRLSGAGAGVVLIFPTRERLSYVLWIHFSASHNVAEYEALLHGLRIAISLGIQRLIVRGDSQLVVNQVMKEWSCLDDNMTANRQEVRKLKDKFDGLELTHVLRHNNEAADRLANFGSKREAAPSDVFVEHLYEPTVPRKETIEATDAQNVELPQDKDEAERISRRSRLYIIHETELYKKSPSGILQRCVSLEEGRQLLKDIHSGIYGNHAAARTIVGKAYRQGFFWPTAVSDADKIVRTCEGCQFFARQTHLPAQELQTIQLSWPFAVWGLDMVGPFKKAVGGYTHLFVAVDKFSMWIEAKPVITITADKARDFFINIVHRFGVPNRIITDNGTQFTGGVFKDFCEDFGIKICYASVAHPMSNGQVERTNGMVLQGIKARVFDRLHPYADKWVEQLPSVLWSLRTTPSRATGQSPFFLVYGAEAMLPSEVEFESLRFRNFSEERYGEDRVDDLNRLEKAREAALIQSARYLQGLRCYHNRNVRSRAFLVGDLVLRKIQTTRDKHKLSPL

SEQ ID NO: 142570 - protein, 144 aa, Oryza sativa
  Clone ID: PAT_MRT4530_43564C.1.pep
MRVPRGRPASVSESASPALALSYPPLRRPSELIPRCIGSRLWAFLMGVGELGGAPCGFRASALLRLLAVAGCAATPVGRRTPGLAQSRRSGTTAAVRAPGGSPPGRAGARAPPRGRPAPPGGTDRCFLTSNVFLPFVAVLNFLS

SEQ ID NO: 142571 - protein, 1888 aa, Oryza sativa
  unsure (1)..(1888): unsure at all Xaa locations
  Clone ID: PAT_MRT4530_43565C.1.pep
MPRHLSPPSSLPWFLLSLSYFPWFFFRRENAAEAEHEHHAGGRSWRSSCGCSPPIKRTGKDGGGDGCRRCGAVDGAPAVVKTTTEGGNVAAAGDRGGAARGRWGRSWEAGDERRRAGRCGNGRRGGLTSLAAALGGLEAILIVARSDDSSGPHPPSAAAAFPPSVVVFTTGGGAPLDGATSSAPVASSIPPSSLDRRREAAGAPPASSGHQRGGAVTGLLRNIMAHQAFWFGSLDFITNDFGKISLLDSDSNQSGRGQISAPFGIPNLAEIYPKIISPELASNHSDEIQSTLTRPDQDDGAYPPILMKLPDDLAAVFTTRASSPRRTRPDPASAPIQPSSREVGIILHPLGTVSTEQLDGYLSSPGVDSRPTEIIEYDYFGYRYDYRNLDDFDEDFEDNYTPLYFGIFMADNEMEEQRKAREVEEQRVQQEAERRRLEEERQAQERERLQREQQERERAAKEAEDRRQHALDARRLARELIGQQDVEGTTVFRTPQKNAVAAITLLDTLLKEDALNQANHVVNILNQIKTMITASVPVNSASVRTPTGSRVPPLRSQDYHQPSLSVVGAGSSRRSXGRPVDLRETINQRRTAXRGYVPHSPDRYDNDVDGIAAFTSDLRRVDWPAGFKPTGIEKYDGTTNPESWLTVYGLTIRAAGGDSKAMANYLPVALADSARSWLHGLPRGTIGSWAELRDHFIANFQGTFERPXSGESLRDYIRRFSEQRNKISDITDDVIIAAFTKGIRHEDLVGKFGRKPPKTVKQMFEKANEYGKAEDAITASKQSGTTWKPKKDMPAAGGSGSNNHKDHKRKPEELVATTSPSSRQRSHVNTFDKIMNSQCPHHPNSNHFAEQYVKNARKPSDGDQGTSKKKDDEDDAPTGFQDHRKELNHIFGGPLAYESKRKQKLTEREINAVQPNTPQYLRWSEIAIKFDRSDHPDRVVHPGRYPLILDPVVRNVKLRRTLIDGGSALNILFAKTLDDMQIPRTELKPSNAPFHGVIPGLSATPVGQITLPVTFGTRENFRTENVCFEVADFETAYHAILGRPTLAKFMAVPHYTYMMMKMPGPRGVISLRSDIKQAVTCDKESCEMAQTREITLDQEEIRLAVTMASEGELPATKMPKSGESDAKTKKIPLDPSDPNKTANNKDIFAWKPSDMPGIPREVIEHSLHVKEDAKPIKQRLRRFAQDRKDAIKEELTKLLAAGFIKEVLHPDWLANPVLVRKKTGQWRMCVDYTDLNKSCPKDPFGLPRIDQVVDSTAGCELLNFLDCYLGYHQIRLKESDCLKTSFIMPFGAYCYITMPFGLKSAGATYQRMIQRCFSTQIGRNVEAYVDDVVVKIKQKDDLITDLEETFASIHAFRMKLNPEKCIFGVPSGKLLGFMVSQRGIQANPEKINAILNMKPPSSQKDVQKLTGCMAAPSRFVSRTGEWGMPFFKLLKKTDNFQWGPEAQKAFEDLKKLLTTPPVLASPHPQEPLLLYVSATSQVVSTVLVVEREEEGHIQKVQPPRLKLSHYFQSHSVTVVTSFPLGDILHNREANGRIAMWALELMSLDISFKPRTSIKSQALADFLAEWTECQEDMPEEKMEYWTMHFDGSKRLTGTGAGVVLISPTGERLSYVLWIHFSASHNVAEYEALLHGLRIAISLGIRRLSVGCYQVMKELSCLDDNMAAYRQEVRKLEDKFDGLELTHVIRHNNEAADRLANFGSKREVAPSDVFVEHLYEPTVPRKETIEAMDTQGTIVGKAYRQGFFWPTAVSDADKIVRTCEGCQFFARQIQLPAQELQTIPLSWSFAVWGLDMVGPFKRAVGGYTHLFVAINKFSKWIEAKPVITITADKARNFFISIVHRFRVPNRIITDNGTQFTSGAFKDFCEDFGIKVCYASVAHPMSTWHTP

SEQ ID NO: 142572 - protein, 1379 aa, Oryza sativa
  Clone ID: PAT_MRT4530_43566C.1.pep
MGSISGIDDFAFPPGQAFRFGSLNFITNDFSKISLLDSDSNQSGRDQVPVPFGIPNSAEAYSKIISSESASNHSDEIQSTPPRPDQDDGSYPSILMKLPDDLDAVFTVKTSPTQRSRRAPASALIQSRSREVGVILQLLGTVSTEDLDGYLSSPGVSSRPTEILDYDDHDDLDNFDDSYEDNYTPLFFGVFMADNETEEQRRAREADQDRARQEAEHRYDNDVDGVAAFTSDLRRVDWPAGFKPTGIEKYDGTTNPESWLTVYGLAIRAAGGDSKAMANYLPVALADSARSWLHGLPRGTIGSWAELRDHFIANFQGTFERPGTQFDLYNVVQKSRGSLQDYIRRFSEQRNKISDITDDVIIAAFTKGIRHEDLVGKFGCKPPKTVKQMFEKANEYAKAEDAITASKQSGTTWKPKKDTPTAGGSGSNNRKDRKRKPEELVATTSPSSRQRPRVNTFDKIMNSQCPHHPNSNHVAKDCFVYKQFAEQYVKNARKPSDGEQGTSKKKDDEDDASTGFQDHRKELNHIFGGPLAYESKRKQKLTEREINAVQPNTPQYLRWSEIAIKFDRSDHPDRVVHPGRYPLVLYLVVRNVKLRRTLIDGGSALNILFAKTLDDMQIPRTELKPSNAPFHENVCFEVADFETAYHAILGRPALAKFMAVPHYTYMMMKMLGPRGVISLRSNIKKAVTCDKESCEMAQTREITLDREEIRLAATMASEGEVPATKMLKSGESNDIFAWKPSDMPGIPREVIEHSLHVKEDAKPIKQRLHRFAQDRKDAIKEELTKLLAAGFIKEVLHPDWLANPVLVRKKTGQWHMCVDYTDLNKSCPKDPFGLPRIDQVVDSTAGCELLSFLDCYSGYHQIRLKESDCLKISFITPFGAYCYITMPFGWKNAGVTYQRMIQRCFSTQIGRNVEAYVDDVVVKTKQKDDLITDLEETFTSIRAFRMKLNPEKCIFGVPSGKLLGFMVSQRGIQANPEKINAILNMKPPSSQKDVQKLTGCMAALSRIAISLGIRRLIVRGDSQLVVNQVMKEWSYLDDTMTAYRQEVRMLEDKFDGLELTHVLRHNNEAADRLANFGSKQEAAPSDVFVEHLYEPTVPRKETIEAMDTQGVSMIEADWREPFIKFLSKQELPQDKNEAEQISRRSRLYIIHETDMYKKNPSGILQRCVSLEEGRQLLKDIHSGICGNHAAAWTIVGKAYRQGFFWPTAVSDADKIVRTCEGCQFFARQIHLPAQELQTIPLSWPFAVWGLDMVGLFKRAVGGYTHLFMAIDKFSKWIEAKPVITITADKARDFFINIVHRFGVPNRIITDNGTQFTGGAFKDFCEDFGIKICYASVAHPMSNGQVERANGMILQGIKARVFDRLHPYAGKWVNQLPSVL

SEQ ID NO: 142573 - protein, 1672 aa, Oryza sativa
  Clone ID: PAT_MRT4530_43567C.1.pep
MPVGLFPVVTATKTSGAATTGSVSSRRRARRAAAVARRSAATPSSAPLTREDQRGGPDARIGIERRRNGRRATHATEGASSSGVSPQHGRGDQPSVPPVGGVGCRAFVASLRNVRWPPRFRPTIAEKYDGSVNPAEFLQVYTTGIEAAGGDDRVKKRTYTQYSEGMMSHFAHTFSGLSSPQHHTMHPCTRGDLRVQGGVRHNRMLEKIASKEPQTTAELFQLADRVARKEEAWTWNPSGSGVATSAAPGSAAQTGRRDRRRKKRSAHSDDEGHVLTVEGASRATRKGRPASDKKKEAGAPSRERPTGKWCIVHNTSLHDLADCRAVKSLAERTRKWEEERRQERREGKSPAVPSGNRRSEAKQKAPVEDIDGGDDDLGFQEPGATIATVDGGACAHVSRRSLKAMKRELLAAAPTHEATRRARWSEVALTFDQTDHPPCVARGGQIAMAPGMVLWPSQPIIGVTPGHTWPLGHIDLPVTFGGSVNFRTERVNFDVADLSLPYNAVLGRPALVKFMAAVHYAYLQMKMPGPGGPISVHGDLKVALACMEQRADHLAAASKPEGGDERLGTSVPAAPRQRMITCDEVPEDALVSFLRANADVFAWRPADMPGVPREVIEHRLAVRPGARPIRQKVRRQAPERQAFIREEVARLLEAGFIREVIHPEWLANPVVVPKANGKLRMCIDYTDLNKACPKDPYPLPRIDQIVDSTAGCDLLCFLDAYSGYHQIRMAREDEEKTTFITPIGTYCYTTMPFGLKNAGPTFQRTTRISLGSQIGRNVEAYVDDLVVKTRDQETLLSDLAETFESLRSARIKLNPDKCVFGVPAGKLLGKLRDVQCVTGCMAALSRFISRLGEKALPLFKLLKRSGPFTWTEEAERALTQLKAYLSSPPVLIAPEPDEPLLLYLAATPQVVSAALVVERDEDNPHSAHPHPVLAWPGREQGGEAPEPNGGPRPPTTGAGPLPACQTVPGAPDPQDGPGATAGRPHLSPSDPEVNPVPTRPGREQGEEAPEPNGGLRPPTTGVGPLPACPTMPGAPDPQDGTEATVGRPRLSSSDPEVVGTEDECAPRGRLDEERPRDAAPGEEDRPHRKVQRPVYFVSEALRDAKTRYPQAQKMLYAILMASRKLRHYFQAHRVTVVTSYPLGQILHNREGTGRVVCMEYRCSDPQMDAYVRQVRRMERHFDGIELRHVPRRDNTIADELSRLASSRAQTPPGAFEERLAQPSARPDPLGETDAPDRPPRPVGVQASGPEGSAPSSLRLIAWIAEIQAYLTDKTLPEDREGSERVQRISKRYVLVEGTLYRRAANGILLKCIPREQGVELLADIHEGECGAHSASRTLVGKAFRQGFYWPTALNDAVDLVRRCRACQFHAKQIHQPAQALQIIPLSWPFAVWGLDILGPFRQAPGGFEYLYVAIDKFTKWPEAYPVVKIDKHSALKFIKGITARFGVPNRIITDNGTQFTSELFGDHCEDMGIKLCFASPAHPRSNGQVERANAEILRGLKTKTFNILKKHGDSWIEELPAVLWANRTTPSRATGETPFFLVYGAEAVLPSELTLRSPRATMYCEADQDQLRRDDLDYLEERRRRAALRAARYQQSLRRYHQRRIRARSLCVNDLVLRRVQTRAGLSKLSPMWEGPYRVISVPRPGSVRLAAGDGTELPNPWNIEHLRRFYP

SEQ ID NO: 142574 - protein, 123 aa, Oryza sativa
  Clone ID: PAT_MRT4530_43568C.1.pep
KGKKNGGKGQLGEKKNGPKNKHFPGGGDTHGQTRGDTISPRQKKNKVLGEGSERLQIGTLNGWPGGPRLKRKGGIRGEPGWGGKKRAREKKKRVLHKKHCAGKSRDFRGGPRISKTPLFFSPK

SEQ ID NO: 142575 - protein, 142 aa, Oryza sativa
  Clone ID: PAT_MRT4530_43569C.1.pep
LEDPLPLSWPFAVWGLDMVGPFKKAVGGYTHHFVAVDKFSKWIEAKPVITITTDKARDFFINIVHRFRVPNRIITDNGTQFTGGVFKDFCEDFGIKICYASVAHPMSNGQVERANGMVLQGIKARVFDRLCPYAGKWVEQLP

SEQ ID NO: 142576 - protein, 873 aa, Oryza sativa
  Clone ID: PAT_MRT4530_4356C.1.pep
APPALPLAARRPPAPPPRPPPRPRSASPTPPPPPAGRPSAPAAASGARSTAPSRRSRRASSSPTASGTSSTSPGFRARSRTSSPSSGSRARSARGAAPRPSRRARPPCSGSGRDPKTKAFSKEGFGQQPKTDPKEKAKAETRDWLNNVVSDLENQIDNFEAEVEGLSIKKGKQRPPRLVHLEKSITRHKAHIKKLESILRLLDNDELSPEQVNDVKDFLDDYVERNQEDFDEFSDVEELYSTLPMEKVEALEDMVSLAPSSLVKGVASVSTTAVLSTKSSVATSPTQATVSAAPSLSVSQDQAEETASQESNPESAPQTPPSKVGSQPSVPVVPTTISTSTAAVSVSAETISSPVRPIVPTTTAAVLPASVTARSAPENIPAVTSAPANSSSTLKDDDNMSFPPRRSSPAVTEIGLGRGITRGLTSQGLGSAPISIGPVSGNGSVSALTDLSKRNMLNTDERINSGGISQQLISPLGNKAQPQQVLRTTDTISSDSSNTNESTILGGRIFSPPVVSGVQWRPQNTAGLQNQSEAGQFRGRPEISADQREKYLQRLQQVQQQGSLLNVSHITGISQKQFPSQQPNPLLQQFNSQSSSISSQAGIGLGQVQVPESGHTKSEEQQQSFAEDVSVESVATAGANKHMSEDDTKIPFSNPSASITEGTQLSRDPDLPAGQPLQPGMSSSGVGVIGRRSVSDLGAIGDNLSVASASTSHDLLYNLQMLEAAFHRLPQPKDSERVKNYIPKHPAVTPASFPQIQAPVVSNPAFWERMGGDSLSTDLLFFAFYYQQNTYQQFLSARELKKQSWRFHRKYNTWFQRHVEPQVTTDEYERGSYVYFDFHVIDDGTGSGWCQRIKNDFTFEYNFLEDELSVQTN

SEQ ID NO: 142577 - protein, 714 aa, Oryza sativa
  Clone ID: PAT_MRT4530_43570C.1.pep
MECENGHVAAAANGSSLCVAKPRADPLNWGKAAEELSGSHLDAVKRMVEEYRRPVVTIEGASLTIAQVAAVASAGAARVELDESARGRVKASSDWVMNSMMNGTDSYGVTTGFGATSHRRTKEGGALQRELIRFLNAGAFGNGDDGHVLPAAATRAAMLVRINTLLQGYSGIRFEILETIATLLNANVTPCLPLRGTITASGDLVPLSYIAGLVTGRPNSVAVTPDGRKVDAAEAFKIAGIQHGFFELQPKEGLAMVNGTAVGSGLASMVLFEANVLGVLAEVLSAVFCEVMNGKPEYTDHLTHKLKHHPGQIEAAAIMEHILEGSSYMMLAKKLGELDPLMKPKQDRYALRTSPQWLGPQIEVIRAATKSIEREINSVNDNPLIDVSRGKALHGGNFQGTPIGVSMDNTRLAIAAIGKLMFAQFSELVNDFYNNGLPSNLSGGRNPSLDYGFKGAEIAMASYCSELQFLANPVTNHVQSAEQHNQDVNSLGLISSRKTAEAIDVLKLMSSTFLIALCQAIDLRHLEENVRSAVKGCVTTVARKTLSTSATGDLHKARFCEKDLLQAIDREAVFAYADDPCSANYPLMQKMRAVLIEHALANGEAERNVDTSVFAKVATFEEELRVALPREVEAARAAVENGTAAKANRITECRSYPLYRFVREELGTEYLTGEKTRSPGEEVNKVFVAMNQGKHIDALLECLKEWNGEPLPIC

SEQ ID NO: 142578 - protein, 49 aa, Oryza sativa
  Clone ID: PAT_MRT4530_43571C.1.pep
MSIAAASDLDASTYASSSLLLVTYEFRVTRFIIFKRCDELGRTGLAPIQ

SEQ ID NO: 142579 - protein, 1160 aa, Oryza sativa
  unsure (1)..(1160): unsure at all Xaa locations
  Clone ID: PAT_MRT4530_43572C.1.pep
MEEERQAQXREQLQREQQERERAAKDAEDRXQHALDAGRRARELIGQQDVEXKTMIAASVPVNSESVRTLTGSRVPPIRSQDYRQPSLSVVGAGSSRRSRGHDKRSIHSPPERHRERGVERPRSPHRRRPVDLRDTINQRRAARGYVPHHSPDRYDDDVDGVAAFTSDLRRVDLPAGFKPTGIEKYDGTTNPESWLIVYGLAIRATGGDSKAIANYLPVALADSARSWLHRLPRGTIGSWGTSERSGTQFDLYNIVQKSGESLRDYIRRFSEQRNKIFDITDDVIIAAFTKGICHDDLVGKFGRKPPRTVKQMFAKANEYAKAEDAITASKQSGTTWKPKKDTPTTGXSGSSNHKDRKHHSSSXFGTRENFPTENICFEVADFETAYHAILGRPALAKFMAVPHYTYMMMKMPGPRGVISLRSDIKQAVTCDKESCEMAQTHEITLAREEIQLAASTASEGEVPTTKMPKSGESDAKTKKIPLDPSDPTKTVVIDIFAWKPSDMPGIPREVIEHSLHVKEDAKPIKQRLRRFAQDRNDAIKDELTKLLAAGFIKEVLHPDWLANPVLVRKKMGQWRMCVDYTDLNKSCPKDPFGLPRIDQVVDSTAGCELLGFLDCYSGYHQIQLRESDCLKTSFITPFGAYCYITMPFGLKNAGETYQRMIQRCFSTQIGRNVEAYVDDVVVKTNQKDDLIMDLEETFASIRAFRMKLNPEKCIFGVPSGKLLGFMVSHRGIQANPEKINAILNMKPPSSQKDVQKLTGCMAVLSRSKRLSGAGAGVVLISSTGERLSYVLWIHFSASHNVAEYEALLHGLRIAISLGIRRLIVRGDSQLVVNQVMKEWSCLDDNMTAYRQEVRKLEDKFDGLELTHVLRHNNEAADRLENFGPNPFKKAVGGYTHLFVAVEKFSNWIEAKPVITITADKARDFFINTVHRFGVPNRIITDNGTQFTGGVFKDLCEDFGIKICYASVAHPMSNGQVERANGMVLQGIKARVSDRLHPYAGKWVEQLPSVLCSLRTTPSRATGQSPFFLVYGAEAMLPSEVEFESLRFRNFSEERYREDWVDDLNRLEEVREAALIQSARYLQGMRRYHNRNVRSRAFLVGDLVLRKIQTTRDRHKLSPLWEEPFIISEVIRPGSYRLKREDGTHIDNSWNIEHLRRFYA

SEQ ID NO: 142580 - protein, 1749 aa, Oryza sativa
  Clone ID: PAT_MRT4530_43573C.1.pep
MVNTRSNWNGPNPPDNNNRGSLVDRTQQEFLRVRPPVFSSTTNPVEASDWLHAIEKKLDLLQCTDQEKVSFASHQLHGPASEWWDHFRLNRTTDEPITWLEFTAAFRKTHIPSGVVSLKKKEFRSLTQGSRSVTEYLHEFNRLARYAPEDVCNDEERQEKFLGGLNDELSYPLMVGDYPDFQKLVDKAIRQEDKYNRMEQKKRRIAQFKTQQGNNQKPRLTLGPQPMSQGGSSSVVRPQRQFFNNNAGNNIRNQAPRPVAAPAQQQPAKREQGSKPVVCFNCGDPGHYADKCPKPRRVKVVPTQNNSAVPASKARVNHVAAAEAQDAPDVILVREYPDVFPDDLPANELAEVKRQVDDLLQKGYIRPSSSPWGAPLKGATVFSKIDLRSGYHQLRIKEEDIPKTAFTTSFLGLAGYYRRFIENFSKIAKPMTRLLQKDVKYKWSEESLEAKPTLIDQVREAQINDPDIQEIKKNMRRGKAIGFLEDEHGTPCAAVVPAVAVAREDRRRHRQVAAVLVRPFAAVGTRRSFVAVDNPKVAAASFSSPSSSVPSPPPFWSPVCSPRCPLRAGALRWCRGAAVRRRVSAARAVFFAEPPPSSVMTNVPSPGASTLAPARDECLETLILTGRGEAVLPPSRIVSERQAGLPRRFMPESATDREIVSLGEGCPAPRYPGRSVFFLPFAMAGLVPPFSSFFMDVLEFYDLQMAHLTPNAVMTLAIFAHLCEMFIGVRPSLRLFRWFFTVQPVSPPSVVGGCYFQPRGPVLNRYIPCVLRKKWDDWKSDWFYTPLADEARLRLPSQPPTQASNWRAPVDLGDGYDAVLDRLAGLRSQGLTGAMVFGDYLRRRIAPLQRRARGAWEYTGSEDCMRTHQGVRWDRAPEDFKIVVQRVLNLSSVEASLIPQGVLPLCSDPDRASILTIMQAVGASEERAPRGHDGAGGSRRGEQSTPGGGRASGPRDGGPGSGRPADARGKRKQEGTPPPSPPRGGGAARASSRRPEGATPTSQPEGERKKKRLRKMGGTEPSRGNLISPPSEIPSRPSRHSKSGQSEAEDPATTEARRRESDRREAADRLREAGEAAQVAVRARQAEEAAREEARLRQAEAATTSEAARDEAAGVSLGPTPSGDAQDKPGPGDIPESGMSIGGPSRAASSPRRLFPTPSVAPLSAEPLLQALAVANTTVLDGLSAQVEALQAERAELDAAWARVEEGRRSVEAMVEVGRKAHRRHVSELEARRKVLGEIAKEVEEERGAALIATTVMNEAQDTLRLQYGSWEAELGKKLDAARGVLDAAAARERRAAETEVASRRREEALEARAMALEERACAVERDLADREAAVAIREVTLAVHEAACAEEESALRLREDALTERERALKEAEAAAQRLADSLSLREAAQEEQARRNLESARAERAALNQRAAELEAQARELDARARSGGAATGDSDLAARLAAAEHTIADLQGALDSSTGEVEALRLAGEIGPSMLRDAVSRLDRAGRQAGLWGGRTVKYAANQGGLAQRLSEMAGTLQRLPEELEGTINSSSRDLARGAVELVLASYQARDPDFSPWTALDEFPPGTEDGARVQVRDAADHIVHSFEGSAPRLAFALNSDEEGDDGGVGDSGDEAGDPGSSPQMARVGASAWGDPHVETGQAGSVVTEGYGPPLSGGPRSALDGEDMTLVAGMDRPLLPPPVTPPCLSGGSGGGRSCHSGTGGVPCPRFLLTSHSVRELKKLRGGLGLFGSDLFEHAVVPHAPLNA

SEQ ID NO: 142581 - protein, 55 aa, Oryza sativa
  Clone ID: PAT_MRT4530_43574C.1.pep
QEVGDRMLRRGVKKGTRHVDSLKVDDVEDHCERRGRTRWTNAWVILENPSRDPAG

SEQ ID NO: 142582 - protein, 96 aa, Oryza sativa
  Clone ID: PAT_MRT4530_43575C.1.pep
VASTAYVPILTQLALLASINVHAVTSHDSLKCHWCTQFPDDCRAMQTSYVVPGTRASSSMMKMGDARCQTWCNMPPWSTVQLSSWWFLWMQNVGDM

SEQ ID NO: 142583 - protein, 331 aa, Oryza sativa
  Clone ID: PAT_MRT4530_43576C.1.pep
MAEVQSVQALASSLAALPPEFVRSEHERPGATTFRGGDAPEIPVIDMAAPESAARVAEAAAEWGLFQVVNHGVPAAAVAELQRVGREFFALPQEEKARYAMDASSGKMEGYGSKLQKDLEGKKAWADFFFHNVAPPAMVNHDIWPSHPAGYREANEEYCKHMQRLARKLFEHLSTALGLDGGAMWEAFGGDELVFLHKINFYPPCPEPELTLGVAPHTDMSTFTVLVPNDVQGLQVFKDGHWYDVKYVPDALIIHIGDQIEILSNGRYKAVLHRTTVDKDRTRMSWPVFVEPPPEHVVGPHPQLVTDGSPAKYKAKKFKDYRHCKINKLPM

SEQ ID NO: 142584 - protein, 64 aa, Oryza sativa
  Clone ID: PAT_MRT4530_43577C.1.pep
QKHFLTLSMRTLGRRCLSSPMTFFVFLLFSFFSSLSLFLFLHPFYPFFNLIYLLEKIRLTTEDV

SEQ ID NO: 142585 - protein, 56 aa, Oryza sativa
  Clone ID: PAT_MRT4530_43578C.1.pep
QHLFLPPASKPMPPPHSLMQPPSMPQPLSPMSPLPMLPPPSPMPSPLSPMRPPPPL

SEQ ID NO: 142586 - protein, 391 aa, Oryza sativa
  unsure (1)..(391): unsure at all Xaa locations
  Clone ID: PAT_MRT4530_43579C.1.pep
MSGSSADPSPSASTAGAAVSPLALLRAHGHGHGHLTATPPSGATGPAPPPPSPASGSAPRDYRKGNWTLHETLILITANRLDDDRRAGVGGAAAGGGGAGSPPTPRSAEQRWKWVENYCWKNGCLRSQNQCNDKWDNLLRDYKKVRDYESRVAAAAATGGAAAANSAPLPSYWTMERHERKDCNLPTNLAPEVYDALSEVLSRRAARRGGATIAPTXAATTARAAAAAAAAALAAEASRRAAAAPPSRPSPPPXPPPQPPPSSLQLPPAVVAPPPASVSAEEEMSGSSESGEEEEGSGGEPEAKRRRLSRLGSSVVRSATVVARTLVACEEKRERRHRELLQLEERRLRLEEERTEVRRQGFAGLIAAVNSLSSAIHALVSDHRSGDSSGR

SEQ ID NO: 142587 - protein, 266 aa, Oryza sativa
  unsure (1)..(266): unsure at all Xaa locations
  Clone ID: PAT_MRT4530_4357C.1.pep
MPISKLDAPLAGVHEGFKRGPRGDVDDAVARLGLLRFDSNEDDFPMAASSARSRALSSSLGMDNGVWRCSWEEEKARLGGVEQAKEAAMWAQGEGNMAQGEGNKAGFRSVPREPSTPRWLTVHRRAQTWPSRAVPEQAARRQRPTARRRCDRVWEGEKQKGEETTVLTEQTRRREVGGVAGGEEETVRSFGSSASSSFLRSSCSTEGWTGNRRNRRSGWWRLXAPTRDGRSCDGSGTRRERSGGRGERRRGRRCVGREEGVRGPFL

SEQ ID NO: 142588 - protein, 416 aa, Oryza sativa
  unsure (1)..(416): unsure at all Xaa locations
  Clone ID: PAT_MRT4530_43580C.1.pep
MDVDSRTIWKVVGWQRFVVVDEPGSHLXLQFLCTLKEIEDGISFRFFHKEHKLTXKGLSTLLCFHDACKIDLRKGISGFEKNRFWEDISDALICKKPRTNDIHNPTLRLMHNWIAMTLFPXLRPIRENELIIMFDMARKIKDAPVKCMIRXWLESIRFTAPVECTSLITLIANGLGVISNDQIAYISTPHPYVDENYLVQGHILMHGVDGSLIFFFPGCTNEILLPNAGYHLYNCCELTIPLXTIEKSRACVSYRDTRNMARNEREGSTSSTPVQMYEANRQPTGDAPGWSQAPRHSTGGSTWQSASESRWQAPHDIHXGNLNTHSPRSSGMPPSPDWWHSSSSRWDLGEITRRMDTLDMQTGEIQHSLKEHIVQMQGWQQNADAQFTNINNLMQXQHDDLQAYFRFQGFNPYQGP

SEQ ID NO: 142589 - protein, 102 aa, Oryza sativa
  Clone ID: PAT_MRT4530_43581C.1.pep
RQGVPSTRSSRRFCGRWRPPTTRWRRYATSCPASWSPPTASACGWHPWTATPPPWSPPPPPPACAAASSAPPAAFARGWRPWTAAPPPRPLPPPPPAMMSPT

SEQ ID NO: 142590 - protein, 72 aa, Oryza sativa
  Clone ID: PAT_MRT4530_43582C.1.pep
DGDWGPVVIATVLVRAGHAGAVFQLRLHGGSWASGTMRHQRGRRPRPRLSSTSASSPSSSSHRVHIYAGKSA

SEQ ID NO: 142591 - protein, 69 aa, Oryza sativa
  unsure (1)..(69): unsure at all Xaa locations
  Clone ID: PAT_MRT4530_43583C.1.pep
NXMMPLLCLGDFLIRRVVIKFDVCEYFIPLRVVIKFXDFFCHWVPFVTPGVHMSVCCFSVTSXITSKFE

SEQ ID NO: 142592 - protein, 62 aa, Oryza sativa
  Clone ID: PAT_MRT4530_43584C.1.pep
GYCSLHSHVEHISRFPSCHSVWADYILPLCVATMCTVLVYMWCPLTLEVFMSITKCPLAEAL

SEQ ID NO: 142593 - protein, 77 aa, Oryza sativa
  unsure (1)..(77): unsure at all Xaa locations
  Clone ID: PAT_MRT4530_43585C.1.pep
FCFFFFIFFFFFFFFCFQNISLFIICFDHYLVACNTTTVFSYLLLANPFWASTGXXXXYFTSLAQPFTFTQTSPHTP

SEQ ID NO: 142594 - protein, 91 aa, Oryza sativa
  unsure (1)..(91): unsure at all Xaa locations
  Clone ID: PAT_MRT4530_43586C.1.pep
MAEPNPQVEREVEVEEVRTPNLVYWEFVQEAAAXRCICLSGVLALVMDHSGAFRPGVYPVKFSVKGFWPXLYGRFHGLSLXLLHFVDRQDG

SEQ ID NO: 142595 - protein, 98 aa, Oryza sativa
  Clone ID: PAT_MRT4530_43587C.1.pep
MKNTVALVLAVLFLLIADLMIASALGRDVLDLPEDSNISKRHIKRSHSGSSMNGQKPGFSEDKGFVLLKPTTRPIYLPPCASTASLHPSRGTKREKLC

SEQ ID NO: 142596 - protein, 58 aa, Oryza sativa
  Clone ID: PAT_MRT4530_43588C.1.pep
FQDNSDRAHLFDHVVNISLGPNEDRDLISALHAVNDIYCRYCQHILGCRYDKASAQNQ

SEQ ID NO: 142597 - protein, 104 aa, Oryza sativa
  unsure (1)..(104): unsure at all Xaa locations
  Clone ID: PAT_MRT4530_43589C.1.pep
SXTSGGNRGTSTSSDFPVVTASGLYSWVLIKLWPSVRGTPWHIFSRGDCVYRRTTVTRIITAKQNGYYQSGKGQGSQQTGXVNPPKTSEXXVSTRIYRKLSTQP

SEQ ID NO: 142598 - protein, 114 aa, Oryza sativa
  Clone ID: PAT_MRT4530_4358C.1.pep
MAAATWCGTDEDGVGVEPGRGPRSMTIDKFEGPSVYFFRKIIGLMGTARPWTVPAWLFWPGHVTLAQRASTAQHGLRSGHGTTSTSEQKAETTVHKSQLEEKELGGGVAVERGH

SEQ ID NO: 142599 - protein, 274 aa, Oryza sativa
  unsure (1)..(274): unsure at all Xaa locations
  Clone ID: PAT_MRT4530_43590C.1.pep
CFWWRYDSFKTWSGKLERQLTHLASAGXEVPEEEEDGCDGDAIRSHHIKSMPQVDRFFAALEGPKLDKLRRAHGSSEELVLLSDKTWPFLLXFPVSAFGICLGMSSQEILWKTVATSTPMRFLHITTKVNQVLWRVCRSCAGMVHMSGVDLEWSHSMAHALALDTRTCVPGLGLTDVRMAGVDPLLSQLRRHGAHGWCGPGVVTKHGTCAGTGHTDVAKRGRSWPGVDRRAHGWCGPGVVTQHGTCTGTDTRTWLRGDVPGLGLTDEDVGVLRG

SEQ ID NO: 142600 - protein, 81 aa, Oryza sativa
  Clone ID: PAT_MRT4530_43591C.1.pep
MATPTSENISTAALPRPAPCSPQAPVPSPALSSALGRLKFERWADSSYPCGSLSGYLGVKGGCVSAGDSLGGKSLRGPAGD

SEQ ID NO: 142601 - protein, 1229 aa, Oryza sativa
  unsure (1)..(1229): unsure at all Xaa locations
  Clone ID: PAT_MRT4530_43592C.1.pep
MDLPAVTGRRTTSYSLLSQFPDDAAVLQRQSSGSSYGAGSSLSASSDFPFHLPSAAAPAAGAPGGSPCKSWAQQAEETYQLQLALALRLCADAASAADPAFLDPGHSATATAGPFPLPPPTPSADSLSHRFWVNGSLSYSNTIPDGFYLIHGMDPFVWSLCTDLLEENRIPSIDSLKSVRPDDSSMQAILIDRRTDFDLGMLENYASSFLSSSADMKDVINQLAKLVSSRMGGTTSNEESFLPRWKECSDAIKSSTGSIVLHLGKLPIGFCKHRSLLFKMLADKVNVPCRVXKGCKYCKSDDATSCLVRFGLEREYLVDLIGDPGQLSDPDSFVNGPYSLSVPSPLRPPKFRSLEITSNFSSVAKQYFSDCHSLNLLFNEASTGANSNAAVAMDQPYSTRKHDTRDDIMSSWVPVKAYIHIMAQQSQAAVSSDAILPEAPREVLPLITSSNLKAEKKKEFKLIEGNQYLRSTVSDLSLAVDDLIIPWNELILKEKIGAGSFGTVHRADWNGSDVAVKILMEQDFHPDRFREFMREVAIMKSLRHPNIVLFMGAVTEPPNLSIVTEYLSRGSLYKLLHRSGAKEVLDERRRLNMAFDVAKGMNYLHKRSPPIVHRDLKSPNLLVDKKYTVKVCDFGLSRLKANTFLSSKSLAGTPEWMAPEVLRDEPSNEKSDVYSFGVILWELMTMQQPWCNLNPAQVVAAVGFKGRRLDIPKDLNPQVAALIESCWAKIILSGYRLLAKLSSVQNGLFVVTEMRVRARSGRRWSSWVLLDYVAFISNSNHHGNATTARSKTRTGQPIEVSFWTAPPPRVSYMCVHCPRLDPYKFATEPTIMATEADLVLIRVTIGPRGNCFNTKCSDLFIFFDREVGLLRCGSVRRRHDPTRLGLHAHTGPDDGTYIVAVLCNTFQSGNLEYALYLYRAGADAWTCHPLSLHGLVDPTSFIHVNTNTITVGGEAGTMAWVDLNRGILFCDLLPCPYTPLLLRYFPLPPPLRLSAHTKLTGCPRFSHDIALVQGRFNFTQMRIHVKPGSITNGTYISQGWTLATWSAPATNPWKQGWRQDCNLSASDLSVDANTMNFQLLPKLSDHQQGTPQQTLERLHVGHPTLSLQSNDIVCLMAKVDQWDDHAWVLAVDMKNRRLKDVAQFGAERTLGISLVYISSMISEYLRTAPGIKGNLKRQGVVFTVPSHKKQTRMVHLSTPSWKGGDQQNSGTSMDDGEDNMDLDLDMFFG

SEQ ID NO: 142602 - protein, 114 aa, Oryza sativa
  unsure (1)..(114): unsure at all Xaa locations
  Clone ID: PAT_MRT4530_43593C.1.pep
RKTRGLGDLLNSRAGPKLAFGYASVPVDLILXSTRNKDKETAVKPINDSRLAKTLSTCGNHHEAHQLKPTTFAMSYCRIQLNRLTLSDSNSADLSRSRFELQPILLCSPIDFHL

SEQ ID NO: 142603 - protein, 229 aa, Oryza sativa
  Clone ID: PAT_MRT4530_43594C.1.pep
DDDDDDAAIRSPRAASEKERGRKKLASSRDALASLPACAVPLCVSLSREEIALVDEAVSANFHHARCHAGPHTATAISAPPRVDIVQRARSATDMWGLLLTRTVVVLVLNIPSECERGLVSGRREYGADVWRCPATGCRLPGVTDNDVGDGDGSEIQNGFFGRRRVGQKQRGRLVRDRAQDFHLVNAIPQQLEPRVSSGWWAGVSCEGKAMLMCRPPVILALQHPLQRL

SEQ ID NO: 142604 - protein, 57 aa, Oryza sativa
  unsure (1)..(57): unsure at all Xaa locations
  Clone ID: PAT_MRT4530_43595C.1.pep
KATIXYQCASDIIPSRDEYKMVQNERINDLAGATFIHAEDQCLQVNCSHSNXPGREE

SEQ ID NO: 142605 - protein, 162 aa, Oryza sativa
  unsure (1)..(162): unsure at all Xaa locations
  Clone ID: PAT_MRT4530_43596C.1.pep
NIFLRLFHFNGAENTEDLEDFESIFIDLSTLQSATSNFDESNRLGEGGFGVVFKGVFPDGQEVAVKRLSNCSNQGLGQLKNELSLVAKLQHKNLVRLIGVCLEEGEKVLVYEYMPNKSLDTVLFDPEKSKQLDWXKRYNILYGXARGLQYLHEHSQXKIIHR

SEQ ID NO: 142606 - protein, 381 aa, Oryza sativa
  unsure (1)..(381): unsure at all Xaa locations
  Clone ID: PAT_MRT4530_43597C.1.pep
MKEWSCLDDNMTAYXQEVRKLEDKFDGLVLTHVLRHNNEAADRLANFGSKREAAPSXVFIEHLYEPTVPRKETIEATDTQDQELPQDKDEVERISRCSRLYVIHETELDKKSPSGVLQRCVSLEEGRQLLRDIHSGICGNHTAARTILGXKAYRQGFFWPTAVSNTDKIVRTCEGCQFFARQTHLPAQELQTIQLSWPFAVWGLDMVGPFKKAVGGYTHLFVAVNKFSKWIEAKPVITITADKVRDFFINIMHRFGVPNRIITDNGTQFTGGVFKDFSEDFGIKICYASVAHPMSNGQVKRANGMVLQGIKARVFDRLHPYAGKWVGQLPSIFWSLRTTPSWATGQSPFFLVYGVEAMLPSEVEYESLRFRNFSEERYGED

SEQ ID NO: 142607 - protein, 172 aa, Oryza sativa
  unsure (1)..(172): unsure at all Xaa locations
  Clone ID: PAT_MRT4530_43598C.1.pep
LAYEADMRLRDTVYGCVAIISILQRNLRQLQQDLARAKFELSKYQQXAAAAAAASASTGTNNGPHSMAEFIGNAVPNGAQSFINVGHSAALASVGGAAACFGQEQQFSAVHMLSRSYEGEPIARLGGNGGYEFGYSTSMAGGGHMSGLGALGGAPFLKSGIAGSDERQGAGQ

SEQ ID NO: 142608 - protein, 66 aa, Oryza sativa
  unsure (1)..(66): unsure at all Xaa locations
  Clone ID: PAT_MRT4530_43599C.1.pep
MDGDRRRRRXGGCAHQDGCGGSSRTNDCGLLRSRDGWGSAEAQGAGAGAGAAVGKGKLTRGQGLHR

SEQ ID NO: 142609 - protein, 328 aa, Oryza sativa
  Clone ID: PAT_MRT4530_4359C.1.pep
MEQERREAKSRTSALPGQRRLRRRVQGEDYLPKEDDFAIASSPPRGPRKPFRPIKPKAYRAGDHQMAHQGPMSPYNIMYPWAIGQRVTCLAQGLHEASRIFEKSTIDENPAKREAQPKEFACAVEASGSARGSDGPRPSEARPKRTRRAAGSQWTSVHDAGSQDGAHLSVARFTEESRTALVDRVHQRKGTEGALTNLADPVATNVAPTWHLCGSYVDWREENEGGWPGNGRREAAEFTGARPRRDVFGQREHTGVKRDTRGINPKALIRRKEFDGGGFPRPGKRKEIEGARSPRLAFTHAPASDACDGRRDEDKRWERRQGVNNGAT

SEQ ID NO: 142610 - protein, 124 aa, Oryza sativa
  Clone ID: PAT_MRT4530_435C.1.pep
SFGCPGLLGSKVGFCFAVGWGSVPGMVGGSGVFFFCGSVVGVCVGCSAPVWGPWSLSCGFLRFFPSAFVRFGCCHGWCPCPPRVVFGLSVIEMAPSVTKCCKKKKIKKKKKKKKKCRPLCLKNH

SEQ ID NO: 142611 - protein, 73 aa, Oryza sativa
  Clone ID: PAT_MRT4530_43600C.1.pep
MVFSAGSTALAERRRKAARKGTPTTEEAAALGERSWPEKRQGELGVAGSRFRGRCESGDGVNALCNTPLFVSR

SEQ ID NO: 142612 - protein, 54 aa, Oryza sativa
  Clone ID: PAT_MRT4530_43601C.1.pep
MAAARGEFVGMAVRWWNVNPGATDASMETAPNELGVGMATAELGDGSDDGAGQA

SEQ ID NO: 142613 - protein, 228 aa, Oryza sativa
  Clone ID: PAT_MRT4530_43602C.1.pep
YSGLSKKDIKTRCPVCRGSCGCKQCTLGQTKGAISKESSGDQDKLISIKICNHQLYKLLPVELNQEQLDELEIEAKIQETKISDVRVQVADEQSGSLDWVHPSRRPQKLAAEAVTTASLPSRALAQYDAQDHGHGPWSVFCVLVVRIMGQQVAKSPKTWHRGLGLVEVDRTGRGMGWETAAQEGKMRGQRTAMHRMSLPSVGRSGFTDGRRLQGDIWAAGSHRGPVPG

SEQ ID NO: 142614 - protein, 90 aa, Oryza sativa
  Clone ID: PAT_MRT4530_43603C.1.pep
QPLPPFSPLSSSHVRGSLSIFLSSLAWESHMIRGFTGAGSDHCFCERTEGEVGAFSPSYCACILMRLDPLFGHIFLYSHILLLSVSNSIS

SEQ ID NO: 142615 - protein, 61 aa, Oryza sativa
  Clone ID: PAT_MRT4530_43604C.1.pep
RRLMTKDQAEMVFRGPTRFSHRDVGRSVEAGGLWSSIRDSINSLPGPAQWISSSRSGTGAP

SEQ ID NO: 142616 - protein, 147 aa, Oryza sativa
  Clone ID: PAT_MRT4530_43605C.1.pep
MAARQRRDHSTALAVSKPQLSVFHAVRGGVDHLHSSSGGIGRRRPPPAPLPRRRRLCRLEHCSPAPARRLPSRTASLAWSRLAAIVRHRPTTTRRPCQSPSPPPPPPPPPRLARVVSIGHRRVPPPHPEPTLTRRPRRSRSPPPPPP

SEQ ID NO: 142617 - protein, 110 aa, Oryza sativa
  Clone ID: PAT_MRT4530_43606C.1.pep
KTSPHNPRPIEKDRDPRSLPCQCCAAPARAPPPRPCPDPAASSSSAVDAAPPRPACRRFILSRAAPTADRHAAASLPRSRWPLNPLTLLPGPPHRAPSRPLLFSADLVDP

SEQ ID NO: 142618 - protein, 161 aa, Oryza sativa
  Clone ID: PAT_MRT4530_43607C.1.pep
MRGSQSHELETDVPASELWKIYGTLRAAELLPELLPHILAKVELVTGDGGVGTIVRLTFPPGIPGLQSYKEKFIKVDNKNYVKEAEAVEGDILKLGFLSYMIRFEIIRKGANTSVIRSTIEYEIGDEHPELQAMVSTASLAATAEKFAEYIKTQKVAQANT

SEQ ID NO: 142619 - protein, 322 aa, Oryza sativa
  Clone ID: PAT_MRT4530_43608C.1.pep
MAKQWFYANRATVNTWDKCSTAFLSKFFPMGKTNALRGRISSFQQTRDESIPEAWERPQEYVAVCPHHGMDDCLILQSFYNGLTSSSRDHLDAAAVGAFFSKTVRAAVNLTEKMVSNMGWSEERLQTRQCGMHTVKETEMLAAKLDLLMKRIDDQEKAKPLVAFKALDSHLTCEVCGNTGHSGNDCPETREEAMFMGNNGYRPQGGQGWNQPRPYYQGGNNGNNNNNGNFNQPSLKDLVFAQAKTTDAINKKTALNDKVLENINVKLEVFASAFQNQLSFNKMIKTQLAQLAALGFYLALASLAHYVWWSHSSVSHSLAVVS

SEQ ID NO: 142620 - protein, 179 aa, Oryza sativa
  Clone ID: PAT_MRT4530_43609C.1.pep
MAARQRRDHSTALAVSKPQLSVFHAVRGGVDHLHSPLTARYGNINTAVTSSRTKMPLVHLLPLSLPPSSGGIGRRRPPPAPLPRRRRLCRLEHCSPAPARRLPSRTASLAWSRLAAIVRHRPTTTRRPCQSPSPPPPPPPPPRLARVVSIGHRRVPPPHPEPTLTRRPRRSRSPPPPPP

SEQ ID NO: 142621 - protein, 43 aa, Oryza sativa
  Clone ID: PAT_MRT4530_4360C.1.pep
PPPRKDGVRRKSHANQHQKPGFFGRGGLSCARRSIGFVGVSSP

SEQ ID NO: 142622 - protein, 442 aa, Oryza sativa
  Clone ID: PAT_MRT4530_43610C.1.pep
MANPPIKCLLPPAIVSLVLLISCMVATGEQQAPYKPLVVPLVRDSDTSFYTIPIKNGAPLVVDLAGTLVWSTCPSTHTTVSCLSGTCGAANQQQPRRCRYVDGGWFWSGREAGSRCACTAHPFNPVTGECSTGDLTTFAMSANSTVNGTRTLHPEEFAAVGSCAPQRLLASLPAGATGVAGFSRRPLSLPSQLAAQRNFGNKFALCMSQFATFGDAPVYLGMEGRGFVDYREILPYTPLLTNPRIPGYYLPVKGISVSWSVPETPASLPAGALDLDARTGRGGVVLSTTTPYTVMRPDVFRAFAEAFDTAIIRRSKYTYSNVTRHPPVGPFKLCYNGAFPMLKRPASMDIPTIHLELDGATGTWSWFNDNYLVFAPGAALCVGVLEMGPGGMPVDGEPAMVVGVKQLDWNLLVFDLDKMLMWFSGDLAFRLAGCSYSSQIGL

SEQ ID NO: 142623 - protein, 347 aa, Oryza sativa
  Clone ID: PAT_MRT4530_43611C.1.pep
MWVEILCGLLAYKIIRRVFFADSDDPAHLADLDSAHSDLCFALASRLEKLYSARCFVGLRIPDPDAGERQHVDLVLLTNREVMVVAIENISGFVEVDKDGNWTCPSDKKNKHGVIPNPVLQVNRLAANLQSYLEKRGAKLPDGHITGKIVLPNPNCRPSYAITLQPEVILYDQWKDLKADSKGGLSTWIKGAFSGSKGDMQDSLLQNLHFILSTSPMWDRLELKGDRNILGEFIEFKGRHDDIQALKCLKRSKVCRFIVQKSTLFGGFGNFSALYLLVILFAKHSCERRSRVQILYSPRDYRAEGTSSSEWKEISVKQYTEILFQPLHSKKVKKFKLSSVASVTLSA

SEQ ID NO: 142624 - protein, 216 aa, Oryza sativa
  Clone ID: PAT_MRT4530_43612C.1.pep
MPIGVPKVPYRIPGDEEATWVDLYNVMYRERTLFLGQEIRCEVTNHITGLMVYLSIEDGISDIFLFINSPGGWLISGMAIFDTMQTVTPDIYTICLGIAASMASFILLGGEPTKRIAFPHARIMLHQPASAYYRARTPEFLLEVEELHKVREMITRVYALRTGKPFWVVSEDMERDVFMSADEAKAYGLVDIVGDEMLDEHCDTDPVWFPEMFKDW

SEQ ID NO: 142625 - protein, 97 aa, Oryza sativa
  Clone ID: PAT_MRT4530_43613C.1.pep
VVVLMLKAGCSRTQGASRREMGEEAFLSRLWSNWLPVRTNCIDYLLVALYCTFLYYVCVRRAANENGCFDRWLRCSFSSLVFFTDICRTDKRCLFFI

SEQ ID NO: 142626 - protein, 48 aa, Oryza sativa
  Clone ID: PAT_MRT4530_43614C.1.pep
QARVQVPGCYTAVDLRVRSRVRARVRSDISLVGRMVLFLNVALMVVMV

SEQ ID NO: 142627 - protein, 56 aa, Oryza sativa
  Clone ID: PAT_MRT4530_43615C.1.pep
SFLIQHKGHIVSFNKWANNAITFDACHYISEHKFSHLFQNTTFLNKAYIFVLWFTM

SEQ ID NO: 142628 - protein, 784 aa, Oryza sativa
  Clone ID: PAT_MRT4530_43616C.1.pep
VSICGSTACVAQTAWIQNGTIQENILFGQPMHSERYREVIHACCLEKDLEMMEFGDKTEIGERGINLSGGQKQRIQLARAVYQDCDIYLLDDIFSAVDAHTGSAIFKECLKGILKKKTVLLVTHQVDFLKNVDTVFVMKDGVVIQSGSYNQLLTSCSDFSVLVTAHHSSMEVPGAAEQMSHDQTTEYSQDTTVPAKSPVKSNSSNENGGTSVAPSKEAGSSKLIEEEEKESGRVSWQVYKLYITEAWGWWGVLVILAVSVLSEGSSMASNYWLSYETSGGTIFDTSVFLGVYVSIVAASIVCDAISTLFVTFLGFKSAQVFFNKMFDSILRAPMSFFDTTPSGRILSRASADQMKIDTALVFYVGFATSMCISVNRYIATSRELTRLQGVTRAPVIDHFSETFLGAPTVRCFGKEDEFYQINLDRINSNLRMSFHNYGANEWLGFRLELIGTLLLSITAFLMISLPSNFIKKEFVGMSLSYGLSLNSLVYYTISMTCMIENDMVAVERVNQYSTLPSEAAWEVADCLPSPNWPRRGDIDVKDLKVRYRSNTPLILKGITISINSGEKIGVVGRTGSGKSTLVQALFRLVEPVEGHIIVDGVDIGTLGLHDLRSRFGVIPQEPVLFEGTIRSNIDPIGRYSEDEIWQALERCQLKDIVATKPEKLDALVADMGENWSVGQKQLLCFGRVILKRSRILFMDEATASVDSQTDATIQRIIREEFTDCTIISIAHRIPTVMDSDRVLVLDAGLVKEFDEPSKLMGRPSLFRAMVQEYANRSYSTEARD

SEQ ID NO: 142629 - protein, 468 aa, Oryza sativa
  Clone ID: PAT_MRT4530_43617C.1.pep
LAALPLHPIPSLHQSSELALHPLRAMGNCCGTKISSDAISRNASGSRRRRSGSRRKGTGLSSRVSSSVAAVTPRSEGEILRCANVRSFAFNELKTATRNFRPDSVLGEGGFGSVFKGWVDENTFLPSRPGTGMVIAVKKLNQDGFQGHREWLAEVNYLGQLSHPNLVKLVGYCLQDEQRLLVYEFMPRGSLENHLFRRGSHFQPLSWNLRMKVALGAAKGLAFLHSDKAKVIYRDFKTSNVLLDSNYNAKLSDFGLAKDGPTGDKSHVSTRVMGTYGYAAPEYLATGTLLEAKIVLSKTHFGFRCSYGSLVGDSLMYADAVGHLSAKSDVYSFGVVMVEMLSGRRALDKNRPAGEHNLVEWARPYLSSRRRIFRILDARLAGQYSLAGAHKAAALALQCLSADAKNRPTMHQVVAALEQLQETTTTSHHHRSPQSRMLLGGRGFNASGRSSAGAGARPRRLSASPLPA

SEQ ID NO: 142630 - protein, 125 aa, Oryza sativa
  unsure (1)..(125): unsure at all Xaa locations
  Clone ID: PAT_MRT4530_43618C.1.pep
MVFARGAQGRARCGQCFTEPPGPAGRFRRRSRKNMLAGPAFSLVRCRXRRRCPLVRARPWSXEESDAAVCLPVRARHRRPQLRRPTPARPRYRRRLRVTLIPHRRRLSVTRRPPPPQLRVRLPPV

SEQ ID NO: 142631 - protein, 73 aa, Oryza sativa
  Clone ID: PAT_MRT4530_43619C.1.pep
PLSDYNIQKESALPLVLGLRGGSFEPPLQALARKYNQAQMFFPKCYAGVPPRAVNCRKKKCGPSPQLRPKKKI

SEQ ID NO: 142632 - protein, 71 aa, Oryza sativa
  Clone ID: PAT_MRT4530_4361C.1.pep
DYNSGENPRKKKAKMGGSQGSILKTKSLLNSFKFPPQRNKFHPGFFFHPISGTLRAVGSIFFSRGGGERPP

SEQ ID NO: 142633 - protein, 278 aa, Oryza sativa
  Clone ID: PAT_MRT4530_43620C.1.pep
MAEAEAEEEMMMRMMCGSGGNEMMKTKMKKKNREGEEEEEVSGGGRMRKGPWTEQEDVQLVWFVRLFGERRWDFLAKVSGLKRTGKSCRLRWVNYLHPGLKRGRITADEERLILHLHSQWGSRWSRIARSLPGRTDNEIKNFWRTHMRKIAHHAKKKTNSPSPAPTTSSGSLSSSLTTATTTMATAAALQESSSCGGDDEAVDQLVAAATTPASQLLTMDYTMDQLWNDIAAAEADTSCYDAAAMASPPSPVWEFCTDYSLWRIDDEEYYKKMLDASQ

SEQ ID NO: 142634 - protein, 87 aa, Oryza sativa
  Clone ID: PAT_MRT4530_43621C.1.pep
INQSEIHESVENSLQIFTHIIQIHSEHHKRSIMHAVVSYYKGSRYRNVSMPGQSIYDHHQIITISRRRCILTNTSSSPRTRSRHHLT

SEQ ID NO: 142635 - protein, 309 aa, Oryza sativa
  Clone ID: PAT_MRT4530_43622C.1.pep
MSKGAMGRTSIMEKQEEALKEWEPLHESISKLLKGGRITDARERHSLAFMEMELGVIVAYLRMPLPPHTDCPGVDLIDNQIQYHWSYYRDVVISLYNQYGEEAPNAGLLRKAMRCFRRRRSLEYNIPRTAYSLYRECSSDPRLELPSSELMPSPHQAAQVEAGALNDHLVGIDSMANEMLRWLMATDKGLRVMAIAGPAGIGKTTLAMELHRRLRCQTQEYYFQCHVVAANFPRRPYRSKLVLQTILKQIMEQLDAPSPNSSEITMSMLEDNPELLTRNISEHLKDKRNTRVSKLPPQIKELCNLKALD

SEQ ID NO: 142636 - protein, 583 aa, Oryza sativa
  unsure (1)..(583): unsure at all Xaa locations
  Clone ID: PAT_MRT4530_43623C.1.pep
MEATISVILTELAGRSISFLVSKYLNQQKPAPSDDERLENLQRLLLRFRIIVDEAEERCITNQAMLEQLSILRKEMFRGYYTLDTFRCRAHQGKDHHGERVLGDLENTIADATEFIAFLSSCPRLHRQPYSMYLILDQCMFGRQTEMEYLINFLLQPGNHSTLEPGVLPIIGPGRVGKSTLVEHACNDERLLSKEAYWYFFKVRTFGSMDASEHPEMASIAMDIAIETEGCFMGANVFSRLLRSNANSHYWSLVLATLREFKKKNQHIWSFMYAADQIKALDRVNEPSEEATELLVILDNYQTICSHASSHCEAEAEAPKISLGGGKGAEATPVPHGLSRPSSHAASAAGEGSERGRRGRSRARLSGVEQCXGRRGRPSPRFSPSPLPHRLGVEEAREAGERGGRRRRRGQRRWRRGGRRRAGELEGVDGDVVAVVELDGAEQGTVVGGKAMRARWGGAWCGLGAAVGGAGRRRRGRVGAEGLPAGPAGSPAHRQVRAVGAGPASPHRPPHIHSPPRRRRGARGRVRASRGELGRDGAAGDDDDAVAARLADRAAGGGSGPRPTGLAQRPPPLLSASIRRPRR

SEQ ID NO: 142637 - protein, 129 aa, Oryza sativa
  unsure (1)..(129): unsure at all Xaa locations
  Clone ID: PAT_MRT4530_43624C.1.pep
MPVSHGLSRPSSHTASAAGEGAERGRRGRSRARLTGVEQCTAGGVELGACGSRRGRRWAAAAAAGKGRRGRPSPRFSPSPLPHXLGVEEAREVGERGGRRHRRGQRRWRRGGRRRAGELEGVDGDVVAV

SEQ ID NO: 142638 - protein, 225 aa, Oryza sativa
  unsure (1)..(225): unsure at all Xaa locations
  Clone ID: PAT_MRT4530_43625C.1.pep
LNVIIFHMSREKKFWSNNLMHQASGYYVKKNYILKADACKSEIDWRIPLXEYLKGPSLGVDRKILXVSVQILYRRNIDGVLLMCLDNDQSKVARGDVHEGICGVHQSAHKMNWLLRRVEFYWPKVIDDYFKCYRGSETCQWIGNVHLAHVAILNPIIKPWPFRGRALVFIGQIYPSLSKGHWFVLVAMDYFTKWAEAVPLENITCTKLRNTSRAFGKMLRKSYGR

SEQ ID NO: 142639 - protein, 51 aa, Oryza sativa
  Clone ID: PAT_MRT4530_43626C.1.pep
YFAFSDRVFVVEFISPSPLTVLPPILVTTDRRRLLLFYLSRRRYTTPLGFG

SEQ ID NO: 142640 - protein, 39 aa, Oryza sativa
  Clone ID: PAT_MRT4530_43627C.1.pep
VDDVPVDSEAPVVTSSISKFAGSVIEDAHKGRVYVRAFI

SEQ ID NO: 142641 - protein, 76 aa, Oryza sativa
  Clone ID: PAT_MRT4530_43628C.1.pep
KETELKKLMNQITFFLGLNLSAMAAGTAKQRWRWLLAPMMLPMSPATSATGATANVKRLLTVASTNVPIWDEVMNK

SEQ ID NO: 142642 - protein, 899 aa, Oryza sativa
  Clone ID: PAT_MRT4530_43629C.1.pep
MAPTAPTAAKSASPSQPSGKSEVADLKQQLRQLAGSRAPDADDQRRDVFKRVISCMTAGIDVSAAFGEMVLCSATSDVVLKKMCYLYVGVHARNHPDLALLTINFLQRDCHDQDPTIRGLALRSLCSLRVPNLVEYLVSPLATGLKDPSAYVRMIAAVGAAKLYHISATACLDADLPAALKALMLSDPDAQIIVLTIPFNYHRKVYDICSADLKLELVLNCPGVWLASLLATAGSLFKSVIGGQVVANCMHALQEIWTLEAAKSEEAAREIETLYSKPVVFYLLNRIKEFSEWAQCLVLELVSNFLPSDNNEIFDIMNLLEDRLQHANGAVVLATIKVFLHLTMSMTDVHQQVYERIKAPLLTLVGAGSPEQSYSVLCHLHLLVMRAPMLFSSDYKSFYCQFSDPSYVKKLKLEMLTAIANESNTYEIVTELCEYAGNVDVPIARESIRAVGKIALQQYDVNAIVDRLLQFLEMDKEYVTAETLVLVKDLLRKYPQWSHDCIAVVGNISSKNIQEPKGKAALIWMLGEYSQDMHDAPYILESLVENWEEEHSPEVRLHLLTAVMKCFFKRPPETQMALGATLTAASADTHQDVHDRALFYYRLLQYDPAVAERVVNPPKQAVSVFADTQSSEIKDRIFDEFNSLSVVYQKPSYMFTDKEHRGPFEYSEDLTNLAVGAETTENTISAQRYQESDNDLLLSTSDKEDNATATSNGSSASTYNAPSDLSGPSLLSSQIPSETSLINPGAPTYSSQSNFSLDDLLGLGVPQSSAPPPAPALTLNSKPVLDPGTFQKKWGQLALSLSQECSLSPQGAASLMNPQSLIRHMQNNYIQCIASGGQPPNYKFFFYAQKDGATAFFLVECIVNTASAKAQIKVKADDGTAAEAFSTLFQSALSKFGLS

SEQ ID NO: 142643 - protein, 104 aa, Oryza sativa
  Clone ID: PAT_MRT4530_4362C.1.pep
LTLSLKQGSLLVMRGNSADMARHVVCPSSNRRVSITFVRVRPSTPVDLSPLPSPTKAMTLWQAPPPQQQQTIPAPGMQQKPEETRRHHSATGPAPHAVLAPAWG

SEQ ID NO: 142644 - protein, 92 aa, Oryza sativa
  unsure (1)..(92): unsure at all Xaa locations
  Clone ID: PAT_MRT4530_43630C.1.pep
SKSMETYYQVHLIIXPTFFFESGRAGRDGLPSECILYYRPGDVPRQSICCFFNEQSSMVFYENCGLQNLYDIVRYCQVNSQCSAHAIFAIIS

SEQ ID NO: 142645 - protein, 594 aa, Oryza sativa
  unsure (1)..(594): unsure at all Xaa locations
  Clone ID: PAT_MRT4530_43631C.1.pep
MGLYSSAPSGGHRRDWWRQVGTDGRSLVESGGLGMQQQQLLHTTAKLVATLPVTMDVTELGERQIHHRQIRELRTSAIVKGSVTAVEACIWALAVVEDGALPGHGTMEREAGGTDPQPVLGRMVAIEDYILCAYIGVEPFLDLFRSYYKLHWMESNRVSGCVGFRLRDGLKSRYIPFQCPSSSSKWRTRWFYLQIEDSDPVFVVPEEQPDKISSCTANPPLTPSLQSFIDIVDDLRVRGLSGYEVAADFIGLNSETVECRVDQVMISGPTMASNITVPLCEKGXAERDAAINTIXVAASLREXVAKEASDAATAAATTSGGNVLTKGRKFSSASNASPPPPRRQRLVTVGEKAARAKAVQDESGGTSGASPAVASTDVVEMGRLLEAGARGIGREIAEARSTAASVNERADRLVHELAEAREDLKKMRELVAGNERQRQRLEHRMSELGNNLSEIRGSLRVTYTGLHQLAGERGIKSTIPANPDEFSLMSSLAELAAAMEEIPSKHAARIGEETSNGIYTGACHVLACVKLAHPELDLREILDQGAASNTRKEVMEEVGDLGESVLPLFEEDVDDEDVQQRGQLESPAIIPTRV

SEQ ID NO: 142646 - protein, 113 aa, Oryza sativa
  unsure (1)..(113): unsure at all Xaa locations
  Clone ID: PAT_MRT4530_43632C.1.pep
XXXFSXPSFNPEMXTGKKXGYXEVSXGXYXTGSDXGXPSXGXAVNSLXFTLVFRKCGFRSPGFGSXXGSGNFSERRNFXKXGVIXGCKXEXGILXPNNMVFXLGDXEVXLSSP

SEQ ID NO: 142647 - protein, 196 aa, Oryza sativa
  unsure (1)..(196): unsure at all Xaa locations
  Clone ID: PAT_MRT4530_43633C.1.pep
DGEEEQPANGGADEDERQWRRQIPARFSVXGSNPAFIKSAIGVSNVLGSTPNLPQQIRGEAEDGLATAMPDGIAVPGKTTVRLAGARAPRQRQLEGRPWEGVETAPEEVAGCINGGIKEGIKSRRLGAGGGKRRKMRLTGGSHLPARGRGGVCARLGVGRAERRSRLGKKRRERGGKGKSGKAEQAGRPVGTRSRV

SEQ ID NO: 142648 - protein, 461 aa, Oryza sativa
  unsure (1)..(461): unsure at all Xaa locations
  Clone ID: PAT_MRT4530_43634C.1.pep
MDLGKSSSTSASLKKLQEDGTLPGRGTMGREAGGTDPQPVLGRMVAIEDYILCGFLPPSSEFLLLVLNFYGLSLLHLNPNSIVFLSIFSYLCEAYIGVEPFLDLFRFYYELRWMESNRVSGCVXCPSFCNKWRTRWFYLQIADSDPVFVVPEEQPDKISSWTAKPXLTPSLQSFIDIVNDLRVRGLXGARVHVPPDLSKFGSRFIGLNSETMGRRVGQVMISGPTTASNIPVPLCEKGAAERDAAINALPLTDIIGPLADHQVAASLKEKVAKEASDAAAAAATTSGGNVPTKGRKFSSVSGHRRKASTPSEELQVEMGRLLEAGARGIGREIAEARSAAASANERADRLGLEHRMSELGNNLSEIRGLLRVTYTGLHQLAGECGIKSTIPANPDEFSLTSSLAELVAAMEEIPSKHAARIGEETSNGIYTGACHVLACVKLAHPELDLRKILDQGAASNT

SEQ ID NO: 142649 - protein, 108 aa, Oryza sativa
  Clone ID: PAT_MRT4530_43635C.1.pep
MADGNKGSLLAGFATFLQRIRGGGGGEDYQLPINHKHPDHKADILMYGDMVEAAYNYKAFAADEKEVYYGGGGGGYLYLATTNLYATIDAVPAPYRSRRLWPTSPSAP

SEQ ID NO: 142650 - protein, 450 aa, Oryza sativa
  Clone ID: PAT_MRT4530_43636C.1.pep
MDLGKSSSTSASLKKLQEDGALPGRGTMERKQECPSSRSKWRMRWFYLQIEDSDPVFVVPEEQPDKISSWTAMPPLTPSLQSFIDIVDDLRARVHVPPDLSKFGSRFTGLNSETVGRRVGQVMISGPTTASNIPVPLCEKGAAERDAGINALPLTDIIGPLADHQVAASLKEKVAKEASDAAAAAATTSGGNVPTKGRKFSSVSGHHRKASTPSASDASPPPPRRERLVTVGEKAARSKAVQDESGGTSGASPAVASTDVVLAPGSREATPSGPANDPAAGRGPPATVLTWEELQVEMGRLLEAGARSIGREIAEARSAAASANERADRLKMRELVDGNERQQQGLEHRMSELGNNLSEIHGSLRVTYTGLHQLAGECGIKSTILANPNEFSLTSSLAELAAAMEEIPSKHAAKIGEETSNGINTGACHVLAYVKLAHPELDLREILDQG

SEQ ID NO: 142651 - protein, 369 aa, Oryza sativa
  Clone ID: PAT_MRT4530_43637C.1.pep
MATLRPAPASMVVLCAVVVVGAVFVVVAEGGGSEEAAASTGKAAMVPALFVFGDSLIDNGNNNNLASFAKANYYPYGIDFAAGPTGRFCNGYTIVDELGYENWIPEMSRTVEGVNFASAAAGILDESGGNFVGRIPFNQQIDNFEATVEQIAGAVGGKEAAASMVARSILFVGLGSSDYLNNYLMPNYNTRRRYTPRQFADLLADRYAAQLTRLYKAGARKFVVAGVGSMGCIPNVLAQSVESRCSPEVDALVVPFNANVRAMLGRLDGGGLPGASLVFLDNYGVFKAILGDPAAHGFAVVDRGCCGIGRNAGQVTCLPFMPPCDGRDRYVFWDAFHPTAAVNVLIAREAFYGGADVVSPINVRRLAAL

SEQ ID NO: 142652 - protein, 59 aa, Oryza sativa
  Clone ID: PAT_MRT4530_43638C.1.pep
MGMPGVQDALRCLPSLIRPHCATVNPVALHCLLPLISPLRLSQPLPLGLLPVALPCCNA

SEQ ID NO: 142653 - protein, 70 aa, Oryza sativa
  Clone ID: PAT_MRT4530_43639C.1.pep
MAIVATTSLGVVLSSHEPLTSLGVLDPYRTMRDMKLATHRHLDAWRPNVRLCLRCTVTWEQRAAGGSCNT

SEQ ID NO: 142654 - protein, 195 aa, Oryza sativa
  Clone ID: PAT_MRT4530_4363C.1.pep
MMSSVAFVEGSRMSRQASPAPTAFPIEPCGLLQRRSRWAVRAPSTAQQAPFTYPQPPSLTKKICIHHLHSPAGTHLPSPLDGDSEIHKTVTTSCGWAEGLRRPPLGYCGGRVEATATFSSSYSSSTAVMLPTQPKCSTTMRMTPGHPPPLANEVGGVERRATRMADVAPMAHLVSAIFIGQREWQTWHGISDLSC

SEQ ID NO: 142655 - protein, 286 aa, Oryza sativa
  Clone ID: PAT_MRT4530_43640C.1.pep
MAAALAAAAAAAAAAHHHRLSSSSPAARTRVVHHHRRRRSSSLSFSAPASSHGCPRGARALRRAAAGDGGGNGSGGVSTGTVDPAAASSPSSSLEELYRSCATWTWRGMRVNYLVRGEGPLLLLVHGFGASVGHWRRNIGVLSESYTVYAIDLLGFGASDKPPGFSYTMETWAELILDFLDEVVRRPTVLVGNSVGSLACVIAAADSSRDLVRGLVLLNCSGGMNNKAIVDDWRIKLLLPLLWLIDFLLKQRRIASALFERVKDRSNLKDILLSVYGNKDAVDDEL

SEQ ID NO: 142656 - protein, 149 aa, Oryza sativa
  unsure (1)..(149): unsure at all Xaa locations
  Clone ID: PAT_MRT4530_43641C.1.pep
QKKKKKKKKRKKKRKKKKKKKKKKRKKRKKKKKKKKKKRRGTKRGNKHRSPSKHKRETKXRTEKKNNQRRXXRXRRKRKHRERTGEHQKNKPRRNQHPTSGKEHTKEQPQEPHPKPRAKEGGKEETTQKGEKSGGEERESPKPAENRTR

SEQ ID NO: 142657 - protein, 162 aa, Oryza sativa
  unsure (1)..(162): unsure at all Xaa locations
  Clone ID: PAT_MRT4530_43642C.1.pep
MEVNEDHLKEIFENYGEVVNVELSMDRVVNLPRGYGYVEFKNRADAEKALLYLDGGQIDGNVVKVRFALPPQQQRAAASPKALHPSPKRDVVDHNKVGPSAEKATKQQXQETTPPRRMWSPPRRPQSLRHRSRSPIHRPIRSPSRSISPRRDQEGCSEVAVL

SEQ ID NO: 142658 - protein, 109 aa, Oryza sativa
  Clone ID: PAT_MRT4530_43643C.1.pep
MSRTRLMYEWAKNSELTRHTEPKFTSLRRGTPEEDTSQLVGWLGQPRVRPNQCSRRWMQGFEGTVEIHALWRLEGVVSRLRDIIIWGYKLWMRGELLMVTVQYEYSSAL

SEQ ID NO: 142659 - protein, 178 aa, Oryza sativa
  Clone ID: PAT_MRT4530_43644C.1.pep
MTCLVANRGGRAGCRSTGAQVCGEEEVAPETGRGGGSGRVEEGGGAVAVAVVVADSEVAALGSHGGDLEGRKMKNKVRWEDWKPNEEANKQPEQARVWQRLLDQSNKLRSQRGGLELRVKVELEQEGPASMSGCKLSSSEAGASSSAELSIAGAQARGRCSSRAWGLSNWGVVASKLS

SEQ ID NO: 142660 - protein, 102 aa, Oryza sativa
  Clone ID: PAT_MRT4530_43645C.1.pep
YSLQVYMLLSNYPINILLMLSKASFVQGPFSLFPVTYQHPIYVIAARCIPSRKCDLSWSLVGYWGAVSWLQKRTVICVVFVRASDILSISEVLTFLIQIYLT

SEQ ID NO: 142661 - protein, 165 aa, Oryza sativa
  Clone ID: PAT_MRT4530_43646C.1.pep
MHCAEPCHGWLAAPFILHESNLSLSRRSPPSNLRKMSDVQQTMLTGLSRVRHVEQNHVRLDRGGNSSDIECSGPLTGIRSRFYKIEEGLKTQHDLKHIHPSSRCRSTLVLYPASWLPTVDIGNSIFGAHGPKENPTLNSRRGDSKGECAVRPQPYGDMLWTSSIH

SEQ ID NO: 142662 - protein, 824 aa, Oryza sativa
  unsure (1)..(824): unsure at all Xaa locations
  Clone ID: PAT_MRT4530_43647C.1.pep
MDPAAARRKAERWIGVAEKLLMARDLEGCKQFVSQARADDPTVPGADDLAAAADILLSAQRRRLATGAPNPYAVLGLDCADPASRDPDVVHSAYRRLSLLLNRSHPDHPXLHAFADAARLVAAALPFLFDPVRKASLDSSLDAAAAAAAPRPPPAPSPQKQQPQPQPRSPRPASPPPVPAAPEVASAVSTPPARPKRGRPPRAAKPQPTPERQQEAEVEAAATFWTACPSCCNLHEYTRSYEARTLLCPSCRKPFFAAAMATPPPIVPGTDMYYCSWGFFPMGFPGGPAFARPTSSSSSSSSSSSSSSSSPTKQAPAALGFYPMGPYSLPLPAQGDAAEGNAAVGSGDGTVTAPSPPPPPPAAAPLPVKPKLVKLGARKRGRPKSSGNLLLVSGSDLIIMVKEHAEKGDGVQECQSSPALSEDNLRHSFRLGDITWVKHTGSWWPAQVVENSCISSKPKKTAKHHVPVRLYGTCVHLVFWTAKKMLKRENKSAMEAFHEAVKKELSHVNSPCDSTEEAGNLKAKTSSKKVRKQKGLKESPASEHMGEDTKDQHSAEQHQELGYTATTGVATRKGRRTREGARQLSPTDGEDQASGKKASIEGSSYKTEKQVGSVYDEEACKMTTTERSVGRREGLRRSACTPMKAYLDPSEDRTSLFSDTSASEGANEVNRTPENSNQHEDDSTIDGTLASHAEIRVMVRDILFSDIIAKQHAAEMAYVDEVINGICCASELNITGDPTPVAKGGRGIKRGGSRAEAESSNITQRSRKGRIDQASSNGKKRAKDTSETMNHDNSPNSLRGPFDSTVFDRYSKAIITHELSFGYT

SEQ ID NO: 142663 - protein, 221 aa, Oryza sativa
  unsure (1)..(221): unsure at all Xaa locations
  Clone ID: PAT_MRT4530_43648C.1.pep
RPGNVPSRCLLCSLRRRQGESRLSREGAAISIWRAEQGRGFWSELIIMVKEHAEKGDGVQECQSSPALSEDNLRHSFRLGDITWVKHTGSWWPAQVVENSCISSKPKKTAKHHVPVRLYGTCVHMYVDPWKSNMEFKMMLKRENKSAMEAFHEAVKKELSHVNSPCDSTEEAGNLKAKTSSQKVRKQKGLKESPASEHMGEDTKDQHSAEQHQELGYTXHT

SEQ ID NO: 142664 - protein, 154 aa, Oryza sativa
  Clone ID: PAT_MRT4530_43649C.1.pep
GLWLGIYCSVTLLRKQHAAEMAYVDEVINGICCASELNITGDPTPVAKGGRGIKRGGSRAEAESSNITQRSRKGRIDQASSNGKKRAKDTSETMNHDNSPNSLRGPFDSTSRDAAMEELGQVSARQIRIMQSLALIAPSGSPFGKNGLVASTSL

SEQ ID NO: 142665 - protein, 127 aa, Oryza sativa
  unsure (1)..(127): unsure at all Xaa locations
  Clone ID: PAT_MRT4530_4364C.1.pep
RNQNSWQNHFNCVETPDTIHGRSFLKWEIVSHPLPHGGXRYTRRFWNATATXIACEPMRPANXAQVTTVHDWWKTLVTRQGLPKKGTRSLILLISWEVWMERNXRIFQNKXLSSVALIAKIKEESRS

SEQ ID NO: 142666 - protein, 223 aa, Oryza sativa
  Clone ID: PAT_MRT4530_43650C.1.pep
MALSLTTAFSHLSLPSTSKFHPLPLLHLRFPSSSSSRRAARLALAASAAEAAEPVEVEEAPAEDGADEVVAVEDELSGPALRKYVKQRLPGGFAAQRITATGRRKTAIARVVLQEGTGRVFINFRDAKEYLQGNPMWMEYCKVPLVTLGFENSYDVFVKVHGGGLSGQAQAICLGVARALVKISTANKVTLRGEGLLTRDTRIVERKKAGLKKARKRPQFSKR

SEQ ID NO: 142667 - protein, 663 aa, Oryza sativa
  unsure (1)..(663): unsure at all Xaa locations
  Clone ID: PAT_MRT4530_43651C.1.pep
MRRRSSLVHAVLLAVAAVALPLAAGQPWPSCGTGGTYAANSTYETNLLDLISALQGNASSSPTLYASGAVGSGGRDAVYGVMLCRGDLSTSDCNDCGTRAGQDVGRVCNRTRDAALVYNQCYVRVSDADFLAAATNNSGEVALMSSTNITRAADVRAYDAAVVSLLNATVRYAVENSTRMFATGQRVGSDPGFSDIYSMAQNIYSAAQCTPDLSPALCRSCLEDLVARWWKTFPRTTVGARIVGTRCSLRSEVSQDKFYTGAPMLKLWADGLSPAAAAASPDAAPGLFSLQNAVKNNSANKILEIVLPIVAVAIVAAVSILLWNIRKKRRRGKAEHFTGSTLLSLASLQVATDNFNESMKLGEGGFGAVYKGFFSDKXVAVKRLAKGSNQGLEEVKNELVLVAKLHHKNLVQLVGFCLEEGERMLVYEYMPNKSLDTFLFDEEKRRQLDWTTRFRIIEGIARGLQYLHQDSQKKIVHRDMKASNILLDADMNPKIGDFGLARLFGQDQTREITNRIVGTFGYMSPEYVTHGQYSTKSDVFSFGILVIEIVTGRRRNNGPYFFEPNEDIISIVWRHWAEGNIKEIIDHSLGRNYPEGEVLKCVNIGLLCVQQNPIDRPTMADVMVLLNSDATSTLPAPVVHIPVASFSDGSSGYSQTVTQLSPR

SEQ ID NO: 142668 - protein, 74 aa, Oryza sativa
  Clone ID: PAT_MRT4530_43652C.1.pep
SPYLRLKVVGCPSTRPGRHRGGRRRGTWHIHREPVITQSYTECWLMLQPLASQAPEQHLPLDFTDLSTSRRSQG

SEQ ID NO: 142669 - protein, 244 aa, Oryza sativa
  Clone ID: PAT_MRT4530_43653C.1.pep
MTTTKTGGVREEGRRGRGRSCRCDAEGDGDDVGRRTDEEQKPARGWEVLPAGEDTTPESFGRGDGEAGEEDDAAELREATARPTDAQARQQRRLVAVQWRQRHWTSTRTHFQRSPRETEGRLGERRRLRRRGWRRHGLPVHGRGGGGGWRCGHGETREEAKTRERRKRIPFYRRGEGAGHGRSGERRRKTRPTAMESGWGRRGRSGRLRARIKREIKRKERGLKDPNQFWNPMLESHGFEGGRS

SEQ ID NO: 142670 - protein, 85 aa, Oryza sativa
  unsure (1)..(85): unsure at all Xaa locations
  Clone ID: PAT_MRT4530_43654C.1.pep
MSFVISLIPLTIINDAVIGNNLXSSWFGMMYSWFGDRTVQPXWLFRMVGPIQXGMLYIVGLILFNXKYFTVLLNSEVFIKCHLCK

SEQ ID NO: 142671 - protein, 253 aa, Oryza sativa
  unsure (1)..(253): unsure at all Xaa locations
  Clone ID: PAT_MRT4530_43655C.1.pep
IIPHRAXPPHPPHTQQHXAQSLPPLPPXRPRAHTPSPNTLTPSAPTPTPTFPAQPPTHPHPNHRTPTPXQRPRTHXHRTPTSSSRPRXGFPRPPTNXHPLSSAHAPLATPLATPHAHTPSLALRTRPPHTRAPRNPRNPPHPRARPTPLSPXLPHTHSRASPRATSGTPPSSSPHLSHAPPRTHHAHTTHPPHASQPLGPKPQSPSPKQAPQPSALQRRAGRSPAKQNVLHHPMCAFNLDRTTYHNPTNSKNT

SEQ ID NO: 142672 - protein, 43 aa, Oryza sativa
  Clone ID: PAT_MRT4530_43656C.1.pep
KYLLQAHRINYQEVSCPTVCFLLDLCVNFTPLHSPCPSPLKKD

SEQ ID NO: 142673 - protein, 97 aa, Oryza sativa
  Clone ID: PAT_MRT4530_43657C.1.pep
CIQITWNHNSRQSGMLMILYIHMQILFTPKQRREGRSVINLGVQDFLPKSGHQTRTPRLLPKHKTIWNGMHLPECLFQAVLTVLGTSWDLEVKYHYN

SEQ ID NO: 142674 - protein, 67 aa, Oryza sativa
  Clone ID: PAT_MRT4530_43658C.1.pep
MRWVMKWLNNHMVSQRHVQQPTVQPLKKREDIFFLTCKNPKDEAFSHYSNFLLRCDFVIHLYPVGSR

SEQ ID NO: 142675 - protein, 126 aa, Oryza sativa
  Clone ID: PAT_MRT4530_43659C.1.pep
MVPIKRAPTRPIVLLMHRSTAIYSNNASSVDHLVHAKSLLVHAKVKSLRSTYIREPCIRAECFLWGIDRYDQAGRPALIHQSRLIINQLQLLLLLLLLRTSPWPLGLLLHMSGSSTNHTHACIDLI

SEQ ID NO: 142676 - protein, 133 aa, Oryza sativa
  unsure (1)..(133): unsure at all Xaa locations
  Clone ID: PAT_MRT4530_4365C.1.pep
KRTCWQRAEAEAQLEASPAEAAEVETAAAVGPRPPPLPPSATTAPWLXDPSSATAPPLAPAGSGNRTAAAPPLATAQRKRGEIERRSGRDRGEVEKREPAGLISSCGPRWERRHIYTVAEVISNGLGLKSRLR

SEQ ID NO: 142677 - protein, 220 aa, Oryza sativa
  Clone ID: PAT_MRT4530_43660C.1.pep
MGQQSLIYAFVARGTVVLAEYTEFTGNFTTIAAQCLQKLPASNNKFTYNCDGHTFNYLVEDGFTYCVVAVESVGRQIPIAFLDRVKEDFTKRYGGGKAATAAANSLNREFGSKLKEHMQYCVDHPEEISKLAKVKAQVSEVKGVMMENIEKVLDRGEKIELLVDKTENLRSQAQDFRQQGTKVRRKMWLQNMKIKLIVLGIIIALILIIILSVCHGFKCK

SEQ ID NO: 142678 - protein, 279 aa, Oryza sativa
  Clone ID: PAT_MRT4530_43661C.1.pep
MGQQSLIYAFVARGTVVLAEYTEFTGNFTTIAAQCLQKLPASNNKFTYNCDGHTFNYLVEDGFSSNRIGILGIQGLAYCVVAVESVGRQIPIAFLDRVKEDFTKRYGGGKAATAAANSLNREFGSKLKEHMQYCVDHPEEISKLAKVKAQVSEVKGVMMENIEKVLDRGEKIELLVDKTENLRSQNSGIFIQWIAMEKLLIHVSVDRMRVWSMVMKYRIMVPKVIWLTVDMAQDFRQQGTKVRRKMWLQNMKIKLIVLGIIIALILIIILSVCHGFKCK

SEQ ID NO: 142679 - protein, 31 aa, Oryza sativa
  Clone ID: PAT_MRT4530_43662C.1.pep
GGLLDSLLSLSVMLVHVLSILTTDLTISKRD

SEQ ID NO: 142680 - protein, 42 aa, Oryza sativa
  unsure (1)..(42): unsure at all Xaa locations
  Clone ID: PAT_MRT4530_43663C.1.pep
RVVQPRDHCPLRVNRPANNTVSRIKARHHHGLIRLLCVXDIL

SEQ ID NO: 142681 - protein, 102 aa, Oryza sativa
  Clone ID: PAT_MRT4530_43664C.1.pep
MDWSRAENARFEQALAMYDRDTPGRWERVAAVVGGGKTADDVRRHFDLLVDDCGSIESGNYGYPGTGAGAGRGSGNGNGNGRDKNNDGNTNRRQSRANGPQT

SEQ ID NO: 142682 - protein, 244 aa, Oryza sativa
  unsure (1)..(244): unsure at all Xaa locations
  Clone ID: PAT_MRT4530_43665C.1.pep
WPLQTPWHPTTAITPSSATTSAGSLDPFPSSPRSWRPKPSATPPPPTPTPTPTSSAPSAAARRPSSGSVCSWSASTPSSSGRASATXSRSRTRATCSPGSTCSGSYAAAPRGRRGSSSILPPRTASSPSRSSWAPSLVGPSTGSRRGGLWCSRPARMRRSARGRWPASNGASSLPSITACSSVLTSSTGSAVSWSEGRVQAGDAAAAVVVARVEKMQLALEEFDQTRQGWRRCSRRWKSSISGH

SEQ ID NO: 142683 - protein, 267 aa, Oryza sativa
  unsure (1)..(267): unsure at all Xaa locations
  Clone ID: PAT_MRT4530_43666C.1.pep
SVPFRETLPPPWPLQTPWHPTTAITPSSATTSAGSLDPFPSSPRSWRPKPSATPPPPTPTPTPTSSAPSAAARRPSSGSVCSWSASTPSSSGRASATXSRSRTRATCSPGSTCSGSYAAAPRGRRGSSSILPPRTASSPSRSSWAPSLVGPSTGSRRGGLWCSRPARMRRSARGRWPASNGASSLPSITACSSVLTSSTGSAVSWSEGHVQAGDAAAAVVAGRGRRRKLWREKRRTTTAASGPPCRRHLSSPTRSTIYASTGPIIFT

SEQ ID NO: 142684 - protein, 118 aa, Oryza sativa
  unsure (1)..(118): unsure at all Xaa locations
  Clone ID: PAT_MRT4530_43667C.1.pep
LEGLKFFIRYALSGRAWNNIHXTKTGFVNKTPSGKGDREAQWAPAQXRTLPGLNQLSPSSALFNDKTGSPDLSEIPEQAPKQTEVPRLRGLPPPKGPVKSVVKLKGVAIAPIPQSSPV

SEQ ID NO: 142685 - protein, 147 aa, Oryza sativa
  Clone ID: PAT_MRT4530_43668C.1.pep
MEALVRAPLRHAVAAASLLPDHNPTAAESSFRLSTTRRIPPRHCPYCAPMHLQHDDNRGAGPHGASGSDWRRRGGEPIGGVDLVDRGELLAKRVLVVRDGDRLADAVGADVSEGDAKREPAGEDAAGCRKIASRDEFQTRRQIEDLK

SEQ ID NO: 142686 - protein, 114 aa, Oryza sativa
  Clone ID: PAT_MRT4530_43669C.1.pep
PGLTGRPTHPAYGSSTSPLPPEAIPKSHGGAPISVPIHGLDASSEAHLAVLPSSALGLGRRRRAGLLLQRGIRRLRRRRCSSGKAAEGEARHGGGRTRWWCEAYCFMSQVQFGR

SEQ ID NO: 142687 - protein, 114 aa, Oryza sativa
  Clone ID: PAT_MRT4530_4366C.1.pep
STSAAGCRELASTKYLAWIHIIGFSCVMLISLASIVAIDFISTLVKLLGNLGAAAEEQAVSCKESSSSSSSTHHLRRDERCVVIGSSKRRREARGEAAAARDHWFLAHLLAVVR

SEQ ID NO: 142688 - protein, 122 aa, Oryza sativa
  unsure (1)..(122): unsure at all Xaa locations
  Clone ID: PAT_MRT4530_43670C.1.pep
MPSSTIRSISITASDDDAAAXXXAVGAPRRARAARRKAARGLGQRAVRLVARWWPVLLLLPAVALLLFEASRLXGASPXGPXPHVFSSXLGRXEPTTRXVMGFANCFXFLNPXSXKDLXFLR

SEQ ID NO: 142689 - protein, 36 aa, Oryza sativa
  Clone ID: PAT_MRT4530_43671C.1.pep
HCGVWLLGLLSPAILPASRPSEPVALPVATAWCLSV

SEQ ID NO: 142690 - protein, 478 aa, Oryza sativa
  unsure (1)..(478): unsure at all Xaa locations
  Clone ID: PAT_MRT4530_43672C.1.pep
LGSIEHHGEEEDVVVHGEIAAGGAAHLPVLPLPRVERRWVEQERGAGGGGRTAAPRRRGREAVPLRGGELPALDEDAARAVQRAGEVPRRAGGGRRRRGVPRRRAGGGAARVPAAQPLRRRRGVLRQGGRGRDRAAAVRGGGESFCVREGDAMVIPAGAIVYSANTHSSKWFRVVMLLNPVXSTPGHFEEYFPVGGDRPESFFSAFSDDVLQAAFNTRREELEKVFERQREGGEITTAPEEQIRELSKSCSRGGGGGSGSEWEIKPSSLTGKSPYFSNNHGKLFELTGDECRHLKKLDLQIGLANITRGSMIAPNYNTRATKLAVVLQGSGYFEMACPHVSGGGSSERREREREHGRRREEEQGEEEHGERGEKARRYHKVRAQVREESVIVIPASHPATIVASEGESLAVVCFFVGANHDEKVFLAGRNSPLRQLDDPAKKLVFGGSAAREADRVLAAQPEQILLRGPHGRGSVSDM

SEQ ID NO: 142691 - protein, 81 aa, Oryza sativa
  Clone ID: PAT_MRT4530_43673C.1.pep
MAAAERPSRSDVDFADVFGGPPRRSSGHDSLRRSSMDSSFGSATKGRSGAEERPVFGDRTSSDRRRQLGQEFYKDIFAGSE

SEQ ID NO: 142692 - protein, 99 aa, Oryza sativa
  Clone ID: PAT_MRT4530_43674C.1.pep
KGGFFLNFLKKKFQRPPRKRPIFFFKIGTFFLLKFSPKPPQGGKCPPEKGSFWNNSPFGGGSLRPKKLGLDLESNKKKPAPGVPPEFPNRAREGTHFSF

SEQ ID NO: 142693 - protein, 99 aa, Oryza sativa
  Clone ID: PAT_MRT4530_43675C.1.pep
CSAAHLQQPVFCSACTQRKWLIKDQAASIRENTCQIEYSKQLLLLIQVPVEVPGFPGTKCTLSFRCHALRILAVTSRPKLYDHSMSVSSEYGIQQFSTH

SEQ ID NO: 142694 - protein, 117 aa, Oryza sativa
  unsure (1)..(117): unsure at all Xaa locations
  Clone ID: PAT_MRT4530_43676C.1.pep
AAGWWGLSLCAPKVASVHGAQLLRLTARGGDPLATKASHATHEAPAAKVPAFEAHGXNSFXHSVINMVXMLXRLGXLXTXYXLENSGWASVFLLLRLRXXXXFTAHLXXQXLDKNPA

SEQ ID NO: 142695 - protein, 57 aa, Oryza sativa
  Clone ID: PAT_MRT4530_43677C.1.pep
KNSNCSWVDGCKGDRRVQASNRARQVYGVPAWTEQWLKGNVVIFARLTTTVYGLHRI

SEQ ID NO: 142696 - protein, 242 aa, Oryza sativa
  Clone ID: PAT_MRT4530_43678C.1.pep
MGNWKDEGVSCSEIRVGQVSHKGASLSEEAPASEVHIQPADQSHRACNICELPVTGVGYRCNHHCSDFAIHEACADRFARDTIDGFFAHPRHPLTAATASAANPGWCDLCQGPIQPGRLVYRCAECAFDVHPLCTLLPMTIHPAARRRRVPRRPRPQLGPGARGVRGVLPGLLHLALPVRPMLVHAPHRLRFAGRRRRCSSWYEGLACHRRRRRRLGRQRWQSHREVSDHVCPATGGEFDCQ

SEQ ID NO: 142697 - protein, 194 aa, Oryza sativa
  Clone ID: PAT_MRT4530_43679C.1.pep
MGPTVLEHSVDEEPANQGLNEEYFSRLYEWRLNMKSMSVIEKYLTGAGIDMEFPVINDKYVGLNHKYAYAQVVDSQGSLAGGCGIVRPKFGGFAKLYLEDKIKPCQDLINVEYHHLGRNKFCSGATFVPKVNGANEDDGWIISFVHDEEINNSQAHIIDAQRFENGPVAKIVLKHRVPYGFHGAFISRSTYKKR

SEQ ID NO: 142698 - protein, 64 aa, Oryza sativa
  Clone ID: PAT_MRT4530_4367C.1.pep
GEVAVVRRPGGSALPSAKSGGTGGGGGGPAAEGDRAAAGRRCEGRRRCSDNPAAAHSPPPDKNT

SEQ ID NO: 142699 - protein, 172 aa, Oryza sativa
  Clone ID: PAT_MRT4530_43680C.1.pep
MASKQMLAVAAAAVALAVLLPARGAAATEHMVGDGNGWILGFDYAAWAATKQFRVGDTLVFRYKGTNHTVVEVGGADFKACNKTASANEWSSGEDRVALDKEGRRWFFCGVGDHCAKNMKLKITVIAAGAPAPGASEAPPPPSSAAGKARARVAHAAAAAAVTAAAAAMLAL

SEQ ID NO: 142700 - protein, 46 aa, Oryza sativa
  Clone ID: PAT_MRT4530_43681C.1.pep
MEGGGGGGGGGGGGGGGGGGSRAPYATRTEEDALQDLRSRRADMIK

SEQ ID NO: 142701 - protein, 170 aa, Oryza sativa
  Clone ID: PAT_MRT4530_43682C.1.pep
PEVAARDAVIGWFRGEFAAANAVIDALCGHLAQIGGDAEYEAVFAALHRRRLNWFPVLHMQKFYSVADVAAELRRVVDARASAAYSEEEAASTVIHEPMDELVAMAAEPEPEQEQEPDHDHVPQDPAPEPEPDGAVNNPVSPTEVLDHEADGEDSSGDSSERKAPFTEDD

SEQ ID NO: 142702 - protein, 733 aa, Oryza sativa
  Clone ID: PAT_MRT4530_43683C.1.pep
MESWIPSVDAGMKKLQEEVGEIAGRLAVLESKPAGSPVVATATPIGHGSHQLHQGMATGASQGPEHALGKGKRQFPNSPITFELGESLEKFGGGSQGSQASGRSVGPRLPKTDFPRFSGENPKLWKKNAEKYFGMYNVAYETWAQFATLHFTGNAALWLQTYEELHSVESWAELCVAVNSKFGRDPYQHHLEELENLKQTGSVEECHNKFEELMHLVLVYNRGYDETFFVTRFVGGLKADIKLAIKLHKPRTVDAALSLAQTQEELLEEAEDGKQTEEKSKWEDRFESLKAARKAREELLEVFQVQEEESDSNQDEEDTSEEELVLFECVVHGTMGRKTIRLQAHTIADGGRMQCNSCVKGVEWWCQGSSFVTDLKVLALGGYDIILGMEWLEQFSPMWIDWKRKKRRFNLQDKRVTLTGVKDRVEHYKLVNAKQLSGLVKSGAEPTSLPPHRDFDHNIPLIPGARPVNKKPYRGLNDITEKNKYPMPVVDELLDELAGAKWFTKLDLRSGYHQIRQTLEDHVSHLREVFQLLQQHELYVKASKCSFAKSHLEYLGHIIGVAGVSTDLGLLQPLPVPTEAWSTVSLDFVEGLPKSGGFDTIMVVVDKFSKFAKFVPLTHPFTALTVAQAFIKHIYDVFGMPQLLLSGPNGWLKLNIVAYRLDLPAGSHVHPVVHVSLLKKAVKPDIQGVRADIVCRLLFLVSPVQLSGKNNNGGGNNGPTAWLTSCLAASLLA

SEQ ID NO: 142703 - protein, 813 aa, Oryza sativa
  Clone ID: PAT_MRT4530_43684C.1.pep
MESWIPSVDAGMKKLQEEVGEIAGRLAVLESKPAGSPVVATATPIGHGSHQLHQGMATGASQGPEHALGKGKRQFPNSPITFELGESLEKFGGGSQGSQASGRSVGPRLPKTDFPRFSGENPKLWKKNAEKYFGMYNVAYETWAQFATLHFTGNAALWLQTYEELHSVESWAELCVAVNSKFGRDPYQHHLEELENLKQTGSVEECHNKFEELMHLVLVYNRGYDETFFVTRFVGGLKADIKLAIKLHKPRTVDAALSLAQTQEELLEEAAHTIADGGRMQCNSCVKGVEWWCQGSSFVTDLKVLALGGYDIILGMEWLEQFSPMWIDWKRKKRRFNLQDKRVTLTGVKDRVEHYKLVNAKQLSGLVKSGAVSRMVQLCVVEKDAAESDSVPPQVTEVLTEFVARFQEPTSLPPHRDFDHNIPLIPGARPVNKKPYRGLNDITEKNKYPMPVVDELLDELAGAKWFTKLDLRSGYHQIRLTECDEAKRAFRTHHGHYEFRVMPFGLTNAPATFQGLMNTIFAHLIRKCVLVFVDDILIYSQTLEDHVSHLREVFQLLQQHELYVKASKCSFAKSHLEYLGHIIGVAGVSTDLGKVKAVQDWPVPKNLRQLRGFLGLVGYYRKFIQGYGLMTNPLTKFLKKDVKWRPYLQHEEFIIQTDHRSLVYLGEQQLTTSIQHKAFVKLMGLQYKIQYKKGVENIVADALSRQKVDDALGAISSGQPRWMEIVIDGYAKNAKAQRLLTSLSLNPGGEPGFQLTDGILRWKGKVWLGHHIEAQQVVLLALHNSGVGGHSGVTGTYQRVKNLFYWPGMKKDI

SEQ ID NO: 142704 - protein, 229 aa, Oryza sativa
  Clone ID: PAT_MRT4530_43685C.1.pep
MWPSAPPKKIIFSDNFSIFAGPTSTRLRKYSSGKNKSTPATPTSHHHRPSAKSGRGGEPHRTLLPEWKAAPPLSSGRIWKGGREGRGRAASATADALPPPPAEATTAALLSPPVGSRRREGRGRAASTATSLPSSPDLGGREGGDGSRRLHRYWPPLFTRSGREGGRPLPLPVPSLRRIWEGGRAASTAASALPPRSDLGGRDGGEQSRCRCPPLRLGVETSRAKPGST

SEQ ID NO: 142705 - protein, 438 aa, Oryza sativa
  Clone ID: PAT_MRT4530_43686C.1.pep
MAGGMSDGSGAATTAGGVGDGSDAGGGNSNCVDDIKGGYRCKCSHGYEGNPYIKDGCKDINECLDNATYPCMGICKNTIGSFDCSCYPGSYMKNGFCLPNQKSTFPARHVIGASVGFVILVIAITFACYVQQRRKLQHIKNNYFQQHGGLILFEEMKSQQGHAFKIFSEEELQQATKKFNEQEILGQGGNGIVYKGLLKSNSEVAVKKCMTIDEQKKKEFGPMLVYEFIPNGTLFHLIHENHGNHISLITRLRIAHESAEALAYLHSCASPPILHGDVKSSNILLDNNFSAKVSDFGASILAPTDEMQFVTLVQGTCGYLDPEYMQTCQLTDKSDENKLEDMLNDQIKNNENMEFLEEMAELARKCLDMSSINRPSMKEIGDELGRLRKVMEHQCARQNPEEMESFLGDSSYVINSTVESTKSFSIEKNAMKRLKSGR

SEQ ID NO: 142706 - protein, 47 aa, Oryza sativa
  unsure (1)..(47): unsure at all Xaa locations
  Clone ID: PAT_MRT4530_43687C.1.pep
LSXARTSTLEDPPSATRRNKPVSFERSGAXAVDGDACLNVGEKSPRN

SEQ ID NO: 142707 - protein, 707 aa, Oryza sativa
  unsure (1)..(707): unsure at all Xaa locations
  Clone ID: PAT_MRT4530_43688C.1.pep
LLCHYSLSAPVAALDALAPAVVGKPGCQTRCDVVDIPFPFGIGDDRCALEARHTRYPFKLDCMSVGGTSKPFFRGMEVTKISLADGKAWMKMNISQNCYNQSTGTMERNREPVDFTGTPFWISDKDNKIFVIGCRTFSYMQINNVVTGCVSKCERALKDGECSGDGCCQVDFPTKGWRYSTTFDSENYNTSLIWRNNPCSYMAVIETTAFKFHYXYDTYNGAAPVVLDWIIXSMDVCDIAIKNTTSYACISGNSNCVDDIKGGYRCKCSHGYEGNPYIKDGCKDINECLDNATYPCMGICKNTIGSFDCSCYPGSYMKKKKNHNSSLLLNCAGASVGFVILVIAITFACYVQQRRKLQHIKNNYFQQHGGLILFEEMKSQQGHAFKIFSEEELQQATKKFNEQEILGQGGNGIVYKGLLKSNSEVAVKKCMTIDEQKKKEFGKEMLILSQTNHKNIVKLLGCCLEVEXPMLVYEFIPNGTLFHLIHENHGNHISLITRLRIAHESAEALAYLHSCASPPILHGDVKSSNILLDNNFSAKVSDFGASILAPTDEMQFVTLVQGTCGYLDPEYMQTCQLTDKSDXYSFGVVLLELLTRKKACNLDAPEHEKVLSMMFLSAMKENKLEDMLNDQIKNNENMEFLEEMAELARKCLDMSSINRPSMKEIGDELGRLRKVMEHQCARQNPEEMESFLGDSSYVINSTVESTK

SEQ ID NO: 142708 - protein, 72 aa, Oryza sativa
  Clone ID: PAT_MRT4530_43689C.1.pep
NVILSTRRRCVHCTNTIRCRRAHYSTTVYIYHPNPQHEKYVCIYSTMYSSINPPTTCHEEIGIRGSITCLVP

SEQ ID NO: 142709 - protein, 93 aa, Oryza sativa
  unsure (1)..(93): unsure at all Xaa locations
  Clone ID: PAT_MRT4530_4368C.1.pep
PTPSPVSTVTLHPLASPRRRPPPPWPPPXSSARAPHPHPLPHXSPSPPPASSWTTATPSPPPPTSTTRAXPXRPNPTRSFRRRGPRPARRGRL

SEQ ID NO: 142710 - protein, 127 aa, Oryza sativa
  Clone ID: PAT_MRT4530_43690C.1.pep
SKNISPGSQLKLSLKKKPSKASLYTTRNNNTATLKSSSIHHLKPVSLKQLIIHNPIIAISHKPKAQIAPSLQSQTPPTSPTSNPFRHHRENSGQLMTMTTTQKNRHQPMQNQLSDDIYMALYSCLRR

SEQ ID NO: 142711 - protein, 601 aa, Oryza sativa
  unsure (1)..(601): unsure at all Xaa locations
  Clone ID: PAT_MRT4530_43691C.1.pep
MAAAAVVHLSVHGRLRRSPELHARPYHRPSLLRCRAFKQEADNGGEEASSSPPPPTTAEARRRRKGPLYKLKAAIQGLAGSRSAAAEAYGGEYQRAVEKAEEIFFSVATQVGRYVITMMSSGVVLGVGFQLSGGDSQMNTLIWYSWLGGVIIGTMIVEKQLQGHXPRMRVVKGSGKAINYLTPPRILLALVTAWVRRGRWFDEEGRAVYAAEADRIRNWAESRARFSFTDAMEMYTENTWVSVFSLSVVCAFIILSSSGGXLFQAHDPRSCQTRWLHTPFFFSTGILLCQANHVLSKKWVNSASPGMVLTDLLLSGSSLRNKQMFNLICELPETVARTLVPRMRVVKGSGKAINYLTPPRILLALVTAWVRRGRWFDEEGRAVYAAEADRIRNWAESRARFSFTDAMEMYTENTWVSVFSLSVVCAFIILSSSVARLHRMLQPPIELKPCRVMILLDGEAGRSLHLVQTMYGFLCASHFFNIAIIMYIHATARPVQIIPMWRGVHPEQWLMCLEVNDFFGFLTRLDGWSHGGIHVVMYFISHDKCRREKGHSSRSNPPFTDAWDPPRSNATLTQVTVARNAPAIITPWAPGGTGCFAEKRG

SEQ ID NO: 142712 - protein, 74 aa, Oryza sativa
  Clone ID: PAT_MRT4530_43692C.1.pep
RRRRSHVVAVVWLGGEGGTARQGIDALDCGDGGSNHGDDSGRLLLALHAAGLALPPLPSTTSPAAAPCYFCVCV

SEQ ID NO: 142713 - protein, 389 aa, Oryza sativa
  unsure (1)..(389): unsure at all Xaa locations
  Clone ID: PAT_MRT4530_43693C.1.pep
PPLFFGGGGKKLFFRGEKPGGGGKKKPXGPPPXGAPPPPXKKKPPPXFXXFFPGGKPPPPKFXKKKGXXFFWGKXKKNPPXKXGGGGGFGXKKKKKTPPXKFWGXKNPPKGGPRXPQKGAXKKKGVLGXPGXKKXPGGVXGPPKGAPGKXFSPKGAPPQKPPXPXGKRXPKFFPRXPQNXGAPKXPKKXLXPXWGKRGPKFFPKTPNFPPPFFXLGKRGXPXLLGGPPPKGFWGNFKKTPPXFXXFXGEKNXGPQIXPFGXKXVFPKKKKGGGEXKGXGFPPPKXXGXPXFGFXEIXKKPFFXLFXPGEIKNXXPQKRGXKERGGENPKKFSPKKPFFRGPFPKRGGGRVKNKKNFFFKNPNWGPGKKPKGPLFPVFFPREKLGGPSPK

SEQ ID NO: 142714 - protein, 98 aa, Oryza sativa
  Clone ID: PAT_MRT4530_43694C.1.pep
TRSCCTGRWRWLGAATYLSCSEFHDQDQACSRPPRSTRRPSSNTARRTAPSASSTLSPDLAESAGHASLEPDDVSKARLRLATDAMFSNNKLTCTKNR

SEQ ID NO: 142715 - protein, 901 aa, Oryza sativa
  unsure (1)..(901): unsure at all Xaa locations
  Clone ID: PAT_MRT4530_43695C.1.pep
MSAPGAGAAAGAAAAAGGDGAPGAGGGVPGAGGGAANNNTNGGNSASQSSGGPFSGYILLLLLFLLLALYCFVPVPDVHDASSMFVRYVPVPNIHDASSMFVRYVSVLDIHGRRPNATLISGRRAEPHYTPKKPSKIAMPAEDHRWPSERMDSRTTETEESVESKTLEFHYFHSYQETKRTRESKLAEDAQISHPAALLKTKPEEEFAFSRALHVPEQIGIRKGVLAKEERLLYALLSIYIQFIVHTTIARSSAPSTSSSSSRPSSSSPFPAATVAALGMVPNGKGLLPKPRASGRPFRVAVALGASGVFAAASAILLALALFLLPNTVWRVWESAFLAVHFVAHAVAAWTIASRRGAAGGALPLQLRVFWVVTALVGALFSASAAVRWAEDSLLFPDDPLAFAGLALSLPLVYVAITASSGEVAGTCEREPADVTTAAEPSTPYDAASWLSRATFSWINPLVSKGYASDSLAAEDVPPVSPAHRAEASYARFVSNWPAQGSRYPVGVALWLSFWPRVLLTAALGLVRLAAMYVGPSLINHFVDFISHGGTTWEGLRLVAILVAGKAVQTLASHHYNFQGQLLGMRIRGALLTALYRKSLRLSTGARRAHGXGAIVNYMQVDAGTVSXPCTIVVALVLLYAYLGPSVLMTLAVITAVTVITAFANKLNLAYQLKFLGVRDSRIKAITEMLNHMRVIKLQAWEEKFGGKVRELRQTEMGWLTKIVLFMCANNVVFSSGPLAMTVLVFGTYLATGGELDAGKVFTATAFFSMLEGPMHNFPQTIVMCMQAFVSLGRLNKFLSDAEIDSTAVERIASSAGDAAAVKVQNGVFAWDVPVEGAEDARQGHGTENGREEGPEMEMVLKGIEVEVRKGELAAVVGTVGSGKSSLLSCIMGEMHKVSGT

SEQ ID NO: 142716 - protein, 60 aa, Oryza sativa
  Clone ID: PAT_MRT4530_43696C.1.pep
FFKQTIPNPSRGVLNFLNKINKIFSCNAQKIILKALNNPPIGPLVKIFINFLKKSSPLCN

SEQ ID NO: 142717 - protein, 805 aa, Oryza sativa
  Clone ID: PAT_MRT4530_43697C.1.pep
MGKDGGDPGGGGYPLVAVCIDKDKNSQNALKYATESLAHKGQTIVLVHVHTKGSSGNHCIPRTPAAEISRRISSGVEDAAGYKQPSDPQMKDLFLPFRCFCTRKDIHCKDVVLDDHDVSKAIVEFAAHAAIEKLVVGATARGGFVSCRGNRGEFGLWHLKRFKAEISSSISKTAPDFSTVYVVSKGGKVTSVRQAVRQAPAVSPLRTMIQGPKPDNVSTQKWTPPPPPSTTRPDIAGTPKIQDNFIMSPFARGANTSVRKAFPDYSMPESSDISFISSGPRRSLDLYPPRLSSGSDAHDHHSFEATRPPSMWGGDSFGSDSQSSNSSFASSLPMEDMEAEMKRLRLELKQTMDMYSTACKEALTAKQKAMELQRWKTDEEQRSHETRLTEESAMALIEQEKAKARAAIEAAEASQRLAEMEAQKRISAEMKALKETEERLKSMGGGGSRGAVRYRKYTIEEIELATEHFADGRKIGEGGYGPVYKGHLDHTPVAIKVLRPDAAQGRSQFNQEVEVLSCIRHPNMVLLLGACPEYGCLVYEYMANGSLDDCLFRRGGGPVIPWQHRFRIAAEIATGLLFLHQTKPEPLVHRDLKPGNILLDRNYVSKISDVGLARLVPPSVADSVTQCHMTSAAGTFCYIDPEYQQTGMLGVKSDVYSLGVMLLQIVTAKPPMGLTHHVARALDHGTIVDMLDPAVHDWPVDEARCFAEISIRCCELRRKDRPDLATVVLPELNRLRALGEDNMQLCNTMSGGGRSSMHSSPYNSNSSMHQPHRQTDMAIEHSVGRSSYDADTSQQAMQGRRLNYN

SEQ ID NO: 142718 - protein, 773 aa, Oryza sativa
  Clone ID: PAT_MRT4530_43698C.1.pep
MGKDGGDPGGGGYPLVAVCIDKDKNSQNALKYATESLAHKGQTIVLVHVHTKGSSGNHCIPRTPAAEISRRISSGVEDAAGYKQPSDPQMKDLFLPFRCFCTRKDIHCKDVVLDDHDVSKAIVEFAAHAAIEKLVVGATARGGFVSCRGNRGEFGLWHLKRFKAEISSSISKTAPDFSTVYVVSKGGKVTSVRQAVRQAPAVSPLRTMIQGPKPDNVSTQKWTPPPPPSTTRPDIAGTPKIQDNFIMSPFARGANTSVRKAFPDYSMPESSDISFISSGPRRSLDLYPPRLSSGSDAHDHHSFEATRPPSMWGGDSFGSDSQSSNSSFASSLPMEDMEAEMKRLRLELKQTMDMYSTACKEALTAKQKAMELQRWKTDEEQRSHETRLTEESAMALIEQEKAKARAAIEAAEASQRLAEMEAQKRISAEMKALKETEERLKSMGGGGSRGAVRYRKYTIEEIELATEHFADGRKIGEGGYGPVYKGHLDHTPVAIKVLRPDAAQGRSQFNQEVEPRRLPVRRGGGPVIPWQHRFRIAAEIATGLLFLHQTKPEPLVHRDLKPGNILLDRNYVSKISDVGLARLVPPSVADSVTQCHMTSAAGTFCYIDPEYQQTGMLGVKSDVYSLGVMLLQIVTAKPPMGLTHHVARALDHGTIVDMLDPAVHDWPVDEARCFAEISIRCCELRRKDRPDLATVVLPELNRLRALGEDNMQLCNTMSGGGRSSMHSSPYNSNSSMHQPHRQTDMAIEHSVGRSSYDADTSQQAMQGRRLNYN

SEQ ID NO: 142719 - protein, 269 aa, Oryza sativa
  Clone ID: PAT_MRT4530_43699C.1.pep
RPPGPKVGSSVRGGIHVVNGAGARRHRDACRRLGQHVELVGGLLWELELAELMRREATRRPLEQLQGALRRCYALVTACQEDRGYLHRLLLGARMANELRAAQHEIDMYIRLIPLIALVDNSSSNRRVTQATEGVRAVVPSCSDHHTSSAVVNIPVFRAKSGPLFYGFDINGVNPHSVTVDPQPQEEKIMDIEAVLKLFVHTEENYPGFRKFDFIQIVDATDGFSEKRILGKGGFGTVYKGHLLDGLTVAIKTFDADTAIFDLKSELQL

SEQ ID NO: 142720 - protein, 63 aa, Oryza sativa
  unsure (1)..(63): unsure at all Xaa locations
  Clone ID: PAT_MRT4530_4369C.1.pep
IKAEAXXQXTAWGTISSIKEXWSVXPPXPHPPLXNEHXGXKNAFTPYRSKLCSGNSRIYQPLT

SEQ ID NO: 142721 - protein, 139 aa, Oryza sativa
  Clone ID: PAT_MRT4530_436C.1.pep
MANSSSGVAIHDDCKLKFNELQSKRMHRFITFMMDNKGKEIIVDKIGDRTTSYEDFTSSLPEGDCRFAIYDFDFLTAEDVPKSRIFYILWSPDNAKVRSKMLYASSNERFKKELNGIQLEVQATDAGEISLDALKDRVK

SEQ ID NO: 142722 - protein, 46 aa, Oryza sativa
  Clone ID: PAT_MRT4530_43700C.1.pep
LRDLSQVGFHGAALLPHELICRVHSSGCLNGCCWHMPSVQASNCAE

SEQ ID NO: 142723 - protein, 99 aa, Oryza sativa
  Clone ID: PAT_MRT4530_43701C.1.pep
MQHRPRAPAHAPSLRALACTPSPLLGAPVPPHARRSHLAAPPADSSCAPLRRTVVVTIAAAHSVTRVHRREERRRGEESGARVSLLPCVGDFSRADAGA

SEQ ID NO: 142724 - protein, 608 aa, Oryza sativa
  Clone ID: PAT_MRT4530_43702C.1.pep
MEGGALALPHFRSRVGIGSPILLSADPGAARRSSGASGRSRVSRVNPGAYPRSAGRGRTWKRDSPEAPPRRSGITRVPNRSPEMPTERAGRTKVSNVNLEVSHHRAVAAVRLLRIEKGKAFVDLLNEKGNSSGENEMSYVERTLGFSIRCLDNRDIRLVTVIVAGTVRWKRYLDYLIMSLCSEEKVFREMEPLLLQILRIGFFEILKLNVPAYAAVDENVRLAKVALRPGAGNLVNAILRKLLLLKEANSLPLPKIEGDDRAQARALSIIYSHPVWMVRRWIRFLGKEEALKLMKWNNSDPHFSIRVNTANGYTRADLIDRLESLQVHYEKSTMDEFVRIQEGMQNYLNLFHVQTVLQAGLLKEGMCAVQDESAGKFPCLSDSGTSHLSKHLILMLRHEESIVGLVVSVVDPQPGETIIDCCAAPGGKTLFMAARLSGQGKIWALDINKGRLRILMEAAKLHNLDAMISDIHADLRLYAKETTATFDKVLLDAPCSGLGVLSKRADLRWNRQFEDLEELMCLQDELLDSASMLVKPGGILVYSTCSIDPEENEHRIAAFVQRHPDFVLQSVHGYVPAEFVTDEGFYSSSPTKHSIDGAFAARLVRSVL

SEQ ID NO: 142725 - protein, 138 aa, Oryza sativa
  unsure (1)..(138): unsure at all Xaa locations
  Clone ID: PAT_MRT4530_43703C.1.pep
DLYKKNLAHQEQPLGKKRDADPLISIKFLNGEQRAXLRARTEFPRGDGERRPSPLSSAPWATRNRWVKIRRKLSPLGHLLATPGHXRGEEEKTASKKGAVPPGXGGGGGVAASGEGGARGRDAEEEERTPVVAVISAT

SEQ ID NO: 142726 - protein, 39 aa, Oryza sativa
  Clone ID: PAT_MRT4530_43704C.1.pep
SYIKLLQTISTKNDVPEHLLFISIVMIQQNSLKLKTTTF

SEQ ID NO: 142727 - protein, 270 aa, Oryza sativa
  Clone ID: PAT_MRT4530_43705C.1.pep
MAPSSKLAALFFAFAVVAAAALAPAAEARVQGFNHEAASEPAIAAAGESKAATGGGAPTLPGLPGLPFPLFPFLTLPFPLIPIGGSSGGGGAAPPSAGSGFRFPFPLPLPFPAPASPGGAPPSSGSGFPAFPFPFPSSPVSPPSQASPASPAAPAPPSPPQPKECLTPLLSMMSCADYLTNSSAQTPPGTCCEGFKSLVSTAPICLCHGINGDLSKFLPLPVDMMKMMTLPNTCGATVPLQTFSMCNTPSVPPLMPQSPSAAAPAPGVSP

SEQ ID NO: 142728 - protein, 86 aa, Oryza sativa
  Clone ID: PAT_MRT4530_43706C.1.pep
IPEERNYEFFPKTVGSSAMSKMKPRILKTICKEHYQQEPRLLSHSGSIINSHPPSQSITSSPSPPSLKKKPVHRLILPHPIRPRHS

SEQ ID NO: 142729 - protein, 749 aa, Oryza sativa
  Clone ID: PAT_MRT4530_43707C.1.pep
MDPPYAGVPIDPAKCRLMSVDEKRELVRELSKRPESAPDKLQSWSRREIVEILCADLGRERKYTGLSKQRMLEYLFRVVTGKSSGGGVVEHVQEKEPTPEPNTANHQSPAKRQRKSDNPSRLPIVASSPTTEIPRPASNARFCHNLACRATLNPEDKFCRRCSCCICFKYDDNKDPSLWLFCSSDQPLQKDSCVFSCHLECALKDGRTGIMQSGQCKKLDGGYYCTRCRKQNDLLGSWKKQLVIAKDARRLDVLCHRIFLSHKILVSTEKYLVLHEIVDTAMKKLEAEVGPISGVANMGRGIVSRLAVGAEVQKLCARAIETMESLFCGSPSNLQFQRSRMIPSNFVKFEAITQTSVTVVLDLGPILAQDVTCFNVWHRVAATGSFSSSPTGIILAPLKTLVVTQLVPATSYIFKVVAFSNYKEFGSWEAKMKTSCQKEVDLKGLMPGGSGLDQNNGSPKANSGGQSDPSSEGVDSNNNTAVYADLNKSPESDFEYCENPEILDSDKASHHPNEPTNNSQSMPMVVARVTEVSGLEEAPGLSASALDEEPNSAVQTQLLRESSNSMEQNQRSEVPGSQDASNAPAGNEVVIVPPRYSGSIPPTAPRYMENGKDISGRSLKAKPGDNILQNGSSKPEREPGNSSNKRTSGKCEEIGHKDGCPEASYEYCVKVVRWLECEGYIETNFRVKFLTWYSLRATPHDRKIVSVYVNTLIDDPVSLSGQLADTFSEAIYSKRPPSVRSGFCMELWH

SEQ ID NO: 142730 - protein, 448 aa, Oryza sativa
  Clone ID: PAT_MRT4530_43708C.1.pep
MPLNPSSSASFLLSSLGRRSLVASLRKASPAAAAALSPMASASTVAAENGAAKAAAEKQQQQPVQVAKRLEKFKTTIFTQMSMLAIKHGAINLGQGFPNFDGPDFVKEAAIQAINAGKNQYARGYGVPELNSAIAERFLKDSGLQVDPEKEVTVTSGCTEAIAATILGLINPGDEVILFAPFYDSYEATLSMAGANVKAITLRPPDFSVPLEELKAAVSKNTRAIMINTPHNPTGKMFTREELEFIATLCKENDVLLFADEVYDKLAFEADHISMASIPGMYERTVTMNSLGKTFSLTGWKIGWAIAPPHLTWGVRQAHSFLTFATCTPMQAAAAAALRAPDSYYEELRRDYGAKKALLVNGLKDAGFIVYPSSGTYFVMVDHTPFGFDNDIEFCEYLIREVGVVAIPPSVFYLNPEDGKNLVRFTFCKDDETLRAAVERMKTKLRKK

SEQ ID NO: 142731 - protein, 109 aa, Oryza sativa
  Clone ID: PAT_MRT4530_43709C.1.pep
MLIDRPFGVWSRLTTVVGPPTPTAIIALLPSTVRQLGGVLTALKPDKTAAPDGANADRHCTDTGSAVGTTTAPHAPPSSRKGDDDEGHSLTVTGFISTDEQINDTWCQY

SEQ ID NO: 142732 - protein, 391 aa, Oryza sativa
  Clone ID: PAT_MRT4530_4370C.1.pep
MAGLSLRCGDCGVLLRSVEEAQAHAEATNHANFSESTEAVLNLVCAACGKPCRSQTEVDLHTKRTGHTEFTDKTMEAAKPIDLEAAPPKPAGEAMDVDASASAEPQEMVAPEVNKEMLADLEAMGFTTARATRALHFSGNSTIEGAINWLSEHQEDPDIDEPLLVPANTITEANKPSLSPEEMKIKAQELRERARKKKEEEREGWKEKGRSMIELRRLEKEEEKRAREKIRQKLEEDKAERRRKLGLPPEDPAAPKPSAPPPVEEKKRALPVRPATKAERMRDCLRNLKQQNKDDDAKVKRAFQTLLTYIGNVAKNPDEEKFRKIRLTNATFQERVGNLHGGIEFLQLCGFEKLEGNEFLFLARDKVDKAVLNTAGAELNSAITNPFFGVL

SEQ ID NO: 142733 - protein, 561 aa, Oryza sativa
  Clone ID: PAT_MRT4530_43710C.1.pep
MATPRFKEEDLGLRVISLGKCSRHLVHAPRSAWFMLHAPSRRSFSTSASSSPCTSPPAPPETSPPNTSTPAPPAPDVPENSSPPDYDLCSDRCSLGDMLEASYDPVEFVRNFPAVMFSKPKNAPDTLYDRWVFKGWFQSAIRDILSKLEDHHIAGLEFEDINTETMTIACNIDSSEFYPRFNFHGKTRNITFEGQKRNYTQLGSTLEKLIAISASASNVHAYHHQLLTEDAKDLLNKMRHPSLDRFEAYMLRNHPSLLQIEAHASFYLTCFDHLKLLPQKPVENFFKGLPYAVGDQHGDWIAIAHQHPLLSMQLSHGYRISNWSQATYRRDGYCHRTEPGSKYSIVQTHRIYHQYFPRTLPAMMWGMVALRQHKGQRTVDVRFTLNSPVPVFFDKDKVRQSPASRMPHGRSGSAQPPAASGLGAERRTPTCRLQLCSACSCSADGLEQPPAWLPPGPLQAAAPAAARGTPSPVGHGLGGQGARRVGNWGKIANGLRCGPIRPQHASLNNIDSHDLHLWRKQDQRGKDCRIKCKFRDFFSLRSNMDKKSLIVSTLFDRNVNV

SEQ ID NO: 142734 - protein, 57 aa, Oryza sativa
  unsure (1)..(57): unsure at all Xaa locations
  Clone ID: PAT_MRT4530_43711C.1.pep
MAPLPAAGAXXRIILAHGACXGGWCWYKVAAXLRAAXHRXDAPDXXXAGXRXLXVGG

SEQ ID NO: 142735 - protein, 190 aa, Oryza sativa
  Clone ID: PAT_MRT4530_43712C.1.pep
DHHDDDLLLLPPSVPYLLSNLPDPASVAAVADPLRLASRRLVLLPVNDNPDVSHAEGGSHWTLLVLDNSNAVSGPRFVHHDSLPPTNLPSARRLAAVLRPLLPASAIPLIEGPTPRQTNGYDCGVFVLAVARAICNWWPTRARHSNSDSDWLEAVKREVNADSIKAMRTQLLQLIHTLIQNNTTTNQHSC

SEQ ID NO: 142736 - protein, 183 aa, Oryza sativa
  Clone ID: PAT_MRT4530_43713C.1.pep
MAETVADEGLEIMDSWCRRGRLRTRRRLRRLYATARVAGLLSAPLRLNTSATSALVLLLLRQGHQRRAGALELMELGGDGFVGFGKDPVHLLLWQQPHLLRRRMLLLWSSVNGGVRLSLIGRGDGDGYLAGPGFPKPPGPGLPCPGESGSESGLVRDRGRVGIGDENVIRALANQLLYSFGPA

SEQ ID NO: 142737 - protein, 65 aa, Oryza sativa
  Clone ID: PAT_MRT4530_43714C.1.pep
MSVMILRRVRQSRVAQQTRLRHLCLADARIWTTTKTMVSMTKKEATPTSTGTKGMLKNRILDNLS

SEQ ID NO: 142738 - protein, 1111 aa, Oryza sativa
  Clone ID: PAT_MRT4530_43715C.1.pep
MPPPPAPPSVERQVAEIAAEPDRASAYARLLHLQRACADDPSAAADLAAASPSILLPLLLRDAGDRDEAVAASALKCLGFTLYHPVLVSTVSGQMAQSVLDTVIQLIMTTQMKAICNLGVWCISVQELEAVVVDHRATSLLTAIVHAIDNPFCSLSTTFEAVQAIMKLTSQNPEKMRELSSIWVPPIYRRLLSVDKAERDMAERCLIKVSSVVLPPQSLLSKAIASDLEHSLLSCMLNMIHDPVKKVQAVKSWGWYISLLGLHVVDNRHLLNKILKVPEQLFIDSDTQVQIATMVAWRNLVNAFLPQASETLVPKTKISPIESRADTNAQLKKIRLIMMPLGRILSRSHSIALSSSCLSTWHHLLYKLGDLINQLPILEAAFGPVLKIVFSIGPDIQNKPLYSFCVNLFHEYISTKVRDMASHGEYLPIPLNQNLLSQSCIHLKTLMDGQCIRWLPWDVTCFDFHLDILVCIVNPELLRKMTLESVVTVMDSATHIFRLLVQGVQVDCKAKCANGNAQICVAKVCKFVKKVFMDLVGKQNNNNCSVLLQYAFQFVKVILEELDHCLLASGICVIGLDIEHIKEMEYADCSPKLSYPGMKSYSYMEMVSPEVYMIVLSLSIVAEFTGELSHGDAEQLAIIICLSNFQDNFHAAVSFMYKQIMLLTDNRLRMRWLMVWNKIAKRLNGQITPNLKKIICGAGVHDVLYQFFCYPFFAFLLPGRKSTLCGSESSSESYLSLTHDLEVEVAIEVYRSICANSNHGPEADHKVFLESFCGFVVSIIDENISLFQANIEYCSEKKFKNCAILSTLGELVSGLLENGHILNYAIKEPTEASEESAGYSQPSILLCCLRLVSRFMGLSTIVIKANPTTQHQIMSRVFSSLSAFAGYLLLKKDVLLFFEIIGEQLTECLSLSGTLYREMQHGETINQIEKLWLKIIMCLKMSKLINDCSFLQKQQMLLQAAVSHPHRPISVATTPAWRASRYDISTLQHSSFSLSKLDKLPMERRKDLTDPCTPHNAIALEEIDILRKFKHPISELEKNDESIKISVGLGRKRLKIMKYSMKPREPGKSTVPPGNFSSKKDTDADAFSSHYMESKACRKPELILEMLKRKR

SEQ ID NO: 142739 - protein, 140 aa, Oryza sativa
  unsure (1)..(140): unsure at all Xaa locations
  Clone ID: PAT_MRT4530_43716C.1.pep
TYKTAPVLSVRAYARTAVAALMFTIHDPVAPALHVSHAAPRSPVSPFRHWPXCRRGSAITAFVGRAVHGATPPISPVAFGHARPRLPVTFRHRRSDRERGRGLRNVLVVAIDLIATADDLLSMRDPHLVFPPPHVFLIQC

SEQ ID NO: 142740 - protein, 138 aa, Oryza sativa
  unsure (1)..(138): unsure at all Xaa locations
  Clone ID: PAT_MRT4530_43717C.1.pep
TYKTAPVLSVRAYARTAVAALVFTVHDPVVPALHVRRAAPRSPVSPFHHWPXCRRGSAITTCVGRAVHGATPQISPVAFGHARPRLPVIFRHRRSDRERGHRLRNILVVAIDLIATADDLMSMRDPHLVFPPPHVFLI

SEQ ID NO: 142741 - protein, 128 aa, Oryza sativa
  Clone ID: PAT_MRT4530_43718C.1.pep
GLITSYFVFKTFHYSLFVLITISLHATQQRGDPTCCEASQLSLVLAGGEDAALMGLNPAHLRLVHRVLPCPGQTYAGHPRLLLMLCLVDLLGTPLGLLPIFLLLPLDAVDLRKRLSPVLFWGHTNSLF

SEQ ID NO: 142742 - protein, 141 aa, Oryza sativa
  Clone ID: PAT_MRT4530_43719C.1.pep
YEDLVWEPGLWESSTKVQLVRDVYWCYNKNKNRISTLKNKTALGLKSFIDKLEVNKSRAPDKQINDDNLYESLFFLRVYMVAHKDDTIKGYSGTMEMMHDKKAIVRLLMIERPEYMVTLISAIRKLGWIRQSPFCAWITST

SEQ ID NO: 142743 - protein, 414 aa, Oryza sativa
  Clone ID: PAT_MRT4530_4371C.1.pep
MAGLSLRCGDCGVLLRSVEEAQAHAEATNHANFSESTEAVLNLVCAACGKPCRSQTEVDLHTKRTGHTEFTDKTMEAAKPIDLEAAPPKPAGEAMDVDASASAEPQEMVAPEVNKEMLADLEAMGFTTARATRALHFSGNSTIEGAINWLSEHQEDPDIDEPLLVPANTITEANKPSLSPEEMKIKAQELRERARKKKEEEERRMEREREKERIRIGKELLEAKRIEEDNERKRMIELRRLEKEEEKRAREKIRQKLEEDKAERRRKLGLPPEDPAAPKPSAPPPVEEKKRALPVRPATKAERMRDCLRNLKQQNKDDDAKVKRAFQTLLTYIGNVAKNPDEEKFRKIRLTNATFQERVGNLHGGIEFLQLCGFEKLEGNEFLFLARDKVDKAVLNTAGAELNSAITNPFFGVL

SEQ ID NO: 142744 - protein, 204 aa, Oryza sativa
  Clone ID: PAT_MRT4530_43720C.1.pep
MECFKTTLAGVVLVVLLLQQAPVLRANDPDPLQTSASPTSTARLATGGDVNANPNGSNVTQLDVAGWPGVNTLGVSMNRIDFAPGGTNPPHVHPRATEVGIVLRGELLVGIIGSLDTGNRYYSRVVRGGETFVIPRGLMHFQFNVGKTEATMVVSFNSQNPGIVFVPLTLFGSNPPIPTPVLVKALRVDAGVVELLKSKFTGGY

SEQ ID NO: 142745 - protein, 102 aa, Oryza sativa
  unsure (1)..(102): unsure at all Xaa locations
  Clone ID: PAT_MRT4530_43721C.1.pep
MVLEHRKITDDRYIKTTDKFQYGNFYCRLHSSESNGEVPTNPNPNQTRVGDSMHKEGRRPAGRSPRILAWGSEVSGGGWXKRRGRRGAAKRQVPHSSSAPGP

SEQ ID NO: 142746 - protein, 227 aa, Oryza sativa
  Clone ID: PAT_MRT4530_43722C.1.pep
MECFKTTLAGVVLVVLLLQQAPVLRANDPDPLQDFCVADLDSEVTLNGYPCKPTPAAGDEFLFSSRLATGGDVNANPNGSNVTQLDVAGWPGVNTLGVSMNRIDFAPGGTNPPHVHPRATEVGIVLRGELLVGIIGSLDTGNRYYSRVVRGGETFVIPRGLMHFQFNVGKTEATMVVSFNSQNPGIVFVPLTLFGSNPPIPTPVLVKALRVDAGVVELLKSKFTGGY

SEQ ID NO: 142747 - protein, 229 aa, Oryza sativa
  Clone ID: PAT_MRT4530_43723C.1.pep
MEHSFKTIAAGVVIVVLLLQQAPVLIRATDADPLQDFCVADLDSKVTVNGHACKPASAAGDEFLFSSKIATGGDVNANPNGSNVTELDVAEWPGVNTLGVSMNRVDFAPGGTNPPHVHPRATEVGIVLRGELLVGIIGTLDTGNRYYSKVVRAGETFVIPRGLMHFQFNVGKTEATMVVSFNSQNPGIVFVPLTLFGSNPPIPTPVLVKALRVDAGVVELLKSKFTGGY

SEQ ID NO: 142748 - protein, 222 aa, Oryza sativa
  Clone ID: PAT_MRT4530_43724C.1.pep
MSPSSVNLRSCALTTRSTERNNGQNVKQTARTHAPTHAPARREGVSRQTGVCHLQRNPAGIELGADVCSAGQRETVFVGLGPRIDIDLFVATNSVLVSTLYRCRSVSSNKLGREEGEDVAFHGELEIDRCTSRGPRQGRRDSAVRDLLSLRVGSCIAVPVPVCDTNLCQYSVKAAPRVIDNWCHFALSFRRPYTVANRDGFINYVLPFSIASLGMPFIFSKL

SEQ ID NO: 142749 - protein, 34 aa, Oryza sativa
  Clone ID: PAT_MRT4530_43725C.1.pep
YGHQSVAVAVVRPLVGSRLHAQPHGVRNEVVIPG

SEQ ID NO: 142750 - protein, 141 aa, Oryza sativa
  Clone ID: PAT_MRT4530_43726C.1.pep
GRVECSHSWTPPAAAAAAASEADATLSLSISLFRPSIIQLAMIHPSNHASFKKNNSCLGFRSIFAYLLIAFSSLIRLQEFHSGFFYFILHFRSLLGIYASQSINQFSGHHQSTNQQKAFRTRESRTHHACHFSSCCNHQIT

SEQ ID NO: 142751 - protein, 63 aa, Oryza sativa
  Clone ID: PAT_MRT4530_43727C.1.pep
FFFPFFFFLPFTSYQHSIPHPSKRGLFPPSNGIPNHPHVLLHPQMLLTKPPLNFKQTPPHIPH

SEQ ID NO: 142752 - protein, 218 aa, Oryza sativa
  Clone ID: PAT_MRT4530_43728C.1.pep
MGNCQAADAAAVVIQHPSSSSSSSSSSGNGGGGGGGRVERAYGAVSAAAVMAANPGHYVAEVVRPVATAPAATAATASAPAARRRLKLLRPDDTLVLGGVYRLVTFEDVLKQFVSKRNATMSRATIATAAEDDDGHRRQGHRGGEAAAAAPAKVAAQSRQENPSSPSPTDEARPEPEPEPEPDLVATAMALGGRMSLSRHGQWRPALPSIAEGSVLCF

SEQ ID NO: 142753 - protein, 98 aa, Oryza sativa
  unsure (1)..(98): unsure at all Xaa locations
  Clone ID: PAT_MRT4530_43729C.1.pep
TATIDRHHMDQMAGSLGERSQTPQGXHVYVMPRCLAAEKRQRVGHGAPGGAVDEQLAHDXRQQIDVLDDSRCKCSYLNHMVGGIDRELTTTRVGNPMG

SEQ ID NO: 142754 - protein, 74 aa, Oryza sativa
  Clone ID: PAT_MRT4530_4372C.1.pep
LFFNKIQSYHMVGFFEKFGGSKKNLISKTCFLIFITSASTLIFNIYIPITNLILHIRQNLYIQFSRVFTYFISL

SEQ ID NO: 142755 - protein, 1667 aa, Oryza sativa
  Clone ID: PAT_MRT4530_43730C.1.pep
MAGPEDKDEEGASHSPRTKGIIQYFTRQVKQHTEGLDTDLQVTNEKIGQLESTQISTNTKLTGLETAVARIDTSLAALVRHFDALNAGGNGGGNDDDIDGEYVEDNLEDEYIADTEQDDRDARDRRRLHNNRRGMGGRRRREVRNNDDAFSKIKFKIPPFDGKYDPDAYLSWEIAVDQKFACHEFPESTRVRAATSEFTDFASVWWIEHGKKNPNNMPQTWDALKRVMRARFVPSYYARDLLNRLQQLRQEETEDTAMARFLGGLNREIYDIVDYKDYTNMTRLFHLACKTSSWQTRTTPPAGRTVSPSSTPTTSRAAPPPSSDKSATKAAQPAPSASSMASTGRMRDVQCHRCKGFGHVQRDCPSKRVLVVKNDGEYSSAIDFDDDTLALLAADHADNEPPEEHIGAAFADHYESLIMQHVLSAQMEKAEQNQRHTLFQTKCVVKERCCRMIIDGGSCNNLASSEMVEKLALSTKPHPHPYYIQWLNNSGKAKVTKLVHINFAIGNYHDVVECDVVPMQACNILLGRPWQFDRDSMHHGKKIVLHPMSPEDILRDDVAKAAKSKCESDKKAQSDGKKPETINLKPKCLLATKSDINELIASPSVAYALEYSDVFPKEVPPGLPPVRGIEHQIDLIPGASLPNRAPYRTNPEETKEIQRQVHELLDKGYVRESLSPCAVLVILVPKKDGSWRMCVDCRAINNITIRYRHPIPRLDDMLDELSGSIVFSKVDLRSGYHQIRMNLGDEWKTAFKTKFGLYEWLVMPFGLTNAPTTFMRLMNEVLRPFIGKFVVVYFDDILIYSKSMGEHFNHLRAVFNALRDARLFGNLEKCTFCTDRVSFLGYVVTPQGIEVDQAKVEAIQSWPTPKTVSQVRSFLGLAGFYRRFVQDFSTIAAPLNALTKKGVPFTWGTSQENAFHMLKDKLTHAPLLQLPDFNKTFELECDASGIGLGGVLLQEGKPVAYFSEKLSGPVLNYSTYDKELYALVRTLETWQHYLWPKEFVIHSDHESLKHIHSQGKLNRRHAKWVEFIESFPYVIKHKKGKENIIADALSRRYTLLTQLDYKIFGLETIKDQYVHDADFNDEAHGGGLMGHFGAKKTHDILASHFFWPQMRRDVGRAVLKKNIKMWEECLPHIEFAYNRSLHSTTKMCPFQIVYGLLPRAPIDLMPLPSSEKLNFDAKQRAELMLKLHETTKENIERMNAKYKFAGDKGRRELNFEPGDLVWLHLRKERFPDLRKSKLMPRADGPFKVLAKINENAYKIDLPADFGVSLTFNVADLKPYLGEEDEFESRTTQMQEGEDDEDINTIDTSTSPHVQHDGPITRARARQLNYQWDKPDHSSDPHPLTGDGDFGDREDKGQICNYISQNQSAFVRKRAIHDNFLYVQNMVKLLHRTKKQSLFIKIDIAKAFDTVNWSYLLEILRQFGFGNRWLNWITNLFSTSSSQVLLNGSPGQKINHARGLRQGDPLSPMLFILAMKPFHRILKEAENVNVLAPLGVRNGRFRCSLYADDVAVFANPKQEELTALSHILACFAQASGLHTNINKTEIYPIRCEGIDLQNLLAGWPGQTKYFPCKYLGLPLHFRKLRKIDFLPLIDKIGSRLPGWKGRFFTSAGRQALVSSVLSAMPTHHLTVLQAPKWVFKRIDRFRRSFLWKGEDPDHSNPGDSLINW

SEQ ID NO: 142756 - protein, 1619 aa, Oryza sativa
  Clone ID: PAT_MRT4530_43731C.1.pep
MAGPEDKDEEGASHSPRTKGIIQYFTRQVKQHTEGLDTDLQVTNEKIGQLESTQISTNTKLTGLETAVARIDTSLAALVRHFDALNAGGNGGVNDDDIDGEYVEDNLEDEYIADTEQDDRDARDRRRLHNNRRGMGGRRRREVCNNDDAFSKIKFKIPPFDGKYDPDAYLSWEIAVDQKFACHEFPESTRVRAATSEFTDFASVWWIEHGKKNPNNMPQTWDALKRVMRARFVPSYYARDLLNRLQQLRQEETEDAAMARFLGGLNREIYDIVDYKDYTNMTRLFHLACKAEREVQGRRASAKANFSAGKTSSWQTRTTPLAGRTASPSSTPTTSRAAPPPSSDKSATKAAQPAPSASSMASTGRMRDVQCHRCKGFGHVQRDCPSKRVLVVKNDGEYSSASDFDDDTLALLAADHADNEPPEEHIGAAFADHYESLIVQRVLSAQMEKAEQNQRHTLFQTKCVVKERCCRMIIDGGSCNNLASSEMVEKLALSTKPHPHSYYIQWLNNSGKAKVTKLVHINFAIGNYHDVVECDVVPMQACNILLGRPWQFDRDSMHHGRSNQYSFLYHDKKIVLHPMSPEDILRDDVAKAAKSKCESDKKAQSDGKKPETINLKPKCLLATKSDINELIASPSVAYALVCKDALISLHDMQHSLPPAVANILQEYSDVFPKEVPPGLPPVRGIEHQIDLIPGASLPNRAPYRTNPEETKEIQRQVHELLDKGYVRESLSPCAVPVILVPKKDGSWRMCVDCRAINNITIRYRHPIPRLDDMLDELSGSIVFSKVELRSGYHQIHMKLGDEWKTAFKTKFGLYEWLVMPFGLTNAPSTFMRLMNEVLRPFIGKFVVVYFDDILIYSKSMGEHFNHLRAVFNALRDARLFGNLEKCTFCTDRVSFLGYVVTPQGIEVDQAKVEAIQSWPTPKTVSQVRSFLGLAGFYCRFVQDFSTIAAPLNALTKKGVPFTWGTSQENAFHMLKHKLTHAPLLQLPDFNKTFELECDASGIGLGGVLLQEGKLVAYFSEKLSGPVLNYSTYDKELYALVRTLETWQHYLWPKEFVIHSDHESLKHIRSQGKLNRRHAKWVEFIESFPYVIKHKKGKENIIANALSRRYTLLTQLDYKIFGLETIKDQYAHDADFNDVLLHCKDGRTWNKFVINDGFVFRANKLCIPASSVRLLLLQEAHGGGLMGHFGAKKTHDILASHFFWPQMRRDVGRFVARCATCQKAKSRLHPHGLYMPLPVPTVPWEDISMDFVLGLPRTKRGRDSIFVVVDRFSKMVHFIPCHKTDDASHIADLFFREIVRLHGVPNTIVSDRDTKFLSHFWRTLWAKLGTKLLFSTTCHPQTDGQIEVVNRTLSTMLRAVLKKNIKMWEECLPHIEFACNRSLHSTTKMCPFQIVYSLLPRAPIDLMPLPSSEKLNFDAKQRAELMLKLHETTKENIERMNAKYKFAGDKGRRELNFEPGDLVWLHLRKERFPDLRKSKLMPRADGPFKVLAKINENAYKIDLPADFGVSPTFNVADLKPYLGEEDELESRTTQMQEGEDDENINTIDTSTSPHVQHDGPITRARARQLNYQVSSFLSSYSSSLYPGDACTRVLLRNDGEDPKGRGFARGGFGLQGSANF

SEQ ID NO: 142757 - protein, 1166 aa, Oryza sativa
  unsure (1)..(1166): unsure at all Xaa locations
  Clone ID: PAT_MRT4530_43732C.1.pep
MGEPDELPPLPLALHPPHLIPPAPAADPRALSFLPDLGGLPWVAYGAASFXVVSHLPSPPREGSSSSGGGGGGDDDGPFFRQAIDLRAPVSAVSWCRRGGGELAAAAGSSVSVFQPAPSSSPGSFGWVLRWAITETFAVAAVAWTGSGDGILLAGEGVAMWARAESSWKLAWRCSPQVAQSLASATHFLQGPVATAAATPSSEGGVPPVLVIVNDAKVGVEKVELAHPKPVSMIQWRPRSLFVSDQSEVRREILMTCCLDGTLRLWSEDEAAKSKKHRVLQRSFSVIAVIEMSNTLNGVLGVDITVKWAIETGSVVSRDEDDNFTLFSGDPGHNQVGKCEWLADVEYSCLCWAPSVIQQNRFLVLGSEKGADCFVVSIQNEGDVLSCQKMFTIPFFEDQGRHGTYLNADMFSAVICKGSSVFPTCLDGEYPTCVSATPLNNTVLSLQQHGSGTASCYHIATGYSDGTVKLWKMSFADNPLHTEKESHIWQLVGTFGADRGPITAISLSNCGRIATVGRNVQKNTTSIHIWKAVKLMGDGSFLLEDALTLQGSVVGLDWLSLGDGRFLLAVYLLNELHIYSHKHPSFKNVLHTVNSKEKHLWSCIALSHSPHDIASFLWGPKATGVLVHKNHLALFSSWLVRRANESSTQICDCPAADIHELPCTKHFNEDIFGRFSLSENYSNTMLLQKHSAHCSNDLWNLSDIAAKMSGPVASYHPRALIQSLYSGQWKRANTVLQHLVQSMQANKISNTLLECSFCGKSCHNIPECPLSESFTDMTSNDISNRGLLWGDNQRSTAFSLLSPSNSYPRMEDINTTTSTSQSSEINKLLATNVSISTISDMERTQIVALSDLLGKITDQSHASPYKSLDEAGRRFWVAVQFERLYALRRSEDPSSAEVFHVDSASIAWALQSDCQDDLLNSVLPAEPSWSEMRNLGMGLWYTNVSQLRTKMEKLARLQYLKSKDPKDCALLYIALNRTKVLVGLFKISRDEKDKRLYEFLSRNFQGSGGPLERNLIANVLLPEAVDKGDHWLSSLLEWMLGNYSQSVNQLLDCHLKSLIEESSIPGDTNVFADPGVGQYCAIIATKSSFRNCVGEAQSANLSKLSLAMASCALNRCGLPLEALEYLCCNSGIEGKDNTSLDGGDKKIVYGILNPFHASSNWLSASV

SEQ ID NO: 142758 - protein, 2978 aa, Oryza sativa
  Clone ID: PAT_MRT4530_43733C.1.pep
MAGPEDKDEEGASHSPRTKGIIQYFTRQVKQHTEGLDTDLQVTNEKIGQLESTQISTNTKLTGLETAVARIDTSLAALVRHFDALNAGGNGGGNDDDIDGEYVEDNLEDEYIADTEQDDRDARDRRRLHNNRRGMGGRRRREVRNNDDAFSKIKFKIPPFDGKYDPDAYLSWEIAVDQKFACHEFPESTRVRAATSEFTDFASVWWIEHGKKNPNNMPQTWDALKRVMRARFVPSYYARDLLNRLQQLRQGAKSVEEYYQELQMGLLRCNLEETEDAAMARFLGGLNREIYDIVDYKDYTNMTRLFHLACKAEREVQGRRASAKANFSAGKTSSWQTRTTPPAGRTASPSSTPTTSRAAPPPSSDKSATKAAQPAPSASSMASTGRMRDVQCHRCKGFGHVQRDCPSKRVLVVKNDGEYSSASDFDDDTLALLAADHADNEPPEEHIGAAFADHYESLIVQRVLSAQMEKAEQNQRHTLFQTKCVVKERCCRMIIDGGSCNNLASSEMVEKLALSTKPHPHPYYIQWLNNSGKAKVTKLVHINFAIGNYHDVVECDVVPMQACNILLGRPWQFDRDSMHHGRSNQYSFLYHDKKIVLHSMSPEDILRDDVAKAAKSKCESDKKAQSDGKKPETINLKPKCLLATKSDINELIASPSVAYALVCKDALISLHDMQHSLPPAVANILQEYSDVFPKEVPPGLPPVRGIEHQIDLIPGASLPNRAPYRTNPEETKEIQRQVHELLDKGYVRESLSPCAVPVILVPKKDGSWRMCVDCRAINNITIRYRHPIPRLDDMLDELSGSIVFSKVDLRSGYHQIRMKLGDEWKTAFKTKFGLYEWLVMPFGLTNAPSTFMRLMNEVLRPFIGKFVVVYFDDILIYSKSMGEHFNHLRAVFNALRDARLFGNLEKCTFCTDRVSFLGYVVTPQGIEVDQAKVEAIQSWPTPKTVSQVRSFLGLAGFYRRFVQDFSTIAAPLNVLTKKGVPFTWGTSQENAFHMLKDKLTHAPLLQLPDFNKTFELECDASGIGLGGVLLQEGKPVAYFSEKLSGPVLNYSTYDKELYALVRTLETWQHYLWPKEFVIHSDHESLKHIRSQGKLNRRHAKWVEFIESFPYVIKHKKGKENIIADALSRRYTLLTQLDYKIFGLETIKDQYAHDADFNDVLLHCKDGRTWNKFVINDGFVFRANKLCIPASSVRLLLLQEAHGGGLMGHFGAKKTHDILASHFFWPQMRRDVGRFVARCATCQKAKSRLHPHGLYMPLPVPTVPWEDISMDFVLGLPRTKRGRDSIFVVVDRFSKMAHFIPCHKTDDASHIADLFFREIVRLHGVPNTIVSDRDTKFLSHFWRTLWAKLGTKLLFSTTCHPQTDGQTEVVNRTLSTMLRAVLKKNIKMWEECLPHIEFAYNRSLHSTTKMCPFQIVYGLLPRAPIDLMPLPSSEKLNFDAKQRAELMLKLHETTKENIERMNAKYKFAGDKGRRELNFEPGDLVWLHLRKERFPDLRKSKLMPRADGPFKVLAKINENAYKIDLPADFRVSPTFNVADLKPYLGEEDELESRTTQMQEGEDDEDINTIDTSTSPHIQHDGPITRARARQLNYQDECPRGRVDAHHKFAATIGDGPEDKDEEGASHSPRTKGIIQYFTRQVKQHTEGLDTDLQISTNTKLTGLETAVARIDTSLAALVRHFDALNAGGNGGGNDDDIDGEYIEDNLEDEYIADTEQDDRDAQDRRRLHNNRRGMGGRRRREVRNNDDAFSKIKFKIPPFDGKYDPDAFLSWEIAVDQKFAYHEFPENTRVRAATSEFTDFASVWWIEHGKKNPNNMPQTWDALKRVMRARFVPSYYARDLLNRLQQLRQGAKSVEEYYQELQMGLLRCNLEETEDTAMARFLGGLNREIYDIVDYKDYTNMTRLFHLACKAEREVQGRRASAKANFSAGKTSSWQTRTTPPAGRTASPSSTPTTSRAAPPPSSDKSVTKAAQPAPSASSMVSTGRMRDVQCHRCKGFGHVQRDCPSKRVLVVKNDGEYSSASDFDDDTLALLAADHADNEPPEEHIGAAFADHYESLIVQRVLSAQMEKAEQNQRHTLFQTKCVLKERCCRMIIDGGSCNNLASSEMVEKLALSTKPHPHPYYIQWLNNSGKVKVTKLVHINFAIGNYHDVVECDVVPMQACNILLGRPWQFDRDSMHHGRSNQYSFLYHDKKIVLHPMSSEDILRDDVAKAAKSKCESDKKAQSDGKKPETINLKPKCLLATKSDITELIASPSVAYALEYSDVFPKEVPPGLPPVRGIEHQIDLIPGASLPNRAPYRTNPEETKEIQRQVHELLDKGYVRESLSPCAVPVILVPKKDGSWRMCVDCRAINNITIRYRHPIPRLDDMLDELSGSIVFSKVDLRSGYHQIRMKLGDEWKTTFKTKFGLYEWLVMPFGLTNAPSTFMRLMNEVLRPFIGKFVVVYFDDILIYSKSMGEHFNHLRAVFNALRDARLFGNLEKCTFCTDRVSFLGYVVTPQGIEVDQAKVEAIQSWPTPKTVSQVRSFLGLAGFYRRFVQDFSTIAAPLNALTKKGVPFTWGTSQENAFHMLKDKLTHAPLLQLPDFNKTFELECDASGIGLGETWQHYLWPKEFVIHSDHESLKHIRIQGKLNRRHAKWVEFIESFPYVIKHKKGKENIIADALSRRYTLLTQLDYKIFGLETIKDQYAHDADFNDEAHGGSLMGHFGAKKTHDILASHFFWPQMRRDVGRAVLKKNIKMWEECLPHIEFAYNRSLHSTTKMCPFQIVYGLLPRAPIDLMPLPSSEKLNFDAKQRAELMLKLHETTKENIERMNAKYKFAGDKGRRELNFEPGDMVWLHLRKERFPDLRKSKLMPRADGPFKVLAKINENAYKIDLPADFRVSPTFNVADLKPYLGEEDELESRTTQMQEGEDDEDINTIDTSTSPHIQHDGPITRARTRQLNYQDECPCGRVDAHHKFAATIGDGVSVAKVQRLWTVVVGP

SEQ ID NO: 142759 - protein, 213 aa, Oryza sativa
  unsure (1)..(213): unsure at all Xaa locations
  Clone ID: PAT_MRT4530_43734C.1.pep
LLVYYVTKATIFENVKRWVKELRVHRNSNIVVXLMGNKMVLKHFRSVSLEDATSFAEKEGLSFFETSALGAMNVDKAFQTVVFXIYRIISKKALAADEAGSWCWCCQRGTIYTSFRDRFQQFYIKMLLFLVAIDIVSIGLLEVILFVIVKMWCHATRIKDYLQEMKNFQNVHKSNIVQPLRQFGSEYHKLVLCMGDAVAVILLPKLKYFVLLL

SEQ ID NO: 142760 - protein, 2110 aa, Oryza sativa
  Clone ID: PAT_MRT4530_43735C.1.pep
MGEPDELPPLPLALHPPHLIPPAPAADPRALSFLPDLGGLPWVAYGAASFLVVSHLPSPPREGSSSSGGGGGGDDDGPFFRQAIDLRAPVSAVSWCRRGGGELAAAAGSSVSVFQPAPSSSPGSFGWVLRWAITETFAVAAVAWTGSGDGILLAGEGVAMWARAESSWKLAWRCSPQVAQSLASATHFLQGPVATAAATPSSEGGVPPVLVIVNDAKVGVEKVELAHPKPVSMIQWRPRSLFVSDQSEVRREILMTCCLDGTLRLWSEDEAAKSKKHRVLQRSFSVIAVIEMSNTLNGVLGVDITVKWAIETGSVVSRDEDDNFTLFSGDPGHNQVGKCEWLADVEYSCLCWAPSVIQQNRFLVLGSEKGADCFVVSIQNEGDVLSCQKMFTIPFFEDQGRHGTYLNADMFSAVICKGSSVFPTCLDGEYPTCVSATPLNNTVLSLQQHGSGTASCYHIATGYSDGTVKLWKMSFADNPLHTEKESHIWQLVGTFGADRGPITAISLSNCGRIATVGRNVQKNTTSIHIWKAVKLMGDGSFLLEDALTLQGSVVGLDWLSLGDGRFLLAVYLLNELHIYSHKHPSFKNVLHTVNSKEKHLWSCIALSHSPHDIASFLWGPKATGVLVHKNHLALFSSWLVRRANESSTQICDCPAADIHELPCTKHFNEDIFGRFSLSENYSNTMLLQKHSAHCSNDLWNLLDIAAKMSGPLASYHPRALIQSLYSGQWKRANTVLQHLVQSMQANKISNTLLECSFCGKSCHNIPECPLSESFTDMTSNDISNRGLLWGDNQRSTAFSLLSPSNSYPRMEDINTTTSTSQSSEINKLLATNVSISTISDMERTQIVALSDLLGKITDQSHASPYKSLDEAGRRFWVAVQFERLYALRRSEDPSSAEVFHVDSASIAWALQSDCQDDLLNSVLPAEPSWSEMRNLGMGLWYTNVSQLRTKMEKLARLQYLKSKDPKDCALLYIALNRTKVLVGLFKISRDEKDKRLYEFLSRNFQEEKHKSAALKNAYVLMGRHQWELAIAFFLLGGDTSSAISVCAKNLQDEQLAIVICRLLEGSGGPLERNLIANVLLPEAVDKGDHWLSSLLEWMLGNYSQSVNQLLDCHLKSLIEESSIPGDTNVFADPGVGQYCAIIATKSSFRNCVGEAQSANLSKLSLAMASCALNRCGLPLEALEYLCCNSGIEGKDNTSLDGGDKKIVYGILNPFHASSNWLSASVVSDVESNLKITMASKYLSRVLRNQSLCSRCSLPLTKDKVLQEFNSNHVNELSRDVKAALQVFDKKFSLQVADIAEKILTFCCNDGIFFLAYVLLWGSISSDVGTGRTSAMLTVMDLLEYNMEFSFSWLCHDIKALLTMTSPVIGACVNRESFQVLLDQLLQAVHDKIHGVSIGTDGGTVNGLLCNIQQERSENQSLPIDEKWHLIGISLWTRLSSFMKQFLTEFVEKERIELETSASDVEFKDLISSVVAKFLMGSLHFVSSLLVKLHASFFREKVLKKSNSSVLFWLSQPRSNNNSHEQFSSIFQLANSENIEVFFDTLWEISAHPVDICTAFVDEEMNCFPLNSISLTRSWKAMTEATLVESENNFAQRSEENRDNLSSKNNEKIQRSIDNTPYGVEVTLEPKRKGLIADFERPRELVRRNGELLEAICLNSINEQQGAIATNRKGLVFFNWNDKQDNKNLAEYIWAGSDWPLDGWAGCESTPTSTSFSPSVGLGRRKGSHLSSGGPTISLGSLAKPGRDLTGGGAFGIPGYAGIGASGFGWGEPDEFEDFVDPPATLENIHSRALSRHPSLPLLLVGSSNTHVYLWEFGKDSAMATYGVLPAANIPPPYALASISAVQFDYYGQRFATAALDGTVCTWQVESSQPYQSILIDHRDVAFLTASGSVLAAAGCSSNGANVVIWDTLAPPSTCQTSIMCHEGGVRSLSVFDRNIGCGSISPLIVTGGKSGDVTLHDFRFISTGKTKHHRSSNEHDVKASSTSMHDTKSGTSNGVSNSGMIWHIPKAHTGSVSSVSTIPNTSLFLTGSKDGDVKLWHAKSSQLVFHWQKLHERHTFFQPTSRGFGGVVRAAVTDIQVLPNGFVSCGGDGSVKLVQVKNDFADVRPH

SEQ ID NO: 142761 - protein, 1629 aa, Oryza sativa
  unsure (1)..(1629): unsure at all Xaa locations
  Clone ID: PAT_MRT4530_43736C.1.pep
MAGPEDKDEEGASHSPRTKGIIQYFTRQVKQHTEGLDTDLQVTNEKIGQLESTQISTNTKLTGLETAVARIDTSLAALVRHFDALNAGGNGGGNDDDIDGEYVEDNLEDEYIADTEQDDRDAQDRRRLHNNRRDSSFDGKYDPDAYLSWEIAVDQKFACHEFLENTRVRAATSEFTDFASVWWIEHGKKNPNNMPQTWDALKRVMRARFVPSYDACDMLNRLQQLRQGAKSVEEYYQELQMGLLRCNLEETEDAAMARFLGGLNREIYDIVDYKDYTNMTRLFHLACKAEREVQGRRASAKANFSTGKTSSWQTRTTPPAGRTASPSSTPTTSRAAPPPSSDKSAAKAAQPAPSASSMASTGRMRDVQCHRCKGFGHVQRDCPSKRVLVVKNDGEYSSASDFDDDTLALLAADHADNEPPEEHIGAAAFADHYESLIVQRVLSAQMEKAXEQNQRHTLFQTKCVVKERCCRMIIDGGSCNNLASSEMVEKLALSTKPHPHPYYIQWLNNSGKAKVTKLVHINFAIGNYHDVVECDVVPMQACNILLGRPWQFDRDSMHHGRSNQYSFLYHDKKIVLHPMSPEDILRDDVAKAAKSKCESDKKEQSDGKKPETINLKPKCLLATKSDITELIASPSVAYALVCKDALISLHDMQHSLPPAVANILQEYSDVFPKEVPPGLPPVRGIEHQIDLIPGASLPNRAPYRTNPEETKEIQRQVHELLDKGYVRESLSPCAVTVILVPKKDGSWRMCVDCRAINNITIRYRHPIPRLDDMLDELSGSIVFSKVDLRSGYHQIRMKLGDEWKTAFKTKFGLYEWLVMPFGLTNAPSTFMRLMNEVLRPFIGKFVVVYFDDILIYSKSMGEHFNHLRAVFNALRDARLFGNLEKCTFCTDRVSFLGYVVTPHGIEVDQAKVEAIQSWPTPKTVSQVRSFLGLAGFYRRFVQDFSTIAAPLNALTKKGVPFTWGTSQENAFHMLKDKLTHAPLLQLPDFNKTFELECDASGIGLGGVLLQEGNPVAYFSEKLSGPVLNYSTYDKELYALVRTLETWQHYLWPKEFVIHSDHESLKHIRSQGKLNRRHAKWVEFIESFPYVIKHKKGKENIIADALSRRYTLLTQLDYKIFGLETIKDQYAHDADFNDEAHGGGLMGHFGAKKTHDILASHLFWPQMRRDVGRAVLKKNIKMWEECLPHIEFAYNRSLHSTTKMCPFQIVYGLLPRAPIDLMPLPSSEKLNFDAKQRAELMLKLHETTKENIERMNAKYKFAGDKGRRELNFEPGDLVWLHLRKERFPDLRKSKLMPRADGPFKVLAKINENAYKIDLPADFGVSPTFNVADLKPYLGEEDELESRTTLMQEGDDDEDINTIDTSTSPHIQHDGPITRARARQLNYQDECPRGRVDAHHKFAATIGDGVSVAKAQRLWTSFEFLPPHIATLINFVVITTVTAIAKKLHPILPIFAGFGKFKIAKFRLQNSVFVARSFGTYSDRTLKNSTSFILSHRQLHHKPDYSLTGPEDKDEEGASHSPRTKRIIQYFTRQVKQHTEGHDTDLQVTNEKIGQLESTQIATNTKLTGLETSVARIDTSLAALVRHFDALNAGGNGGRSEEDIDGEYIGDNWEDEYIADTEQDDRDARDR

SEQ ID NO: 142762 - protein, 170 aa, Oryza sativa
  Clone ID: PAT_MRT4530_43737C.1.pep
MVVRQPWMVAQAHRLKINATSSTTYYAHADSSVSPSVHPRATSHPELFACHVDRNTLFELAISTVLEKPTGVQQQQRLHGANVHKEEEDESRQSAQLQDTGPTGGGGGGMHACTPKRPINRWPRKDNPVAGAAHDAETVATTECVLDREDRKLAGIFSVVQWNGGAWGKR

SEQ ID NO: 142763 - protein, 250 aa, Oryza sativa
  unsure (1)..(250): unsure at all Xaa locations
  Clone ID: PAT_MRT4530_43738C.1.pep
QEVVNSLANIAKRSERNGGCFNFNRGGRTAADGGGRGRGRGHGRNNTGGFGGRTCNANNKHPLCQLCRKTVHTVFDCWYRFDXEFVPTERSVAAVSNLYGVDINXYIDTGATDHITXEIEKLTVRDKYNDKDQVHTASESGMDIDHTGHSIVHIYASSNHKLFFKNILHVPKAKKEKXNLVSVHRFLYDNHSFLEVHPFYFLIKDRVTKNTLLKGWCRHGLYPLPSASREGYGVIKPTVIGWHDRLGHPS

SEQ ID NO: 142764 - protein, 448 aa, Oryza sativa
  Clone ID: PAT_MRT4530_43739C.1.pep
MEALPPVAVAGTVLEDLPEDALLAILALLAPTDAAAAACACRRLAAAASSPSLPLALALRLGLPPPRPLLPASAARLLRSLHRLRRLLGLWRRLPSSSFSGSGYRSTSSSSSLAAFEWAPGGTLAASLLAPSARGLAVAKSPFVTLSIDETGETVAAMGDVPVSVNFVGNNHIVVEAAAASSGDDDDEAAMEGGSPPEVMYMHFANRRSPGAGRKRRSKQGRRRGRAMEAEHFVRIADAEPTEARPLQGLWKLIARLRLHTKGIMAIMQLTGWVFLLAHALGYMTCRNMEKSHLATPKSFWGISESRTLEFYLVTYDDIGGITCRQVSDTRGQNSGFTPIFWTTNTTFLEQPFSEKELDHYIRREHIQGVDSDHAATENRAISRILCINSSYDVVDHHLSAPLDDMRNVEGRIWLYDDGTFGFGFSGSNSIIDLKHVSSDGCILDALH

SEQ ID NO: 142765 - protein, 79 aa, Oryza sativa
  Clone ID: PAT_MRT4530_4373C.1.pep
YTRSRIPANIAITLSALAEVASLSPPPSCQARSPPSPPVASPVTPLSPPPPCLARSPPSPSVAPLSSPPPCLACSRPSS

SEQ ID NO: 142766 - protein, 135 aa, Oryza sativa
  unsure (1)..(135): unsure at all Xaa locations
  Clone ID: PAT_MRT4530_43740C.1.pep
VNTLSVMVTDKTYLLFFDLWNIRIWDTFTYTDCSYVRRGNLSQIMKNISTIQVISKILLGVLLGDQDGPRYKRDPQGGVKGXNFIINTPTIVYEAGVRRAKSPRDLVEYIDYDLILIPTYPNTLIIRSPSITRRH

SEQ ID NO: 142767 - protein, 70 aa, Oryza sativa
  Clone ID: PAT_MRT4530_43741C.1.pep
MIDDPWAHGSLAAVRTCTRVWQKGVAGAAPATPRRDGDRCVAIWRQRRFPAGAECLSRPTAVSIDGDVRL

SEQ ID NO: 142768 - protein, 690 aa, Oryza sativa
  Clone ID: PAT_MRT4530_43742C.1.pep
MTKPLPSTILLICVSAIGMVAADVPVAGHPGCQTRCGDVDIPFPFGIGDHCAIHHGFNIICKPVNGTKRPFKGSFEVTKISVRDAKAWMKMRISWFSYEDNKIFIIGCNTMAYMRGVSYVIGCLSTCSDQPKNGSCSGAGCCSVDVPPDLGYLEAYFNKDYNSSEISYSSCGYVVVMEKAVTTYIPSTNFWDDYNGTVPAVMDWIITWETCEEAKTNMSSYACVSNNSECLNSTNGRGYRCKCSKGFDGNPYVKDGLLGCRDINECLDNTTYPCAGICENTIGSYKCSCPQGQNELARGVCVPDQKIQKSQAWVMPVVGASVGFVILVIMATCSYLIRERRKLQHIKQKYFKLHGGLLLFQEMNSNERKSFTIFSEAELQHATNKFDKNQILGHGGHGTVYKGLLKDNTKIAVKKCMTMDEQHKKEFGCCLEVQVPMLVYEFIPNGTLSNLIHGNHGQHISLVTRLRIAHESAEALAYLHSYASPPIIHGDVKSSNILLDVNFMAKVSDFGASILAPLDKSQLVTLVQGTWGYLDPEYMQTCELTDKSDVYSFGVVLLELLTRKNVFNLDAPGNEKSLSMRFLSAMKENKLENILDDQISNEENMEFLEEVVDLAKQCLAMCGEDRPSMKKVAEKLDRLVKVMQHPWTQQNPEELESLLGESSYIISSGASSTGNFSIEKKVVKDLASGR

SEQ ID NO: 142769 - protein, 539 aa, Oryza sativa
  Clone ID: PAT_MRT4530_43743C.1.pep
MVAARRRRRPRRRVRPPPVATPSSDPRLAAAGTGASTPPPPLPRRRMWSGWRWGRRRGRGACSPVDPAVLEAGLVWRLLAAAGQLTRGGAVAVAVDALLFEHLWWLQHTPTSSLPSPSWVINSPSSRPLAPPDSVDVIPPLAIVGRRAATPPPLPSHAAGPCRKTSTGHNHRCPLLQQIHATGRRPQSQCDLEVEKLGVGWVGLYEGFEGVCIADHGCGCVVLPSWDAGSDRCSGRGDDCFFLGWEPPFANLAAADARISFPVCVPEDLWDASNSSNSDRARLIPAMFSIMYGKVGISADTPSSTSDSFFSDSLNSSCGQSLIGMVLVTTFCYLKSVVQVPLAFIVAPDIFRINRDILSFVSCIVSNQIKQTCASIIQDTSDTSSNTKTDLSSDTPSNTTMTGSTKRAFNELCFCAKNVDPTADLKKYIEDLECLDRSSKFYAVAVNNTFMKQDRVYCTKEFSQDYLKPLMEGKETISIGVQIAGGVSKNMILHMSTDGRCNLKKGWAKFATHNHIYLQSLCTFHFYKTTRLEATFDVL

SEQ ID NO: 142770 - protein, 189 aa, Oryza sativa
  Clone ID: PAT_MRT4530_43744C.1.pep
RILSPPPSPSSPSWRSPSYPPSPRTPRLMPPPPPPPPPPPSHRRRAGAAPPRGGRAADPRWRSPWTRCCSSTCGGCSRRRLRPSPHHRGSSIPLTADPSRRPTPSTSSLPLPSSADAPPPRRRRPPTQQIHAARRPSATTVAALPSSFSNPLPSMTAQAAASSPTPGSTLPTICELASSSLRRFLVIFV

SEQ ID NO: 142771 - protein, 195 aa, Oryza sativa
  Clone ID: PAT_MRT4530_43745C.1.pep
MAELKQGGNAQHSSAQTVEEQEETAVYLWHTDREGYASVGSSKHNKSNQGKPHCHCHILESLDEQAAQQPTNVHLGEEDEVDGVRLCQQPHQRVVVVPPKQKSPEISVERKKLTHMSLARLTLVLAKKPQPGLSSRERAAMVVASGRLAAWTCCVGGQRRWGGGATADDGEGRDDVDGVGRREGSAARGIDDPRW

SEQ ID NO: 142772 - protein, 189 aa, Oryza sativa; identical to SEQ ID NO: 142770
  Clone ID: PAT_MRT4530_43746C.1.pep

SEQ ID NO: 142773 - protein, 513 aa, Oryza sativa
  unsure (1)..(513): unsure at all Xaa locations
  Clone ID: PAT_MRT4530_43747C.1.pep
MAGPCPCRHGTPAAHGPFGARRPVKAGRQLSCTGRQAARPPAARPPVHTIVVPIAIAPPPPPPPTLPPPSRRRFGAPPPPPRAVAKRSYLCRATVKAGTAFISDEVGPPTTTPQAAQRANGPDPGIGSHAAAPADGGGEEEEEAPSPRPSPPVATPSSDPRLAAAGTGALTPPPPLPGRRMWSGWRWGRRRGRGACSPVDPAVLEAGLVWRLLAGAGQLTRGGAVAVAVXALLFEHLWWLQHTPTSSLPSPSWVINSPSSRPLAPPDSVDVIPPLAIVGRRAATPPPLPSHAAGPCRKTSTGHNHRCPLLQQIHATGRRPQSQCDLEVEKLGCGFFANTRVNLANDMRNNDYTLMRLLAQADAINFIFFTKMDIGGGRGDDCFFLGWEPPFANLAAADARISFPVCVPEGGFLQDRAKMMVLSRNFCDVMSHYVDLLLFPFQDLWDASNSSNSDRARLIPAMFSIMYGKVGISADTPSSTSDSFFSDSLNSSCGQSLIGMTSFYFYGCNEVAA

SEQ ID NO: 142774 - protein, 183 aa, Oryza sativa
  Clone ID: PAT_MRT4530_43748C.1.pep
MTVAGSDRKSPVAVRGSRRVPYGWRGLHTPMVTAPADGTATRRVASDRRDRREADGDATVTAQQRRRRARRAGDDGAAAVARGTRWDATVTATARQRRHGAQGDATGGSGDATAGGAGRGAMTRQQRRRRRGSNGDGARWYEARGATATAERRAARQVTAARRQAAMVTARGTRRAWQGRGRG

SEQ ID NO: 142775 - protein, 104 aa, Oryza sativa
  unsure (1)..(104): unsure at all Xaa locations
  Clone ID: PAT_MRT4530_43749C.1.pep
GDAWGLTLSLRRRHRATAAGCYTFLRSASRRGGALAPRLLXSASAAAHVVRVEVGTTKGERNLFXVDLAVLEAGPVRRRPRSQRDLEVEKLGVLRVHSQIRYPR

SEQ ID NO: 142776 - protein, 80 aa, Oryza sativa
  Clone ID: PAT_MRT4530_4374C.1.pep
QVVFSLYDCCLKSLQFKTTEIEIVVSSNRPVNVKGSQTLTLNLEERSSELLWVYRSKGQYYPLTNPNPFPTTCIEPETKT

SEQ ID NO: 142777 - protein, 150 aa, Oryza sativa
  unsure (1)..(150): unsure at all Xaa locations
  Clone ID: PAT_MRT4530_43750C.1.pep
FHPLPPPSPSCHRRLLHLLRHRRRIAVSEVGARPPPPRAVAERSRLRRATVKAGAAFISDEVVAPTTTPQAAQRADGPDPGIGSHAAAPADGDGEEEEEAPSPRPSSAGCYTFLRSASRRGGHWRLDSSASAXAAAHVVRVEVGTTKGER

SEQ ID NO: 142778 - protein, 304 aa, Oryza sativa
  Clone ID: PAT_MRT4530_43751C.1.pep
MLCIPSLFELGHGGVTGISGLAVLEQYTWSRCRGSWTAFLGICGMQAAAETATEHVRFQLRSASCMGRFTFHSYRFMHCSAPNIFLYSRGLADVRTGMGRSGFIYFVQFQGQIKQTCASIIQGINISYQPHTRAITISATSTEDTLDTSSNTKTDLSSDTPSNTTMTGSTKRAFNELCFCAKNVDPTADLKKYIEDLECLDRSSKFYAVAVNNTFMKQDRVYCTKEFSQDYLKPLMEGKETISIGVQIAGGVSKNMILHMSTDGRCNLKKGWAKFATHNHIYLQSLCTFHFYKTTRLEATFDVL

SEQ ID NO: 142779 - protein, 46 aa, Oryza sativa
  unsure (1)..(46): unsure at all Xaa locations
  Clone ID: PAT_MRT4530_43752C.1.pep
VQVPSTXSRQPPPRXPGFXLEGCLAALCCCCLLDECCCDPSVIFVT

SEQ ID NO: 142780 - protein, 53 aa, Oryza sativa
  Clone ID: PAT_MRT4530_43753C.1.pep
MDAVKMQQLAQVPPIAHQEKMSLQILRRYPLASSLHRRARDFVAASAALELLQ

SEQ ID NO: 142781 - protein, 89 aa, Oryza sativa
  Clone ID: PAT_MRT4530_43754C.1.pep
RLGACAAPPVLRYGKYWRILDKRWPGEQPCDELDACCMHHDNCVQAKNDYLSTACNEELLECLARLREGSSTFQGNTCMIDEVIDVISL

SEQ ID NO: 142782 - protein, 92 aa, Oryza sativa
  Clone ID: PAT_MRT4530_43755C.1.pep
MKQCILESFSSCRSDRDYTKVLACHRWIQDEFLRKATHKWAFLSDMSPRKFVIFLAGRCSNQLKMKLQGWHAQMMASCHICSADASNFSCLN

SEQ ID NO: 142783 - protein, 85 aa, Oryza sativa
  Clone ID: PAT_MRT4530_43756C.1.pep
MAGRWRVGGGEKYGGEAEEEDGGAGGESNEGGGGGGANPWSSSAALLPNGTLLQTGGFSNGDRIARLFSPSTGWVDLPSFLAVRR

SEQ ID NO: 142784 - protein, 55 aa, Oryza sativa
  Clone ID: PAT_MRT4530_43757C.1.pep
PSPSPQAPPPPAPPPPPFQIPKPSNWNRGLRTEHVIVDAAVTVSIPELHFITAAC

SEQ ID NO: 142785 - protein, 128 aa, Oryza sativa
  Clone ID: PAT_MRT4530_43758C.1.pep
PEWLTGVAITPKVDVNSFGMVLLEIISGRRNLSEAYTSNHYHFDYFPVQAISKLHEGSVQNLLDPELHGDFNLEEAERVCKVACWCIQEDEIDRPTMGEVVRFLEGLQEVDMPPMPRLLAAITERSHI

SEQ ID NO: 142786 - protein, 114 aa, Oryza sativa
  unsure (1)..(114): unsure at all Xaa locations
  Clone ID: PAT_MRT4530_43759C.1.pep
YRHYDLEGTVLVHNLVLRPYTEFIWHDYGLQRWPLLQSASIELINNLVWQQLVLLAQQSDYEDINIXVQAIPHELQLQXVGDLYLDRRLAQAHALLAINVPYKYGIYPKYYGAP

SEQ ID NO: 142787 - protein, 62 aa, Oryza sativa
  Clone ID: PAT_MRT4530_4375C.1.pep
FFFFFFKISRKSFTLLLSNMLQKNLRVQTSTATNAEWKTEERKTIAPKTVHTSKSEIKPLHW

SEQ ID NO: 142788 - protein, 900 aa, Oryza sativa
  Clone ID: PAT_MRT4530_43760C.1.pep
MASSWHASAGRLLENPLLDDPSVSRVMREASFSSAAVKSIIEQSLSAPSPCPSAAASTTTAGPGPLSPSPSPLPRAGAANAYLNPRLAAAAAVASGGGGGGGDDARKVIDVMLKPTRRNPVLVGDAGPDAVLKEAIRRIPTAGFPALAGAKVLPLEAELAKLAGDKAAMAARIGDLGAVVERLLGEHGGVVLDLGDLKWLVDGPAAAASEGGKAAVAEMGRLLRRFGRAGVWAVCTAACTTYLRCKVYHPGMEAEWDLHAVPIARGGAPIAAAAAGSALRPGGSGILNSSMGMLSPALRPMPVTPTALRWPPPGSDQSPAAKPAMCLLCKGSYERELAKLEAEQTDKPASRPEAAKPGLPHWLQLSNDQNKAKEQELKLKRSKDELERKWRETCARIHSACPMAPALSVPLATFTPRPPVEPKLGVARGAAVPTLKMNPSWEKPSVAPTLELRKSPPASPVKTDLVLCRLDPGTNPAVENEQKESCEGLTALQKAKIAGISDIESFKRLLKGLTEKVSWQSDAASAIAAVVIQCRSGSGKRRNVGTRGDMWLLFVGPDQAGKRKMVNALSELMANTRPVVVNFGGDSRLGRVGNDGPNMGFWGKTALDRVTEAVRQNPFSVIVLEGIDQVDVVVHGKIKRAMETGRLPDSRGREVSLGNVIFVLTTNWVPEELKGSNVETLLRGEERMLESTSSSWQLELSIGDKQVKHRADWLCDDVRPAKLAKELSSSHGLSLDLNLAVGALDDTEGSHNSSDVSVEQEQEKGQLAVKRSTPAPGSDILELVDDAIVFRPVDFTPFRKTVTDCISAKFESVMGSSSSFRIDEDAVDWMVGSVWLTDEKIEDWAEKVLKPSIERLWHNVKHDSGRSIIRLTAVAAKALPRWGGGREGLPVAVTIAIDGM

SEQ ID NO: 142789 - protein, 107 aa, Oryza sativa
  Clone ID: PAT_MRT4530_43761C.1.pep
MNTRPVVLVFLLLVLVITSQFEWKQQIGDAAADPADARRRHQGLAKEDAVKEKIIFSQEKNIQQLNELIESLQRQLLHCRGSNNTVHTTTVSHTEVSEVDGQESIDD

SEQ ID NO: 142790 - protein, 778 aa, Oryza sativa
  Clone ID: PAT_MRT4530_43762C.1.pep
MASLLPILLLTAFLSSKPALCYINPGATPPQKIGTKSSGGRATYIVFVEPPPPLGHGDGEDDHCRWHESFLPLSELAGSDDEPRLVHSYTEAVSGFAARLTGGELDAVSKKPGFVRAIPDRTLQLMTTHTPEFLGLRKDAGLWRDSGYGKGVIVGVLDTGIDSSHPSFDDRGVPPPPARWKGSCRDTAARCNNKLIGVKSFIPGDNDTSDGVGHGTHTASTAAGNFVDGAAVNGLGVGTVAGIAPGAHIAMYRVCTVEGCTESALLGGIDEAIKDGVDVLSISLGSSFAADYDKDPLAIGAFSAVSKGIVVVCAAGNNGPAFATLSNEAPWMVTVAASSVDRRFSAPTRLGDGRVIDGEALDQASNSSGKAYPLSYSKEQAGLCEIADTGDIKGKIVLCKLEGSPPTVVDNIKRGGAAGVVLINTDLLGYTTILRDYGSDVVQVTVADGARMIEYAGSRNPVATITFKNRTVLGVRPAPTLAAFSSRGPSFLNVGILKPDIMAPGLNILAAWPSSVARTDAAAAPPSFNVISGTSMATPHVSGVAALVKSVHPDWSPAAIKSAILTTSDEVDNTGGPILDEQHNKTMLFGPFNTGAGHVNPTRAADPGLVYDIGVAEYAGFLCTLVGEYVLPIIVRNSSLQSCRDLPRVGQSHLNYPSITVELEKTPFTVNRTVTNVGPAESTYTANVTLAAETSLKLSVSPETLVFSKAGEKKTFAVTVSGRFTKAAQAVAVLEGSLRWVSPEHVVRSPVVLYIPVASAPPSPPMPAVGTRRGDNWA

SEQ ID NO: 142791 - protein, 1344 aa, Oryza sativa
  Clone ID: PAT_MRT4530_43763C.1.pep
MERNAVPIIVPAVSDRLFLSIVSVDTGKTVAKSGKAAARSGICQWPDSILESIWFSQDEVSKEFDECQYKIVVSVGSIKSGVLGEIFLNLTNFLNLVDPTAISLPLKRCNSGTVLQLKVQYLGAKSKSSGVRSWKDLSPRLDDRSPTNDDIDSKSDGSDSVANRSVRSSSGNPLGGTTQDELGNREMSFSASGSHRSSNSGDSTADRTNLSPRDSSNGGMHVGRQDSASSYVSASRGDDGFRSNNSSFSSRASGPNVLQGNTPKSFGNGFGQLSLGTSDSSKELLEAAEETIEELRDEAKMWERHSRKLKADLEMLKKECSEKSKQQTELEAELSAAHAERDSYRQEIEELKSSMKEVTTRQKVGGTSKYGDWIDLQKELEDDVKFLKESNANLSIQLKNTQEANIELVSILQELEETIEEQKAEISKISKVKNVTDADALKKGPLVKQDTEWAKQLSIKEDEITMLREKLNHVLNIENLGSDAVYLELEKENELLRVKIQELEKDCSELTDENLELIYKLKEVGGATKGQGPCIPNDSNLQIEELKSQICQLEEELRSKELLHTGSFADASISSSKVLQEKCADLELKLLNFRSQIYELEEKFQKSQEELEQRNLELSELRQKLDSSHSMAGEGVQTSGARGYQFRNGMDSEPETDVLKAKIQLQQQENDDLRCSKVEMESVISKIQAEKSQLEECLEASRKESSISSKCLDEVRQDILVLSSSIDSHVSANKVLERKVTELESCKADLELHISDLEQENIELSERISGLEAQLTYMTNEKESSELQIHDSKSLIVNLKDKVERQQAEMETQRLEFKQKQQEAQRKLSEAQDDSEVLRRSNSKLQSTVESLIEECSSLQNQIAELKRQKLELHGHLTQQEQELDNSKKRNLDFCKTVEFLEAKLSSLQKDISSKEQSLLSELESIFQEHTEQEEKINRAHFMLNKIEKEKTLEVENLEREVMSLTAQASSTQEERENATVEAIREVSVLRADKVKLEASLQDVSAQLRHYESQLGDLRKESKSKIKGLVDSLNASKQSEEMLAADAEHMKKLMEDAKSNEDKLRKSSGELELKLKANDYEKQQMIEEISGLKLQVQKIMSLQDEVLKLKSSLDEAKFERGKLEELHRSVTEECEELKAQKAMLTDKMSNMQETLDNGEEEKRSRIAMQAKLVRLESDLSAVEASHVHEAELKNELNRIKRSNSEYQRKIQSLEQENEDLTSQLEQMAHIKEEDLGKQDIGGSPVDEESGIHLKIQVLEAKLAEALEENKMYRAQQKSPMPDGQCAAGNGNESSNERVLQLEGELRDMKERLLNMSLQYAEVEAQRERLVMELKATKKGGGRWF

SEQ ID NO: 142792 - protein, 120 aa, Oryza sativa
  Clone ID: PAT_MRT4530_43764C.1.pep
MGYFRAPRRKAAAAAEGESVRAALLVGGGGEEAAVPKGYFAVYVGAEARRFVVPTSYLRQPAFRGLMELAADEFGFAQEGGLRLPCREEDFQATVAALDARRRPASGGAIMSTMVKARSL

SEQ ID NO: 142793 - protein, 115 aa, Oryza sativa
  Clone ID: PAT_MRT4530_43765C.1.pep
RRPSASSHSACAASSPLSPSLASPPPPSFLPALSPLPHALLPTLPSPPLTSPTPPSLPRATSHGCSPAPSRGPPLLVRRPTVQGGVAAASYRALQRRRRQDARGRWQSPPWRSGV

SEQ ID NO: 142794 - protein, 84 aa, Oryza sativa
  Clone ID: PAT_MRT4530_43766C.1.pep
LLSTWRSEVLTRSRQQASLPPRIRIRRDQKQRYVFPDSIHRHRKGLAILISEIDIRCLVLAHNSSCLSLSGTSPISEGCFRIRH

SEQ ID NO: 142795 - protein, 185 aa, Oryza sativa
  unsure (1)..(185): unsure at all Xaa locations
  Clone ID: PAT_MRT4530_43767C.1.pep
QRRKAQAKKTTRHIIKEDTGQTAATERKTKKWGGKKQKNEKKKTKNERLKGKKKKNGKIITPTRQRKKHSARRNKRIKTKGKKKKKGKKKGAKKKDKXKKEPTKIHEKKRTDKKSLKTKKNRNRRGNSMRTKKEKKEKLXEKNQIEKSPKKYGRIEEKKKYEKKKNKKPIYGPKTAEGARPFARN

SEQ ID NO: 142796 - protein, 847 aa, Oryza sativa
  Clone ID: PAT_MRT4530_43768C.1.pep
CVYKGKSPVSVLVLGSQEALKLPVASGANAGVGADANANAKAGIGAGVGISGAAKVGADIGAKAGVGGDMNAKAGIGAGVGISGGAKVGADIGAKAGVGADTNVNAKAGIGAGAGISGGAKVGADIGAKAGVGADANAKAGIGAGIGISGGAKVGADIGAKAGVGADANANAKAGIGAGVGISGGAKVGADIGAKAGVAGDTYTKEKAGVGAGVGISGGAKVGAEIGAKAGVGADANANEKAGIDAGVGISGRAKVGAGIGAKAGIGANANANAKAGIGAGVGISGGAKVGADIGAKARVGADANANAKAGIGAGAGISGGAKVGADIGAKAGVGGGAIAKAGIGAGVGISGGAKVGADIGAKTGVAGDANAKVGIGAGVGISGGAKVGADIGAKAKVGGDTNAKAGIGAGVGISGGAKVGADIGAKAEVGADANAKAKASIGAGVGISGGAKVGADIGAKAGVGGDVYTKAKAGVGADVGISGGAKVAGGIGTNARVGADANANAKAGIGAGVGISGGAKVGADIRAKAGVGGDVNAKAGIGAGVDISGGAKVGTDIGAKAGVGADANANAKAGIGAVAGISGGAKVGTDIGAKAGVGADANTKAGIGAGGGISGGAKVGADIGAKAGVGADANANAKDGIGAGAGISGGAKVGADIRAKAGGGADANANAKDGIGAGAGISRGAKVGADIGAKAGVGADANAKAGIGAGVGISGGAKVGADIGAKARVGADANANAKAGIGAGASISGGAKVGADIGAKAGVGADANSKAGIGAGVGISGGVKVGADIGAKAGVGADVNANAKAGIGAGVGISGGAKVGADIGAKAGVGGDAYTKAKAGVGAGVG

SEQ ID NO: 142797 - protein, 71 aa, Oryza sativa
  Clone ID: PAT_MRT4530_43769C.1.pep
MAFALQRRRVWEQYGPMGLGARALLDTPPPESHLTGCGCGGSVGGTKRALPMGRGDALMHVQPDCFPVLRT

SEQ ID NO: 142798 - protein, 67 aa, Oryza sativa
  Clone ID: PAT_MRT4530_4376C.1.pep
TPQLRKIRSSWKLKPSFGKASKASHIILEHIESQANEGYTSCGPVVEMSYGGGLVPNARGSVLPACP

SEQ ID NO: 142799 - protein, 93 aa, Oryza sativa
  Clone ID: PAT_MRT4530_43770C.1.pep
MVLVPLREVVPLVVDGGDGETNLGEGGPNAAAAELPGPCRRKACLNYCSSWSLANGFAKLIPAFWLDFQMLGNGDSVSEFGGNFFFHLVVNQY

SEQ ID NO: 142800 - protein, 163 aa, Oryza sativa
  unsure (1)..(163): unsure at all Xaa locations
  Clone ID: PAT_MRT4530_43771C.1.pep
MRVSASSGAVAAPRAVSSRSGGREQPHRRLPCCHMEIGNMCWLATRTIFSDPKNLTADXVGLDVCGYTGVSYVLLPDXAAGKVSDIVDYLPVELELLSDIALLHLNSTRFCXLHCLHELDHSNNRLVRHFRTIVLDFLYNNFKGAIPRQHRQNTMRPSMMRCV

SEQ ID NO: 142801 - protein, 130 aa, Oryza sativa
  Clone ID: PAT_MRT4530_43772C.1.pep
MRWCTLSPSWWWVAAASTPQGTSPMWTVATYVTAKCTPSPRRTATSTTTRCSTPSPTRASVPTMTAPTESCHQRPRFFMRLVRSRTRRPPESGTAASCPPPCSQSSTPTTAMASSSIGPSTKSNQASPTD

SEQ ID NO: 142802 - protein, 53 aa, Oryza sativa
  Clone ID: PAT_MRT4530_43773C.1.pep
MASDTCSGLHLVLVCLHVLAEIEMGVRFLAKRSDIRSVVTFACETLRCSKLKP

SEQ ID NO: 142803 - protein, 501 aa, Oryza sativa
  Clone ID: PAT_MRT4530_43774C.1.pep
MANKFTTKPHVFDGTDFSHWCSRMQSYIMAENYDIWRKVSHPYMIPEVINTAAAKTEFEQNCKARNILLSGISRSDYDRVAHLQTAHEIWTALSNFHQGTNNIKELRRDLFKKEYIKFEMKPGEALDDYLSRFNKILSDLDSSYDANYPQSEISRHLLNGLDMSIWEMKVTSIQESVNMSTLTLDSLYTILKTHEMNILARKVDSKSSALVSSSTSLDVGTSSSKPSVLALFNAMSDDQLERKQKGLLDACKNCAILTQEISYLQRFSDGKKNLNMILDQSKVSTHNRGLGFDSYAHHTRHPPTVLGVARRGEILIETEPKNTVFKSAGIMSSLNASSLKSNDVNAKPSVVAKPSISKPSTSQTCCEKLAHKQKKEREIAFAKRCWQKSGFNSRTTVRPRLTSRSDRPAVRPPASRSDRPAVRPQLNRRSDRLPGPVRPQVMIGFTVILCDQSDRVEVAGDSMPRESICGDGSGVGLVVRRCPWWSDIMKDTKARVDARGW

SEQ ID NO: 142804 - protein, 50 aa, Oryza sativa
  Clone ID: PAT_MRT4530_43775C.1.pep
VVGKDCKEKHPNVKQVFCGAFGLLCCVNCYNVCSDLVDLVVTSASPCLML

SEQ ID NO: 142805 - protein, 813 aa, Oryza sativa
  Clone ID: PAT_MRT4530_43776C.1.pep
MARRRSDRREHGGQTGGGNRKVSHPYVIPEVINTDSAKTEFEQNCKARNILLSGISRSDYGRVAHLQTAHEIWIALSNFHQGTNNIKELHRDVLKKEYIKFEMKPGEALDDYLSRFNKILSDLRSVDSSYDANYPQSEISRHFLNGLDMSIWEMKVTSIQESVDMSTLTLDSLYTKLKTHEMNILARKVDSKSSALVSSSTSLDVGASLSKSSVLALFNAMSDDQLEQVSYLKSFLQRFSDGKKNLNMILDQSKVSTQNRGLGFDPYAYHTRHPSTVLGAAGRALIAHCEKENKKYEKSEYRILGNSLDDKDVFDIIVEVVLQIINFQVMIGFIVILCVRSDRAEVAGDSMPRESICGDGAGVGLVREAIKLSSTLRVLRFVFLRVRWSNRQLTSGQTDGKAAVRPAGAQRSDRRRHQARQVTSAVRPGDLYWSDRRHPLGQTGRSISVRPTSIEFEGDISVDSETSVVTSSISRYAVLIFRRCSQDAMLDGSTKAALLQQTNLSDRMTISVNLFSNQKHERKNKYRLDRQSKRRASDSDQLTLQRAEKIKAGRNLEVQNVKDKVISSSFSKLGFIDANNDSNFVNAIKDIRTLEEARLSDCISLKDKHNSTVFPENELTDDQLEDNSVLEKLCSEIMEEEQQLDFIALSETVKRDFTSSALKNLCGGKDFLWHCKPPRGRSGGWLLRDGFVDMVKEIWLSVDEGNTSLERWQAKIRRLRQFLRGWAKQTSGTYKKEKKALLEKLDLLDKKAESTLLTQEELNAKHYMRNRLAFLLREEEIKWYQRAKTKDILEGDSNTKYFHLVANGVFSRK

SEQ ID NO: 142806 - protein, 544 aa, Oryza sativa
  Clone ID: PAT_MRT4530_43777C.1.pep
MATPARFSTKPHVFDGTDFSHWCSRMQSYIMAEDYDIWRNVSHPYVIPEAINTAAEKTAFEQNCKARNILLSDDYLSRFNKILSDLGSVDSSYDANYPQSEISRHFFNDLDISIWEMKVTSIQESVNMSSLTLDSLYTKLKTHEMNILARKVDSKSSALISSSTSLDVGASSSKSSVLALFNAMSDDQLEQFEEEDLVLLSNKFSRAMKNIRNRKRGEPNHCFECGALDHLRSHCPKLGRGKKEDDGRVKDDDVNKKKNMKEKEKKKHCMQWLIQELIKVFDEPEDKDESKGKHVVDLAFIARNASSDVDESDDDNEEKLSYDQLEYAAYKFAKKLQTCSIVLDEKDHTIEILNAEVARLTSLIPNDDNCQSCEVLFSEINALRDVNYVNCKKLEFEIEKSKKLESSFALGFALHARVVDDLILTKNEVSYLKSSLQRFSDGKKNLNMILDQSKVTRCLGRVFAMMDREWAWWKSKLHKCKCDNQKRQGDKRFFTEVRKLAGFLLPVEASPTPPLNHEATARPFVMGWARREPAHGEDYQSLDH

SEQ ID NO: 142807 - protein, 392 aa, Oryza sativa
  Clone ID: PAT_MRT4530_43778C.1.pep
MDWELAWWILRLELMHVVDGDFIWHTMESNRHLSGGQTGGGDSKRQLIRRSDQSFISVKPVAFRRSDRTTTSSDLRSFDSSYDANYPQSEISRHFLIGLDMSIWEMKVTPIQEFVNMSTLTLDSLYTKLKTHEMNIRSRKAMENVRNRKRGEPNRCFVCGALDHLRSYCPKLGRGKKEDDGRVKEDDVNKKKNMKEKEKKKHCMQWLIQELIKVFYGSKDEDEGKYCSKCVLNEMKLKDALGRVKHMEEIVKQDEEVSYLKSSLQRFSDGKKNLNMILDQSKKKEREIAFAKRHWQKSGFNSRTTVRPTLTSRSDRPAVRPQLFHVLMFEVVVFVNTIGSLIAHCEKENKKYEKNEYRILGNSLDDKDVFDVSKIMGAESLETVLTTGTYPE

SEQ ID NO: 142808 - protein, 86 aa, Oryza sativa
  Clone ID: PAT_MRT4530_43779C.1.pep
ESVLFGILSFFLQKVVFLDEHRPHPWGCWPFVGKGSSYVPFPGVRCVFSLQSVLVNPSCSNSSIFGYCVTLLSCIMLGSPFVRWLA

SEQ ID NO: 142809 - protein, 95 aa, Oryza sativa
  Clone ID: PAT_MRT4530_4377C.1.pep
KRKGAEKLNPGRQPSPFPTKVFFSFLVCPVFENGKKNRPQNSKPKKTKKTQPVPQFHYSRWGFTSSSRGGNAGPGGSPRKAGVKLSWPKGRKNGL

SEQ ID NO: 142810 - protein, 1610 aa, Oryza sativa
  Clone ID: PAT_MRT4530_43780C.1.pep
MKNVRNKKRGKPNRCFECGALDHLRSHCPKLERGKKEDDGRVKDDDVNKKKNMKEKEKKNHCMQWLIQEIIKAFDESEDEDESKGKQVVDTAFIARNASSDVDESDDDNEEKLSYDQLEYAAYKFAKKLQTCSIVLDEKDNTIEILNAEIARLKSLIPNDDNCQSCEVLFSEINALRDVYSVNCKKLEFEIEKSKKLESSFALGFALHARVVDELILTNNEVSYLKSSLQRFSEGKKNLNMILDQSKKKEREITFAKRRWQKSGFNLRTTVRPALTSRSDRPAVRPQLNRRSDRLPGPVRPQVQQWSDRPRGNFSRNSNQAFVKRQDDSMPRESICGDGPGVGLVSNRQLTGGQTGGTAAVRPAGTRRSDRRRQESAAGNLGGSTDRSTSVRPTFIKRSDRRNNFGGRTRGRMCLENLPWGSCSGLDVPRAPLAGGCTQGWTYPEHHPRWLRSGANVLRHNLRERSNFNAEVFALGRCGPLRSDGNRSRLATTGSVSVYFRLYEELIAGHMRGTVRPRIQAAGPAGRRWLRLAATLRPISPATAAVRYPLFPLACGRGGQVPAVTMAKEVDRFVELVVVRHGETSWNASRIVQGQMDPELNEIGKQQAVVVARRLAREARPAAIYSSDLKRAAETAEIIAKACDVSNLMLTEALRERHMGYLQGLMWDDAVNKSPSVFKGFANFEVKNGLDFDDRNHELPQIYAQKYQWHKNEGGGESLNQLSERCISYLNKVAQNHIGERVIVVGHGAAILELCRHTDPPNRSIRRKIPNTSLNIFRISGVTGRWILERLLPRITPLPRRRLRRSHSPNPLISPAVAASLAGVLATRSTNPTWARSLAALLPSPLSDAHLAAAVSSLPDPDLALALLSWSQSPDHHEALPGPATPLAHSALLRLLASSRRFDAVDDTLQSMSLAGAAPTRACLGALVAAYADAGMLGKATDMCERLREQYGSLPEVTHCNRLLKLLVEQRRWDDARKLYDEMLGEDSGADNYSTCVLVRGLCLEGRVEEGLKLIEARWGAGCIPHVVFYNVLIDGYCRRGDMGRGLLLLGEMEAKGFLPTLVTYGSLINCLGKKGDLEKIGSLFLEMRKRGLSPNVQIYNSVIDALCKCWSATQAMVILKQMFASGCDPDIITFNTLITGLCHEGHVRKAEHFLREAIRRELNPNQLSYTPLIHGFCMRGELMAASDLLMEMMGRGHTPDVVTFGALIHGLVVAGKVSEALIVREKMTERQVFPDVNIYNVLISGLCKKHMLPAAKNILEEMLEKNVQPDEFVYATLIDGFIRSENLGDARKIFEFMEHKGVRPDIVSCNAMIKGYCQFGMMSEAILCMSNMRKVGCIPDEFTYTTVISGYAKQGNLNGALRWLCDMIKRKCKPNVVTYSSLINGYCKTGDTDSAEGLFANMQAEALSPNVVTYTILIGSLFKKDKVLRAGLYFETMLLNHCSPNDVTLHYLVNGLTSCTPCVINSICCNTSEVHGKDALLVVFKKLVFDIGDPRNSAYNAIIFSLCRHNMLREALDFKNRMAKKGYVPNPITFLSLLYGFCSVGKSMNWRTILPNEFQQEEFEIIFRYKFLFDQYATESVCCEVSRVLQQYLAECKSLQRVEQKFANS

SEQ ID NO: 142811 - protein, 627 aa, Oryza sativa
  unsure (1)..(627): unsure at all Xaa locations
  Clone ID: PAT_MRT4530_43781C.1.pep
EFFDLCFIGFRRSNRRHTGGQTGGRWRSDRRRRGDQTSGDFTRGRQSSGGWTGGSTPVRSTAHEIWVALNNFHQGTNNIKELRRDLFKKEYIKFEMKPGEALDDYLSRFNKILSDLKSVDSSYDANYPQSEISRHFLNGLDMSIWEMKITSIXESVNMSTLTLDSLYTKLKTHEMNILSRKGDSKSSALVSSSISLDVGASSSKSSVLALFNAMSDDQLEQFEGEDLVLLSNKFSRAMKNVRNRKRGEPNRCFECGALDHLRSHCPKLGRGXKDDDGRVKDDDVNKKKNMKEKEKKKHCMKWLIQELIKVFDESEDEDESKGKQVVDLAFIARNASSDVDEFDDDNEEKLSYDQLXYAAYKFAKKLQTCSIVLDEKDHTIEILNAEIAKLKSLIPNDDNCQSCEVLFSEINALRDVNSVNCKKLEFEIEKSKKLESSFALGFAFHTRVVDELILTKNVLXKKYKVAFCASSLVNASCANKAKQNNGVLISQDCSKCVLNELKLKDALERVKHMEEIVKQDEVLILMLIILDILLLFWVLLGEKKEREIAFAKRRWQKLGFNSRTTIRPTLNRLPGPVRPXGTMAXDQPRGNFVRNSTRTFVKQKNKNIKKNEYRILGNSLDDKDVFD

SEQ ID NO: 142812 - protein, 1164 aa, Oryza sativa
  Clone ID: PAT_MRT4530_43782C.1.pep
MAGGLAQLWKEWQIQILIILSFTLQVILHLLSWIRRHKGYKVLRIILWLSYLSADSTAIYTLGQLSMTTSSSSREHLLNAFWATFLLLHLGGPDNITAYSLEDNQLWLRHLLTFTVQVLGVAYVLYRYIAGSRTLVEAIILMFAVGVVKYGKRVWAFMCANMDSIRSSLDFLDDSSAHNPYLEQARKERMNRDLKQALLGAHYMFDFCKSLFVDALSMSEPQRSAVDRRDAYHIVDFAVTYALLIGAILLEITTLLRTVGSSWTCAFLHTRKWDWPCNSVMFTRQIVKAGRSRLWLDSIGQYNLLDFCTRDMTDLRGRIAMKVGLENWFNKLHYSNTTSISSDIKEFVLKEIQKRGRGDIRNARRMCILYENKMDEELSWSTVDIDFEKSILVWHVATDVYLCCFKEEVEHTEKPVVKVIKEISNYMLYLLLQHPDMLPGPIRIGLYPKVCASLVELWQEHSTSSSEGGDNNRSKSKKLASLLFQKFGSESTDNEHGQVYLDGTAVAGYLLRNECNVPNMLGLIAGVWFEMLCYAAHHCSEESHARQLSTGVREKYNGTEQIQMASGAGDSMPRESICGDGPGVGLVRSNNVVIYFESSSICVSSGYGGLTGDILAVRPAASGGQTGSVQNNIKELHRDLFKKEYIKFEMKPGEALDDYLSRFNKILSDLRSVDSSYDANYPQSEISRHFLNGLDMSIWEMKVTSIQESVNMTTLTLDSLYTKLKTHEMNILSRKGDSKSSALVSSSSSLDVGVFSSKSSVLALFNAISDDQLEQFEEEDLLGRGKKEDDGRVKDDDVNKKKNMKQKEKKKHCMQWLIQELIKVFDGSEDEDEGKGKQVVDLAFIARNAISHVDESDDDNEEKLSYDQLEYTAYKFGKKLQTCSIALDEKDHTIEILNAEISRLKSLIPKDDECKSCEVLFSEINALRDVNSINCKKLEFEIEKSKKLESSFALGFALHARVVDELILTKNVLKKYNVAFCASSLVNASCANKAKQNNDVLISQDCSKCVLNEMKLKDALGHVKHMEEIVKQDEVFSCSTCRKQKGLLDACKNCAILTQEVSYLKSSLQRFSDGKKNLNMILDQSKLFHMLVFENFGDIVGFAVLLGSVRPGSGCRSDRRYVSGDSMPRESICGDGPGVGLVVRRCPWWSDIMRVTNTRVDARG

SEQ ID NO: 142813 - protein, 227 aa, Oryza sativa
  Clone ID: PAT_MRT4530_43783C.1.pep
MANKFTTKPHVFDGKDFPYWCIDSKSSALVSSSTSLDVGVSSSKSSILALINAISDDQLEQFEEEDLVLVTNKFSQARYRKKLGRGKKEDNGGEKTNNDNKPKSAFKGKKIKETLKKAFDQVYAAFEPLSDVDGESGNEVKGKNISGVCFMARGESDLECEDNECFLAPNVVKARGVMVDCENCVNLEKEVSYLKSSLQRFSNGDLMPRESIAGDGSGVGLEIRRCP

SEQ ID NO: 142814 - protein, 153 aa, Oryza sativa
  Clone ID: PAT_MRT4530_43784C.1.pep
PRVRPRVRPRVRFCTELRIHRKYDLKGSTQGRSTKKQNINENTTLKDLDLSYVFHVDKPWREALFRQIALDCMFLESQSIIDYSMLLGIHFRAPNHLKRITSCQNALESTGISAETECSVALHHEETISSKGFLLVAADEPGPAVRGSHIRGS

SEQ ID NO: 142815 - protein, 549 aa, Oryza sativa
  unsure (1)..(549): unsure at all Xaa locations
  Clone ID: PAT_MRT4530_43785C.1.pep
CDEQLASFEMKPGEALDDYLSRFNKILSDLRSVDSSYDANYSQYEISLHFLNGLDMSIWEMKVTLIQESVDMSTLTLDSLYTKLKTHEMNILARKVDYKSSALISSSTSLDVGASSSKSSVFALFNAISDEQLEQFEDDDLVLLSNKFSRAMKNVRNSKKGEPNRCFECGALDHLRSHFSKLGRGKKVDDERVKDDDVNKKKNMKEKEKKKHCMQWLIQELIKVFDEPEDEDEGKGKQVIDLAFIACNACSDVDESDDNNEEKLSYDQLEYAALDEKDHTIEILNAEIARLKXLIPNDDECKSCEVLFSEINALRDVNSVNCKKLEFEIEKSKKLESSFALGFALHARVVDELILTKNVLXKKYKVAFCASSLVNASCANKAKQNNGVVISQDCSKCVLNELKLKDALERVKHMEEVVKQDEVLILMLIILDILLLFWVLLGEKKEREIAFVIQRWQKSGFNSRTTVRPTLNRLPGPVRPQALRRSDRPRGKFVRNSNRTFLKQKGKKYEKNEYRILENSLDDKDVFDVSKIIGAESLETVLTTGAYPK

SEQ ID NO: 142816 - protein, 97 aa, Oryza sativa
  Clone ID: PAT_MRT4530_43786C.1.pep
MDQIEDADVEMPELVELVDDEGGLQEIIDIIRVHRWKATYERIIATAADVNSLILSNHVQLLYQFDKDLDSCPLFKAAYCLGGLAKSWPSHMLSRSG

SEQ ID NO: 142817 - protein, 50 aa, Oryza sativa
  Clone ID: PAT_MRT4530_43787C.1.pep
LNQYLVSNCIESTVHLPTKQYNLTMLSHKRNDRNLCTASGKTVITKDQGQ

SEQ ID NO: 142818 - protein, 217 aa, Oryza sativa
  unsure (1)..(217): unsure at all Xaa locations
  Clone ID: PAT_MRT4530_43788C.1.pep
SFTVLLCDTQLKMETPFTVKAQPGADVWKQPPSTDVFTAPFRPHSIAPLKHFISATITFRTTYVHQYDQACLLLTFTKPGAPRKWIKTGIELYNEHPRYSTVTCDSWADWSVEAVGPNDEAGVMSGEKSVTIKAMKVEDALGVCLWVYRVDENGEKTPLRQTSWVYGDEGGEGWELEVSAAVARPDPHKNIKDDLEATFDKLDVEWEKPTAXTNFTS

SEQ ID NO: 142819 - protein, 61 aa, Oryza sativa
  Clone ID: PAT_MRT4530_43789C.1.pep
PRSWVSGVGSSCVERRLCLGHSLIELAHSGPMLSRKRSICNRRTLDKLIGQSCVFIYTSVQ

SEQ ID NO: 142820 - protein, 89 aa, Oryza sativa
  Clone ID: PAT_MRT4530_4378C.1.pep
MGTWADRAASRAWAAAIIVSENLEYNCWLHEGMTTKNEQGTSRVDSSPRIRAAAVTATCCCVPQLRPAGVTGACDSGIRLERQAQQAKA

SEQ ID NO: 142821 - protein, 191 aa, Oryza sativa
  unsure (1)..(191): unsure at all Xaa locations
  Clone ID: PAT_MRT4530_43790C.1.pep
MEKYEPVREIGAGNFGVAKLMRNKETRELVAMKFIERGNRIDENVFREIVNHRSLRHPNIIRFKEVVVTGRHLAIVMEYAAGGELFERICEAGRFHEDEARYFFQQLVCGPXAPRLKICDFGYSXSSLLHSRPKSTVGTPAYIAPEVLSRREYDGKLADVWSCGVTLYVMLVGAYPFEDPKDPKNFRKTIS

SEQ ID NO: 142822 - protein, 370 aa, Oryza sativa
  Clone ID: PAT_MRT4530_43791C.1.pep
MEKYEPVREIGAGNFGVAKLMRNKETRELVAMKFIERGNRIDENVFREIVNHRSLRHPNIIRFKEVVVTGRHLAIVMEYAAGGELFERICEAGRFHEDEARYFFQQLVCGVSYCHAMQICHRDLKLENTLLDGSPAPRLKICDFGYSKSSLLHSRPKSTVGTPAYIAPEVLSRREYDGKLADVWSCGVTLYVMLVGAYPFEDPKDPKNFRKTISRIMSVQYKIPEYVHVSQPCRHLLSRIFVANPYKRISMGEIKSHPWFLKNLPRELKEEAQAVYYNRRGADHAAASASSAAAAAAFSPQSVEDIMRIVQEAQTVPKPDKPVSGYGWGTDDDDDDQQPAEEEDEEDDYDRTVREVHASVDLDMSNLQIS

SEQ ID NO: 142823 - protein, 166 aa, Oryza sativa
  Clone ID: PAT_MRT4530_43792C.1.pep
MVQFRSSLSMSRARTRHGDGDDRGWNQLHVASRKGDLNQVRRLLDDGMDVNAPAWGPKSPGATPLHLAAQGGHVKIMDELLERGANIDARTKGACGWTPLHIAAKERNKRAVRFLIENGAFLPPDMNDHRFNPPLHYCSGLEWAYEMKRMQDESDSTGETSLGSES

SEQ ID NO: 142824 - protein, 138 aa, Oryza sativa
  Clone ID: PAT_MRT4530_43793C.1.pep
MVLRERLGEEGVVRRNCLSRHKTLLTHKHKLALQIHHPHGGDGKRWRRGQQEQCWGRDLEQLARKARNAALSATESGSYAIGTRSIEAESSGPVGEGAGGVEEALALLEKRPTIPPASLKEERVAGPVRDARLACESD

SEQ ID NO: 142825 - protein, 483 aa, Oryza sativa
  Clone ID: PAT_MRT4530_43794C.1.pep
MEIAVSAVTGELFSRFISFLLSKYSSHEISEDKQLERLQQLLLRICAVVEEADGRYITNSGMLMQLKGLADAMYRGHHVLDMLRCRTLTQENSIKEVQVGSPFPPLKRFRAIVDAAGKDKARYFEIHRTLEILETAVDHMPEFVVLLGGCERMSRRPYDAYLYIDNFMFGRHTEKQRLLNFLLEYNPPSLPAVLPIVGGHAVGKKTLIAHVCADERVQSQFSSILHLNEDDLLRIAHSDTLLSGKMLVVVEFVSDLNEKNWEEFYTSLAQMNEGSKVITISRFRKSEKLGTVKPILLDIHSHEELTYLFKTLAFGSANPMDHPRLLQVAEEFAMQLQLRGSLISVNICADVLRWNLDVNFWISILNRCITVAEKNFSLYGKHVRSLFEQGHRLDITNFASSSAAPLHIIPFAGHSSALKDLQRVTLRELLLDPSVRPKGDFNLVSWESRLPPYTSFIHFVPNYSQDFPKDKPLSGRKRRGDPS

SEQ ID NO: 142826 - protein, 78 aa, Oryza sativa
  Clone ID: PAT_MRT4530_43795C.1.pep
MAGHSDAWKGAIPTCKLASAWTSSSRRRAQGCLPECRWKDGSVDRDFVALPLASMKAIGRMNMWAVAGQVEIQPNNPL

SEQ ID NO: 142827 - protein, 218 aa, Oryza sativa
  Clone ID: PAT_MRT4530_43796C.1.pep
WSDGVCPNNCSHPSSQNDVATPDPEHEEEIFESLRPHKNIEELEEFRGNITTKAFPAVEELEFQEMLKWVEWSQVGQDDFPSLRLLKIKDSHELRYLPQELSSSLTKLVIKDCSKLASLPAIPNLTTLVLKSKINEQILNDLHFPHLRSLKLHESKDAWYEEQQALNELNDASEDEHREEFGLLYEDDNGEDNDEQDHEQSEDEEIQYGSDDSSEEDE

SEQ ID NO: 142828 - protein, 271 aa, Oryza sativa
  Clone ID: PAT_MRT4530_43797C.1.pep
MSSSESDHICSICDCAAVLGARYVRAAAGRLTSQLSCHGAQLLTWSAAVKRAGDEEEEPEALTLALLPFPSDVARFSRHPPTDPSGRSPAATTPPRRAGSPEGVNGAGETSPASLLPLTPSPSFLHESSSVIPPPPTPAHRPPPAPRLRRRRRRLAARPIRRPSPSCRLPRPSLYAGELLLQPPPYPGGVAGAREEEEPSCTNIEWPPACPRQLCAASLPLEDDHRSSAPSADAMREMEWALSLALPLGDECGRPSSLTGEGTYNRRSILV

SEQ ID NO: 142829 - protein, 855 aa, Oryza sativa
  unsure (1)..(855): unsure at all Xaa locations
  Clone ID: PAT_MRT4530_43798C.1.pep
MAGLLASGIIKWTTNKLSSLVSPQIVSSSSDEQSASFRDLRDLQRTMARIQRTLDAMDEHNIRDEAERLRLWELQQLAYDAQDAVDEYRYELLRRRXRTKAIKGRAAEVASASAKVTRRNLNHPLSKKILEKFNEITKAWDDLQLNESDAPIREEAYDIKISTTPHVGDFDIVGREEDKENIIEILISDEAAQANMSVVSIVGMGGLGKTTLAQMVYNDERVSRYFQLKGWVDVSEGHFDVKAIARKIIMSFTRNPCDIEDMGNLQNMITAQVQDMKFFLVLDNVWNVQKEIWDALLSLLVGAQLGMILLTTRDETISKMIGTMPSYDLSFLTSEESWQLFKQMAFGFIDQHMDQQFEGFGRKIVGKCGGLPLAIKAIGSSLRGETNEETWKDVSESDQWGLPAEEDRVLPALKLSYDRMPVQLKRCFVFLSLLPKGYYFWKEDMINLWMCLGLLKQYCTGRHENIGRMYFDDLIQRAMIQRAESDEKLECFVTHDLIHDLVHFVSGGDFLRINTQYLHETIGNFRYLSLVVSSSDHTDVALNSVTIPGGIRILKVVNAQDNRRCSRELKLLRYLSFFQTRITTIPESISDLYNLRVLDARTDSLRELPQGIKKLVNLRHLNLDLWSPLCMPCGIGGLKRLQTLPRFSIGSGGWHSNVAELHHLVNIHGELCITGLRRVINVDDAQTANLVSKNQLQILRLDWSDGVCPNNCSHPSSQNDVATPDPEHEEEIFESLRPHKNIEELEVVNYSGYKYPSWFGASTFMHLAKIILCQQSCKFLPPLGELPRLRILSMECMTDVEHVRQEFRGNITTKAFPAVEELEFQEMLKWVEWSQVGQDDFPSLRLLKIKDSHEL

SEQ ID NO: 142830 - protein, 1110 aa, Oryza sativa
  unsure (1)..(1110): unsure at all Xaa locations
  Clone ID: PAT_MRT4530_43799C.1.pep
MAGLLASGIIKWTTNKLSSLVSPQIVSSSSDEQSASFRDLRDLQRTMARIQRTLDAMDEHNIRDEAERLRLWELQQLAYDAQDAVDEYRYELLRRRXRTKAIKGRAAEVASASAKVTRRNLNHPLSKKILEKFNEITKAWDDLQLNESDAPIREEAYDIKISTTPHVGDFDIVGREEDKENIIEILISDEAAQANMSVVSIVGMGGLGKTTLAQMVYNDERVSRYFQLKGWVDVSEGHFDVKAIARKIIMSFTRNPCDIEDMGNLQNMITAQVQDMKFFLVLDNVWNVQKEIWDALLSLLVGAQLGMILLTTRDETISKMIGTMPSYDLSFLTSEESWQLFKQMAFGFIDQHMDQQFEGFGRKIVGKCGGLPLAIKAIGSSLRGETNEETWKDVSESDQWGLPAEEDRVLPALKLSYDRMPVQLKRCFVFLSLLPKGYYFWKEDMINLWMCLGLLKQYCTGRHENIGRMYFDDLIQRAMIQRAESDEKLECFVTHDLIHDLVHFVSGGDFLRINTQYLHETIGNFRYLSLVVSSSDHTDVALNSVTIPGGIRILKVVNAQDNRRCSSKLFSSSINVKIPTETWQNLKQLRALDFSHTALAQVPDSIGELKLLRYLSFFQTRITTIPESISDLYNLRVLDARTDSLRELPQGIKKLVNLRHLNLDLWSPLCMPCGIGGLKRLQTLPRFSIGSGGWHSNVAELHHLVNIHGELCITGLRRVINVDDAQTANLVSKNQLQILRLDWSDGVCPNNCSHPSSQNDVATPDPEHEEEIFESLRPHKNIEELEVVNYSGYKYPSWFGASTFMHLAKIILCQQSCKFLPPLGELPRLRILSMECMTDVEHVRQEFRGNITTKAFPAVEELEFQEMLKWVEWSQVGQDDFPSLRLLKIKDSHELRYLPQELSSSLTKLVIKDCSKLASLPAIPNLTTLVLKSKINEQILNDLHFPHLRSLKVLLSRSIEHLLLDNQNHPLLEVLVISVCPRLHSIMGLSSLGSLKFLKIHRCPYLQLPSDKPLSTQLQRLTITKCPLLADWLEVQISHQQCQLHESKDAWYEEQQALNELNDASEDEHREEFGLLYEDDNGEDNDEQDHEQSEDEEIQYGSDDSSEEDE

SEQ ID NO: 142831 - protein, 480 aa, Oryza sativa
  Clone ID: PAT_MRT4530_4379C.1.pep
MDTCPVSSGMTDSSKWHMSGNGAAAVHGKEKVATRWRTGAGGGAPRTGVGGVAWVAGEAAVHGWWAQVAAHRLRQQCTGGGRRRQRTPSNPSPTPRSGKCLFPSSTTTTPGRERERESSSSGSQLVQLMPPKRRPEEESPQAAALKKRCRSFDLEIRGCRHLQELAAGCVRTLEAALESAISRIPEEVTKALTSFLIRAPRTLSDQNQPPRYKLRFSNGLSNEVFTKKGICDVNGESLKISVHVNNPQEACSHRLLSAKIRVVVLDGDFNKNDQGCWTSEEFRNHIVRPRDKVGTVLTGELELSLKNGEAYIHDATFVDNSKFMRSGKFRLGVMVIDDLGERIQEGITEPFVVKDRRGEGSKKHEIPSLDDDVWRLKKISKDGVFHDALKQSGISNVKEFLRLYYTDEPALRKATDKVWTTIIEHAKKCDPGRELYSFLPENRNVVLFFNSIHQIVGVITGDHYTPFSDLDKSMQVFLWF

SEQ ID NO: 142832 - protein, 132 aa, Oryza sativa
  Clone ID: PAT_MRT4530_437C.1.pep
MVHPYFTGKEAVGAEAAFGPDVREFFDRTWRFVFPETSGLDDPRVNPFVDDATRAAAAAIPCERVQVCVAEQDVLLKERGLWYHRELKASGYGGEVELFESKGVGHAFHFVGMAGSDQAVELLERNVEFIKK

SEQ ID NO: 142833 - protein, 126 aa, Oryza sativa
  unsure (1)..(126): unsure at all Xaa locations
  Clone ID: PAT_MRT4530_43800C.1.pep
MRMQDIVRDAIKLGFQRADFDDVIRSFCWYYSSFFSKQAAATAVAPPKDDEQAKKTGATISYELTLLDCLHASLVPPSEGAATGGGGVKGGKTSRIRTANELRRSGIRLMAMEEGXRVVQFSEDTM

SEQ ID NO: 142834 - protein, 308 aa, Oryza sativa
  Clone ID: PAT_MRT4530_43801C.1.pep
VAAAAAAASTPTASSTPTTTPPSSNSNLLLHPPPGAAPSKSNRISLPSPLLIPRAPPPPRTAASPPSSRPASAAPPPRAPSAPPPPCSASVSTASKTGPSSRSSAARASTPASAASRRSRSLSSPPSPSRMRRRWWRVGEAVVDARDEVGGESVGARGAVTEHVDAERVADFSRSPRPPPVAPILPPAEHTRRSSPPSGRCPRPRLRTAPLLPPADARVLLISQRPPAIGSRGWKRRRSRLSRPSLSPPAGETARGGRRGERDGERRKKRKAVSMTCGPHIPQVLFFLKKEGTLLHARTGMVMDSWRC

SEQ ID NO: 142835 - protein, 198 aa, Oryza sativa
  Clone ID: PAT_MRT4530_43802C.1.pep
MEEWPAGGGLQLRRGETVAQALTMTPKFREAQTVPIFDDCVYELEMVKLINPENAFPTDRETLAVLVGSGHRRLAPTMIGVRELAELRRTAAPQLTIERLTGGSRDSCHITFSIVAVPSDRILAVKIKGRITVGALTLKKSEFWQQELVASTCYNKPVTSTSQEAVASKPQLIARRHCRADEATGTPRTRRRSSLVGV

SEQ ID NO: 142836 - protein, 78 aa, Oryza sativa
  Clone ID: PAT_MRT4530_43803C.1.pep
NLWVPTQEAWLVLCPFLKFLLGTRGVCLTNLPPLGVQFFFPPGPYQDFNCPIFWFCPFFPSLWGSPGPMFFFRTSLSR

SEQ ID NO: 142837 - protein, 41 aa, Oryza sativa
  Clone ID: PAT_MRT4530_43804C.1.pep
CVSPFSPVVKKFISKHCNRRRRYSQTFYLHRVHFEFSLVGF

SEQ ID NO: 142838 - protein, 128 aa, Oryza sativa
  Clone ID: PAT_MRT4530_43805C.1.pep
MPLFLSWTQLDQTKIPLGPLAEVKLGGIKSVEAAKRVGEKPVVRGDGGDGGRLCEAYQEFGAVTTCWELFRVACDHAEELVGSIRQRIGSECLVNMATDTSSSSSIRRSPLRRRRSSLHHIFPRRPTA

SEQ ID NO: 142839 - protein, 141 aa, Oryza sativa
  unsure (1)..(141): unsure at all Xaa locations
  Clone ID: PAT_MRT4530_43806C.1.pep
MCSTALVYEFMPNGSEDRWLHKEGDGKFSKRLGVSHRINIAVNIAEALDYLHHDCGRPXIHCDLKPSNILLDDDMTALXGDFGIARFYADPSTATVGTNSSIGIKGTIGYIAPEYAGGSRASTSGDVYSCGIVLLEMMTAK

SEQ ID NO: 142840 - protein, 130 aa, Oryza sativa
  Clone ID: PAT_MRT4530_43807C.1.pep
MDKLQCDGALPNARAIERTKGVLASSRGIGCNFSTKGILIGRVIPNINWEHVFIVKSKEVEQQEGKEDVSTCRGTGATLDDGVGWRIDGHHRQREMSGCSGYSMLGFLVCRVITDINREHVFRVESKAVE

SEQ ID NO: 142841 - protein, 121 aa, Oryza sativa
  Clone ID: PAT_MRT4530_43808C.1.pep
MAGARRTMALVALVAVVAAAVVAERASAAVSCGDVTSSIAPCLSYVMGRESSPSSSCCSGVRTLNGKASSSADRRTACSCLKNMASSFRNLNMGNAASIPSKCGVSVAFPISTSVDCSKIN

SEQ ID NO: 142842 - protein, 52 aa, Oryza sativa
  Clone ID: PAT_MRT4530_43809C.1.pep
MLIEMVLDLGAVVLNCRADHWRCDSACQLREEFTHLCSLRTSSQPIASTDHL

SEQ ID NO: 142843 - protein, 38 aa, Oryza sativa
  Clone ID: PAT_MRT4530_4380C.1.pep
QGSIHSVTYILVANLSHIMCTTHCLSFVQSKLAHALSA

SEQ ID NO: 142844 - protein, 347 aa, Oryza sativa
  Clone ID: PAT_MRT4530_43810C.1.pep
RKATNSGDGEEQQRQPMAMAIPKVDLRGLEPGTPGWEAARATVTASMVSHGCVVVAHGELGADLREALFGRAVREAFALPAEAKRRNVSTVGPYRGYIANIPGMDWESLRVHDADDAARVREFAGLLWPEGNPEVRARFLMGDWGGVRPGDCSETIVSFATKMRDLERTVERMTLEGLGVGEDHIASHLAAQDYGVRLSHYGPPPDASTAISLQAHRDDSMTTIIVQHEVEGLEVQAGDGSWHAIPPEPDTIAIVAGELFRVVTNGRVPASVHRVRTPSGRERYCVLVGSRSKDGAVLSAMDELVDGEHPLAYRPCKAEEFIQFRYSEEGRKFSDPLKAFCGVNATE

SEQ ID NO: 142845 - protein, 106 aa, Oryza sativa
  unsure (1)..(106): unsure at all Xaa locations
  Clone ID: PAT_MRT4530_43811C.1.pep
MMPMEEILRHAEPEVVAGSARGLDNFNVLQKAAKKLLHDEAKGCGNDFTLLHTMLEXLRLKARNGWSDNSFNNLLVLLKELFPEPNSLPTNTYEAKRLLGVLDLDI

SEQ ID NO: 142846 - protein, 58 aa, Oryza sativa
  unsure (1)..(58): unsure at all Xaa locations
  Clone ID: PAT_MRT4530_43812C.1.pep
YNNLSIVHTPCHRGRRPWDPLESPSIIATLALSSLQVMLNPMMGRXSGEGGGGGRDNV

SEQ ID NO: 142847 - protein, 163 aa, Oryza sativa
  unsure (1)..(163): unsure at all Xaa locations
  Clone ID: PAT_MRT4530_43813C.1.pep
MEADAVCQPRRVADKRTPLDTTRAAHVQTTWLPSGHTNTVTTRTXNDYRHRYMGTGVDKHTMGMGRQRKDEDGAVRGRXPYYHATRRGNDDDKRXRQRWTGTTETNGRXSPAILGRRQDEANSGLDDVEPRTKTTTXAAADLTKRGRRTNAAXRRDERHDDRE

SEQ ID NO: 142848 - protein, 71 aa, Oryza sativa
  Clone ID: PAT_MRT4530_43814C.1.pep
LLSTWRSVVLTRSRQQGSLPPRIRIRRDQRQRYISPDSIRRHRRGLAMPISEIDIRRLVLAYVGLYVDLVS

SEQ ID NO: 142849 - protein, 47 aa, Oryza sativa
  Clone ID: PAT_MRT4530_43815C.1.pep
PNKKAITFHTRQLNSYLPQHQLTFFFFTPLPMLSFSLVFLSLFCTRG

SEQ ID NO: 142850 - protein, 52 aa, Oryza sativa
  Clone ID: PAT_MRT4530_43816C.1.pep
HFVSRNADHVILAHLFIRFMLSSAVVPPAQILARFCILMMFSSCDVLLMPSS

SEQ ID NO: 142851 - protein, 65 aa, Oryza sativa
  Clone ID: PAT_MRT4530_43817C.1.pep
KRQASRKSPRLEQPPPPSPHPTRQHSRHPASPLPSTSPPQASVAPPFPPPRHLLHPSRLASRLPA

SEQ ID NO: 142852 - protein, 121 aa, Oryza sativa
  Clone ID: PAT_MRT4530_43818C.1.pep
KTKPPTLKFFLVLLAINKPNAKIGGRKAFNFFASVNEGEGFPIPVNKGIPAHLGKGQFPPVEGGKRGGKNKANQQLGRAPPRRAGWGASVRAVLPLPLPLAKALLVFPAPVVGPISQPYLG

SEQ ID NO: 142853 - protein, 79 aa, Oryza sativa
  Clone ID: PAT_MRT4530_43819C.1.pep
LLSIMFREMQVMVNGFFFLPRLVKFGVVQLCSCSPWKSYHIIGYLNLVYVQFQPRLYSKLFRIMRLRSIHAIIYRKFLN

SEQ ID NO: 142854 - protein, 46 aa, Oryza sativa
  Clone ID: PAT_MRT4530_4381C.1.pep
FSGHCASHWVALFNDGCILCYMYDKPPILNLAKESLADTGYTQYEY

SEQ ID NO: 142855 - protein, 942 aa, Oryza sativa
  unsure (1)..(942): unsure at all Xaa locations
  Clone ID: PAT_MRT4530_43820C.1.pep
MDEPGEPLLGLENFFDEDVDLENLPLEDVFEQLNTSQSGLSSADAAERLKLFGANRLEEKRENKIIKFLSFMWNPLSWVMEAAAVMALVLANGGSQGTDWEDFLGIVCLLIINSTISFIEENNAGDAAAALMARLALKTKVLRDEQWQELDASTLVPGDIISIRLGDIVPADARLLEGDPLKIDQSALTGESLPVTKRTGDIVFTGSTCKHGEIEAVVIATGIHSFFGKAAHLVDSTEVVGHFQKVLTSIGNFCICSIAIGAIVEVIIMFPIQHRSYRDGINNVLVLLIGGIPIAMPTVLSVTLAIGSHHLSQQGAITKRMTAIEEMAGMDVLCCDKTGTLTLNHLTVDKNLIEVFSREMDREMIILLAARASRVENQDAIDMAIINMLADPKEARSSITEVHFLPFNPVDKRTAITYVDSDGNWFRVSKGAPEQILSLCYNKDDISEKVQLIIDRFAERGLRSLAVAYQEVPEKSKHGHGXGPWVFCGLLPLFDPPRHDSADTIRRALDLGVCVKMITGDHLAIAKETARRLGMGTNMYPSASLFGRHGDGGGAAVPVEELVEKADGFAGVFPEHKYEIVRMIQGGGGHVCGMTGDGVNDAPALKKADIGIAVSDATDAARGAADIVLTEPGLSVIVSAVLTSRAIFQRMKNYTIYAVSITIRIVIGFVLLASIWEYDFPPFMVLIIAILNDGTIMTISKDRVKPSPSPDSWKLNEIFAAGVVIGTYLALVTVLFYWTVTRTTFFESHFKVRSLKQNSDEISSAMYLQVSIISQALIFVTRSQGLSFLERPGALLICAFILAQLVATLIAVYATISFASISAIGWGWAGVIWLYSLVFYAPLDLIKIAVRYTLSGEAWNLLFDRKERLRRQRAAAGDQVAALPSSSSSTTEGAFRSSPQQRMAAYADRGASQATGRNRQIGRCTYAESACAICDETEACGF

SEQ ID NO: 142856 - protein, 496 aa, Oryza sativa
  Clone ID: PAT_MRT4530_43821C.1.pep
MKLSLVCSANPNNHRSRSSDITRHQKGGSARRKSKPYQEKDDSENIDEFDTDIMSSKNGPPISLTSNSRPQATSVPGEREKEIVELFKRVQAQLRARGKGKEEKKPEQAKAQGERGSVDSLLNLLRKHSVDQRRKSGDEKEQSVDQTKRSNESGNKQNSSIFIKNDTQEEQKKPHPAAFKRPASNFRRRSPVPNVKFQPVTNVDAERVINNINDAVQEAKPTLENKAATDEPDSVSTFEPNSVIEPENLSLDDLDHISDDEPDASDTDEPSGEYDEPSLQIPSVPIIDESHDTTLKSSLGGPDLSTLKVTELRELAKSRGIKGYSKMKKNDLSQGTDWEDFLGIVCLPIINSTISFIKENNAGDAAAALMSRLALKTKVLRDEQWQELDASTLVPGDIISISQLSLVNPFLSPKEPGTIVFTGSTCKHGEIEAVVIATGIHSFFGKAAHLVDSTEVVGHFQKIIKGEISKDIDITSKFIVLQISEKNEYGITGISL

SEQ ID NO: 142857 - protein, 166 aa, Oryza sativa
  unsure (1)..(166): unsure at all Xaa locations
  Clone ID: PAT_MRT4530_43822C.1.pep
SQGTDWEDFLGIVCLPIINSTISFIKENNAGDAAAALMXRLALKTKVLRDEQWQELDASTLVPGDIISIRFGDIVPADACLLEGDPLKMNCHTPFMRKMSITGIQLSLVNPFLSPKEPGTIVFTGSTCKHGEIEAVXIATGIHSFFGKAAHLVDSTEVVGHFQKVI

SEQ ID NO: 142858 - protein, 143 aa, Oryza sativa
  unsure (1)..(143): unsure at all Xaa locations
  Clone ID: PAT_MRT4530_43823C.1.pep
RCPDWCFATXXPRXRATVVAXLASPSPSSSSSSSNSSNLPAPFRPXRSSCNTXVFAAPVAXPXMXSAXXXLXDGFAKFQXPNFYEERKPEALSKPLXAGQAPXXMXVFSCAXSFFFVRVMGPGKGFRSISNGSHLNWQSKHPW

SEQ ID NO: 142859 - protein, 375 aa, Oryza sativa
  Clone ID: PAT_MRT4530_43824C.1.pep
MLLPPHPGRTLPAYHGDNRFLLGACFLSKLPMLRPMKLSLVCSANPNNHRSRSSDITRHQKGGSARRKSKPYQEKDDSENIDEFDTDIMSSKNGPPISLTSNSRPQATSVPGEREKEIVELFKRVQAQLRARGKGKEEKKPEQAKAQGERGSVDSLLNLLRKHSVDQRRKSGDEKEQSVDQTKRSNESGNKQNSSIFIKNDTQEEQKKPHPAAFKRPASNFRRRSPVPNVKFQPVTNVDAERVINNINDAVQEAKPTLENKAATDEPDSVSTFEPNSVIEPENLSLDDLDHIADDEPDASDTDEPSGEYDEPSLQIPSVPIIDESHDTTLKSSLGGPDLSTLKVTELRELAKSRGIKGYSKMKKNDLVELLSNMA

SEQ ID NO: 142860 - protein, 105 aa, Oryza sativa
  unsure (1)..(105): unsure at all Xaa locations
  Clone ID: PAT_MRT4530_43825C.1.pep
LYRGFYLSXGGTWHLTRGCIGFSKSSEGXVLRSAGPSNCIGYIXGVVQGCIASISWIALVRLIYLRTYLSYILVNLVLAXNLTVSAEIHFXGLCRYRLNYLARLD

SEQ ID NO: 142861 - protein, 106 aa, Oryza sativa
  Clone ID: PAT_MRT4530_43826C.1.pep
TPLGGNPFQGRVKGEGLILKPLWGQPFFGALLEKTKMGNPPPWFQRKVGASSGKEIFFPLAWLGVYPKVKGNGFGKKKKKKKKKKKKKKKKKKKKKKKNKKKKKTK

SEQ ID NO: 142862 - protein, 159 aa, Oryza sativa
  Clone ID: PAT_MRT4530_43827C.1.pep
MCGPAACAARCASSPSYRVRAREAASTARPRESASTAARPPPPEKWGGEGRGRIQTRLAAAQLTVGATARAGTAQLTAGKAAAPRRGPTANDDKAQRPPDAQRDGKRRHRAHEHGGGGAMSIKSGLSLQTVTEADIFARPLWHTQPYPNSRHPALSMPE

SEQ ID NO: 142863 - protein, 164 aa, Oryza sativa
  Clone ID: PAT_MRT4530_43828C.1.pep
MAATTVIRGTIPYDLRCQESLLPLEKSLERRWIRHARRLALLRVSLSMPGEKSIHLRVPSCKLASSHLSSMSPPHDLQSHLYIASHVSAPTHTCAQGKHYALHQAERQTMMHPNTKWNTMSHTPMSTPFSSSVEVLHEATNGVEPTQVDPDLLCMEAPFGYGFR

SEQ ID NO: 142864 - protein, 975 aa, Oryza sativa
  unsure (1)..(975): unsure at all Xaa locations
  Clone ID: PAT_MRT4530_43829C.1.pep
DMRQPHLAFMKKAYNFVHHAKAHALRKNRXRHIFCSFFDCKNQKLLRDPSTILVYSMEHEFKEDCRVWXHGEITVPEGDSNMECDETCFPLDGAEDFTIDDMALERMDEDGSTSSDDFEAEFSLEDMMHHAKPEVLMGTARGLDNXRGIXKPTEDLLYEESKGYEKDYTXLRLVLELFILKARYEWSNSSFNDLMGFLRVLLPKPNLLPSNKYQANKLIWPLSLGVQKIHACVMQTIVPPVRKXSRYKMGSGSSDSEVVEPDSSGIQRXKILAMVMWNLXLKDRMXHLFSKPNDAKLMRXRQDNRKVAGMIRYPTDAHXVEVFDSLHPKFPMDPRNVRFALSTNRMNSFGDIYISHNTWPVLLTMCNLPTXDCHKGKYILLTILIQGPKQLGITIDEFPEPLMEGMEDLCQEGLRMWDVYQLEYFTLCAIIFVIIIDLLANIFLFGQIKRXTAYLIYLDKMSYKYVTSSSKIAYIRHQRFLXRNKYCTMAKCFDNTIENESATAKRSGSVVFDMTKNIKIAFEKGKKXVKRKKAXGGKYMPYRKHSIFFKYMLYWEDLEIHHAIDIMHLEKNMLDSTIDTLIDIXSKMKHRLDSCNDLVTLDIRNNLHPKDLANGKQDSPACYSMTPKKKNXFCKYLNWVXPIGFSSNIRKLVSMKDMTISXNAHDCHXLTVFLPIAIRTIKLXSKVVITKMCYFFNQISXKIFDPMELGPIQNFTIETACQLEMYFPPSYFDMMEHLIVHIVLQIXELGLLYLHQMWVYEWYISILKGYVRNHAYLEGSMXRGTQLVECVLDYIKDVNSTRKPMARYEGRLTGKGAVGKRCLFDNDYKAVAEADNNVLQQLAIIEPYIEQHMNEVSACNXFPQWLLDQSLXIGESMKEXTLERLASGLSSLVTSWQWYVINGYXIKDKKSSAQNSGVRVEAFNTTDEKKLHXGIIQEIAVNIQIPIIDAXWVKDTIGISLDNYNLTIVEGSRVG

SEQ ID NO: 142865 - protein, 64 aa, Oryza sativa
  Clone ID: PAT_MRT4530_4382C.1.pep
TTLDRECLKSLVNFTNDKGIHLIADEIYAATTFGQSEFISVAEVIEEIEDCNRDLIHIVYSLSK

SEQ ID NO: 142866 - protein, 112 aa, Oryza sativa
  unsure (1)..(112): unsure at all Xaa locations
  Clone ID: PAT_MRT4530_43830C.1.pep
LLNDIRGIEREDSDGKMTDGVSLLVHASXGSMSVDEAKTEVMKRIDASRRKLLSLVVGEQEGPIPRPCKQLFWKMCKILHLFYYQTDGFSSPKEMVSAVDAVIKEPLQLRSL

SEQ ID NO: 142867 - protein, 54 aa, Oryza sativa
  unsure (1)..(54): unsure at all Xaa locations
  Clone ID: PAT_MRT4530_43831C.1.pep
KPGVQQVLFSALLLIIVSVLASTATMPPHHTDLFLYNLHKHCVGGGGXXXYXLP

SEQ ID NO: 142868 - protein, 99 aa, Oryza sativa
  Clone ID: PAT_MRT4530_43832C.1.pep
LKEEMASYGVTFANLTAFPTATLFSFSAFDFIADDSGQLQQFSPSIVGFVQAISFASGTEFRFGDLDFTANKNFASDLEKVEADLVWNRVDLQVGLHIG

SEQ ID NO: 142869 - protein, 92 aa, Oryza sativa
  unsure (1)..(92): unsure at all Xaa locations
  Clone ID: PAT_MRT4530_43833C.1.pep
RARPARPGPGTAGHGPAAIGPARPDRHFVPGCAGPWAAPPAQARPXAPSCRPIVPGRXRPNVPVEGPRHGPVVGPGRHGPDLRRAVPCLGRA

SEQ ID NO: 142870 - protein, 127 aa, Oryza sativa
  unsure (1)..(127): unsure at all Xaa locations
  Clone ID: PAT_MRT4530_43834C.1.pep
LSSYYSPHKINNRAESKFTKTIIPASIQLIQQANSKQSPRESQSTSHAMQLIIIQPKSSPYFMQTLGHLEQPTGWRRRHAGALLPGRPSSPSATSDPFMTSSRPNPSEDDWWIALPPSQTEXASLGX

SEQ ID NO: 142871 - protein, 71 aa, Oryza sativa
  Clone ID: PAT_MRT4530_43835C.1.pep
FQFGSLIPVSIIQVPCVVMGVQFGSLFMFVWVSTDHAYSVCRQMLGCIHYCSGWKLLFQFMPAWDGNYYLL

SEQ ID NO: 142872 - protein, 60 aa, Oryza sativa
  Clone ID: PAT_MRT4530_43836C.1.pep
LYQREKAYVHTPECTVHIGRTIAYFPRTSSTRYMCTPIASSSCLSYSKQCASTYTHEHHT

SEQ ID NO: 142873 - protein, 629 aa, Oryza sativa
  Clone ID: PAT_MRT4530_43837C.1.pep
MAAGVLMTKPFMAAASALACLLVMLRCLPSVVATTVSFNYSTFSNAKNITLQGSAAFAGGGCIEITTGSNLPSSGTMGRVAYTPPVQLWDAATGEVASFTTRFSFNITPTNLDNKGDGMAFFLVGYPSRMPDKGDGGALGLTSRYFDTVQPGENRFVAVEFDTYLNRDFDPNATYDHIGIDVNSIRSVQTESLPSFSLTGNMTAIVDYNSSSSILSAQLVKTWTNGSTTLYNLSTTVDLKSALPEKVSVGILAATGLSLELHQLHSWYFNSSFQQNPPPAVQHSPTTSGSGLAGVIAGATVGAALFVVLLFAMVVVLVRRRRSKKRREVEEAEEARHVGLARDDDDDDDGEPIVEIEMGMGPRQIPYQDLIEATNSFAAEEKLGQGGFGAVYRGYLREQGLAVAIKRFAKDSSKQGKKEYRSEIKVISRLRHRNLVQLIGWCHGRDELLLIYELVPNRSLDIHLHGNGTFLTWPMRVKIVLGLGSALFYLHEEWEQCVVHRDIKPSNLGDFGLARFIDHAVGMQTMTAVSGTPGYVDPECVITGRASLESDVYSFGIVLLEVACGRRPMSLQDNQKNGIFRLVEWAWDLYGQGDVVSAADERLNGDYDVSEMERVIVVGLWCAHPDPSA

SEQ ID NO: 142874 - protein, 717 aa, Oryza sativa
  Clone ID: PAT_MRT4530_43838C.1.pep
MAAASASAIACLLFLGFLPSLATAVSFSYSTFSNGTKNITLQGSAAIAGDGWIEITTGSNLPSGGTMGRVAYSPPVQLWEAATGEVASFTTRFSFNITPTNLDNKGDGMAFFLVGYPSRMPDTADGGALGLTSRTFDAVMSGDNRFVAVEFDTFNNSFDPSATYDHIGVDVNSIVSVQTESLPSFSLTGNMAAIVDYNSSSSILSVQLVKTWTNGSTTLYNLSTTVDLKTALPEKVSVGFSAATGSSLELHQLHSWYFNSSFQQNPPPAAQPSPTTSGPGLAGVIAGATAGGALFVVLLFAMIVVLVRRRRSKKRREAEEAEEARHVGLAGDDDDDDDGEPIVEIEMGMGPRQIPYHELVEATKSFAAEEKLGQGGFGAVYRGYLREQGLAVAIKRFAKDSSKQGKKEYRSEIKVISRLCYHNLVQLIGWCHGRDELLLVYELVPNRSLDIQLHGNGTFLTWPMRVKIVLGLGSALFNLHEEWEHCVVHRDIKPSNVILDESFNAKLGDFGLARFIDHAMGMQTMTAVFGTPGYADPECVITGRATSESDVYSFGFVLLEVACGRRPMSLQDNQKNGIFWLVEWAWDLYGQGDVVSAADERLNGGYDVSELEHVIIVGLWCVHPDPSARPSIRTAMAMFQSSGQLLVLPAKMLVPTYAPPVASVEGLFTSSTGMLSSSATQSSSTTSGYITHTSSSSNTSTSAGSKDSSSLLKHQYL

SEQ ID NO: 142875 - protein, 166 aa, Oryza sativa
  Clone ID: PAT_MRT4530_43839C.1.pep
LLPCRPPPVASCSPAAARGEGRREVERGGKEEADGQSKGGIPPNYHLLPRAKLRIRHPRGWIRRPTAGDERHCRSRRCDGARRRRSGGACAGGQQGRGRSGCDGAGPPAACLERGGGERWTRWRLAAQAAAAAGRHDLVGATPPPHPPLVAAWITVVLCPPPKLSL

SEQ ID NO: 142876 - protein, 119 aa, Oryza sativa
  Clone ID: PAT_MRT4530_4383C.1.pep
MAGCCVFLRWPSASPSRIGYRSLDDGDDGPSPAAVTTTVVVGKERRVFSVDQLVLDTYPFRLLLETAVRKEESKAALFVDVDAILFEHILWLAGHHDRSSSSLLHLDLKEIIDFYSQDA

SEQ ID NO: 142877 - protein, 288 aa, Oryza sativa
  Clone ID: PAT_MRT4530_43840C.1.pep
MLNVMVIDEDRRHAYSTSSMLTQFNFCVTVYTSPIKALDFLENHAQDFDLVLAEVHMEELNGFAFLTASRKIHKSIQVINLKVVRMEKIKGLLQDDSSKNTKVIKNKGTTDCNQIATHVHQMQVLNGDDVYTAMRRSLHLGTIFDESNYSNDPCSNEYKVGEDEIGGYGCANEANATHSSDDHNVVVPDLSCNIADDVSQEIMSKATTCVDHRKQDTTRTDGPAAMSADEANATFSTGNLQQVNVIVTCNGDGSQESIQKNTCDDQHAPTGSKPETFRLVNYSDSESD

SEQ ID NO: 142878 - protein, 161 aa, Oryza sativa
  Clone ID: PAT_MRT4530_43841C.1.pep
RAAGIGTRKALSYHLHSYYWLDFQRLNEIYRYKTEEYSETALNKFNVIPESIPDWIFDFMPSRGGYFIGNVSPARMDFRWFCLGNFIAILSSLTTGEQAEAILDLVEERWEELIGEMPMKVCYPAMENQEWQIVTGCDPKNTRWSYHNGGSWPVLLWLLVA

SEQ ID NO: 142879 - protein, 43 aa, Oryza sativa
  Clone ID: PAT_MRT4530_43842C.1.pep
AELGLLGFFLLADNTSAITARMQTVRLHDPFRIQARLTRTRPT

SEQ ID NO: 142880 - protein, 87 aa, Oryza sativa
  Clone ID: PAT_MRT4530_43843C.1.pep
MHTNGVRPRPPSLPRHALTRWPYRPPAPRPAPPPPHKPPRRPAPAPPPPPSPPRPPVPPARPPWPPPRRRRRALAPPPPWQARPPLV

SEQ ID NO: 142881 - protein, 40 aa, Oryza sativa
  Clone ID: PAT_MRT4530_43844C.1.pep
MEIKKERLVRSSNMRQAADKVSRRFWLTWRLHGKFDLVFI

SEQ ID NO: 142882 - protein, 54 aa, Oryza sativa
  Clone ID: PAT_MRT4530_43845C.1.pep
GILFKSYLFKMYGVVMVEFLNYNHITMCMFFFFFFFFFFFSVPFFFFFFRTRGR

SEQ ID NO: 142883 - protein, 148 aa, Oryza sativa
  unsure (1)..(148): unsure at all Xaa locations
  Clone ID: PAT_MRT4530_43846C.1.pep
DVSGGTGRPPAAPDPGAPPSVGGSSPWVAEDRQWAVDFGGRRGSXRRRRSRGDGGGRWAGVGGGGKARVRLGGGGQWLQIRRRGATGDGXENGGAGAPRRRRHEEKERGEGEGGGGLADAVDSFRPAGEAGSGAVGWWXRWNRATARG

SEQ ID NO: 142884 - protein, 145 aa, Oryza sativa
  unsure (1)..(145): unsure at all Xaa locations
  Clone ID: PAT_MRT4530_43847C.1.pep
MLDVDKFARTLRVRWLSFSXESSNKPXAGTSPPCDELDRKLFGSATKVSIGDGHKVSFXESNWVGGQPLKELAPTLYKHVNXKGRSVQKGLTNDQWIKDIGHNPTVWLVKEYLEVFNQVWSNDTXTLVEGVDDTITWRWTSNGFG

SEQ ID NO: 142885 - protein, 1274 aa, Oryza sativa
  Clone ID: PAT_MRT4530_43848C.1.pep
MGGDEEEVAGDVRRKLGGYLPAVVSVSSDVGVEALAPLSPCSLFACGGVSLAPNPDGSGATPRSNGRACGGGGVVRQLRALVSSRCVEVEGRVLRAVARRGREGGGGDGEVEARAVVLFDVYLPVSVWSGWQFPRSRAAAAAAVFKHVSCNWDARNALLAFNWTSPDNPHCDDQYIWTCTDCHVLGCEVHQIPSVLNNDKSFDLHEIFKTLPSVMVEKRMQITRITPDEAASGVGIWSVPDDVLYKVLVRLKPRDLIRVAAACHHLRNLSASIMPCMKLKLFPHQEAAVEWMLRREQNLQVLEHPLYKGLCTMDGFPYYINVTSGEISTGSAPTVHDFCGGMFCDEPGLGKTVTALSLILKTHGTLAVPPPGMNVMWCMHKPDKKYGYYELSASNSSNGNIFLSGSKKLRKDVIREDTCSSESLNNGGSVVSTRSSRKRGRLVNPDLNMIAAHPSGKSPMSAPTGAHSTPATHVLKITKNLKHVRKNLMEAYSDGSVGNKRKRDATSELSETWVQCDACRKWRRLLDGTALDSSTAWFCSMNPDSARQKCSIPEESWDLKRKITYLPGFHKKGTPPGNEQNASFFTNILKEHAALIDSETMKALLWLAKLSPKKHIEMEAVGLTRPVLDARANIGKGARPYYKIFQAFGLVRKVEKGITRWYYPSMLDDLAFDSAALGIALEKPLDLIQRHVSSDTLNVYVWGDHKKPSAHNLAWDYDIVITTFSRLSAEWGPKKRSVLKQIHWFRVILDEGHTLGSSLALTNKLQMAVSLVASNRWILTGTPTPNTPTSQVAHLHPMLKFLHEEVYGQNYQSWDTGIHRPFEAQMEDGRSRLLQLLQRTMISARKQDLKNIPPCIKKITFLDFSEGHAKSYNELAVTIRRNILMADWNDPSHVESLLNPKQWKFRTTTIKNVRLSCCVAGHIKVAEAGQDIQETMDALMQLGLDPSSGEYQSIRYALLNGASCFRCRDWCRLPVVTPCRHLLCLDCVALDSEKCTLPGCGNHYEMQTPETRARPENPNPKWPVPKDLIELQPSYKQDDWDPDWQSTTSSKVAYLVNKLRSLKAENIKHGYSRNMANGACLSSQSSCQDHNNVEGRLPHTMPDKVIIFSQFLEHIHVIEQQLTIGGITYAGMYSPMPLGSKRSSLTKFKDDPACMALVMDGTAALGLDLSFVSYVFLMEPIWDRSMEEQVISRAHRMGATRPIFVETLAMRGTIEEQMLKLLQDSNACRQMVNKGTSSTDNEGARPHRSLHDFAESSYLAQLSFVKGSDAAEKL

SEQ ID NO: 142886 - protein, 240 aa, Oryza sativa
  unsure (1)..(240): unsure at all Xaa locations
  Clone ID: PAT_MRT4530_43849C.1.pep
PVLDARANIGKGARPYYKIFQAFGLVRKVEKGITRWYYPSMLDDLAFDSAALGIALEKPLDLVRLYLSRATLIVVPANLIDHWTTQIQRHVSSDTLNVYVWGDHKKPSAHNLAWDYDIVITTFSRLSAEWGPKKRSVLKQIHWFRVILDEGHTLGSSLALTNKLQMAVSLVASNRWILTGTPTPNTPTSQVAHLHPMLKFLHEEVYGQNYQSWDTGNHXPXEAXMERRRSRLLQLLQRTM

SEQ ID NO: 142887 - protein, 54 aa, Oryza sativa
  Clone ID: PAT_MRT4530_4384C.1.pep
KKGNLKLPHHFIYKQKTFEEGEMLMRLTGCPNNLNYFHTKTTHFNTQIRETDQS

SEQ ID NO: 142888 - protein, 96 aa, Oryza sativa
  Clone ID: PAT_MRT4530_43850C.1.pep
MDSLVHSIGSAGSRDRIGRKGTVADLADARRCSNRAPAPVPAAAVDLYHSHEFIIHKVAGISWLATPEYKNNYNKNDGLFYLLSFDGSWLHMHIGF

SEQ ID NO: 142889 - protein, 164 aa, Oryza sativa
  unsure (1)..(164): unsure at all Xaa locations
  Clone ID: PAT_MRT4530_43851C.1.pep
GIPCAYGFIYDRKKYQQLHGFLVSGXGIETNLEKIRAIKNLKSPLRLEEVEKLTGCMEALGRFVASMRKLGLPFFNLVKKHNKFKWTTVTEEAFQILKRYLANSSILVASQPXEELFLYNVTTPYSASTILVIERDQVQQPIYYVTEVLHNVKAIFPNPKAVTL

SEQ ID NO: 142890 - protein, 119 aa, Oryza sativa
  unsure (1)..(119): unsure at all Xaa locations
  Clone ID: PAT_MRT4530_43852C.1.pep
MEGRGRHGGAQCGSGGGGVGTRRCGRGETHGGSAKLQQWQRPCRAVVRHRRRCPPPINAAPRLPRLCRPPSAAPVSRHLAKHHCDSPSPRAASHHRRKKKEEGRKKXKNSMSSSTWRAT

SEQ ID NO: 142891 - protein, 215 aa, Oryza sativa
  unsure (1)..(215): unsure at all Xaa locations
  Clone ID: PAT_MRT4530_43853C.1.pep
VKSFNLPAGKGGRKKNWGPEAKKAFRLPPGFEEGPPPLNEKKKTGGPEVPVRTRKPTLAAHXAACAEKKSHSPPEEALPSGASFXEAEAPAQGWPNSLFLREPARXEQAPRNSESARPERAPLDQRARELEARAKELDAKAHNGGAATGHGDLTARLAAAEHTIAELQGALDLSAGEVEALRLANEVGPGMLRDAVSRLDRAGRQAGLWGGQNAK

SEQ ID NO: 142892 - protein, 56 aa, Oryza sativa
  unsure (1)..(56): unsure at all Xaa locations
  Clone ID: PAT_MRT4530_43854C.1.pep
SKNKSPVSSLTFTPAWIFVIVNIFLRAYKVEVFWFQFSKPKKXRRAKRGSKLTKRA

SEQ ID NO: 142893 - protein, 104 aa, Oryza sativa
  Clone ID: PAT_MRT4530_43855C.1.pep
SLSSSPRSPHSLTLPSPWPPASRTAARPHPPPRDPARSPPRPSPPRRPLAAPPPPPLPGRRTRRPSPPSPPPRCGGPRRRSRGPAGSRAPWSPPSSSPPSGRPR

SEQ ID NO: 142894 - protein, 210 aa, Oryza sativa
  Clone ID: PAT_MRT4530_43856C.1.pep
MAATVVSKFEVEKFDGTGNFVLWQMRLKNLLAQQGISKALQETMPEKMDSDKWNEMKAQAAATIRLSLSDSVMYQVMDEKTPKEIWDKLASLYMSKSLTNKAIILLCSLPPSYEHVVTTLTHDKDTVKTEEKRKGGIASLAARGEDSDRKTMNIMKDGKTVMTGERTSSCLYKLQGSAVAGGVMEDGYAGVAVHDPEGGEPGVGSLGGSA

SEQ ID NO: 142895 - protein, 353 aa, Oryza sativa
  Clone ID: PAT_MRT4530_43857C.1.pep
MDADKWDEMKAQAAATIRLSLLDSVMYQVMDEKTPKEIWDKLASLYMSKSLTSKLYLKQQSYGLQMQEESDLRKHVDIFNQLVVDLRKLDVKLDDEDKAIILLCSLPPSYEHLRRSKKNEATEASQAESLLVKAKHDYEAGVSKSKEKGARCYKCHEFGHIRRICPLLKKRKGGIASLAARGDDSDSSSHEILTVSNEKSGEAWMLDSASSYHVTSKREWFSSYKSGDFGVVYLGDDTSYRVVGVGDVKFKMYDGNEVLLSDVRHMPGLRKSLISLGSLHETGWLYQVDSDRKTMNIMKDGKTVMTCEMTSSCLYKLQGSVVAGGVMEDGYVGVAVHDPEGGEPGVGSSGGSA

SEQ ID NO: 142896 - protein, 89 aa, Oryza sativa
  Clone ID: PAT_MRT4530_43858C.1.pep
MAKTFLPAYAPNQFSQKIENWMNEVTTLLSLLICFNNFGLEIMCDGARRSRDAKHAMVTKAIYLYFNCANEAIMGAQFNRATEAVENLH

SEQ ID NO: 142897 - protein, 408 aa, Oryza sativa
  Clone ID: PAT_MRT4530_43859C.1.pep
MAATAVSKFEVVKFDGTGNFVLWQMRLKDLLAQQGISKALQETMPEKIDADKWNEMKAQAAATIRLSLSDSVMYQVMDEKSPKEIWDKLASLHMSKSLTSKLYLKQQLYGLQVQEESDLRKHVDVFNQLVVDLSKLDVKLDDEDKAIILLCSLPLSYEHVVTTLTHGKDTVKTEEIISSLLARDLRRSKKNEATKASQGKSLLVKDKHDHEAGVSKSKEKGARCYKCHEFGHIRRNCPLLKKRKGGIASLAARGDDSDSGSHEILTVSDEMSGEAWMLDSASSYHVTSKREWFSSYKSGDFGVVYLGDGTSYRVVGVGDVNFKMYDGNEVLLSDVRHVPGLRKSLFRLGAYMRQDGKTVMTGERTSSCLYKLQGSAVTGGVMEDGYVGVAVHDPEGGEPGVGSSGGSA

SEQ ID NO: 142898 - protein, 39 aa, Oryza sativa
  Clone ID: PAT_MRT4530_4385C.1.pep
HEGQLKLSWLHFPLSFLFPKTHLLSRIVKIHALLEQTHF

SEQ ID NO: 142899 - protein, 131 aa, Oryza sativa
  Clone ID: PAT_MRT4530_43860C.1.pep
MAAPAGPHVQEAETARCHHSPVQLGPTRRARRSMGRPHPHRIEEVQRQPAAAGATPHGHAPHSESRILHHDVPHNRAPAFRESVAEACAFHCSRTDGFVPSPFHKVGSLLIEEADHFCNGTECAATFTSPA

SEQ ID NO: 142900 - protein, 368 aa, Oryza sativa
  Clone ID: PAT_MRT4530_43861C.1.pep
MAATVVSKFEVVKFDGTGNFVLWQMRLKDLLAQQGISKSLEETMPEKMDAGKWEEMKAQAAATIRLSLSDSVMYQVMDEKSPKEIWDKLASLYMSKSPTSKLYLKQQLYGLQMQEESDLRKHVDVFNQLVVDLSKLDVKLDDEDKAIILLCSLPPSYEHVVTTLTHGKDTVKTEEIISSLLARDLRRSKKNEAMEASQAESLLVKAKHDHEAGVSKSKEKGAQSSSYNVTSKREWFSSYKSGDFGVVYLGDDTSYRVVGVGDVKFKMYDGNEVLLSDVRHVPGLRKSLISLGSLHETGWLYQVDSDSKTMNIMKDGKTVMTGEKTSSCLYKLQRSAVAGGVMEDGYAGVAVHDPEGGEPGVDSSGGSA

SEQ ID NO: 142901 - protein, 144 aa, Oryza sativa
  unsure (1)..(144): unsure at all Xaa locations
  Clone ID: PAT_MRT4530_43862C.1.pep
HALVKDRLSTKKNLHKKTIVPNDTCDICNDEIXNSFLCPFAKSFWEKIGVQPLIQDVEXQFHQPKPGLRMPILHYQVFYLLCFWALWNHRHDVVFRGQGPSITSCLQRCVREAALXAENLKSEARYVIQIWKEIFSSPLQSINS

SEQ ID NO: 142902 - protein, 406 aa, Oryza sativa
  Clone ID: PAT_MRT4530_43863C.1.pep
MAATVVSKFEVVKFDGTGNFVLWQMRLKDLLAQQRISKALEETMLEKMDAGKWEEMKTQAAATICLSLSDSVMYQVMDEKTPKEIWDKLASLYMSKSLTSKLYLKQQLYGLQMQEESDLRKHVDVFNQLVVDLSKLDVKLDDEDKAIILLCSLPPSYEHVVTTLTHGKDTVKTEIISSLLARDLRRSKKNEAMEASQAESLLVKAKHDHEAGVSKSKEKGARCYKCHEFGHIRRNCPLLKKRKGGIASLAAHGDDSDSSSHEILTVSNEKSGEAWMLDSASSYHVTSKREWFSSYKSVGDVKFKMYDGNEVLLSDVRHVPGLRKSLISLGSLHETGWLYQVDSNRKTMNIMKDGKTVMTGERTSSCLYKLQGTAVVGGVMEDGHAGVAVHDPEGGESSVGSSGGLA

SEQ ID NO: 142903 - protein, 415 aa, Oryza sativa
  Clone ID: PAT_MRT4530_43864C.1.pep
MAAAASDSDSPAAAAARHHDDPTLPAFASFSLSLSLRTPASPSPAALASVPSTIHLPTQISTLAVCLHPSASASASPSSRRRLNAAAAASSLLAPLPASTPGLSRSFPSGAPAGGRRRTLVWFPRELASRHEAFARRGSSSLLPVIVFDPRDFGKPEVVIPELARAAGAEAVFAHGEVSRDECRAEEKVSKAVEKEGIEVKYFWGSTLYHLDDLPFRLEDMPSNYGGFREAVKGLDVRKVLDAPEEVKCVPMKNVLEPGEIPTLAELGLTAPPAMAHGSKAAVGSTLIGGEAEALERLKKFASECCMQPNKGDKDSTRDSIYGANFSCKISPWLATGCLSPRFMYEELKKHASRAIPSGSTPKNGDGTSDAGTNWLMFELLWRDFFRFITKKYSSAQKTSEVAPATGCTPTPALA

SEQ ID NO: 142904 - protein, 81 aa, Oryza sativa
  unsure (1)..(81): unsure at all Xaa locations
  Clone ID: PAT_MRT4530_43865C.1.pep
XSQVQGCGSSQAWELLRFICFRILRRLRLQVYSMIFSPSPALPPQYFEARIIFVPHKSLLKXFCNHAVCFLLCESIVHXHP

SEQ ID NO: 142905 - protein, 374 aa, Oryza sativa
  Clone ID: PAT_MRT4530_43866C.1.pep
MAATVVSKFEVVKFDGTRNFVLSQMRLKDLLAQQGISKALEETMPEKMDDDKWDEMKAQAAATIRLRLSDFVMYQVMDEKSPKEIWDKLASLYMSKSLTSKLYLKQQLYGTMWVVDLSKLDVKLDDKDKAIILLCSLPPSYEHVVTTLTHGKGTVKTEEIISSLLARDLRRSKKNEATEASQAESLLVKAKHDHETRVPKSKEKGHDSNSHEILTVSNEKSGEAWMLDSASSYHVTSKREWFSSYKSGDFGVVYLGNDTSYRVVGVGDVKFKMYDGNEVLLSNVRHVPGLRKSLITLGSLHETGWLYQVDSNRKIMNIMKDDKTIMTGERTSSCLYKLQESAVAGGVMEDGYAGIAMHNPEGGEPSVGSSGGSA

SEQ ID NO: 142906 - protein, 278 aa, Oryza sativa
  unsure (1)..(278): unsure at all Xaa locations
  Clone ID: PAT_MRT4530_43867C.1.pep
NASGVDYPAAAAARHHDDPTLPAFASFSLSLSLRTPASPSPAALASVPSTIHLPTQISTLAVCLHPSASASASPSSRRRLNAAAAASSLLAPLPASTPGVRPLXPSGAPAAAGRRRTLVWFRADLRLHDHEPLHAAVGASSSLLPVFVFDPRDFGKSPSGFDRTGPYRAGFLLDSVADLRRGLRARGGDLVVRVGRPEVVIPELARAAGAEAVFAHGEVSRDECRAEEKVSKAVEKEGIEVQYFWGSTLYHLDDLPFRLEDMPSNYGGFKEAVKGLDA

SEQ ID NO: 142907 - protein, 84 aa, Oryza sativa
  unsure (1)..(84): unsure at all Xaa locations
  Clone ID: PAT_MRT4530_43868C.1.pep
QQSPNPYIPQGKNQPSRQKGKKNPPGKDPPPQGGFFGRXDGAPKPGGWGPPPGGKGGGNGKPPRGGTPGGSLGGFRTPQNLPKI

SEQ ID NO: 142908 - protein, 624 aa, Oryza sativa
  Clone ID: PAT_MRT4530_43869C.1.pep
MAATVVSKFEVVKFDGTGNFVLWQMRLKDLLAQQGISKALEETMPEKMDAGKWEEMKAQAAATIRLSLSDSVMYQVMDEKSLKEIWDKLASLYMSKSLMSKLYLKQQLYGLQMQEESDLRKHVDVFNQLVVDLSKLDVKLDDEDKAIILLCSLPPSYEHVVTTLTHGKDTVKTDEIISSLLARDLRRSKKNEAMEASQAESLLVRAKHDHEAGVSKSKEKRARCYKCHEFGHIRRNCLLLKKRKGGIASLAARGDDSDSSSHEILTVSNEKSGEAWMLDLASSYHVTSKREWFSSYKSGDFGVVYLGDDTSYRVVGVGDVKFKMYDGNEVDSNRKTMNIMKDGKTVMTGERTSSCLYKLQGSAVAGGVMEDGYAGVVVHDPEGGKPGERDGVDVAGLAVGEEVGAVLRHDRVGTGSDRVGARNRRMEQAPELGLRGARACAHGEHLAPKLRHAVPSLARPGSGCFSALWSSCPRASRALAPATNLHKSRQQKRQQIGRRGRRRGEAHDGGIPDVPPQHGRRGGATAWEEPLAASTIVSAFWIHRRVPNLLRRVPSLLRCRRREERGEERPPAGRREKPPAGRGERRGHRRGERRSRRRGEGKCSVVEERRGQPVELEEGEGRGD

SEQ ID NO: 142909 - protein, 389 aa, Oryza sativa
  Clone ID: PAT_MRT4530_4386C.1.pep
MLPSSAASSPPAPPPSPWDDVSWAESTSSTVLQHYNSLPKKGKPQGRESTVLAAFLLSTPQQDPRNLTVLSLATGTKCLGAARLNHHGDLVHDAHAEVVARRALLRLIYTEIGRSGASDWLVASGGVMPVPPSPSELLREQLDSVNGCDDVGFVQRKPGRGDTTLSMSCFDKITRWSVVGIQGALLSHILEPLYLSTITIGQSPTGASDGFSVENNIKKVLDARLSSLSSKLLLPFKLNKPLFYEAPIPPKEFQQTSGDLQPLTCGYSICWNKSGFHEVVLGTTGRKQGTSSKAACSPSTESLLCKRRLLEAFVLIEHPLVKKFHREEMSYRQIKDMAHEYQQTLELLRKAPFFSRWSAKPASLDSFTVSRKCMLFSRCSSELLYKLSL

SEQ ID NO: 142910 - protein, 269 aa, Oryza sativa
  Clone ID: PAT_MRT4530_43870C.1.pep
MFGPMAFFPRLVSDVDFGAGFITSGIRAYGRSMVEEVVEAYMKLGDGQGRGVADADSESGHSACGTIVEDEAKSNTRRGGDADSDLKKSEAIGLMKSAKEFHGIALQSNKSPRQKEIGLGPLGGGDLGRRASSAESVSVMDAEAVEKQQHLDISTSGSPSINCGQAISAKGAAREFSLRMRKSVDVGFISSVHKMIRKKGFSPCLLGRIQFAWQDDCGDMREGGALLRVESEGRNYRDTGVSCYDEPGGGLSGRLGVSGEKGSTQVLVH

SEQ ID NO: 142911 - protein, 556 aa, Oryza sativa
  Clone ID: PAT_MRT4530_43871C.1.pep
MAAFNREMTRRGAQVDGGGSDWRSNRWVGHFGRVARTFRCCQRYEEAQEVRVAAVCASCVEAEQRARFVPDFHRGGGGLGGEVTGGWRRILAGGAWRRGTRRRPSELEQELAAAAAAVLGEEPVQVFSGGAPRRCGSLLRGQRLPKVRRRDGSSQMRLKDLLAQQGISKALEETMPEKMDAGKWEEMKAQAAATIRLSLSDSVMYQVMDEKSPKEIWDKLASLYMSKSLTSKLYLKQQLYGLQMQEESDLRKHVDVFNQLVVDLSKLDVKLDDEDKAIILLCSLPPSYEHVVTTLTHGKDTIKTEEIISSLLARDLRRSKKNEAMEASQAESLLVKAKHDHEAGVSKSKEKGARCYKCHEFGHIRRNCPLLKKRKGGIASLAARGDDSDSSSHEILTVSNEKSGEAWMLDSASSYHVTSKREWFSSYKSGDFGVVYLGDDTSYRVVGVGDVKFKMYDGNEVLLSDVRHVPGLRKSLISLGSLHETGWLYQVDSDRKTMNIMKDGKTVMTGERTSSCLYKLQGSAVAGGVMEDGYAGVVVHDPEGGKPGVGSSGGSA

SEQ ID NO: 142912 - protein, 49 aa, Oryza sativa
  Clone ID: PAT_MRT4530_43872C.1.pep
LVPLVLCACYASALMDDLKPRYKQYEVQSHENATATSAHPMRSLRKGTP

SEQ ID NO: 142913 - protein, 72 aa, Oryza sativa
  Clone ID: PAT_MRT4530_43873C.1.pep
MDLDWRGERGDGTTVRALQSVGGPRWRVSAVTATLTALGPYNRYPNYQNWCKTGPSAVLKAVLADTAPTWLV

SEQ ID NO: 142914 - protein, 93 aa, Oryza sativa
  Clone ID: PAT_MRT4530_43874C.1.pep
MMGMAYNMSTMAPPPPPPPQMMNLARPSPSTPQPPMGIMPQTQPPPPAPTMLQQQMPMNVGPPMQFALQQSGAPSFRPLQPPPGMQFFHPQSQ

SEQ ID NO: 142915 - protein, 366 aa, Oryza sativa
  unsure (1)..(366): unsure at all Xaa locations
  Clone ID: PAT_MRT4530_43875C.1.pep
LCLFLVLALMVAASAHDVPITDEDLKSEESMWSLYERWSHVYGVSSRDLAEDKKSRFEVFKANARHIHEFNKKEGMSYKLGLNKFSDMTVEEFAAKYTGVQVDAGAAVVTSAPDEQPVLVGDAPPVWDWRDHGAVTPVKDQGSCGSCWAFSAVGAVEGVNAIATGNLLRLSEQQLLDCTNPNDDCINGGRAERAMQYVVNNGIALDASCPGPYYPPYEAEKLPCRTEPGRQAVTLDCIRQLPLDNEAALKERVYIQPVSVAVDAKNTGWQXLKGGVYSGPCGTRINHAVLAVGYGVTLNNTKYWIVKNSWNTTWGESGYIRMKRDVGGNKGLCGIAMYGIYPTKTKTSTFSAAARAASVIADAALY

SEQ ID NO: 142916 - protein, 88 aa, Oryza sativa
  unsure (1)..(88): unsure at all Xaa locations
  Clone ID: PAT_MRT4530_43876C.1.pep
EGAGTXXTHQIIPFHIPPPYAYRRHPQWVTHTQSITIHHTQVXQSPHHAHACMVTVSHPGVDTQLWSPPFSNPSVSLFYSAPRSIVRR

SEQ ID NO: 142917 - protein, 96 aa, Oryza sativa
  unsure (1)..(96): unsure at all Xaa locations
  Clone ID: PAT_MRT4530_43877C.1.pep
LLLAXTXXXFLLXFSTGGLATGTFGXTGVSFWKALVLXIXXTXGLVYTVYATAVNPXKGSLGTIAPIAIGFIIGANILXGGAFNGXSXNPAVSFGP

SEQ ID NO: 142918 - protein, 338 aa, Oryza sativa
  Clone ID: PAT_MRT4530_43878C.1.pep
YVPACPSPSPFPPPSYYSCFPMDHSGSVSAGGKMMVKAAAAAESASTNERTQSFSGCNSEKFYHIESPHKKRKSQYELSDTRVSSLKYKFRNGLAWQEDESSRTESLGCNSIFVNRNYDMDMVNRVEELESCDNTQSLIGGCIEVDSINGIESHKMLKVQAFSSSSSSNNISSDAFTSSRSNGTKDTDSWDMQHLEYDHPGLMLLPYDDDIEEAYDVLGQYDVVMKNDLASGDVDGSAAGVIDEKLYSNGIEDLLILPRGQNSIHVRTFGIGWGRGPAWREEDAVAGDEPRAMSSRDVEDLVYVASRPREPVARDISTKRGGASVAGAREQSDVGGRS

SEQ ID NO: 142919 - protein, 865 aa, Oryza sativa
  Clone ID: PAT_MRT4530_43879C.1.pep
MEKKKVMEKKKVDAVVAAARPFLRGDLSQVDPELPSLVSVLCDAGAGECYHKHGTFLAHLIDVYRILRLWGAPDAVARCGLYHSAYSNSYVNLAIFQPDVARDHVRGIIGAAAERLVHLFCVVPRHQLMHDDLHLRYTDAELTAHLAASQASLDAARKSGGGGGDPGEAWRAKLASVVPPEGVVARHIRTGEAVALSRRVLGVFIVMTIADFSDQYTDYQDKLFDNEDGRLEYRGDNWRAVWPGSGKPGLWMSAMSRLAAVYRLIATDEEIRELTAGERSVVKREDAELELVIPPVFERCSKVLDAAEQKEGRDLYWEAVCGEWEEGKTERLLRRSIEKNPFVGEPWLVLAQALLNSGHDEEAEAAAEEGQYDAYIHWFYYFHRGPAPLASLADAASTCLEKENSMTLLWRTVKAFSYIQGSIVGECIVEWMRTVIKEKGEIEHPFGIDAAKCIAKEAELISEWLRHGRRMLTDDEYTLCHEIRAVACKLFVIRGEWTVDIASALLGIRKEAEWLIENLKRFPVESISTSMKIRQFALDFVWEKIGEYASYKNKESSESEMASESDADVTESNDNDYMWWRVNSCKYPILSRMALDLLAVPASSVASESAFSTGSRIISDYRSRLASGTVEALVCLQDWMRADGFGDPYSILTDTAEGDDVNMQLLGSLDLSFSGGQIHFYSVRLLLNSIQDVLALAMTLNHLTSQANYHQYNAYLHWFYYFHTSLAPLASLVDAASMCLEKERSMVLLWKNARACTYIRDCLVGECIVKWMRTAINGIRKEAEWLIENLKRNNVESISTSMKIRQFALDFLCEKYVEYGSFKKQESSESEMASESDEDVVEEHTYYVGDLHDEDYLKLRKKKTT

SEQ ID NO: 142920 - protein, 409 aa, Oryza sativa
  unsure (1)..(409): unsure at all Xaa locations
  Clone ID: PAT_MRT4530_4387C.1.pep
MLPSSAASSPPAPPPSPWDDVSWAESTSSTVLQHYNSLPKKGKPQGRESTVLAAFLLSTPQQDPRNLTVLSLATGTKCLGAARLNHHGDLVHDAHAEVVARRALLRLIYTEIGRSGASDWLVASGEKWKLRDGYHLHLYITQIPCGVMPVPPSPSELLREQLDSVNGCDDVGFVQRKPGRGDTTLSMSCFDKITRWSVVGIQGALLSHILEPLYLSTITIGQSPTGASDGFSVXKYIKKDLDARLSSLFSKLLLAFXLNKPLFFEAPIPPKEFQQTSGDLQPLTCGYSICWNKSGFHEVVLGTTGRKQGTSSKAACSPSTESLLCKRRLLEAFVSIEHPLIKKFHCEEMSYRQMKDMAHEYQQTLELLRKAPFFSQWSAKPVSLDSFTVSRKCMLFSRCSSELLYKLSL

SEQ ID NO: 142921 - protein, 554 aa, Oryza sativa
  Clone ID: PAT_MRT4530_43880C.1.pep
MESKGGKKKSSSSRSSLMYEAPLGYSIEDLRPAGGIKKFRSAAYSNLLPSDREGHQSCFLSSSSLASSFETMAVLSVADSPPVSAIGFEGYEKRLEITFSEAPVFADPNGRGLRALSRAQIDSVLDLARCTIVSELSNEVFDSYVLSESSLFVYPYKIVIKTCGTTKLLLAIPRILELAEELSLPLEAVKYSRGTFIFPEAQPSPHKNFSEEVAVLNRYFGGLKSGGNAYVIGDPAKPGQKWHVYYATQHPEQPVVTLEMCMTGLDKKKASVFFKTSADGHTTYAKEMTKLSGISDIIPEMEVCDFDFEPCGYSMNAIHGPAFSTIHVTPEDGFSYASYEVMGFNPASLAYGDLVKRVLRCFGPLEFSVAVTIFGGRNHAGTWAKGLDVGAYSCSNMVEQELPSGGLLIYQSFTATAEIATGSPRSVLHCFADENTEKAGKMEALYWEDDAVEEIDGTEGNELSTLYADLILCTNTTAIGKYDFCSAPITVLHLSVTQVVLQQGLRQGVLVVVGRSNAKESSFKNQFHMRSDFSYCHFMAKRAGMQQQQQQQLQ

SEQ ID NO: 142922 - protein, 395 aa, Oryza sativa
  Clone ID: PAT_MRT4530_43881C.1.pep
MAVLSVADSPPVSAIGFEGYEKRLEITFSEAPVFADPNGRGLRALSRAQIDSVLDLARCTIVSELSNEVFDSYVLSESSLFVYPYKIVIKTCGTTKLLLAIPRILELAEELSLPLEAVKYSRGTFIFPEAQPSPHKNFSEEVAVLNRYFGGLKSGGNAYVIGDPAKPGQKWHVYYATQHPEQPVVTLEMCMTGLDKKKASVFFKTSADGHTTYAKEMTKLSGISDIIPEMEVCDFDFEPCGYSMNAIHGPAFSTIHVTPEDGFSYASYEVMGFNPASLAYGDLVKRVLRCFGPLEFSVAVTIFGGRNHAGTWAKGLDVGAYSCSNMVEQELPSGGLLIYQSFTATAEIATGSPRSVLHCFADENTEKAGKMEALYWEDDAVEEIDGTEGKKMRSC

SEQ ID NO: 142923 - protein, 323 aa, Oryza sativa
  Clone ID: PAT_MRT4530_43882C.1.pep
MRQPHGPRWTGRSVRPKAGHVGAAGGRRRARAPMVTGGGHGHIGAAAERGVGKGETRRRSTAHHRSTVTTKRQPERRKAAARLGSTGTAALRRYAAVGSLADTAEKKHWPSSIRARRKAVKSRNRPKQFREGIKSTGTLTNLKARFWTCTEVKQIFQARTNLPSTRVESEVNEANIVPGSADKLSPEQKKEFELMMKNAQEQFMKSFVATRQGKVVQKYKVKVVVAVEVGTSSSQGSKSAADGSGDKGDGLQDSVVEDLYEDGAEVQEEPARCTNFQDQVDYAVQHALINHSGVLVNPLPNMIKSVIDGTIAEHQTTGPVYLP

SEQ ID NO: 142924 - protein, 38 aa, Oryza sativa
  Clone ID: PAT_MRT4530_43883C.1.pep
TVSNKTKITLCCILNALLIQMFRDYTHQHTQVCLSDTH

SEQ ID NO: 142925 - protein, 394 aa, Oryza sativa
  unsure (1)..(394): unsure at all Xaa locations
  Clone ID: PAT_MRT4530_43884C.1.pep
TLMKPLLTIKGRQILLHQHFACHIINLIVKKGFKLLNVHIEAIRXSNHVLTIAXQWKRYCVASDERARKFITSTKHRWNATYLMLKCIXYKDLLIIFLQTRDVLTSDGQLLLIDIYXYVVERFFQFLFIXTSKVYYPTANLNLHKILEIATLFKEYDSDELIGPAVFSVKQNYLKYWKNLPMLYAFAFILDPRGKXHRFLNLCSLIGETKYVDYSNYYSDVNTKSFXVFQKYELKFXGVTLQIPTPALATGKKNHSXSRICGGSSSSHGGNGSSTKCXTIELSNYLDSIAIRHESSHFNVHRLWNNHRMSYPLXKLARDVLMVPVSTISSKSAFXLYGQIIEDRRTCLSNEDEEILLSIKGXELAAEHTQYTXADNQELATQFXNLHLDQEKIE

SEQ ID NO: 142926 - protein, 50 aa, Oryza sativa
  Clone ID: PAT_MRT4530_43885C.1.pep
MDTLFSEVLFINRWNLAPNAGLHRFSLIFGEGANIEERDKKRAKAETREE

SEQ ID NO: 142927 - protein, 78 aa, Oryza sativa
  Clone ID: PAT_MRT4530_43886C.1.pep
MWTLSLAPATWNFRHVGPEPDVEHTQTQSEHAEIVVGGAEDPRDATQRDAPPPPRGAVKGGFGRVNAGGLDSARESET

SEQ ID NO: 142928 - protein, 71 aa, Oryza sativa
  Clone ID: PAT_MRT4530_43887C.1.pep
MHQITTVHGEIGDKERWGMDGPESIASRPGGERSGEVDGGVTANQGFDVPILELAPIRLRIGAPNWFWIGI

SEQ ID NO: 142929 - protein, 409 aa, Oryza sativa
  Clone ID: PAT_MRT4530_43888C.1.pep
MGRKRAVLVGINYAGTEGELKGCLNDVARMRRCLVDRFGFDEADIRVLADADPSTPQPTGANIRLELERLVGDARPGDTLFFHYSGHGLQLPIETGGDDDDTGYDECIVPCDMNLIKDQDFTELVQKVPDGCLFTMVSDSCHSGGLIDKTKEQIGSSTKQSKIQQRERELRRQQAPSPGTCSCASLLQIALRHLPRRGGQRIIGSRSRDGVGEDQPPRSQAELLAADATRAGIKNRSLPLSTFVEMLRERTGKDDVGVGSIRTTLFHHFGDDASPKIRRLVNAMLGRRHGSATASEEHPDKAKPERVDGEGEAAAAKQGAPETRPLPRNGVLISGCQTDETSADATTPEGVSYGALSDAIQSVLAEERRGKVTNMELVRRARELLAKQGYTQQPGLYCRDKHANVAFIC

SEQ ID NO: 142930 - protein, 157 aa, Oryza sativa
  unsure (1)..(157): unsure at all Xaa locations
  Clone ID: PAT_MRT4530_43889C.1.pep
MVRTGIMFREKQRSSAVGIPCEKMTKVRILGGQLRSTVGIGTRLREELRSRRSRIPGDEVGYKMAYGGXYCMDEIFAMGRVEARRISTFEREKLGFTSSGWTGGKSAVXTTGGHTRGRETXNRRQGGGXTGCVRVVRPAAIELRRDFHRFEGNFYFR

SEQ ID NO: 142931 - protein, 212 aa, Oryza sativa
  Clone ID: PAT_MRT4530_4388C.1.pep
MVIDSVLMMGILSRFVTDDNINEHAVDGPERCTGRAGASRTPSACVLARIGGRSSFWERYAQLLLFVFLYIVFANMSNTGDDSNIGDNEKEVPVNTNGGNTASNSSGGPSSVYNLLTLFPQVLLISGDAVLTCRRQPTHSTQFSLQVMAATEQTNLEGGKTIDRPSSLRHKVWPANWNCSPLPWQLEVTCSQSPRPMEPVMGRELEAAARVA

SEQ ID NO: 142932 - protein, 90 aa, Oryza sativa
  Clone ID: PAT_MRT4530_43890C.1.pep
MAKGVACGETSSPAALTPYLIGTVAKGVGVAKGVQRLGWLRGLWTPVFITGIKHGLGVAKLIRPQPLTPYLIGIVAKGVGVAKGLFGYSP

SEQ ID NO: 142933 - protein, 94 aa, Oryza sativa
  Clone ID: PAT_MRT4530_43891C.1.pep
WDEAPPRQIGTPPASYPSLGRTFRLLRSSNRWPPWLLPPPPTSIEPRSLFDRCGPSTVSRHTLQVLKAPPFSSWGLSKGFPFFSYFKLRWFFFF

SEQ ID NO: 142934 - protein, 550 aa, Oryza sativa
  Clone ID: PAT_MRT4530_43892C.1.pep
MAPKSADIGIKWQKFIDRVTEIDMPKKLNVLSVDVLPVIEEHDSNIGEELVSSNAGATMLEFWASYMVSKFGGPVCLIFCIMVKSGGSKSSGGSHHGSDEEEVTMPVFDANLLAGVKDGLESACDYFDKCINQKFTKLERSIAMLVDRLPPPRQAHDRQGRRPPPEHHEYDAEDESPGLRSDGGPAIMDRVVVDDVHRDNRNRCATRVPLDEGLGCGDPEDYLEWEMYCDQIFNSHNYSEDKKVRLASIEFTGYALSWWNQLQLKQGDFSVDAYYKEMELLMSRTGVTENDETTMARFLNGLNDDVKNVLRYHIIMIYKRDGDGCAASKSVSFKPTTPFRDGSKPAASSAIEILMIHLWMMVLKNKNGLSMLARAVQRDGSNVDAKGQRCNIFQLECKIQEKMNQAGTLKITHKVRVAFSIGSYVDKVDCDVVPMNACHLLLGRPWQFDLHATHEGRTNHYSFIHRGVKHVLKPMLDSAIKSMVFSAVKNKKEPCQINPKQRTVLFQGREDDMPKKLNVLSVDVLPVIEEHGSNVGEELVVMLVLDTGRR

SEQ ID NO: 142935 - protein, 53 aa, Oryza sativa
  Clone ID: PAT_MRT4530_43894C.1.pep
MATGEPGVFHPVACTELLCELCLDVIFPGMFTSRSRKEMTKYGVGKMTNVPLH

SEQ ID NO: 142936 - protein, 130 aa, Oryza sativa
  Clone ID: PAT_MRT4530_43895C.1.pep
MAQGFRLFKPGRKGPDHLLPHLRRLVLRWLGSRPCMPTPIDTAFPNLQELGIYSIGMEKEGREIELLVATSTSKEEMGKRRSWRRHEVERQQHNLKVECGRHHGSRHCYLGRRRLLRPWLLPHPQPVYSR

SEQ ID NO: 142937 - protein, 887 aa, Oryza sativa
  Clone ID: PAT_MRT4530_43896C.1.pep
MQGKKESTVMEAATTNIFYRPVIFFSVLLCFQYRAAGVASDTLSNGRNLTDGDTLVSANGSFTLGFFSPGLPSRRYLAIWFSESADAVWVANRDSPLNDTAGVVVIDGTGGLVLLDGAAGQAAWSSNTTGSSPSVAVQLLESGNLVVRDQGSGDVLWQSFDNPSNTLIAGMRLGRNPRTGAEWSLTSWRAPDDPATGGCRRVMDTRGLADCVSWCGAGKKYRTGPWNGLWFSGVPEMASYSSMFANQVVVKPDEIAYVFTAATAAAPFSRLVLSEAGVIQRLVWDPSSKGWNTFAQAPRDVCDDYAKCGAFGLCNVNTASTLFCSCMAGFSPMFPSQWSMRETSGGCRRNAPLECGNGSTTDGFVPVRGVKLPDTDNATVDTGATLDECRARCFANCSCVAYAAADIRGAGGGSGCVMWTGDVIDVRYVDKGQDLYLRLAKPELVNNKKRTVIKVLLPVTAACLLLLMSMFLVWLRKCRGKRQNKVVQKRMLGYLSALNELGDENLELPFVSFGDIAAATNNFSDDNMLGQGGFGKVYKGMLGDNKEVAIKRLSKGSGQGVEEFRNEVVLIAKLQHRNLVKLLGCCIHGDEKLLIYEYLPNKSLEAFIFGTVQKHTMRSNKLHSMLTDREILLFLKKYLKIPKFYTKIFGTLRYLVSEDPASKYALDWPTRFKIIKGVARGLLYLHQDSRLTIIHRDLKSSNILLDVDMSPKISDFGMARIFGGNQQEANTNRVVGTYGYMSPEYAMDGAFSVKSDTYSYGVILLEIVSGLKISLPRLMDFPNLLAYAWSLWKDDKAMDLVDSSIAESCSKMEVLLCIHIGLLCVQDNPNNRPPMSSVVFMLENEAAALPAPIQPVYFAHRASGAKQSGGNTSSSNNNMSLTVLEGR

SEQ ID NO: 142938 - protein, 54 aa, Oryza sativa
  Clone ID: PAT_MRT4530_43897C.1.pep
MASCFALRPSPTIDLRLFDELGGKPFGLHYTASPRSVEGPRELWSRLCKMCGMP

SEQ ID NO: 142939 - protein, 39 aa, Oryza sativa
  Clone ID: PAT_MRT4530_43898C.1.pep
MSVSLFRSGREGFSGPQSEDRRGDEVTAVLGTRGDVARY

SEQ ID NO: 142940 - protein, 117 aa, Oryza sativa
  Clone ID: PAT_MRT4530_43899C.1.pep
MATGSTRGSLPPPREPVATTRQWRRRRRRRCNFRFPCRCPWLQPGAGGLQFYTDTAAAAAGALLVAHTPGWPLYHHHQQQHAAAGPVLGRRAAFAPPELKRGVLTVNPATFPAPGAK

SEQ ID NO: 142941 - protein, 93 aa, Oryza sativa
  Clone ID: PAT_MRT4530_4389C.1.pep
MGFHHQKTEQSGRPADRDRHAAQRRKCLHMRRREGELGESGVLAAEASSQGWMSPAESASDMAAATEALSGWPGCKAGPLEGEVRSSSPDPDG

SEQ ID NO: 142942 - protein, 110 aa, Oryza sativa
  Clone ID: PAT_MRT4530_438C.1.pep
PKNLVPVKKRVPWGMGKVFFLGMVNPQGNFRVLPGGFPFPPPPGWGFPVGGKGFLLWAPQKKGFQRFGPGPFLVFLNWGLKGFFLIFINLGPCGKVLPPVWAKGGAQLGC

SEQ ID NO: 142943 - protein, 131 aa, Oryza sativa
  Clone ID: PAT_MRT4530_43900C.1.pep
AQFYACPFGQCPPPPFLHPILNPCNGFVRPQCSPMSPPWGPSPGLQFSSCPVIRPQFCPPIGFMAPQFPCPAFCPLGPFFLPQVPFYAGFVGEPPAQAPAPVASHLPPLCGVSPRDCRPPCKVAPGPCGFW

SEQ ID NO: 142944 - protein, 651 aa, Oryza sativa
  Clone ID: PAT_MRT4530_43901C.1.pep
MAPPGVGVGVAYLWGKGRGGRKGTPVVVTMESPNYSVVEVDGPDAEAELRTAAVAMDKGGGRGRNKNQAPPGSSPGGFLALSLLALAVELAAYWNGWRLRRPELHVPEAVEIEGWAHSAYISWMSFRADYIRRPIEFLSKACILLFVIQSMDRLVLCLGCFWIKLRKIKPRIEGDPFREGSGYQHPMVLVQIPMCNEKEVYEQSISAACQLDWPREKFLIQVLDDSSDESIQLLIKAEVSKWSHQGVNIVYRHRVLRTGYKAGNLKSAMSCDYVKDYEFVAIFDADFQPTPDFLKKTIPHFEGNPELGLVQARWSFVNKDENLLTRLQNINLCFHFEVEQQVNGVFLNFFGFNGTAGVWRIQALEESGGWLERTTVEDMDIAVRAHLNGWKFIFLNDVKVLCELPESYEAYRKQQHRWHSGPMHLFWLCLPDILTAKISSWKKANLILLFFLLRKLILPFYSFTLFCVILPLTMFVPEAELPVWVICYVPVCMSFLNILPSPRSFPFIVPYLLFENTMSVTKFNAMVSGLFKLGSSYEWIVTKKSGRSSESDLSTAAERDTKDLTLPRLQKQISESELIELKMQKERQEKAPLGAKKANKVYKKELALSLLLLTAATRSLLSAQGIHFYFLLFQGVSFLFVGLDLIGEQID

SEQ ID NO: 142945 - protein, 246 aa, Oryza sativa
  Clone ID: PAT_MRT4530_43902C.1.pep
MAPPGVGVGVAYLWGKGRGGRKGTPVVVTMESPNYSVVEVDGPDAEAELRTAAVAMDKGGGRGRSRSRTARQLTWVLLLRARRAAGRLASFAAAAARRFRRSPADAADELGRGRGRLMYGFIRGFLALSLLALAVELAAYWNGWRLRRPELHVPEAVEIEGWAHSAYISWMSFRADYIRRPIEFLSKACILLFVIQSMDRLVLCLGCFWIKLRKIKPRIEGDPFREGSGYQHPMVLVQIPMCNEKE

SEQ ID NO: 142946 - protein, 149 aa, Oryza sativa
  Clone ID: PAT_MRT4530_43903C.1.pep
VCAGCRQEKKESAGAAGEKPPSFCDRLQRAFHARPAFRPLRRLGVRHGQDDDGGGGAPGSTVDMQPATTTTHGGGPPRPVLPPAAGHAPAPVVLPPAVVKPAAKPAGGNAPAPVVLPSAPAARPPPPSRRHGHAHASTTGSAPAAEKVA

SEQ ID NO: 142947 - protein, 536 aa, Oryza sativa
  Clone ID: PAT_MRT4530_43904C.1.pep
MVNLWKTGENPSIDILNLKLRTTVQQGIKLLKRSLQEGHADRTTTSFDPNESKVFTRRNPLMWSLNEGSNSNAFKKVPARWLEFNFYLFSMALRFEVLGRFNRARAARLTLPHFTCQTPLFMPVGTQGTIKGLTTDQLEEIGCQIILGNTYHLELRPGSQLIDDLGGLHKFMNWKRALLTDSGGFQMVSLLHLADITEEGVTFQSPVDGKPMLLTPEESIHIQNNIGADIIMALDDVVKTTITGPRIEEAMYRTLRWIDRCIAAHKKPDVQNLFGIVQGGLDPVLRDICVKGLVERNLPGYAIGGLAGGEDKDSFWRVVAQCTAGLPEDKPRYVMGVGYPLDIVVCSALGADMYDCVYPTRTARFGTALVPEGVLKLKQNAMATDERPIDPTCPCMVCKNYTRAYLHCLVTKDAMGSQLLSYHNLSFMMRLSRDLHMSILEGRFPEYVIIQLNFVSFVSFLTVLVNKKVSMPYCRFVRGFLRMQFPKGDVPKWVRNAMVVAGIDISECCTPAKYPRDAMDAPGTDIPELLPPTKCS

SEQ ID NO: 142948 - protein, 54 aa, Oryza sativa
  unsure (1)..(54): unsure at all Xaa locations
  Clone ID: PAT_MRT4530_43905C.1.pep
MDDFGRKFVHYQVLKQKKKNQPFAVKKKKKKKKKKKKKKKKKKKKKKXKKKXKK

SEQ ID NO: 142949 - protein, 416 aa, Oryza sativa
  Clone ID: PAT_MRT4530_43906C.1.pep
MELADVFLDHGYAVAVALIDPSVMENEANLAAAVARAVSSKSSTISFHTLPGIPDPPSLAFNDQFFKNYFDLVRRHNEHLHDFLRSVRGLHAVVIDASCAHAHEAARKLGVPVLMFYPSNAGHLAVNLQAPLLVDGFKKHLGGDSTSPVEFLGVRPMSASHLAGLFGPISEVNKDFEAMIFAGARMKAEFDGILINTSVSLEERALRALADPRCCPDGVVIPPVVMFLCFGSIADACEQSDQQLKEIAAGLDKSGHRFLWVVRATSTQHLDALLPEVFFARTSGRGLVVNSWVPQPSILRHRATAAFVTHCGWNSVLEGITAGVPMLCWPLYAEQRMNKVLMVEDMGVGVEMEGWLEGLVTAEEVETKVRLVMESEHGRKVRERVEAHRDGVAMAWKDGGSSRVAFARLMSELLNV

SEQ ID NO: 142950 - protein, 69 aa, Oryza sativa
  Clone ID: PAT_MRT4530_43907C.1.pep
MTWIDLGIRRFGLTMRSRFGVRDIEVELTGMLDGRSWHSDHGPSTSSLVAPRTRGDTGLMAEDGDDAAL

SEQ ID NO: 142951 - protein, 379 aa, Oryza sativa
  Clone ID: PAT_MRT4530_43908C.1.pep
MEKMMPGMVKEEWPPSSPEEGEAPRPMEGLHEVGPPPFLTKTFDLVADPATDGVVSWGRAGSSFVVWDPHVFAAVFLPRFFKHNNFSSFVRQLNTYFLVRTNYLNKRSHFYSLRFQGFRKIDPDRWEFANDGFLRGQRHLLKMIKRRRPLSYLPGSQQALGTCLEVGQFGLDEEIDRLKRDKNILLAEVVKLRHKQQSTKANMRAMEERLQHAEQKQVQMMGFLARAMQNPDFFHQLIHQQDKMKGLEDTFSKKRTRSIDIVPFLNPGEVSQGDQLESTLLFDPRPFAELNDEPAKSELENLALNIQGLGKGKQDVNRTRNQPRNQASNETELTDDFWEELLNEGARDDAGIPGMERRRPRYVDALAQKLGYLSNSSQK

SEQ ID NO: 142952 - protein, 796 aa, Oryza sativa
  Clone ID: PAT_MRT4530_43909C.1.pep
MASILVENGTLTPGFIQFIVALTTLLMVIRFGLDALRHRSRGNVTQIVLATLDTVTHTMITYSLGIMQHRSATTSYYQLWAVLLVTLRYSVKIGRPAGIAMKQTPLFDLMSSFWTAHILRSHSVSMLLKVPGWLLWSINSARIIHGFISSADASNVHRENMRLLTDYMRHEHTTTVQVQRPDPSSMKGYRYLVLGEGKKLKKRELAEQGVDGVETTEAINRILLALLTDENNIDQELVTLERIWSHQGRCSHDGCQCNLPPGCCDILDQKTKDLCLSFALYKLLRRRFFNLPIHEARLQKTRRLVVYGILGEGDAANYKRAFRVSEAEVAFLNDFFNSRYAIIFAQGFPWIRLVLTTLLIGGISSVAVAVYRFSKSAKEDELGRVHIHHGVYFTWVILSLLGAKEIWEMTTYVFSDWTKVLLLCKFVEQPWWMRCWVGNLARALMRMLLCSPPLFRRWHGKVGQFNLLFSRHSSIHLSQQVKEAVVDSLRNSVRQNLVLNNYLEQAISKNSLRIRLVRPSDNQEQEQAPQNSQADGGHRVSVEWLQDSQKKSVEWQLQDDVHTLLVWHIATCYCELKLAETRNVGANYTWLSWRGFGCRRRPSDADNPWRPHYLVSRTLSQYCAYLLWLVPPLLPGNSLMAKAVITQVYRERNRLLGRRVYLPFSWCTSTTKVLDKLETYRSGEIQLFADEAGNANTTILRKGAELGMGLITAARSADSEALWKFLSDFWAGFVVHLAESTKASQHKMYLTAGGELSTHLWALLSHAGYLGATPHGDQTSDTVLQQLQPYNPDVQL

SEQ ID NO: 142953 - protein, 106 aa, Oryza sativa
  Clone ID: PAT_MRT4530_4390C.1.pep
SSELFISWSGSLPIIQSSAYITLATYTHAIFSVAVDCITCLVGVVSLKNQVSDSHQDEQSNLTPDPPWRNHNDLIFFLSFVFLMRCSWTTKMEVLPNCHNSFLPSK

SEQ ID NO: 142954 - protein, 105 aa, Oryza sativa
  Clone ID: PAT_MRT4530_43910C.1.pep
MTIINSFINDIFKKFIKANKTSHQVAWEMLDARARLGNFVSNAHCPGLSPGSPPGGRDYNSITFKKEVARGNQAGRVTRRNSDRDMWRKKTSLAMPGLLLSPSEA

SEQ ID NO: 142955 - protein, 153 aa, Oryza sativa
  Clone ID: PAT_MRT4530_43911C.1.pep
MKMEEDATYGKMQESLMEEARELSILCGVDVALLCAGGPGTGDGDGGGAVSTAEVAVWESEEGVLASYRAILPRPEAHTLRECLELKLARERAKLAMVRQCRDLCVHLWDDTVSYISTAEEARALLESMDAAMVAATARREALRWVYWTTATP

SEQ ID NO: 142956 - protein, 117 aa, Oryza sativa
  Clone ID: PAT_MRT4530_43912C.1.pep
METGSSAGAAARSGRRRLDLDWSLEIDERKGKRYYSVRYGVQSIEWVIFTVMTTVVLIGTLVIILLPVTQKGMMEEVPLPPSMKRSEDMIRESLHLLFPFVQMKRSEDDTRTPASSI

SEQ ID NO: 142957 - protein, 102 aa, Oryza sativa
  unsure (1)..(102): unsure at all Xaa locations
  Clone ID: PAT_MRT4530_43913C.1.pep
MGRPTQHGLGPPGPRLIGLARPNRHAGPCCASPRAAHMAQSRPNTTPAVLGRPEGTTVYRRPTMLRVXPRHAPTVGPGQHGRDPSQAVSCLGRAKMACLGIG

SEQ ID NO: 142958 - protein, 539 aa, Oryza sativa
  unsure (1)..(539): unsure at all Xaa locations
  Clone ID: PAT_MRT4530_43914C.1.pep
MISSAGPHPRRIRPLAAASLVLFLFLLYSRSGGSLVRSPRVLSFDSHTGHRRFLSDADPISPASNLSEIGELNGEQPPVDPSVACAGVARHEGFGSQCEFLRAHPQCSSGGFVDYLGFFYCRCERFRVLGYAVLGVCLAALFYMLGNTAADYFCCSLEKMSALLRLPPTVAGVTLXPFGNGAPDVFXSIAAFXGDRRCSLLEEESDGDVAQINTSLPQWMWASHVAIYSNHGIRGGSPDSSRPLWGWSDEEVDNSTVSFSKLFLFLELPLTIPRRLTIPIVEEDRWSKEYAVASAGLAPVLLAFLWSSQDGVSTKAHIAAYVIAGISGMALASLAFMFTDHERPPRRFLFPWVLGGFVMSIIWFYIIANELVALLVAFGVILGINPSILGLTVLAWGNSMGDLMSNVALAMNGGDGVQIAMSGCYAGPMFNTLAGLGISMLLGAWSTAPNSYVLPQDSSLIYTMSFLVGGLIWALVMLPRGGMQPNKILGVGLIALYSVFLFIRVPEFGGPQSPNSGEGCGTGAVEKRRVWFRLGTDTD

SEQ ID NO: 142959 - protein, 178 aa, Oryza sativa
  unsure (1)..(178): unsure at all Xaa locations
  Clone ID: PAT_MRT4530_43915C.1.pep
MSSRSRRRMQSPGEGWPSRRTARGGEASLHLASFDPSLAPRHCRAAAPMPPLQPLPDVEEGRAPPPXAAAPPLPPLPGRRASPPATAGPLPLRLPPAPAGSGGGEGVAAPVGPAPPPRLPSRPAAEQSRGRGRGRGRASGEGEKNREKWRTGLISSRCLPRWEKIERSSGEAGLTSPL

SEQ ID NO: 142960 - protein, 67 aa, Oryza sativa
  Clone ID: PAT_MRT4530_43916C.1.pep
SIALWFFLLFFRLLITVLHFTLYRSSSNLKTEETTNGAEGQAIKMSHREAKLLTIRIASIIKQLTQL

SEQ ID NO: 142961 - protein, 114 aa, Oryza sativa
  Clone ID: PAT_MRT4530_43917C.1.pep
MEKVWVQSSSPHFISLSLKHLQSVLKKDEPLESECFNMAICKFMYEKIQTIHKTKEAISNHCLDLQFWNATGFGKDPVHHDNVDLAKTISSWSKIHYKLSQCKSYAMLEALSWS

SEQ ID NO: 142962 - protein, 113 aa, Oryza sativa
  unsure (1)..(113): unsure at all Xaa locations
  Clone ID: PAT_MRT4530_43918C.1.pep
RLERPPPPPAATLPPHAASTPAALVLQSPPRCRTPPQSPPRALPPPXQASSPXTSLRGRRPLSPCPPALCHRPLXVSSPLTRIPRGHHPPMSRPPRAPPSTARPHVSPPTARP

SEQ ID NO: 142963 - protein, 70 aa, Oryza sativa
  Clone ID: PAT_MRT4530_43919C.1.pep
MGHTSRAVMGGLHRHGALTKHVMPAQDGKIDTVATLNDLSMLDMQVMAEEKSGHWWFVGGGPLELLVKIY

SEQ ID NO: 142964 - protein, 270 aa, Oryza sativa
  Clone ID: PAT_MRT4530_4391C.1.pep
EKQFQISTALRLDYQLDIEAELQLVDKIKSELGINSDSKLEKITMRKLGLERTIDVIFVAYNDQTLPCFIFDGSVIFDLIPGDMVINAMMAAINSQWNKQAQVIYHVTSSHQNPVPLSLIEESLYKYFHKNPRTSKDGKAIQNEKILTFNRLVYFQAYMILRYKVPLEMMRAANVLLGGIYTKNYYELNRGYNILMTVAKLYAPYVFFKGWFDDTNLRKLWKATAMDQNDDASIFNFDPKCINWSSYLVNTHIPAAIKYANNQKTKARSA

SEQ ID NO: 142965 - protein, 150 aa, Oryza sativa
  unsure (1)..(150): unsure at all Xaa locations
  Clone ID: PAT_MRT4530_43920C.1.pep
WRRRRRQRRSLEAEGGGGGAAPRRRXAPALEAEGGGDTRRGSEETRGGGVTEQQPRNYPATNHNPHGSNPGRAPPGSHPPTRVTTRQRTETETSTPAPPPVGPPRXDSTPPRAPTNIPPSPGRASRASSVFRPPHSRRRAHLASTQGHPG

SEQ ID NO: 142966 - protein, 51 aa, Oryza sativa
  Clone ID: PAT_MRT4530_43921C.1.pep
QNFSEYISFAFSVKVVAWDHTQMSTFSSVFSKLMYHATLVNLVQQYKIPAS

SEQ ID NO: 142967 - protein, 959 aa, Oryza sativa
  Clone ID: PAT_MRT4530_43922C.1.pep
MAEGAFLSSLVDRLSTTALSGITSLWGVKEQVDSLIHELQAVECFLKDADLREIRRQATSNNNWFWLHSLRDAAYDAEDLIESVELHEGRYHTLNPLLQPLNSYRFAKQINEIKSRFQSIIDGWAKNASMLRELRDMSSSSSSVTSAADSLWRRSSCHLGDDVVVGREEEAGMIIDRLLRCTAHREVVGIVGMGGVGKTTLASLVYNKVSAIQTGGTSLRPDSPKGTSSRSSVEMYFDACAWVPVGQNADALGLLKITSAQIGVELNSTQVAAAKNAMFRFLQHKKYLIVLDDIWTTETWLELSEAFPKSTNGSKILLTTRSKEIAVSADPSSLPYELDPLSEELSFQLFITKVFGLNHVDTTSCPPQLKDVGHQLSKKCGGLPLALVVLGGLLSGKEKQFEVWRNILKSMKWSNYEAGNQCLEILALSYSCLPYHMKLCFMYLGAFKEETEISVSKLIKLWIGDDFIPQQDGKTREETANDYLRELIQRCLVQPLLPAHKQGFKRVRIHGLLCELARSEARESRFFYCENGDAVSRAEGKYYRRLALHTKLIAFHELSNSEKLRSLLIFPGVIESCVITVGHQALRPFSRAFCHAFFLFPLWGFQHNILEQLTSMQYIRVLELEGHERLACDLKSVQSNLNHLRYMSLRNTNLGEFPFPESNFPLLQTLDIRGTFIRKLPGILESLDTLRHIYLNWRVSLDIRRLTNLQTLHGVIILPNSQAERNLMALTNLRKLRFRTWRGVEYRPESPNGFDIDRYNAQSSMGNENHALAESLRQLGNLHSIFIMMPFASFQPITSDIVQAVTSHEQLHKLKLQGRVHRNLLLEDPHFSCIKSITLSGSWIVLSPMESLGSLTTLYELKLKDDALRCSEVSCLQNSFPELRYLKISGLKKLRVFHVGNGSFPNLTRFSIHDCTEFLSTVEVMEHATRLQVLKIKEMPSVLPDVTDFCHSRNINLIS

SEQ ID NO: 142968 - protein, 97 aa, Oryza sativa
  Clone ID: PAT_MRT4530_43923C.1.pep
MRECISIHIGQAGIQVGNACWELYWLEHGIQPDGQMPGDQNGGGGGEAFNTLFNGTGAGKHGPRAGFVRLWPSRVVGGGAGGFRPVFPLGRLLGVWG

SEQ ID NO: 142969 - protein, 210 aa, Oryza sativa
  unsure (1)..(210): unsure at all Xaa locations
  Clone ID: PAT_MRT4530_43924C.1.pep
ICICRSEKISESHGSIRWNLTANGQHSXKSAYRLQFFGAAKSVFYQSIXKAXALPKCKFFSWLVTQNRVWMTERLEKRGWQNQKICPLCYTVDESALHLLAKCRLTKRIWAEIQRWTRTDLQMDNWENCHSVDQCWTLVAESPSTPRRPLRTLVILIPWKIWCERNARIFRNNASAPSSILTKIKEEGRAWVKAGXASILQEFVILGDIT

SEQ ID NO: 142970 - protein, 360 aa, Oryza sativa
  Clone ID: PAT_MRT4530_43925C.1.pep
MKIQCNACGAAEARVLCCADEAALCTACDEEVHAANKLAGKHQRVPLLSDDGGAAPAAAAPAVPKCDICQEASGYFFCLEDRALLCRDCDVSIHTVNSFVSVHQRFLLTGVQVGLDPADPVPPVADKHVKSAGGSVDSATKHLQRNPTDLSGENSASLPSQNVINGNYSRQSSVTMAKTGQVNWTMSNNTIRSIDPPPKYSSEESPALLLASHTSTMAAYSSQISKDSDRIYNLPFTGGNGSDSLHDWHVDEFFSNSEFGFAEHGSSKGDNAKPGSAGGSPQCRLAEGLFVEGLLGQVPDNPWTVPEVPSPPTASGLYWQNNLLCPSYDSTMFVPEISSLENSQNNFTVSAGLKRRRRQF

SEQ ID NO: 142971 - protein, 1850 aa, Oryza sativa
  Clone ID: PAT_MRT4530_43926C.1.pep
MAMTMLFSLLFCTAKATDDSGAETEAEALLRWKSTLIDATNSLSSWSIANSTCSWFGVTCDAAGHVTELDLLGADINGTLDALYSAAFENLTTIDLSHNNLDGAIPANICMLRTLTILDLSSNYLVGVIPINISMLIALTVLDLSGNNLAGAIPANISMLHTLTILDLSSNYLVGVIPINISMLIALTVLDLSGNNLAGAIPANISMLHTLTFLDLSSNNLTGAIPYQLSKLPRLAHLDSLPNLRVLELSNNGFHGTIPHSLSRLQKLQDLYLYRNNLTGGIPEELGNLTNLEALYLSRNRLVGSLPPSFARMQQLSFFAIDSNYINGSIPLEIFSNCTWLNWFDVSNNMLTGSIPPLISNWTNLHYLALFNNTFTGAIPWEIGNLAQVYLEVDMSQNLFTGKIPLNICNATLEYLAISDNHLEGELPGCLWGLKGLVYMDLSRNTFSGKIAPSDTPNNDSDLLALDLSNNNFSGYFPVVLRNLSRLEFLNLGYNRISGEIPSWIGESFSHLMILQLRSNMFHGSIPWQLSQLPKLQLLDLAENNFTGSIPDSRHYIDIDWKGREHPFKDISLLATGHIPHSISNLMSLEWLNLSNNLLSGEIPTAFSTSFDANFVTRDTATFNLPFISLGQVGEGKLMVIGNPHYNSILRCPNGYSWNGGVNKDGQCTLNSDPDDMKNFMENVLRYLSDDKWKPDAKASMTVGTNLDTVYFKRHGQVTGNSAAFDFHPDFAGISVEHLSSYGDLDPQEMPLLILNGFEYVTQVGNDPYAIPLRADTSKPKLTQQDVTDLIAYLNKGGSVLIMENVMSNLKEESASGFVRLLDAAGLSMALNKSVVNNDPQGYPNRVRQQRATGIWVYERYPAVDGALPYTIDSKTGEVKWKYQVENKPDDKPKLEVASWLEDVDGKQETRYAFIDEADHKTEDSLKAAKEKIFAAFPGLKECTNPAYHYEVNCLEYRPGTGVPVTGGMYVPQYTQLSLNADTAKAMVQAADLGTNIQRLYQHELYFRTNGRKGERLSSVDLERLYQNMSVWLWNDTSYRYEEGKNDELGFKTFTEFLNCYANDAYAGGTKCSADLKKSLVDNNMIYGDGSSKAGMMNPSYPLNYMEKPLTRLMLGRSWWDLNIKVDVEKYPGAVSEEGQNVTETISLYSNPTKWFAGNMQSTGLWAPAQKEVTIKSNANVPVTVTVALADDLTGREKHEVALNRPPRVTKTYSLDASGTVKFKVPYGGLIYIKGNSSTNESASFTFTGVVKAPFYKDGAWKNDLNSPAPLGELESDAFVYTTPKKNLNASNFTGGLEQFANDLDTFASSMNDFYGRDSEDGKHRMFTYKNLPGHKHRFTNDVQISIGDAHSGYPVMNSSFSPNSTTLPTTPLNDWLIWHEVGHNAAETPLTVPGATEVANNVLALYMQDRYLGKMNRVADDITVAPEYLEESNNQAWARGGAGDRLLMYAQLKEWAEKNFDIKKWYPDGTPLPEFYSEREGMKGWNLFQLMHRKARGDEVSNDKFGGKNYCAESNGNAADTLMLCASWVAQTDLSEFFKKWNPGANAYQLPGASEMSFEGGVSQSAYNTLASLDLPKPEQGPETINQQYPTAMPVLATVGGLIIGSFLNVVIWRYPIMLRQQMAEFHGEMSSAQSKISLALPRSHCPHCQQTIRIRDNIPLFSWLMLKGRCRDCQAKISKRYPLVELLTALAFLLASLVWPESGWGLAVMILSAWLIAASVIDLDHQWLPDVFTQGVLWTGLIAAWAQQSPLTLQDAVTGVLVGFITFYSLRWIAGIVLRKEALGMGDVLLFAALGGWVGALSLPNVALIASCCGLIYAVITKRGSTTLPFGPCLSLGGIATLYLQALF

SEQ ID NO: 142972 - protein, 118 aa, Oryza sativa
  Clone ID: PAT_MRT4530_43927C.1.pep
MRNRKVAHQSAASIATTVQNRPTRARNVDDSTAGWETPAKQSTLRAQERSYWRTAQTAHDPNNTPGRGGRRRAIEGRRGYTAERARRLEIPRGARGGLWGEHIALSFNLSNVDNARKS

SEQ ID NO: 142973 - protein, 330 aa, Oryza sativa
  Clone ID: PAT_MRT4530_43928C.1.pep
MVISSKGKVCVTGASGFVASWLIKRLLEAGYHVIGTVRDPSNREKVSHLWRLPSAKERLQLVRADLMEEGSFDDAVMACEGVFHTASPVLAKSDSNCKEEMLVPAINGTLNVLKSCKKNPFLKRVVLTSSSSTVRIMDESKHPEISLDETIWSSVALCEKLQLWYALAKISAEKAAWEFAKENNIDLVTVLPSFVIGPSLSHELSVTASDILGLLQGDTDRFISYGRMGYVHIDDVASCHILVYEAPQATGRYLCNSVVLDNNELVALLAKQFPIFPIPRSLRNPYEKQSYELNTSKIQQLGFKFKGVQEMFGDCVESLKDQGHLLECPL

SEQ ID NO: 142974 - protein, 132 aa, Oryza sativa
  unsure (1)..(132): unsure at all Xaa locations
  Clone ID: PAT_MRT4530_43929C.1.pep
GVXXPSIAKPFAKXDMXFXSYFXXRXRPSGMPESFSLKKMXDLXEQVCGGKXSWGVFSGVKGALEELEXRPEYCLDLNFMLALVHXGYEMPIDREVKVAKKIKGNELGWCLGASLPLLAKGSGWTCKIAEVH

SEQ ID NO: 142975 - protein, 86 aa, Oryza sativa
  Clone ID: PAT_MRT4530_4392C.1.pep
MPMQTSQNLEAKGRWGWQRWSTTPFLAVEVQCRVALGSRGSGTGRVASEMEHHVSPGGVGTKGRALGNADDNMLPLGAHKDSSHDA

SEQ ID NO: 142976 - protein, 135 aa, Oryza sativa
  unsure (1)..(135): unsure at all Xaa locations
  Clone ID: PAT_MRT4530_43930C.1.pep
TPTSSRRCHRRRPTRVCEWKTSRSPPPPHPAAARLLRSTCAALPHRRRLASSTPASRLAATLATLLXPRLLRRPHRARLASPPPPRLLRPCHARLSGAPTALTSPPPPPLSTAAADSARACCLGRRCPKEKRERQ

SEQ ID NO: 142977 - protein, 95 aa, Oryza sativa
  Clone ID: PAT_MRT4530_43931C.1.pep
MAGSGAVSSFHLDFDDQRFLFHDEKGSKKMISTTGKGWDEKMMRPPASTPSSPQIPPLSTPLPSRPPCLPPRTSLLLNAAAVVGGGGDERTPVFK

SEQ ID NO: 142978 - protein, 76 aa, Oryza sativa
  unsure (1)..(76): unsure at all Xaa locations
  Clone ID: PAT_MRT4530_43932C.1.pep
FFFFFFKKKXXLSYTPSVAQQNSGTVHKGFLIFYKITXGIIVPQWALNPTESTRCVYSVNQRVGGLYITRVGSGDN

SEQ ID NO: 142979 - protein, 85 aa, Oryza sativa
  unsure (1)..(85): unsure at all Xaa locations
  Clone ID: PAT_MRT4530_43933C.1.pep
LRFSSLPLLLVCVSPFSTPLGDPASPSGISRAPPYPAATRVGTPSGEFHLRPQHRATXXRRAFLLLXIPLLDVXLLPHXRVQPRP

SEQ ID NO: 142980 - protein, 57 aa, Oryza sativa
  Clone ID: PAT_MRT4530_43934C.1.pep
LSLRRLAEFKSQLKELQTEKNLRLQKIDVQINCIHEICNMMSLDLQKELYDCSSQLR

SEQ ID NO: 142981 - protein, 112 aa, Oryza sativa
  Clone ID: PAT_MRT4530_43935C.1.pep
IPKLKTPRRRAAATRWPPTPPPSRRRRRPRRRSGWCTPAPAAPWQARRPRSPSAPPQPPPRRRRHLQARRRRHHPPPRARSRPPPAPSSSAAAAATAAPAGRATPRSRWPAS

SEQ ID NO: 142982 - protein, 275 aa, Oryza sativa
  Clone ID: PAT_MRT4530_43936C.1.pep
MAPGLYTDIGKKTRDLLYRDYGTHHKFTLTTCTPEGVTITAAGTRKNESVFGELQTQLKNKKLTVDVKANSESDLLTTVTVDEFGTPGLKSILSLVVPDQRSGKLELQYLHEYAGINASVGLNSNPMVNLSGVFGSKELSVGVDVAFDTATSNFTKYNAALSLTNSDLIASLHLNNHGDTLIASYYHLVKHHSNTAVGAELSHSFSRNESTLIFGSQHSLDPHTTVKARFNNYGMASALVQHEWRPKSLITISGEVDTKAIEKSTKVGLSLVLKH

SEQ ID NO: 142983 - protein, 126 aa, Oryza sativa
  Clone ID: PAT_MRT4530_43937C.1.pep
KGAGPNPLTRRPLWERAIGLPPSLKAPPPKRRPFPNSLNWGNPRFSQGDLVENPPPWNKPRVPQKKKFKSPPRGPKLGAPKKDPPHCMLCDAIPESSKSTPPFLIFFSLYLFFLFFFFFFFFFLNK

SEQ ID NO: 142984 - protein, 76 aa, Oryza sativa
  Clone ID: PAT_MRT4530_43938C.1.pep
ANRKPQETSINRNQSMRATYKIRSIDLQLEANKYEPIYIRLQRSFQIWASRYTDALLSSGAGAQVARSAVYINLLQ

SEQ ID NO: 142985 - protein, 112 aa, Oryza sativa
  Clone ID: PAT_MRT4530_43939C.1.pep
MVSVASTLGQRITVADKDAASSVHARSLAVKYQCTGVSCCAFDFTQGAERVRVAVTITCTQVVAFSTEQSQSYGTHRTARSGRVPDEPAKYGEHASTISSASYRMRACFVRA

SEQ ID NO: 142986 - protein, 377 aa, Oryza sativa
  unsure (1)..(377): unsure at all Xaa locations
  Clone ID: PAT_MRT4530_4393C.1.pep
MEQPTIQNLYAPRANLCEPSYSSKSILSDGYEIGPGFIAMIREQTFSGGIGENPYLHLRDFELNEKEYLGVAWARFSLLTQSGPDLSLPDHVLLQQFRYGLDKESAANLDISAEGSFAHKTTAEGRELLDLILENDSFGRSEAVPEVKIIYEDPLHEELEPNSTAESSFRLLEPEEEEIHPPEIPFQFKDDLYEDYGNTLNYSSKTKAHPKHEPFEEVMFVSSFVPYEPIAHLHETERPSSPSIKPKPCPPGLQNVVLVYHQERTMFLHDASLEMENLQASDKLETSTLEGERKHFTYEHESFYFEIPLNSCSLKEXPESCSISVASLCEDHNHLSVLISSMFRRMVVDAYIYHKYXEISYFFVALILQSDVPLVKL

SEQ ID NO: 142987 - protein, 448 aa, Oryza sativa
  unsure (1)..(448): unsure at all Xaa locations
  Clone ID: PAT_MRT4530_43940C.1.pep
LKKILCIFEQLSGLKINFNKSEVICLGEAKKXEEYSKIFTSNIGNLPIKYLGIPINKKXIMNKDWKQTEEKMEKRVGCWQGNLQYIGGRVTLINSCLSSTPLYMLSFYRISKGVKEKIDFIRRRFLWQEDQRIRKYHLVQWPVVCSPKEQGGLRIRDLDIMNKALLGKWLWNLEKIDXMWQKLLKRKYLSKKILAAQKIKKGASHFXQGIMEIKDVFFSYCWKKPGNGTNTLFWEDNWMGXPLAQKFPYLYRVTHTHYITLAEVKQKGWGSIXFRRNLLGDNLRDWNYIKSCCDQVRLXDETVWGLTKNGIFSVKSFYTAMKMQEAASMMGVIHKKIWQIKVPMKIRIFLWLLLKDSVLTKDNLKKRGWKKGNETCQFCDKKXSIQHLFFYCPMTRLTWNVVACTFGLQPVKNIQYALGWGHSVSRNLIESKFQFTRNQLAHPNELRI

SEQ ID NO: 142988 - protein, 98 aa, Oryza sativa
  Clone ID: PAT_MRT4530_43941C.1.pep
PPVRGPVPHSPPKGWAGGGTPPDSGPPQGGPGPGDLVGQKGEVLVEGKAHGGVPRAPKPPVCVGARPPPFFRILGGPRPFPRPPPGVPRPVPFVFFPG

SEQ ID NO: 142989 - protein, 343 aa, Oryza sativa
  Clone ID: PAT_MRT4530_43942C.1.pep
PGCRQACSHDQLTILGEQVGVPVYSERTEAKPAQITKNAVEEAKRKNIDAIVMDTAGRLQIDKSMMVELKEVKKAANPTEALLVVDAMTGQEAAALVTTFNIEIGITGAILTKLDGDSRGGAALSVKEVSGKPIKFVGRGERMEDLELFYPDRMAQRVLGMGDVLSFVEKAQEVMRQEDAVELQKKIMSAKFDFNDCLKQSQNVAKMGSMSRVVGMIPGMNKVTPAQIREAEKRLAFVESMINAMTAEEREKPELLAESRDRRIRVAEESGKSEQEVSQLVAQLFQMRAQMQKLMGVMTGQEALPGMGNLMESLNADEKAPPGTAPTEEEAQQDEAEGAGCSP

SEQ ID NO: 142990 - protein, 291 aa, Oryza sativa
  Clone ID: PAT_MRT4530_43943C.1.pep
MVLLPQILPSPRLAAAAASPNSAFRPAPRLHSSAPARRGRGARLATAASASGSGSGSSPSSPEPYQPAESDDGLVELPLFPLPLVLFPDATHALHIFEFRYRIMMHTVLQTDLRFGVVFAGSGAGGAADVGCVGEVVKHERLADDRFFLICKGQERFRVARVVRTKPYLVAAVQWLEDRPPAETPAPGDDAEALATDVEALMRDVIRIANRLNGKPEKDVGDLRRGLFPTPFSFYVGNTFEGAPREQQALLELEDTAARLRRERDTLRNTLNYLTAASAVKDAFPSSPSSG

SEQ ID NO: 142991 - protein, 282 aa, Oryza sativa
  unsure (1)..(282): unsure at all Xaa locations
  Clone ID: PAT_MRT4530_43944C.1.pep
FNAQSENGPLLKKNVGISSLNSASPPFYPSGCLQTQISLVPAQRRDNMQAGGSNKVFPSSMKMDDNAKVQSGPAVRRDYGARDRFQHADGPVRQSPRSGGTSLNSSGFAASTSNHGQXSSVGRTQGGNGIPSNNQSTSSLHQNPRAPTHQQSHTXVAHQKSGQVQTQSAMRIPTQQLNHRTGNPSTTQHLPVRSTESAENGLSPSSNKSNASSGAGNSNSQEAGRRSFMYGGAQVIEAAGAIGLAQGEHNFPGTPALLPDMHRASQHPGGVGDTTVEWPSWL

SEQ ID NO: 142992 - protein, 112 aa, Oryza sativa
  Clone ID: PAT_MRT4530_43945C.1.pep
MQTLESYLFLTLLVHFIFFFSRAQRLAIRSLEHKSFVACKAKLPRWSLKDYCGVKVYDPILSLSKTPKPSTIYLNFLNPFRDYATMEKSLNWSSGSVWQISKGNDFPPLFKS

SEQ ID NO: 142993 - protein, 387 aa, Oryza sativa
  Clone ID: PAT_MRT4530_43946C.1.pep
MVGGEMSKQWTRSVARAREASWAENGIYVGKSIGVFDRIRGRRCDMEESLDLETTDLGRRSWEVSRRACRVRVVAVQCSEARAAPFHGSTTPPGGTGPPFTATATAGADAEARAASPEKRRRMAEKAVGHGPRTRIRGGGLAAAPTAPSAAARRLSAVSYTAAPNLTKKVPDPKVVKPARKTTPVKKRPQVDQAQKQREELAALQEQLSGLQKKLLEKDEALRSAEHLISRISAANAAVDELRGQLTEKESQIESTGSELHGAKIQLAEKQAALEKLEWEAKVSSTKVEELQVDVASMDVEISALMKLFRKITENDRAPYSRERADDSSLECEPVQLDDMVGDIDMEKMEQEMSAYATALAAAKDNPTDEFLKAVTEARLRLQAFVL

SEQ ID NO: 142994 - protein, 406 aa, Oryza sativa
  Clone ID: PAT_MRT4530_43947C.1.pep
MDNKPAQERRETWVPGAVIVGAGPSGLAAAACLAARGVPATVLERSDSLASTWRHRMYDRLALHLPKRFCELPLLPFPEEYPTYPSKDQFVAYMEAYAAAAGVAPRFGATVEEAAFDAAVGAWRVRLDGGEVLMARWLVVATGENAEPRVPDFPGMQKFAGCAMHTSEYKSGEQFAGKKVLVVGCGNSGMEVSLDLCRHGAKPSMVVRNTVHVLPREMFGLSTFGIAMALLRWLPVQLVDRFLLTAAHLILGNTGQFGLRRPKTGPIELKNLTGRTPVLDVGTLDHIKSGKIKVVGAVKEMTRQGVRFTDGKEEQFDTIILATGYRSNVPSWLKDAGDLFTREGISKVPFPNSWRGRNGLYTVGFTQRGLLGTSSDALNVAKDIHCQWRERDRSAINVLEISNSSF

SEQ ID NO: 142995 - protein, 138 aa, Oryza sativa
  Clone ID: PAT_MRT4530_43948C.1.pep
AAAASAPSASAPSSSSAAASSDNAYTSFQGLLALARITGSNSDETRGACRKCGRVGHLTFQCRNFLSVKEDLDMEDDIDAGIRAASQANAQAKLDEFRKKTSGGKDADEGSDDEDEDDEEDSDDSSDSDIDPELERII

SEQ ID NO: 142996 - protein, 143 aa, Oryza sativa
  Clone ID: PAT_MRT4530_43949C.1.pep
MAIGRPSPSSGGDTLSMGAEDGKGTAAWVLNSMVSSPPEPSEQYPTPTIKEPSDPVERVAAAWSSSLSRDGGIHLVQYRVKGDAVGVVVHGEVEAQVRAVLLVAAVGSIVTQMEDPLVSPWLAASLFLTSTWSPCGYWAVRPI

SEQ ID NO: 142997 - protein, 85 aa, Oryza sativa
  Clone ID: PAT_MRT4530_4394C.1.pep
PPRPFNHLLVPSGLCMFRGWNLWSRINNFSTTEILAMTTRVTPSSEYRLHLMRGKLGTLQGEPVPELPGVAEPNACRGMCWQLEC

SEQ ID NO: 142998 - protein, 366 aa, Oryza sativa
  Clone ID: PAT_MRT4530_43950C.1.pep
MLLERSSRTRMASSSTAAAALVVAALLLSSSPSPAAAAAGRGGELRMKHSDGGYSYNRTLAHIFVQYASAVYTSDLTSLFAWTCPRCQSDTKGFEMIEIIVDVENCLQAFVGVAPDPQSILIAFRGTQEHSVSNWIEDLFWKQLDVGYPGMPDAMVHHGFYTAYYNTTVRHEILESVRWARKTYGRLPINVVGHSMGGALASFCALDLSVKYGSQEVQLMTFGQPRVGNPSFAAYFSDQVPRTIRVTHQNDIVPHLPPYFCYLGEWTYHHFSREVWLHETIVGNVVTRNETICDGSGEDPTCSRSVYGRSVADHLEYYGVSLHADSRGTCQFVIGSTNMAYGTILEVDRTIIMTRYPQEWHAVESI

SEQ ID NO: 142999 - protein, 130 aa, Oryza sativa
  Clone ID: PAT_MRT4530_43951C.1.pep
PCRRSKCLFFFPQNFFFLKENDLRGRSCCSPRCRHIPAVSARLAGPSEERSAEEYDSPYVGAWLGVNHVGALHLPVEAALGRLKVGAVHHRVSEQAPRSDLQLPIAAHSTPRKSAATGKARRAPRHAGQS

SEQ ID NO: 143000 - protein, 1263 aa, Oryza sativa
  unsure (1)..(1263): unsure at all Xaa locations
  Clone ID: PAT_MRT4530_43952C.1.pep
MASRQHNAQFHKNKTLDNKYMLGDEIGKGAYGRVYKGLDLENGDFVAIKQVSLENIPQEDLNIIMSTFMWWTERRIFSGQQEIDLLKNLNHKNIVKYLGSLKTRSHLHIILEYVENGSLANIIKPNKFGPFPESLVAVYIAQVLEGLVYLHEQGVIHRDIKGANILTTKEGLVKLADFGVATKLTEADINTHSVVGTPYWMAPEVIEMSGVCAASDIWSVGCTVIELLTCAPPYYDLQPMPALFRIVQLSSILPLASFNFLSSVILFDIGGISRWHQNYFEPSFESDLDKPLLSSWFVSTVRDIDEDDEGSSGDNHSGFSGPPRDTQTPTASGLEQEDGRKDLVSESARQDIPDEFHDGMLKTTGSSSSNDVELMKDNVVLNKDPTLVFHEKLSLESSLGATDLNGKLTHEVSQDGPPNKLTSSGQESRKSDGKYVEDESKDGSSLEDGDAFSFQAGGQNINFQKEAKTSVEMANELSRFSDTPGDASFDDLFPPKKRGDHGAEASTSTTGEELQYNGAQNDLAKELKTRMAQKQKENDTEHMNGGKLLEYVMRLREEDIDGTAFDETIPGESLFPLQSVEYSKIVAQLKPGEXPVVMNFAVPDRAKEVRVQALXEDPPALSSQVFKLQHSTPRNDFCRIAAKNGILLRLVNTLHSLNEATRFASISGSGASVTQNGSTPRRRSGQLDPPMLEISKTRLDHHHSSGSLQSLQADADRHHIIMDPSASPRFTDMAAAGHMERNDNDPIRPQRLSVSAGRTSTDRSPKHIELVSNGHSSGQNDQIRPLLSLLEKEPPSRHVSGQLDYVRHLSGLERHESILPLLHASTERKTNGELDLLMAEFAEVSRQGRENGNLDSNIKTSNRVPSMKYAPSSGPTTSNEGASTSGAASQTASGVLSGSGVLNARPGSTTSSGLLAQMVSMSADVAREYLEKVADLLLEFAQADTVVKSLMSSQSLLARLFQMFNKIEPPILLKILRCINHLSGDPNCLETLQRTDAIKHLIPILELHDGPLVYQIHSEVLNALFNLCKINKRRQEQAAENGIIPHLMNFVMSDSPLRQYALPLLCDMAHASRNSREQLRAHGGLDVYLNLLEDDAWACTALDSIAVCLSHDNDHRKVEQALLKKDAIQKLVKFFQDCPEQYFVHILDAFLKIITKSSRINTAMATNGLTTLLIARLDHREAIARLTLLKLIKVVYEHHPRPKQLIVENDLPQKLQNLIEERRDGQRGGQQEKNSFIPNGTSKIISGAAMGAFHMKKVIPTNV

SEQ ID NO: 143001 - protein, 1150 aa, Oryza sativa
  Clone ID: PAT_MRT4530_43953C.1.pep
LLTCAPPYYDLQPMPALFRIVQLSSILPLASFNFLSSVILFDIGGISRWHQNYFEPSFESDLDKPLLSSWFVSTVRDIDEDDEGSSGDNHSGFSGPPRDTQTPTASGLEQEDGRKDLVSESARQDIPDEFHDGMLKTTGSSSSNDVELMKDNVVLNKDPTLVFHEKLSLESSLGATDLNGKLTHEVSQDGPPNKLTSSGQESRKSDGKYVEDESKDGSSLEDGDAFSFQAGGQNINFQKEAKTSVEMANELSRFSDTPGDASFDDLFPPKKRGDHGAEASTSTTGEELQYNGAQNDLAKELKTRMAQKQKENDTEHMNGGKLLEYVMRLREEDIDGTAFDETIPGESLFPLQSVEYSKIVAQLKPGESEDVILSACQKLVSIFNQRPEQKQIYVSQNGFLPLMELLELPKNRIITSVLQLINQIVKDNTTFLENACLVGLIPVVMNFAVPDRAKEVRVQASRFLQQLCQASTLTLQMFIACQGIPVLVSFLEPDYAKYREMVHLAIDGIWQVFKLQHSTPRNDFCRIAAKNGILLRLVNTLHSLNEATRFASISGSGASVTQNGSTPRRRSGQLDPPMLEISKTRLDHHHSSGSLQSLQADADRHHIIMDPSASPRFTDMAAAGHMERNDNDPIRPQRLSVSAGRTSTDRSPKHIELVSNGHSSGQNDQIRPLLSLLEKEPPSRHVSGQLDYVRHLSGLERHESILPLLHASTERKTNGELDLLMAEFAEVSRQGRENGNLDSNIKTSNRVPSMKYAPSSGPTTSNEGASTSGAASQTASGVLSGSGVLNARPGSTTSSGLLAQMVSMSADVAREYLEKVADLLLEFAQADTVVKSLMSSQSLLARLFQMFNKIEPPILLKILRCINHLSGDPNCLETLQRTDAIKHLIPILELHDGPLVYQIHSEVLNALFNLCKINKRRQEQAAENGIIPHLMNFVMSDSPLRQYALPLLCDMAHASRNSREQLRAHGGLDVYLNLLEDDAWACTALDSIAVCLSHDNDHRKVEQALLKKDAIQKLVKFFQDCPEQYFVHILDAFLKIITKSSRINTAMATNGLLTLLIARLDHREAIARLTLLKLIKVVYEHHPRPKQLIVENDLPQKLQNLIEERRDGQRGGQQEKNSFIPNGTSKIISGAAMGAFHMKKVIPTNV

SEQ ID NO: 143002 - protein, 168 aa, Oryza sativa
  unsure (1)..(168): unsure at all Xaa locations
  Clone ID: PAT_MRT4530_43954C.1.pep
PRYILRQLPATRVFSLESPVFASSHWEEANTIDDWDLPTADITAVLCARTXCGQSAAGNSVAGREAFVSDDSHATVTRTCESASTELKDGRTLNVNDTPGLYETTITSEDDGEEIAKCMIMANDGIHAVLMVISDTSGSNAKDSSTIATIKEVVGENIVDHMTLVYTY

SEQ ID NO: 143003 - protein, 190 aa, Oryza sativa
  unsure (1)..(190): unsure at all Xaa locations
  Clone ID: PAT_MRT4530_43955C.1.pep
MGGGERAEDDEGVGEVERQDHDHQPERVEHGVAGPRPPPTYRPPQIAPCRCRRSGRESGEVVGGRGXSSDRDSLPVLLLCRRPGDGPSRSLVRXREKPVRGRRRSRCHLPHGRLPLXRLLHLPHPSTGALVGLAPGGALVDMTTSDPTLATEIAEVTADKGXVSGGDRGARKATLSIFEEEHVRMTATVP

SEQ ID NO: 143004 - protein, 223 aa, Oryza sativa
  unsure (1)..(223): unsure at all Xaa locations
  Clone ID: PAT_MRT4530_43956C.1.pep
MGGGERAEDDEGVGEVERQDHDHQPERVEHGVGPRPPPTYRPPQIAPCRCRRSGRESGEVVGGRGXSSDRDSLPVLLLCRRPGDGPSRSLVRCRQPLPLATVVHHRHERHGPVHGQKPVRGRRRSRCHLPHGRLPLXRLLHLPHPSTGALVGLAPGGALVDMTTSDPTLATEIAEVTADKGXVSGGDRGARKATLSIFAGGDTAVVARLTPLFKLMGNALYMG

SEQ ID NO: 143005 - protein, 352 aa, Oryza sativa
  unsure (1)..(352): unsure at all Xaa locations
  Clone ID: PAT_MRT4530_43957C.1.pep
HFWIELMGRAGTYQKPYPDEFDLGPYVPCFVKFTGKDCRTAIEHMGQFLVHCGEANSNDILKLRLFPLSLSGAALIWFVTLMPNSIHTWSQLEHXFYCRFFITHSSLPKSNVNSFQQNGSYVQPTMHKAKHRLQNDDIKLASSAMDQFREEFSFKRKNLEEEIYRDMMKRLNVCVLNKRSEPTFVLEQKPNNVELSTKKKMVHVFEFSEIEEPFVLPDEINNCVAEWIDSKSKPFVCXALKPSPQKCRLEENKYTFDLTMCDHIFDALLXNSYIKLLDHHVMPLLQDLKERIYCKGHNSFDHCTRVCNIFRQKIQXAINEGRLHFATPRKSYAKDDPGPIPCVEYDSERMIV

SEQ ID NO: 143006 - protein, 78 aa, Oryza sativa
  Clone ID: PAT_MRT4530_43958C.1.pep
MGTPPLPRERCLILGSTPSLLTSRAHRHQATSPSLKLRAVLHPNDRSPFSSWGPLPSHRLGRTISSDPCPGLHPRQLC

SEQ ID NO: 143007 - protein, 75 aa, Oryza sativa
  Clone ID: PAT_MRT4530_43959C.1.pep
CVLGSFSVCVSGYSETQPPRRRSAAAQAEAVEVPSPWGVLRCVGGRGACREAGSPSQPHRVRSLAETRPRSRPPW

SEQ ID NO: 143008 - protein, 58 aa, Oryza sativa
  unsure (1)..(58): unsure at all Xaa locations
  Clone ID: PAT_MRT4530_4395C.1.pep
LSLGGNARTAIICTMSPAQTHVEQSRYTLFFXTCAKEGTIMQKVIGGIDKHCEDSMKF

SEQ ID NO: 143009 - protein, 1406 aa, Oryza sativa
  Clone ID: PAT_MRT4530_43960C.1.pep
MEANHNMLLKVGYSGGQIRDIPLQPLKKALQKVWGSCFLDISQVDSNLFMAHFRTWEDLSWVWNKQPWSFGSDTFLMEWATANEKLKPLSAYTFKSIMVTVRFYGIPMALRTEDTARKVVKEIGEPSAANPIVEENLKKDPRFMSVRVKMDVSKPVQAIVNLDIDIREPLKHFASPGARTCSSQEGGSKVNMIGQVNSALQDGRFALVGPSLFSQKSIQPNTMQKDVEQAKGKSAVVQQQNIPQHLDGLPLAENANIQPSRVQLAQLARVHSPNLGQPITAASAPKVCTTRIDPGNALRFLVRVAKYVANLEYGMLPMSEQDYDWWVDISSGYNLDKFHDEMASKIIWGPSQEIRVWGLDTEIGTECKLTTNEEFGQWMNSMLDDKLVEFGVEVIYKKGYEPIEGIANPVDSAIQGVSGVVTADPIDQSSAQVLSAMISAEVSSPGHEEGTGDTSSHPQNAEEANAVVDWSKLAILVEPEQDCDVNLLLDEDQVFEAMGFKAADQRAAAAAAAMEETAIPIIPTEIQQDMLDAAIVVDDEVPIDVLDWDRDDPDMSVGTFYPSMDEFRMAVKQYAIVHEFELETEKSDKERFRGKCHAIGCPWIIRAKTQPNKSVRVLFYKYDHKCASRSRVRGRMASQAWVAERAIPFLNKKNGMGPKELQKELQDTYKITIPYHTVYHGRKRATDKLFGKWSDSFDWLYRFKAEVEMRSPEQRECMRHLMENMKKLFHGSIYARKMWPAAKTYMLEKHDKWMDEVTTASPEVKQWLKEYHNLLWARSKFDCAIKCDYINNNLAESWNSWIKDLKDLPVDALADAIREKTLILFEKRRRISTALNGVILPVVIHQLNEASRGLGHLKVTKGNPDQAEVTETYKDEEVTRHVVYLDKWTCTCREWQVTGKPCPHALALITTIRQPNMEKYVDTAYSVHRFQAAYASVIPNITDKKQWPKVDKGFKLLPPVPKKRGVGRQRKNRIPSALEKGKGKATRQVQCPDCQRFGHRKGSVRCELTGTRKRRSEVSPRTQEGFVWRRNVSHPVVPHGSHSMESEKTALSHACSGDLLVGLEFSAQKADYNALEKDLRDKEAADVFTKSFSSGSRSITAAHFSSAGFGGPGPFGPAVSAGMVQWGGMPADDCTRANDVGSFVAQSSHGASICMGDLNDIMSPEEKFGYEEEIWSIIKGMRKNASPGPDGLNAAFYRSAWSWIKDDLMTLVQDFYQTDDLIITGTATVEEANQIKSIIDKFCRKSGQTPNWDKSGILFSGLEIRDIQAVNKSLILNSAWRLITNPHEQMAQILKAWENGVTGIGIFFHFPQDHNAMFIKAISDKAQSPLQAELLALQLALEISKFLNLADVIYLMDNATIVDAVKRNNFLQEPGHWSPRPFWLQITSSTPADLMQVRWIPNSQGR

SEQ ID NO: 143010 - protein, 219 aa, Oryza sativa
  Clone ID: PAT_MRT4530_43961C.1.pep
MQSQSPMQQMQQLCLQQQVQAQMQAGIRIRAKASLFSKSKHPQPRTVHHQALSRPAQLSRHRSLKQQVLPIVVMVFKGSFCKVSNHSWKMYDKSLLRRLFIGKASASSGRQLYLQHPSSSNCISSNAESVSIKSDEDINTNDTSTPPQVQLHGPIARARARQLNYQLLVHLVLAGSRLLAGTNTLVVGLIVHPSRFTTASGVGVTIAKAQHPPPVIPDL

SEQ ID NO: 143011 - protein, 1316 aa, Oryza sativa
  Clone ID: PAT_MRT4530_43962C.1.pep
MKPSVCPSWIDPGNALRFLVRVAKYVANLEYGMLPMSEQDYDWWVDISSGYNLDKFHDEMASKIIWGPSQEIRVWGLDTEIGTECKLTTNEEFGQWMNSMLDDKLVEFGVEVIYKKGYEPIEGIANPVDSAIQGVSGVVTADPIDQSSAQVLSAMISAEVSSPGHEEGTGDTSSHPQNAEEANAVVDWSKLAILVEPEQDCDVNLLLDEDQVFEAMGFKAADQRAAAAAAAMEETAIPIIPTEIQQDMLDAAIVVDDEVPIDVLDWDRDDPDMSVGTFYPSMDEFRMAMKQYAIVHEFELETENSDKERFRGKCHAIGCPWIIRAKTQPNKSVRVQINKYDHKCASRSRVRGRMASQAWVAERAIPFLNKKNGMGPKELQKELQDTYKITIPYHTVYHGRKRATDKLFGKWSDSFDWLYRFKAEVEMRSPGSVVEIDTVKIGDKGGCRPYISIDSTALNGYWNGHMPAANALDGHNWMFPLAFGFFDSETKENWVWFMEQLANAIGPVPKLAIHTDACKGLETAVHKVFPWAEQRECMRHLMENMKKLFHGSIYARKMWPAAKTYMLEKHDKWMDEVTTASPEVKQWLKEYHNLLWARSKFDCAIKCDYINNNLAESWNSWIKDLKDLPVDALADAIREKTLILFEKRRRISTALNGVILPVVIHQLNEASKGLGHLKVTKGNPDQAEVTETYKDEEVTRHVVYLDKWTCTCREWQVTGKPCPHALALITTIRQPNMEKYVDTAYSVHRFQVAYASVIPNITDKKQWPKVDKGFKLLPPVPKKRGVGRQRKNRIPSALEKGKGKATRQVQCPDYQRFGHRKGSIRCELTGTRKRKKNNKTKTNVGRKKAKGAIDAQAAAVDVQANTPRTRAAAVDVQANTPRTRAAVAKEAAAESQVHATQTSSPGPITRRLLSWCYMNLGNHIILLFQTQRPIKHFLSHLPGQHSSPEKDYYKILGVPKDASQEEIKRAFHSLAKRYHPDTNRGNTAAKRTFQEIRDAYEARFHKQGHNPFAEFYRQNNGPFSSKFYKIFSEVFEHDVDAHANDIEVEVNLSFRDAVKGCMKQVSFSAKNLCDSCDGRGYLANAKMYVCPSCRGAGRVSINPFTSICTSCRGFGKVIKDYCLTCKGSGVVDGMKYVNVTIPAGVDSGDTIHVPEAGHSGGRGTLPGSLYIKLQVASDPVFVRDGADIHVDKKISFTQAMLGGKVEVPTLDGTAEVKIPKGVQPGQVIVLRGKGLPNQAGYLGDQHVRFRIHFPSMVNERQRALLEEFAVEEATKEQSSFSAGNWWELVENMKGQTFLLGLGFLVLVHLLLTKTVN

SEQ ID NO: 143012 - protein, 58 aa, Oryza sativa
  Clone ID: PAT_MRT4530_43963C.1.pep
ENRRLSSGKKMHPFFASRKIHKGAGQDILNVEDEDMDSLCAFERDPPLCPVHVLYELE

SEQ ID NO: 143013 - protein, 122 aa, Oryza sativa
  unsure (1)..(122): unsure at all Xaa locations
  Clone ID: PAT_MRT4530_43964C.1.pep
MAAAENSSSAGLQRSSEQIQPTGGRGGRGGGRVAGDQRRATRRRQXRESRRDAPHAAATAAANGAGARXAAWMTTAASSLSXRVPRRRRPPPPHPPAPVLPRRWPPSALATRGHHPGAPPFP

SEQ ID NO: 143014 - protein, 116 aa, Oryza sativa
  Clone ID: PAT_MRT4530_43965C.1.pep
SKSERKLHSHWLLPQEYKRRMHARYPSMSGGSHHDKLHVETYLCASHTYIDLPCGKLIILLDPERVKPETCQENRTLLWPYGPTFPAQDCFDFCPQRRIKHSTGLTSHCSIPRAWR

SEQ ID NO: 143015 - protein, 98 aa, Oryza sativa
  Clone ID: PAT_MRT4530_43966C.1.pep
MVNLAAAAAAAASSWLLHSSNVVILLWLAGFHLQKSTCSSCGYPAARIRKYNWSVKAIRRKTTGTGRMRYMRHVPRRFKSNFREGTEATPRKRAAAAN

SEQ ID NO: 143016 - protein, 218 aa, Oryza sativa
  Clone ID: PAT_MRT4530_43967C.1.pep
MAMSPHDQHEHEPDHAHRSPSNGTAATSTIATNRWGPYSGAGDFASNMAVILAALLAALALALALNAAVRYLLRRHRRARQQPAAAAAAAEDPEKPPVQEADPPPPPPALVYSAAGTKLAGAAECAICLAEFVDGDTVRVMPCWCQEIPLESGLRFAQIKVYQTGPFNVEAANLLPTPGICTTCRFVYRGVVKHLHFLYGDWRDILACFVKGKKNTNS

SEQ ID NO: 143017 - protein, 1404 aa, Oryza sativa
  Clone ID: PAT_MRT4530_43968C.1.pep
MEDKKQQQQQQREEAEAEEEAPVVPSSLRAAATCRSLSSLSSSLRWDHRGDDDEEEAELRWAAIERLPTLDRMRTSVLSSEAVDVRRLGAAQRRVLVERLVADIQRDNLRLLRKQRRRMERVGVRQPTVEVRWRNVRVEADCQVVSGKPLPTLLNTVLATARGLSRRPHARIPILNDVTGILKPSRLTLLLGPPGCGKTTLLLALAGKLDKNLKVTGEVEYNGANLNTFVPEKTSAYISQYDLHVPEMTVRETLDFSARFQGVGTRAEIMKEVIRREKEAGITPDPDIDTYMKAISVEGLERSMQTDYIMKIMGLDICADIIVGDIMRRGISGGEKKRLTTGEMIVGPSRALFMDEISTGLDSSTTFQIVSCLQQVAHISESTILVSLLQPAPETYDLFDDIILMAEGKIVYHGSKSCIMNFFESCGFKCPERKGAADFLQEVLSKKDQQQYWSRTEETYNFVTIDHFCEKFKASQVGQNLVEELANPFDKSEVYNNALSLNIYSLTKWDLLKACFAREILLMRRNAFIYITKVVQLGLLAVITGTVFLRTHMGVDRAHADYYMGSLFYALILLLVNGFPELAIAVSRLPVFYKQRDYYFYPAWAYAIPSFILKIPLSLVESITWTSISYYLIGYTPEASRFFCQLLILFLVHTGALSLFRCVASYCQTMVASSVGGTMSFLVILLFGGFIIPRLSMPNWLKWGFWISPLSYAEIGLTGNEFLAPRWLKFHSLKRYSDTIWTSATGTSRAIISRDKFSTFDRRGKDMSKDMDNRMPKLQVGNALAPNKTGTMVLPFSPLTISFQDVNYYVDTPVEMREQGYKERKLQLLHNITGAFQPGVLSALMGVTGAGKTTLLDVLAGRKTGGVIEGDIRVGGYPKIQQTFARISGYCEQTDVHSPQITVEESVAYSAWLRLPTEVDSKTRREFVDEVIQTIELDDIRDALVGLPGVSGLSTEQRKRLTIAVELVSNPSVIFMDEPTSGLDARAAAIVMRAVKNVADTGRTVVCTIHQPSIEIFEAFDELMLMKRGGELIYAGPLGLHSCNVIHYFETIPGVPKIKDNYNPSTWMLEVTCASMEAQLGVDFAQIYRESTMCKDKDALVKSLSKPALGTSDLHFPTRFPQKFREQLKACIWKQCLSYWRSPSYNLVRILFITISCIVFGVLFWQQGDINHINDQQGLFTILGCMYGTTLFTGINNCQSVIPFISIERSVVYRERFAGMYSPWAYSLAQVAMEIPYVLVQILLIMFIAYPMIGYAWTAAKFFWFMYTIACTLLYFLYFGMMIVSLTPNIQVASILASMFYTLQNLMSGFIVPAPQIPRWWIWLYYTSPLSWTLNVFFTTQFGDEHQKEISVFGETKSVAAFIKDYFGFRHDLLPLAAIILAMFPILFAILFGLSISKLNFQRR

SEQ ID NO: 143018 - protein, 149 aa, Oryza sativa
  unsure (1)..(149): unsure at all Xaa locations
  Clone ID: PAT_MRT4530_43969C.1.pep
MVVQSGEGSVHVVLVPYPSQGHINPVLQFGKRLAGHDGVRCTVAVTRFVVGSTTKPCSLGSSPVRVGVFSDGCDEGGPAELGGHRGPYFQRLEEAGSVSLDELLRGEAERGTPATVVVYDTFMPWVPRLARRHGAACAXRFLTQXCAVD

SEQ ID NO: 143019 - protein, 435 aa, Oryza sativa
  Clone ID: PAT_MRT4530_4396C.1.pep
MGAGRSVPARGRDSESSSRKTKAAASSSSTAGCWGRLPLLISSGGIMTSSPPDRSPPYLQTTAEPTLYAGTTNNSYKPFLPEEAFSGSISPSLVAADFQLRQFTYADLQRATGYFRPETFLGVGGFGRVYKGWIQVNETAHGKPRTGIPIAVKTLNYDGLQGHDEWVAEIHYLRNLKHPHLVKLIGFCMEGDQRQLVYEFMSRGSLENHLFIRSRTPLPWFLRVKIVLGAAKGLAFLHEQEMPVIFRDFKTSNILLDEDFNAKLSDFGFARDGPVGDMAHVSTRVLGTYGYAAPEYVLTGKKAMERNLVEWAHNNANDRSIHRLIDPGLGSNFSMAGAQILARTARSCTRQNPRDRPLMSEVVHTLETLHTDQRANATTSYSYSQSQPPSPSANPSPSRSPMRSSASSPYGAPYPYGGIGGHASPLRHGTRRAMA

SEQ ID NO: 143020 - protein, 1422 aa, Oryza sativa
  Clone ID: PAT_MRT4530_43970C.1.pep
MEDKKQQQQQQREEAEAEEEAPVVPSSLRAAATCRSLSSLSSSLRWDHRGDDDEEEAELRWAAIERLPTLDRMRTSVLSSEAVDVRRLGAAQRRVLVERLVADIQRDNLRLLRKQRRRMERVGVRQPTVEVRWLNVRVKADCQVVSGKPLPTLLNTVLATARGLSRRPHARIPILNDVTGILKPSRLTLLLGPPGCGKTTLLLALAGKLDKNLKVIYFFIPSQLHVILPPIKVTGEVEYNGANLNTFVPEKTSAYISQYDLHVPEMTVRETLDFSARFQGVGTRAEIMKEVIRREKEAGITPDPDIDTYMKAISVEGLERSMQTDYIMKIMGLDICADIIVGDIMRRGISGGEKKRLTTGEMIVGPSRALFMDEISTGLDSSTTFQIVSCLQQVAHISESTILVSLLQPAPETYDLFDDIILMAEGKIVYHGSKSCIMNFFESCGFKCPERKGAADFLQEVLSKKDQQQYWSRTEETYNFVTIDHFCEKFKASQVGQNLVEELANPFDKSEVYNNALSLNIYSLTKWDLLKACFAREILLMRRNAFIYITKVVQLGLLAVITGTVFLRTHMGVDRAHADYYMGSLFYALILLLVNGFPELAIAVSRLPVFYKQRDYYFYPAWAYAIPSFILKIPLSLVESITWTSISYYLIGYTPEASRFFCQLLILFLVHTGALSLFRCVASYCQTMVASSVGGTMSFLVILLFGGFIIPRLSMPNWLKWGFWISPLSYAEIGLTGNEFLAPRWLKFHSLKRYSDTIWTSATGTSRAIISRDKFSTFDRRGKDMSKDMDNRMPKLQVGNALAPNKTGTMVLPFSPLTISFQDVNYYVDTPVEMREQGYKERKLQLLHNITGAFQPGVLSALMGVTGAGKTTLLDVLAGRKTGGVIEGDIRVGGYPKIQQTFARISGYCEQTDVHSPQITVEESVAYSAWLRLPTEVDSKTRREFVDEVIQTIELDDIRDALVGLPGVSGLSTEQRKRLTIAVELVSNPSVIFMDEPTSGLDARAAAIVMRAVKNVADTGRTVVCTIHQPSIEIFEAFDELMLMKRGGELIYAGPLGLHSCNVIHYFETIPGVPKIKDNYNPSTWMLEVTCASMEAQLGVDFAQIYRESTMCKDKDALVKSLSKPALGTSDLHFPTRFPQKFREQLKACIWKQCLSYWRSPSYNLVRILFITISCIVFGVLFWQQGDINHINDQQGLFTILGCMYGTTLFTGINNCQSVIPFISIERSVVYRERFAGMYSPWAYSLAQVAMEIPYVLVQILLIMFIAYPMIGYAWTAAKFFWFMYTIACTLLYFLYFGMMIVSLTPNIQVASILASMFYTLQNLMSGFIVPAPQIPRWWIWLYYTSPLSWTLNVFFTTQFGDEHQKEISVFGETKSVAAFIKDYFGFRHDLLPLAAIILAMFPILFAILFGLSISKLNFQRR

SEQ ID NO: 143021 - protein, 99 aa, Oryza sativa
  Clone ID: PAT_MRT4530_43971C.1.pep
LYPNLDFIHHPPHYTPTNPITPLLLSAARHTSNFFFFIAHTAPPRSDRENVNSHGGPKVVPHGDGPPYEPSALQNRRRASDRGRAPTAPGVPPPPVPPT

SEQ ID NO: 143022 - protein, 64 aa, Oryza sativa
  Clone ID: PAT_MRT4530_43972C.1.pep
MTIKPDRVQRGLKEHISTWCEKKGSYLRGTNGRNAERNFAQHHYADQYDKPFCAGLVEYIISGP

SEQ ID NO: 143023 - protein, 98 aa, Oryza sativa
  unsure (1)..(98): unsure at all Xaa locations
  Clone ID: PAT_MRT4530_43973C.1.pep
SNLNLVGELGKKDYRDPTQEAVRKSLIFLKNGKPDDVALLPLPKKTRSILIATYHADDLGSCSAXQCGDWTITXQGLTGNNLTAGITTLDCIKLVRDG

SEQ ID NO: 143024 - protein, 188 aa, Oryza sativa
  unsure (1)..(188): unsure at all Xaa locations
  Clone ID: PAT_MRT4530_43974C.1.pep
EYHHEFFCKKRETALRPPTSYRNHTAEKVHINRELRQCRNECNLGPPSACTTLDKPXIPIRLPPRXRHKWSQRAPRAARAEQQQTWPTGATRSRRNRRKEQDSDLLDEEGITAGTATRSHLPPLAXDGNATGTTARSHLHPSNRPQSFGSRTSTAANRRRRRPHQHRGLTGKSNQQGTNPNYRRHLTT

SEQ ID NO: 143025 - protein, 62 aa, Oryza sativa
  Clone ID: PAT_MRT4530_43975C.1.pep
IRPSVLQNNSANSMIKAVFGAPSSQPLSLVFRAHVFQTAKRCIFCKKFIYESYLKKIKLIHF

SEQ ID NO: 143026 - protein, 44 aa, Oryza sativa
  Clone ID: PAT_MRT4530_43976C.1.pep
CFLARADRRRGESPLERHRGVQTSRGFFMNRIGVEVLGQTHTQR

SEQ ID NO: 143027 - protein, 80 aa, Oryza sativa
  Clone ID: PAT_MRT4530_43977C.1.pep
MVDLDHCFKSIAYNSLKYKLPSERIVTALVSMLSMTNIGILYIVVKEKKVVELSRRHSLKAVETTPFKGLNVNILLRNLQ

SEQ ID NO: 143028 - protein, 147 aa, Oryza sativa
  unsure (1)..(147): unsure at all Xaa locations
  Clone ID: PAT_MRT4530_43978C.1.pep
MAEIMMYPLVASLEYIFCFGGWTASCVVFFHLIVSFYGTEMTENLMPAAAAAMALPTATATWGRRSRRARAVRRASASVALAVAGLTLWLWCVYLRFLPGLRCFRCXGVLKKVAVPPKALGFATPVFAFVALGSHAVVRGDEAEWDE

SEQ ID NO: 143029 - protein, 241 aa, Oryza sativa
  Clone ID: PAT_MRT4530_43979C.1.pep
MTILAYEYVQQHVVLAAVSFHFTCAYITIPLKPRNPLRANSNPRQSHPPMKKQAAAARCNALFVDRFEKIMMYPLVASLEYIFCFGGWTASCVVFFHLIVSFYGTEMTENLCSCDGMTAEEAAAMRGVEACMLLSCAAQMAAAAAAMALTTATATWGRRSRRARAVRRASASVALAVAGLTLWLWCVYLRFLPGLRCFRCFGVLRRVAVAAVALGFATPVFAFVALGSHAVVRGDEAEWDE

SEQ ID NO: 143030 - protein, 130 aa, Oryza sativa
  Clone ID: PAT_MRT4530_4397C.1.pep
TLHIQNGAKRARKHRLGVTFEQEGVPLVALNYNNGIQAGIYSYYTQHKGNLLPSLCTRGPGPILGLKNLGGGVFTPVFFEPETKLIYLFQAPFFGGALSKPLGNHIFLVISASNQRGSRHVQEAIKCNFL

SEQ ID NO: 143031 - protein, 88 aa, Oryza sativa
  unsure (1)..(88): unsure at all Xaa locations
  Clone ID: PAT_MRT4530_43980C.1.pep
TEYCCSTSPXGDPKRISNSGNMSNLSKAKAVQGXQLLHGSCYSSMMYPNVEDYXDGIQGCHQLPSTSNKLVGYTTNKGNLHYKNIFNP

SEQ ID NO: 143032 - protein, 275 aa, Oryza sativa
  Clone ID: PAT_MRT4530_43981C.1.pep
MRLRTCFMLLPCWCREACCIWLVSERHTADTSELVMNNHIMCGIGVKKSVSRQHLKAPVWNRLANCSVREGAGAIDLSSKTRTATTTGFAWMATHTTRACNAAYSYLISSFYSKLSAQRGTLYKDPLLPFFNASCKTNRNADATLQVCNRDANANANAEAHGLPIGLTKTGPQYFVATPNSELQLPIIVRRKSRVIITVTDSFVSPKSSGVCLSTTNFLVLGKLFHNPLSNECIIDLVSRYELGLTDWWRREYGGLDFAYGTQQKTQASNDSVLL

SEQ ID NO: 143033 - protein, 137 aa, Oryza sativa
  Clone ID: PAT_MRT4530_43982C.1.pep
PHPPYHYFAFSLPHRCANAWSPRGPRLRTPSCTLARYRRPALPHRPPVHATVTPSHRPAPSDDQRLARCRLQPAPSNSLLLVSSSPPASSCSVPTQRRRCQPVTVVALRLVRPSRSLAWPVVRSTGTTAASRLQASA

SEQ ID NO: 143034 - protein, 122 aa, Oryza sativa
  Clone ID: PAT_MRT4530_43983C.1.pep
MATHLFSILFLSPFPRCHHCRDNIVDAAASEETASTTRSKLAIPETRSLAELWGGAEGRAGIVAKQSGRGPRAEQSGGGGGPPGRWWRRLGLAMTRDNEKAPNIPGRVRRDEGDEAGMSRLA

SEQ ID NO: 143035 - protein, 635 aa, Oryza sativa
  Clone ID: PAT_MRT4530_43984C.1.pep
MASGISIGTGGPWWLLQIWLNLHTRMVANRPPLADARFPRFEPIIDDDGEKITTCRCMSFGEAASVSIASKLSAKPFSEWFNNFYDGVPQKHQDLLPGDFRFEEINSEKYDKSIEVYSTAISPCILPVGIHQGKNIQMTYEFYHPISAARQLGMGQLPISLFFADKIQSRGEITSTLMMDRLLNIAGPPLGSINNIKLRMLRSAAFDRWWVEWKKHLSHQSASMYLTDLFPEAVPQTIESSPPHHSNSGMEIQYAPGLLPNGGGRSPPVIGYNAPKTSTLLHGLPRVPIAPDAGRKKRAKSAAAPSAAKKKPKKQKTTADELPAIDPDVTEFLEDEATVEDVDEAAEHISETREQTTPADPPAPQRTPSPPPPRPPTHVPESSENTPSAADSHHVDEEEKATPAPAIPVLADMFSFDIRQFLDEEEETTSKTLVPLADDIKSTLLHISKRLEGSLEILVTSCGSIRDRLNEIHDKIPDELANAITPAAYLKQHRLKLEKAQRRIADQRERRDLEATIQANRVSINEKKAKLDELEAGTNPTQTNIDRLNARKIELLAELEQCNAPVALEQQKLADLPKGIEDQKSKLKVSVKHLADLTKSLKVFPSTDAADAQIIDEVDHIRQRAISVIQKYMSG

SEQ ID NO: 143036 - protein, 81 aa, Oryza sativa
  Clone ID: PAT_MRT4530_43985C.1.pep
CSKQILYELTITLAIDNLELVVDYTIKLALSTTVMCMVDWLEQLKQPKLIFVMVEMAPKTTARFLLWKMRWTSCVLWGKYN

SEQ ID NO: 143037 - protein, 55 aa, Oryza sativa
  Clone ID: PAT_MRT4530_43986C.1.pep
YYGNTAGFYKVGRCLSNLPLLMPQPLVVLGSLAPGGWGVEPTLSWNVDVVSLRLA

SEQ ID NO: 143038 - protein, 66 aa, Oryza sativa
  Clone ID: PAT_MRT4530_43987C.1.pep
EVLNLGPDLHRILIHLLHLYTTRPPRLSRAKSTLSTCPSSEGFLAVPLDQHILNTVNLLWRLNYTD

SEQ ID NO: 143039 - protein, 36 aa, Oryza sativa
  Clone ID: PAT_MRT4530_43988C.1.pep
ESIKVLWVKLPGSPYDMRGQVSHPFVAAGLSDAQPR

SEQ ID NO: 143040 - protein, 154 aa, Oryza sativa
  Clone ID: PAT_MRT4530_43989C.1.pep
MAEKQRREKNVEKQRRRGKDVEKRWKIDGRGDGAVARGGPPSRVEAAGGCGALLAELMTVWSLALVAATVGRDREEQGLGRRGSGRPAIHGRKAQACSAPTRGRGRGLAPVRGVAGAWRRNGHDTASLLLCTASRGQEAQGVERTNGSPTTQSG

SEQ ID NO: 143041 - protein, 55 aa, Oryza sativa
  unsure (1)..(55): unsure at all Xaa locations
  Clone ID: PAT_MRT4530_4398C.1.pep
CNTLLIVTSAQQAELYTLTQXCQGQNANIYTDSRHAFGVAHDFGKLWKHVVSLLP

SEQ ID NO: 143042 - protein, 99 aa, Oryza sativa
  Clone ID: PAT_MRT4530_43990C.1.pep
SIQGLFFGMVGPAILHTGQSAPKGSFCATKMQFRPCLSCNLGQEACVSGPVHSLSNFPLHRGRVHASFLRTSSKLWVCFFFPCDMPDHGKCKLKMCIVS

SEQ ID NO: 143043 - protein, 52 aa, Oryza sativa
  Clone ID: PAT_MRT4530_43991C.1.pep
MSPLSAASFFLPCSFFPCTTLLCAFLTMSADSCPVFEYFAYSRIRLCYLLLV

SEQ ID NO: 143044 - protein, 91 aa, Oryza sativa
  unsure (1)..(91): unsure at all Xaa locations
  Clone ID: PAT_MRT4530_43992C.1.pep
KINRYNCLNXALSLIDNDGYHDLGANRAQGIPYRLYRLSSLSTLINXTLYFLADXYRADAQFDSKFNSIPHQIRFDLLPSSLNPMQNSVVN

SEQ ID NO: 143045 - protein, 238 aa, Oryza sativa
  Clone ID: PAT_MRT4530_43993C.1.pep
MASSRERRLPPPAYRMENPFSVKVLQLRKSGLKNIEAGIGCGVGIGHGFGIGIALKPQELMSKFTSRLKDTPTLSSAPNMAGSVPSNGQAPNGVSIDLKAKTTKSNFHHTSNETSQVKPAPGLQSQHGMQPDMTESRTEKILSTSKNKKMMFQDETKMDIRDVARNSHGMDNVLELLLKHQRIIDELRDENDKLRQMLIEELKVSPSKLQLDHKNGVKAYNPCSDCFACRPRSRKTRR

SEQ ID NO: 143046 - protein, 76 aa, Oryza sativa
  Clone ID: PAT_MRT4530_43994C.1.pep
MGCWQEASGKRRQVLCLVRRHGRRKVRADKTDVDGKARSLMATGFTPSSPLPPFHRPVPLFLLLVAVTFPPLAPFC

SEQ ID NO: 143047 - protein, 255 aa, Oryza sativa
  Clone ID: PAT_MRT4530_43995C.1.pep
AAAPPGIVIAARDIPPPGASVAARTSLFGPPPPPSSSSPPSSRATDVSVGSGEERSGGSSRPHPAPAPPTPPLLRGRRRGEEGTTVELELPHRPAPSSSHASAIAISTRCVLCVGKGGGGDDRAAAHRAATSAKKMRRRRTCGEGGARAGGAESPRRRPGTMAPAPAETASGSSAAGFGAASPLASRQIRRGRGAPAEGERGAGGGWEREGHQRRSKGAGAAGKGKEREEKERVGPPVREKVDPMHCGGCCLRSY

SEQ ID NO: 143048 - protein, 928 aa, Oryza sativa
  Clone ID: PAT_MRT4530_43996C.1.pep
MRQDVASKCDSRSRSGAAPEIMRSPRRTIGENGYRDTRHHQLKCSDGNLGELRVESIPNFHCKSLPTRSRKTNAEDSIVGKRGSMYQSSSEISMIRKLHEGRRKKIDSALDGDAFLSFEIVDSSSQPSTSGAYLFSHQNRRSEAKSSVESRRIHRASRDFLDLSFRELPDENCRLDRPRMDCTLLKNDAGDGFLEISLEEEMTKGPCRNAAPQLIGGESSKGTEANCLQNKISVCPSENNCSQRERNSTNSLPESMSAKVSISDGTRPSESVRHGIENSTKVRSSPFKKILDPIMKSKSIRSPSLMEDSNHVTMPVNRKNCVSRKSLLSDLSRSEQSQSINCQLNGERQHTTNALSPAHLQAVLKLDTKNGIPVFEFCVKGPEESISARSWKTGNDLNWIYTFHSGGKRASATGRASKDGRWCSPPIVGQMQASSYLCSEVGKDGVLTNSVITEFVLYDIAHARQSFSAEEKTQCTETTQSTLSSAVEKSASGDCPQRINLMDQQNSARNNSDVSTSCPWSEEDLYPHLEIAATVIQVPFNRSKSKELKSGLSPGTVKVITPSGLHGLPNDDETSPSPLLDRWRYGGGCDCGGWDMACPIAVLGNAYDNNWANSVTKEGENPMELFVLGGKEELPALSIKGNEKGQLLVHFHARLSAMQAFSTCISLLHCSEASTAVSIEKGKHKLYSSSLKMLLEEEVSQLIEAVTAEEKRKTKKRKEAAVAKGQGQFGGLQPHLLQIDAGEEIIPKITALSKSNGRVICVLSVLGAVQEATLLLSSGVTSYHKGPLEIIRLFGSILTPNDQGCLRVTLASGDSSVIGGVITGPLKAATPVQVVVASFYSDVYWPNRTPKIIAPYPNSQSTIRNGSTLSSEHVNPGYVSYTAVDQHESSEVDVKPSLGMLNLASLDRHESSEVDVKPSLGMLNLASL

SEQ ID NO: 143049 - protein, 108 aa, Oryza sativa
  Clone ID: PAT_MRT4530_43997C.1.pep
MAITGSKKPGQLKQMLRRCSSSLGIKGAGGDDDGLPGDVPRGHFAVYVGISRRRYIVPVACLAAPEFQELLRKAEEEFGFDHDMGITLPCDEATFHGVLASASATSIR

SEQ ID NO: 143050 - protein, 35 aa, Oryza sativa
  Clone ID: PAT_MRT4530_43998C.1.pep
RETVQTGKGYLEDRRPASNMDPYVVTSMIADTTII

SEQ ID NO: 143051 - protein, 60 aa, Oryza sativa
  Clone ID: PAT_MRT4530_43999C.1.pep
MGLGRIKAHHLRLRERHGEGVNDYALIDVGMACSSGREQDPREEMLFLWWCCRDDKNLKR

SEQ ID NO: 143052 - protein, 271 aa, Oryza sativa
  unsure (1)..(271): unsure at all Xaa locations
  Clone ID: PAT_MRT4530_4399C.1.pep
MSSWNSVGMEVLYQVLGWVAFFAWSFSFYPQVFLNFKRKSVVGLNFDFLVLNLTKHSSYLIYNAALFFSPFIQRQYHETYGDKEMIPVAANDVAFSVHAVALRCEVLYQVLVWVAFNAKISSFYLSIILNFKRKSMVGLIFDFLELNLXKALIFPHIQMTSIKYIPHPIMNSXDMSTIGWSIGNILLDLTGGVLNFGQMGVQSIDQHTLVNFYGNIGKTLLSLEVVFFDILFIIQHYVLYPVKRDENGKAIISERVAPLIRPSDKPEEDSV

SEQ ID NO: 143053 - protein, 662 aa, Oryza sativa
  Clone ID: PAT_MRT4530_439C.1.pep
MAAEEGARSPTRMLAEGHLRVATGGGAPADGGIAVRHLPHHHASKREGAGGKNEQYNLEDVDSVPSKMSNKLVNGNNKVPATLDDYKRLLVPVIEEYFSTGDVELAASELRSLGSDQFHSYFIKKLISMAMDRHDKEKEMASILLSALYADLLGSSKMSEGFMMLLESTEDLSVDIPDAIDVLSVFVARAVVDEILPPVFLTRARALLPEFSKGIEVLQVSEKSYLSAPHHAELVERKWGGSTHFTVEEAKRRIQDILKEYIESGDIDEAFRCIRELGLPFFHHEVVKRALTLSMENLSSQPLILKLLKESTAGCLISSNQMSKGFCRLAESIDDLSLDIPSAKILFDKLVLTATSEGWLDASFTTSSAPNEDMRNASGEKIKHFKEESGHIIQEYFLSDDVPELIISLQELSAPEYNPIFLKKLITLAMDRKNREKEMASALLSSLSLELFSTDDIMKGFILLLQSAEDTALDIVDAPSELALFLARAVIDEVLIPLNLDEIGNRLRPNSSGSQTVQMARALLAARHSGERILRCWGGGTGWAVEDAKDKIAKLLEEYNTGGDLGEACQCIRDLGMPFFNHEVVKKALVMAMEKENEARILALLQECFGEGLITINQMTLGFTRVKEGLDDLILDIPNAQEKFGAYVDLATERGWLLPPFA

SEQ ID NO: 143054 - protein, 115 aa, Oryza sativa
  unsure (1)..(115): unsure at all Xaa locations
  Clone ID: PAT_MRT4530_43C.1.pep
FVXVNXMGXXFLSPCWWXXAREYKXVXDSDXGFXGIRQDXXQCRAFQXXXFXXXXAXXLLSSXXXQXXXCXCSSGXRTPXGSMQVXAXASGNXXEKVXASNLCXVXIGXGSMNAG

SEQ ID NO: 143055 - protein, 295 aa, Oryza sativa
  Clone ID: PAT_MRT4530_44000C.1.pep
MESSRGKPGLNGSGGGAAAFDYSSRRGYYTGAGAALPPLAAGSRAPPVDPCCVVLRVFVLLGTLASAVVMAADRQSTTVQIAAGEELAPPLRVPVTAKWTYSSAFVVPTIFESDTQPWLIANLCKIMGVGHVALWVTLFVDSSSSHRKFLSFTTVDLDEERPKLTTVDLAFTERREKSIRIEIWRRYFVVANAMVFAFSAAALAAVRRRSAVVPVMVGDLVAMALLFSAVGAAAQFGLLGERGNAHVRWAKVCDVYGPFCEPDAWAYPTSLIAAFADLVLLMLTILTIHKASSYY

SEQ ID NO: 143056 - protein, 230 aa, Oryza sativa
  unsure (1)..(230): unsure at all Xaa locations
  Clone ID: PAT_MRT4530_44001C.1.pep
MDNALASAAAIADQRQKIEQYRHILSSVLSFSPPDISQAKRFLDHMVSDEVPLVVSRQLLQTFAQELGRLEPEAQKEVAHYALTQIQPRVVSFEEQVVVIREKLAELYESEQQWSKAAQMLSGIDLDSGIRMLDDTNKLSKCVQIARLYLEDDDSVNAEAFINKASFLVTNSHQELLNLQYKVCYARFXGSEEKILEAALRYYDISQIEQRQIGXEXIDENALEQALSAA

SEQ ID NO: 143057 - protein, 784 aa, Oryza sativa
  Clone ID: PAT_MRT4530_44002C.1.pep
MSHWKNTFKSWPSLEKSWPVWYKRISASKQAHWDAIGIGQALALTIANSAKDEPLLAAATYFWSNTLNAFLFNQGPMTPTLLDIIMLTGLDVTSSANPMNLNTKNTFEFKTKSIGGWSGYIAAYMGKGPVTPREHVAFLLMWLEKFLFSEALESKKQFPLSKILLGYLYQMLNNASAKIIIGSVVGAGGPWWLLQSWLNLVVMKVVNRPSVTEAKFPRLELIVEDSGKERTHRRCMSYGEYASTPADAGAKLSAELLKDWFFSFYEGFQKDARVWFFYADSMDLELPADFRFEDINHEKFQQSREVFTTAISPCILPVGIHQGRNIQVSYEFYHPMSSARQLGMGQLPIGLYFVDKIQCRGDISSTLMMDRLLNIPGPPLGNIENIKLARFRSRAFDRWWSEWKLHLFHQSASMYMTDLFPDAIPQTTESSPPRRSNSGKDIEYAPSLIPNGGGRSPSAIGYNAPKTSALLQGLIRQPADAGEKRKTRSSAVDTLAPALKKKTKPKKSTPADDLPALDPSIEQALDEEAIEEDVDQAAAEVSDTERTPSASPKQAPPSPSVPAHFSRPPPPPSPPVQPESGKRTPSAADSHHVEEEEQLTAPAIPVLADLFSFDIKDYLDETEEDTTSKATALLPNDVKRTLEDISHRLGASLDTTWQRLADHWERKDIEATIQHNRQLVHIEKSKLDQLSEGPIKSNIDRLEARKIELLAQLQECNAELDIEHKKLVDLPQAVEEQKAKLKSAIKNVADMTKSLKVIPGTDAQDTQAIEEIEQIRKRAIPAIQ

SEQ ID NO: 143058 - protein, 430 aa, Oryza sativa
  Clone ID: PAT_MRT4530_44003C.1.pep
MDNALASAAAIADQRQKIEQYRHILSSVLSFSPPDISQAKRFLDHSNEPSIFAPLPVDSYGFCSGSGVTVGFGAAAVVSDEVPLVVSRQLLQTFAQELGRLEPEAQKEVAHYALTQIQPRVVSFEEQVVVIREKLAELYESEQQWSKAAQMLSGIDLDSGIRMLDDTNKLSKCVQIARLYLEDDDSVNAEAFINKASFLVTNSHQELLNLQYKVCYARILDLKRRFLEAALRYYDISQIEQRQIGDEEIDENALEQALSAAVTCTILAGAGPQRSRVLATLYKDERCSKLKIYPILQKVFLERILRKPEIEAFAEELRPHQKALLPDKSTVLDRAMIEHNLLSASKLYTNISFDELGALLGIDPRKAEKIASRMIYEDRMRGSIDQVEAVIHFEDDTEELQQWDQQIAGLCQALNDILDSMSSKGMAIPV

SEQ ID NO: 143059 - protein, 64 aa, Oryza sativa
  Clone ID: PAT_MRT4530_44004C.1.pep
MVGVPSHAPASTASRAISRHAASTTESRCATSAAREGATAGAAYLRQRVCRPRELSRSTGFFTF

SEQ ID NO: 143060 - protein, 993 aa, Oryza sativa
  Clone ID: PAT_MRT4530_44005C.1.pep
MSFIRKKSMEFLKSFEVPAKNPSEEAQRRWRDAVGTLVKNRRRRFRMVPDLDKRSQAETQRRKIQEKLRVALFVQKAALQFIDAVRKTEHPLPELARQCGFSVSAEELASIVRGHDTKSLRFHNGVDGIARKVAVSLADGVKSDDAGLRAEVYGANQYTEKPPRTFWMFLWDASQDMTLLLLAFCAAVSVAIGLATEGWPSGMYDGVGIMLTILLVVMITAASDYKQSLQFRDLDKEKKKIDVQVTRDGYRQKVSIYDIVVGDIVHLSIGDQVPADGLFIDGYSFVVDESNLSGESEPVHVSTANRFLLGGTKVQDGSARMLVTAVGMRTEWGNLMETLSQGGEDETPLQVKLNGVATIIGKIGLAFAVLTFTVLMARFLLGKAGAPGGLLRWRMVDALAVLNFFAVAVTIIVVAVPEGLPLAVTLSLAFAMKKLMQERALVRHLSACETMGSASCICTDKTGTLTTNHMVVEKIWASGAAQTMSNAKGFDQLTSSMSETFAKVLLEGVFHCSGSEVVRGKDGRHTIMGTPTETAILEFGLAVEKRARIEHTGAGKLKVEPFNSVKKTMAVVIASPSAGGRPRAFLKGASEVVLSRCSLVLDGTGNVEKLTDAKAKRVASAIDAFACEALRTLCLAYQDVDGGGGDIPGEGYTLIAVFGIKDPLRPGVREAVATCHAAGINVMARSLPLDKHTLVTNLRGMFNEVVAVTGDGTNDAPALHEADIGLAMGIAGTEVAKENRDVIIMDDNFSTIINVAKWGRSVYINIQKFVQFQLTVNVVALMVNFISASFTGSAPLTIVQLLWVNLIMDTLGALALATEPPNDAMMKRPPVGRGDNFITKVMWRNIVGQSIYQLVVLGVLLLRGKSLLQINGPQADSLLNTFVFNTFVFCQVFNEVNSREMEKINVFSGIFSSWIFSAVVGVTAGFQVIMVELLGTFANTVHLSGKLWLTSVLIGSVGLVIGAILKCIPVESGSDASDRHDGYRPIPTGPSAV

SEQ ID NO: 143061 - protein, 206 aa, Oryza sativa
  Clone ID: PAT_MRT4530_44006C.1.pep
MRLLSGASASRIPCPLLSLARARARCLPVPASATACRAASSSAAAAAGDGGALKPWLFVGLGNPGKVYQGTRHNVGFEMIDVIAEAEGISLSSMQFKAMVGKGRIGDAPIMLAKPQTFMNASGESMYDDLDLPFAKLRLLPKGIGRPPGKMDPANFVLRPFNRKEQEELDFAFHRGLEAVRIMALEGFNKSATYVNTAQSSEMLNR

SEQ ID NO: 143062 - protein, 250 aa, Oryza sativa
  Clone ID: PAT_MRT4530_44007C.1.pep
MRLVSGASASRIPCPLLSLARARARCLPVPASATACRAASSSAAAAAGDGGALKPWLFVGLGNPGKVYQGTRHNVGFEMIDVIAEAEGISLSSMQFKAMVGKGRIGDAPIMLAKPQTFMNASGESVGQLVSYFKIPLNQVLVMYDDLDLPFAKLRLLPKGGHGGHNGVRSIINHLKQNRDFPRLRIGIGRPPGKMDPANFVLRPFNRKEQEELDFAFHRGLEAVRIMALEGFNKSATYVNTAQSSEMLNR

SEQ ID NO: 143063 - protein, 423 aa, Oryza sativa
  Clone ID: PAT_MRT4530_44008C.1.pep
MAAAAALRRSLAAGPAPALLLRRQLLMRFLSTQTQSQTQTPADLATLKNSIRSAAHTPEALADLFISGLSHPAFLADRPIFTLSVHRLASAGRRDLVASILSSSLTSLPAPHPSEGFLIRLISLYSAAGMPDHSLSTFRIVTPPSDRALSALLSAYHDNRLYDRAIQAFRTLPAELGIKPSVVSHNVLLKSFVASGDLASARALFDEMPSKADVEPDIVSCNEILKGYLNAADYAAFDQFLKDNTTAAGGKRRLKPNVSTYNLRMASLCSKGRSFEAAELLDAMEAKGVPPNRGSFNTVIQGLCKEGEVGAAVAIFKRMPEVPRPNGKGVLPNSETYIMLLEGLVNKGVFAPALEVFKECLQNKWAPPFQAVQGLIKGLLKSRKAKHAKEVAMAMRKVVKGDAKEEWKKVEAEFSFEPTDKKA

SEQ ID NO: 143064 - protein, 464 aa, Oryza sativa
  Clone ID: PAT_MRT4530_44009C.1.pep
MPMAALRLLLLALAVACCAVAEPPQQERSALRAFLAGTPHERALAWNASTPACAWVGVTCDAANATVVALRLPGVGLIGRVPQGTLGALRGLRVLSLRSNRLFGDVPGDLFSLPDLRSLFLQGNLFSGSVPPDVAKLTALQHLALSHNNLTGAIPFALNGLANLRSLRLDGNRFSGSLPSLTLPLLEDFNVSYNQLNGSIPASLARFPPESFAGNLQLCGKPLSRPCEPFFPSPAGAPTPTDGRGSGGGSVPVSEKKKKKLSGAAVAAIAVGGGAAALLALVLLVVCTAASRRRAANGEVGKTAAARGLTPPSTASGELGEVTSSTSKEIALAAAAATAERSRLVFVGKGAAYSFDLEELLRASAEVLGKGSVGTSYKAVLEEGATVVVKRLKEVAASRREFSAHLDSLGKVDHRNLLPVRGYYFSKDEKLLVCDYLPAGSLSATLHGGGGGGCMYRFTKLQGL

SEQ ID NO: 143065 - protein, 36 aa, Oryza sativa
  unsure (1)..(36): unsure at all Xaa locations
  Clone ID: PAT_MRT4530_4400C.1.pep
MRGRSYTPSPPRGYGRRGRXPYPXGRFGGCRCRVLP

SEQ ID NO: 143066 - protein, 162 aa, Oryza sativa
  Clone ID: PAT_MRT4530_44010C.1.pep
MELHVERRGGVPQKEVGRTKSSQSSGTACQDDMRCRRLSYTSLHAKRHSKPVRTAEQPPIGNLTRWKPKAWIWRSRWCRRTTTQATQTPPRNPIVAAATEEPVSPDLLWDVPDLNLVGLDSVVPLATFTTTASRRHNRGSSLSRRRYTRIPPETHRIWTLVG

SEQ ID NO: 143067 - protein, 103 aa, Oryza sativa
  Clone ID: PAT_MRT4530_44011C.1.pep
MGKPEWQPKATKFARLHTLGQKDVKQQRDDRTADLGGAPVTPSVDVEAPARDYEPPEHLELLVTDLGVLQPLARCLLSSLMSQNSGTYKVVFDKVSEIYSEFS

SEQ ID NO: 143068 - protein, 116 aa, Oryza sativa
  unsure (1)..(116): unsure at all Xaa locations
  Clone ID: PAT_MRT4530_44012C.1.pep
NHEMNHLSLDTEDSLASLLLELAANNDVTGFKRLIECEPSSIDEVGLWYGRHKESKKMVNEQTTSFMGDATYCCIDVXKLILSVSEADVXNRSSGLDKSTALHCASSGGSENAVDA

SEQ ID NO: 143069 - protein, 32 aa, Oryza sativa
  Clone ID: PAT_MRT4530_44013C.1.pep
LWYLHCTSKTAQNDLILMVLYMYRAHRNTSDI

SEQ ID NO: 143070 - protein, 50 aa, Oryza sativa
  Clone ID: PAT_MRT4530_44014C.1.pep
NLYLKLCSNTICSKGRTGGAVFYVPTALGAKYITGRAFFKTNLRDSGAGC

SEQ ID NO: 143071 - protein, 152 aa, Oryza sativa
  Clone ID: PAT_MRT4530_44015C.1.pep
NATTSLASLVDFSCACGCVGEILRFFLVVWDRSMASLGGGGGGQGPPNGSGVPTNRPVFTIEGRVVEPPTLTAAQLDMIRSMYLSSLGVPPVNGFYPGAVQYPRGVFVPSNEYEAAGATRAAKRAKQTDISAENELAAKTTGTTPPPAAPKK

SEQ ID NO: 143072 - protein, 100 aa, Oryza sativa
  Clone ID: PAT_MRT4530_44016C.1.pep
MEPTPTALPGLLPGLLIVRVELLHREHMFLVVCIEEGAPDGGLGGGCGSARREQGRLLNTEVAAAAEIEPSSDTQWVCSRIELGITSGAIYPDLGVPRDT

SEQ ID NO: 143073 - protein, 112 aa, Oryza sativa
  unsure (1)..(112): unsure at all Xaa locations
  Clone ID: PAT_MRT4530_44017C.1.pep
GHXXQTNLSNFCQKEKNLREKQESERGRERRLVGVGALGVWGSAEARWSRGRHCVGLAGVGALGEPPEIRRSAAPPSSGQSSRSSPSSRAGGVGVARVWLLHSGAGPSPLTT

SEQ ID NO: 143074 - protein, 35 aa, Oryza sativa
  Clone ID: PAT_MRT4530_44018C.1.pep
FAVYPRDAADRRRPSLALLGAEAAMRAAVAAKERG

SEQ ID NO: 143075 - protein, 220 aa, Oryza sativa
  Clone ID: PAT_MRT4530_44019C.1.pep
YKSIKTIGWKSVRWRWPWRFGMEAVVAHGAKQSRGFAGRGNGQRGQKHAIVYSCHDRWVATKVKQASSAKRGQLPCSVDGSGKVFFGDVTCQVIVTQVQVEQLGTYLADQTFHTCMLISVYATEVKLEDMAGEVATGQKGVPFPWHASDGGGTRAEFRYGIAWIARDKVVVASRRRPRRRRSNGLPVGFMISWETGQLREELDRANRANSARARKISRHE

SEQ ID NO: 143076 - protein, 61 aa, Oryza sativa
  Clone ID: PAT_MRT4530_4401C.1.pep
MEVISQRWDEPEVTVELVTWDGGGGSSSILTFEKVGVLEDDVVAPPAGAHKGVALAGLVGP

SEQ ID NO: 143077 - protein, 675 aa, Oryza sativa
  Clone ID: PAT_MRT4530_44020C.1.pep
MAPMPAPAVALAVLVLLSAVPGYFSDDLNTDAQALQALRSAVGKSALPSWNSSTPTCNWQGVTCESGRVTELRLPGAGLMGTLPSNVLGNLSALRTLSLRYNALTGPIPDDLSRLPELRAIYFQHNSFSGEVPASVFTLKNLVRLDLAGNKFSGEISPDFNKLNRLGTLFLDGNSFTGEIPKLDLPTLSQFNVSYNKLNGSIPRSLRKMPKDSFLGTGLCGGPLGLCPGETALTPAGSPEVQPAGGGAADAGGASSGTKKKLSGGAIAGIAIGCVFGVLLLLALIFLLCRKKSSSSTPATAVEKGRDLQMAPMDMEPKGQNGSAAGNGAHVGAAAAAPAAATSAAVAAAAAAAKTGGATGGSKKLIFFGPMAAAPPFDLEDLLRASAEVLGKGAFGTAYKAVMESGSAVAVKRLKDVDLPEPEFRERIAAIGAVQHELVVPLRAYYFSKDEKLLVYDYMSMGSLSALLHGNRASGRTPLDWETRSAIALAAARGVAHIHSTGPTASHGNIKSSNVLLTKNYEARVSDHGLPTLVGPSFSPTRVSGYRAPEVTDIRRVSQKADVYSFGVLLLELLTGKAPTHAVVNEEGLDLPRWVQSVVREEWTAEVFDQELLRYQNVEEEMVQLLQLAIDCSAQHPDRRPSMSEVAARIDEIRRSSLGDRPATDSAGEGEEPSL

SEQ ID NO: 143078 - protein, 42 aa, Oryza sativa
  Clone ID: PAT_MRT4530_44021C.1.pep
MSGDQADDVREELSVGRDDSAFVEIVLDNAVYSTTTYSNIIV

SEQ ID NO: 143079 - protein, 706 aa, Oryza sativa
  Clone ID: PAT_MRT4530_44022C.1.pep
MLAGYVYGGGILAVVLAVVVVTLPLPATAAPVAECDPGVANTNVTGNSAFDRNLGLLAAALAANASAAGAPGFAVRTAGAAPDQVYALALCRGDVNASACRACVAAAFVDAKGVCPGGISLYEDACLIRFTGQSFMDFLRPDKWQVSQMTETDLLLVLNSWIPGQASGNVKVPEVGWFNAAVAKILAALVEHAWATTTTTTTGNNSTTTIKYFATGEESFNPKIYGFAQCVPVLTPEQCKECLRSLHDNAKTVYMGNSLRLMYSVRPFYGGRATLQLSPPPPPVVETPVEAGAGKKKSAAGVAAGLACSVLVLLILAVFAFVRFKRRTKAVEADHPLKKITRAQCMIFDLPTLQEATENFSENNKLGEGGFGSVYKGVLSDGQEVAVKKLLGTSGHGLDQLHNEVLLLAELQHKNLVRLHGFCLHQGETLLVYEYIKNGSLDNFLFGNFTSHSNISYFFTLLEEIPKDINRGNALNWEQQYNIILGIAKGILYLHEDSSLRIIHRDLKSNNILLGEDMEPKIADFGLARLLGEGHTHTRTTRVVGTFGYMAPEYAIDGNVSTKIDIFSFGVLVLEIVTRRRNCNSDDHDLVNLLSDVWNCWTKGTVSQMIDQSLHGYSQSQALRCIHIALLCVQSDPNDRPQISSVIFMLTRENMELQPPAQPAFFFGGGSASSSPSFGQRSYVYDRCGFDNISVNGVTLTEPYPR

SEQ ID NO: 143080 - protein, 360 aa, Oryza sativa
  Clone ID: PAT_MRT4530_44023C.1.pep
MVETTVDVMIRKGTNMRLESYEFLSDFKHGNAVVLLDYTESGNKGSFIVTQVDGSFTAWFETGGKELCFDSSGHITQLFKDMIVDFYDLTWSLHKRHLVMQNFVKENIYVKIFDGVPKLMILLTEVKLVDQLGPFKQDWSHVQGLMTWCKEQSGLKMDFLTKSFYDFIGSTDCTVIKLRNYPDDWDEKKKGDYLLTLAEVNHGVLKDKLKSRDDFHWPFVKLPKLEQNLPPMLQQILSGERQMKRKFDVTFFCDYINLLRNSYKKFNELPENVKALCINQDGFIKLIDGWSPEFWTKIYEKIGTLLDLNDGDAGARADILRTYGAVLQDLVQGGEGAVDEIGFGSGAVSHTRTIQVVSKD

SEQ ID NO: 143081 - protein, 44 aa, Oryza sativa
  unsure (1)..(44): unsure at all Xaa locations
  Clone ID: PAT_MRT4530_44024C.1.pep
MEHXSCXLXLTQPPPPSPMAPVXRGXSXXVXHRGXVDDGSRRER

SEQ ID NO: 143082 - protein, 134 aa, Oryza sativa
  Clone ID: PAT_MRT4530_44025C.1.pep
PSLGKTAVMIAKSSPSSSAPWPPPKTARAPSSPSTRRPPPLQPRRRRRPLRRRSPASVRARAAEPSSEVTSSPTSSSPSSVSRRGPDGSRPSVLDQIPSFPESPFSPEKSLKSSKASKASHTDPKQPFEHVDPI

SEQ ID NO: 143083 - protein, 68 aa, Oryza sativa
  Clone ID: PAT_MRT4530_44026C.1.pep
TVRSQGATTGFHNDVSLPCSIARSQSPKAPGMLSRILLSVVSASIKDFGPSMFQCLHIKDECSLAQPV

SEQ ID NO: 143084 - protein, 1076 aa, Oryza sativa
  Clone ID: PAT_MRT4530_44027C.1.pep
MARPEEKLRCTKEPFIEDVGTRRIKSIRFSMFSGNEVRQSAEVQVWNSRIYNHEMKPVPNGLLDTRMNISHFCVSLVGSTGVAKKGRAGLIILHDCSKTLDGSTEELRDALSHKKEKLSISAVRMLDPAIVLSLFKRMTDEDCELLNLGDRPEKLIVTEIAVPPVPIRPSVFVAGGRMSNEDSITVILKSIANTNSILKENLQTGGQFMKCFDCWQHLQLQVVEYINSDAPSLPESQHRGLVQRLKGKTGRFRGNLSGKRTEYTGRTVISPDPNLRITEARIMPWRTLRFNESVCNPYNADFDGDEMNLHVPQTEEARTEALMLMGVQNNLCTPKNGEILVASTQDFLTSSFLVTRKDNFYDRSSFSLLCSYLGDAMENIDLPTPALIKPIELWTGKQLFSVLVRPNACTKVFLNLTVKEKIYKTPKGSTLEPEAMCPNDGFVYFRNSELLSGQVGKATLGNGNKDGMFSTLVRDYNSHAAASCMNRLAKFSARFIGNHGFSIGVDDVQPGEHLNQEKKMKIDGGYKDCHDLIASYSKGALRLQPGCNAAQTLEQSITRVLNEIREEAGKVCMNTLHWRNSPLIMSQCGSKGSPINISQMVACVGQQSVGGRRAPNGFIDRTLPHFPINSKTPAAKGFVANSFYTGLTATEFFFHTMGGREGLVDTAALVLAVECFISGTVVRCMKTFTALCQFYVEVKTAETGYMSRRLMKGLEDLSVFYDQTVRNASGGIVQFLYGDDGMDPAKMEGKDGKPLNLDQLFMKVMEIINAAKKISTPIITAELLSEKDVLSARIVKGSMEKAVLGEVAEAIKIVLKSSQPNLVVKLDMQRIEALHMGISADSVQLSILNHPKIKLKSEHVRVIDKSKLRIYPAGIDKSKLLYELHHLKSMLPKVIVKGIPTVERAVISETGEENDKRYKLLVEGTNLLAVMGTPGVDAMKTKSNHIMEVNRTLGIEAARRSIIDEIQYTMKSHGMNIDSRHMMLLADLMTYKGEILGITRYGIAKMKSSVLMLASFEKTAEHLFNASYSGREDQIEGVSECIIMGIPMQLGTGILKVRQRLDHLPEFKYQPDPILA

SEQ ID NO: 143085 - protein, 91 aa, Oryza sativa
  Clone ID: PAT_MRT4530_44028C.1.pep
NLSSPRFYCQGTEIKPSKFFEGPKAYIFNKGIILRCKKSRPMSHIGKIHFFPSNFSFCNGTILFCNPKVCKFVGIKTGHPCEIKISYSRNE

SEQ ID NO: 143086 - protein, 1300 aa, Oryza sativa
  unsure (1)..(1300): unsure at all Xaa locations
  Clone ID: PAT_MRT4530_44029C.1.pep
MARPEEKLRCTKEPFIEDVGTRRIKSIRFSMFSGNEVRQSAEVQVWNSRIYNHEMKPVPNGLLDTRMGAANKLGECSTCHGSFAEFPAGLSSSEFVFPTIGGREGLVDTAVKTAETGYMSRRLMKGLEDLSVFYDQTVRNASGGIVQFLYGDDGMDSGIMEGGDGKLLKMGRSLMKVMPACPQRGQNRIAALXMFHILNDRLSELVVSSDYTVELYTLLLDEDHVGERHSSFEESIAANISGISVKQLQVFLDTCFTNSNLKENLQTGGQFMMCFDCWQHLQLQVIEYINHYAPSLSKYLHLGLARRIKGMTGRFRRNLPIKSAEYTARTVVLPDPILKRSEVDIPLLVVRVSTNLERVSNYTILMLHQCIRSREAQHPGVSADSVQLSILNHPKIKLKSEHVRVMDKSKLRIYPAGIDDIVLFNRQPSLHRMSIMSHRARIMPWRTLRFNESVCNPYNADFDGDEMNLHVPQTEEARTEALMLMGVQNNLCTPKNGEILVASTQDFLTSSFLVTRKDNFYDRSSFSLLCSYLGDAMENIDLPTPALIKPIELWTGKQLFSVLVRPNACTKVFLNLTVKEKIYKTPKGSTLEPEAMCPNDGFVYFRNSELLSGQVGKATLGNGNKDGMFSTLVRDYNSHAAASCMNRLAKFSARFIGNHGFSIGVDDVQPGEHLNQEKKMKIDGGYKDCHDLIASYSKGALRLQPGCNAAQTLEQSITRVLNEIREEAGKVCMNTLHWRNSPLIMSQCGSKGSPINISQMVACVGQQSVGGRRAPNGFIDRTLPHFPINSKTPAAKGFVANSFYTGLTATEFFFHTMGGREGLVDTAALVKTAETGYMSRRLMKGLEDLSVFYDQTVRNASGGIVQFLYGDDGMDPAKMEGKDGKPLNLDQLFMKVMATCPQRGQNTLSPGEILQILNDKLSEHDASSDDGCSEKFKQLLTYFLEDRIKLLKSTRRALLLDEDHVGERHSSFEESIAANISGISVKQLQEIINAAKKISTPIITAELLSEKDVLSARIVKGSMEKAVLGEVAEAIKIVLKSSQPNLVVKLDMQRIEALHMGISADSVQLSILNHPKIKLKSEHVRVIDKSKLRIYPAGIDKSKLLYELHHLKSMLPKVIVKGIPTVERAVISETGEENDKRYKLLVEGTNLLAVMGTPGVDAMKTKSNHIMEVNRTLGIEAARRSIIDEIQYTMKSHGMNIDSRHMMLLADLMTYKGEILGITRYGIAKMKSSVLMLASFEKTAEHLFNASYSGREDQIEGVSECIIMGIPMQLGTGILKVRQRLDHLPEFKYQPDPILA

SEQ ID NO: 143087 - protein, 94 aa, Oryza sativa
  Clone ID: PAT_MRT4530_4402C.1.pep
PGEKGCRFFPQGFKGSVPGFSVNPVDPPGAGDPFVGSPLVKVPKGDSLFPPPEKLRGGLQFFNGGGALCPPQKGALPGVPPLPVGQGVFPKAPP

SEQ ID NO: 143088 - protein, 156 aa, Oryza sativa
  Clone ID: PAT_MRT4530_44030C.1.pep
GRVGGTQMTLKTFHFAGVASMNVTLGVPRIKEIINAAKKISTPIITAELLSEKDVLSARIVKGSMEKAVLGEVAEAIKIVLKSSQPNLVVKLDMQRIEALHMGISADSVQLSILNHPKIKLKSEHVRVIDKSKLRIYPAGIDKSKLLYELHHLKSM

SEQ ID NO: 143089 - protein, 69 aa, Oryza sativa
  Clone ID: PAT_MRT4530_44031C.1.pep
MGHSTAKAKRIWSLHHQGCQPRALPPCHRQQLAMVETTDTVLARLMHLALNKKEFTKEGKELASSNRHD

SEQ ID NO: 143090 - protein, 119 aa, Oryza sativa
  unsure (1)..(119): unsure at all Xaa locations
  Clone ID: PAT_MRT4530_44032C.1.pep
MSTTGDNSNTRYKEKEPPVNINGGNTASNSSGELFSXGYNVSLLLFVLCFLQLSVTILLRCIVYIDAYSILSMLMLITFTTITGSIPIANIMLIILLSFFPQISWVSTLYFFFAFLSSL

SEQ ID NO: 143091 - protein, 102 aa, Oryza sativa
  Clone ID: PAT_MRT4530_44033C.1.pep
MDTATRHQFERRTIPVHNNVLLTSTTRYGNLVERTAGHISIRIGGYRLPDDLIRSDRSCSSLATLPKLCSPSHSFDSTFVMVSNKGKGMIGGIGTPSTRQLN

SEQ ID NO: 143092 - protein, 65 aa, Oryza sativa
  Clone ID: PAT_MRT4530_44034C.1.pep
LVTAVQAVCDLGHLNGLTQIHCYANRHLLEKDICSGKNVLLDYVKSCLTLICLTCMLIMHQCTSF

SEQ ID NO: 143093 - protein, 292 aa, Oryza sativa
  Clone ID: PAT_MRT4530_44035C.1.pep
MGSDAEPAKGLLPYLQRADELQKHEPLVAYYCRLYAMEKGMRIPQKERTKTTNSLLISLMNQLEKDKKSLTLGSDDHLHVEGFALNVFAKADKQDRAGRADINTAKTFYAASIFFEILNQFGELQTDVEQKQKYAIWKAAEIRKALKEGRRPEAGPPGGDKDEAPDSTTTNSHLTDMGRSQSFGSGQHGNEASSQHVDQDFSRRDSFSAVQPGNNALRHSTEKFNDHVSAQSPYSPPPPQSQTPPQSQFSSPAQSSYSSPSYQGTDYPSSDVHKPPHGYSSAPYTSTDYFTN

SEQ ID NO: 143094 - protein, 33 aa, Oryza sativa
  Clone ID: PAT_MRT4530_44036C.1.pep
MGFMGYRCEYEPGYKQMHVGDEANFLPCVIPNS

SEQ ID NO: 143095 - protein, 85 aa, Oryza sativa
  unsure (1)..(85): unsure at all Xaa locations
  Clone ID: PAT_MRT4530_44037C.1.pep
LDLKIELSLVXTPSKPGKDAXEIFYCPIGFLDLTPQGCTTHLVIRPYFFQLEYACCPLNGCHLLISQTSLSGHAPFNPSVLDXHL

SEQ ID NO: 143096 - protein, 1887 aa, Oryza sativa
  Clone ID: PAT_MRT4530_44038C.1.pep
MGCVSSKQFHGEEQRGGEGKPRRRPCPNSLRRLVSYNSSKRHEHFEEEDEEGVVVSATSSSAGHRVGNDVSTARLIRKPPAPVVEAVAVPVAALPDEAASVAVSVVDVERPVAAPANWRRAPNGAAEQEPRSGGTRSEAKPRITDVVPNGVQGGHAAAGWPRWLTEVAAEAVRGWQPRKAESFEKLDKIGQGTYSSVYKARDLESGKIVALKKVRFANMDPESVRFMAREIHILRRLDHPNVIKLEGLVTSRMSSSLYLVFEYMEHDLAGLAATPGIKFTEPQVKCYMQQLLSGLEHCHNRGVLHRDIKGANLLIDNNGVLKIADFGLATFFNPNQKQHLTSRVVTLWYRPPELLLGATNYGAAVDLWSAGCILAELLSGKPIMPGRTEVEQLHKIFKLCGSPSEDFWANLKLSRATIFKPQHPYRRCVSDVYKDFPPPALALLDCLLAVEPQNRGTAASALGSEFFTTKPYACDPSSLPKYPPSKEYDAKLRDEEARRQRAAAVKGHESEAGRRKQLPAPNGNNELQQRRVQLNPKSSSNKFIPKEDAVTGFPIDPPGRAGDNVYPQRAPLMHAGRSSSTLGRSSGTDQNAQRFYTSQIAAAEMSTATGGQRGNATKLSSNLGESARRQYLREHRSSSRYSQLAAAEPSDRPEWTHQFQERPSSSHRKDDGAANKEPTVVNGAKKSRIHYSGPLMPPGVNMEEILREHERQIQQAVRRARLDMGKGKNHVERDQSESLLYTTQNGRPKDGESTSVKKGTLSPHGSRESPPPSPPHPASSLSAILYSCTARRARRPGELAHARAATLGLAAHPSVLPRLASFYLALADLPAARAAVEQAAGKARAFPWNLLIWGYAGRGLWEDVILSYEKMVGWGVAADRFTYPSVLRACGELREVTIGRNIEQRIRRCRYGLDMYVWNALVGMYAKCGELEDARRVFDGMAVRDVVSWNTMVSAYASTGKSNKAFELLQQVPGANVVTWNAVAAGNLKAGNYDEVIRLVSQVRGYHGTGVDSVTIVIGLKACGRTGYLSVGRELHGVAVRLCFDSLECVVNSLITMYSRCGMMSSACLLFRACSVRSITTWNSLLAGFAFMEQIEEASLIFREMIGFGVCPNGVTVLTMLSLGARVGHLCHGRELHCYILKHELDSSKLMENSLVDMYSKCRQMVVAQRVFELMQFRDKHAYTSLVLGYGLQREGHVSLKLFDEMIVNSIEPDHVTFVAVLSACSHSGLVTQGQLLFAKMVSIFGIAPRVEHFSCMVDLYCREGLLKMAEVIIDKMPFQPTAAMLATLIEACRIHGNTEIGDRAAKKLLAMRTNNPGHYRLIANMYIAAKCWPELAKVRSLMSTLELNMIPSHSLLESEYDVCPVEQDNFLNHVTYDKFRSSTALPSQNTGVSDTNFATALASLLYLATHTALELATKMDVNTGGGGGVLVVSRRMIRPEFKELPPEHDTTVHLTPWDLRLLTVENIQKGILLPKPPTGGETLVEHLASSFARALGRFYPFAGRLVVEEVDGGASPASSVSVSLRCNDEGAEFVHAAAPDVAVADIAASLHIPRVVWSFFPLNGVVAAHAATESLPVLSTQVTELSDGVFIAMSVNHVVGDGTNFWEFMNTWSEISRSSGGELGISPSASTSTSPPLVVKRWFLDNCTVPIPLPFAKLEQIIPRSEHQAPVQECFFAFSAASIRKLKAKANDEIAGAAVAISSLQVLLALVWRAVSRARGLAPRQETAYVVVVGCRGRVGGISSGYMGNAVVPGAVRLTAGEIMERGLGWTAWQLNKYVASFDEAAMRGALASWPRRPDFFSVLSLLGGAAIITGSSPRFDVFGNDFGWGRPATVRSGGANKFDGKVTVYEGPDGAGSMSLEVCLTPAALAKLVADEEFMGAVTTP

SEQ ID NO: 143097 - protein, 114 aa, Oryza sativa
  unsure (1)..(114): unsure at all Xaa locations
  Clone ID: PAT_MRT4530_44039C.1.pep
MAMEAEALLPEPEPESPPMLAVNHLGGPGCRGSSGRRTGAFFLIGAEVGEWMAYSAIMGNLGSYLTGPFRQPTVVTAAVENQXMATWMFLPMLGSVVTDXWLGRYRTILWASLL

SEQ ID NO: 143098 - protein, 58 aa, Oryza sativa
  unsure (1)..(58): unsure at all Xaa locations
  Clone ID: PAT_MRT4530_4403C.1.pep
MXLLSLINISLAHTSFSLIRPTPRMVHNPVAHHIWGLQHSISLVGHISPPTXDSVSHY

SEQ ID NO: 143099 - protein, 92 aa, Oryza sativa
  Clone ID: PAT_MRT4530_44040C.1.pep
MGKIDDPLKLGEEFLEVGSHGSSKDLSVTGDLGGCSRLRHRCSASRLLCQLRKRLRRPLFEPVTVWHCGEMRGEQGREKMGEEKCGVGIWFS

SEQ ID NO: 143100 - protein, 59 aa, Oryza sativa
  unsure (1)..(59): unsure at all Xaa locations
  Clone ID: PAT_MRT4530_44041C.1.pep
PRSDRSASDMAASQRSVAVSAKCAAASWAEERRPGGAPXGPPALGSPGGACPSGRAPRS

SEQ ID NO: 143101 - protein, 103 aa, Oryza sativa
  Clone ID: PAT_MRT4530_44042C.1.pep
MKTTLAVVEGTRAHIVNLANSRASRLNERLIDPAIESRSIAGATPAPFEMETAMVLLLLALVAFLLCYPLVLPPLPPSPPALFIWIPVFMLLLLFALALFPVQ

SEQ ID NO: 143102 - protein, 91 aa, Oryza sativa
  Clone ID: PAT_MRT4530_44043C.1.pep
MEQVAPPPVRYCGVTEDYEQQLDEEPPSPLSPSRVSSPLPLPEQKLSTAYLVELRPRRKNALINNGPRYRCGDHGYPISTRRWYSSWAQDT

SEQ ID NO: 143103 - protein, 86 aa, Oryza sativa
  Clone ID: PAT_MRT4530_44044C.1.pep
AVVFVYLYSSRQHNSGTISQARIFHQQRGTGWTGDCGSSGCGIRRQRLEEGDGPDRWAPPVSNQERREGVRAGPTGRASVGTEGGL

SEQ ID NO: 143104 - protein, 420 aa, Oryza sativa
  unsure (1)..(420): unsure at all Xaa locations
  Clone ID: PAT_MRT4530_44045C.1.pep
MATRPSPRSRDSARPKSTSGRPPSSPRSSDTTRRSSFTAASSSDKPVPSFLRPTVSSSLHSSSSSSPSSSSLLSSSPSSKGTGTTPRRSADKAPSASAASSRPITPKDKAPAVATSRPITPKDKAKAAAASTSRWSAVSPRQLMQKASNAFTRGSSSKSRAXRKTRRRPPRRRPRPPPRTRPLRRRPRPSARRPPHRRPRRLERRWPVLRPGRREPSPRRSTTSNPLKRRRPNRHLPPPRCKKRRXLREPSSRRSTTSNHLKRPPSRHLPPSPCKKKQRLRRPKQSKKNNRMRRRKKSSRQWRRKFKTSRLARKQRRKPSPSRRXRRREXPMRRSRKRRRRKPVPLQSRKQSFRGVQRMSRHPTPLSKKRRSNLQRRMSQMNQNPPRLKRWPSRRRSRPMRANKKRRQNQKREWRTLKQA

SEQ ID NO: 143105 - protein, 289 aa, Oryza sativa
  Clone ID: PAT_MRT4530_44046C.1.pep
CSRRSQPIATARPRPHPALSGGGASGAWPVSSACSRRTTVATTGSASPPRTPRRRWSALRRLHRHHSGRRCRWRRIHLRRRDSRRSSRCIQRRLRSVGGAPATRRGARRSRRSTAGPAATAPARRRRPSSPASWAWRSPRRRLPPRRRRGHYRLDPLPLPRRRRRRSGGSCWARWRSATRTSRRCGGSSPPSAPPRCARPPRPTPRRLQKPQGRDQTTGGRTTAAATSIRRRRRHRRSRGPRSTTRVLTPCWTPSPPRDSHAGNGRLPARISMQIASSAAVPPPSDRRS

SEQ ID NO: 143106 - protein, 73 aa, Oryza sativa
  Clone ID: PAT_MRT4530_44047C.1.pep
SSLASSSSPPPPPSSPPLSSSRVGPFPCRHLPDDDPNSGFAPDNLDLLRNHPVPDRLLVVSAGVAANLLSAFL

SEQ ID NO: 143107 - protein, 1001 aa, Oryza sativa
  Clone ID: PAT_MRT4530_44048C.1.pep
MTSNLGRSQQSIRFPVSYSVAYIVWKIREIIGSLICIGIPGQISWEPDSGFHRCKTEGLVWPKVRFRKSPKFGSSICNLGFELYVSPRYLMAAADGGGDKGIIVEMVSHPKPIGSGEGALEILGRELRVEGMAEEGGSIQRPNKTSTYKKRSKESPNINPSQGPTTFTEGVVDDEEEDALCVNLEEVVKIAGRYDLSEILLVKDSKPRDALLVAHFDGFTSPSEVPLDVVPIWVRIYDLPLALMTKAQGELFGNKLGKVHEVDVEEDGQNLHDLFRIRVDLSVKHPLKSQIAIEVSVQGSASSSFVRKKKCDWWNEEVLPRVDAYDGFEFREKEGDHKIDDQLADQAGKLSVTEEEVQKNAVVAARRQQDQYVADTCDGTGKPPAYEMIPAIKDLYKQPSFGDGDLVYGEPRVENRHHMRSLLSSLKQVSNLPWMVVGDFNEALWQFEHFSLKPRNESQMQSFQDVLQTRDLHDLGFSRVPYTCDNRREGRNNVRERELAISEIIKDSWESAGDKSTLGGIKSALSKVMTSLCTWSKRKFKNVSWKIEKIRKKLALLQERNADNIEIRQTMDQMNTSVSRRDDVVTTVSHLMAEGSDSQGSACRLYFKHKTAETKEHETSADHVLNMTIRYELHSRLENDQAIDKTAQRQLEKEKDHLRKVLFRIVCIVKFLAKHSLAFLGTNSKLYEDSNGNFLGHRKGQLANEGYNDTNGNFLGLIEMLAEFDPVIQEHVRRITSEETLLHYLDPKIQNELIHLLASAIKSEITCGRAKDFFGIIQRIYTTFANSTKKWQILKDNITGLTLKSVSATRWESCVESVKVIRFQCADIREALLQVSDVDNDVKTSSEAKGLANNELREYEFIVAIVIWYEVLYAINLVSKHLQAKDMLIDVAIEKVQGLISFFKGYRETGFLQALEAAKGIALELDISTTFRKKREIKRKRQFDENPDDTNVATQSAEESFRINYFIPIVDQAISSLTRRFERYQHYQKNFGFLFTADSLR

SEQ ID NO: 143108 - protein, 37 aa, Oryza sativa
  Clone ID: PAT_MRT4530_44049C.1.pep
RLYLIKTNNKLNLPYQQKTKRAITNITKNHHDVQPKL

SEQ ID NO: 143109 - protein, 153 aa, Oryza sativa
  unsure (1)..(153): unsure at all Xaa locations
  Clone ID: PAT_MRT4530_4404C.1.pep
MLTIKFGNICIGKKIGLKRNQTXELSRKQSKNRLRFGSAKSESDWVKXYNRFRQYNLYGXKSAAKTYGILEFVRDNSRVRYGHILIKSTGTLAYPKTXFWTYTGIKQISQASCFSXHQRTSTKKKKTERKPQKTEKKKKAKTEKKTNRKNCRP

SEQ ID NO: 143110 - protein, 44 aa, Oryza sativa
  Clone ID: PAT_MRT4530_44050C.1.pep
FSIVKIRLSSLDCAESECFIFQSSFESWYCDHAFITKCCIIIML

SEQ ID NO: 143111 - protein, 60 aa, Oryza sativa
  Clone ID: PAT_MRT4530_44051C.1.pep
SRARSERIHIDAALLSALVDRWRPETHTFHLTVGEMVPTLLASFGGVLPVALEDLTDGHG

SEQ ID NO: 143112 - protein, 44 aa, Oryza sativa
  Clone ID: PAT_MRT4530_44052C.1.pep
DLDIDRKRAQAQALLAFNLPSTNGNDPRDERAPGSITTPGGVME

SEQ ID NO: 143113 - protein, 121 aa, Oryza sativa
  Clone ID: PAT_MRT4530_44053C.1.pep
MSTPPEQSASQSNVQMAAILDELKKINITLQEHSTAIKSLESSKGIMRPLPSPTPHAETHGSNQLARPEPKRHKCKRLFWLGAPFADDDHNATPEADDDPGISLYALSGVRRCNSASRSTA

SEQ ID NO: 143114 - protein, 50 aa, Oryza sativa
  Clone ID: PAT_MRT4530_44054C.1.pep
HLSLSGSRARCGTSHRNRRHRWRGCAATESFTRAEAGRVRAGGHQGRARV

SEQ ID NO: 143115 - protein, 59 aa, Oryza sativa
  Clone ID: PAT_MRT4530_44055C.1.pep
MAAAPLSSCAATVATPAAPHRLFVFIRVGRVDPAVPEDQLFIAVDVEDFVSDKGKSYLP

SEQ ID NO: 143116 - protein, 232 aa, Oryza sativa
  Clone ID: PAT_MRT4530_44056C.1.pep
MRKVAVAMFFVPMVMSASWSPAMARPYADQASGAGGSGNIALPPPPSPHWTGGHRLPPLEQKFSLCNHVPQVPNLYKFYMKNAIVFIEIEYKKSKKLITASPLARTRSALLRSPDLLALAATSGSPALLTFGHLSCWASLGPSGIFRAGLTQARPNGRAVPCRPACLNLRPRHGPTTGRAGPAHSRAVLGVLSLVLGHRALGRPKKARPKSQLYTHVASNNRSIAPPWINIT

SEQ ID NO: 143117 - protein, 478 aa, Oryza sativa
  Clone ID: PAT_MRT4530_44057C.1.pep
MTRAARMAAVAAAVAAGDGGACGGDGWQAITTEGADASRFRWCIRFEVEAAVSLGGKLGNDDTVEKSEPPMLFWSTLVTTSYVGLRQWFQLLGAGGLYSLRRIPANRLFYPSTRAAEEATAKSQESFMEEHGGRKHPGLHTMEMLEKLPRSTFAFEPAPVDRYHLRSLDFACLLGHESRMLTADNRGNTVVFDADSSSVLAFPNLISPKRYNAISLSIINNDGSNNNNGLEPPPEDGLYVMTRSPDVHRIKDGCFEVLNYSSSSADFREMTPHWVSLPPPPFAGCMNAEITSYTVVHGTTIYISCNKPIHSTYAFDTVSHEWRRLGSWTMPFHGRAEYVPELNLWFGLSARHPYSLSAFDLLSDDSSVAAKPPTVHHTWVDLDIPQSWLPWNIHLINLGCGRFCIAKMFHSISGDGTFCSYSESDDGTIEDSDPIHGSFAIFTGLHMVRPRGKHDDVQMIKHKFMYYQFFDDYIEWVI

SEQ ID NO: 143118 - protein, 489 aa, Oryza sativa
  Clone ID: PAT_MRT4530_44058C.1.pep
MAHRCLACRVPLCRQLALSVLARVGDAAMPDAMYGIGDDLTGWEILDLLDDDEMVCGEVPAYKERVDSLAARPGYGSAGKKLSIFTNYFGVSVNCPAIYLYKVSIHPEPKLGVTKKAVLSEIVKLHGERVFRNKIPVFDTRKSLYTAHALPIVSETFVIKLDDDEDKTRTKGVHEVTIQFYKRIDLQDLQSYHTRRNASQGAIQAIDAVVRVLLSSCLSAPGTIFSTKFGPIIDTQEGLEFWRGCYKGVRLSQFGPGLNIGCLKNMVFIGTHYIPAAPFYKPLPVVEFVAELLNRTDVNQLFSTEEYDKVEKALQGVFVETTHRTDKTIRYKIKGLSVVPLEDLMFAEGAKENFTTTVVDYFQKRYKYKLKYIYWPCLQCGSSRDIFLPMEVCKILPGQRYCRKLTTRQAAKLLKATCERPHIRKIAIMKVRNNCNVERCVEEFGIRVNGLPAIVCGRILPTPELKYHVSGNEKTCVPTGGRWNMINKS

SEQ ID NO: 143119 - protein, 37 aa, Oryza sativa
  unsure (1)..(37): unsure at all Xaa locations
  Clone ID: PAT_MRT4530_44059C.1.pep
DIDHPPRVSWPAPIXNQQTAANEVRSKQIDPLLNARG

SEQ ID NO: 143120 - protein, 169 aa, Oryza sativa
  Clone ID: PAT_MRT4530_4405C.1.pep
GDATAALGAGRRRHAGGDAMAARGSERRCDGLRCGARDGRRDGRRATRRVAWERRDRRGDDGTARRGAGLGARRRRHDGDGRRDGDGAARGSRATATRRRRGAAAAMGRRRTAASDDGDGARRLGARGGDGTRERRQDVDRDGDSGDGRGEAERRAARGARGSVAEEGL

SEQ ID NO: 143121 - protein, 633 aa, Oryza sativa
  unsure (1)..(633): unsure at all Xaa locations
  Clone ID: PAT_MRT4530_44060C.1.pep
MARRAEEATRREEDRPRREDEAAAAAGGEDGAAAAAGGRGDCSGAHTVVPVAGDANASFRSRNVLGAGTRTAKVVAVGDDDVTLRACVDERPTQPLRRICFDRFKPWMLCSALAFGHKRGGISEREPRARVQSKRSSYDRESVTARGGSEAGAGDGGGGGRQRAAKGALEMKEKGSRAAVDERYAQWKSLIPVLYDWFANHNLVWPSLSCRWGPQFEKATYKNRQRLYLSEQTDGTVPNTLVIANCEVVKPRVAAAEHISQFNEEARSPFVKKYKTIIHPGEVNRIRELPQNSKIIATHTDSPDVLIWDVEAQPNRQAQLAQMESRPDLVPPDSRPDLILRGHKDIAEFALAMCPAEPYVLSGGKDQSVVWXSIPDHISALXGDSLETESSPGASGSKGKTANDKDSPKVDPRGIFLGHDSTVEDVQFCPSSAQEFCSVGDDSCLILWDARSGTGPAVKVEKAHGGDVHCVDWNLHDVNYILTGSADNSVRMWDRRNLGSGGAGIPVHKFEGHKAAVLCVQWSPDKASVFGSSAEDGFLNVWDHEKVGNKKNPNAPAGLFFQHAGHRDKIVDFHWNSSDPWTIVSVSDDGESTGGGGTLQIWRMSDLIYRPEDEVLAELENFKTHLASCAPRS

SEQ ID NO: 143122 - protein, 61 aa, Oryza sativa
  Clone ID: PAT_MRT4530_44061C.1.pep
DYISKANIYFKDSIESSFSKIACSIPPTTATTPPPPRPPPPPLPPAARVRVLEEIEIERAP

SEQ ID NO: 143123 - protein, 1162 aa, Oryza sativa
  Clone ID: PAT_MRT4530_44062C.1.pep
MGPFRRAGGRTGLHGASFTPWPASAPPTATTRPPGGGPAAEGGSAVGGPGFTRVVHCNNSAVHRRKPLKYPTNYISTTKYNILTFLPKAIFEQFRRVANLYFLLTAILSLTPVCPFSAVSMIAPLAFVVGLSMIKEGVEDWRRFMQDMKVNNRKVAVHKGEGEFEYRHWEDLAVGDVVKVEKDQFFPADLLLLSSSYEDGICYVETMNLDGETNLKVKRSLEVTLPLEEDESFKDFPRIDKILLRDSKLRNTSFIYGVVIFTGHDSKVMQNSTESPSKRSTIEKKMDLIIYILFTVLVLISLISSIGFAVRIKYDLPNWWYLQPEKSNKLDDPTRPALSGIFHLITALILYGYLIPISLYVSIELVKVLQAHFINQDLHMFDEDTGNTAQARTSNLNEELGQVHTILSDKTGTLTCNQMDFLKCSIAGVSYGVGSSEVELAAAKQMASGDDGQDIHVQDVWENNEDEIQLVEGVTFSVGRTRKSSIKGFSFEDDRLMQGNWTKEPNSSTILMFFRILAVCHTAIPEVNEATGALTYEAESPDEGAFLVAAREFGFEFFKRTQSSVFVREKFSSSNGPVEREFKILNLLEFNSKRKRMSVILKDEDGQILLFCKGADSIIFDRLAKNGRMIEADTSKHLNDYGEAGLRTLALSYRVLDESEYSSWNAEFLKAKTSIGPDRELQLERVSELIERDLILVGATAVEDKLQSGVPQCIDRLAQAGLKIWVLTGDKMETAINIGYACSLLRQGMRRICLSIPTDDQVAQDANKAAKESLMSQIANGSQMVKLEKDPDAAFALVIDGKALTFALEDDMKHMFLNLAIECASVICCRVSPKQKALVTRLVKEGIGKTTLAIGDGANDVGMIQEADIGVGISGVEGMQICYFFYKNIAFGLTIFYFEAFAGFSGQSVYDDWFMLLFNVVLTSLPVISLGVFEQDVSSEICLQFPALYQQGPRNLFFDWYRILGWMANGLYSSLAIFFLNICIFYDQAIRSGGQTADMAAVGTTMFTCIIWAVNMQIALTMSHFTWIQHLFVWGSVGTWYLFIIVYGSALRSRDNYQILLEVLGPAPLYWAATLLVTAACNMPYLIHISYQRLCNPLDHHVIQEIKYLKKDVEDQTMWKRERSKARQRTKIGFTARVDAKIKQIRGKLHKKAPSLTIHTVS

SEQ ID NO: 143124 - protein, 109 aa, Oryza sativa
  Clone ID: PAT_MRT4530_44063C.1.pep
MLKKRCDLQAPSPLSSELANGGGGLLSPRSSSSSSSSLQGFSPRSIFSVDDQAKNHPCASPRNPLSGGGQVTGLAGVLVDGEGERRCYGRTGRVLLGMMRLRVQLPQER

SEQ ID NO: 143125 - protein, 1189 aa, Oryza sativa
  Clone ID: PAT_MRT4530_44064C.1.pep
MGRSGGRRRDRLRWSKLYTFACFRSSHSNNEAAGGGPAAEGGSAVGGPGFTRVVHCNNSAVHRRKPLKYPTNYISTTKYNILTFLPKAIFEQFRRVANLYFLLTAILSLTPVCPFSAVSMIAPLAFVVGLSMIKEGVEDWRRFMQDMKVNNRKVAVHKGEGEFEYRHWEDLAVGDVVKVEKDQFFPADLLLLSSSYEDGICYVETMNLDGETNLKVKRSLEVTLPLEEDESFKDFQGLIRCEDPNPSLYTFIGNLEYERQIYAIDPFQILLRDSKLRNTSFIYGVVIFTGHDSKVMQNSTESPSKRSTIEKKMDLIIYILFTVLVLISLISSIGFAVRIKYDLPNWWYLQPEKSNKLDDPTRPALSGIFHLITALILYGYLIPISLYVSIELVKVLQAHFINQDLHMFDEDTGNTAQARTSNLNEELGQVHTILSDKTGTLTCNQMDFLKCSIAGVSYGVGSSEVELAAAKQMASGDDGQDIHVQDVWENNEDEIQLVEGVTFSVGRTRKSSIKGFSFEDDRLMQGNWTKEPNSSTILMFFRILAVCHTAIPEVNEATGALTYEAESPDEGAFLVAAREFGFEFFKRTQSSVFVREKFSSSNGPVEREFKILNLLEFNSKRKRMSVILKDEDGQILLFCKGADSIIFDRLAKNGRMIEADTSKHLNDYGEAGLRTLALSYRVLDESEYSSWNAEFLKAKTSIGPDRELQLERVSELIERDLILVGATAVEDKLQSGVPQCIDRLAQAGLKIWVLTGDKMETAINIGYACSLLRQGMRRICLSIPTDDQVAQDANKAAKESLMSQIANGSQMVKLEKDPDAAFALVIDGKALTFALEDDMKHMFLNLAIECASVICCRVSPKQKALVTRLVKEGIGKTTLAIGDGANDVGMIQEADIGVGISGVEGMQICYFFYKNIAFGLTIFYFEAFAGFSGQSVYDDWFMLLFNVVLTSLPVISLGVFEQDVSSEICLQFPALYQQGPRNLFFDWYRILGWMANGLYSSLAIFFLNICIFYDQAIRSGGQTADMAAVGTTMFTCIIWAVNMQIALTMSHFTWIQHLFVWGSVGTWYLFIIVYGSALRSRDNYQILLEVLGPAPLYWAATLLVTAACNMPYLIHISYQRLCNPLDHHVIQEIKYLKKDVEDQTMWKRERSKARQRTKIGFTARVDAKIKQIRGKLHKKAPSLTIHTVS

SEQ ID NO: 143126 - protein, 52 aa, Oryza sativa
  Clone ID: PAT_MRT4530_44065C.1.pep
MTLGRVVGQEVCLMKHLAWIKSIKASSHHKKVKFYAIPHNQDMTNLTGGNQH

SEQ ID NO: 143127 - protein, 118 aa, Oryza sativa
  unsure (1)..(118): unsure at all Xaa locations
  Clone ID: PAT_MRT4530_44066C.1.pep
RQNLLGTNAAGKGRGCDHLIGLRRRMSSFSARIQTLMSSAAAGGASRLATSMPSVNALAAQACSARRWWGWGLGWLMNRRPACARXLDMNEDEDGALGWHCRGTWWHVLYRLRAGARR

SEQ ID NO: 143128 - protein, 136 aa, Oryza sativa
  Clone ID: PAT_MRT4530_44067C.1.pep
TRPLSPPPPGPAPPPSPPPPRGRRSEMASYPVFQVSPEEAAKGKWYMATAATNYLTRDQSPMSDLKPLTGRVLSRGNGAGLKVHGSGAVNTETVAIPDVWHVPGINANLVSVPQLSLLGPKVSFDRVGCTVNRDSV

SEQ ID NO: 143129 - protein, 69 aa, Oryza sativa
  Clone ID: PAT_MRT4530_44068C.1.pep
PRLQPSRRAFLSQQASCPPDSSGATARGAATQSPAVVSPSSTLRRHPRANAWWTKATGIERSIYENETE

SEQ ID NO: 143130 - protein, 27 aa, Oryza sativa
  Clone ID: PAT_MRT4530_44069C.1.pep
TITLLLTRGIPTGITYSRLTDEYTAVW

SEQ ID NO: 143131 - protein, 224 aa, Oryza sativa
  Clone ID: PAT_MRT4530_4406C.1.pep
GGIKVKARQGNGNLTTALGVGRRRHAGDDAMAARGSERRCDGRRCGARDGRRDGWRGSGVTGGATTGRRGAARGLARGDGDTTATGDVMATGRRGARGRRRRRGLEARATARGAGLKGDRTRRRRGAEAAMGRRRTAASDDGDGARRLGVRGGDGTRERLQDVDGDGDSGDVTGGDGVRRSGGGRGEAERRTARGARGSVAEEGLGLGIKLTGTPASHQPLDLH

SEQ ID NO: 143132 - protein, 88 aa, Oryza sativa
  Clone ID: PAT_MRT4530_44070C.1.pep
SKSDECHLLPSQNTHYHPTSTSNALQASVRPPPPNMMPPPPLGMVRPPPPPSSMPAPPMWRPPPPPQQAGGMPPPPMSMPPPPPPPSG

SEQ ID NO: 143133 - protein, 67 aa, Oryza sativa
  Clone ID: PAT_MRT4530_44071C.1.pep
MAPLVSGVGGIIATSLSKGEWRKRGYDFHRMMLSLSPRYLPRIRLKNEYDSFGQQMASERMSALKLM

SEQ ID NO: 143134 - protein, 1347 aa, Oryza sativa
  Clone ID: PAT_MRT4530_44072C.1.pep
MAGANDDVWRQRFDDMMRRLEELSGLITDIDQQQRTQTLAINRLENGARAPSSRFDDLSDVGDRNGGRFAHHNVGRGDRYGRGGDGFHGHGRPGGHRFDGDGDRPPRYHKLDFPKFDGRGDPLPFLNRCEQFFRGQRTPEDNKVWLASYHLLDGAQQWYTRLERDHEPPSWHRFSELLNMRYGPPLHSTPLGELAACRRTTTVDDYAERFLDLLTRTGYLSEDQQLGEDDTDNDSATDQADAAATLRISLHAATGVRASDAMHITAHLGDTDLYTLIDSGLMHTFLSQDTAARVGRAPQPRMGLNVTVANGDKVACPGVFPDMPLQIAGEEFATDVYVLTLGGYDLDFTVLTMSFWHRVTLHGLPGHQRPRALACAPAALLDSLLEEFADVFTEPTGLPPARDRSHRIQLLPGTAPVAVRPYRYPVRHKDELERQCRVMEENGLIHRSTSAFSSPVLLVKKADGSWRFCVNYRALNERTVKDKYPIPVVDELLDELHGAAIFSKLDLRSGYHQVRMHPDDIDKTAFRTHDGLYEFLVIPFGLTNALATFQSLMNDVLRPFLRRFVLVFFDDILVYSPTWTSHLQHLRTVFTALWAAQLFVKHTKCSFGDPSVAYLGHIISQHGFAMDAAKIQAVAEWPRPRSPKELRGFLGLASYYRKFIQDFGSVAAPLTQLLRKDSFAWAPATDDAFQRLKLALTTTPVLSLPDFNRPFVVECDASGTGFGAVLHQGEDPIAYFSRPIATRHHALAAYERELISLVQAVRHWRPYLWGRQFIVKTDHYSLKFLLDQRLSTIPQHHWVSKLLGFDFVVEYKPGKQNAAADALSCRAAPDSQAFVLSTPTFDLLKDIRTAGDTDPALQALRDEINSGTRTTPWAVIDGLVTYKRRIYIPPGSPWVSVVVAAAHDDGHEGIQKTLHRLRRDFHTPDDRRVVHDHIQGCLTCQRNKTDHLHPAGLLLPLPVPSAIWSDVAMDFVEGLPRVGGKSVILTVVDRFSKYAHLIALAHSYTAETVARAFFVDIVRLHGVPESIVSDRDPVFTSAFWTALFTATCTKLHRSTAFHPQSDGQSKAVNKAIAMCLRCMTGDRSRQWLRWLPWAEYIYNTSFHAALRDTPFKLVYGRDPPSIRAYDASELRVAAVAQSIEERDAFLADVRLRLEQAQQYAKRYYDQKHREVSFEVGAWVWLRVRHRVPASLPEAVKGKLRPRFYGPYRVVAVINEVAYRLALPPGTRLHDVFHVGLLKPFVGVSPSAPLALPPIQHGAAQPVPRQVLRARLARGVRQLLVQWEGLPASATSWEDLDDFRNRYPSFQLADELLIEGGRDVMWGIPFRRRKQQAGLGAGRAIGPGGTAV

SEQ ID NO: 143135 - protein, 173 aa, Oryza sativa
  unsure (1)..(173): unsure at all Xaa locations
  Clone ID: PAT_MRT4530_44073C.1.pep
MAHVSFYRNYGKTFKKPRRPYEKERLDAELKLVGEYGXLLTLDEKNNTRRIFEGEALLRRMNCYGLLGEGQNKLDYVLALTVENFLXRRLXTIVFKNGMAKSIHHARVLIRQHHIRVGRQLVNIPSFIVRLESEKHIAFSLTSPLGGSPAVRVKRKNQKASGGGGDGEEEEEK

SEQ ID NO: 143136 - protein, 56 aa, Oryza sativa
  Clone ID: PAT_MRT4530_44074C.1.pep
DFITSYLGGETFHYSLLGLNTISVDATQQRGEPTSFGGSQLSLVLAGVKKCCTGGA

SEQ ID NO: 143137 - protein, 512 aa, Oryza sativa
  Clone ID: PAT_MRT4530_44075C.1.pep
MRSSARGRGRLLLLLLLAAGAPAAPAAAEVATCKAWLVQSIPTDMPHLRRVPGVLSTADVLQWLSGNATKSLDVLAQYWQFLAQPKNPKSGDYGYSESEMVRFGADKGQRVYKALEKAADRKIKIRIVQHSGFAPDFDKESADLAAGRPNVQNVTLLFGDWWGSGVVHAKVWISDKKDVYIGSANNDWKSLSQVKELGIYFADCPQIAKTVEIYFQNLWKLSTLNSTAYTKVAWDKQWQAFRKVPCWSHFLKPEERCRSPLPPSVDVPYVDGYPSLANPKMLDFSFETPGYKSSTKEHHLSYLSYAPPELSFDKFQADEQGWLDTIKSVKFGGVVRISTMDWLGQSQYATQTVFWPSLSSAISEVIFSKNATVRILVAYWTHFIPNTEKYLKSLLYSNILCTSSSYNHCMGKVEIKYYVVPGYNKTGPALAQGAATGNRYPDFTRVNHGKYAVSDVRANIGTSNLIWDYFYTTAGVSFGTYSPAIVSQLQDIFDADWFSPYTVPVKPLEASA

SEQ ID NO: 143138 - protein, 106 aa, Oryza sativa
  unsure (1)..(106): unsure at all Xaa locations
  Clone ID: PAT_MRT4530_44076C.1.pep
LLLEXXRQRHPERKTNPTRTARRQRDAADGDERGXRGGPQQQDAADQHPGTMGRGEGADKEEEEALFLRTRANSYLLCAPGDLHAHHASSYHPVAPNLHRGTSRWR

SEQ ID NO: 143139 - protein, 937 aa, Oryza sativa
  Clone ID: PAT_MRT4530_44077C.1.pep
MATILGSLIGSCVNKLQGIITEEAILILGVEEELKKLQKRMKQIQCFLSDAERRGMEDSAVHNWVSWLKDAMYDADDIIDLASFEGSKLLNGHSSSPRKTTACGGLSPLSCFSNIQVRHEIGDKIRSLNRKLAEIEKDKIFATLKNAQPADKGSTSELRKTSHIVEPNLVGKEILKVSRNLVCHVLAHKEKKAYKLAIVGTGGIGKTTLAQKLFNDQKLKGSFNKHAWICVSQDYSPSSVLRQLLRTMEVQHRQEESVGELQSKLELAIKDKSYFLVLDDVWQHDVWTNLLRTPLHAATSGIILITTRQDIVAREIGVEKQHRVDQMSPADGWELLWKSISIQDEKEVQNLRDIGIKIIQKCGGLPLAIKVIARVLASKDKTENEWKRILDKNVWSMAKLPKEIRGALYLSYDDLPQHLKQCFLYCIVFPEDWTIHRDYLIRMWVAEGFVEVHKDQLLEDTAEEYYYELISRNLLQPVNTSFDKSQCKMHDLLRQLACYISREECYIGDPTSCVDNNMCKLRRILVITEKDMVVIPSMGKEEIKLRTFRTQQHPVGIENTIFMRFMYLRVLDLSDLLVEKIPDCIGHLIHLHLLDLDRTCISCLPESIGALKNLQMLHLHRCKSLHSLPTAITQLYNLRRLDIVETPINQVPKGIGRLKFLNDLEGFPVSGGSDNAKMQDGWNLEELADLSKLRRLIMINLERGTPHSGVDPFLLTEKKYLKVLNLWCTEQTDEAYSEENASNVENIFEMLTPPHNLRDLVIGYFFGCRFPTWLGTTHLPSVKSMILANCKSCVHLPPIGQLPNLNYLKIIGASAITKIGPEFVGCREGNLISTEAVAFPKLEMLIIKDMPNWEEWSFVEQEEEEVQEEEAVAAAKEGGEDGTVASKQKGKVALSPRSSWLMPCLRRLDLWDCPKLRALPPQLGQTNLKELLIRYTS

SEQ ID NO: 143140 - protein, 344 aa, Oryza sativa
  Clone ID: PAT_MRT4530_44078C.1.pep
MVNFLKLSDIQSTDAESVDVGFISSVHKTTRKKGFTTCLLGRNSILFGKTTVVIGEKVEHCCRWSQEEEITGIAGVDSCYGEPGGVLSGRLGVNGEKGSTQFQISYGVSSAFGFRCDFGTGFITHGMGDHHGMPLPPPLQLPCHPKLLQMPFDQEDQPGIHGVMLSSDHCGLYPLPALPLSNSAAAAAATVALGKHSAAAGSMPNIGGAEEVATTVTKAGNESTTCNGSTTWWRGSTMAAAGEKGKMKIRRKMREPRFCFQTRSEVDVLDDGYKWRKYGQKVVKNSLHPRSYFRCTHSNCRVKKRVERLSTDCRMVITTYEGRHTHSPCDDNSSGEHTNCFSSF

SEQ ID NO: 143141 - protein, 332 aa, Oryza sativa
  Clone ID: PAT_MRT4530_44079C.1.pep
MASTASFMLAVLLAVAVAAAPARAVRCPPSDKQALMRVKQSLGNPATLSTWSLASADCCEWDHVRCDEAGRVNNVFIDGANDVRGQIPSAVAGLTALMSLSLFRLPGLSGPIPACLTALSNLQFLTISHTNVSGVIPDSLARIRSLDSVDLSHNSLTGPIPNSFSDLPNLRSLDLRSNKLTGCIPAGLVQGQFRSLILSYNQLTGPIPRDDAQDEINTVDLSHNRLTGDASFLFAAGRPIGKVDLSWNDLDFDLSKLVFPPELTYLDLSHNRIRGTVPRSLAALSTLQTLDLSYNRLCGPLPRLHGVIRHGCKPYEHNQCAGGAPLGGCHQS

SEQ ID NO: 143142 - protein, 166 aa, Oryza sativa
  unsure (1)..(166): unsure at all Xaa locations
  Clone ID: PAT_MRT4530_4407C.1.pep
ATPRYRTWRPRPLRPSPARRRWSKPPXPPPPPPRGXPPGTTTPTPPPRALSSWPAGRWPRHPPPAARRPARRRPPPRLRCPSRRYRRPHATPPRXPSPSPPPPTRRLHRDAGGELRTPPLAVCLAAPAPVPSIGISNHPVFCFHRHRQRHLLAVANVRFHSIPSIH

SEQ ID NO: 143143 - protein, 58 aa, Oryza sativa
  Clone ID: PAT_MRT4530_44080C.1.pep
SCHFLRLLFGHSSRSSFRFFSFIFFHYFYLFCFFFILSLLIFIFLISFYFFYFILYSY

SEQ ID NO: 143144 - protein, 146 aa, Oryza sativa
  unsure (1)..(146): unsure at all Xaa locations
  Clone ID: PAT_MRT4530_44081C.1.pep
MSVSSASTNRTVGARGIYVFIAGLPSSSPTGVSAHTVGWSHHRRWASTGRPXSSAANWCPRHHGWMVTQPLSGIIVITDQXLTTVDWCLRLHGWPIMPPLLGAYNFTDWLAFAAADYCLRLHSWAIIPPLLGVYVFTDRPAFIAVD

SEQ ID NO: 143145 - protein, 73 aa, Oryza sativa
  Clone ID: PAT_MRT4530_44082C.1.pep
MATAPPLCQIRRGGEASAQHEVPQREATAPSARSYRERRPDRRGDGDGRGRRCVTRTCYRYSVRYNIQVNMKK

SEQ ID NO: 143146 - protein, 725 aa, Oryza sativa
  Clone ID: PAT_MRT4530_44083C.1.pep
MEILRAQGEGEDECRDGERDWVVTAKDLPVHDEPLPLYSSPLDPSSLYHPSLGQRSQAAPRQPAGRGGKVHGGRLRWLVGSGAIELGVLILLVAPGPWRFGGWGARMAAAAGLHNVKGAYGPLMGRRAIAGPIAPKLDGPERLLWPLQGRTGHGEAVFLRAGCQGELAMAKSSFFGRFGRMASCHPPTSPSRARVRVELRPRPCKPCGMVELPQLSPSALVRISIFDWARRTSGFEPNAALFGAIFFATVNSKTVVTPAGTKKTVFGSVNFNIRPERSDLWPVNAAMSKWDRHWMARWFYHTIPFEAGSDSAKALRCRRRVIVPNRKRRIAVDGAMEARCRDLVEEFCMLRVFPLSQSWQVTVDPSEEVDGLPKLVLLEGMNMLTLDQAEAEARKMIGDVYNGELPPRANPHKTNDEAGPSRKHTRGQVKLAPRKHRAPASSDSDADDEEDAEGRDGEEEGGEEEEVETVVEKAKGEAVEGRAVTPGYTPTPSPGHNETGVESNSSPLRQKYLDGAKALVAFSSGKAAKGGLVKKVAKKKGLVDVARVFSGDESSDGTPTSPAGRSLDLSAAPVPPLGAAGAGGSTAAGASASAERIMTAAAKVFGSPLCQLVASPLIEAKGKRAVVETSASEYSLAVPRFAPGDFETQADLLPFVEGVSNLVLPASALSLFTELNEFDEGCSAIKSLAVRAHLVCAVLRKICQANAVRHKQQISPRRLLPRSGP

SEQ ID NO: 143147 - protein, 804 aa, Oryza sativa
  unsure (1)..(804): unsure at all Xaa locations
  Clone ID: PAT_MRT4530_44084C.1.pep
MAPRKPNPVQALGPDPGRVNDDYTSFLGVSLMDDDELAKLVSSGALAEGQAFALGKAVVPKPVDNRTVVFAVFFEAGLRFPCNVLLPEILRLFQVELPQLSPSALVRISIFDWACRTSGFEPSAALFGAIFFATVNSKTVVTPAGTKKTVFGNVNFNVRHEWSDLWPVNAAMSKWDRHWMARWFYHTIPFEASSDSAKALRCRRRVIVPNRKPRIAVDGAMEAQFALLRKVCSRLSCRDMVEEFCMLRVFPLSQSWQVTVDPSEEVDGLPRLVLLEGMNMLTLDQAEAEARKMIGDVSLVEFSQLLTRRAAGRANRVYNGELPPRANPHKTDDEVGPSRKRTRGQVKLAPRKRRAPGSSDSDANDEEDAEEHDGEEEGGEEEEAETVVEKAAGEAVEGHAETPGYTPTPSPGHNETGVELGRGEGPGCVLFGQSGEGRXLSRSDDESSDGTPTSPAGHSLDLSAAPVPPLGAAGAGGSTAAGASASEERIVTAAAKVFGNPPHQPVASPLIEAKGKRAVVETSASEYSLVAPRFAPGDFETRADLLPFVEGVSNLVLPASTPSLFTELNEFDEGCSTIKSLAVRELEKGKEARAEVDHLKAKLEKEKAHSAVLTDYYNLTEPKMEALRQEVRKAEASAAEESRRFSREMVKTTESARTACQTLRLALTDMGAKVRGVPFEDASAFVFFEWTQEAGGSVSDCATAYGDCCARVSAAFTMGLLQQFGCEHIAEFPNYANGDWELSAQDISPALRAWRKQFWQKDGRSTAKARLLEQLAKAEAADLCEEEDAVAGGGGGDAQDHPEV

SEQ ID NO: 143148 - protein, 91 aa, Oryza sativa
  Clone ID: PAT_MRT4530_44085C.1.pep
PQKKFNKIISMHPWKNTTFFWTERRKSFFPKTTRFQTLRQHKSFGKGLSGLVTATFFYPRATILLKPKGNQQYRSQTLKNILGPQPPFFPG

SEQ ID NO: 143149 - protein, 138 aa, Oryza sativa
  Clone ID: PAT_MRT4530_44086C.1.pep
CYCYMMPEGHASGEFLQEQSRNQMTVLVAMLIFQLDKHNHRFFKIAHGLKQKKNLGRLNHVQFRYMAHQDPWKCADIGRNFAPEPNSYHICISSCLGTHCLIHVTFTFLKTEKVQLPRARAPPPGGGARCRSPRLHFL

SEQ ID NO: 143150 - protein, 34 aa, Oryza sativa
  Clone ID: PAT_MRT4530_44087C.1.pep
SKETQAATDSARCFAMATVLACIVIGWWMSPGRL

SEQ ID NO: 143151 - protein, 255 aa, Oryza sativa
  Clone ID: PAT_MRT4530_44088C.1.pep
MNMETRRYTSLSHRKARSMECFPSTQCPVKRGKAIATLLNISEPPLELTRTLLEADADSAFQPDRRGSFPIHIAASAAGRLSAVIALLTIFPGSAGLRDSDGRTFVHVAARKKRYSVVAHACQTPALSGILNKQDNEGNTALHLAVEAGDWWIFACLFVNKQVDLNLPNSSGHTPLELSINTIPTGLYCLLNSRILIQETLIAANATRGISRMDAAGTEEHGPQSEAENEEKGSEIVLPLYYILMYDAIDFLFNV

SEQ ID NO: 143152 - protein, 102 aa, Oryza sativa
  Clone ID: PAT_MRT4530_44089C.1.pep
MGRAVGALVASASASPAPLRALNGFVAAIRSPLGIGFDLNVPPETFGHYCAVLQSEMLCLELEPTPSPFPAPAARVQGLLPSKQGPDWAINLEICDTLNADR

SEQ ID NO: 143153 - protein, 100 aa, Oryza sativa
  Clone ID: PAT_MRT4530_4408C.1.pep
DLALTAYAPQALSCAYLPICIINGVVLSEFMFIFLLLCCCQSITLIKTTLVSSMLVIRRYQSAMSSAVQLMKCRLIFSCVRDSEDEARCHDGRHSSHSIL

SEQ ID NO: 143154 - protein, 72 aa, Oryza sativa
  Clone ID: PAT_MRT4530_44090C.1.pep
MTTLYKCNPHDFCLVDDHKTAQAEVAEDVLTTPGLMPAEAAERTTAPWPSSLAGWMGIAGGGGAGQTDDYDN

SEQ ID NO: 143155 - protein, 101 aa, Oryza sativa
  unsure (1)..(101): unsure at all Xaa locations
  Clone ID: PAT_MRT4530_44091C.1.pep
KRTSASTRRSAPDYLPRTRLRREVRSARYDAGRARWLVDAVDLATGRTERYAARHLVAAAGENDERVVAGMDTFPGKVVHSADYRSXGAFKGKFVLVVGPY

SEQ ID NO: 143156 - protein, 93 aa, Oryza sativa
  unsure (1)..(93): unsure at all Xaa locations
  Clone ID: PAT_MRT4530_44092C.1.pep
ISTRPGLSKIVQXLPQSAEXQCYIPCVYLPSHNSDKPCERQHLSIKRSQSVLVSTLFLSKCNCCCAILCSSCCTNYSLFLALYNLLPNHLSEY

SEQ ID NO: 143157 - protein, 71 aa, Oryza sativa
  Clone ID: PAT_MRT4530_44093C.1.pep
VISVLFNLVVYPKKPHCSICCHNVSTLNCIIWINHAVQVVVPKSCNLFFSKPVQKKYHLSTKIGKGPSPIN

SEQ ID NO: 143158 - protein, 713 aa, Oryza sativa
  unsure (1)..(713): unsure at all Xaa locations
  Clone ID: PAT_MRT4530_44094C.1.pep
WPRTISHPRRGSAAATRRRRRRRRSSTGRPPRXARGEDPEGGALLGLANYEEDEEDEEAAAAAGRRRANGRHEEEEEEDDDDDEVLDFDFEKFCSISLSNLNVLEAGHHVFINLQTEKAYCLPDGYEINDPSLEDIRHVLNPRFTTEQVRNLDRNKQWSRALDGSNYLPGMVGLNNIKETDFVNVTIQSLMRITPLRNFFLIPENYRHSKSPLVHRFGELTRKIWHARNFKGQVSPHEFLQAVMKASDKRFQIGFPRRRSPPVDADLLPRLRLAAGQSSPWRVLLQSLALVVTSGLSASASHSHRGRALSSRLLNSLLPHAPRRLLPALLRLLPGDHLTLLLLVSSKHHSHSLPAASALHALAVSSGHLPSDLRIANSLLSLYLSLGSPASARRLLADIPRPDAVTWNTLLRACLRLGLLPAARRLFDEMPERDVVSYNSMVAGYVAEGDLAGARNLFDGMARRDVVTWNSMISGYSRHGDMENARKMFDAMPERDVVSWNSMLDGYAQAGDVEMARLVFDGMPKRSIVSWNVILALYAKLRDWRECLGLFDVMIAEGNTERWDRLVPDVLLLTTLLTMYAKCGVMETAREIFNSMGEKSVPSWNSMIIGMVRFYSIEPKSEHFGCMMDLLGRAGLLEQSENLIENLQEGRWDDVEKVRKVMEEKGVEKDAGLSLGTLFCCVTVKGEHKDGMFMPHYHGITYYFLDDFSVNST

SEQ ID NO: 143159 - protein, 439 aa, Oryza sativa
  unsure (1)..(439): unsure at all Xaa locations
  Clone ID: PAT_MRT4530_44095C.1.pep
MAADDLSSPARKRGRDEEEEEEEEVIDGEAAQKRARGEDPEGGALLGLANYEEDEEDEEAAAAAGRRRANGRHEEEEEEDDDDDEVDNDVRRAPERRPRQVELRRDCPYLDTVNRQVLDFDFEKFCSISLSNLNVYACLVCGKYYQGRGLKSHAYTHSLEAGHHVFINLQTEKAYCLPDGYEINDPSLEDIRHVLNPRFTTEQVRNLDRNKQWSRALDGSNYLPGMVCIRETNTMVLKCXGLNNIKETDFVNVTIQSLMRITPLRNFFLIPENYRHSKSPLVHRFGELTRKIWHARNFKGQVSPHEFLQAVMKASDKRFQIGVQSDPVEFMSWLLNTMHSKLKSRKRNRSIIHDCFQGELEVVKEFHKKHIVEKKEDGDEQNGDAGSDIVTETSRVPFLMLGLDLPPPPLFKDAMEKNIIPQFAQNFDSSKGLTLQHES

SEQ ID NO: 143160 - protein, 104 aa, Oryza sativa
  unsure (1)..(104): unsure at all Xaa locations
  Clone ID: PAT_MRT4530_44096C.1.pep
PPPCPLAGFVLYPPPXXHINHKNPPXHNNTTTNKIQXKPIQKKXTNQPKKXKQKNKPITKHHYXIYNKIPSLITLNFLFYTTFSLSPPTQKTYPLSFSLPFPQK

SEQ ID NO: 143161 - protein, 759 aa, Oryza sativa
  Clone ID: PAT_MRT4530_44097C.1.pep
MAADDLSSPARKRGRDEEEEEEEEEVVDGEAAQKRARGEDPEGGALLGLANYEEDEEDEEAAAAAGRRRANGRHEEEEEEEDDDDEVDNDVRRAPERRPRQVELRRDCPYLDTVNRQVLDFDFEKFCSISLSNLNVLEAGHHVFINLQTEKAYCLPDGYEINDPSLEDIRHVLNPRFTTEQVRNLDRNKQWSRALDGSNYLPGMVGLNNIKETDFVNVTIQSLMRITPLRNFFLIPENYRHSKSPLVHRFGELTRKIWHARNFKGQVSPHEFLQAVMKASDKRFQIGFPRRRSPPVDADLLPRLRLAAGQSSPWRVLLQSLALVVTSGLSASASHSHRGRALSSRLLNSLLPHAPRRLLPALLRLLPGDHLTLLLLVSSKHHSHSLPAASALHALAVSSGHLPSDLRIANSLLSLYLSLGSPASARRLLADIPRPDAVTWNTLLRACLRLGLLPAARRLFDEMPERDVVSYNSMVAGYVAEGDLAGARNLFDGMARRDVVTWNSMISGYSRHGDMENARKMFDAMPERDVVSWNSMLDGYAQAGDVEMARLVFDGMPKRSIVSWNVILALYAKLRDWRECLGLFDVMIAEGNTERWDRLVPDVLLLTTLLTMYAKCGVMETAREIFNSMGEKSVPSWNSMIIGMVRFYSIEPKSEHFGCMMDLLGRAGLLEQSENLIENLQEGRWDDVEKVRKVMEEKGVEKDAGLSLVGSREGGHFINESGASAPRNDVMLCMLGEMSVHMKQPSEGSNCRKRSPSAP

SEQ ID NO: 143162 - protein, 67 aa, Oryza sativa
  Clone ID: PAT_MRT4530_44098C.1.pep
PNSNQFSHVTIEPEGAADLGEGQDSQDLEQGKSTLFFEHVDPNCEIVLFTNKIACNYEHPTCDYTMP

SEQ ID NO: 143163 - protein, 247 aa, Oryza sativa
  Clone ID: PAT_MRT4530_44099C.1.pep
METLPTRGRSNTKKVKASGGSTDEARQLEAKRLSLYSRRNHKRRTTQEITFFGLIWKRSKNDLRSSKLKADDVILRSRDGVGSPMKPTCFLCFKPYRSDLMYIRCESCRNWFHGDALELEEGRIAQLISYRCCRCRRRPLPKCPHSDFYYSKVPEPQPVSQENADDMLSSEEAAGADGDPPLDSSGGVEPTVEETVGANFSANMKSSVPGSVQETIYMDGSSHPTHPVSKGVAIETSPPPSMMVSGQ

SEQ ID NO: 143164 - protein, 167 aa, Oryza sativa
  unsure (1)..(167): unsure at all Xaa locations
  Clone ID: PAT_MRT4530_4409C.1.pep
MHWSGGGGGAGLSSTVSSPGFTKFLKYFQPCSSLTASHTRRAAKARVWCGGLRAAEMREXRRQALKRRRLWAATGDGSKGAGSRRKAAHRRWPWCLVAPPRDGIAPSPSMVAGIVLRARSRTSSPQRFNPRSSSGSGSGGGRERGRRWAVASCPGRCQPAAHTHLRH

SEQ ID NO: 143165 - protein, 152 aa, Oryza sativa
  unsure (1)..(152): unsure at all Xaa locations
  Clone ID: PAT_MRT4530_440C.1.pep
LPYTCGALGLSACSLWLLRHSSLMGSSDIDNWIQDAKESMVGFWDVHVGQPIISIRDELFETFKQRSKREMEKQEVQQTEESLRXMLLDFCGNTSNEKPPQDMSELAMMEXVMKRYEKXEAMHPFKGLSSGKLTCALSIQIEKHKLALLEAM

SEQ ID NO: 143166 - protein, 186 aa, Oryza sativa
  Clone ID: PAT_MRT4530_44100C.1.pep
MKRLTFGAEPEMVDSASIAQEVMLLLARSGGGGAGYVVGHGGEAPRVFECKTCRRRFPSFQALGGHRASHKRPRGGGGGGAAAAVAAAAGEGEAGVALSLAAGTPAVKASRAHGCAVCGVEFALGQALGGHMRRHRIAGAEADEAVSARGGEPAPERNPREARGVVGLDLNAAPADDTGLLLVDCL

SEQ ID NO: 143167 - protein, 190 aa, Oryza sativa
  unsure (1)..(190): unsure at all Xaa locations
  Clone ID: PAT_MRT4530_44101C.1.pep
SQDTLAFTIFPRKNVRLICNDELRIFYAMTKKIKISPVKAMIKQWLEQLKMIGPIDCNSLITRIVVKVEALENGAIIDIPQPHSIINEDYLVQGQALKHGPNASMLFSFPRYTNEISLTNPKFHLYKCQALTIPLAVAKXQQQQLQYPLLDWSQPGYTLGWNQPLPTYGVGSSAWASASSGQWEHPINRL

SEQ ID NO: 143168 - protein, 204 aa, Oryza sativa
  Clone ID: PAT_MRT4530_44102C.1.pep
MTSVWKTKVLTGLNKLFDKDGKKAAAAEFLKSFNKEEIGKEIDDKKTELEPKVVEVVESSPPEIKALLKDKKTASKIKKNGPAVTKFLEELAKIDFPGAKPVSDAVAKSGTTPLSPAIAFILEKVAPFVPKEEPKPEPEAEAAAETTSREVAVEEEKKEEEAAPAEPAAAAAEAAAPSTEVVEEKKEEEKPAEAAAPAAEPEKQ

SEQ ID NO: 143169 - protein, 462 aa, Oryza sativa
  unsure (1)..(462): unsure at all Xaa locations
  Clone ID: PAT_MRT4530_44103C.1.pep
YGETKLAVENEFDKYDFSNAQMIKAASNKFTSSTLFWWIYVSNKPETWDEFKTMMRKLVSSYFKCTIREKLEHLKXGDRTVREYIHEFKVCIIYSDLKECDENKMHRFFKGLNFHIQVVLANVIYNHIGHLFMFAHSIESEIKCKKAXKEQCLVPPVTNILQEVQNIKQKEXNNEHVKKEEKHEAPIIFEESLQGKFNGAEIIEVEQPLVEPIAEMPLSLVNLLAVPCDKEGLCDNASSLISMPQLVNEHVISSVSLCVDFKHVVXIANEVDERGLLSSLITLGYVRFDVFCXLKNLKEKLFAKSNLPCPTNAIFHIFGEYNDVRIYLVHRVYICSDLKPHVHKDKTYKLHRNIIANQIISSLPSFDWKKQVVLNGLREEHHMEKPRTVFHEGEDDVTMATMDTTVSHIMDEQEDIKIKSSMCWNPIRPRATLLTSNGRQICIRAPFWVHEYLMESSRSRLS

SEQ ID NO: 143170 - protein, 40 aa, Oryza sativa
  Clone ID: PAT_MRT4530_44104C.1.pep
RVASFVPGIQGTHSDHVFLHNSHVRLPPQPLYLCLIHQYP

SEQ ID NO: 143171 - protein, 48 aa, Oryza sativa
  Clone ID: PAT_MRT4530_44105C.1.pep
TRTSSVSEKTRVRFGAAPQVAHSIWRAEGASAPPPSGVVTAAAAPEKG

SEQ ID NO: 143172 - protein, 61 aa, Oryza sativa
  Clone ID: PAT_MRT4530_44106C.1.pep
NMSAEFHFFYWLLRTYGFMAQLRSKSMVESGLPFFGKARNNSEFEGGTTTIRWKRPEPFIQ

SEQ ID NO: 143173 - protein, 585 aa, Oryza sativa
  Clone ID: PAT_MRT4530_44107C.1.pep
MPQTSVLQVVPHYTRDGIGDHARVILDYVKRMQAEDPAFFYAMQFIDGHPVGNIFWADARARMAYKHFGDAVFLDDYCKRNKYQLPLVAFTGVNHHCQPVLFGCAIIGDNSEASFVWLFETLLLAMSGHHPDSLTTEHDSAIQLAALKVLPRTRHRFCRWHILNETHDKLSHLSDEFPSLHEELVNCINMPETIDEFEVNFKALISKVGPGNSEWLYSVYNCRQHWVPVYLRDTFFGDESSKEECASRSSFFDGYISAKTDPQSFIQQYEKALDCCYEKEVKEEFETKYSLPEIKTSSPIEKQGADLYTRHILTVFGTQGVSSLPSQYIVKRWTKYAMERSPDKKIDEVSKVNEPKEEQKSGAEDGEQSQTWRYNSLCREALRYAEEGASSVEVYIVAMQALQEAANKVNMAKRGIGQSHELSQGNGNKGNNVNMASSTSSPQLVTVPVGLCLPSMDSSKISAAAKDAIFGSTDSSDDDEYDEDDDTDDNDEDEGITGDEGFGQIATSNEMVCLAWKSGMTKRDSADNEQAVTIWALNALPNLVQNGLVRKLNGSLVILVATWKKRELLETGDEVVRCLHAIRAP

SEQ ID NO: 143174 - protein, 224 aa, Oryza sativa
  Clone ID: PAT_MRT4530_44108C.1.pep
MATTSACCYRPLSAPPLHRRRGPPPQQQQLRTAVGGPRPRPSLQVAAAAATGGGQSVKAATDAEFFQTSDTRPIMLFDGVCNLCNGGVRFVQEHDPNRLGLSESGRKLLQRSGRAPDDISSVVLVEKDRSYIKSEAVLRIMGYLNLPFPQLATFLNFVPLFLRDFAYDNVADNRYAVFGRSESESWMIKIGQPSLLQVSSHAARNAFFAEKMHGKVTNPRQTAI

SEQ ID NO: 143175 - protein, 57 aa, Oryza sativa
  Clone ID: PAT_MRT4530_44109C.1.pep
EQSYTFSPNTGVASRRKDRVNSHGVGLEHLDESFTTVGSDGWVSSPASMLPLLWDVP

SEQ ID NO: 143176 - protein, 222 aa, Oryza sativa
  Clone ID: PAT_MRT4530_4410C.1.pep
MGLNPSKRVDAALRGAPAFAAACDDAFGRCLADAQYAFAGVRPYQLADASAHLHSSLRGSLPLVRRWVPSPPPRARVDSALRAAGLEDAAVLSRGQFREFAAELFREAVLAGAAQAALVRAPAGAAGLVGVGLATRAGAGVVGRCTFVPFIKLQLQNIQNFRASLSSLPDTGSNCGGRGIVGACGLHEQCTVEMYDGLLVECGDQSGSRMHDGGLRKEDTRP

SEQ ID NO: 143177 - protein, 1540 aa, Oryza sativa
  Clone ID: PAT_MRT4530_44110C.1.pep
MADTGGGGEKGTIGEKVTRPKPLDVVLVDQQLALAGGSGLADASREEDFRQKPVESQGGSKSLQGPAAFTEGPVDEEDDDAVEVILEEEEVQKAGQLTVLARFYSMRFPNPVALFEDMRRAWRLRAEMSYKSLKDNLFIITFSNEGDYLFVLQGGPWLHRGDAILVAEFDGLTNPSMVPLDTVPIWVRVYDLPLVMMNKARGDLYGSKIGKVREVDVDAFGSNRHDFFRIRVDLPVNKPLKTKLDIKIKINGKEETRKFNVRYERVPHFCFSCGFIGHSDKECAKQVSNEDVPFPFSADLRCSPLKPFERKVSRVKALQNMGVSRKLVFRGAGSASSSSKGHKVESVHATDLPSRVDAFDVFDHREGKGDERVDDLLASQTNLMHVSDMNSLGQCQQKEGMQLKKVQAGALDSIEESSMEDTCSPIKRKNLDSSSVRRVGKVQQALLQYEQHGGNQDLEQKKVGDSTRALKRSRKEAGRGTEKDDMEATNPGAADLGFKGLPHTYDNCRDGWSNVKVRLDLAVANDRWRDIFTAAQVKENLQVSRKCLHYEIIWEREPEISQIVEEAWSIAGGKGDLGEATDHMNELLYREEMLWLQGSRVNWLKEGDRNTRFFHSRAVWRAKKNRISKLRDSDGTVHNTTKEMETMETDYFKGMFTADPNISPDRVTHLIQQRITDEMNDKLCVGFTDEEIATAVFQIGPLKALGPDGFPVRFYQCNWNIVKQDIMAAVRRFFHTGSMPSGVNETVIVLIPKIDQPVGLKDFRPISLCNVVYKVVSKCLVNRLRLCLDDLVSDEQSAFVLGRLITDNALLAFECFHSIQKNKQPNKAMCAYKLDLSKAYDRVDWQFLETAMTRMGFAHKWVNWIMACVTTVRYSVKFNGTLIESFAPSRGLCQGDPLSPFLFLFVADGLSLVLKEKVAHNDLSPLHVCRNAPGISHLLFADNTLLFFKANQQQAQVFKEVLSNSACGTGQLINPSKCSIMMGSSTPQPVQATIKNVLQVDRDSFEEKYLGFPTPEGRMNKGKFQSLQEKVWKRVIQWGENYLSSGGKEVLIKAVLQAIPVYVMGIFKLPDSVCEELNKLTKNFWWGAESGHPSWRGILHGLELLKQGLIWRIDNGNSVRVWRDPWILREHTRRPITVKANCRIKWVSELITAAGTWDVNKINQHFLGIDTDAILNIRLSPRADDDFVAWYPDKLGRFSVHSAYHLAVSLKNKEEGSSSSAANSKRSWDLIWKCNVPQKIRIFAWKVASNSLATLDNKRKRKLEVNDECAICEREKEDSAHALCRCPHARQLWLAMRQAGNITLSMDNVHGSGSWLFDCLEQISEGDRTMFLMILWHIWFIRNEIMHDNTSWQTWKKENMWFSFLFCMQWLVRPPDAHWEKPRSGWMKLNVDGSFDPLLERGGIGMVLRNDSGNVIFSSCRAIGRCSGELEAKLCAIAEGVVLAIQWTLLPLIVETDCLEASQLIQSKAGDLSAHAYVIREIKYLLSDQRAFVVKKIHRSQNRVSHALANKARSENVSDFWLEGSCNFISQIIYDDAKFE

SEQ ID NO: 143178 - protein, 51 aa, Oryza sativa
  Clone ID: PAT_MRT4530_44111C.1.pep
HPKLLHYGQDLEKRILVSIRTHRMIELHGYYDLVLEDPQAEVAPAPTMFWW

SEQ ID NO: 143179 - protein, 62 aa, Oryza sativa
  Clone ID: PAT_MRT4530_44112C.1.pep
FFFFFFFFFFFFFFFFFFFFFFFFFLKKTRGIGGPRTGGPPRFKRRDTLGLWGGIIIFLETI

SEQ ID NO: 143180 - protein, 50 aa, Oryza sativa
  Clone ID: PAT_MRT4530_44113C.1.pep
MMQSSGGAKSIARDLGVSNPPRPSNKDDYVALSILPRRDPKQEEVQQDAP

SEQ ID NO: 143181 - protein, 145 aa, Oryza sativa
  Clone ID: PAT_MRT4530_44114C.1.pep
MLIEFFPFTIELRLAEPTADGRGPALRLQTAEAQPGYGGRRRRRCRRDEPATAEARRCGRGWRRRGPATVDGGGADAASRRRRKRGVAAADDGGAARRRWTTVALTRRAGDDAATQERASRIRAWGGGAGGVDCGIWFARCRLGI

SEQ ID NO: 143182 - protein, 65 aa, Oryza sativa
  Clone ID: PAT_MRT4530_44115C.1.pep
RKSMYCTSQEKKIDVLSFKLIQVTSIVQFSNVVEKIDVFYRIGLFDKQMISSAILVYINISIDLC

SEQ ID NO: 143183 - protein, 260 aa, Oryza sativa
  Clone ID: PAT_MRT4530_44116C.1.pep
MHNCRIRALETKARGMRMILRPQKKMQSNNKAQERGREPNMRMLLYYLRLLGASSDGMAQKIEMSAGRGVIHEASLRFGGSGTHLSCTSPQLKPKEAWTWSTEPETPVASAGGTYCHGQRPAIGNWCVPDRWGQACAVTETATNGQTRSAWLSCGLSPRQRSPWLAAASVRPPALRAPRRLVCKPRAPRRGRATVSLSLSRPLHSLSSRGAAPVAVWGNKLVTAHGRVALGRFRSGVNLRRSGSQATVELPNDGDHGSRL

SEQ ID NO: 143184 - protein, 40 aa, Oryza sativa
  unsure (1)..(40): unsure at all Xaa locations
  Clone ID: PAT_MRT4530_44117C.1.pep
PNXSIQLKIDTEEKXSCCFFFFFYFAGAMHLLGTFMAATS

SEQ ID NO: 143185 - protein, 420 aa, Oryza sativa
  Clone ID: PAT_MRT4530_44118C.1.pep
MGGRKRALLVGINYPGTKAELKGCHNDVARMRRALVDRFGFDEADIRVLADADRSAPQPTGANIRRELARLVGDARPGDFLFFHYSGHGTRLPAETGQDDDTGYDECIVPSDMNLITDQDFTELVQKVPDDCLFTIVSDSCHSGGLLDKTKEQIGHSTKQNQAQQIKREERSDSGTGGFRSFLKETLKETVRDAFESRGVHIPHQSSRRNDDEDEEPHMGSSSHGGDRIKNRSLPLSTLIEMLKEKTGKDDIDVGSIRMTLFSLFGDDASPKIKKFMKVMLTKLQEGQHGGVMGLVGALAQEFMKAKLEGNQEADALEPAMKQEVHSVHEAYAGTTARVSNGVLISGCQTDQTSADATTPKGVSYGALSNAIQTILSEKSGRVTNKELVLRARELLSKQGYTQQPGLYCSDKHTSVAFIC

SEQ ID NO: 143186 - protein, 74 aa, Oryza sativa
  Clone ID: PAT_MRT4530_44119C.1.pep
TLGTGGLGGKRSSRRPPPIRSRGHYLLHASKSSPSAWIPPLVYWRLPSAVVACSPETVDVTGVAPLTAAVDANC

SEQ ID NO: 143187 - protein, 148 aa, Oryza sativa
  Clone ID: PAT_MRT4530_4411C.1.pep
MGNILKCFISCFDGEDEDGGSGHGRFPNSYPPVSSLHYQPLHLDDLQVPLSPPPPSTRQQQPPPRPALSRLHYQPLRLADLQVPLSPPPPSTRQQQLPPRPARPLGYHHGVLWPTIEITPCDDFLNLEFTTKGCHPMTLECIVLFSKS

SEQ ID NO: 143188 - protein, 110 aa, Oryza sativa
  Clone ID: PAT_MRT4530_44120C.1.pep
DFFLGPHGKGHPFFPSFRAKRKNPLGPNQYPRFHGGGAGFLIHRAPPLFRWEIRQWGRPHKFGGGKPVGPPGFIFFGSGPFLAPHFLRFKFSPRKRFGLVIGPHFFPAPI

SEQ ID NO: 143189 - protein, 65 aa, Oryza sativa
  Clone ID: PAT_MRT4530_44121C.1.pep
FYGPLGHHIVQVHVPPWHFLPGGHGPLRPQHGTKAPLFHVDFVSPGIGKSIKSAETLHIGGLSKS

SEQ ID NO: 143190 - protein, 471 aa, Oryza sativa
  Clone ID: PAT_MRT4530_44122C.1.pep
MEPDAAAAAAAGEREAEIEKAFRARLPDFRKQADSLTLEGVRRALEKDMGLEKHSLDAHKKFIKQCVDKVFSGSDDDNTNNNAPEKDEAKDDRSSKEESEDAQPTSDSNKISSNADEPVAKSSETDRDQEGDKDHSSGSDISEATIKNAIVKRASYFRENSETITLQGVRRTLEEDLKLQKKALDAYKSFISTELDNILQEPANGTKKTSKTESHKDSGQKTSKNSKRARQDSDTSEINDSHCERGDSDEDARPKKKKAEKGKAVKRQKKTTVEKQLSNSKAKKVAKKDLDKSKERSGSEEDNSNSSAEEDNKKKRQVAPAYGKRVERLKSIIKSCGMSIAPTVYRKAKMAPESKREACLIKELEDILEKEGLSTNPSEKEIKAVKKRKERAKELEGIDMSNIITSSRRRSTSNFIPLPTPKIVADSDEDDEEDPRVRNDEEVNVEGGDEGDNDVGKAGDGSADDAEHDSD

SEQ ID NO: 143191 - protein, 135 aa, Oryza sativa
  Clone ID: PAT_MRT4530_44123C.1.pep
PFSFGLVFSNVFASGSVFSPEGLALPEDALMEKFAFGVFMGAPVSLAILFPTFFFAPPLFLHGSKNVLFFFLGTQYLFPPFFKIKGFFKAPPQFFVFAPVSPPSGVVVPSAPQGEKKKEEPQGGSHGDLGMSLFF

SEQ ID NO: 143192 - protein, 283 aa, Oryza sativa
  Clone ID: PAT_MRT4530_44124C.1.pep
MAILPPAAAAAAAEDVLSLYDACWFRRLVLLSPSSPAAVAADVAPASPPVASQREEEEEEEEEEEREVKRSPPGTLRHRRTRSDEAATAALDGLEPLRIPNGHRARLETILSGKDGLAAALPQPQPMAERRRAAVRRPGGRRRRQRRGRSMSELEFEEVKGLQDLGFTFSEDDVDAELASIVPGLRRRRSDEDDAREAPAAAAASAEEEAASSRRIGSAPAGTSSSFSSAPRRPYLSEAWDDEEEEMRRMLRNWRIPPAGDGDGADLKEQLRLWAHTVASAVR

SEQ ID NO: 143193 - protein, 119 aa, Oryza sativa
  Clone ID: PAT_MRT4530_44125C.1.pep
WRRRGGSSTRRRIWPLGTRTRPVAAVVVRSSRWRWQAGRQRRRSAWGPRREEARRTGTDGGCVGRQGTGSGGDGVGCGMRRLGRWRQWWCRRSVVVRSAKVVTSAAIGYKVRSVVVGRG

SEQ ID NO: 143194 - protein, 47 aa, Oryza sativa
  Clone ID: PAT_MRT4530_44126C.1.pep
NAFTSYFTASVHTKLLKLNLKVSPSVKKKIQCIFKHWIFFSDGGCRP

SEQ ID NO: 143195 - protein, 159 aa, Oryza sativa
  Clone ID: PAT_MRT4530_44127C.1.pep
NWVWTSDRLAIRGWQNNGVCPLCRCTDETSLHLLADCRYTRKIWDAIATWVACEPIMLINTVALIAKIKEEAKSWAMAGAKHLAEIPDRDAVNIFFLTSLPLSYLLFFLSGVGIPGTVAVGWMTQASGIFDGEVVDERGYVEATLTTSEILVLVREHTT

SEQ ID NO: 143196 - protein, 56 aa, Oryza sativa
  Clone ID: PAT_MRT4530_44128C.1.pep
FITHCFNLSIFSTHTNHTHLGGFYWGLIKISYSPPANVPFFLNFTCQNYKGGKNNF

SEQ ID NO: 143197 - protein, 75 aa, Oryza sativa
  Clone ID: PAT_MRT4530_44129C.1.pep
NLCIHIIFPYSVGFQHYQVLLGQATFQRIGDETRNTIQSAIICFFLLQQNLQASPPKHDSTDKFYSSVRTNITYI

SEQ ID NO: 143198 - protein, 60 aa, Oryza sativa
  Clone ID: PAT_MRT4530_4412C.1.pep
CPPLLHPCGQLVRPPPTPPPSRALYSRRLHRRPSIPSPDQPSRPPFAGTLTRQNPKSKSP

SEQ ID NO: 143199 - protein, 124 aa, Oryza sativa
  unsure (1)..(124): unsure at all Xaa locations
  Clone ID: PAT_MRT4530_44130C.1.pep
LTTKFGNFSIGDGDKXRRNPRWKSFRKQSKDRLKSESDVXGSAESELDKVSRLSRVXQCDMFGQKSATKTYGILEFVRDKSHVRHGHILNKSTGMLTNLKASFWTCTGVKQISQASCFYINNIT

SEQ ID NO: 143200 - protein, 45 aa, Oryza sativa
  Clone ID: PAT_MRT4530_44131C.1.pep
KLGLKFKCWGGRPPNDSGKAHSRGGKSINPSGGGGPKFLPSFDKT

SEQ ID NO: 143201 - protein, 102 aa, Oryza sativa
  Clone ID: PAT_MRT4530_44132C.1.pep
PGSAESEVDKVCRLSRVRQCDMFGQKSAAKTYSILEFVRDKSRVRHGHILIKSTGTLIDPKARFLGPALELSRSPRPRVFLINNIRSIGIDFLSILPSTLED

SEQ ID NO: 143202 - protein, 149 aa, Oryza sativa
  Clone ID: PAT_MRT4530_44133C.1.pep
SSDFVADKIAYALSQGIKVIACIGETLEQREAGTTMEVVAAQTKAIAEKISDWTNVVLAYEPVWAIGTGKVATPAQAQEVHDGLRKWLVTNVSPAVAESTRIIYGGSVNGANCKELAAKPDVDGFLVGGASLKPEFVDIIKSATVKSSA

SEQ ID NO: 143203 - protein, 80 aa, Oryza sativa
  unsure (1)..(80): unsure at all Xaa locations
  Clone ID: PAT_MRT4530_44134C.1.pep
MPTTTTVALVCYGPVNKEVPLNWCAAVNDISGFHIYXVKYMVAHLRQPLVKIHGITXLRVCQAVVIVHPKDSGDLHVELY

SEQ ID NO: 143204 - protein, 37 aa, Oryza sativa
  Clone ID: PAT_MRT4530_44135C.1.pep
RAQRSVGSRVISRGRHRIPPRPVSGPRWVGLPCRAAP

SEQ ID NO: 143205 - protein, 40 aa, Oryza sativa
  Clone ID: PAT_MRT4530_44136C.1.pep
QKYVYFNLKFGVMSTRYGVSLSVILDYIRKGSVLWLLDCD

SEQ ID NO: 143206 - protein, 307 aa, Oryza sativa
  Clone ID: PAT_MRT4530_44137C.1.pep
MPSSHGDLDRQIAQLRECKHLAEGEVRALCEQAKAILMEEWNVQPVRCPVTVCGDIHGQFYDLIELFRIGGEAPDTNYLFMGDYVDRGYYSVETVSLLVALKVRYRDRITILRGNHESRQITQVYGFYDECLRKYGNANVWKYFTDLFDYLPLTALIENQVFCLHGGLSPSLDTLDNIRALDRIQEVPHEGPMCDLLWSDPDDRCGWGISPRGAGYTFGQDIAQQFNHTNGLSLISRAHQLVMEGFNWCQDKNVVTVFSAPNYCYRCGNMAAILEIGENMDQNFLQFDPAPRQIEPDTTRKTPDYFL

SEQ ID NO: 143207 - protein, 168 aa, Oryza sativa
  Clone ID: PAT_MRT4530_44138C.1.pep
MAEAAQRQSATVETSLPPISGWRGEGGSGGGVALLSLWPDLSLHAVAEDAAGSTALRCDDDDVVFRMCAASPSAATSPAPTCYQKALMTLVRLRWPSTSPRLHVEQWQDASIPSSLLPLNHSRSSAPASTDGPTALLQPAASEEPLPPPNPHVSIAQYWFDYHPQPSL

SEQ ID NO: 143208 - protein, 55 aa, Oryza sativa
  Clone ID: PAT_MRT4530_44139C.1.pep
QTISGNEIVSYESPKPTAGIHRFVFVLFRQSVQQTIYAPGWRQNFNTRDFSALYN

SEQ ID NO: 143209 - protein, 84 aa, Oryza sativa
  Clone ID: PAT_MRT4530_4413C.1.pep
KRNNEKDVRSIAFKSTWMEQGYKGALLTDCMFETQDTPAQQAYLSGAHYPYIYQTYAYFQIIPPYHTVIQIHQEDQVKLPTHML

SEQ ID NO: 143210 - protein, 79 aa, Oryza sativa
  Clone ID: PAT_MRT4530_44140C.1.pep
ISKPLNNALLYVQINILAMCERPERAGHPPFIPLYKAHLLAFWWYHGCRRLRLYHKLERQPALEQAGISLPCAGSYGGF

SEQ ID NO: 143211 - protein, 103 aa, Oryza sativa
  Clone ID: PAT_MRT4530_44141C.1.pep
MENRELKMQNKALSKQNKVLMEQSRELMELPVLRQKHEELTRRYESLTKKRNEDQPSLRRSGKLKKEKEDQQVDFRKRRKIWRGKIRELKEKIKQLECCCVIL

SEQ ID NO: 143212 - protein, 38 aa, Oryza sativa
  Clone ID: PAT_MRT4530_44142C.1.pep
YIKQQIHNVPTQREKSGYLLILAKINRCPISPCVEWPT

SEQ ID NO: 143213 - protein, 171 aa, Oryza sativa
  Clone ID: PAT_MRT4530_44143C.1.pep
MRVHPAPRKRTIAVQRRCGVAAAAAGMAGGKKLRRLPHIFAKVLELPFAADADVSVEGDAAALRFVAAADGFTPSGGASAHAVEIHPGVTKVVVRDLSAGLDGDDGAVFELDRWRFRLPPCTLPAMATATYADGELVVTVPKGAAPDDDGDGAAAAVLGGSGVVESVLLLV

SEQ ID NO: 143214 - protein, 62 aa, Oryza sativa
  Clone ID: PAT_MRT4530_44144C.1.pep
LLQPAVWITVHRFKRSMGLMPCHAQLTCDSLCQCESEPDPPGILIARGIRRFRSAIGETEAG

SEQ ID NO: 143215 - protein, 327 aa, Oryza sativa
  unsure (1)..(327): unsure at all Xaa locations
  Clone ID: PAT_MRT4530_44145C.1.pep
MASPYTGAQPPYPAGAHQPPPPAQALLQQNHSLAFRVMRLSRPSLQPDQAAALRFDPRDVFLPEDALTGPDPSASSAADAAAFLQGLLHPLDSPATTVPGDFTFRDRFLLRDPVDALAPPGPRLLPQSLGLVCPPVIIQGDRFREYLPQFYQFNDSIPLSVRTKVRTVKVXNPIVSRLLTLIDLCKQPILIRAGGGIYNYLYQLRPSSXPTASKDVDLRAVKVPPVIFLERPFMVNLCLTNQSDKTVGPFEVFLAPSVLNEEKYVLVNGLQKLVLPLVEAFESINFDLSMVATQVGVQKISGITLYAVQEKKLYEPLSDIEIFVDAE

SEQ ID NO: 143216 - protein, 530 aa, Oryza sativa
  Clone ID: PAT_MRT4530_44146C.1.pep
MPLKKVAKEKVARRKESEAGVEMAAEEEAEPSALDAEDGVAPSTSAPAPQQPPLAPATSVGQALNTVDAAKAAAAARALQTRAETLSTCQLVAPQAASPQQATSSTALTAIQVNSNLEAQAKADMGAMRQNMARLQDMLRQMQEQQQAYEAARQAKVASAPILQYSTGYIPTQAYPQAPIQALPSQVMQAPANFAGQPSAATVHPTPHVQLQVRPVATQAFAARCREQGGERKRAAAEWGNQDSPNPTQFKFPPVPRYSGETDPKKFLSIYKSAIEAAHGDKNTKAKVIYLALDGIARSWYFNLPANNIYSWEQLRDVFVLNFRGTYEEPKTQQHLLGIRQRPGESIREYMRRFSQARCQVQDITEASVINAALAGLLEVELTRKIANKEPQTLEHLLRIIDGYARGEEDSKRRQAIQAEYNMASVAAAQAQVQAQVAEPASLAIRQPQPVNQGQPPRPGQAPMTWRKFKTDRAGKAVMAVEEVQALRKEFDAQQLAAINSPFTRRSEKTFTAPFTDALRTPLSNAETFV

SEQ ID NO: 143217 - protein, 78 aa, Oryza sativa
  Clone ID: PAT_MRT4530_44147C.1.pep
ILPLPRAGGVVRVGVGSGEAGRVGDAGVGEEAVEGVVKLHRPAAGKALAILHRRRSVSMPHRTDLLPLSPGLGLLKID

SEQ ID NO: 143218 - protein, 347 aa, Oryza sativa
  Clone ID: PAT_MRT4530_44148C.1.pep
MGIGRARWVALLVGLAAAAVVATLGASEGDADPLYRACVDECEKTGSLRETSVRHCQVPTDDHPADKSWYAHEPLYLQWKEWNCKSECRYHCMMERESEREQLGLGSVKYHGKWPMKRASVFQEPISAALSALSLLVQFNGWLSFFLLLSYKLPLRPETQMTYYEYTGLWHIYGLLAMNAWFWRAIYHSCDTVWTEKLYYSSFAAFIGYSLILAILRTLNLKDEASRVMVAAPILAFTTTHILYLNFYELDKGLNTKVCTAASLAQFLLWALWAVMTKHPSCFKILFVIIGNVFSIVLETYDIPPRWGYVDGRVFCVAISIPLTYLWWKFAKEDAEMRTSTIIKKTR

SEQ ID NO: 143219 - protein, 812 aa, Oryza sativa
  Clone ID: PAT_MRT4530_44149C.1.pep
MAIDTTADHGGGAGAGGVDIPMQILVQPPPLPPPTATATARHRRTHTGDSTASSYEPQRRPVEHQVSSMHAATASDDGGGVDDVVPERKVTAFALHVAVLEKAASHVGAVCFVWATVVILGGFAADLDARDFWLVTAILLVEGTRVFSRSNELDLQEQPMHLPDAAAAAAGDDDDDPPPPHKAAAAASPIHLLPLGGWLVEARNVSYVLYWLQLLSASACVALSLLRLATLRFAGDNGGGGNKNAYYALMLFYVLALSEAVIFLVERAYWEWVLSYRRLVEAVSGECDLGDAGVVPIKRFFYRAFSRSVEGGILDATRMDLVSFAVELLSSDSGDEQLIGAHILRGSIANRDSARRAVRKIGTSAATVERLVEMVSWKSPSKRRVRSLAAEVVLRLAGKRRNLIRVATIPGAIESISTLLETPTTDAAAGDLAMNEMGLHIMKKLAREHGNAAKISSTRGVLSRIIHFTRTSRAALQICAGGEGSLPAKTVLRSLQVVKNLSSTPGHTGEAIRREISDNVFVLGNIRKVLQHGGERHGKMQLTAIGVLADLAIDGDAKEKIGCTGDMIAHLLDMFAGSPESAPAVAYAAQGAAHIRLQAGEVVALLALESAANCDRILREAAVVERLVMTLHHPGLQITSSRILLNLCRYSRSDHFLQLSSLTAAVPIVFKAIMVEKSSLLEVSIGLAIQITRLATPEFHKEIFGKAGVPDTDIAGRLVEILKEHRTPRVKVPRMRRFVIELAIAMMRGDAELVPFFRSMELEKELRSVVRSTSELESFNMFSGSIGLSRHSSTLASLVDDAMEIMQALQDS

SEQ ID NO: 143220 - protein, 69 aa, Oryza sativa
  Clone ID: PAT_MRT4530_4414C.1.pep
NSNGVILRYWPVSGIHWYLAFHMSSAKYYSYFITLFVLDCSQRHVFSVSVIRPTLTEFVKVSNLNVLRV

SEQ ID NO: 143221 - protein, 604 aa, Oryza sativa
  Clone ID: PAT_MRT4530_44150C.1.pep
MASAEAKDGEEVMGEGREGDPVDKIRRLLRIAIYNIGYVEGFFPDAYFSDIVVREDGLCDALKKKYLKTLVFSICEKYEGPVLQEFIFSFSYPSTGPDEVVMMMTRTGSKVITKFEASAVKVTPNQMRSSACKMIRLIVQQTRTYPVQEEHAIEMKLSFYEDTTPEDYEPPFPKYCVNSEDVAIWNNNILKMEVGNINNKHVVLTLKVKSAQSYCKNSIVDDCSDYEMCECETYGYTSAPNDDTEEDYHTGMLASPIKAWYPQDTGTQMTRKRKTGFVLVSSSKKIKFLLDSGASHHICNDKAIMRNLKDVKKEYQVSLASCGGLELKAEMMGTVVTKDMKLSQVGYIPEMEFNVVSIGQLAVQGLITTGGDGRFSVIDAKEARVVGEGHLQRKTEKVDGRVYHEYVFKSLIREIEGDDEKLIEPLRADDDEIDEEEEKKCWVIDTGCGRHMIPDISILTQVKREEVTFQAACGIVSSTHKGLVKEGNLILRDVLCCPKVTRKMISGPMLDLSGHRFTFNDKKCCIVHKDGLELRGVGKLDRATRTYLLKPGEDSRAAAAAKEEPKMLAAAAEGYGGPKQEADTKNMRGKGKKTAQATKRLRLS

SEQ ID NO: 143222 - protein, 55 aa, Oryza sativa
  Clone ID: PAT_MRT4530_44151C.1.pep
IFEAQNACLRRDDKLLPTFVGHSLRVHQSNIDFRGSFDLLVLFNSCVTILLDCGA

SEQ ID NO: 143223 - protein, 97 aa, Oryza sativa
  Clone ID: PAT_MRT4530_44152C.1.pep
DAINIAFRCKVPIQVNRRIAYNNGLKVVQPTPSESYVSSDQFQYTRLDRPDDQPCFEAQEFDLVRNMLVAAVEERYKDAAQYRDQLFMFRAKKKNMI

SEQ ID NO: 143224 - protein, 748 aa, Oryza sativa
  Clone ID: PAT_MRT4530_44153C.1.pep
MEIINGPVLPRYAAPATGALTSDAKISGQLLRRVHLRRRACGLQGDHYRAARRFFGFPSERHARSGWVWPVCCSYGSSSDGDGAAAADYDASGEEFVNSSVMEAVELRSVSDGFVIKMRDGKNLRCVQNNPRVLRLRDSAPHHAIVLKMEDGSDLLLPIIVMETPSIMLLAALRNIRIPRPTIYNVVKEMTERMGYAVRLVRITEMVHDAYYSRLYLAKIGNEEETISLDLKPSDAINIAFRCKVPIQVNRRIAYNNGLKVVQPTPSESYVSSDQFQYTRLDRPDDQPCFEAQEFDLVRNMLVAAVEERYKDAGAGFEGIVHDDDKKEWKSDEDNSEGDKKAKAVSFKNRAISAGNKFRRSLRRKRRRRVGDHVASIEDIRDVKELEAVQRFHQCLHDEGLLPERHDDYHVMLRFLKARKFDIDKAKHMWSEMLRWRKEFGADNIEEFDYSELDDVLECYPQFYHGVDKEGRPVYIELIGKVDPNKLVQVTTIDRYVKYHVKESEKCLQMRFPACSIAAKRHIDSCSTILDVQGVGLKNFSKDARELIMRLQKINNDNYPETLHRLYIINAGQGFKMLWGTIKSFLDPQTASKIHVLGSKYQNKLLETIDESELPDFLGGKCRFVLVEKHNDGTGRTSKSNYCVVDSLNLTASLSSQAISRENSTHSSVLRRLGELEEKLQELEAKQSQMPPDREELLNGAIHRVDALEAELISTKKMLYDALMRLDELLAYADQQKNIQFRKKRFCF

SEQ ID NO: 143225 - protein, 62 aa, Oryza sativa
  Clone ID: PAT_MRT4530_44154C.1.pep
LVLQGYPCQILHVEPSPPLQSLWGINKILLLVKLTIKDTPTTGDPPLDAALVTAVTCTSTVL

SEQ ID NO: 143226 - protein, 48 aa, Oryza sativa
  Clone ID: PAT_MRT4530_44155C.1.pep
MAAIWESHFSAFLFMLIVPSTPSTGKKRGRERRQRLWGYRLATHPKLR

SEQ ID NO: 143227 - protein, 526 aa, Oryza sativa
  Clone ID: PAT_MRT4530_44156C.1.pep
MGSAASAAAPPPPPTAQPHMAAPPYGAGLAGILPPKPDGEEEGKKKEVEKVDYLNLPCPVPFEEIQREALMSLKPELFEGLRFDFTKGLNQKFSLSHSVFMGSLEVPSQSTETIKVPTSHYEFGANFIDPKLILVGRVMTDGRLNARVKCDLTDDLTLKINAQLTHEPHYSQGMFNFDYKGTDYRAQFQIGNNAFYGANYIQSVTPNLSMGTEIFWLGHQRKSGIGFASRYNSDKMVGTLQVASTGIVALSYVQKVSEKVSLASDFMYNHMSRDVTSSFGYDYMLRQCRLRGKFDSNGVVAAYLEERLNMGVNFLLSAEIDHSKKNYKFGFGMTVGDMYEMKSLTANRHHRWLSRRGLSRATSTLYSKSSNTLKQIWRRRSMWTGSEVGETKNKVDEAEIDGSFEAQDDRGGIGMILRDSAGQVIFTSWHSLDYCTEVLEAEFLASKEGLSLRIQWMRLLIVVETDCSTVVQLLQAKTSDKSGLAYIVKEAKELMTGHREIVLNKVHRSKNNISSNRARCESLLVF

SEQ ID NO: 143228 - protein, 77 aa, Oryza sativa
  Clone ID: PAT_MRT4530_44157C.1.pep
MAEKFRSVREKRLCKPRGSDAGLAEIVKLRFYYVLAVGNLIKERVRLQGRNVACHVTLSKQASCLEETSKRRRQNLQ

SEQ ID NO: 143229 - protein, 213 aa, Oryza sativa
  Clone ID: PAT_MRT4530_44158C.1.pep
MRRKGSECTRITPETTGGGKPTISLQASSWSSRMEPSDPDRRSRLARGACGSRLLRSARWTATRFYRRARASVARAFRPASTKKGPASCAASRSPDCTPARNSSRRHSLAPVVADDSHKSEAVEECIRFMNSSSRKYRADRKRRGVALSRAAGRSSDGGVQGWWGKRRRPGRGGEAVAATTAASRAGGGSGGARRGWQGKRRQRALVLLLRGA

SEQ ID NO: 143230 - protein, 754 aa, Oryza sativa
  Clone ID: PAT_MRT4530_44159C.1.pep
MKLKQLEGLLGDLQQFTAPKAENSFDDITGKVVADFGCGCGTLSVASSLLDAEHVVGIDIDPQSLELAQENAADLELDIDLIQCDIKNLNLRVGLLVDTVVMNPPFGTSRKGADMEFISMGMKVATRAVYSLHKTSTREHIKKVALRNCNAISAEVLCELRYNLPRTYKFHKQNEVDIAVDFWRFVPRARDEDKPMDGTCLPTCIQQAVQVLTLKRVVQSSVTGWNKQPLMQELTKALKSVSSDLLDRFIDSVYKFSEQPYLNEGNFGPVNEIGDEVFIDDLNGEVPKDFPEGVYIRNGPNPLNASQTAAESIFGPTSYMYYEGHGMLHAIYLSKSNLGEWRISYKNKYVDTDTFELERKKNKIAFLPSAEGEPCATLVAFLLNTVRFGKPVKDSANTSIFQHAGRAFAATENHLPYEIDINNLRTLGPYNINGAWDQPFTSHPKKICGSGELVTMGTNIEKPHYVLGVISSDGERLLHKVDLKFEEGKLIHDIGVTAQFIQNDMGGISRIGVMPRFGDADSIIWFDVENHCSYHLFNCFEDGNEVVIRGCRTLDSVLSSASHDDDKSKCSGRAFLQPDKNSEGFDPSVDGTLFSRPYEWRLNLKSGTTKEGYLTDEKVAMDFPVINEDFVGVKNNYGYAQVVDSVATSEIGLFKYNRIAKVHFDRQDKENKQLKSVEYHVLKEKTFCSGVQFVAKENGIDEDDGWIITYVHDELTNVSQVYIIDAKRFAEEPVLKITLPQRVPYGFHGNFFYK

SEQ ID NO: 143231 - protein, 81 aa, Oryza sativa
  unsure (1)..(81): unsure at all Xaa locations
  Clone ID: PAT_MRT4530_4415C.1.pep
VEGGSSANLVXKKNPHASHNNNNNVKPDIKPKATTNFKKKGKRKAKGNCFVCGKPGHXAKDCPERKDKKSANMVIIEGGGT

SEQ ID NO: 143232 - protein, 90 aa, Oryza sativa
  Clone ID: PAT_MRT4530_44160C.1.pep
MEGVEEGTQPMAEAAMRLDGDGGRGYCRQMRLLTRRCRSMQPPIRNFKVPISDPAIAVKKPSTMLLSDIHRKCIEIMKPTHERLDWEALP

SEQ ID NO: 143233 - protein, 225 aa, Oryza sativa
  unsure (1)..(225): unsure at all Xaa locations
  Clone ID: PAT_MRT4530_44161C.1.pep
EDDLGAGDVLTFRFHSLAVLKLFDRIREYRLHDYRYQATRGWYSSGTAPEDALLPCAVARPPRMYGCVIGVQRGRTVEVVDTSDILLDTDPGTLDRDLLKKKLETYKKAFPGLAILGWYSIDTHVTNTDMETNQALMDASGTTFYLLFNPAMNLSLKDLPVTIYEKVHSTNRSPTPLIFVQAXYKTETVEAERISLDHTCPVVSDVSVPPLVGKGNMQILCRLLD

SEQ ID NO: 143234 - protein, 75 aa, Oryza sativa
  unsure (1)..(75): unsure at all Xaa locations
  Clone ID: PAT_MRT4530_44162C.1.pep
IASPPPLHFVTHIDNCDYYHHHLFFTMDAQEHHHLQEIKPTSPXTSGRIADSGGRAVGTVVDHNITSLARPRRGQ

SEQ ID NO: 143235 - protein, 70 aa, Oryza sativa
  Clone ID: PAT_MRT4530_44163C.1.pep
KKSGTPLFSTDIKQNHPQGTHVGGYIILHPDTSSKTQHCGGSLWDTLKNPGEYWWKNLGGRAPRFSPLVF

SEQ ID NO: 143236 - protein, 102 aa, Oryza sativa
  Clone ID: PAT_MRT4530_44164C.1.pep
RATAHPSQQTVIQSKRRRFNNETPIPPGSEGGEEESSIEAASMRRRNDSVRLLFSGAAIMKSMNSIISALVYLSSLGTIPSRGEILNPYSFICLDIALLSGN

SEQ ID NO: 143237 - protein, 549 aa, Oryza sativa
  Clone ID: PAT_MRT4530_44165C.1.pep
NLAFPPVKRPHEDDLGAGDVLTFRFHSLAVLKLFDRIREYRLHDYRYQATRGWYSSGTAPEDALLPCAVARPPRMYGCVIGVQRGRTVEVVDTSDILLDTDPGTLDRDLLKKKLETYKKAFPGLAILGWYSIDTHVTNTDMETNQATVIWLSVWSYYEEMLLLLMDASGTTFYLLFNPAMNLSLKDLPVTIYEKVHSTNRSPTPLIFVQGKYKTETVEAERISLDHTCPVVSDVSVPPLVGKGQHANIMQTSGFKLMLFEIPSGFAMFEVSQELIARPKDIWARFAYQDDITNVIVTLGSIQIHNKSVARDIIVGPGDELKEFILSFCTHNYLIVQDVELKDVIEKKLNIYCYCNPTVVGELTWGLNYVLHKLLPQEQSLTHEPYLPLSKAMSKQIKEYGFKISPREIDREFLRAMSFLNYLGYMSERYSLLLDHLFGQYRKNNMSDIEFAKSIASHLHSSEGIVPRDERYTRAEIMEFIDFIIAAPENRSRTLSFLRRIEAASIDDSPPPPSLPGGMGVSLLKRLRLDWITVCCLGCAVALYPFYRRV

SEQ ID NO: 143238 - protein, 186 aa, Oryza sativa
  Clone ID: PAT_MRT4530_44166C.1.pep
MAPPRPHLTAPAEEKYILPQHVFSDPDNSSAHIESLHLGYVCLNTVATTGFAGFANTHLMLQGFAKTSARFVNLRRQLRHPRHERVVQHHRRRPPLLRLFPDQLVQRHRPDLLQPLEVRATVAAEIRWAALVAAVGEHHDVHRRRTKAGLGQADDEPRHSDGAPDAAMTAKTSSGGGAGGMGGHER

SEQ ID NO: 143239 - protein, 212 aa, Oryza sativa
  Clone ID: PAT_MRT4530_44167C.1.pep
MAKRRAESELEQVEAEAEAEAEAEKNGRRAAGSQDGIFSLKLSNITATVDGPVHLYGYFAVRDHLDPLRNYIFNRTRDDPFIMGQDNGVDSDNSLIPMPGPKRGIGNQARVLIEFDMKIKNGETRDDDFQLIDARMEAMMLSNPTNCRPHMWACKAHSVQFMMQIFSLKLSNITAAVDGPVHLYGYFAVRDHLDPLRNYIFNRTRDDPFIMG

SEQ ID NO: 143240 - protein, 41 aa, Oryza sativa
  Clone ID: PAT_MRT4530_44168C.1.pep
RARLLTFLAANQSSTAMSDSGSRSLCGRFLTSYIRLKLSIT

SEQ ID NO: 143241 - protein, 364 aa, Oryza sativa
  Clone ID: PAT_MRT4530_44169C.1.pep
MAKRRAESELELVEAEAEAEAEAEAEKNGRRAAGSQDGVNRAFILECSKHSDGSIYSGDDFWHRFYKVADTRETRMEAMMLSNPTNCRPHMWACKAHSVQFMMQIFSLKLSNITAAVDGPVHLYGYFAVRDHLDPLRNYIFNRTRDDPFIMGQDNGVDSDNSLIPMSGPKRGIGNQVRVLIEFDMKIKNGETQDDDFQLIDGAIICSEFVLPDRVFTQRIEGDCGAVDISRALFHEAVEATIQVSISQVHVNGLSLSLYSYTSRIPEKIRLFDGVISKPCDLNRVVAVVENTPLFLIFRAVHRDGSDYDIPKYCPLVFKVDQGDGSYRVSEYCPFKARRHGYDMKELKLGGARVLLKVSWSTLK

SEQ ID NO: 143242 - protein, 40 aa, Oryza sativa
  Clone ID: PAT_MRT4530_4416C.1.pep
EENFMGFKILSRLRHYTLHCSIHLTSSIACSSLPIRTMFS

SEQ ID NO: 143243 - protein, 255 aa, Oryza sativa
  unsure (1)..(255): unsure at all Xaa locations
  Clone ID: PAT_MRT4530_44170C.1.pep
MAKKTILQVVCAVALVALCACGVAASPSSPAGAGCRKHVARITEYGGVGDGRRSNTAAFAKAVADLSLRAGDGGAALVVPXGKWLTGPFNLTSHFTLFLDHGAEILASQNLEDWPLIAPLPSYGRGRDEPGPRYSNFIAGSNLTDVIITGRNGTINGQGQVWWDKFHAKELTYTRGYLLELLYSNNIIISNVTFVDSPSWNLHPTYCTNVTISGITILAPLNSPNTDGIDPDFFSHVKIRDSYIVSGDDCIGLKS

SEQ ID NO: 143244 - protein, 70 aa, Oryza sativa
  unsure (1)..(70): unsure at all Xaa locations
  Clone ID: PAT_MRT4530_44171C.1.pep
MPTPSHLKNPLCFDFRAAXRVPEXXAWPGLDXXPVVDXGGRXSXDXVPVVDIXGXRIXAXVARXAEXLGR

SEQ ID NO: 143245 - protein, 198 aa, Oryza sativa
  Clone ID: PAT_MRT4530_44172C.1.pep
MGWRWHDDGDDGGRGLGDIPDLAGGGGGGDGERCATRRVVQSRCHTEEVEPGRFVRKCEKTEQLLRDCVGRPSELVESKTENTEEDVTDEMKSGSLSLGFPTNEPFAFPGLRSDIEALEKGLFGSIGSFLDDAERMTNDFLKSFGVPSINERESSSFDGQPTGRHIGGQPAGRHIEEGTAKDTKQNDYAEFSSKITDV

SEQ ID NO: 143246 - protein, 119 aa, Oryza sativa
  Clone ID: PAT_MRT4530_44173C.1.pep
PGATPGPGGGHKGSPPPTPFSPGGSPSPSGPPRRLIPVFPGPGLGKGGLPGPGSRLPFPPTPLCLQPGPKNWRVPVDLLGGPPQAGGSCAWGGPPFPGFAHPPCLGPPLGGPPSPFCAF

SEQ ID NO: 143247 - protein, 157 aa, Oryza sativa
  unsure (1)..(157): unsure at all Xaa locations
  Clone ID: PAT_MRT4530_44174C.1.pep
VVTGSIPCLSTSCGEAAARSYEDGGQFRTAPPPPPPPPPPQRAXPPASPAGQKALTAPAXPPGRPPPPSLSPFLPPRRDAPAANAAHCHPPYPAASAPLPAPYRPPXPPPTAGPPPPMAIPLSPATSPFFPPPTPXPNPPRDPNSPAPEKKRRSPEL

SEQ ID NO: 143248 - protein, 409 aa, Oryza sativa
  Clone ID: PAT_MRT4530_44175C.1.pep
MRKPDCGGGGGAAKGGGVLGVAGGNNAAVVGGKVRKGLWSPEEDEKLVAYMLRSGQGSWSDVARNAGLQRCGKSCRLRWINYLRPDLKRGAFSPQEEDLIVNLHAILGNRWSQIAARLPGRTDNEIKNFWNSTIKKRLKISSSSASPATTTDCASPPEHKLGAVVDLAGGGGATDDVVVGTANAAMKSMWVDSSSSSSSSSSSMQSRPSIMAAAAAGRSYGGLLPLPDQVCGVDTSPPPPFFHDHSISIKQAYYGSTGAHHHHHAIATMDGSSLIGDHHHHSSSILFGGASVPPLLDHQTILDDDDDHPNKTGSNTTAATLSSNITDNSNSNKNNSDNNNNISSSCCISLMNSSSNMIYWEGHHQQQQQQHQMLQQQQQHMSRNVMGEWDLEELMKDVSSLPFLDFQVE

SEQ ID NO: 143249 - protein, 133 aa, Oryza sativa
  unsure (1)..(133): unsure at all Xaa locations
  Clone ID: PAT_MRT4530_44176C.1.pep
PNANVAVNAKDLPLRWMLHNGYEVPRDMLQSGSDAESSFRGGGDLTPGGDTGQSIAGEVWGNVKDIVGQKKDEYDYTKLFKTYFIHSLPAFLSRTRXYLWRCGKQRLREARIQGVDYLILGLAGLCLGTLAKV

SEQ ID NO: 143250 - protein, 84 aa, Oryza sativa
  Clone ID: PAT_MRT4530_44177C.1.pep
GGKLGWRRLGGDWGWDRAGQGSPLGGNGREVDLRCHGAERREPVGMQAYVCFFFYCLFFFFFFFFFFFFFFLSLIFLSHWHTAV

SEQ ID NO: 143251 - protein, 307 aa, Oryza sativa
  Clone ID: PAT_MRT4530_44178C.1.pep
MEIGLTLADHHEGETDGGLAAAAAAAAAATGGGREGRVDLAVVVIHGDRGGSVARDAAPGSMAMAVVEAGRRISGKTSVPASSPNRLHATQSNFRGSGSSARSLMISLGLKDHSQVNTSLVVSVITKATDMGGHGQWRGRRLRRTQVMACMSLRWMQTKVAAAVDKGKGDDDGCGGRGRRTRVWTVGRTWASAAEDEDSGMEASNGNGYERGWQDGCEGQGRRPQARMAGRPRTTTAVVVDEDNDRGGHGCGCGMNVPCRAEDEDGGTNASNGCGREGRGWRLQARVVGWPRATSVATKDENDRGRW

SEQ ID NO: 143252 - protein, 553 aa, Oryza sativa
  Clone ID: PAT_MRT4530_44179C.1.pep
MASISPTSSSVAALRGHPVQFVKGGAVSKEAKGSISFSPVANSNNANVKFTGLRVAASLKRDGAFPGDGYSGNDNTVLPKSTSVRGQDYPTADSVLPTESIIVPEISNAGLKCVADMFSDEDKDTEQDLDSPTEGFSSISEAIKDIQQGKLVIVVDDESRENEGDLIMAASLVTPEAMAFVVRYGTGIVCVSMKEEDLERLNLPLMVATKENEEKLCTAFTVTVDAKEGTTTGVSAKDRAKTVMTLASPDSKPEDFNRPGHIFPLKYREGGVLKRAGHTEASVDLAMLAGLPPAAVLCEIVDEDGSMARLPKLRVFAERENLKIVSIADLIRYRRKRDRLVERSSVARLPLRWGNVRAYCYRSVIDGIEHIAMVKGEIGDGQGVLVRVHSECLTGDIFGSARCDCGDQLAMAMEMIEKAGRGVLVYLRGHEGRGIGLGHKLRAYNLQDDGRDTVEANEDLGLPVDSREYGIGAQILRDLGVRSMKLMTNNPAKYGGLKGYGLSIVGRVPLVTPITSENRRYLETKRTKMGHVYGLANGQASHQTGSNGAKGEH

SEQ ID NO: 143253 - protein, 94 aa, Oryza sativa
  Clone ID: PAT_MRT4530_4417C.1.pep
MASFLPGGRAELYDAHAYMRRHMLDIRQHRGLKLPTLTKTPRGVFMGEKFKSWTAYSLDQIKFHSIQAAGTILKDTTIVPYRGRSCVKNEMLPS

SEQ ID NO: 143254 - protein, 291 aa, Oryza sativa
  Clone ID: PAT_MRT4530_44180C.1.pep
MDGAGISLVSSAQLAALLLHYTQVSTALVNKVITAICMERTADENLNHVYWRWSSTYYVVARVQYYQVPTGAQVEQFSKYSTSDEDNSATTTMNKQSSLLFSILNSSNQSIYYTDTSSICCLLALTDLCRRHVLSGVRKRHGSSSDSAPTCMCAVKYCYMVEGRRQCARAGGAAVSPGERGCGDGKRRASVTAGKRQLRVWAPHLPQLRPLPLLRRATTLGSFDECDGGGGNQRQERLLIGSPDARRPLCPQLAALAFRSPAAVQRRSACRHAARLRSAHRPRSVDSAAQG

SEQ ID NO: 143255 - protein, 396 aa, Oryza sativa
  Clone ID: PAT_MRT4530_44181C.1.pep
MPPPPSATAGRRSPFSALLLYVTFALVILLLLTSYSPSIPHRGRSLHRRLKLHPRNPSLSGAGAGAPTGGNGAPQKQQNHHHAAPFDPEIAELERRLEDKEWEREHYRILHGDGGGGEADEHMREWEEFLREDEDFINDDERFNLGDRIRALFPKIDLAPRDGFASLDELTRWNLEQSRADQLHRSAREMELYDKNGDGVVSYGDFRAQHNESSGEVNSLGFPWWKEEHFNASDADGHGFLNKTEFNDFLNPSDSENPQIINLLCKQEIRQRDKDGDGKLNFEEYFHGLHDHIHGYDYENADISHIGNNTVAKERFSKLDKDSDGFISEHELEPVLDKLHLSERYYARQQAAHAISEADKDHDGRLTLDEMIENPYAFYGSVFLSDDEDYFHDEFR

SEQ ID NO: 143256 - protein, 406 aa, Oryza sativa
  Clone ID: PAT_MRT4530_44182C.1.pep
MAGAGAGEGGTVLVGVRGYDSGHREKEGGSTATSRTSNGRPIEMTFWNEAPPALSHFSAHGSDLPPAAHGDLLLAPKVIAAAYGLLLLRVPVNPVPGGKSLFRQDDYFVYHHHQPARLDLLPRPCQQYCLRDDDFAIVSICGDKQQYVVAALEMINLPSQFALHRYKSSSGGGDGDEIAGNWTCEEVFVEEAVRDRVCPIPDSAERPVYHITTKTIALGGAKGTVGWVDLWRGILLCDLLDEMSPPKLRDMPLPWPAKGNWTRYLSDSESFYRDITVSQHKDFIKYAEMEITMPRVVTKTIISSGDRTMPADDPPDSFLEWVRRSREPQPQPTTRQRSSVRRPGQWRLTTWTMPIPVTSWEDWRPDCTANLHDFHVVDNTAHHGLLDKLIVETNFRQYEKGVAYET

SEQ ID NO: 143257 - protein, 35 aa, Oryza sativa
  Clone ID: PAT_MRT4530_44183C.1.pep
WCCWKGDQYIVVQLKLEQQYLHSRISLLCLDLVKR

SEQ ID NO: 143258 - protein, 50 aa, Oryza sativa
  Clone ID: PAT_MRT4530_44184C.1.pep
VSMYAHNKVVDAEKDLCRTALRSLRLTSIAKAVLSAALRADSESCMHALS

SEQ ID NO: 143259 - protein, 97 aa, Oryza sativa
  Clone ID: PAT_MRT4530_44185C.1.pep
HSIAQYSKSGVRYPSRVRLLVNCCRSRCRGVCCSSRRWGRMCRKGGLAVHVDQVHRLGQKPARALEALGDRVGRLVVDPHEKVNHPPRRLRLRVEST

SEQ ID NO: 143260 - protein, 507 aa, Oryza sativa
  Clone ID: PAT_MRT4530_44186C.1.pep
MAIESAPARNERRGQHVVLLASPGAGHLLPVAELARRIVEYDGFTATIVTHTNFSSAEHSSTFSSLPPSISIAALPEVSVDDLPADARVETRILTVVRRALPHLRDLLRSLLDSPAGVAVFLSDLLSPRALAVAAELGIPRYVFCTSNLMCLTSFLHNPVLDRTTTCEFRDLPGPVLLPGCVPLHGSDLVDPVQDRANPVYRLVIEMGLDYLRADGFLVNTFDAMEHDTAVAFKELSDKGVYPPAYAVGPFVRSPSGKAANDACIRWLDDQPDGSVLYVCLGSGGTLSTEQTAEVAAGLEASGQRFLWVVRYPSDKDKTASYFSVSGDGDGEDSPTNYLPEGFLERTKGTGLAVPMWAPQVEILNHRAVGGFVSHCGWNSTLETVAAGVPMVAWPLYAEQRMNAVMLSSSRAGLALRPSNAREDGVVTRDEVAAVARELITGEKGAAARRKARELREAAAKATRAPGGPSRQAFEAVVGGAWKKAAAAARGGRAGEPDDNGTAVTAQ

SEQ ID NO: 143261 - protein, 78 aa, Oryza sativa
  Clone ID: PAT_MRT4530_44187C.1.pep
KPMLCFSYNYHSQIHRLIFRQYCRNTLVLKASKDSILNGALHIMFNELRLTFLHPICLSLPHVTADAWVNKFIYLTKI

SEQ ID NO: 143262 - protein, 63 aa, Oryza sativa
  Clone ID: PAT_MRT4530_44188C.1.pep
METEKPISSKTQFLGTIADASATHGSAKRTLKLIQNTKPPTLLMANNDDDAKNTNSEKSTKPR

SEQ ID NO: 143263 - protein, 162 aa, Oryza sativa
  Clone ID: PAT_MRT4530_44189C.1.pep
RWGRIGPPLRGRPVPQKKHLLPIAPPDQQNLLPIAPPDQQGHAKENDRKVDGVKEISNPLDIEIRASLLQQIRDKSGQQKLNGHEKSKAVGNDTKNLDEREELLQQIRSKTFNLRRTNASKTNTSSPTTANSSVVAILEKANAIRQAVASDEGGDDDSWSDI

SEQ ID NO: 143264 - protein, 87 aa, Oryza sativa
  Clone ID: PAT_MRT4530_4418C.1.pep
IFPIDDQMNMKSVVEYFKEMYGFTIQHPHLPCLQVGNQKKANYLPMEACKIVEGQRYTKRLNEKQITSLLKVTCRRPREQEMDILQV

SEQ ID NO: 143265 - protein, 526 aa, Oryza sativa
  Clone ID: PAT_MRT4530_44190C.1.pep
MVGKRDRIGPMATRLLLLLLLLLGMSLKGSEGAWCVCRPDVAEAALQKALDYACGHGADCAPVTPSGSCYSPNNVAAHCSYAANSYFQRNSQAKGATCDFGGAATLSSTDPSSGTCKYPATARDKHRNRHGGCRHRHRYKHEHEHEHFFPGLFNCSHGSGGCARGCSLRGEIGVDARRGVAVVGVRAMRKLCPNLDRDDSLDTVLEVPIPDEMLINAPGTDKRRGAGGANMRAWLKNQAFDRATVGGPANATAELQLFLNVVGSPLIPCPVPHDRAFSRSIRDSSIQASTAKYIMQQYIAATGGQAALQGLQSMYAVGKVRMCASEFHLGDQNVTAAQGRAEVGGFVLWQKCPEVWGWTRGRIANLFSDAVCIGEKIITGEECFILKLEASAATLRARSAAAFDIIHHTVWGYFSQRTGLLIQLEDSHLLRMKSGKGARRSENIFWETTMESTISDYRHIDGINIAHGGHTAVTLFRYGEGSVNHKRKLEETWTVEEADFNLYGLTTDYFLPPSDLKKDIDEKRAG

SEQ ID NO: 143266 - protein, 256 aa, Oryza sativa
  unsure (1)..(256): unsure at all Xaa locations
  Clone ID: PAT_MRT4530_44191C.1.pep
MRKLCPNLDRDDSLDTVLEVPIPDEMLINAPGTDKRRGAGGANMRAWLKNQAFDRATVGGPANATAELQLFLNVVGSPLIPCPVPHDRAFSRSIRDSSIQASTAKYIMQQYIAATGGQAALQGLQSMYAVGKVRMCASEFHLGDQNVTAAQGRAEVGGFVLWQKCPEVWYFELIMAGHKMSAGSDGKVAWRQSAAENSHASRGPPRPLRRSLQGLDPRSIANLFSDAVCIGEKIXTGRECFILKLEASAAKLRARS

SEQ ID NO: 143267 - protein, 172 aa, Oryza sativa
  unsure (1)..(172): unsure at all Xaa locations
  Clone ID: PAT_MRT4530_44192C.1.pep
MATRLLLLLLLLLGMSLKGSEGAWCVCRPDVAEAALQKALDYACGHGADCAPVTPSGSCYSPNNVAAHCSYAANSYFQRNSQAKGATCDFGGAATLSSTDPSSGTCKYPATASAXRDKHRNRHGGCRHRHRYKHEHEHEHFFPGLFNCSHGYADHGRDLRYADRRRRVWADD

SEQ ID NO: 143268 - protein, 80 aa, Oryza sativa
  Clone ID: PAT_MRT4530_44193C.1.pep
ALFPPPIYMIFTWPIKQALMVCFPKGVLFRGTSLINLISRCFGPGPPFFLGRGPPPPPCWGPRGPMPRCGGGSTRGGSRF

SEQ ID NO: 143269 - protein, 62 aa, Oryza sativa
  Clone ID: PAT_MRT4530_44194C.1.pep
PLGRDHLLLPPPFSLLQHLSSSTTTSLSHETAFLLWLLMASKNKSFYTKTIVQYIKKIETMF

SEQ ID NO: 143270 - protein, 58 aa, Oryza sativa
  Clone ID: PAT_MRT4530_44195C.1.pep
FSSSSICDRLHDVASPPPRLCLTRMRPDYFILLKVSRASAPMPPSCPVVRSAILFGRA

SEQ ID NO: 143271 - protein, 124 aa, Oryza sativa
  unsure (1)..(124): unsure at all Xaa locations
  Clone ID: PAT_MRT4530_44196C.1.pep
LSTDFTLYLCRYSCVTSLPERCNGMGLMSKYSVTLCRMHGCRVEFNNVDLVSRLLSIINWGYMLRIRRGGPLMVTAQYGYSSARVYNPKXISWGGYSSVFSPGWMAMTGCRKELGNQGWSLKTE

SEQ ID NO: 143272 - protein, 83 aa, Oryza sativa
  unsure (1)..(83): unsure at all Xaa locations
  Clone ID: PAT_MRT4530_44197C.1.pep
MNPTRRPRRRERSRAAEVEQTLPEACGGTDEATEGARAVPEKRAMENKHNLISEPTRPVPLTSHHXLNGFKFYAPYILVFQYV

SEQ ID NO: 143273 - protein, 110 aa, Oryza sativa
  Clone ID: PAT_MRT4530_44198C.1.pep
MAHKPPQRKDRPHRAIAASIAFRAATPQRRTDDAVRRAPASRSPPAFYHDDPQDNFSGCHSHERERVKTIMFDSFSQITTSSTSITYLEEKIYRKGCDKHKMNLIRDHDN

SEQ ID NO: 143274 - protein, 73 aa, Oryza sativa
  unsure (1)..(73): unsure at all Xaa locations
  Clone ID: PAT_MRT4530_44199C.1.pep
SSCKVHHRSLNLYRCVIPVPKLANRPLRSSNLFDCVISVPKLVYHSFRSSNLFSCVTPXVPKLQIRYHVGPTC

SEQ ID NO: 143275 - protein, 662 aa, Oryza sativa
  Clone ID: PAT_MRT4530_4419C.1.pep
MSNKLHNSSRHSFLLAWHSSNLAILHEAIRIIPRYIVAIVVEILRGLLVILLLGFVLHLAGGDRHPPPGPIACARGGTSGGCTVTNIYGSFPDRAACRAAGVAYPRTEEELVAAVAAAAAAGRKAKAATRYSNSFPRLACPGGVEGEGGVAISTRWLNRTVRVDAARRLMTVEGGMVLRDLIREAAAAGLALPHSPYWSGVTVGGALATGAHGSSLWGKGSAVHEYVVGMRIVTPAAASEGFAVVRELAADDPDLDAAKVSLGVLGIISQVTLALEPQFKRSVKFVKRDDADIAEKVAVWGRLHEFGDMVWLPGQRQVIYREDNRVNISTPGDGLNDYFGFRAQPTLSMVGARVIDECLEENPMYTDTARCLASRAVTKMFDLLAYGFTNDGATFTGYPVVGYQHRIQSSGSCMGSLEEKDDGLLLTTTCPWDRRTRGVFAYNVAFTVPLSRAPAFVADVSRLRDLDPAAFCQIDAKMGVLVRYVAASSAYLGKAEDSVDFDVTYYRSRARGAPRAHADVFDEVEQMALRGHGGVPHWGKNRNAAFDGAIARYPNAGEFLRVKDRFDPEGVFSSEWSDRVLGVGGASPAIVGDGCAMEGLCVCSDDSHCAPELGYFCRPGKVFTEARVCSLLRDAADGYLRDRHGNVRVNATSTGKHSLLHE

SEQ ID NO: 143276 - protein, 153 aa, Oryza sativa
  Clone ID: PAT_MRT4530_441C.1.pep
MSRRREEEEGDDEAEEARPRGEVRWWEADATGHRGGGEEEVGGAGVGRESGGGVGWSLFGLCSAEAKKNRKARNEVKKMVRRVKHMHAQLNEHLHVNVPSSPPGFEAEPDEPEEEIEDPFAGLPPDFDFFGFSHGDGYPPPPPPEDPPQAPFA

SEQ ID NO: 143277 - protein, 106 aa, Oryza sativa
  unsure (1)..(106): unsure at all Xaa locations
  Clone ID: PAT_MRT4530_44200C.1.pep
MAPTCATLAEAAVPGARPPXLPPTWGRALIYCLSVDNTLMPCLPYVQSAGTGPRASCGGIQSLLIAANNSPERRTIXCRCLKNVANGDSWGPYISRDRALRCKCNM

SEQ ID NO: 143278 - protein, 241 aa, Oryza sativa
  unsure (1)..(241): unsure at all Xaa locations
  Clone ID: PAT_MRT4530_44201C.1.pep
MGPKRKPPARAAAAKLDPDGMFRGVSAFVVPHAVQSRRLEVWKQRLAQMGGRVQEKLAAKGGGGAVTHVLAADAKALLRELDAAWLHRFRGSVVSFEWLEECLKSGERLPEHKFAINYEEEFKPKKEGGAAGSGVLQSAKRSKISSDGPENRKETAGGNRESRDAIAHPNEDSDVVKGPSTCTSSQSASGDSKETIASQNAFXAEEASSGESSTYAPPDLNRNITEIFGKLINIYRALGDD

SEQ ID NO: 143279 - protein, 107 aa, Oryza sativa
  unsure (1)..(107): unsure at all Xaa locations
  Clone ID: PAT_MRT4530_44202C.1.pep
SFKPRQEPVLLNVPALPVDRMLLLDSDFTIVIFHGQTMAQCRKAAYPDHIWLDGCAHLMTAPPQDPDSLILERFTVPCLIXSDNFRSQAHTLLALLIPTVKYNSDSS

SEQ ID NO: 143280 - protein, 1772 aa, Oryza sativa
  Clone ID: PAT_MRT4530_44203C.1.pep
MAAAAWGGTTQKCDSCGRTVYPVEELAADGRVYHRPCFRCTHCKATLQFSNYSSVEGVLYCKPHYDQILKSTGSLEKSFEGTSKSAKAEKSNGNKGQPNRFSSMFVGTQDKCVVCNKTVYPLEKVNLNGSSYHKSCFRCTHGGCTLSPSNNVTHEGKLYCKTHHSQLFMVKGNFSNFEDSTPNAKVDIEKQPEHEDATKNPGGPGQGDGLTEKPLESELTPEKPSQDDIVAEKQSQSSVDVPKQSESSTTVQRSEEGERVTKGESNSHVVSKKPLESSVEKPFQSSAVNLQPSGSSAAVRKPWQRNLPTDKPLLSNTTTEKSTPSSAAIEESLPSNGVDAKQPESSTASTVVKRPWQRRVATENLPQSISPSDKPSSTSADDVKPSENSKLIRKPWQRAVAAEAQIQNSGPTEKSSLTNDTKPSESTTSIKRPWEHKVVNEKPLQNNIDTEKPLQNNTDTEKSSSSAIDVKLAETSTTPTVPQEHSGITEKPSQTSADDVKPSESTAAVVKKQWQRNIGFQKQPQSSVTDAKTPESRGMGKRLWQRNVPTEKQSQSGASVVTPSQVSVASTNPLQSSVVVKKPWQRSVSREKEPEKDISSNKPLQNRVLAEEAEKTNVTADNKSQIIQDKKNNGATTENSSQISESAKKLPLTANKSQADTSTEKLSESDILAVASSQITEPSKKPSENTAENEKPSQTDIATDELPLTQSVEAMSEPSPSDAAHQEISEREILTDKLPESTMAVEKLSQTATLTEKPSKEDAAEKLPQTNEPSEQPHESEETAEKPLQNEANAESTTKQSDLSLEKPPQVDANVGNPTEPESDATSGVNSSDAQIRPTAEQLVGPQGIVSAEKTSDQILEANTDPAADQSSESQDVAPAKVATEQPLENQKAAASEQPLEPQHEAYEENPQEHNSDATAKESSEPERDTASDQLAEQPSESRTAGEKATLRESDVVTEDPAEPQIDAAAERSAEVLSESQTGVETPVLHQSDRTNEVPSEPQTDEASDKSTEQPLEPENDASVEDEKPPEIESDDVHDKPSESTPDTETLPHNTPKSSISISEAADGNVSEEAPPQSSASIETPSESAIAVEEPKHDDEASIKPSEDSSALEEPPQDDSASVEPSENTITLEKASEEDEGSVKPSEGNDALEKTLEEDEASAKLPEDSTTFEKPSEKDDAGTKQTEDPVTLEKEPEEDKGSVEPTQDNAGLEKPLEEDEASAKPSEDSVVLDKPSVEDDDSAKPSEDSMDLEKPEAHKPSEEEDGATKSSPEDAAVEEAPLQVSEEGRRREFSMAPKRKPPARAAAAKLDPDGMFRGVSAFVVPHAVQSRRLEVWKQRLAQMGGRVQEKLAAKGGGGAVTHVLAADAKALLRELDAAWLHRFRGSVVSFEWLEECLKSGERLPEHKFAINYEEEFKPKKEGGAAGSGSLFWRILNVCSPDLNRNITEIFGKLINIYRALGDDRRSFSYYKAIPVIEKLPFKIESADQVKDLPAIGKSLKDHINEIVNTGKLSKLEHFENDEKVRTVSLFGEVWGVGPATALKLYDKGHRTLDDLQKDDSLTSAQRIGLKFFDDIKQRIPRHEVSEMEKLLQEVGTDILPGVIIVCGGSYRRGKSSCGDMDIIITHPDGESHVGFLPKFVQRLKGINFLREDLIFSIHSIEGTDCGVDTYFGLCTYPGRELRHRIDLKKVYPRNRHAFGLLAWTGNDVLNRRLRILADSKGYILDDTGLYLATPGSGGKRGGRSDAIINCDTEKDVFDTLGFPWLEPHERNL

SEQ ID NO: 143281 - protein, 120 aa, Oryza sativa
  unsure (1)..(120): unsure at all Xaa locations
  Clone ID: PAT_MRT4530_44204C.1.pep
WIGTDKHRRFPISKIGGLHGGERGSGGRPPSLAGSSSPPLPVLPSPDPAEGRGVSGGAAEGEHRCRWRMAXRPAARRPPSPTMRAGAASSVAAADDDEKDGPKIVLFPSHAGRPTALSKP

SEQ ID NO: 143282 - protein, 1844 aa, Oryza sativa
  Clone ID: PAT_MRT4530_44205C.1.pep
MAAAAWGGTTQKCDSCGRTVYPVEELAADGRVYHRPCFRCTHCKATLQFSNYSSVEGVLYCKPHYDQILKSTGSLEKSFEGTSKSAKAEKSNGNKGQPNRFSSMFVGTQDKCVVCNKTVYPLEKVNLNGSSYHKSCFRCTHGGCTLSPSNNVTHEGKLYCKTHHSQLFMVKGNFSNFEDSTPNAKVDIEKQPEHEDATKNPGGPGQGDGLTEKPLESELTPEKPSQDDIVAEKQSQSSVDVPKQSESSTTVQRSEEGERVTKGESNSHVVSKKPLESSVEKPFQSSAVNLQPSGSSAAVRKPWQRNLPTDKPLLSNTTTEKSTPSSAAIEESLPSNGVDAKQPESSTASTVVKRPWQRRVATENLPQSISPSDKPSSTSADDVKPSENSKLIRKPWQRAVAAEAQIQNSGPTEKSSLTNDTKPSESTTSIKRPWEHKVVNEKPLQNNIDTEKPLQNNTDTEKSSSSAIDVKLAETSTTPTVPQEHSGITEKPSQTSADDVKPSESTAAVVKKQWQRNIGFQKQPQSSVTDAKTPESRGMGKRLWQRNVPTEKQSQSGASVVTPSQVSVASTNPLQSSVVVKKPWQRSVSREKEPEKDISSNKPLQNRVLAEEAEKTNVTADNKSQIIQDKKNNGATTENSSQISESAKKLPLTANKSQADTSTEKLSESDILAVASSQITEPSKKPSENTAENEKPSQTDIATDELPLTQSVEAMSEPSPSDAAHQEISEREILTDKLPESTMAVEKLSQTATLTEKPSKEDAAEKLPQTNEPSEQPHESEETAEKPLQNEANAESTTKQSDLSLEKPPQVDANVGNPTEPESDATSGVNSSDAQIRPTAEQLVGPQGIVSAEKTSDQILEANTDPAADQSSESQDVAPAKVATEQPLENQKAAASEQPLEPQHEAYEENPQEHNSDATAKESSEPERDTASDQLAEQPSESRTAGEKATLRESDVVTEDPAEPQIDAAAERSAEVLSESQTGVETPVLHQSDRTNEVPSEPQTDEASDKSTEQPLEPENDASVEDEKPPEIESDDVHDKPSESTPDTETLPHNTPKSSISISEAADGNVSEEAPPQSSASIETPSESAIAVEEPKHDDEASIKPSEDSSALEEPPQDDSASVEPSENTITLEKASEEDEGSVKPSEGNDALEKTLEEDEASAKLPEDSTTFEKPSEKDDAGTKQTEDPVTLEKEPEEDKGSVEPTQDNAGLEKPLEEDEASAKPSEDSVVLDKPSVEDDDSAKPSEDSMDLEKPEAHKPSEEEDGATKSSPEDAAVEEAPLQVSEEGRRREFSMAPKRKPPARAAAAKLDPDGMFRGVSAFVVPHAVQSRRLEVWKQRLAQMGGRVQEKLAAKGGGGAVTHVLAADAKALLRELDAAWLHRFRGSVVSFEWLEECLKSGERLPEHKFAINYEEEFKPKKEGGAAGSGVLQSAKRSKISSDGPENRKETAGGNRESRDAIAHPNEDSDVVKGPSTCTSSQSASGDSKETIASQNAFKAEEASSGESSTYAPPDLNRNITEIFGKLINIYRALGDDRRSFSYYKAIPVIEKLPFKIESADQVKDLPAIGKSLKDHINEIVNTGKLSKLEHFENDEKVRTVSLFGEVWGVGPATALKLYDKGHRTLDDLQKDDSLTSAQRIGLKFFDDIKQRIPRHEVSEMEKLLQEVGTDILPGVIIVCGGSYRRGKSSCGDMDIIITHPDGESHVGFLPKFVQRLKGINFLREDLIFSIHSIEGTDCGVDTYFGLCTYPGRELRHRIDLKKVYPRNRHAFGLLAWTGNDVLNRRLRILADSKGYILDDTGLYLATPGSGGKRGGRSDAIINCDTEKDVFDTLGFPWLEPHERNL

SEQ ID NO: 143283 - protein, 47 aa, Oryza sativa
  unsure (1)..(47): unsure at all Xaa locations
  Clone ID: PAT_MRT4530_44206C.1.pep
ALCRCVVRLCVSCWCLVSCIDCCEIDVSHSIHWKLALQEASNCCFIX

SEQ ID NO: 143284 - protein, 62 aa, Oryza sativa
  Clone ID: PAT_MRT4530_44207C.1.pep
MSPRRVQSSPWRSRLAPPLCKTSPRNQQSSPRPTSSAIMPFSPCKQTNDGRTCRRSIDHRRT

SEQ ID NO: 143285 - protein, 69 aa, Oryza sativa
  Clone ID: PAT_MRT4530_44208C.1.pep
MVNHPHAPYPRRRQTVLASIPTSSLSALETVDGVGAVGGVNEPSDPRLGESGVPIEGNALGSSFGANRL

SEQ ID NO: 143286 - protein, 382 aa, Oryza sativa
  Clone ID: PAT_MRT4530_44209C.1.pep
MGFLSAFSPNYSCLLALRFLVGIGVGGAHVFTSWFLEFVPAQNRGTWMVIFSCFWTIGTILEASLAWVVISVLSWRWLLALTALPCSLLIPFFGTTPESPRYLCGQNRTSDAMLVLERIAITNQAALPPGVLIYHQEAKVDHSDLTSEKEDLLPVSEKECTFDNAMSFKYGGGIAALLRLLSRKLLRSTLLLWFAFFANSFAYYGLVLLTAQLSDANRSCTSGQTNVVPQKDVNLYKDTFITSLAEVPGLILSAVLVDWFGRKASMWFMLFTCCAFIGPLVLQQNELLTTVLLFGARAVAMGSFTVLCLYAPEVYPTSARSTGVGIATAIGRIGGVVCPLVAVGMLRSCHQMEAILVFELVLFLAGVACFLFPIETKGRGMD

SEQ ID NO: 143287 - protein, 101 aa, Oryza sativa
  Clone ID: PAT_MRT4530_4420C.1.pep
MRNPLSTSIAAASTREEAEATGSSDLTSLLWIWVSGVDSGWDNDEERLGLWLGDGSGDNNLARFGSHRPAISFLVSEDEKVATMLSINDHDDNHGGRTACV

SEQ ID NO: 143288 - protein, 42 aa, Oryza sativa
  unsure (1)..(42): unsure at all Xaa locations
  Clone ID: PAT_MRT4530_44210C.1.pep
PTWRLDYICSLKHISGTDITNLQLSFXRFXQVIIYMVNKQDS

SEQ ID NO: 143289 - protein, 207 aa, Oryza sativa
  Clone ID: PAT_MRT4530_44211C.1.pep
AVPLLRLHRHPDATLDDGIVRHMRRLDSWPLYQEPGSRQRRPSAKAILGRGTLRRSTMPHAVASTTAGFGLEKKEAQPKSTLLRRYCSSSSSRQPEPAIPRLCSAVFSSKSAAPAAVCRRLGRRPPVPPPLSAPQGQEQARQPVPLRRRPREAHRRHQPEARRRVLIHWIRSCEVKPGHPSIVAEGRRNAVATVDSTSSPFGACRRP

SEQ ID NO: 143290 - protein, 68 aa, Oryza sativa
  Clone ID: PAT_MRT4530_44212C.1.pep
FTSLISTDHIHLSFNFSTYFLISTNHIHSSWSHLISTLTLISVKNSISVYILGWSEYFVNCILIGMME

SEQ ID NO: 143291 - protein, 171 aa, Oryza sativa
  unsure (1)..(171): unsure at all Xaa locations
  Clone ID: PAT_MRT4530_44213C.1.pep
MVAYRFHQYQVVGRALPTPGDEHPKIYRMKLWATNEXYFLRKLKKVKKSNGQMLAINEIFERNPTTIKNYGIWLRYQSRTGYHNMYKEYRDTTLNGAVEQMYTEMASRHRVRFPCIQIIKTATVHFKLCKRDNTKQFHNSNIKFPLVYRKVRPPTRKLKTTFKASRPNLFM

SEQ ID NO: 143292 - protein, 69 aa, Oryza sativa
  Clone ID: PAT_MRT4530_44214C.1.pep
GRKLSSTVLGEGTTYSDRGEQAILQGDSEIAEAWFDQAAEYWKQAIALTPGNYIEAQNWLKITKRFEFE

SEQ ID NO: 143293 - protein, 234 aa, Oryza sativa
  Clone ID: PAT_MRT4530_44215C.1.pep
MAAEVAAGGDSGWSSGSATFYGGSDASGTMGGACGYGNLYSAGYGTSTAALSTALFNNGQSCGACFEVRCGGGGSCLAGTVAVTATNLCPPNYALAGDAGGWCNPPRPHFDMAEPAFTRIAQARAGVVPVQYRRVACAKQGGIRFTITGHSYFNLVLVTNVGGAGDVTAVSVKGSRSGWQAMSHNWGANWQNGANLDGQPLSFRVTASDGRTVTSDNVAPSGWSFGQTFSGGQF

SEQ ID NO: 143294 - protein, 750 aa, Oryza sativa
  Clone ID: PAT_MRT4530_44216C.1.pep
MGKKKKKNPRPINTSSPVPQLTRASGSKAGSSTPRRRSMRSNVENLDGIARGDDDSLLKAMKRTAVRNLDDSFAAREVSAPTNQLHSASRIASFQQGVSLGTSNVSFLLNVLKHIEVDRTKVATKPRENNQSISFVSEVDPFMTSDDEGDDIDGALLAHLVKDISEIDMEDVDQREAAFAGNLKQFKMELSWFLRDDFHDRVVEIWNKPIKGRNAVQRWNKKMSALRRHLREIKEAIFAMDHNKAPGPDGFPVEFYQKFWEVIKHDLLNLFNEFHSGSLPIFGLNFGVITLIPKVEEANRIQQYRPICLLNVSYKIFTKVATNRISSVADNLVNPTQTAFMRGRNILDGVAIIHETVHELHRKKLNGVIFKIDFEKAYDKVKWPFLLQTLRMKGFSPKWISWIKSFIVGGSVAVKVNDDVGPFFQTKKGLQQGDPLSPILFNFIVDMLATLINRAKTQGQVDGLIPHLIDGGLSILQYVDDIVLFMNHDLEKAQNMKSVLLAFEQLSGLKINFHKSELYCFGEALEYRDQYAQLFGCQVGSIGKGMAIRKNTSLLSGTSSVVPKIKGGWEFMTSSGGARMRGVQRKASAAEERRRASAAVGKAAEGELGEAEDSGWDEELPHARPPSPPWPRGWPTMLGEAPPAAEGEEAEEEIVSWSPTASPSLLNSLAAALALRYSVRGLLALHCSDRRRTRAFHCSVAALALRCAARICARRSARYLRSAAALRCLRSAAGWPRRVASPTVTTTVES

SEQ ID NO: 143295 - protein, 178 aa, Oryza sativa
  Clone ID: PAT_MRT4530_44217C.1.pep
MVAFRFHQYQVVGRALPTPGDEHPKIYRMKLWATNEVRAKSKFWYFLRKLKKVKKSNGQMLAINEIFERNPTTIKNYGIWLRYQSRTGYHNMYKEYRDTTLNGAVEQMYTEMASRHRVRFPCIQIIKTATVHFKLCKRDNTKQFHNGSIKFPLVYRKVRPPTRKLKTTFKASRPNLFM

SEQ ID NO: 143296 - protein, 57 aa, Oryza sativa
  Clone ID: PAT_MRT4530_44218C.1.pep
MALRQIVRHSSDCAWLELKRHTYGNVMSQEKQKARGYGSRAGGSGCLLRRRPNGLML

SEQ ID NO: 143297 - protein, 51 aa, Oryza sativa
  Clone ID: PAT_MRT4530_44219C.1.pep
LEIGHSSRSTSVTSKLCKYKEGFSSVVASGQNIFHSTCRFFSPVECDPAWL

SEQ ID NO: 143298 - protein, 110 aa, Oryza sativa
  unsure (1)..(110): unsure at all Xaa locations
  Clone ID: PAT_MRT4530_4421C.1.pep
AGXLTPVEQRVSREMRERERRLPLAHRARDFNPRTPSPSPASSGFVWRRDQDHSCYGTQGGWMTPTRGADPLDKQLWFLWERGDHEHVLQVPQRDDHERRVGQDCWLLHR

SEQ ID NO: 143299 - protein, 91 aa, Oryza sativa
  Clone ID: PAT_MRT4530_44220C.1.pep
ENALKKKKKKKKKKKKKKKKIFLKKRGWKKKNIKSFLKKKKKKKKGPPFLKNQTLPPLPSNLKFFFWGPQNKINGPGFKNRGREKPLGSPN

SEQ ID NO: 143300 - protein, 106 aa, Oryza sativa
  unsure (1)..(106): unsure at all Xaa locations
  Clone ID: PAT_MRT4530_44221C.1.pep
LVLARQRLXADEHPSXRCPXNXRXRGRXXSITYAAAXILDXRGSNGXXGGVRARTAAAXXEERLDAELVGVDDEDGEREEAGAEDEQKQVRXXDGRAGSEAELLVQ

SEQ ID NO: 143301 - protein, 77 aa, Oryza sativa
  Clone ID: PAT_MRT4530_44222C.1.pep
MGGSAEHATGRTPKGGDLAWQKRRAARDAEARREERGGARRERDTGTWRRCESVPLHDLKNGDSKKKPGPDSLTADE

SEQ ID NO: 143302 - protein, 68 aa, Oryza sativa
  Clone ID: PAT_MRT4530_44223C.1.pep
KEMDYWSTTVITSTDDKFDIVPQSRMLTTENFTANESTPMTSIMKLQSDMAFWRIRKTIRSTIGNILC

SEQ ID NO: 143303 - protein, 291 aa, Oryza sativa
  Clone ID: PAT_MRT4530_44224C.1.pep
MPEISVEAAKMKTHRFPNLIAAANRGPGLGRGVLDHLRQISRGGPVGGARRGGIGGGLTAGHGSAGQQIAVGAEEAAEAALGTTEARRAATTVEAETYVAVTESSSSAAQASVEDRIEVLQFSLSLSIFLGLRRKPFATAARVRHLFVGEADGGSTTSSKAPLLLWLNGGLVCSSIRYGAMEELGPFHVKSDGETLSARMRWPPVLSHHVVLTSPHCSLRPSCRSRRCQREGGKEERRRRKRRKEKGQSGYLENYLTSFIPGNNKIMRPVFYGQLYAFLVSISCVTFFSVF

SEQ ID NO: 143304 - protein, 75 aa, Oryza sativa
  Clone ID: PAT_MRT4530_44225C.1.pep
GLSENKSANSCGMFQASRFPNCSYFLDEYVYLFYHVRGYLQIKDHNLLAIIDFYLGGKVLVNIYLVLYGFRYIEI

SEQ ID NO: 143305 - protein, 83 aa, Oryza sativa
  Clone ID: PAT_MRT4530_44226C.1.pep
MAYLCLKPAGCSGRRDVHPASLELHAWRLHRAEKGQPNRREENRLILRKSMMGHRAIGPCLGRECGTWLSLHGGDKVHQWITV

SEQ ID NO: 143306 - protein, 466 aa, Oryza sativa
  Clone ID: PAT_MRT4530_44227C.1.pep
MALKQKGTDAAADPKKRRRVGFSGIDAGVEANECMKVFIGIELAHPSIFLLVTYLPLVFDTARNPDEAGSANSTSLQPFDLNHFFGEDGKIYGYKNLKINVWISAISFHAYADISFEETSDGGKGITDLKPVLQNIFGENLVEKDEFLKTFSKECEYLSNVVTDGNVIKHDASIDEDSAVEHYVLGSTPIDITEHGWEMLLVVKKSAQASSSSNFLVLGFAAVHHFYHYPESTRLRISQILVLPPYQGEGHGLRLLETINSISESENIYDVTIEDPSDYLQYIRSSIDCLRLLTFDPIKPALCSMVSSLKDTNLSKRTSSLKMVPPSDLAETVRQKLKINKKQFLRCWEILIYLNLDAEDRKSMDNFRACIYDRIKGEILGTSTGPNGKRLVQMPSNFDEETCFAVYWTQDGGDADDQTVEQQPEDLKTQEQQLNEVVDSQMEEIVEIAKNVTSRGKDKLSVSCSV

SEQ ID NO: 143307 - protein, 230 aa, Oryza sativa
  unsure (1)..(230): unsure at all Xaa locations
  Clone ID: PAT_MRT4530_44228C.1.pep
MALKQKGTDAAADPKKRRRVGFSGIDAGVEANECMKVFIARNPDEAGSANSTSLQPFDLNHFFGEDGKIYGYKNLKINVWISAISFHAYADISFEETSDGGKGITDLKPVLQNIFGENLVEKDEFLKTFSKECEYLSNVVTDGNVIKHDASIDEDSAVEIVRVELQGAAAFLYCRLVPLILLLVEGSTPIDITEHGWEMLLVVXKSAQASSSSNFLVLRFAAVHHFYHYP

SEQ ID NO: 143308 - protein, 283 aa, Oryza sativa
  Clone ID: PAT_MRT4530_44229C.1.pep
MIEEGIFPNVVTYTAMIDGLCKNGSTSLALEMFNKMIEQGCLPNLLTYSSLIRALGQEGKNDKAGCQPTLWTYGVLIKGLKNEYLLADQRLAALPDVVPNCSFGYQTTDQDAVSVMSAKLAELDPGLSVQVQNALVSNLSTAGRWFEANELLGSMISQGLCPDQEAYNSLLCSLLRVRNVDLAMGVFKHMSTQGCEVHLNGYKELICALCQLHRRKEARITFENMLMRTWNPDDVVQAVLIDGLLRDGYKDLCMEFLHIMETRRYMPSFHIYTILAREASKKR

SEQ ID NO: 143309 - protein, 127 aa, Oryza sativa
  Clone ID: PAT_MRT4530_4422C.1.pep
RPVVRRPTDDGTSGTNGYLGRLEGCFLSSSSPCPSHPIDLLDMGKGKARDAVLARKKDGIGLLHAAACQGHLTVCKFLMEELGGLPCLRLVMIKDAHSSPPCCWHRSPSISSSFLYILPIVLLYKAL

SEQ ID NO: 143310 - protein, 1007 aa, Oryza sativa
  Clone ID: PAT_MRT4530_44230C.1.pep
MAAPLQSLPPSRLRPLWPPPRAARLRSLVLLVSAFSSSSRGLGSERPLPVDPGGVSGRRNQDPGDDALIRRAHRALARPDWHRSAALASLTPAQAASVAESHPIAARGLDLLLFLSRERSHSYRPGTFAALARRLVDARRYAAAGRARIHLIKSCHSKEAMARTMSFLDMLSQSGLRMGLFAYSALLIHLSRLGMTAAVMDRYHRMLSEGVQPNLLIYNAVINALCKDGNVADAETIMKKVFESEMSPDTFTYTSMILGHCRKHDLDSALQVFNQMAKEGCEPNTVTYSTLINGLCDSGRVNEAFDLIREMILHGILPTAHTCTGPIIALCDMGCYEDAWRLFVDMKNKGCEPNVYTYTALISGLCVSGLLKVAIGLFHRMSRDGVFPNTVTYNALINILVENRRIKYAFVVLNLMGRNGCSPNIVTYNEMIKGYCILGDPKKAMLVMNNMLQRGHSANLVTYNTIIKGYCDSGNTTSALRILDLMRDGGCKPDEWSYTELICGFCKISKMESAFGLFNEMVDDGLCPNEVTYTALIDGYCKDEKLDTATSLLEHMKRSGCRPNVQTYNVLIHGLTKQNNFSGAEELCKVMIEEGIFPNVVTYTAMIDGLCKNGSTSLALEMFNKMIEQGCLPNLLTYSSLIRALGQEGKVEEAENLFAELERHGLIPDEITYVKMIEAYIMSGKVEHAFNFLGRMIKAGCQPTLWTYGVLIKGLKNEYLLADQRLAALPDVVPNCSFGYQTTDQDAVSVMSAKLAELDPGLSVQVQNALVSNLSTAGRWFEANELLGSMISQGLCPDQEAYNSLLCSLLRVRNVDLAMGVFKHMSTQGCEVHLNGYKELICALCQLHRRKEARITFENMLMRTWNPDDVVQAVLIDGLLRDGYKDLCMEFLHIMETRRYMPSFHIYTILAREASKKRSWKHVAGCITKVKRATCSTSCTGQCFCSSLSRLYYLYPIKIEILANLGQIITTNGRELYAKACLFLNKHLSKKISLTQFLCSRYEKQLI

SEQ ID NO: 143311 - protein, 358 aa, Oryza sativa
  Clone ID: PAT_MRT4530_44231C.1.pep
MWSWLITGRGVAKKIRNAPHCSSRPISELGAEAQMECPNCKHVIDNSDLQKGRLLLMRKEVAIQWPGLPAGVKFDPSDLELLEHLEQKIGLGGSKPHTFIDEFIPTIDNDEGICYSHPENLPGKSKAIVEKGVTKGWKKIMVLYKSSQRGAKPDKANWVMHQYHLGAEEDEKDGELVVSKISYQLHGKQIDKSETGNADEESDAFAARVGPKTPKSNTPQPCRLKNSPCETENYDPILEDQDEEESNIPIVSLKDDAGNPAWCAGETQAAREAVQACPNLDESLRCHEVLDSFYHETLLPSDRPILSQGGNEILDRNLNAVYGLPDLYNVDLGTPPDFQLADLQFGSQESIGNWLDSI

SEQ ID NO: 143312 - protein, 56 aa, Oryza sativa
  Clone ID: PAT_MRT4530_44232C.1.pep
QRQLFWFFYLFSSITDFVTCITEKKHLIDLDPLLTVLPRSNSVQPNQRTSYRTATG

SEQ ID NO: 143313 - protein, 51 aa, Oryza sativa
  Clone ID: PAT_MRT4530_44233C.1.pep
SSHDCGTAACCFSKAGGYQAMLVCRVIAGRVRRNDYYGCAEEEEGAFDSVA

SEQ ID NO: 143314 - protein, 123 aa, Oryza sativa
  Clone ID: PAT_MRT4530_44234C.1.pep
VDQINSRRRKSNVTCFLFLFHVPPIPIVSSELWRIPKKKNERRKCVTVWTSLSYKEVNSLEYCAKKKKKKKKKKKKKKKKKKKKKKKKKKKKKKKKKKKKKKKKKKKKGGLGDTSFNIGCFGK

SEQ ID NO: 143315 - protein, 118 aa, Oryza sativa
  Clone ID: PAT_MRT4530_44235C.1.pep
MEAEAGSAREVRAAEREAGVAQEARPMEGGRTGARGASGGRGRLGARGAAGGEGGDLGVRESYRWVWRGLRHTKAGRRGAPVLGSHMSAELEWWWSIGAPAVDSQEGGCRAKAQSWLL

SEQ ID NO: 143316 - protein, 95 aa, Oryza sativa
  Clone ID: PAT_MRT4530_44236C.1.pep
MKKTTITFRTGLNTMDLQKIQMGEVDKAIEENDSVDYQILKNILSEGNDLLETTYKDKKEYENLEACPVCKALLYKIRRDDPGDVDGKPEEEGSF

SEQ ID NO: 143317 - protein, 50 aa, Oryza sativa
  Clone ID: PAT_MRT4530_44237C.1.pep
KYHLQLNIAMHACKSVSYLVAHTYIDPYTFIYMSICIYAGSDHQLIGHPY

SEQ ID NO: 143318 - protein, 835 aa, Oryza sativa
  Clone ID: PAT_MRT4530_44238C.1.pep
MDAMEAEEGPFLANDAKLHAGMYRAFHPAVSKLVAIFPFIEASRPRSKSGIQALCSLHVALDKAKGLLQHCADCSRLYLAITAETVLLKFEKARTQLQESLRRVEGIVTEEIGCKYTIWYFLTSGPVGAQQIVEIIAELEEVVFTLDQSEKEAGDEVINLLQRNRKMNSSSDSGELEVFHMAALKLGITSSRAALTERRALKKLIEKARSDEDKRKEYVVSYLYNLMRKYSKFFRSEAGDDTDSQGSSPCSPTILGMEDMYGPYGNGRAFSRQLSSIQSFNSRFGSFNSRLGSFNCRRSGPRSENMSIPPEELRCPISLQLMYDPVIISSGQTYERVCIEKWFNDGHSTCPKTQQQLSHLSLTPNYCVKALIASWCEQNDFPVPDGPPGSFDVNWRLALSDSEATGCVSLESFDSINVKSVKVVPLDNVRKEEPANNESGTLDDSSCYDFDMNEGYRNLLLMLHEKTNLHIQCRLVEQIRYLLKDDEEARIQMGSNGFAEALVQFLRNAVQDGNEKAQEIGAMALFNLAVNNNRNKGLLLSAGVIDQLEQMISNPRLSAPATALYLNLSCLPEAKNIIGSSQAVSFLVDRLFSHEARDTKGSSCKHDALYTLYNLSNHQASVPSLLSAGIVEALHSLLSESLASEGLGWTEKALAVLISLAATQAGRKDIMSTPGLISTLAMLLDTGEPTEQEQSVSCLLVMCSADDKCIAPVLQEGVVPSLVSISATGTGKGKEKSQKLLKLFREQRQRDGAQPVPQQAQQQQQQQQQQQQAGETGNGTMVHSCRYLSSGGPTAQEIQHQTAQEVPHGIVLSQDATVIRCRVRLWLDRTWKPSQ

SEQ ID NO: 143319 - protein, 134 aa, Oryza sativa
  unsure (1)..(134): unsure at all Xaa locations
  Clone ID: PAT_MRT4530_44239C.1.pep
EXHPPPPPVRLHPAXRGEKPQGXGAKRAARLRAARAKDXXLXLKTLTGEXHHXGXLEXLXDTIXQRXKAKXXGTRXGDXRPDQAXGXSSXXKATGKKXAPSPNYNIXKGVXPPPGCSRLLCXAXXRXKKXFXXP

SEQ ID NO: 143320 - protein, 24 aa, Oryza sativa
  Clone ID: PAT_MRT4530_4423C.1.pep
YHQYFSYRGSRALRISVSSPYAIH

SEQ ID NO: 143321 - protein, 379 aa, Oryza sativa
  Clone ID: PAT_MRT4530_44240C.1.pep
MAQTASPSFSIIIFLPVVAVVVIPSQIPQPKTKSSPSIPFPFFSTSKISPFSLFSLSSSPSSSSSAPPLRLPVEIPILPTPHLCLPPPIPSSAAAAVRGVVTSFYLIQRSVKLVSTRAKPLEVEIAKEDERMSSSADNTVYCCIAKGRKIIYCYNSKDGDPHMETTAALCLENAPSYHRHYIHTAGSRSYGYLMADGHTFFAIIDPSVGNVGALQFLERVREVFRTVNRSGFHDSLVPAVQRLVASLEKMPHATFDLEESVEKGEPSDSSSCTSSKVPLLGRSGSRKDKKKAKEKAASAAVCEDEQHGTRGVRIDVPPEEVGGMSLERSASQSRLRRQHSSRSLWVRHVKIIIVVDAIICILLFAAWLAVCKGFQCVSS

SEQ ID NO: 143322 - protein, 57 aa, Oryza sativa
  Clone ID: PAT_MRT4530_44241C.1.pep
DILMYRGDMLFCSEECRQEQIEIDEAREQRSKQTARAEQDRQRQHNASHPRIPVWAW

SEQ ID NO: 143323 - protein, 42 aa, Oryza sativa
  unsure (1)..(42): unsure at all Xaa locations
  Clone ID: PAT_MRT4530_44242C.1.pep
SGXRNLDKTATTIRGGASTATYHIFIYICSLAITIRYYFTDL

SEQ ID NO: 143324 - protein, 104 aa, Oryza sativa
  unsure (1)..(104): unsure at all Xaa locations
  Clone ID: PAT_MRT4530_44243C.1.pep
TIPNPKYISSQNPHPGKTPQKKKPKMGGSKGPILKTKPPQNSSXNSPPPKQNPPRFLNTPPRGDAASGGPHPPPPGGGXAAPPGGPGQAAGNARWVHGGRETFR

SEQ ID NO: 143325 - protein, 36 aa, Oryza sativa
  Clone ID: PAT_MRT4530_44244C.1.pep
LDQNHPVWGSVDNYTTVREKQITQLVQAFSYSKRTL

SEQ ID NO: 143326 - protein, 58 aa, Oryza sativa
  Clone ID: PAT_MRT4530_44245C.1.pep
MASVNTGGLRLVRCPKCYNILPEPPNVEVYKCGGCDTILRVKIRPSNGQNVATKQVRQ

SEQ ID NO: 143327 - protein, 34 aa, Oryza sativa
  Clone ID: PAT_MRT4530_44246C.1.pep
KHSILRWHKGIYIVQAHWYYKQYHLTYTSDSINH

SEQ ID NO: 143328 - protein, 533 aa, Oryza sativa
  unsure (1)..(533): unsure at all Xaa locations
  Clone ID: PAT_MRT4530_44247C.1.pep
MPTKAGSTGEDPGTXEGWSCYLGKSLVKESDLTEFVLTGVLAERLATYGGEAVVPSPGDRRTVVFTTFFAVGLRLPCDDFLPSVLEIYEVKLPQLSPLAFPKLAVFAWMCQTCGFAPTAKLFAVLFTACATTKDVNMPAGPKKTVFGCVNFMLRLEHSDAWPVPSSMVMQKWFYVDNPYPADDDKANWLRPHLEDAEAEEVRIVGGRADTDADEEDDDEREAGSDEDGGSRGYTPNVVWVKAGAGSNALPVRPQDVAGANALLAISSSTAKIGAIARKKKKGVVQIAGGFSASEESSDGTPTSPALRRVVPRRRCLSPPPTSDAEAPTGGSASAPAAAPVRAIESAEANISGADRVDKAPSSSHQRDGKAPAIEMIVSDMTLNAPHFVSVDFASRLESPPSWMGFVRWFRRPTALVSSPCSTSSARVAQLRRAYSCSLLHEHGCDHVEDFPQTMKKDWPENAQSAASALKAFRKGFWENGSRDGAKTRLREQLERIARAEDAAAANTGEDPGPSETATDREGEGNESRDHPEV

SEQ ID NO: 143329 - protein, 122 aa, Oryza sativa
  unsure (1)..(122): unsure at all Xaa locations
  Clone ID: PAT_MRT4530_44248C.1.pep
QYQVQSTVLLQQQVLXPISEFDRQHIGISERIFLXSAALQLRIIQGCQQLALMAQQSHYHDINIRYVIAQQLQLTTXADLYFDPNLAHAHALMAINAPSTYTMYXRDYGERSTITTICGALE

SEQ ID NO: 143330 - protein, 342 aa, Oryza sativa
  unsure (1)..(342): unsure at all Xaa locations
  Clone ID: PAT_MRT4530_44249C.1.pep
MQVTAYMYDREAAKGTDSASDIDRHDDTGAARYNDLVSCRSTLPSSIGKESVVAGFNTVEGTTTIRSRRSIMQDPHASSGRGPSERINMVNNITHKPANQATRRNAVKIEPQVPTEMKHTDSRKSTATLAHVNNTPMTDKSKDSMCSSSMVEEQKLPSLAVGSCSTGQPEGGTDSRTVFLSNVHFAATKDALSRHFNKFGAVLKTLIVTDIAGQPTGSAYIEFLHKESAEQALTLDNTSFMSRMLKVVRKNSLEVSQQSGWPRDSRRTAYPRPAFPGAMRGRLPLRGGXRSLQWKRDNADTVDAAKPGHSTPIPTGNQLISPVVRSFTYTRAEQKQDVGATI

SEQ ID NO: 143331 - protein, 56 aa, Oryza sativa
  Clone ID: PAT_MRT4530_4424C.1.pep
AGIMLNLNMMYLLSQFLKEKDILCMVEVGKYISGRSHEIMNALLTSASTVQMARNY

SEQ ID NO: 143332 - protein, 150 aa, Oryza sativa
  Clone ID: PAT_MRT4530_44250C.1.pep
TMSFDMKQLSFDNNHRSTQIIIHHKSRIITNHGTTQSQITDQHNARIHSAVVNPPLLVAVSLATTATARRRHCGSPPRPLAPDLAEGRAPPPPPSLPPPPAAASPPAESPLLAGSGGGGHRHRLPSFFAQEAFGFARYPRDSPPFAVLAP

SEQ ID NO: 143333 - protein, 192 aa, Oryza sativa
  unsure (1)..(192): unsure at all Xaa locations
  Clone ID: PAT_MRT4530_44251C.1.pep
MHGDRDHAARAPPAASTAPPLFPLPLNPQPIPPXLSPLSPAPSANPYPXPPAPPPPPPPPASPPSPNHPXPAPGPPPPPPKPHPQHGPPPPPPPPPPPPPPPPPPPHPPRPRPPPTXPPPPPPPAXXPPPPPPPPPPXQPPPPXXPPPXXXXXPPPPPPXXPPPPTPXXXXXXPPXPXPXPPXPPPPPPPPP

SEQ ID NO: 143334 - protein, 57 aa, Oryza sativa
  Clone ID: PAT_MRT4530_44252C.1.pep
SMPKMKCLPLKSDQIDMSNNSIDSTSASAPRRRESFISRPAQRSPLHQHRRRMSSLT

SEQ ID NO: 143335 - protein, 94 aa, Oryza sativa
  unsure (1)..(94): unsure at all Xaa locations
  Clone ID: PAT_MRT4530_44253C.1.pep
INLLDFMTSDLQPMYALTFGSMLILSYCIASRLVYTRLYCYFITSSSADCLSIIIYIGHIADCLNPIAIGXYRHRLLLAXGWNYSIALSADRLF

SEQ ID NO: 143336 - protein, 530 aa, Oryza sativa
  unsure (1)..(530): unsure at all Xaa locations
  Clone ID: PAT_MRT4530_44254C.1.pep
MPLNEHPGGTPSGLPAACELTVVAEGRLERWWRTRRWRAWRRGCPTRAPRAPCALHAMARHSATPAVQQEMLAVGVVARLLFLVQCSPAPSLSAIAAYTELVAAASRRMTHGTAATSTSSRRSSRRPRGAARMFHHPPVAAASRETRRSPGMPMAAAPPSTRERKRRPGGERGGTKGRRCHWWRQGFDVYFVRGRLMKHLQLPKNQAMLNLRVMRMMARGTKARMMFVSWLEAWMKILIVIMREFKMSMMGELTYFLGLXIKQMKQGTFVHQMKYTKDLLRRFKMADCKPISTPMGSTVVLDLDEDGEVVDQRSXRNMIGSLLYLTVLRLDIQFAMYLCARFQASPRASHRQVVKRIMRYXGIWYSTSSSICLSGYSDADCSGCRIYRKSTSGTCYSLGTSLIAWSSRKQSNVVQSTAESEYVIAASCCSXILWLISTLRDYGLTFEKVPFFCDNTSAINIAKNPVQHSHTEHIDIRYHFLRDDVEKGDVXLAFVDTQLQLADIFTKSLDSSXFAFFRGELGIVRPFGIN

SEQ ID NO: 143337 - protein, 61 aa, Oryza sativa
  unsure (1)..(61): unsure at all Xaa locations
  Clone ID: PAT_MRT4530_44255C.1.pep
SPVYVSILMDSXLHIRALHSDINDIVRVFRCNKNLQHPHGHSSQFLPRLLTLITLLCRSSQ

SEQ ID NO: 143338 - protein, 89 aa, Oryza sativa
  unsure (1)..(89): unsure at all Xaa locations
  Clone ID: PAT_MRT4530_44256C.1.pep
QILFTRVSSNGLCVLVGFRREIPAVESRATDPLLIALGAGGGCCRVGGEGEGQRRAPQEVSHVVVVTGXGVVATADFYIKPAEEEGGEC

SEQ ID NO: 143339 - protein, 64 aa, Oryza sativa
  Clone ID: PAT_MRT4530_44257C.1.pep
MRKQHTSSAVAAVAASLCKVLLMILALLCTLHTASVVEGRSGPPNGPPAPSANEERHNTPAFHN

SEQ ID NO: 143340 - protein, 334 aa, Oryza sativa
  unsure (1)..(334): unsure at all Xaa locations
  Clone ID: PAT_MRT4530_44258C.1.pep
MSWHLVRSVSPIIATTVYLPVEFPLAAALQPVRLSGFLLSLARPAYVDAAMATPKSSGYLSDLKSQSSPELSEKRHRRTFTFSQLRRVPCMRVVLEHPSAIPCQRREASVWHPAERSMPLGARRRLRARLAGPPTPWHGFVTPSGAPPSRQSRSRSAVVTARAHQLAVATFAVVPLARRRREMGSGERDLGARVLPFSPDRHFIRQGDDRSRPLDRTAQFCLALGHRRRRRLRYAQWAAEVHRTFPRICAMVXLLSSRAVELIRLAEDGPAQVWAGLGRPGPKVFKVSHYQTVFFPLQRTGTIASHLDVNESMXININMNVGNARMTYIVKRRK

SEQ ID NO: 143341 - protein, 86 aa, Oryza sativa
  Clone ID: PAT_MRT4530_44259C.1.pep
MDVKANVTSREELACNANRLEYDARPRRRRPQAAGTTTRRLCYYALRIWTLRAACRYENISQPWQAQQPTSLGFYEAEAAAAASSS

SEQ ID NO: 143342 - protein, 141 aa, Oryza sativa
  unsure (1)..(141): unsure at all Xaa locations
  Clone ID: PAT_MRT4530_4425C.1.pep
PTPTKHTTPQVSPPPPAGSEQPPLVPRRICKPHRLSQGPSELHNAHPCLDASARGKLYFKSGSYPFPLVASAVCLPVHPANRSLTAMGATSKTMYPQPTFKSHFSWIITTXMKHGRVSQAXATRYDTXRSNTAIIPSTELV

SEQ ID NO: 143343 - protein, 41 aa, Oryza sativa
  Clone ID: PAT_MRT4530_44260C.1.pep
LSFAWIPVDYLARIKLRCHGKVRVEGQKPVERLAAYISERI

SEQ ID NO: 143344 - protein, 123 aa, Oryza sativa
  unsure (1)..(123): unsure at all Xaa locations
  Clone ID: PAT_MRT4530_44261C.1.pep
MVFYGGVDHALRGEVFEILXLGIHEYDSTYAEREYLAVMKRAEYEVIKSQWKSISATQAKRFXTKFRERKGPIDKEVARTDWSIPYYEGDDNQNVAALREISVTYSFYNFDPGYCQGMRDFLA

SEQ ID NO: 143345 - protein, 195 aa, Oryza sativa
  Clone ID: PAT_MRT4530_44262C.1.pep
MQSQIVCHGCRSVLRYPSGAPSVCCALCQAITTVPPPAPVMEMAHLICGGCRTLLMYTRNADTVRCSCCSTVNLVRPVNNIAHVSWGQCRTTLMYPYGAPSVKCAICHYITNTGMNTVAPTPSPMPTSSGSSYNAPPSGSSYNAPPSGSSYNAPPPTSAPTSRPQNVTVVVENPMTVDEKGKLVSNVVVGVTTGK

SEQ ID NO: 143346 - protein, 367 aa, Oryza sativa
  Clone ID: PAT_MRT4530_44263C.1.pep
MKASIKFRDDDRPLVRAKVPVGVLGLPFLTGVSAGGGGDSRDLRFDLSTAFASGPALRLSYRPNDPLQPFALSVRTGLGPLGSPARAPFAISAEFNLLSSSPPAFSLLFKPRIGDFSLANSVISPPASASPAPPLPPPPPSHKLTDLANGGDDHRAFSFSGNGFAANVAAAGKSGGGVGALLSGMRLTTRSVLPLWSKASLRFQWGLRVPPELKAALADDGYGRKAGNLAINKLPLLVMNKITIEHTLRNPPHSDADKGKKKDAPEFQTEGFSLVKRQLEVLNAESIMLRRTVEDLRAEIGGNRAASMPGKGDARRMPSSLAPPPPQPFLAKPDRHGNGKEMVDSGPKPVSNEASEELKKALEARRK

SEQ ID NO: 143347 - protein, 84 aa, Oryza sativa
  unsure (1)..(84): unsure at all Xaa locations
  Clone ID: PAT_MRT4530_44264C.1.pep
VLYYADINLYCQLSTCFWITNKNPGRCPIASQKTDKISRTNTRKYGLYALTSGVQRAGRCSLAXATSLLQFEEAVNQQRSQQAH

SEQ ID NO: 143348 - protein, 305 aa, Oryza sativa
  Clone ID: PAT_MRT4530_44265C.1.pep
MAAARRLPVLELVSFVAVLLISSPTAAAAELSVDFHAASCPPLEAIGCDASVYLRGGSNSEQGMGPNLTLQPRALQLVDDIRAKVHAACGPTVSCADISALATRDAVVVSGGPSYAVSLGQKDSLAPAPVRLVNQLPGPGTSSVQALLDKFGSKGLREAADLVALSGAHTVGRAHCDFFRDRAARQDDTFSKKLAVNCTKDPNRLQNLDVVTPDAFDNAYYVALTRKQGVFTSDMALIKDRITAPIVRQFAADKAAFFRQFAKSMVKLSQVPRTDRNVGEIRRSCFRTNGPRLVDLATGDEAASP

SEQ ID NO: 143349 - protein, 163 aa, Oryza sativa
  Clone ID: PAT_MRT4530_44266C.1.pep
MAAARRLPVLELVSFVAVLLISSPTAAAAELSVDFHAASCPPLEAIVRSSVQAALQQEIALAAGLLRIFFHDCLPQGCDASVYLRGGSNSEQGMGPNLTLQPRALQLVDDIRAKVHAACGPTVSCADISALATRDAVVVSGGPSYAVSLGQKDSLAPAPVRLV

SEQ ID NO: 143350 - protein, 114 aa, Oryza sativa
  unsure (1)..(114): unsure at all Xaa locations
  Clone ID: PAT_MRT4530_44267C.1.pep
QKTQGLGDLLNSSAGPKLAFGYMSMPVDLILQSTRNRXKGTAINPINDSRSARTLSMRGNHLEAHQXNPMTYTESYYRNRLYRLAPSDSNSADLTLADLDCSRFLLCFRNDLHL

SEQ ID NO: 143351 - protein, 106 aa, Oryza sativa
  Clone ID: PAT_MRT4530_44268C.1.pep
MGVAGSGAALGTGEAMQLRGGATSRVAQRGRGKDAAPWEEVMQMLRKQIDWKYRWTFDFDPMVGRKKGDVEAPKLREFLLVGMICIGIYDNNAICDYEVEQREVIG

SEQ ID NO: 143352 - protein, 318 aa, Oryza sativa
  Clone ID: PAT_MRT4530_44269C.1.pep
METVAAAAKTAMVADATTTAAMAMVADATAAATTAAGLVAVAAAAAPKIVSETLESRLSEVELVFNCVKKALEGTVEIKILSDAQVFHGKITACTTNVPNHAVLLYDSDVVGCSTTVGDDRVIQLLRRVVVVSVNEMLILNIHAQNDNVFSGCSLELSPFTRGSDEEEISCGKNWVAAVGEELGPLGAAGGRQGRLERMLRSVSKSYMVNKLEFYMSAVDHVVALVRCRCRPRGTVELRYAVVKEAVEATVEIKAVEGCFSGEIAACTTNIQDGVVLLDSTITCCVMDDNGDVQLSRRVMAVQCKEKLLLTVVNQDDM

SEQ ID NO: 143353 - protein, 193 aa, Oryza sativa
  Clone ID: PAT_MRT4530_4426C.1.pep
METIQALELGVEQKKSEPEVDEMPGSMEDQKPAEISQDKVAETDIKPAVQTELETSPVANPNPAETNQYTDGVTYGDLETTDPGTTYRCKRCRTLVATEGYVVTHKVGRGEKCFATRKKRPGDEKEPECTCLFVEPLKWMQPVVEGYISGKIACRKCNSRLGQFHWAGMQCSCGAWVNPAFQLVKSKIDQCEM

SEQ ID NO: 143354 - protein, 385 aa, Oryza sativa
  Clone ID: PAT_MRT4530_44270C.1.pep
MLTLVGTRDSFAQSQAQLCAGMQLKAPTRAKYSQGFMPIGESDAYCALIPGLPEDLAKICLALVPRSQFPVMGSVSKRWMSFLESKEFIAVRKEVGKLEEWVYVLTADAGSKGSHWEVLGCSGQKHSPLPPMPGPTKAGFGVVVLDGKLFVIAGYAADHGKECVSDEVYRYDSCLNRWVELSKMNVARCDFACAEVNGMIYVAGGFGPNGDSLSSVEVYDAEQNKWTLIESLRRPRWGCFACSFEGKLYVMGGRSRFTIGNTRFVDVYNPNDNSWGEVKNGCVMVTAHAVLDKKLFCIEWKNQRSLAVFNPADNSWQKVPVPLTGSSSTRFCFGIHDGKLLLFSLDEEPCYKTLMYDPAAPTGSEWFTSELKPPGLCLCSVTIRA

SEQ ID NO: 143355 - protein, 86 aa, Oryza sativa
  Clone ID: PAT_MRT4530_44271C.1.pep
FFFFFFQCGWTINPLSSKPSRSNHERPNILIKKIHFHPKVCACTSKLPKSPPAEASGETSAPKFLLPVLLLLSTYKNINSEAALIT

SEQ ID NO: 143356 - protein, 1153 aa, Oryza sativa
  Clone ID: PAT_MRT4530_44273C.1.pep
MSSRYLVPPPGAADRAGGDAGDAALARDIVTLHKALSLDHSASSRRRRSLPLPAPSVANQARHKPRLKPSSSTRKLLPSASSSSSSSAAAAASTSSSSSFWKKSLTAISHLGRRRLDCAFALHVHSVDGLPAALDGSPISVHFRRMSLCASTRPVAAALGAASFEEVLTQRSPVYFSRGAKAAVKYEPRPFVVVAATSALELGKHEVDLTRLLPLSFDDLEEGGGSGFGKWSTSFRLSGPARGARLNVTFSCSLVGAPGEQQKGGEVAGLRRGSMARQVSVQTPTPVPARSRDVRVLHEVLPSGRTVKALPFFGDAGLDVRKEEVPTVESEENESPQSKHCTSVEVINVDLAQPEGDCDAAEFSVIEQGVEIALEDPEQLKSVGTDNVADGNEDFRDEVGENEGEAKAVSVGDACAEESVGGKPEEVFSDVCFESEDAGEKKDSMVKAVSLPTVELDGEDQLDAELEDLGCLINSLSVVEPEQFDSPIVEGKRSRRLSCVGVTEGCNSASRMIRSRSMDASSDFVASEFLNMLGIEHSPLGATSGSDSESPRERLWKQFEKEALASGNGILGLDFEDEAEELSYEDDAEEPRCEDVAHDFDLSTIIREAELELQNAIQPIDTRFRAKSLEDEETEALMRQFGLNEKSFQSSPPGSRSGFGSPIDLPPESPIELPPLADGLGPFVQTKDGGFLRSMNPVLFKNAKNNCSLVMQASSPIVLPAEMGSGIMEILHGLASVGIEKLSMQANKLMPLEDVNGKMMQQIAWEASPALESSERYDLLDNHTMDALAGGIGNATFGKSKKGRCTDLSSSLGRESTSEYVSLEDLAPLAMEKIEALSIEGLRIQSGMSEEDAPSNISAQPIGEFSSLQGKCAGNTLSLGLEGTAGLQLLDVKQSGGDVDGLMGLSITLDEWMRLDSGIVDEDEQFTDRTSKILAAHHAKSMELVAENQNVDKKNRRSGRRWGLLGNNFTVALMVQLRDPLRNYEPVGTPMLALIQVERVFVPPKPKIYSTVTDKGNSEHDDEEPKTEEVLEKALVKEEKIEEEEDSVPQFKVAEVHVAGFKSEPEKTKSWGNQTQQQSGSRWLLAAGMGKGNKHPLMKSKAIAKPTKEAAGQSEDTLWSISSRVHGAGTRWGELAGPKRNPNILLQKEKRFR

SEQ ID NO: 143357 - protein, 83 aa, Oryza sativa
  unsure (1)..(83): unsure at all Xaa locations
  Clone ID: PAT_MRT4530_44274C.1.pep
MNALLSVFLAVQGLIGECFTFYFGVHDYHCLKMLMADRNSVMSIVLDARDQVSGINMVTVHSGTAGDMXKRYQICLTFPDRMD

SEQ ID NO: 143358 - protein, 76 aa, Oryza sativa
  unsure (1)..(76): unsure at all Xaa locations
  Clone ID: PAT_MRT4530_44275C.1.pep
MRAAAMAMEKHFKYVILGGRVAAVYAXPEFHKHGAKPGELAIISKEAAASYERTALRKGYLCTQNAVXLPGFHVCH

SEQ ID NO: 143359 - protein, 77 aa, Oryza sativa
  Clone ID: PAT_MRT4530_44276C.1.pep
LFNTQISKVANYLPNLVLLAFSSCGLPYYKLCHMVIEQVSLCYVKIESKPVKQSNHIFTIFPIPIAAFMFLLMSPSI

SEQ ID NO: 143360 - protein, 76 aa, Oryza sativa
  unsure (1)..(76): unsure at all Xaa locations
  Clone ID: PAT_MRT4530_44277C.1.pep
FFFFFGIMQLGLLLSQVYNNYIHKKMNSTKVSFCSSNINTSSHLXSGLTRLILLSSQLFCPAQPWQCLLVTHTHCL

SEQ ID NO: 143361 - protein, 120 aa, Oryza sativa
  Clone ID: PAT_MRT4530_44278C.1.pep
MPPHWDFGSERKKEIERRLAPRSVSTTRSGVHEHVEDAAAIVHGGGLGDSNEASTPPNTASRFAHSLVSDEKTSKVMPIPAAASAAVALLRPSPRREEEREESGKTKGEDNIWGPHRIAT

SEQ ID NO: 143362 - protein, 186 aa, Oryza sativa
  Clone ID: PAT_MRT4530_44279C.1.pep
GKSLVRTILEICNITSCIKLLIQTVITCSGVFVCKLLNLVVNKLTLFFFDVFFLKQRNGGSEVQGAAETVVVGQRRQNSGVDVAGSTQGANCNGAWCCFGGEERRPERRRRFGWPAARTVTPTTCSTDWSGDARRRWLSRRSRGRWPSSGHSVRGVCFLGLGTRCGERAVASGALAWEMRKSGVRE

SEQ ID NO: 143363 - protein, 153 aa, Oryza sativa
  Clone ID: PAT_MRT4530_4427C.1.pep
HEADLLTPTRKDEFLNMLLEDGCYILSKFVVPTISIARGSWQRQHVPPQHLEHDIIYLVENQIPFFILEKISEITGLIPTEGGSLVRHFCSYIEYVLKLRGYAIGDRYVEMQMPTPSHLLHLLHILLNGPQAVKQTLATDGQDSTAIQITRFL

SEQ ID NO: 143364 - protein, 159 aa, Oryza sativa
  Clone ID: PAT_MRT4530_44280C.1.pep
MGDGNEVIDISSDSDDGDAYLPILSFFRSITPTNKFGLNTSRTRQYGPRTFSGFDKYCCKFAAVKRTLMTNAKMTFAVQFSERYINKYIGSPIDDLMVSMAGTTQSYQMRLKRSKDSRAMLTTGWNQLIDAKAFDEGDVCLFHFKEVDDVLVLKVHVLK

SEQ ID NO: 143365 - protein, 163 aa, Oryza sativa
  Clone ID: PAT_MRT4530_44281C.1.pep
RRSRRPSSPRTERTSSAPTRATATSPSRCLQPPWASSAPASSSSPSPSPSRQSPSSPPPAHPHPLPSPWPSPPWPTPPTRSPKLPPPPPPSASPPPSPAPAAAWAATRARPSRTAPLSPPPPPPPRAAAERRPPSQAGAAPPPPYRPRRRRVRRRPSCSRSSP

SEQ ID NO: 143366 - protein, 85 aa, Oryza sativa
  Clone ID: PAT_MRT4530_44282C.1.pep
MEDLAFLAAMMFWHSLELGVHGGVKQPTGCGVVGQVEPRRVAAEPPVEPQARHGLPTVPWAARGQARHDTNCRPCRAGLIALGRV

SEQ ID NO: 143367 - protein, 162 aa, Oryza sativa
  Clone ID: PAT_MRT4530_44283C.1.pep
GSEGAGDGVQARPVYVAAVDLACSEEFLELIKSALLAALEALIPGSLFGLMTFSHKIGLYDVQGPIPVVKNVFIPPDTEEDGLPVALEDAMPLLSFLAPIDTCKDRIAAALDTLRPTSSWERGAASGQEPDTVLLGGRGFGTAMSALTDYLSSEYGTTFALA

SEQ ID NO: 143368 - protein, 155 aa, Oryza sativa
  Clone ID: PAT_MRT4530_44284C.1.pep
MEVRDVSGGLAFRFVAVAGDGGRALLNAVEVVLVTMRSGEAILDGSDETNLSEIAPTGKNSSSSVGEKGARLSTTHCTQQVIPEEEVSPPPLKRQWLAVGEAAATGVKATAHGRSGGAAKGGGARGKGEKRRRRESSPEGAAVTDAENEGGGNNR

SEQ ID NO: 143369 - protein, 919 aa, Oryza sativa
  Clone ID: PAT_MRT4530_44285C.1.pep
MALLLLRRRIHRGHKTLLPRAFSSSSGEGMFPPPTSDPASADQRTTKLSSHFAEIRGHLNATPPSSPPRRIPESPPPDDVRRSLHLFRNPHPSSGATSAAAANPSPSFADVFRARPAPPTSRATGADAFPFSALRESLNKNLGTSPTASAVPLPGATASSPDWSSILSSRQRHDGKPLPESVFGRETRGEARRGRDGKVEEQQFIRLYSDNELGKKLSELRPPVGKDGKEWFSVEELSRRLKKLREMDREERALQSGLGTDVLRDAIVTLQTKDLKTNNFAIGECLMKLMDNLFVTDDAVVTFGLLVAAAQSMSALMAFGSQATPAYLLGKPQQELVERYFHPDHMSSAEKMKQELQSVRDEFKMSENDCGSARVQGKVWVKELGEQSSYLQLKPNILVKKCLIILALAAAAAIAGFLSVAGAGRGRSSSSSPARRLSNGLAAERARMAMARAASPTVERELDAARAAIRRAARRRRHGDLAGGEGRSSSNVSSAKWLSFFGDADHARLERVYRNPAAFYRSYVEMERRFKVYVYEEGEPPIAHEGPCKNIYAVEGRFIEELELMAPPLGGVRTWDPARAHALFLPLSVSQMVQLAYRPLSYDLSPLRAIVADYVAVVASRHRFWNRSAGADHFMLSCHDWAKKNIFPTPNDFHTNFETSANNKFSTYSLRSTRLNFWGPHASRGHPELYANAIRALCNANTSEGFRPDKDVSIPEINLYDGDMPPELLSPAPPPPRPFLAFFAGGRHGHVRDLLLRHWKGRDPAVFPVYEYDLPSIPVSVSGDGDTDAGGEGGNPYYWYMRRSRFCLCPSGHEVASPRVVEAIHAGCVPVVVADGYAPPFADVLRWEAFSVAVAVADVPRLRELLERIPAPEVERLRDGVRLVKRHFMLHQPPERLDMFHMILHSVWLRRLNLRLNSH

SEQ ID NO: 143370 - protein, 122 aa, Oryza sativa
  Clone ID: PAT_MRT4530_44286C.1.pep
FRTKKKKKKKKKKKKKKKKKKKKKKKKKKKKKKKKKKKKKKKKKKKGGAFLKYPGLGPGPCKFNFFFWGPLIFFPGPGFPPLGLGKTLGFPILFPLLQIPFSLGGVLGKSPDRAAFPNVWAA

SEQ ID NO: 143371 - protein, 159 aa, Oryza sativa
  Clone ID: PAT_MRT4530_44287C.1.pep
SVQAKYCGRDEARGGSSPRHENADKAPARCKSQAAKRLPAVRSRLAGLMVIRRADDGKKTAIPFDLLFKVLNQVHPDIVIPSTAMCIVNSFMIDFFDMLAGESDMLARYIENPAITFREIHTSVRLVLPGELADHAVSEGTNAVTTFTSAYADCLALTG

SEQ ID NO: 143372 - protein, 1385 aa, Oryza sativa
  Clone ID: PAT_MRT4530_44288C.1.pep
MPNGLIRKLREELLDKLIAHATFPHPPPQIPVGAAAAAATDAIAWICAPVVAAAWICAPASPVPDGVSPSCLRAVPPPPNRRQTRPSVVAPSPTIDRHIPLLIGCFMEKDLIFMTHGRGVVKADEEVRGSRSARTELKIRGVGLMLVDCGYPPIHVGVDGFMCVRAVLHRMGSNGGRLALLTCSLTKANCLLAMKLFLFKEKQTFELGNIEEAAASSGERSTARRVDRAPPRLRRGCRSKRKPPSCAPLSGLELLASMGTKALIFHVAEEKKIPSFAGILAATFWGNLFLAIILPARISGALIFHELIEVDIYCACLCVDSLLVVVIDMEIVAVDQEGARVVGTNCMLARGGTGAVAPVLELTATPRQDAAAEAGVDEPAQHQCEHFSIRGYVALLQKKDPKFCSLSRIFHDQKKCDEHKASSSPFSVAKFRRWDCSKCLDKLKTSDNGTAPRTLPAKQNGTSDGCSITFVRSTFVPASVGSQKVSPSTQSSQGKNADRSTLPKSVQEGNDSKCNAPSGKNGAAEANTDSPMKDLQGPAQNYDVAANVSEDNTSVDVGALPEVPQITWHIEVNGADQPPSTPKLSEVVLKRNEDENGKTEETLVAEQCNLTKDPNPMSGKERDQVAEQCNLTKDPKPVSGQKCEQICNEPCEEVVLKRSSKSKRKTDKKLMKKQQHSKKRTAQADVSDAKLCRRKPKKVRLLSEIINANQVEDSRSDEVHRENAADPCEDDRSTIPVPMEVSMDIPVSNHTVGEDGLKSSKNKTKRKYSDVVDDGSSLMNWLNGKKKRTGSVHHTVAHPAGNLSNKKVTPTASTQHDDENDTENGLDTNMHKTDVCQHVSEISTQRCSSKGKTAGLSKGKTHSAASTKYGGESTRNGQNIHVLSAEDQCQMETENSVLSHSAKVSPAEHDIQIMSDLHEQSLPKKKKKQKLEVTREKQTMIDDIPMDIVELLAKNQHERQLMTETDCSDINRIQSKTTADDDCVIVAAKDGSDYASSVFDTNSQQKSLASQSTQKELQGHLALTTQESPHPQNFQSTQEQQTHLRMEEMVTIAASSPLFSHHDDQYIAEAPTEHWGRKDAKKLTWEQFKATTRNSPAATCGAQFRPGIQAVDLTSTHVMGSSSNYASRQPVIAPLDRYAERAVNQVHARNFPSTIATMEASKLCDRRNAGQVVLYPKESMPATHLLRMMDPSTLASFPNYGTSSRNQMESQLHNSQYAHNQYKGSTSTSYGSNLNGKIPLTFEDLSRHQLHDLHRPLRPHPRVGVLGSLLQKEIANWSENCGTQSGYKLGVSTGITSHQMNRKEHFEALNSGMFSAKWNALQLGSVSSSADFLSARNSIAQSWTRGKGKMVHPLDRFVRQDICITNKNPADFTTISNDNEYMDYR

SEQ ID NO: 143373 - protein, 73 aa, Oryza sativa
  Clone ID: PAT_MRT4530_44289C.1.pep
CVWQSSRCYVRVNQALLVVHGAFVNHINHGSGNPETLAIPIRPSAVPSIGSRKRRFQKVQSLRRGCVSVGKER

SEQ ID NO: 143374 - protein, 180 aa, Oryza sativa
  Clone ID: PAT_MRT4530_4428C.1.pep
MAGNLRKREEMYRQPQKRRHTGGGGGSQRRGLLRDCVSGALRDHAGQQRSSSSQSKNKAAFAARALCAPHEDVLARHFGGGVVSDFVKTAQEHIDSLDEHDNFKTLQPLCATAVVVAAAFRHHRRVRQVEEHPVRPFAAAAIRRRIAVDIEPSRAVVKFVVGLRSPSFVVVLVFVSDVLK

SEQ ID NO: 143375 - protein, 54 aa, Oryza sativa
  Clone ID: PAT_MRT4530_44290C.1.pep
GPDPSRAMPCLGRAKMPCRGPVLRASGRAEGGEERGAGAPVAGWLRRRRPNVFL

SEQ ID NO: 143376 - protein, 72 aa, Oryza sativa
  Clone ID: PAT_MRT4530_44291C.1.pep
CHQITHHTIATNKHYSRHRGRNTVDLHETLHKLATCLQRLTPPLNILLNSETAHKLLFQATEWQSRLGCHGL

SEQ ID NO: 143377 - protein, 156 aa, Oryza sativa
  Clone ID: PAT_MRT4530_44292C.1.pep
NPQKKDCSSTRNPVFEECSTHKATNSAVQQLSLKSIQNATCNFKTLIGEGGFGSVYRGTLAHGEEVAVKVRSTSSTQGTREFNNELRLPSAVRHDNLVPLIGYCCEKDQEILVYPFMSNGSLQDRLYGEASKRKVLDWPTRLSVCIGAARGLAHLH

SEQ ID NO: 143378 - protein, 81 aa, Oryza sativa
  unsure (1)..(81): unsure at all Xaa locations
  Clone ID: PAT_MRT4530_44293C.1.pep
SRGPQAVHPPAQAGLMRVNILGTRTFXCPGCDCAVDHSCTGGREQLYDGHTRADPPRGGYGLCVPVRSGLSAIRVLPCFNL

SEQ ID NO: 143379 - protein, 626 aa, Oryza sativa
  Clone ID: PAT_MRT4530_44294C.1.pep
MAARFGPLLLVLPLSSALLVLSAATAPRGRPSQVDVGRQLREELWERNQGHEMLRSWRDGDPCSPSPWEGFSCRWKDGNLFVVKLNFSSKKLQGPIPAAIGNLTELDEIDLQDNNFTGSIPESFFDLTHLLKLSVKCNPFLNNQLPHGLSISVEFSYGGCAYHSPPGASNQRIAVIGGVAGGSLACTFALGFFFVCFNKREKNPQKKDCSSTRNPVFEECSTHKATNSAVQQLSLKSIQNATCNFKTLIGEGGFGSVYRGTLAHGEEVAVKVRSTSSTQGTREFNNEVQMKPAPASIKESCCGLGVNQIPKKLFIVLHSGKEAKYGFFGRKFKNKEMLRLLSAVRHDNLVPLIGYCCEKDQEILVYPFMSNGSLQDRLYGEASKRKVLDWPTRLSVCIGAARGLAHLHGFAGRCIIHRDVKSSNILLDHSMCGKVADFGFSKYAPQEGDSNASMEVRGTAGYLDPEYYSTQSLSTKSDVFSFGVVLLEIVTGREPLDVQRPRDEWSLVEWAKPYIREYRIEEIVDPGIKGQYCSEAMWRVLEVASACTEPFSTFRPSMEDVVRELEDALIIENNASEYMRSIESTGTLGSNRYLSIDRKMFASGSARFASFDATKGHLQTMPSLPG

SEQ ID NO: 143380 - protein, 121 aa, Oryza sativa
  Clone ID: PAT_MRT4530_44295C.1.pep
PGKNPPFPIKVFFVGPPLKYFPKLTLFHLGPGFGKFSLCQRPRPNFPFPPKSPPPRGLVCYPQKSCPNVAKKKNWGTHFLTQGGFWLGPQILEPKKKKKKKKKKKKKKKKKKKKKKKKKNK

SEQ ID NO: 143381 - protein, 126 aa, Oryza sativa
  Clone ID: PAT_MRT4530_44296C.1.pep
YSQKMLLEQTAKNHQTCILGDTELGGGISIANLDHLIDPPSSMGREKIFVFPHGQHLYSNLSCLTDQIWNIPNYWPNLSKMYVTYCLDKLVDALLVLHSHGRFQLYNKMPVPPFHGPSTVRCYHCP

SEQ ID NO: 143382 - protein, 50 aa, Oryza sativa
  Clone ID: PAT_MRT4530_44297C.1.pep
QSWVQLRTVLSFKSRSSECQVPRYVSFEVYIPICMAVSVLQEQSREECIT

SEQ ID NO: 143383 - protein, 97 aa, Oryza sativa
  unsure (1)..(97): unsure at all Xaa locations
  Clone ID: PAT_MRT4530_44298C.1.pep
ESEVKWRRRRRRRSAAEAQGGGCFDCNICLDFSHGARWSPLCGHLYCWPXCIYEWLHPGGDDDGSNGDASSTRRXPCPVCQAAVSPDTLVPLYAAPL

SEQ ID NO: 143384 - protein, 104 aa, Oryza sativa
  unsure (1)..(104): unsure at all Xaa locations
  Clone ID: PAT_MRT4530_44299C.1.pep
MDISRANEGYTGYGVVVEMSWHRASVLLLGAQSCLPVSGVPAVVGVGSVLLXMARIGKGLVXLIFKTCLXLKCGMVGMGWLGTSWXPGSGCQFGLNHRRPWVKA

SEQ ID NO: 143385 - protein, 496 aa, Oryza sativa
  Clone ID: PAT_MRT4530_4429C.1.pep
TPIHPPSRRHQVPFRKKVDIGPGDRPRPTFISKNLSPEFRTKLIELLKEYRDCFAWEYYKMPGLSQLIVEHRLPIKPGVRPYQQPPRRCKADMLEAVKAEVKRLYDVGFIRPCRYAEWVSNIVPVIKKNGKVRIFMAEEDIHKTTFRYPSAIGLFEWVVMTFGLKSAGATYQRAMNYIYHNLIGWLVEVYIDDVVVKSKEIEDHIADLRKVFERTRKYGLKMNPTKCGFGVSAGEYECKNYTLVVYNEKCRELMKEFRLVTLKHVSREHNVQANDLAQGVSGYKPMMKDVKVEVATITADDWRGWGIDMIGMINPPSSKGHKFILVATDYFTKWVEAIPLKKVDSGDAIQFVQEHIIYRFGIPQTISTDQGSIFVSDEFVQFADSMCIKLLNSSPYYAQANGQAEASNKSLIKLIKRKISDYPRQWHTRLAEALWSYRMACHDSIQVPPYKLVYGHEAVLPWEVRISSRRTELQNELTADEYYNLMADERTWFNQD

SEQ ID NO: 143386 - protein, 151 aa, Oryza sativa
  Clone ID: PAT_MRT4530_442C.1.pep
MRRSSPTSVLLDTAQDYNKASLDLERQTEAALKAMLELDQILRANEINFAILAALPAFGVSLLLLFAVRAWATHEEEACCKFGLTLYTLDRLYKAVESQARETGEWSSLREDMFDLAKPGVGMEDKLVLLSRLKGMYDCLLPSPSGVLPRL

SEQ ID NO: 143387 - protein, 292 aa, Oryza sativa
  Clone ID: PAT_MRT4530_44300C.1.pep
MPPPLYVLLLLSGLLLSSLHTPPCSAAIADGDTLMVGQALSVGEKLVSRNGKFALGFFQPQPTAGISKSINTTTNTLPGWYLGIWFNKIQVFTTAWVANRENPITGPELKQAQLKISRDGNLAIVLNNNNTSSESIIWSSTHTIVNRTTGSSSTNTSALLMNNGNLLLMASSNVVLWQSFDYPADVGLPGAKLGRNKITGLNRRFVAKKSLIDMGLGSYILEMDTNTAIKVFIGCSAFDHVFLKDEDDNCSIRIDYELEVRHVYRKDNTNVDNLTRRASRRKPVESSMFLEY

SEQ ID NO: 143388 - protein, 44 aa, Oryza sativa
  Clone ID: PAT_MRT4530_44301C.1.pep
LNNWHGVTLLVLKKLFVAAAVRAHRYLFLTPQLSLIFVSQLQTG

SEQ ID NO: 143389 - protein, 143 aa, Oryza sativa
  Clone ID: PAT_MRT4530_44302C.1.pep
MAPTRRFPWPCGRWRRSARCSRRGTRTSARSTPPPRTRSPRTTGAPAPSPPRWSPPRTAARRRPRRARSAGSRRRAPRPPPSPARSAASTSPPPRRGAPPTRPRARRGTSPTPATRRTGTPSCSGWSPPRARRRRPSASAARG

SEQ ID NO: 143390 - protein, 496 aa, Oryza sativa
  unsure (1)..(496): unsure at all Xaa locations
  Clone ID: PAT_MRT4530_44303C.1.pep
MPGAAGYSGSVKLKYVKLGYQYLVNHFLTLLLVPVMAATALELARMGPGELLSLWRSLQLDLVHILCSVFLVVFVGTVYFMSRPRPVYLVDYSCYKPPPSCRVPFATFMEHTRLITDDEKSVRFQTRILERSGLGEETCLPPANHYIPPNPSMEASRAEAQLVIFSAIDDLVRRTGLKPKDIDILVVNCSLFSPTPSLSAMIINKYKLRSNIRSFNLSGMGCSAGLISLDLARDMLQVHPNSNALVVSTEIITPNFYWGTRRDMMLPNCLFRMGAAAILLSNRRREARRAKYRLMHVVRTHKGADDRAYRCVYEEEDEQGHSGISLSKELMAIAGDALKSNITTIGPXLVLPMSEQLLFFFRLVGRKLINKKWKPYIPDFKLAFEHFCIHAGGRAXVIDELQKNLDLSAQHVEASRMTLHRFGNTSSSSLWYELAYIEAKGRMRRGDRVWQIGFGSGFKCNSAVWKCLRTVKTPADGPWDDCIHRYPVDIPEVVKL

SEQ ID NO: 143391 - protein, 64 aa, Oryza sativa
  Clone ID: PAT_MRT4530_44304C.1.pep
HRRRRGGQVGLACLHCTHLHEDDHIQSNDEHGTNLHIILAAAHRIGQLSYFLIVLAQPIDDDIV

SEQ ID NO: 143392 - protein, 94 aa, Oryza sativa
  Clone ID: PAT_MRT4530_44305C.1.pep
MGSLGPSVVGLQPKAEKTTAAAGGEQQHGGGGGGCGGSSFRMPLHYPRYKKAEYEAMPEWRVDCLLREYGLPVDGDLDAKRRFAMGAFLWPDQY

SEQ ID NO: 143393 - protein, 119 aa, Oryza sativa
  Clone ID: PAT_MRT4530_44306C.1.pep
MYRQDIWMLLGNGLGPELGNSVTGEFVVAERMWSRSCDGNGMKGSRRCDGPPPRREAEQPPLQWAGETPLRWAAAATRTGAAAVAAGMGRCRCNGPPLRTGNGAAAAAGTGSGAAATTH

SEQ ID NO: 143394 - protein, 108 aa, Oryza sativa
  Clone ID: PAT_MRT4530_44307C.1.pep
MAQKYFCDDVTTGGGGSAARAGMLAGERRRGDANGEHQDVERDAVNSPVTKEAAEKQRTATATRRKWRKLRVDDGDEAPAVSGDGEGADEDGDDLANPTAVFPSDGDG

SEQ ID NO: 143395 - protein, 104 aa, Oryza sativa
  Clone ID: PAT_MRT4530_44308C.1.pep
MLAPTKPQPEDDRISDNSFNLFASPTSVLQYVATDEVPHRSGGGGELFGSKLELSWGYVGPALQWHVSPWSFPASHGVRVSGLAGRHVGSVWGPVITKGPGPQH

SEQ ID NO: 143396 - protein, 53 aa, Oryza sativa
  Clone ID: PAT_MRT4530_44309C.1.pep
VGPSAVPCLTRGTTLHSAGGRCDVGSQLSVQSDVTGDRPVTDRSFLTVARQSG

SEQ ID NO: 143397 - protein, 1711 aa, Oryza sativa
  unsure (1)..(1711): unsure at all Xaa locations
  Clone ID: PAT_MRT4530_4430C.1.pep
MATDISQSLDLNVPGLEFLHQHDFGTPSGTELQQRSLKTEKPPPSPSSTDKSEVPPKSRIPKHTGSEVHEGNIVPVTVDKLTPEQKEFELTMQQAQHQFLNSFMETRKGTVVQKYKVLLRMEKGNRFRXGTNESGGKGTAEGSGDKVQPQFNTFQDRIDXPCPQHALINQFGALVNTLSNMVKSLVDGSIAEHQATGPVYLPGGVFPNYRPLITNNQPTASNVPPAQPTAPISAPAAAAPSSASRQLTNPRLLTREQPQHAGQNVNRLTQEQQGGSARPQFAPQFNQFKPIPQQAQGVPQQRPWADLIADMMREQFGLKTKDTGNLYWHLNPECWADLEKQFHNYFYSGVHEMKLSDLIAIRQRHDEPMQDYIQRFREMRNRCYSLSLTDSQLADLAFQGLIAPIKEKFSSQKFDSLSHLAQKLTLHEQRFAEAKKNFKKINHVYPYMYDSDDEDDSEVAAVEWVRSKKLIPCQWVKSFEKEEKQIQLHAGHIIPSAEELGKRRYCKWHNSGSHATNDCKVFRQQIQVAIEGGKIKFDDSKKLMKVDGNPFPVNMVYTAGRTADGGKARGFQINSAKIINKYQRKYDKQQERHYEEGDGGFDRHTVSFSDFAGTKNQKRRVQRLRNRERFQEVEQEINRRLKKAKPRQEWRIKNKHAAADEVKADEEASARLVLSPEQADFEKPEGTENRHLKALYINGYVNGKPMSKMMVDGGAAVNLIPYAKFRKLGRNAEDLIKTNMVLKDFGGNPSETKGVLNVELTVGSKTIPTTFFVIDGKGSYSLLLGRDWIHANCCIPSTMHQCLIQWQGDKLEIVPADRSVNVASANLALWEMDSIDCLSGKTESPNYYFEGVVEKSNVYTKDTVDDLDDKQGQGFMSADDLEEVDIGSGDRPRPTFISKNLSSEFRTKLIGLLKEYRDCFAWEYYEMPGLSRSIVEHRLPIKLRVSNIVPVIKKNGKVRVCIDLNKAIPKDEYPMPVADQLVDAASGHKILSFIDGNAGYNQIFMAEEDIHKTPFTCPGAIGLFEWVVMTFGLKSVGATYQRAINYIYHDLIGWLVEVYIDDVVVKSKEIEDHITDLRKVFERTRKYGLKMNPAKCAFGVSADQFLGFLVDERGIEITQRSVNAIKKIQPPEDKTELQEMIGKINFVRRLYLSAGEKSIGSVLIQELEGKERVVFYLSRRLLDAETSSVEIVPWTLFFNGSVCTHGCGIGLVIISPRGANFEFAYTIKPYATNNQAEYEAVLKGLQLLKEVEADAVEIMGVSLLVISQLAGEYECKNDTLMVYNEKCRELMKEFRLVTSKHVSQQQNVEANDLAQRASGYKPMMKDVKVEVATITTDDWRNDVHHYLQNPSQSASQKLCYKALKYTLLDDELYYRTIDGVLLKCLSADQAKVQIGEFGAIQRAPASAMNPIIKPWPFRGWGIDMIGMINPPSSKGHKFILVATDYFTKWLEAIPLKKVDSGDAIQFFQEHVIYRFDIPQTITTDQGSIFVSDEFVLFADSMGIKLLNSSPYYAQANGQAEASNKSLIKSIKRKISDYPRQWHTRLAEALWSYQMACHCSIQVPPYKLIYGHEAVLPWEVRISSRRTELQNELTADEYYNLMADGREDLVQSRLRALAKVTRDKERVARHYNKKVVPNSFSEGELVWKLILPTGTRDNKFGKWSPNWEGPFQVHKVVSKGAYMLQGLDGEVYGRALNGKYLKKHYPSIWVNA

SEQ ID NO: 143398 - protein, 148 aa, Oryza sativa
  unsure (1)..(148): unsure at all Xaa locations
  Clone ID: PAT_MRT4530_44310C.1.pep
MFAPVKGGFFSLFGKMPHRGGNCFFGPPPPRGVLKGEKPPFLGFFGDPPPLWGVGGPPPPNFESNPPKXPPVPLVGNPFPGGQGNPSRFSPFPPPQGLKGPAPFFFPPSFPGVLKGPPPQKNPLGGVGGVFSYLNLSRGPGTPRFLVI

SEQ ID NO: 143399 - protein, 490 aa, Oryza sativa
  Clone ID: PAT_MRT4530_44311C.1.pep
MATQGWIADIIGDWVKKNPQKKAKDAKEKPFIGVDATKLTGKYTGQLASATVVDERLVISADACKGLEKVVDASFPMPVEHRECIRHLYSNFLKKFHGTVITDHLYHVTKSYTKEGFKYHMGQIHVAKPEAIQFLEKHHSRIWYTCGFGEGNKCDYLTNNMSESINAKIRGLKELLPHELVDSIRDLIMEKMTTRREVAKNLGDEILMSVMKQLNDLTSLLKVVKVARSDDGFAEVTLVDADNMTRRHTVDLDNRKCSCRVWQVSGRVAPMTHRSQWPIVDLGFKVHALRQKSGARSPRVQRIRGCLEPGRKKFIVLQNQPAQTTCNFDVEPHVEPQLTVAEACRFFHPDNLAHRPGIVVVAVACATASDAAFKILGFREWMASSSSQTTMAYNPATRGHFGPYENTAAGCSCSAAPLPPQAPVAVWPAAAPFDARADSPPRAPLLTRSCKLPPHASTCCLPVHLAGAAVPPTPSLLASCAAARGRPNGC

SEQ ID NO: 143400 - protein, 374 aa, Oryza sativa
  unsure (1)..(374): unsure at all Xaa locations
  Clone ID: PAT_MRT4530_44312C.1.pep
GENAAAEGGGGERSGGEPPVVPPSTSHAGACRRQPHPPPSAPRRSSSPAXPRPPSSTPHAGARRRRPHPPPSTPRSSSPSHPPPSTPRRSLSRAXPLPPPPPPSPNRAGAPASASPLQAAASTLPQPSYPPPAQPEPTPSPPPSASTVGRPATPTRCPRPPPRWTWPSRRPRPTPSPPCSRQPATERPPPPIKKEPLGPTCHPPFPPTTATPVGPPPPQWPPRVHPPPTPPTPPTRSPPKRAPPVTPKKSRRPEWRNLSPSPQPPGGFPPPTAVAPRRRAPPPPPPPPAXTPTPPPPRGAPATMRGAAAPGPPRRRAAADAVSPPTSRPGRPWRCARRSTATRRSAGTRCSPPGSPDGPRWGTSGRSTRRLSSQ

SEQ ID NO: 143401 - protein, 218 aa, Oryza sativa
  Clone ID: PAT_MRT4530_44313C.1.pep
MKPSRKSLLFLPATVSSSPAGCQAELEPATPRRLAAPNPTQSDPVSSGFLRGFDPLILLYLFPYESEQIVGAATTPPNPPPPPANLRPRRAAASAVAAACRHRQKVRQGEGKPGHPSFFAAGHRRAAAAEAAPRCHVALPGGESGPRWGGGHSFPLCLTEKYAGGVNPSEYCTTIIEAAGGDDQVMASFFPMTLRGQARGWLMNLLPASVYSWEDSCS

SEQ ID NO: 143402 - protein, 232 aa, Oryza sativa
  unsure (1)..(232): unsure at all Xaa locations
  Clone ID: PAT_MRT4530_44314C.1.pep
DIIHGSHSTGGDLAGARVVSRDFGGHLCEENDETNATVLTNATNDDGXRLATRGWRRRLGSPAAAALRWPAAKKDGWPGFPSPWRTFWRWRQAAATAEAAARRGRRLAGGGGGLGGVVAALQGTRGHGRGGKRKRATRGCFIXAWIEEIGLQTRGIASGNQKLGFGDKLENEFDSDKIPNDLLRFIGEKIEEDERIKTPQKSGRNGVGLGGIWGGKTARRGRLELCLAAGWR

SEQ ID NO: 143403 - protein, 373 aa, Oryza sativa
  Clone ID: PAT_MRT4530_44315C.1.pep
MEAQAQDKAEEGEEEGTRQQHAQAGPVGAAGGGGGGGAAAVAMSAIPMNSWLVPKPEPVEFFGGMAMVRKPPPRNRDRHTKVEGRGRRIRMPAACAARIFQLTRELGHKSDGETIRWLLQQSEPAIIAATGTGTVPAIATTVDGVLRIPTQSSSSSGPASSAVVDGEESSAKRRRKLQPTRAVAGASPLATAAPAAYYPVIADPLLQGSGGAAISVPSGLAPITATGAPQGLVPVFAVPATGSPAVAGGNRMIPQATAVWMVPQPAGAAGAGNQPTQFWAIQSAPQLVNFAGAQFPTAINVADFQQQQQQQPVSTTIVQNSNSGEHMHFSGADSHEQQRRGRKEGNSGGVVDHPEEDEDDDDDEPVSDSSPEE

SEQ ID NO: 143404 - protein, 68 aa, Oryza sativa
  Clone ID: PAT_MRT4530_44316C.1.pep
LSRMRSTSHSCRRSGVAEHPVGRLGKAGRRHYRAGSLPRLNVAELLLTAANHHGQVDVPQLQIPARYG

SEQ ID NO: 143405 - protein, 164 aa, Oryza sativa
  Clone ID: PAT_MRT4530_44317C.1.pep
PGDPKGPSGSGKTTLLTLMGGLRSAQSGSLRVFGQELNGAKKQDLVQVRRHIGYIFQAHNLLESLTARQNVQMAIELHPQYNAQQAKELSIAMLEAVGLGAHINYNPHNLSGGQKQRVAIARALGSHPKMILADEPTAALDSQSGHDVVELMRKLAREQGSTIL

SEQ ID NO: 143406 - protein, 305 aa, Oryza sativa
  Clone ID: PAT_MRT4530_44318C.1.pep
MNPNRTPPRQSRGDTSSLYGSRALPSFLPHGPAGLLLLLIQPPTRAQPSRPTSTAHTTHAHISQLQYSDYCSSNTYNNAYVTACSNGVQYEYEYDYSSRTRTDPKQSNQTLRVRADPLTSIRRPISSIHPMVSVECHRDVSTNPENVSRHNKLYLFRRRSKPMHPNSKARTRRNNENIKGWRYAESIIELMLFASERRLAGSSGPCTRNFRTLRVENFHKCCPEVPGPFQFKNVFLLPESSSIKITGSSEQSEQIGISSVLHPEVPNLLNFTAANLFVIFRKAYSPPPPLDYILARSNLHDMRKK

SEQ ID NO: 143407 - protein, 80 aa, Oryza sativa
  Clone ID: PAT_MRT4530_44319C.1.pep
QKDSAKYGVCYRTKKDEVIEFCNGQQPLAKAVSAIKPINYHNKHVLVDIALLSLSMKKLCSHLCRVEPVVINKPMVLSRI

SEQ ID NO: 143408 - protein, 63 aa, Oryza sativa
  Clone ID: PAT_MRT4530_4431C.1.pep
LRRRRSGGARRASFSTLEGRLFQLTQNLCVADAAPAVAVKGTRLAAPAYRLPSIPPTRTRTSH

SEQ ID NO: 143409 - protein, 37 aa, Oryza sativa
  Clone ID: PAT_MRT4530_44320C.1.pep
HIMLWIMIPYSMRALIRRPNAFTQLAVSAPSLVLHNQ

SEQ ID NO: 143410 - protein, 79 aa, Oryza sativa
  Clone ID: PAT_MRT4530_44321C.1.pep
PDYLIQLKKTGGFLQKIRTSLVYLCPAEHIPPKIEVDLANLDIGDRVSMNDIPVHPSLRLLSKNETMPVCKILASKPVE

SEQ ID NO: 143411 - protein, 239 aa, Oryza sativa
  Clone ID: PAT_MRT4530_44322C.1.pep
MALCLRRAAAAAVGEALRRGASTAPWRRAASASYHHTIQALPRETAGPRAAARERRNGRVPAVLLALAGAGPGEGVAHRKLLTADRKQLGEILKQSPYFLSTPVRLQVRAGERSTAVVHSGTVLPIKVHRDETTGNILNLVLVEADEGTMLKVNLPVEFKGEDVCPGLKKGGFLQKIRTSLVYLCPAEHIPPKIEVDLANLDIGDRVSMNDIPVHPSLRLLSKNETMPVCKILASKPVE

SEQ ID NO: 143412 - protein, 54 aa, Oryza sativa
  unsure (1)..(54): unsure at all Xaa locations
  Clone ID: PAT_MRT4530_44323C.1.pep
MLCGIVTDNNTQETAMTMITPSAQLTLTKGNKSWSSTAVXAAPCSGSPAPTSSS

SEQ ID NO: 143413 - protein, 253 aa, Oryza sativa
  Clone ID: PAT_MRT4530_44324C.1.pep
MSGTPADGGGGGGGGGGGSGDDWFLDCGILEDLPAAACGAFPWDASPSCSNPSVEVSSYVNTTSYVLKEPGSNKRVRSGSCGRPTSKASREKIRRDKMNDRFLELGTTLEPGKPVKSDKAAILSDATRMVIQLRAEAKQLKDTNESLEDKIKELKAEKDELRDEKQKLKVEKETLEQQVKILTATPAYMPHPTLMPAPYPQAPLAPFHHAQGQAAGQKLMMPFVGYPGYPMWQFMPPSEVDTSKDSEACPPVA

SEQ ID NO: 143414 - protein, 387 aa, Oryza sativa
  Clone ID: PAT_MRT4530_44325C.1.pep
MEKRQQSAGHSGVGARDKGIMTSVATGQGGGLAVVEQRWDAATCTMMEGLAPMRAMARPPLQVKSATHLVAPMAWEEGNLWLARAGPGAPTSPHTCVLVTELITNDQAAPTSHGGHQPKPPYHLFLPIAGTSIHDYRKNAALASTHRPPATKHPGAPHGHDLTDGRNQRTTSTTYNSTKRPRGHRVNAARPPKLLDQRCHHQARRRSTAALALRSTPSKHAGGAQSAGVVSRCHLRPACQPRRRPRLPRHMPLSFLPNTIVLAPPTAVAHAVISLPARSDDDGPDPATEGPDPVTVAVPDPQPRAAPPRGLPRTPCHFLASETARHRGFCPRCRHPSSYVVFGGGEAVRGGEGGGGQGLGFAPGHPCVDDRRRVELIPPHRGCLVDG

SEQ ID NO: 143415 - protein, 163 aa, Oryza sativa
  unsure (1)..(163): unsure at all Xaa locations
  Clone ID: PAT_MRT4530_44326C.1.pep
PRVRKIVEGGGWGVKSLGLRNKGKRXRRRLGALQVVCQDFPRPPLXENTLNFLEAGQLCXFVRDSEQPTKPLQVXIAGAGLAGLSTAKYLADAGHKPILLEARDVLGGKVLLLCFYVAFNFFCYSFFFFFGCLYLNSSYSLLVAFVDYFFGGNAFNISCLVGF

SEQ ID NO: 143416 - protein, 293 aa, Oryza sativa
  Clone ID: PAT_MRT4530_44327C.1.pep
MRRLVASQELLLVLLISLQCLSCLAIANPALDRQAEALLQWKSGLRGDLSYCGLEEWSNATSPCNWSGIYCSYKVYIQMKIPTVNILFRGYFLPLQCFLASGSWVEASQWFVGEENLQKRAKKSSLETSFPYGTLMQRAEIQGKGVFAIKLLHRMEDYFDIGAFLAEIEVLTKIRHRRIVKLHGYCSHSQCKFLVYDLIERGSLASIWNDQELAKELDWCKRVTIVMDIAQALSYLHHDCDDPIVHRDIKSSNILLDHDFKAYLSDFGMAKKLKDNSSSWSTIFAGTCGYIAP

SEQ ID NO: 143417 - protein, 46 aa, Oryza sativa
  unsure (1)..(46): unsure at all Xaa locations
  Clone ID: PAT_MRT4530_44328C.1.pep
RLGXAHNTKHXWMVXGVXISGYLFGXXXVALLXXSQLPKPXEXKXA

SEQ ID NO: 143418 - protein, 827 aa, Oryza sativa
  Clone ID: PAT_MRT4530_44329C.1.pep
MRRLVASQELLLVLLISLQCLSCLAIANPALDRQAEALLQWKSGLRGDLSYCGLEEWSNATSPCNWSGIYCSYKVRRGHERDAILVVTNITLFSCNISGGLSKLRFAQLPHLVFLDLSINSLYGPIPSDIGRLAELSYLDLSNNKLTGSIPPSIGNLTNLGFLELSNNYLSQGILSCLPDTLHNLQYLDLSHNSLTGPIPSSLGNLARLYFLDLGFNNLFGHIPREIGMLHSLVALDLDHNNINGSIPTTIGNLTSLKSLDLSTNEITGFIPESIGNLSLIELYLSINEITGFIPESIGNLRSLIKLYLSTNEITGSIPESIGNLTSLQNMDLSNNRIIGPIPSTFSKLISLITLKLESNVLNAILPPELGFLRNLFVLDLSSNQFTGSIPPQIGQFHHLSLLRLRNNLLTGPIPEELGYCTDLTELDLSRNNLSGAIPMTFMMLYRLLELNLSYNSLGGRFFGFYTTEASSVVSLDHNTGICGDPLYGLTPCQPSNPNPDSLHTNENSDSKHLVPRLLLAFAMFSCIWLVGGSITVVCWRRKLAKKGKEIIPGDFVSIWNFDAKVAFQDALYATENFDEKYCIGVGSYGSVLELRSKEKCKFLVYDLIERGSLASIWNDQELAKELDWCKRVTIVMDIAQALSYLHHDCDDPIVHRDIKSSNILLDHDFKAYLSDFGMAKKLKDNSSSWSTIFAGTCGYIAPELSSTMVLTEKCDVYSFGVVMLEVVMGKHPGDLLLPFFCRTEQHTKLKDILDQRIMAPTTEEKDIILLVLVAFACLQICPKSRPTMQQVCQAMTTRSLPAPILKPLDEIKLQHFHDFCGTIQNI

SEQ ID NO: 143419 - protein, 1257 aa, Oryza sativa
  unsure (1)..(1257): unsure at all Xaa locations
  Clone ID: PAT_MRT4530_4432C.1.pep
MAKKLPLSLSSTGKELPPKTNNLKSGAFEVNEGNIVPITVDKLTPEQKKELDLMMQQTQHQFLNSFMETRKGTIVQRYKMKLVADVPRIGSSKDGEVQQIPAGTTELGGKGAADGSGDKGDGSQGVQGEDLGPDGNTAQLQFNNFQDRIDYAVQHALINQSEVQYQQGGSAQPQFAPQYNQFKPVPQQAQGAPQQRPWADMIADVMREQFGLKPKDTGNLYRHPYPEWFKRVQLPNRYKVPDFSKFSGQDSVSTYEHGMIAPIKEKFSSQEFDSLSHLAQKVTLHEQRFAEAKKSFKKINHVCPYMYGSDDDDDDDSDVAATEWVRSKKVIPCQWVRSSGKEERYDFYISKAEKIFDLLLREKQIELPAGHTIPSADELGKRRYCKWHNSGSHSTNYCKVFRQQIQAAIEGGKIKFDDSKKPMKVDGNPFLVNMVHTAGRTADGGKSRGFQVNSAKIINKYQRKYDKQHEKYYEEDDDGFDPHWGFEEASARLVLSPEQAVFEKPEGTENRHLKPLYINGYVNGKPMSKMMVDGGAAVNLMPYATFRKLGRNAEDLIKTNMLLKDFGGNPSETKGVLNVELTVGSKTIPTTFFVIDGKGCYSLLLGRDWIHANCCIPSTMHECLIQWQGDKIEIVPADRTNLIELLKEFRDCFAWEYYEMPGLSRLIVKHRLPIKPGVRLNQQPPRRCKADMLEPVKAEIKRLYDAXFIRPCXYNHIFMAEEDIHKIAFRCPGAIDLFEWVVMTFGLKSARATYQRAMNYIYHDLIGWLVEVYIDDVVVKSKEIEDHIANLRKDFERTRKYGLKMNPTKCAFGVSAGQFLGFLVHERGIEITQRTVNAIKKIQPPLRHYLLSNECTVICKADVVKYMLSAPILKGRIGKWIFSLTEFDLRFESLMAIEGQAIADFIVYHRDDSIGSVEIVPWTLFFDGSVCTHGCGIGFVIISPRGASFEFAYTIKPYATNNQAEYEAILKGLQLLKEVEADAVEIMGDSSLVISQLAGEYECKNDTLMVYNEKCRELMKGFRLVTLKHVSREQNVEANDLAQGTSGYKTMMKDVKIEIATITADDWRNDVHHYLQNPSQSASRKLRYKALKYTLLDDELYYRMIDGVLLKCLSGDQAKVAIGEGCQDCQKFRAIQRAPASAMNPIIKPWPFRGWGIDMITDQGSIFVSDEFVQFANSMCIKLLNSSPYYAQANGKAEATNKSLIKLIKRKISDYPRQWHTRLAEVSWSYRMACHGSIQVPPYKLVYGHEAVLPWEV

SEQ ID NO: 143420 - protein, 173 aa, Oryza sativa
  Clone ID: PAT_MRT4530_44330C.1.pep
MDHSEEAANAGVRAAAAMPVPPTGHGCTGGGALPGVPARHDMPRAPEHAMKNWERKRGELSGQGKCFPELDHHCHRAQGGVDDDDSDERASCCVVARWLHLKVATLELEDSMSNDCGVRWSSLRTVQLTTMMGMLGGELGGDDDRQTCSGKGRPHVGGHTARDKPELEKRMGM

SEQ ID NO: 143421 - protein, 57 aa, Oryza sativa
  Clone ID: PAT_MRT4530_44331C.1.pep
MEQRTVGPTNNVLDAIKSLDIWSTNSQAPQVDISEKIAPSLQVCWRGLEHKRDNDDD

SEQ ID NO: 143422 - protein, 60 aa, Oryza sativa
  Clone ID: PAT_MRT4530_44332C.1.pep
NYLIILIRRDNEKIKQKNNMRTETFKTYIKFIKLGIKKKTAKTSGYIDGSERMQHSVQRR

SEQ ID NO: 143423 - protein, 440 aa, Oryza sativa
  Clone ID: PAT_MRT4530_44333C.1.pep
MGVVIEREEWALTPLAYPLLSAASLAAVLLLPYFSPPLHATAAASPSSHSPFDVGTTPFLRFRRGFLFVFSLASVAEGIHSVFGEDEFARCGLGREQMAARLAAAAAAVLFLGGLSGVVSDKLGPRQACIFYWMLQLAVGALKSFSGLRCAWISNLISALASSMFYFCFETWFVVEHEKQGQKQDLLFDSFWLMTFFESMSLLGSQGITNLLVNDDDKGFLLPYAFAALLSIVGLLYIRKNAPSTTHHASVIGSYQKSFFAHVFRAPFQNEDSLTIAYVTVGIALSIVAYDYQDIGTLVILFCIFHACVGFILPSLARLRTMYLPNELRGGMMSFSLGLANAAIFIFLMQMQHAYEAAYLFSNPETDTVTTSRQKEEYLVFVCSRELQRTVIKVSKAGPSDLNLQLLPTLEKKLHEAEKVGRLDRLFYSPPIDLLLSVHG

SEQ ID NO: 143424 - protein, 1069 aa, Oryza sativa
  Clone ID: PAT_MRT4530_44334C.1.pep
MAILEALQQTSIPVTGSSSIAVSPENFIKCLKKFYHHWKEDGSNLWGSSTAIAIATPPPSDDIRYKKSLALSMWFFNRELPETIMVFTEKQIHVLCKQKGCDALKPLKMPVSKAVSIEIVLHNLAKGDNGSSLMDEILHAVCSHFESKSAVIGHLAREKPEGKILEVWSEKLNGSRLRLSDVSSGISDLLSVKDATEIMYVKKAAYLTASVMKKYVVPKLEKIIADEMKVQHSKLTDLMEKILLSPTKIDVKLKAENVDICYPPIFQSGSKYDLRPAAASNNDNLYYDSGSLIVCAMGAKYSNYCSNVARTFLIDCAGEKCNAYKVLCQAHDAAIAALVPGSKASDGYQAAVSLVRDKAPDLLPFFTKSAGTGIGIEFRETWLSLNEKNDRILKEGMVFNVSLGFQNLPEKTGDYKNKEFSLLLADSVLVCKEKPHVLTAFVSKADGDVFYSFDEEKTGSPSVKPSLNAKVMVPEKPVPKAELMLPLKENLRSHSRTPKEDLRKQLQAEILQKRTAEIAMNSNASNHKLLEGQGLRAMREPVAYKSTRDIPCSNRLEIQVDKQNEAILLPIYGVIVPFHVCTVKKAEIRGDSNRGVYVCITFNVPGTASNLQDPCLKTNANRIFLKAVTFISKDRKHADEAIQLMRIIQRGVLERAKRASLVSQERLQLCDRMTRDRIQLMDLWIRPTFAGRGRKSPGILVLHVNGFQYSASKSEKIEIMFCNVKHAFFQPAEKEMITLLHFHLYNDIMVGNKKTRDVQFYIEVMDTVDSVGLRRRTAWDPDEIEEEQRERARRSGINRQFELFVKRVNSIWSQPRFEQLGLQFETPSQKLGFNGVHGRTTCFIVPTPSCLVQLVESPFLVTSLREVDIVCLERVALGQKSFDMVFVFQDLKRDVIRIEVIPMTSIDGIKDWLNGCNLKYYESKLNLSWRKVLKEVMNNKESDENNRWEFLNPDASDSDSESSQTEDDQYEPSDADSCSESDDEDSDSESVVDSGEDDGAMDGSEDDGGDAAESWDEMERKARDADMEMGSESDSEDERQRRREKALAKSRCPSHPQAKGAAHKRQRIN

SEQ ID NO: 143425 - protein, 151 aa, Oryza sativa
  Clone ID: PAT_MRT4530_44335C.1.pep
LVRHKQKTHLLEIHAVFRKKIGGGRHKRLSPKHSQKHLVETQKDSGLRASIGMEYFLHCMGSETQLFHWGRFFTPGRQPPVFFLHAGGLICSHLFRPGLGWSSQLQEKEASSTACCDKGGAVCVQAPATEAAAPASRVQQRKHQQAAPLFL

SEQ ID NO: 143426 - protein, 172 aa, Oryza sativa
  unsure (1)..(172): unsure at all Xaa locations
  Clone ID: PAT_MRT4530_44336C.1.pep
MAGTGLRFRQGAIFFSGAHAAAHPRTRTPHHHCSPQRTHDARGRCRLTAKSANGRPQISASFRDVAIDGAQSEDGAPEQGGSTVSITVVGASGDLAKKKIFPALFALYYEDCLPEHFTXFGYARSKMSDEELRNMISLTLTCRIDQRENCSDKMEQFLKRCFYQSGQYNSEE

SEQ ID NO: 143427 - protein, 317 aa, Oryza sativa
  unsure (1)..(317): unsure at all Xaa locations
  Clone ID: PAT_MRT4530_44337C.1.pep
KKSQLLGEERNQPSHPYPFLCLSCSRALPPPHSPSQAPHSLTPLSVTTAAPPLPPPPLNPPCCKMTAMAAWPDPAPPLNLPLAPSXSSIGARGWPDPAPPLPTSTWERPNPPPFPRRPTPPPLPARQLGWPEAEAQPAAAPPPPLSGSPTGGAGPTCRAHLPPXPAPPRPKPPLPPSPRAPAHTSPMXPAPPPTHPATAAPNPYSSSPPSPDPXAGQGLPPPDPSETRPATAHSSPRSSPPPPLAPXAEPPKPPPAPGPSPRRPRAPRPARQPPQPPPAPGQSPRRPRAPLDAASSCHRRPRRSGEQERRERESEGR

SEQ ID NO: 143428 - protein, 740 aa, Oryza sativa
  unsure (1)..(740): unsure at all Xaa locations
  Clone ID: PAT_MRT4530_44338C.1.pep
EAAETKGRGGGEGRKCRREEEEAFAAKSRRIDDQDDEERMNNYTPMLEEEEDGCRDSRCAELVFGEEEELDPVQMEEKLRQVKLELQDKYTEVDEEEQIRNYRTSWDSSLSSRYGPFQCTMVRIKKGLEWPLHVYGLVAVRDSVDHNRNLLFHRTRDDCQILTQKDSFLELTGPSRAILIVDPVEFDVELKVKGRRESDDQILSFQLFRQNGFFNGRQSVTLVRRFHPIMLGWYSKFKFTYAVLNGAVEATICRVKVVRGSWTKEYQGRIVCTTSSICHEDFMLLDSQDAETMPIGSDDVIKLSRRVVTVELSGELTVSLTATHVGKRTRDDDGGIAQNDEALFTTDKVRFRPKKSGESCATCKLGFCEVEITVERGVPGLSCTASKMICMIACLLAAMAMPNVLSHVFLVAXPQSIFFILAGYIYNHIQTGVDACSDPTYNQARSCNLIDRSIQLVPNKVRMARGGVVWLAVALLCCCFVRHCESARVFTIINQCKTMVWPAVTPGESFGGGGFALKPGQSMVFTAPVGWSGRIWGRTECDFDQAGNGSCATGSCGSELKCGGSGATPATLAEFTLATKDFYDVSLVDGFNLPMVVRPLNGEGNCSVAGCDGDLRDSCPSELSKKVNGRTVACRSACDVFDTDQYCCRGMYGNPSTCQPTFYSKKFKAACPTAYSYAYDDPTSIFTCSNADYTITFCSTRKRPVCTYHNNRLICSASTRSWPSVISALLFTFLALQFSL

SEQ ID NO: 143429 - protein, 70 aa, Oryza sativa
  Clone ID: PAT_MRT4530_44339C.1.pep
MATCGAAPGPRFARRTYVVARGHGGSPVRAASAWRNVCVRVGDGRAPEDANAAAREACETVRDQSALPAR

SEQ ID NO: 143430 - protein, 1244 aa, Oryza sativa
  unsure (1)..(1244): unsure at all Xaa locations
  Clone ID: PAT_MRT4530_4433C.1.pep
MVKSLVDGSMAEYQATGPVYLPGDVFPNYRPLITNNQPSTSSVPPAAPVSAPAPAAPSSAPKQITNPRNILDKSWADLEKQFHSYFYSGVHEMKLSDLTAIRQRHDEPVQDYIQRFREMRNRCYSLSLTDSQLADLAFQGLIAPIKQKFSSQEFDSLSHIAQKKINHVYPYIYGSDDDNDDSEVAAAEWVRSKKVIPCQWVKSSGKEERYDFDFTKADKIFDLLLREKQIQLPAGHIILSAEELGKRRYCKWHNYGSHSTNDCKVFRQQIQVAIEGGKIKFDDSKKPMKVDGNSFPVNMGMRLPSIEDCPRCSDIAESSSRSHNRSNRLRLTRVPVHQRLGPVNQDHDQEDEEGRKTQWCPSGIFTKNQKRRVQRLRNRECFHEVEQEINHRQKKTKPRQEWRVKNQAATADEAKRLAKGKSVVTASVNMVFTLPAEFGAKQADVDEVEEASARLVLSPEQAVFEKPEGTKNRHLKPLYINGYVNEKPMSKMMVDGGAAVNLMPYATFRKLGRNTEDLIKTSMVLKDFGGNPSETKGVLNLELTVGSKTIPTTFFVIDGKGSYSLLLGRDWIHANCCIPSTMHQCLIQWQGNKIEIVLADKSVNVASADLALWEMDEFRTKLIELLKEYRDCFAWEYYEMPGLSRSIVEHRLPIKPGVRPYQQPPRRCKADMLEPIKAEVKRLYDAGFIRPYRYAEWVSNILPVIKKNSTVRATPKDEYPMPVADQLVDAASGHKILSFMDVYIDDAVVKSKEIEDHIADLRKVFVRTRKYGLKMNPTKCAFGVSAGQFLGFLVHERGIEITQRSVNAIKKIQPPEDKTELQEMIGNINFVRMFISNLSGRLRHYQLSNECTVICKADVVKYMLSAPILKGRVGKWIFSLIEFDLRYESPKAIKGQAIADFIVDHRDDSIGSVEIVPWTLFFDGSAEYEAVLKGLQLHKKVEADAVEIMGDSFLVISQLAGEYECKNDTLMVYNEKCRELMKGFRLVTLKHVSREQNIEANDLAQGASGYKPMMKDVTIEVSTITTDDWRYDVHHYLQNPSQSASRKLCYKALKYTLLDDELYYWTIDGVLLKCLSADQAKVVVGEXYFWPTMLDDCFKXYKGYQDCQKFGAIQRAXPWPFRGWGIDMIGMINPPSSKGHKFILVATDYFTKWVEAIPLKKVDSGDAIRFVQEHIIYRFGIPQTITTDQGSIFLSDEFVQFADSMGIKLLNSSQYYAQANGQAEASNKSLIKLIKRKISDYPRQ

SEQ ID NO: 143431 - protein, 59 aa, Oryza sativa
  Clone ID: PAT_MRT4530_44340C.1.pep
LISWSFGFSEEYKKARHAISSVTGGVRSFILRPPVATNILNFFFTNQGKLNYSLQLFQW

SEQ ID NO: 143432 - protein, 97 aa, Oryza sativa
  Clone ID: PAT_MRT4530_44341C.1.pep
QDGDGLGLLIILCRDVLDGDVGASIGRRHGGRTDGWRIRLDFIRKSIAAESVGGGGGVTGGHVLVGASATHGREPLLSLKTPPEEAEEEERNRKKLQ

SEQ ID NO: 143433 - protein, 347 aa, Oryza sativa
  Clone ID: PAT_MRT4530_44342C.1.pep
MRLSVAILCALVAVQAAALLLAGSAAAASELKVGYYHKKCKGVENVIKWHVIKALKQNRRTGAALVRLLFHDCFVRGCDGSVLLDKSYENPHPEKEAPVNIGLAAFDLLEEIKAAVEKRCPGVVSCSDILIYAARDAGSILSNGHVHFDVPAGRLDGVVSRADEAQAELPDSTMTVQQLKDNFAAKGFDTEQLVILSGAHSIGQGHCSSFTGRLSEPPQQITPAYRDLLNYKCSQAANPDVVNNVRDEDASVVARFMPGFVSRVRKISDFLDNTYYHNNLAKIVTFHSDWQLLTDATSLSKVHEYADNATLWDSDFSDSLLKLSQLPMPEGSKGEIRKKCSAINHLY

SEQ ID NO: 143434 - protein, 245 aa, Oryza sativa
  Clone ID: PAT_MRT4530_44343C.1.pep
MAFGSHTRLDVRRAQQHSSFCSPSSAAAVLVALALVAVWMASSTLVTPADFSPFRPTTTTARPRNRMDPVTVEEDADDPPPLTLRQTETGPGGDNGSHSHSPSLETATEADPQAAQSTSNTKDTPHNKQQQQTASPTPSSYAWKLCNTEAGPDYIPCLDNLQAIRNLRTTKHYEHRERHCPQHLPTCLVPLPKGYTNPIRWPNSRDQIWYNNVPHTKLVEYNGHQNWVKVSGEYLTFPGGGTQFK

SEQ ID NO: 143435 - protein, 143 aa, Oryza sativa
  Clone ID: PAT_MRT4530_44344C.1.pep
MKERGVRNKQGVIMKALLDRCLSKHRNGGWPEPPEGSFAVYVGGGGGGGGAARERFVVRTECVNHPLFRALLEEAEEEYGYVADGPLELPCDAGEFVAVLARIEREMAEERTVGCAGGLVFRLHPAAHLMLVAPATPPPMIVG

SEQ ID NO: 143436 - protein, 94 aa, Oryza sativa
  Clone ID: PAT_MRT4530_44345C.1.pep
GSSSRTWRGVKPPPPLRCCMPSSTAPMASPVPLGRQGRPVKQVSWPPSQVEILKKESLGVFLLCFPFRVSEMKKKEGFFRMLCIPRPCFFSLKK

SEQ ID NO: 143437 - protein, 207 aa, Oryza sativa
  Clone ID: PAT_MRT4530_44346C.1.pep
MIKKWNKNITSKPNIASTAAKATSGCLIHPIRSTRRKRRPISRYYRLLFSPQEMLVAQRKHVNNRKYRNEKMGEKTVGRKALGRRAAVAEMSPYCTHEEIRTKLVRELPHHYVTSVAGRKDQPTTLWILQYRKANIKIDRFNILPLVQSLAQRCRDSKNSIINSIRHKEYICSCSGLMLLPQYEQYIANTTSKSEIDALMYLKYLNK

SEQ ID NO: 143438 - protein, 348 aa, Oryza sativa
  Clone ID: PAT_MRT4530_44347C.1.pep
MAEARTIGSISVPNVQELAGTCNGIDEEIPERYIRPEVSSDEVIKNNHGDMSIPIIDLDKLISPQSSQEECVKLISACQYWGFFQLINHGVPDEVIANLKNDLVEFFSQPLDAKKEYSQLPNNLEGYGQAFVVSDNQKLDWADMLYLQVCPTDSRDLRFWPNYPASFRDRKYWTLPAAIHAKAVGVEPKSLLSVFEGQARGLRMNYYPPCLKADKVLGLSPHTDPGGLTLLLQVNDVQGLQINKDGKWFSVNALNGALIVNIGDTLEILSNGKFRSVEHRAVVHPSRERISAALFYYPCQDMVISPLPDFVKDGKVKYKTISYQDLLTEYFTAELDGRNRLKKMKLEP

SEQ ID NO: 143439 - protein, 109 aa, Oryza sativa
  Clone ID: PAT_MRT4530_44348C.1.pep
PGGTENAGGVDQNAPTYTDLQTCGNLQHDNAQGDIFLTMPPGGAPPISPRGRRPRNAGDTPMGSKLGGVRLKAMRHHGLTAAEVHTGREPPCGRKPKRLLMTFVIKAVD

SEQ ID NO: 143440 - protein, 396 aa, Oryza sativa
  Clone ID: PAT_MRT4530_44349C.1.pep
ILPEESKAREERAPPEGGKTATSTRRRRARRWHFADVPCQIEFLPSVDDLVEPGIYNNFTGFSLNYISKENVSSSNGIFEPLFGGHQSLQEREETYYARNQTLHCGFVQGPEDYPNTGFDLDENDKIYMASCRVVVSSCIFGSSDYLRRPTKSKIGPYSKKNVCFVMFLDELTLGTLSSEGTGPDETGFIGLWRIVVVEKLPYKDMRRAGKVPKFLAHRLFPFAMYSIWLDSKLRLNADPMLIVEYFLWRNKAEYAISVHYDRTCVSEEVLQNKRLNKYNHTAIDEQFYFYQSDGLVKFNESGREPVLPSYVPEGSFIVRAHTPMSNLFSCLWFNEVNRFTSRDQLSFAYTYLKLRRMNTGKPFHLNMFKDCERRAITKLFHHRANETADPPPANP

SEQ ID NO: 143441 - protein, 135 aa, Oryza sativa
  unsure (1)..(135): unsure at all Xaa locations
  Clone ID: PAT_MRT4530_4434C.1.pep
AIFSQVFFLQCTFMVRAEATPXAKQGADRQLWFASKQSLSYLDGTLPGXFGFDPLGLSDPEGTGGFIXPRWLAXGXVFNGRTXMXGVLRMVXXXLLGKLGLXPXXXAIXWFQXGVIPPRXYTYWAXPYTLFLFQL

SEQ ID NO: 143442 - protein, 76 aa, Oryza sativa
  Clone ID: PAT_MRT4530_44350C.1.pep
MGRRPPSQSRRGRVTGGPREDDVGARARASVSRAPASSCARPRSGYNSRPETGGRQLGNWLACAVASASASKREIA

SEQ ID NO: 143443 - protein, 104 aa, Oryza sativa
  Clone ID: PAT_MRT4530_44351C.1.pep
ITQYEYFFSIDLLHHNCADVPEGSFIVRAHTPMSNLFSCLWFNEVNRFTSRDQLSFAYTYLKLRRMNTGKPFHLNMFKDCERRAITKLFHHRANETADPPPANP

SEQ ID NO: 143444 - protein, 388 aa, Oryza sativa
  Clone ID: PAT_MRT4530_44352C.1.pep
MPERRLPISTPAAAGPRRHPRRQRRHCRLLVLPAFALALVSLAYLSFSSHPNLPFHAKHHDMASIKDVKERMDQRQTLDAKVKANLSMTKVESEPFKRRKKSRKHYVPCQIEFLPSVDDLVEPGIYNNFTGFSLNYISKENVSSSNGIFEPLFGGHQSLQEREETYYARNQTLHCGFVQGPEDYPNTGFDLDENDKIYMASCRVVVSSCIFGSSDYLRRPTKSKIGPYSKKNVCFVMFLDELTLGTLSSEGTGPDETGFIGLWRIVVVEKLPYKDMRRAGKVPKFLAHRLFPFAMYSIWLDSKLRLNADPMLIVEYFLWRNKAEYAISVHYDRTCVSEEVLQNKRLNKYNHTAIDEQFYFYQSDGLVKFNESGREPVLPSCSYHYLMI

SEQ ID NO: 143445 - protein, 83 aa, Oryza sativa
  Clone ID: PAT_MRT4530_44353C.1.pep
MERKKRRGIKTEAQGGGDTQGAAAAHRAAGRSGEARQARARGEVAAAGETCKGVARRRAQPARLQRTGVAAAGDSRLQYSQIL

SEQ ID NO: 143446 - protein, 242 aa, Oryza sativa
  Clone ID: PAT_MRT4530_44354C.1.pep
MAMEAAAERSAGAGAAATAAPESGGGGAGERRSRFRRICVYCGSAKGRKASYQDAAVELGKELVERGIDLVYGGGSIGLMGLVSHAVHDGGRDLGGVIPKSLMPREVTGEPVGEVRAVSGMHERKAEMARFADAFIALPGGYGTLEELLEVITWAQLGIHKKPVGLLNVDGFYDPFLSFIDMAVSEGFIAEDARRIIISAPTARELVLKLEEYVPEYEVGLVWDDQMPHSFAPDLETRITSS

SEQ ID NO: 143447 - protein, 169 aa, Oryza sativa
  Clone ID: PAT_MRT4530_44355C.1.pep
MAATRGGGRSAARCRRRLLDALSGSMEQRARRHWWPNSTSGSHLIAITPSALSLRNSAGAIFIRFKPLARCRRYWSPQQLSPRISSFVLTPRPLPPLARATATAGIGLLLTKILVPALRPPPPLGPQLPKLRRSSTRTRRPLSPLGSLLPTKPPLPDSPSSCRGLFVDA

SEQ ID NO: 143448 - protein, 427 aa, Oryza sativa
  Clone ID: PAT_MRT4530_44356C.1.pep
MATVVRACMPLPPAAVASSSAAPSTDAQAQRSPSSSSARVLVLGGTGRVGGSTATALSKLRPDLNILIAGRNREKGESLASKLGEESEFVQVDIRDRNMLEEVLQDVDLVVHAAGPFQRENECTVLQAAIATKTAYIDVCDDTDYSWRAKGFHEQAKDCGIPAITTAGIYPGVSNVMAAELVHAARSENAGEPERLRFFYYTAGTGGAGPTILTTSFLLLAEDVIAYNKGEEIKLKPYSGALSIDFGKGVRKKDVYLLNLPEVKSAYKVLGVPTVSARFGTAPFFWNWGMQAFANFLPVEFLRDRNKVLKLVGFVDPFVRAIDGIAGERVSMRVDLDCSNGKNTIGLFSHRKLSVSVGYATAAFVLAVLEGSTQPGVWFPEEPEGVAIESRKVLLERASQGTTIFVMNKPSWMIETDPKEVGLGIYV

SEQ ID NO: 143449 - protein, 113 aa, Oryza sativa
  Clone ID: PAT_MRT4530_44357C.1.pep
MARYKWQKELRGEVSNVTTAHGPLKLEEKPLPLLPIELIYGTSYLHSCGPVLSLHCYNNSCTKLTAEGKREMGIGTWRHNEEPLLPPLVACPQCVALPLEEKGWVSMSTPYYR

SEQ ID NO: 143450 - protein, 460 aa, Oryza sativa
  unsure (1)..(460): unsure at all Xaa locations
  Clone ID: PAT_MRT4530_44358C.1.pep
MATVVRACMPLPPAAVASSSAAPSTDAQAQRRSSSSSARVLVLGGTGRVGGSTATALSKLRPDLNILIAGRNLEKGESLASKLGDESEFVQVDIRDRNMLEEVLQDVDLVVHAAGPFQRENECTVLQAAIATKTAYIDVCDDTDYSWRAKGFHEQAKDCGIPAITTAGIYPGVSNVMAAELVHAARSENAGEPERLRFFYYTAGTGGAGPTILTTSFLLLAEDVIAYNKGEEIKLKPYSGALSIDFGKGVRKKDVYLLNLPEVKSAYKVLGVPTVSARFGTAPFFWNWVMQAFANFLPVEFLRDKNKVLKLVGFVDPFVRAIDGIAGERVSMRQLLYRKFLPVCFRSTSSFQGFKLFPELTAYSFKLWPEQVDLDCSNGKNTIGLFSHRKLSVSVGYATAAFVLAVLEGSTQPGVWFPEEPEGVAIESRKVLLERASQGTTIFVMNKXTDPKEVGLGIYV

SEQ ID NO: 143451 - protein, 106 aa, Oryza sativa
  unsure (1)..(106): unsure at all Xaa locations
  Clone ID: PAT_MRT4530_44359C.1.pep
CGSCCSSRCRSSSCXXWSRWFSASSAARXLVXPXCSSCXFLXVXXXCXXXLVSLXXXXXXLXLSLLGXVWLXXVCFLXLXXXXXXXSXCXXXXCAVXXPSLLWFVF

SEQ ID NO: 143452 - protein, 1663 aa, Oryza sativa
  Clone ID: PAT_MRT4530_4435C.1.pep
MSGDKQTPPSTGKSTDPQNKLLNPTGSEVHEGNIVPLTIEKLSPEKKKDFDLMMKNAHEQFMKSFAETCRKVYQKYKVIKALTGEPGDKGDGFQEGVVEDLGPDGNEVQPQFNNFQDRIDYAVQHALINQSGVLVNTLTNMVKSLVDGTIAEYQATGPVYLPGGVFPNYSPLVIANQQGTSNMPPVQLTASISAPAPAAPSSAQRQMINPRLLTREQPQHGGQNVNRMTQEQPDQSVVPQVIPEHLVDNIQPNFQNYQGGNLNYQYQPPSPHVQYQQGGSPQPQFARQSNQFEPMSQQVQGVPQQRPWADMIADVMREQFGLKPKDTGNLYRHPYPEWFERVPLPGRYKVPDFSKFSGWADLEKQFHSYFYSGIHEMKLFDLTAIRQRHDEPVQDYIQRFREMRNRCYSLALTDSQLADLAFQGLIAPIKEKFLSQEFESLSHLAQKVTLHEQRFAEAKKNFKKINHVCPYMYGSDDEEDPEVAAAEWVRSKKVVPCPWINSARIINKYQRKYDKQQERCYEEDDGGFDPHWDYDVFRFCWNEGMRLPSIEDCPGCSDIAESSSRSYNRSNRLRQTRVPVHQRLGPVNQVHNQDDDEGVMTQWCPSGIFTKNQKRRVKRLRNRERFQEVEQEINHRLKKAKPKQEWRVKSQVPTADEVEADRAKRLAKGKSVVTASVNMVFMLPAEFGAKQADVDEVEEASTRLILSPEQAVFEKPEGTENRHLKSLYINGYVNGKPMSKMMVDGGAAVNLMPYATFRKLGGNSEDLIKTNMVLKDFGGNPSENKGVLNVELTVDSKTVPTTFFVIDRKGSYSLLLGRDWIHANCCIPSTMHQSLIQWQGDKIEIVPADRSVNVASADLALWEMDECPIVIYNQLKMESPNYYFEGVVEGSNVYTKDTVDDLDDKQGQGFMSADDLEEIDIGPGDRPRPTFISKNLSPEFRTKLIELLKEYRDCFAWEYYEMPGLSRSIVEHRLPIKTGVRPYQQPPRRCKADMLEAVKAEVARLYDADFIRPCRYAEWVSNMVPVIKKNGKVRVCIDFRDLNKATLKDEYPMSVADQLVDAASGHKILNFMDGNAGYNQIFMVEEDIHKTAFRCPGAIGLFEWVVMTFGLKRAGATYQRAMNYIFHDLIGWLVEVYVDDVVVKSKEIENHIANLRKVFERTRKYGLKMNPTKCAFGVSARQFLGFLVHERGIEVTQRSINAIKKIQPPEDKKKLQELIGKLRHYPLFNECTMICKADVVKYMLPAPILKGIVGKWIFALTEFDLRYESPKVIKGQAIADFIVDHRDDSIGSVDIVPWTLFFDGSVCTHGCGIGLVIISPRGASFEFAYTIKPYATNNQAEYEAVLKGLQLLKEVEADAVEIMGDSLLVISQLAGQYECKNDTLMVYNEKCRELMDGFRLVTLKHVSREQNIEANDLAQGASGYKPMTKDIKVEIATISADDWRYDIFQYLQNPSQSTSRKLLYKALKYTLLDDELCYRTIDGVLLKCLSADQAKVAIGEGMLYNSFKSILFTGLVFLRPLQPIRARSSCTDEFVQFADIMGIKLLNSSPYYAQANGQAESSNKSLIKLIKRKISDYPRQWHTRLAEALWSYRMACHGSIQVPPYKLLYGHEAVLPWEVRIGLRRTELQNELTADEYYNLMADEREDLVQSRLKGLLSIITRW

SEQ ID NO: 143453 - protein, 248 aa, Oryza sativa
  Clone ID: PAT_MRT4530_44360C.1.pep
MRHHYHHLVINGESAHYGTGTHWCPSATLSSRRPPMVDCPSRCRLLVAPIVGRQGESMDERRENGGEGYGVERRGKDLTGERKEMEPVGCKYSQACLLRRPPVKMDFYKRVYIGSFSNPFTYGLSFSPPKKGPNAEEAPGSKLHLSYSPTQQQSAGKSIPEVPYLVTVLPSYKIVPEPKKSDKTYPPISKTTANEIPYLSYSPTQQQVQAKGGSAEERAWLRRLSATSTAAGGGPGCGGAKDRSGSRW

SEQ ID NO: 143454 - protein, 39 aa, Oryza sativa
  Clone ID: PAT_MRT4530_44361C.1.pep
HFQIFEFSSIPLNLGLTALCSVRPEVPVTPVRNFRGSGV

SEQ ID NO: 143455 - protein, 73 aa, Oryza sativa
  Clone ID: PAT_MRT4530_44362C.1.pep
SLLEVAGSSLPPPSRGRRPPSRRRLCSRSSWWALFWSSRWRIAGYASGGPCLAGRGSPPVCCSKTSFRVGGWV

SEQ ID NO: 143456 - protein, 137 aa, Oryza sativa
  Clone ID: PAT_MRT4530_44363C.1.pep
NPMTKEAAEEQRTAPATRKKRRRRSGRRRRRCSGGLRRRRRDGRGRRRLGDHDGDLLERRRRLEQRRRTAGAAATTVARGYTALERFRRRETKARVAAERGQLGDPYIGVGRRRRRPTGRRPNRPPFRASSAPPEPI

SEQ ID NO: 143457 - protein, 76 aa, Oryza sativa
  Clone ID: PAT_MRT4530_44364C.1.pep
MSSFLQRCFLCRRELADGKDIYMYRGDRAFCSVDCRCKQIFMDEDAAAAGGNCAADIIVPTKSDTSCIPSAVSLTA

SEQ ID NO: 143458 - protein, 342 aa, Oryza sativa
  Clone ID: PAT_MRT4530_44365C.1.pep
MAGIRWPPEDPEIFPSRMVTGGGGGGAGGGPPGPPGEMASDDDRSVAADSWSIKSDYGSTLDDEQRYADAAEVLLASSSSSSAAASGPAAATTASVAANPSGDFSFDKDVPDSADMEPPLLGLPNYHQDGSYAEYLANFQERSHTDDWFGTENMDVLVSWTKNLCSNKDLRSCSVLDIGTGSGRLSQQLAKQGFSDLTGIDHSEGAIEVARNLAIRDGFEHINFLVDDVLESKLERRFELVMDEGTLDTIGLHPDGPVKRMMYWQSVAGLVSPGGILVITSCSRTKDELVQEVESFNQRKLSAMGSEGAQASDTAVFKYIDHVQTYPIVDSSCITTVAFSHS

SEQ ID NO: 143459 - protein, 70 aa, Oryza sativa
  Clone ID: PAT_MRT4530_44366C.1.pep
SCCSVCRIFFSFMSNALSTTLSRTSPSCQRAHRRFLILQMISNSLKICDIKKTAGRCNPLICSSFREQCE

SEQ ID NO: 143460 - protein, 109 aa, Oryza sativa
  Clone ID: PAT_MRT4530_44367C.1.pep
HIILFPRRGGGGVGFIILSLGDPKKTKNITYIKPPKNNLIPPSPWPWLRGPLVLRSGGCQRRVDGPLVPVWARGVPGPWREIGVFGLAPGLVCRGPQQSRILSGGSPRL

SEQ ID NO: 143461 - protein, 110 aa, Oryza sativa
  Clone ID: PAT_MRT4530_44368C.1.pep
MERRDAYGRKAVESDERAGGGGGDTGRSWLLARRKLVRYHWLRFDVDCQVGPNLSPRPQVNGSGDGVPNPDERTQPLDVDRIECGARLLGFGFGLFRYTFFVGLAMTGHV

SEQ ID NO: 143462 - protein, 364 aa, Oryza sativa
  unsure (1)..(364): unsure at all Xaa locations
  Clone ID: PAT_MRT4530_44369C.1.pep
MGSRDGFFNKLLNDFICWSTCPDKIGTIIVIDNLVYRDHPSLKIRGVPKDVRSYDVERVRNKEQLSIQLGCGQTHXIIENVLDKCGVVTPNLPTKTDDLSHSTGHRWAIREKHMXQTNSSNFHWCSRDNSTRXVLEPVNHSNLSHRSFNWCSRDNSTRXVLEPRSTYGYTWFLTSGVAILPLPLLLVVELRLHLVLDQRCSNSPTTFIYSGRVKAXTWFSTSGVAILPLHPLQVVELRLXPGFPPAWPSNDYXLLLDQRRSDSPTTSTPTKLISGTXYRQVFCPEIPYHDXHLELKPILLSLYAALARPPRNLRELSLGTPRADKALSGNAETNDHTLRLLDHSRMAGGSRQGIQNEEIVYPPR

SEQ ID NO: 143463 - protein, 323 aa, Oryza sativa
  Clone ID: PAT_MRT4530_4436C.1.pep
MAEKPPPSPSSAGKGFPPKTDNQKFGASKVNEGNIVPINLGKLTPEQKTELEQMMQQTQHQFLNSFMETRKGTVVQKYKIKLVTDVPGIDSSKDGEVQQAPAGTAETGNQGIPEGSGDKDNQPATSNVPPVQPTAPILAPAFAAPASAPGQLINPRLLPTVDPAQHQPIQQTPSRQQVIQPIQQTPPRQQAIQPIQQQGSLNASAGLMTPGNQPRQHVMTQVVPENLVHNVQPDQSVIPQVVPEHLINQFKPMPQQVQGVPQPRPWVDMIADVMREQFGLKPKDAGNLYRHPYHEWFERVQLPNRYKVPDFSKFLGAGQCFNL

SEQ ID NO: 143464 - protein, 83 aa, Oryza sativa
  unsure (1)..(83): unsure at all Xaa locations
  Clone ID: PAT_MRT4530_44370C.1.pep
MAIVGNWLQVVDDLNHRNLMALARRFGDILLLRMGVRNLGVVISPDLXKEVLHTQGVLFGSRTRIVVYDIFTGKGQDMVITEY

SEQ ID NO: 143465 - protein, 151 aa, Oryza sativa
  unsure (1)..(151): unsure at all Xaa locations
  Clone ID: PAT_MRT4530_44371C.1.pep
MKGVKSKGAIKSDAMLCVKSKGVDNAAAKGRKGKAGKDPNXFKRAPSAFFDFMEEFRKEFQENNPMNKSVAGVGKTTGDRSKSLIEVHKAPYVYXPTSLKAEYNXAIAAYDKGVEHCTRRYPTKXNRIDHEEESDKLKSEVIDEYDDEVSA

SEQ ID NO: 143466 - protein, 397 aa, Oryza sativa
  Clone ID: PAT_MRT4530_44372C.1.pep
MNAAGDTASPALTPREPCRSKPAYLLPVGPRPSPPAALLRVSAMGGRRASATVGPRSSRAAVGERSCGRNDGGRSGVGMRAEQRWAMVGERKASATGCEQSGRRASGRARGAEEGGATAEVAEAGTWRQWASSARLTLPVASAAAARVARRADRANEHVVLAASSPRQADRRVTASRHARDAGVTRDGRVRYEEGGDEAHEAPTGECAAGGGGGEECGWQGEAQCAGGGGRSGARAAKERLPTAEEQRAGRRQTTPESGRPRVPRATSSAVTATAARVDEPRLGVVRVAVPTLDYEQRIALRWSSLYRRIVVGHGGRPVRRTLRTWDEGERCLGNDSWYVTSKACAGWPEWQETLQPAPGMPSLHACTCRFCRGTTLARRNGSTSSSISPWFESIHH

SEQ ID NO: 143467 - protein, 65 aa, Oryza sativa
  Clone ID: PAT_MRT4530_44373C.1.pep
AQLWAERRRAERRRDAGRAAMGDGGRAEGKRDGLRAERTAGERTSTGGGGGGRNGGGGRSRNVAA

SEQ ID NO: 143468 - protein, 197 aa, Oryza sativa
  Clone ID: PAT_MRT4530_44374C.1.pep
NPFPRVPKPPFLLGLGLLFIWSGVTTWASLLEERHSSTAASSLSSLAKQRARGRRRKKARTGIPPSGPTWPRLEPRPVPPTPDPGHRDAAAASGAAPPRSRRVWYVPSRLCVSFLFFFFLPAVLLARPGGRFLRGLRLQCGVELLSGLFRCNGIAGLEEERSWLAGLRGTFPRGCGKMVSPLLHGAVPPVIRPSASA

SEQ ID NO: 143469 - protein, 100 aa, Oryza sativa
  Clone ID: PAT_MRT4530_44375C.1.pep
MVVKAAFAVAMFLLTTNMLVSVATRSPDNLLNSFPEETGHVYSASTVQKMTEYKPTTAHEPAKSTTAFAACDVAEMIKISFYICHFLCIVELLMNYARNA

SEQ ID NO: 143470 - protein, 137 aa, Oryza sativa
  Clone ID: PAT_MRT4530_44376C.1.pep
MRRRADLVAFGGGIGLAAQRRRGWGSAAVHGEIREAERMGGDIRWTNWTRRRAGRGRGSRRRGAAGGFTVTGRGRFPVSQPRTQSQAFGLWCRGLGLRGALRPLRKLTNKLGLVAHVTETDNEHQFNEQEYTLVGQA

SEQ ID NO: 143471 - protein, 80 aa, Oryza sativa
  Clone ID: PAT_MRT4530_44377C.1.pep
MDLVHQRWSPMSSPSVHREWGASKGLNGNNEESMAAGLVTWRMRRLAQVDVKEEGGGPGCSEPGEGADGEEEEAAKTTVA

SEQ ID NO: 143472 - protein, 125 aa, Oryza sativa
  unsure (1)..(125): unsure at all Xaa locations
  Clone ID: PAT_MRT4530_44378C.1.pep
MVLAQLGGSISRALAQMSNATVIDEKVLSDCLNEISRALLQSDVQFKMVRDMQSNIKRIVNLETLAAGTNKRRIIQQAVFTELCNMLDPGKPSFTPKKGKPXCVVMFGGLQGSGXTTTCTXYAYY

SEQ ID NO: 143473 - protein, 88 aa, Oryza sativa
  Clone ID: PAT_MRT4530_44379C.1.pep
MDEKGELTGERGKRGFGGDWRQPSGGRGADGTRERDDSGFMARHVSSGGGARPETAVREGADVAGEVADLAGDVGDVFWDYVTFARAH

SEQ ID NO: 143474 - protein, 1133 aa, Oryza sativa
  unsure (1)..(1133): unsure at all Xaa locations
  Clone ID: PAT_MRT4530_4437C.1.pep
MYGSDEEDDSELTAEFGAEQADVDEVEEASARLVLSLEQAVFEKPKGTDNRHLKPLYINGYVIGKPMSKMMVDXGAAVNLMPYATFRKLGRNSDDLIKTNMVLKDFGGNPSETKGVLNVELTVGRKGSYSLLLGRDWIHVNCCIPSTIHQCLIQWQGNKIEIVPVDSQLKMESPNYCFXGIMEGSNVYTKDTVDDLDDKNLSPEFRTMLELLKEFGDCFAXEYYEMPGLSRSIVECRLPVKPGVRPYQQPPRRCKAYMLEPVKAEVKRLYDAGFIHPYRYAEWVSNIVPVIKKNGKVRVCIDFRDLNKATRKDEYPMPVADQLVNAASGHEILSFMDGNAGYNQIFMAEEDIHMTAFRCPGAIGLFEWVVMTFGLKSAGATYQRAMNYIFHDLIGWLVEVYIDDVVVKSKEIENHIADLRKVFEKTRKYGLKMNPIKCAFGVSAGQFLGFLVHERGIEITQMSVNAIKKIQPPEDKTELQELIGKINFVRRFISNLSGRLRHYLLSNECTVICKADVVKYMLSAPILKXRVGKWIFALTEFDLRYESPKAIKGQAIADFIVDHRDDSIGSVEIVPWSLFFDGSVCTHGCGIGLVIISPLGASFEFAYTIKPDATNNQAEYEAVLKGLQLLKEVEADAIEIMGDSLLVICQLAGEYECKNDTLMVYNEKCQELMNGFRLVTLQHVSREQNVEANXDLAQGALGFKPMMKDVKVEVATITADDWRYDVFQYLQNPSQSASRKLRYKALKYTLLDDELYYRTIDGVLLKCLSADQAKVAIGEVHEGICGTNQSAHNMKWSLRRAGYFWPIMLEDCFKYYKGCQDCQKFGAIQRAPASAMNPIIKPWPFRAWGIDMIGMINPPSSKGHKFILVATDYFTKWIEAIPLKKVDSGDAIQFVQEHIIYXFGIPQTITTDQVSIFVSDEFVQFADSMGIKLLNYSPYYAQANGQAEASNKSLIKLIKKKISDYPRQWHNRLAEALXSYRMACHGPIQVPPYKLVYGHEAVLPWEVRIGSRRMDLHDQLTADEYYNLMADEKEDLVQSRLRALAKVTKDKERIARHYNKKVVPKSFSEGELVWKLILPIGTRDNKFGKWSPNWEGPFQIHKVVSKGAYREVYGRALNGKYLKKCYPSVWVHT

SEQ ID NO: 143475 - protein, 120 aa, Oryza sativa
  Clone ID: PAT_MRT4530_44380C.1.pep
MAVATMALSFPVMARAVPSTFSALFGEARITMRKTAANPKPVASTGSPWYGADRVLYLGPISGEPPNYLTEELPDDYGRDTVGLCVDPETFAKNRELEVIHSRWAMLGALGCVFPELLAR

SEQ ID NO: 143476 - protein, 263 aa, Oryza sativa
  Clone ID: PAT_MRT4530_44381C.1.pep
GGRDGIGSAGVSGCPAAGFTAAQQGTAHCLLRGGGETLAWCGWLGEGYAEGVQVVGWACCNVVWRWTAVAGESSVHAVASSVVAGGLWGGGSGQTRAAVNDDDEEAAAGEAARSGAPSPHPDPAAAAAPRPDLAAATAPRPDLATVAAGCPDLGLGFFLPLFLSLTGGSWGTEQSRRWQRRRQAGDKMAAGAAGDAESVTAGMRVTRTRKVTEEWRTTMRTTLERWRRRRRPWRRGSGTHGTNGGGADGAWGGGIVAGGGGDR

SEQ ID NO: 143477 - protein, 32 aa, Oryza sativa
  Clone ID: PAT_MRT4530_44382C.1.pep
STRRSCRRCAGLSPYRTDSSPLASIRLSWLAS

SEQ ID NO: 143478 - protein, 69 aa, Oryza sativa
  Clone ID: PAT_MRT4530_44383C.1.pep
EQPFQNKINLHMGGGQMKKKEQKGKKRKAKEGLPMVSFPDHGGPPPFSKGGPTPGGSPGTPPNLALGLG

SEQ ID NO: 143479 - protein, 307 aa, Oryza sativa
  unsure (1)..(307): unsure at all Xaa locations
  Clone ID: PAT_MRT4530_44384C.1.pep
TSLQLRNLLWATSKHDVYLMQNYSVMHWSSLLQRGKEVLNVAGQLAPSQNVRGAMPLSRVQISTMAVKGNLMVAGGFQGELICKYVDKPGVAFCTNLTGNNNSITNAVDIYQAPNGGTRITTANNDCVVRTFDTERFSLISHFAFPWSVNNTSVSPDGKLLAVLGDSSDCLIADSQSGKEMARLKGHLDYSFSSAWHPDGRVVATGNQDRTCRVWDVRNMSRSVAVLEGRIGAVRGLRYSPDGRFLAASEPADFVHVYDAAAGYADAQEIDLFGEIAGVAFSPAXNNGGGGEALFVSIADRTYGSLL

SEQ ID NO: 143480 - protein, 472 aa, Oryza sativa
  Clone ID: PAT_MRT4530_44385C.1.pep
MADEEHAPTSRKRVAGTQINKDNPEPDDDSTEQEMGTFKRASEEVMATRRIVKVRRQQPSSAPSNPFSAIRFTPSDTSAQATIPVSEPQPSDVITANAKDSSSEKADEGSNGSGKDALPVTDKSAGSSEVAETEKDGSDLKGSDEKAKSSDSIEPPSQPVETTDEAKDLGGGSVVAGEAKEDNSKASDIEDKTAKEGDAEEEDGANEAGAEDKISKGDDEKKDGDESETKDGSSEEQKDADNKGQSSSPTPLFSFKNLSSGQNAFTGLAGTGFSGSSFSFGSGSKESSSAPLFGLKTDGSSFPSFSIGASNNGSSSPALATSAEAPKKFAMPEGPVETGEENEKAIFTADSALYEYLDGGWKERGKGELKLNIPVSGGERSRLVMRTKGNYRLVLNASLYEDMSLKDMDKKGVTFACMNSIGDSQSGLATFALKFRDTSIREEFKAAVEMHKAKKASGTLKTPENSPKASDD

SEQ ID NO: 143481 - protein, 56 aa, Oryza sativa
  Clone ID: PAT_MRT4530_44386C.1.pep
MALIYRTQWRSSPVHDERWLPVADFDGGGVDGVALGLANPTVATARLGGGSNGGER

SEQ ID NO: 143482 - protein, 149 aa, Oryza sativa
  Clone ID: PAT_MRT4530_44387C.1.pep
MAARAVRPDPNHDQRRVRDRERDAAPPDHPLPNQAGCSSSLRTATNAAAAAAAIDRSARGGEDAPPSDTAPPPLSPSLLNPPGFRGAACRRNGGLLLLLPLLRFLLPSQATRAPQERDTTRGEMQIKRRSVCFGSAAPPRLPVSDLRAH

SEQ ID NO: 143483 - protein, 711 aa, Oryza sativa
  Clone ID: PAT_MRT4530_44388C.1.pep
MAGSMVDRATSDMLIGPDWAKNMEICDICNRDPGQSKDVVKALKKRIGHKNPKVQILALTLLETAIKNCGDIFHMHVAERDVLHEMVKIVKKKSDQNVKEKVLTMIDTWQEAFGGPRARYPQYYAAYHDLVRAGAAFPKRSDRPAPLFNGQSPAGRNMRSPDQQDEAESSAGNDFPALSMSEIQNARGIMDVLAEMLNALDPGNREGLRQEVIVELVDQCRTYKQRVVLLVNATADEELMSQGLALNDDLQRVLAKHDAIAAGIAVRVEKKPKSLQALVDTEDSMNQDSKKEQALVDIEDPTTQETNKEPSQSASVQSPFEQLALPAPPVSNGSATPAPKSDLGVDLLSWDDNPSTTENSLALVPVTDPVVDSTPSQNALAIVDIFSQNNTTNNIAKPADPFGVNSSSTLPGSQPYNAPTQHPLQAQQQPQQVGLYPNGGAVNPGTSYPTSSGWNGQIANNATPPAQQTVNYDEQSGALPPPPWEAQSAPSGDMSNGGMQSHPVSNGQFGGMPSLPTPSNQMGGMQPLHPQMNQMGGPQAHQMYNNQQPGAMQPSQPAVTQMQSGFANQFGSMPPHSMPGMQFPGMQPSPMPGAQPVMMYAQPMMMPGMQFAAMPQPRMYGPQMSQYRLVQQQAAQYYSNSQGRPTYYAGMNDLSQKMYGLSMQDSSYMGMNSSPYSTTPSSSSSMGQPSKPEDKLFGDLLSIAKTKQNKA

SEQ ID NO: 143484 - protein, 110 aa, Oryza sativa
  Clone ID: PAT_MRT4530_44389C.1.pep
RNTQRMYSTMPSWLPRLGQQASTAQLGPASLDNELAWLLNDVSLLRLCEKKRAPLSFFSLIFCRMSWYWIVSCLFVFCNDALFLSCAGFFHMYIKADVRIPFDVCFVTAN

SEQ ID NO: 143485 - protein, 67 aa, Oryza sativa
  Clone ID: PAT_MRT4530_4438C.1.pep
FVWLLLLQMGMEPLAEKLQRAEIPKRGGNGAASAASLSSDKSLAGPSVLGARSVKAWRRVGWVVAVD

SEQ ID NO: 143486 - protein, 195 aa, Oryza sativa
  unsure (1)..(195): unsure at all Xaa locations
  Clone ID: PAT_MRT4530_44390C.1.pep
MAEERESFESQWAPSDVTEKNLKEMVAHGVLPAKEIIGWRPAYGEAFPTPDTHEVVVFSHYFYGGFALPTSKFFXGILEFYGISLHHLNPNSIVHIANFVHVCEAFQGIRPHFALFRRIFFLKPQPNKNKPCVIGGAGFQLRGTLSQKYFSMPFKTSNKGWHANWFYLQNPEPALPEYSCLPPKYQETWNSLSMG

SEQ ID NO: 143487 - protein, 78 aa, Oryza sativa
  Clone ID: PAT_MRT4530_44391C.1.pep
ILYLFILIFTYSVLKHEVKNKLGMKFYHDFGMNFSTIKRLRLGSAASFPNSPPSCFACTLFKLVNDVLFKKVSIRKLL

SEQ ID NO: 143488 - protein, 48 aa, Oryza sativa
  unsure (1)..(48): unsure at all Xaa locations
  Clone ID: PAT_MRT4530_44392C.1.pep
IFPVRVSLRDLFVFXSCNRSGVVSDVXIFCILGINMCPIPCNELXPVQ

SEQ ID NO: 143489 - protein, 68 aa, Oryza sativa
  Clone ID: PAT_MRT4530_44393C.1.pep
GRVRWRPLNHAAHVIHNTLAGGDTAYFGLIFQYQIFASNDADCLSLLFLKGGGVYITSYHSPTYNTYL

SEQ ID NO: 143490 - protein, 647 aa, Oryza sativa
  Clone ID: PAT_MRT4530_44394C.1.pep
MATYYSSPGSERDSQTMYSRDPGSASYPMSSALGNLLYLNNPSSGPYTEFSGILQPQQNCMEMPGPGHASAMSQDPSSRESDMLSSHQGQRSFSHVKDMKNEMLMHMMDGAQGSGSELIHDDAHTGSQLEFGVLNNHNSSSVPSMQSQGLSLSLNTQIMAPSLPYWSIKPDMLTPQSYHDNLRGEDMRMKNLQSEASRAIRNSRYLKAAQELLDEVVSVWKSIKQKAQKEKVESGKADGKETDGGPKSEGVSSNPQESGANAAPELSTAEKQELQNKMAKLMAMLDEVDRKYKHYYHQMQTVVSSFDVVAGPGSAKPYTAVALQTISRHFRCLKDAINDQINVIRKKLGEEENSSGKEGKLTRLRYIDQQLRQQRAFQQYGMIPQNAWRPQRGLPENSVTILRAWLFEHFLHPYPKDSEKLMLARQTGLTRSQISNWFINARVRLWKPMIEDMYKEEIGDLEQDSNSSSDNAPRSKDKMASSEDKEDLKNSRARICETSQLSESRTSIGAMNVGGAPVGFQNEPNPDDSFMNLMLKDQRSNEVDGGLLLHNTVAQHSDENARFMAYHLAELGRYGNGNVSLTLGLQHSSSNLVPNAQPGFPGVNEDDIYNATAPLGVTVASSDYDSMNQMDQRQRFEHSPLLHDFVA

SEQ ID NO: 143491 - protein, 494 aa, Oryza sativa
  Clone ID: PAT_MRT4530_44395C.1.pep
MAPAPLAGGRLVLVVVVAAACMARWSEGIGVNWGTQLSHPLPASTVVQLLKDNGFDRVKLFDAEDGILAALKGSGIQVMVGIPNDMLADLAAGAKAADDWVATNVSNHVNNGVDIRYVAVGNEPFLETFNGTYLNTTFPAMQSVQAALKKAGLADKVKVTVPLNADVYQSPTGKPSDGDFRADIHGLMLTIVQFLADTGAPFVANVYPFISLYKDPNFPLDYAFFQGSSAPVVDGGVTYQNTFDANHDTLVAALRRNGYPNVSIIVGEVGWPTDGDANANPQYARQFNQGFLTHIASGQGTPLRPGPVDAYLFSLIDEDQKSIEPGNFERHWGVFYYDGQPKYPLSLRGGGNGNGNGSTLMPAKGVTYLQRRWCVMKPSASLVDQKVGDGVSYACGLADCTSLGYKTSCGGLDAKGNVSYAFNSYYQVNDQDDRACDFKGIATTTTVDPSAGSCRFIIEIAPTANGVAMAATVRVAGVMAAILAVFIHLVVPVF

SEQ ID NO: 143492 - protein, 818 aa, Oryza sativa
  Clone ID: PAT_MRT4530_44396C.1.pep
MADHRSKLVSHLLDSGMADTVAGAVDYRGRPASRAATGGWKSSVFVMAMEIAERFAYKGVAANLITYLTGPLGQPMARAAASIDAWKGVSQMLPLPLACVADAWLGRYRAIVLASVIFVLSMGTLSMSSAFPVSRAGHVAVFYVALYMVALGEGAHKPCAQAFAADQFDEKDGGECAARSSFFNWWYFGMCAGTAVTTMVSSYVQDNVGWGLGFGIPCIVIVVSLAAFLLGTRSYRFYTARTASPVARVAKAFLTLIKSWRSNRRTNPASGGKGDGDGDAGDLVEEVKSVLRLLPIWASCIIYAIIFSQTSTFFTKQAATLDRRIGRSFNVPPAALQTFISVSIVVFIPVYDRLFVPLARRYTGRPSGITMLQRVGAGLALSLVAVVLSALVETRRLRVAAGAGMADAPKARLPMSLWWMVPQYVLVGVADVFAMIGLQEFFYDQVPDAVRSLGLALFLSIFGVGHLLSSLLISVIDGATARRAGGSWFANNLNRAHLDYFYWLLAGLCAVELVAFFLFSRVYTYKKKGNDADGNCDYRGVDDDGICVEQCALLPEAEPSTGSKSGGRGGWPAAFFLLAAVFAERVGFNGVQGNLIMYLTGQLGMSTAAAAAGVNAWGGTAFMLPLLGALAADSWIGRPRAVVASGVLYLLVAAVCSSPAAAPAGRVAFCYVALYLLALGQGFHRPCGGALGDGHFSESNPGGLAQRSSVFDWSNFAGAGGCDLSTARIRYVQDDVSWGIGLGPCWAIMVLSLFVLLLGTGTYRPEQPRPCAQPRRGDAMDDTAPPRRCPALPPAPWTGASSSARAAAAASYSSRRRR

SEQ ID NO: 143493 - protein, 75 aa, Oryza sativa
  unsure (1)..(75): unsure at all Xaa locations
  Clone ID: PAT_MRT4530_44397C.1.pep
KNAMNAKKITNMWGLLNSIHLAVAFPSFFFGENPGVSGVEWGVLFFPLSPGGVMAGEAQFRSVFPNSCFCLIXEW

SEQ ID NO: 143494 - protein, 492 aa, Oryza sativa
  unsure (1)..(492): unsure at all Xaa locations
  Clone ID: PAT_MRT4530_44398C.1.pep
MESSEQCALLPEAEPSTGSKSGGRGGWPAAFFLLAAVFAERVGFNGVQGNLIMYLTGQLGMSTAAAAAGVNAWGGTAFMLPLLGALAADSWIGRPRAVVASGVLYLLXSLGMLTVSSMVAPPQATMVCQDTAAVCSSPAAAPAGRVAFCYVALYLLALGQGFHRPCVQAMGADQFSESNPGGLASRSSFFNWINFAVSCGYVLSTAGISYVQDNVSWGIGFGACWAMMLVSLFVFLLGTGTYRPEQPRTFAETRRGDAMDDTAXVATLFTKQGSTMDRRIVIGTGGGGGVLLVPPAALKSLVSFAVMVTIPAYDRALVPLARRVTKHPSGITTLRRVGTGMVTACLAMAVAALVEAARLRAARDAGLLDEPGVAVPMSVWWLAPQFVLLGVATTFTMVGLEEFFYDQVPDELRSVGVAACMSVVGVGSYASGMLVSATRSRGESWFSDNLNRAHLDYFYWLLAGISALDVLVFLYFAKGYVYTKNKVLSVDI

SEQ ID NO: 143495 - protein, 106 aa, Oryza sativa
  unsure (1)..(106): unsure at all Xaa locations
  Clone ID: PAT_MRT4530_44399C.1.pep
MEFEWVLRRPMRLADSPRHEKGLPAACXGPGAKPKVWCAWLEGVMRRVLSRPLSDVDLYVNFVVCVPWPVLDRGFNAHSAWNSIREFLGVTGLAKLEGSGRPTPRL

SEQ ID NO: 143496 - protein, 370 aa, Oryza sativa
  Clone ID: PAT_MRT4530_4439C.1.pep
MEAIRKQASKLREQVARQQQAVMKQFGGGYGADGAFADEAEAQQHSKLEKLYISTRAAKHFQRDIVRGVEGYIVTGSKQVEIGNKLCEDGKKYGAENTCTSGSTLSKAALCFAKARSLMEKERGNLLKALGTQVAEPLRAMVMGAPLEDARHLAQRYDRMRQEAEAQAIEVSKRQMKLRETSGNGDMISRLEAAESKLQELKSNMGVLGKEAVASMTAVEAQQQRLTLQRLIAMVESERSYHQRVLQILDQLEREMVSERQRIEGAPPPAVESSMPPPPSYEEINGVFMRNPTVAELVETVEFFLAEAIQSYRAESETELNLAAGDYIVVRKVSNNGWAEGECRGKAGWFPYDYIEKRDRVLASKVAQVF

SEQ ID NO: 143497 - protein, 594 aa, Oryza sativa
  Clone ID: PAT_MRT4530_443C.1.pep
MPDLTKPPSPRPRRRRCRLCGICLGTALLALLVSSLAHLFSPPQPQPQLQPPRPSPSSSPPRFAVIIDGGSTGSRAHVFATGPGGRPDLARSAVMRVTPGLSSFADEPARAGDSLRPLIDFAREKVGGAAAEVRLMATAGLRLQEGRLQEAILSSCRDVLRASGFRFEDSWAEVIPGSDEGIYAWVAANYALGTLGGDPHKTIGIIELGGASAQLTFVSDEVLPPELSRNFTFGGTTYTLYSNSFLNFGQNAAQESFREILRSKDSKNGTLVDPCAPKGYSRIKEVISRPSSASKSKLENQFADSGDGDFTFFGLKQSSSLSDFVLAGEQFCNKDLSTLRKMYPNRIEYSNQVGDTQVEWALGAFISNIKGVIVEPSATGRSAHRSRPLLAVLLGVFLLGGALCLARWRKPKTKIIYDLEKGRCLRCYIVNVLQASKSQDGRVGLRRQFQSLTAILIICFFGFIRSFKWCKNSIHPSLCGTSPIFEGCFRIRHGWTRAYPLGHQESLLGPVHVKRLFVWRGRVQACVCVDAWWGAATALQLPPLNQGHFCRLVIIGKVDPNVILYRSVTNVGAKGHDFHAESPMPWCSVHAYDP

SEQ ID NO: 143498 - protein, 47 aa, Oryza sativa
  Clone ID: PAT_MRT4530_44400C.1.pep
LPRRLVGAQRCWTSTFWGAGSCIMMLMLRWPYFALPSTQIRGVAVLF

SEQ ID NO: 143499 - protein, 974 aa, Oryza sativa
  Clone ID: PAT_MRT4530_44401C.1.pep
MAAETVVSMAMSVLGSAVGKAASAAADEATLLLGIQKEIWYIKDELKTIQAFLRAAEVTKKKDDLLKVWAEQVRDLSYNIEDCLDEFKVHVESQSLAKQLMKLGERHRIAVQIRNLKSRIEEVSNRNTRYSLIKPISSITTEDERDSYLEDARNQSGSNTDESELVGFAKTKDELLKLIDVNTNDGPAKVICVVGMGGLGKTTLARKAYENKEHMKNFSCCAWITVSQSFDRKEILKQMIRQLLGADSLDKLLKEFSEKLLVQVQHLADHLVEGLKEKRYFVVLDDLWTIDAWNWIHDIAFPKINNRGSRIIIKTRDAGLAGRCTSESLIYHLEPLHIDDAIHLLLAKTNIRLEDMENDEDLGSIVTKLVKRCGYLPLAILTIGGILATKKIMEWGKFYRELPSELESNPSLEAMRRMVTLSYNHLPSHLKPCFLYLSIFPEDFEIQRGRLVDRWIAEGFVRATDGVNIEDVGNSHFNELINRSLIQPSKVSTDGVVKRCRIHDIMRDIIVSISREENFVLLTREKITVVAEESIRHLAFHGSKCSKICLEWNHLRSVTLFGDRPVGRTPALCSPQFRMLRVLDLEDAKFKFTQNDIRNIGLLRHMKYLNFARASTIYTLPRSIGKLQCLQILNMREANISALTTEVTKLQNLRSLRCSRRSGSGYFSIIDNPKECLMITMCLPMVFLTSINFSDRVKLIPEICMSCSTRWSDTKGVRVPRGIDNLKELQILEVVDINRTSRKAIEELGELIQLRKLSVTTKGATNKKYQIFCAAIEKLSSLQSLRVDAEGFSDTGTLEWLNSIACPPPFLKRLKLNGSLADTPNWFGNLKQLVKMCLSRCGLKDGKTMEILGALPNLMVLRLYRNAYADEKMTFRRGTFPNLRCLDIYLLKQLREIRFEEGTSPTMESIEIYGCRLESGIIGIKHLPRLKIISLEYDGKVAKLDVLQEEVNTHPNHTELQMAEDRSHHDLGGI

SEQ ID NO: 143500 - protein, 590 aa, Oryza sativa
  Clone ID: PAT_MRT4530_44402C.1.pep
MEKLSMVTSLLCAITVAVLAVAVVSGEAAVVEHTFVVHEMNATHLCNTTKIYVVNGQFPGPTVDVTEGDTVVVHVINKLPFGLTIHWHGVRQMRSCWADGAGFVTECPIPPGNEHTYRFNVTGQVGTLWWHAHVTCLRATINGAFIVRPRDGKYPFPTPAKDVPIIIGEWWELDLIELDRRMMDGNFDDNPLSATINGKLGDLSNCSRMVEESFILDVKHGESYLLRVINTALFSEYYFRVAGHTFTVVGADGNYLTPFKTDMVTVAPGEAIDVIMVADAPPAHYHMIALANQPPEPDPQIPVFTSRGLVRYAGTTANNNGLPVPMPIMPNQHNTMPSYYFHANLTGLAHPERHRVPMHVDERLFVTLGLGSICRGQNTTCKRRRSPETIVVATMNNVSFAHPKTTALLERYYDGTSKGVYTEDFPIRPPRPFNYTNRDLIPPGPLEEALEPTFKATKLKRFKYNTSVEIIFQSTTLMQSDSNPMHLHGYDVFLLAQGLGNFNAKRDVRKFNYHNPQLRNTVQVPRGGWAAIRFVTDNPGMWYLHCHFEFHIIMGMATAFIVEDGPTPETSLPPPPPEFKRCGNNGLSQP

SEQ ID NO: 143501 - protein, 162 aa, Oryza sativa
  unsure (1)..(162): unsure at all Xaa locations
  Clone ID: PAT_MRT4530_44403C.1.pep
LPVGXLPXLSFRAXAXXAPAXLVPLSRVAXAXLLXWLXLPWFLVVSXSAVWGVASLXLPVVVPASAAVAVXALXLXLRFGXGXXGLVXRRAAXVPGSVVVXPXGXLXPAWXVXFPLXXGSAGAGAXXXXXALXXLLVGFGGGCLLFSFLGFGVGLGCPCLGG

SEQ ID NO: 143502 - protein, 85 aa, Oryza sativa
  Clone ID: PAT_MRT4530_44404C.1.pep
TFPCCQAIASSLLMELPTEEGRTSTKREMPGQCQRRGPAIILKSVAACTLLVCNGRARPDRRLGWKLRKSLLIFPSIVLLQSLYA

SEQ ID NO: 143503 - protein, 168 aa, Oryza sativa
  Clone ID: PAT_MRT4530_44405C.1.pep
MAAPSNLIADDNPGPDPFLCRSVKPAAARRCLASKAWYWCWCLLQSKMARGAQPSASLLLFSLGLVLLYFSSGSTIRLAEGQKTWCVAKPSADDKVLTANLNYACSQVNCGVIQQGGPCFNPNNLVSHAAVAMNLYYAAHGRNAWNCYFQNSALVVQSDPSYGSCTYY

SEQ ID NO: 143504 - protein, 926 aa, Oryza sativa
  Clone ID: PAT_MRT4530_44406C.1.pep
MEQREARQEEEEEEERDAPAVPPGENDEERDRNLSSRVVSLLFGGDISAQTFEKWVSLVRKRSGAFRPSGFPRRNSRIEVMPSGSFSLFSAADLSEQVVTAELIGKEDIPLTSSQPTEISLWERLGNASALDIESPDFSWNMLSSLHHTEHSSSSDHSEDEMCKPLEVTVNSGGVVFFALFNSSSNVLPKEAAAVIKFSSSKMSTQAERLGYEFARLLGVQTPQARVVHNSSLEWQDIRKAAENARSVAVSNSDEVGEMTCSELLEALELSRCLLLMSYIHGSPLLESSKAFSPREAACVTASSLGRVLMLDLILRNEDRLPCRQLGWRGNPANLMISDRPSAPSVDRLDDSKCTTESSIPTITQLVQSDKRTHTANATINSPELVSMSPKPDALKSVRGNADSLDGPVHIVAIDTGVPRRPPAGRRVKDHERYPKVVQLMLNNSDYSSNILYEISGGKLGTPGPDEAIAFTDSCCSISDEDNTAAIHEFRGAFRAALRDLEGFHLFLLQLYQKLDGVLRVFLSIVTKGSEESDNNDATVPDFPSPGANYSTPCAPSKQQNSELHGDSEILKSTTKPSSAGSRGSSDSVSPLSRESWSNKYFKGSAEGPRSLRMTMKLRDFYKTPKVDPELVKEIEQWNEALKSDVIKFCEENNFHSGFFDGNENNMVADAYELKVRLEHIIERIALVSDAANTERPSLVINNLFIGGALAARSMYTLQHLGITHILCLCSNEIGQSDSQFPDLFEYKNFSISDDDDANISDLFEEASDYFDHVDHVGGKVLVHCFEGKSRSATIVLAYLMLRKGLTLAKAWNLLKKVHRRAQPNDGFAKALLALDRKLHGKVSMDWQHKRPEMKVCPICSKNVGLSTSSLKLHLQKAHKRLSAGSVDSAMTLEIQKSIQSLRISRGGSLSPSQKLTKAFADELSF

SEQ ID NO: 143505 - protein, 135 aa, Oryza sativa
  Clone ID: PAT_MRT4530_44407C.1.pep
MRQADRNVGAIVINPLLPPGPGGEEGKVVRRRGGESKERTSSTLSGGSTGRSGAWWRGRGRWWCKPKDSFSLIFNWICGRSSLICHEELGIHKYTGRGRSSWVATFLLDAMGTTIGEATASPLNQILEPLTSIAP

SEQ ID NO: 143506 - protein, 1508 aa, Oryza sativa
  unsure (1)..(1508): unsure at all Xaa locations
  Clone ID: PAT_MRT4530_44408C.1.pep
MRLAQARLRAIKVLXAGSGDKGDGLQEGMVEDLGPDGNGLELQFDNFXDQVNYAVQHALINQSGVLVNTLTNMVKSVVDGSIAEHQATGPVYLPGGXFPNYRPLVTGNQQNPASAPLTQPMASVTAPASAAQVAPSSASRQMTNPRLLTREQPXDAGQNINRLTQEQNLLNASARMRTPDNQLRQHVTTQVVPEHLVHNVQPDQTMIPQVIPEHLVRNIHPNIQNYNGGYLNYQYQPPSPHVHQGGSPQPQFAPQFNQFELVSQQAQGAPQHRQWADMIADVMREKFGLKPKDTGNLYRHPYPEWFERIPLPARYKVPDFSKFSGGVHEMKLSDLTAIRQRHDESVQDYIQRFRETRNRCYSLALTDSQLADLAFQGLIAPIKEKFSSQEFESLSHLAQKVTLHEQRFAEAKNNFKKINHVYPCMYNSDDEDDDSEVAAAEWVRSKKVVPCPWERSSGKEEKFDFDITKXLTRFLIYYFGRNRFSFLLVAIEGGKIKFDDSKKPMKKKYDKQQQERYYEEDGGFDPHWGGCEFFRFCWNEGMRLPSIEDCPGCSNVAESSIRSYNRGNRLRQTRVFVHXRLGPVNQGYDQGDDEDXRLNXCPSGIFTKNQKRRVQRLRNRERFREVEQEISHRLRKTKPGQEWRVKNQAATADEVEADEAKRLAKGKSVVIASVNMVFTLPAEFRANQADVDEVEETSAKLVFSPEQAVFEKPEGTENRHLKPLYINGYVNGKPVSKMMVDGGAAVNLMPYATFRKLGRNSEDLIKINMVLKDFGGNPSETKGVLNVELTVGSKTVPTTFFVIDGKGSYSLLLGMDWIHANCCTPSTMHQCLIQWEGDQIEIVPADRSVNVASADLAIWEMGGIDCLSGKGVVEGSNVYNKDTADDLDDKQGQGFMSADDLEEVDIGPGDTPRPTFIKKNLSPEFRTKLIELLKEYRDCFAWEYYEMPGLSRSIVEHRLPIKPGVRPYQQPPRRYKADMLEAVKAEVKRLYDAGFIRPCRYAEWVSNIVPFIKKNGKIRVCIDFRDLNKATPKDEYPMPIADQLVDAASGHKILSFMDGNVGYNQIFMAEEDIHKTTFRCPGAIGLFEWVVMTFGLKSAGATYQRAMNYLIGWLVEVYIDDVVVKSKEIENHIADLRKVFERARKYGLKMNPTKCAFGVSAGQFLGFLVHERGIEITQWSINAIKKIQPPENKKKLQELIGKVNFVRRFISNLSGRLELFTPLLRLKADKEFTWGAEQQKALDNIKEYLSSPPVLIPLQKGIPFKLYLSAETRYSPVENLCLCLYFSCTKLRHYLLSNECTVICKADVIKYMLSAPILKGRVGKWIFALTEFDLRYESPKAVKGQAIADFIVDHRDDSIGSVEIVPWTLFFDGSVCTHGCGIGLVIISSRGASFEFAYTIKPYATNNQDKYEAVLKGLQLLKEVEADAIEIMGDSLLVISQLAGEYECKNDTLMVYNEKCRELMNEFRLVTLKLVSREQNVEANDLAQGVSGYKLILPDLALYFMCLI

SEQ ID NO: 143507 - protein, 127 aa, Oryza sativa
  Clone ID: PAT_MRT4530_44409C.1.pep
MVRTGTMLREEQMSSAVGIPCEKVIRVSILGGQLRLTVGIGTKLREELSSRRLRIPSDEVGYEMAYGGWTPCRRDLCNGLHELAGGRAGPGVGGPAGPCMRQEGRAHEESEWRTEHVSTAERSPFRC

SEQ ID NO: 143508 - protein, 499 aa, Oryza sativa
  unsure (1)..(499): unsure at all Xaa locations
  Clone ID: PAT_MRT4530_4440C.1.pep
MLEAVKAEVKRLYDAGFIRPCRYAEWVSNIVPVIKKNGKVRVCIDFRDLNKATPKDEYPMPVANQLVDAASGHKILCFMDVNAVCTHGCGIGLVIISPRGASFEFAYVIKPYATNNQAEYEAVLKGLQLLKEVEADAVEIMGDSLLVISQLAGEYECKNDTLMVYNEKCRELMDGFRPVTLTHVSREQNVEANESAQGASEYKPMIKDVKVEVATITVDDXRYDVFQYLQNPSQSASRKLRYKALKYTLLDDELYYRTIDGVLLKCLSAYQAKVAIGXGICGTHESAYKMKWLLRRVGYFWPTMLEDCFRYYKGCXDCQKFGAIQRAPASVMNHIIKPWPFRGWGIDMIGMINPPSSKGHKFILVATDYFTNWVEAIPLKKVDSGDAIQFVQKHIIYRFGIPQTITTNRGSIFVSDEFVQFADSMGIKLLNSSPYYAQANGQAEASNKSLIKFIKRKISDYPRQXHTRLAKALWSYRMACHGSIQVPLYKLYGHEAVLP

SEQ ID NO: 143509 - protein, 1157 aa, Oryza sativa
  unsure (1)..(1157): unsure at all Xaa locations
  Clone ID: PAT_MRT4530_44410C.1.pep
MKLSDLTAIRQRHDESVQDYIQRFRETRNRCYSLALTDSQLADLAFQGLIAPIKEKFSSQEFESLSHLAQKVTLHEQRFAEAKNNFKKINHVYPCMYNSDDEDDDSEVAAAEWVRSKKVVPCPWERSSGKEEKFDFDITKADKIFDLLLREKQIQLPAGHVIPSAEVLGKRRYCKWHNSGSHSTNDCKVFRQQIQVAIEGGKIKFDDSKKPMKVDGNPFPVNMVHTSGRAADGGRNRNFQMNSARIINKYQKKFCWNEGMRLPSIEDCPGCSNVAESSIRSYNRGNRLRQTRVFVHXRLGPVNQGYDQGDDEDRKXNXCPPAEFRANQADVDEVEETSAKLVFSPEQAVFEKPEGTENRHLKPLYINGYVNGKPVSKMMVDGGAAVNLMPYATFRKLGRNSEDLIKINMVLKDFGGNPSETKGVLNVELTVGSKTVPTTFFVIDGKGSYSLLLGMDWIHANCCTPSTMHQCLIQWEGDQIEIVPADSQLKMESPSYYFEGVVEGSNVYNKDTADDLDDKQGQGFMSADDLEEVDIGPXIHQGRLLLIELLKEYRDCFAWEYYEMPGLSRSIVEHRLPIKPGVRPYQQPPRRYKADMLEAVKAEVKRLYDAGFIRPCRYAEWVSNIVPFIKKNGKIRVCIDFRDLNKATPKDEYPMPIADQLVDAASGHKILSFMDGNVGYNQIFMAEEDIHKTTFRCPGAIGLFEWVVMTFGLKSAGATYQRAMNYLIGWLVEVYIDDVVVKSKEIENHIADLRKVFERARKYGLKMNPTKCAFGVSAGQFLGFLVHERGIEITQWSINAIKKIQPPENKKKLQELIGKVNFVRRFISNLSGRLELFTPLLRLKADKEFTWGAEQQKALDNIKEYLSSPPVLIPLQKGIPFKLYLSAGEKSIGSVLIQELDGKERVVFYLSRRLLDAETRYSPVENLCLCLYFSCTKLRHYLLSNECTVICKADVIKYMLSAPILKGRVGKWIFALTEFDLRYESPKAVKGQAIADFIVDHRDDSIGSVEIVPWTLFFDGSVCTHGCGIGLVIISSRGASFEFAYTIKPYATNNQDKYEAVLKGLQLLKEVEADAIEIMGDSLLVISQLAGEYECKNDTLMVYNEKCRELMNEFRLVTLKLVSREQNVEANDLAQGVSGYKLILSRFQRSVSYASTD

SEQ ID NO: 143510 - protein, 164 aa, Oryza sativa
  Clone ID: PAT_MRT4530_44411C.1.pep
LLEPIVGHKARGPKARPTARLFGPAQARHGPTWVGPVLARPDRRAVPGPPHRHAGLARHDGPTGQARPIGGRKFRLILRKSTTAHRAFGPARQGPRRVGPCLGRECGTWAGTARPAQPSRPFLLRGRFQAPPCARYCRRAQLSYRRRHIAFDAKQSPPTSCRRR

SEQ ID NO: 143511 - protein, 147 aa, Oryza sativa
  unsure (1)..(147): unsure at all Xaa locations
  Clone ID: PAT_MRT4530_44412C.1.pep
METTRTTRIISILVSLVQLGQGDTYGYKYKPPXEESGDEAINTQHNRHXKPTYAKTRRRISTSGIGMASPLRCLXILSGETKALSLISPGTDLRRKATLLSTTSYIIIPPCRQQLDRLPQILYCLAYILVPMIPIPCKYRSRDIKRR

SEQ ID NO: 143512 - protein, 131 aa, Oryza sativa
  Clone ID: PAT_MRT4530_44413C.1.pep
QHLTPNSTTHLMLQLQSHNFSNFFLMARHSCHRGSFQYTPHFRGQQFTAQLTTSLHASRHLAQHLLQQNPPISPTNPPPHPHTQLCRCLPCTLWCRTRAIPGTVVHLASAVTIFPIGQSYKAVGVTPGSIR

SEQ ID NO: 143513 - protein, 213 aa, Oryza sativa
  unsure (1)..(213): unsure at all Xaa locations
  Clone ID: PAT_MRT4530_44414C.1.pep
XTXGXIGYRXPPPIFFFFFXFLKKNXRIXXLFXTXXLPXKRKXLIXLXTXXHXXTXXXSTXASXXISXPNIXNXXAGGEXPXQNXGKXXXAXSKFPFRXPXNXLXWGXXXPGXXTPCXXXPXXXDXLPXRTXXXPTAGXPPGXNXXPGXXLLXXXXXXPXXNXFGSSLSPXXPWXRVYXVPTPPXKXGPXFYHFXXXGXXKFPXPLXXXKXLL

SEQ ID NO: 143514 - protein, 95 aa, Oryza sativa
  Clone ID: PAT_MRT4530_44415C.1.pep
GAYYFKAMVGCQTKLGQVRLVVRLGPHPGRKVLWALVDKRAGRREPSPLAVPVPLFCRASVGLPPGPFICKGRLSALEILDVMYVPPHENISVLG

SEQ ID NO: 143515 - protein, 89 aa, Oryza sativa
  Clone ID: PAT_MRT4530_44416C.1.pep
EKNFSSISSPFCIPHEDRYFWGKEKKTTKHEHKKSFISNTYVRISTRTGKLSRKGKPDHKFRSTLLLGPPTPARLCRCSDFQSFIGHPL

SEQ ID NO: 143516 - protein, 111 aa, Oryza sativa
  Clone ID: PAT_MRT4530_44417C.1.pep
MAARANAAGAEDSGELKGKGGSAVWRKRNGGEALPLPEWEGNESLAQVARLGWVLQGCRAGGVQQGNQAQWEHFQHEVETTRTMRGELVDALKLTLQLLFLGFREEGGMWA

SEQ ID NO: 143517 - protein, 176 aa, Oryza sativa
  Clone ID: PAT_MRT4530_44418C.1.pep
MEGGQPIRIYCKGDTTLNVAVRGNELRLVRDDPNDESQVCDGVGKLTDDEERPAFALVNRTTGHALVNGGDLELGLAPYSGHVAVELSVLWSLGHPRADGFMEIRTLRDVRYTLDGVHGFVDGGYRLNGIHGIPEHGTLVAIYHSQPTADYAVWKIAPVGHQEPHSHSESDDALES

SEQ ID NO: 143518 - protein, 60 aa, Oryza sativa
  Clone ID: PAT_MRT4530_44419C.1.pep
LPTACTFYLVVVYFLGIYGYLFLLQFPFSLIASIDHSLTSVVLFSNAPYLWSDVLRLYST

SEQ ID NO: 143519 - protein, 913 aa, Oryza sativa
  unsure (1)..(913): unsure at all Xaa locations
  Clone ID: PAT_MRT4530_4441C.1.pep
YLPRRRKFKPILQLKQSAVANAGSYSLKKRRVQRLRNMGRFXEVEQEINHRLKKAKPKQEWRVKNQAPTADEVKRLAKGKSVVTASVNMVFTLPAEFGAKQADVDEVEEASARLVLSPEQTVFEKPEGTENRHLKPLYINGYVNGKPMSKMMVDGGAAVNLMPYATFWKLGRNAEDLIKMNMVLKDFGSNPLEIKGVLNVELTVSSKTVPTTFFVIDGKGSYSLLLGRDWIHANCCIPSTMHQCLIQWQGKKIEIVPSDSQLKMESPSYYFEGVVEGSNVYTKDTVDDLDNKQGQDFMSADDLEEIDIGPGYNQNFMSEEDIHKTAFRCPGAIGLFEWVVMTFGLKSAGATYQRAMNYIYHDLIGWLVEVYIDDVVVKSKEIADHIADLRKVFERTRKYGLKMNPTKCAFGLSAGQYLGFLVHESGIEITQRSVNAIKKIQPPEDKTELQEMIGKINFVRRFISNLSGRLEPYTVVEAEYEAVLKGLQLLKEVEADAVEIMGDSLLNVEANDLAQGASGYKPMMKDVKVEVATLTADDWRTAVRSAAATGAAGDIDGQTGMQSYIMAEDYDIWRKVSHAYVIPEAINTAAEKTAFEQNCKAHNILLSGISRSDYDRVAHLQTANEIWVALSNFHQGTNNIKELRRDVFKKEYIKFEMKPGEALDDYLSRFNKILSDLRSVDSSYDANYPQSEISRHFLNGLDMSIWEMKVTSIQESVNMSTLTLDSLYTKLKTNEMNVLSRKADSKSSALVSSTSSSVVDASSSMPSFLAAFNATSDDQLKQIEEEDLALVANRIARAMIMLGTGKELGRGKREDKDGEKTSNNKPYNNRSKSSSQGKKMENLRKAFQQVCAAFEPLSDVDGESGDDDKRKNISDVCFMARGESDIEFEDNEIGDRSDRLNSLGQIDHRSDRR

SEQ ID NO: 143520 - protein, 118 aa, Oryza sativa
  unsure (1)..(118): unsure at all Xaa locations
  Clone ID: PAT_MRT4530_44420C.1.pep
PSRDVNVVWWRFRYTSSRVVILPPIFQAVFLAAVTTPQMXHVLVYKTWQCLLFLEIHPYRSADRHMRLNLAYPWSSTHXQFCPXGGDHGKPPDLLGTPPSCXXIXTXIPILTXPXXXF

SEQ ID NO: 143521 - protein, 40 aa, Oryza sativa
  Clone ID: PAT_MRT4530_44421C.1.pep
MISEVALEKLQLEVILLLRKVASDFYSPSHGWNPYIKRLE

SEQ ID NO: 143522 - protein, 209 aa, Oryza sativa
  unsure (1)..(209): unsure at all Xaa locations
  Clone ID: PAT_MRT4530_44422C.1.pep
GCRIRHELSSKTLTLAGGSGGRRWRGGXGVVMVVGGMDXXXAHRTPXDVFXDFXAXRAGXIXALTXHVXKFYXQCDPDKENLCLXGLPHXTXEXNXPAEXVPPXLPXPXLGINFARDGXDXKXWLSLVAVHXDTXLLXXTFFFGTRFXFDKESXKXLFTMINNLPTIXXVVTXTXXXXNLXKTPXTXXXNNXSRTLPPGNPTPKGSNSP

SEQ ID NO: 143523 - protein, 379 aa, Oryza sativa
  Clone ID: PAT_MRT4530_44423C.1.pep
MQEQQQDFKNVFCMEGGQGESSYINNSQSQSRNLKMMLYALEETLDKIQLPRHRPGNKPLLTAADLGCSCGQNTLLIADVIVDHMTDKSFGSKDDDGLEFCFYFSDLPSNDFNTLFHLLPQQAAAAGRDGRQSRRYFAAAVPGSFHDRLFPERSINVFTSTFSLHWLSQVPKRVVDKQSPAYNKGKVFVHGASEETGTAYQRQFRSDMMRFLHCRAAEMKPGGAIFIVSLGRLSSTRGPTEQGYIYEVYCSMFEDSLRDLIEEEMVDGEKMDNFNVPLYAATVEEFKEAVDADGSFKINQLELVMGSPPVVDDPANRGVVGRMVANYMRALFGPLVNTHIGGAMADELFIRMQCRAEIRAEELVDEMCFAHILCSLSLV

SEQ ID NO: 143524 - protein, 39 aa, Oryza sativa
  Clone ID: PAT_MRT4530_44424C.1.pep
MKIIFFFALLAIAACSASAQSDAVTLAYRQDPLQLILLL

SEQ ID NO: 143525 - protein, 137 aa, Oryza sativa
  Clone ID: PAT_MRT4530_44425C.1.pep
MASSAAAYLDADENLEAIISRIEQKSRKIETLLKQSKPVEALKTALEGTPLKTRDERCKSANWIVVHRAMMAIRDVDGMFNSLDPEYYDILMKYLYRGLSTGDRPTCDQCLKIHEKLTEKAGLGCILRSLADTVNTV

SEQ ID NO: 143526 - protein, 919 aa, Oryza sativa
  Clone ID: PAT_MRT4530_44426C.1.pep
MVDVRAVIESFFVMLKENIYVLIRIESLVALVTLIFLAMFIIDFYRCRTRSSILTTILESIDELSDQIVVYLIGAMQSARFENELFPVWAIVLVSLRTSLGYLSGYGISDRDRQFMELANVIKFIGAGVLAGTRGLKYARPLWSFWAILQLKSMYRFFAHGMANESLWHGRSSEFIPEYMRTFIPEDQETGVNHDDRNTSTMMPGKKYLICGESNKDITLKKPQYTINISNSSAQSLVTLGKIQEYNWKGMNNRDGDSKFKDLSMAFSLSRLLRCRLEDVTLNKDSINDMQHLIISEFIPDSRGQRQEEKVDGHQAVEAERTFRILELELAFVRDYFYTLYPLVFWEGLGSLCLSLLLSAATFAIAFWLAVGIRKVYQPPEGNLVLWVDGCNFDIIMTWVFMFCVMFKEIWEIVTYLVSNWTRLLVLCKYVQDQAWFVSERLTKHLVRSFFESKIGEPWHGRIDQYDFLQQITYKPTLWKLANVITLGKIKGKLDGKKTGEAIKIPQCVKLAILQAIRRIGLTSENSGLSAGLKTNYHIAISLSRYCAYLQVFRSELLPDSFLVPEVLFVETLKHAREQLKDCNLKWCRYNKLMGIALQATPSSVDEKLKMNILQQGVTLAKDLIGMKDDEACWKILAEVWADLLVHIAPSWNASDHKNNLESGGEFITLIWALLWHCGIEKSSLWHKDEAFENNSQVPQESSTETRNVIPMDEPANEDGIESSEELKTRSFRRGKESRNGPKDTAKQSHGDRSQPRSMARTGTMLREEHRSGTVKRPCDKCMHGQGDVHVCCDWLVGRPPIHRDHGLGQDATRLDRTGPVQDGAEASMIQATTAQLGKQGRQGRRSRRRRAREGHAAGADSTARSRAGDRLHAGPMPNSDGVRGRRRIYKSKLDLVQLLPSRAWKLERFFQKKYTEAI

SEQ ID NO: 143527 - protein, 86 aa, Oryza sativa
  Clone ID: PAT_MRT4530_44427C.1.pep
CSSYPCQTPVNMISRSQFPMSRRMSLMWFSWPAASSSAVYCRMALSGLLSAGGTSRSSARQLPPLACPSSSARPPATRGLPRPALL

SEQ ID NO: 143528 - protein, 272 aa, Oryza sativa
  Clone ID: PAT_MRT4530_44428C.1.pep
YHHATRRGNDNDERARRRRPGTTETNGEGTTSAAILGRRRDAAGATLDDAEPRTKTTTTGAGEEATRAAGSSCTETGTTWNAPLRIRRRRRRRETTSRATDGTSTTRTNRGDDDGPRRGLDGGEAMPRTTLPLRCQRWRRRRRPAHWHGGRGCRSGCRQDRGRGGAGDGVPAKPRAGRGGGRRRDVDEGDGDIGRRSDAATGATDGGTVAATPLFCRRRRVSGDFPAKRRRSRGRGGSCDVADGDGTAGRHTGAAAGAAGDGRRHRREGKYS

SEQ ID NO: 143529 - protein, 292 aa, Oryza sativa
  Clone ID: PAT_MRT4530_44429C.1.pep
PVGTTETNDEGTASAAILGRRRDAAGTRLDDAEPRTKTTTAGPARRRRGTASSGCTDARTAWNTPQRCPRRRRRRETTNRATDGTSTTRTNGGDDDGPRRGLDGGEAMPRTTLPLRCQRWRRRRRPAHWHGGRGCRSGCRRDRGRGGASDGVPAKPRAGRGGGRRGDAEGGDGAAGPHLSGAAGAAGGSTVAATPLFCRRGHVSGDFPTNRRQRRRRGGGCDAGEGDGTAGRRSDEEGKAAGGGRRHGRERRTAGRGDAATGKLGKGVTPIHSTQVISKCSDSIHVVVVAIR

SEQ ID NO: 143530 - protein, 119 aa, Oryza sativa
  Clone ID: PAT_MRT4530_4442C.1.pep
MDACMGELENRLNTRFLGGASTSYNNERMYGVSSAYSIPSVPIQQDWPMRSTYNSKFIPTPQYNSDRYDTAGQTGSRGRSNRYNIAGQIGRGGRSNWEGNAAQAIAGKSFRIDSYIDRS

SEQ ID NO: 143531 - protein, 93 aa, Oryza sativa
  Clone ID: PAT_MRT4530_44430C.1.pep
MALKYMDHLILSTCDPKIRISYKRVKLLVLLFNNQIMILLAQDSDQNVNFKVPVICMNLTENLDEANVMCTLPSEDATAIPTQPSSYNVCFIN

SEQ ID NO: 143532 - protein, 85 aa, Oryza sativa
  Clone ID: PAT_MRT4530_44431C.1.pep
MIYRYLGLETRWIWLRERGRRRASTPARAAQGGEAPPAPPHLISSQIRQRLRRRSKNLPVGGLLPTGLAGNQELNPKEMNRKKGA

SEQ ID NO: 143533 - protein, 201 aa, Oryza sativa
  Clone ID: PAT_MRT4530_44432C.1.pep
MVMTTTRHTVRFGSATIDTTVTSDVAAADEWARGVRAAARGGRGLIVGLDCEWKPNHVSWKTSKVAVLQLCAGERFCLVLQLFYANRVPPAVADLLGDPSVRLVGIGVGEDAAKLEADYGVWCAAPVDLEDACNRRLGLVGTGRRLGLKGYAREVLGMAMEKPRRVTMSNWEKRELDPAQVEYACIDAYVSYKLGERVLAN

SEQ ID NO: 143534 - protein, 96 aa, Oryza sativa
  unsure (1)..(96): unsure at all Xaa locations
  Clone ID: PAT_MRT4530_44433C.1.pep
FFFFFFWISQNHISXAYHKSNGHHVFTYQMSHNTNSQNRQCIRIAKKNRHIANTPHRIARGQPPPPAAVPPPAAPTDPAQPADAATDPTSSHPAGQ

SEQ ID NO: 143535 - protein, 64 aa, Oryza sativa
  Clone ID: PAT_MRT4530_44434C.1.pep
GIRHEAYRAREEEGAGRRRGESRGEKERRRYAVAVAVVDTTSGSGDRGYTFTKLVQPPLTPRRR

SEQ ID NO: 143536 - protein, 53 aa, Oryza sativa
  unsure (1)..(53): unsure at all Xaa locations
  Clone ID: PAT_MRT4530_44435C.1.pep
FFFFFFKMYNIPRRHPFFFFTTSLCPCHQEKGPLIRKIRLTATMSEPXKCACN

SEQ ID NO: 143537 - protein, 63 aa, Oryza sativa
  Clone ID: PAT_MRT4530_44436C.1.pep
NTLYPMPSWYFEKPPQTAEFRTTARYDHIIGASLGCNLGCPRRTLHPTVPGWVPGSAEASAGP

SEQ ID NO: 143538 - protein, 155 aa, Oryza sativa
  Clone ID: PAT_MRT4530_44437C.1.pep
MLAVFSGAVVEVPAELVAAGSRTPSPKTRASELVGRFLAAAEPAVSLQLGDLGHLAYSHANQSLLRPRRSFASKDDIFCLFEGVLDNLGRLSQQYGLSKGANKVLLVIEAYKTLRDRAPYPASFMLSQLTGSYAFVLFDKSTSSLLVASDPEGKV

SEQ ID NO: 143539 - protein, 179 aa, Oryza sativa
  Clone ID: PAT_MRT4530_44438C.1.pep
MWGAAVRMREKSWGARRCGAHPNLTRKPSESQSALRPASRWYGTACYVTVRYLTRSPYGRGVFDRSSSPRAAGPRVVRERRQKSTGSGLIVFWRYLHGRLRASYVAGAAGEVYASAGAAGRAGGAGRERGFQRYVKRKLCTRIVKQRGEVFRHAHWISVNHYVHYARIPHKKYDLAFSG

SEQ ID NO: 143540 - protein, 94 aa, Oryza sativa
  Clone ID: PAT_MRT4530_44439C.1.pep
MSFADLEAGAVRAPRRARGPDATRALVFQITTAVASYRRLLNSLGTPKDTPALRDQLQKTSHNILQLAKDAKEKLRRAAEADKNADTSADKSLT

SEQ ID NO: 143541 - protein, 320 aa, Oryza sativa
  Clone ID: PAT_MRT4530_4443C.1.pep
MGCEHHQNTRESAQNSKKWIEENQGSPQAEGQAGRAQPRIKSTGTLMNLKARFWTCAEVKHIFQASVCFSHQYAFGTPGGTELRQLPLMAEKQSPSTGKPPNPPIKPPGTTQPSSEVGAENMIPVTIDKLSPEHKLELEQIMKSAQEQFMNSFKETRQGMVIQKYKLKVVAADESGTNSSQDGRTKGAKGGANGSGDKGLEPRDGEVEDIGEENAEGQQESPRCNNFQDQIDYASVVDGTIAEHQNTGPVFLPCGVFPPYRNLMTGNQQPATNAPPVQPTTAVSTPAPGAPSSAQRHMVNPRVQTREQPQHAGQNINRLT

SEQ ID NO: 143542 - protein, 95 aa, Oryza sativa
  Clone ID: PAT_MRT4530_44440C.1.pep
MAIGESSRAAVESFGPAPVAGGDSTYVEPGRIHRRPASGGATSSNDSRPDGACKGPGPGLRLSQLWRKRPPFGVLPISCRQRSLISVFSRSVITL

SEQ ID NO: 143543 - protein, 190 aa, Oryza sativa
  unsure (1)..(190): unsure at all Xaa locations
  Clone ID: PAT_MRT4530_44441C.1.pep
GWKASIILQLLTENIQLHLCRSFASKDDIFCLFEGVLDNLGRLSQQYGLSKGANEVLLVIEAYKTLRDRAPYPASFMLSQLTGSYAFVLFDKSTSSLLVASDPEGKVPLFWGITADGSVXFSNDIDLLKGSCGKSLAPFPQGCFYSNALGGLKCYENPKNKVTAVPANEEEICGATFKVESATAILTALH

SEQ ID NO: 143544 - protein, 87 aa, Oryza sativa
  unsure (1)..(87): unsure at all Xaa locations
  Clone ID: PAT_MRT4530_44442C.1.pep
PPPTSPTSPARPPSPANTTLALVAISAFDSAPSMPPSXSIQMRPPSPPSAASTISTAPQLPSLSSGASSTLSGAPSASSSSPATISP

SEQ ID NO: 143545 - protein, 281 aa, Oryza sativa
  unsure (1)..(281): unsure at all Xaa locations
  Clone ID: PAT_MRT4530_44443C.1.pep
MLAVFSGAVVEVPAELVAAGSRTPSPKTRASELVGRFLAAAEPAVSLQLGDLGHLAYSHANQSLLRPRSFASKDDIFCLFEGVLDNLGRLSQQYGLSKGANEVLLVIEAYKTLRDRAPYPASFMLSQLTGSYAFVLFDKSTSSLLVASDPEGKVPLFWGITADGSVAFSNDIDLLKGSCGKSLAPFPQGCFYSNALGGLKCYENPKNKVTAVPANEEEICGAXPSRLRAPLQSSQLCTRMMFRCPVXCTWWWCNIVATDLYHLFIKEKYCLHGKCFSVLGV

SEQ ID NO: 143546 - protein, 147 aa, Oryza sativa
  unsure (1)..(147): unsure at all Xaa locations
  Clone ID: PAT_MRT4530_44444C.1.pep
RKGIRQRTWGKWADQILGPXSKGVRVWLATYNTVEEADTAYDAKARKNRVMNAKVNFPDDPNVAQKLHLKQNAVMHDKLASPLKTCGDDAFFQLNSSYNDLXAMLAKAPAKSAETAELCPXVKPVAFTVKFLINMLFDSSXNSFGSS

SEQ ID NO: 143547 - protein, 153 aa, Oryza sativa
  Clone ID: PAT_MRT4530_44445C.1.pep
IKVFELGIIVHSIIIGISLGASESPSTIRPLVAALTFHQFFEGIGLGGCIVQARFHLKSAVTMAIFFSLTTPVGIMIGIGISSAYNENSPTALIVEGILDAAAAGILNYMALVDLLAEDFMNPRVRKSGRLQLIISILLLVGIALMSLLGIWA

SEQ ID NO: 143548 - protein, 276 aa, Oryza sativa
  unsure (1)..(276): unsure at all Xaa locations
  Clone ID: PAT_MRT4530_44446C.1.pep
MLGVFSGDVVEVPAELVAAGSRTPSPKTRASELVSRFLGGAEPAVSVQLGDLGHLAYSHANQALLRPRSFAAKDDIFCLFEGVLDNLGNLNQQYGLSKGANEVLLVIEAYKTLRDRAPYPASFMLSQLAGSYAFVLFDKSTSTLLVASDPEGKVSLYWGITADGSVAFSDNIDLLKGSCGKSLAPFPQGCFYSNALGVGGLKCYENPKHKVTAVPAKEEEICGAXPSRWKDLQSSQRCIRRFLDLQLLLGKENSVVCKWWCNIVARHASDLYHHLP

SEQ ID NO: 143549 - protein, 196 aa, Oryza sativa
  unsure (1)..(196): unsure at all Xaa locations
  Clone ID: PAT_MRT4530_44447C.1.pep
LRSLYKVPTRDISLPGACTQRILARVPAFEPLSQVRPEADHTECFVERNEQCLCTGSSXIPRLIEPXGLEEPGSCITAALAYITHGKGDVXMEFSWVAMNTAPQLCYLTKTERPSSYVXDEHRKIXRVDEGDVVAITARGAHRCYRGGDTPVCXLGYAYDIKSFANQIAPTPTELLLSGLNLRGQRIFVHSIFQHS

SEQ ID NO: 143550 - protein, 189 aa, Oryza sativa
  Clone ID: PAT_MRT4530_44448C.1.pep
MALAPTSLRCFLTGRPLCSAGSTAAVLPAPKPTRRRPSARLSCRAANEAPSTRGDLPVKLGKLAMVALAAGVLALSPVDDAMAAKSGGRVGGQAFRSAPRSAPRPSGPRINNSRTNIYINPPVAPPLVGGYGYGYGYGWSPFSFFAPGPSVAVGVGGGFDTLVLFIVLGTIVGAVRRFLNRNDDDYDDY

SEQ ID NO: 143551 - protein, 82 aa, Oryza sativa
  Clone ID: PAT_MRT4530_44449C.1.pep
GPPRGRPRGPPTGREWLPIKNVKNALVFPCISRELFPHLRTRKNQIDPPGCCMEPPKKCSAIVNYEGGGFIYCSISPWNGPF

SEQ ID NO: 143552 - protein, 86 aa, Oryza sativa
  Clone ID: PAT_MRT4530_4444C.1.pep
PRVRSQSPTPLPHHGWNPRRIRESLDDYLWLSCKLCSCCLKLAASLCQIYQQKKKIMSVSLNYIHMINLETQYVAKNHTQLNHICI

SEQ ID NO: 143553 - protein, 928 aa, Oryza sativa
  Clone ID: PAT_MRT4530_44450C.1.pep
MGVVTSLGLGGVHSSIAAAEHELSLLRGHLRSGGASCRGADDDDQDPIDSWANQVRDVAFQLDDITDECCFLSGSGSGHGFARYCANVPTWIALSRRLRKVREKLGQLLEAANYQRQRVDVMNNFVSCGELRREDDAVAAGRRMAENARSMDKEEIIGFSDHREVLVRWLLAEDAAEPRRRTLLAVCGMGGVGKTTLVASVYKEVTAPAAAPASHHFDCDAWVTVSQRFTMEDLLMKILRKLNLNTVGRRAGTGRRRRRSATDVGDGGGDTDYGSLVAALRERLANKRYLIVLDDVWDETLWDGLERAMPDGDGVAGSRVVITTRKSGVAMAAAPERTMALEPLPTHQGWALLCSVVFKDVPGHRCPSHLREVAGDMLERCRGLPLAIVAVGKLLRHKDRTEFAWRNVRDSLAWVKNSEDLGIGEASRILNLSIDDLPYKLKKCFLSCSIYPEDFLIKRKILIRSWVAQGFIDEAKEVAVRNEFGRAKRFLIHDLIKDLINHRSKHEEGFVQFAECDLTMDSNIRVRHLALDRCTSSRRSASAAKIAALRSFQAFGSKLDASLMSCFRLLTVLNLWFIEINKLPSTVTNLRNLRYLGIRSTFIEELPKDLGKLQKLQTLDTKWSMVQKLPSSLSKLKSLRHLILLKRHAADYYRPYPGTPVGQLPAGLQNLTSLQTLNYVRADEMISKSLAKLEQMKSLELFDVDASFAAVLSSSILKMSHLQRLGLTNSNTESVIDLESITVAPRKLQKLALSGRLARGKLPGWTCFLTSLKQVHLIASGIAQDSLLLLSSLPGLLHLSLNAAYREKEMTFAAGGFPALQTLTLHELSNLSQIEFQRGCLAELHELVLDKCTKLADSPKGMENLTRLQNLKLVGMAPELMEKLQDGKGDDGCYYKPGTGSSMICQVPSPSRYHMKSIVFLKPPAVLV

SEQ ID NO: 143554 - protein, 178 aa, Oryza sativa
  unsure (1)..(178): unsure at all Xaa locations
  Clone ID: PAT_MRT4530_44451C.1.pep
GRGRDESTADDSEGGRARHWAAHRRRRRDLEHDERRRSRPPPRPPLPPSRPPLSPSPRRPPPYPPLPPSRPPLSFLPLLPRASPXPAPSRMPLSPFPRRPPPHPPLPPSRPPLSFLPLLPRAPPRPLRPGRRARISSPASRRPPTVLFCRSPPASPHRRREERRERREEKERKRGEGG

SEQ ID NO: 143555 - protein, 98 aa, Oryza sativa
  Clone ID: PAT_MRT4530_44452C.1.pep
VKTSTSKPAPPVLKKFTKAEVAKHNTKNDLWVIIKDKVYDVTSFANEEHQGGMDAVMSDAGMDATSKVMDPTHPGQPYIADMIQAYRVGGLARALVTN

SEQ ID NO: 143556 - protein, 54 aa, Oryza sativa
  Clone ID: PAT_MRT4530_44453C.1.pep
MVLSTIHCDPKDSFLPLSRHGFLRTSTFPPLRNPTDGDTTVDTRLAVLPMAAPP

SEQ ID NO: 143557 - protein, 385 aa, Oryza sativa
  unsure (1)..(385): unsure at all Xaa locations
  Clone ID: PAT_MRT4530_44454C.1.pep
MNDNFIFNEVISSQGLLEIPLQGRSYTWSNMQVDPLLEQLEXFLPNTHALVMARSASDHASIKVQIATTIPKSNVFRFENFWLNXAGFHDQVRNVLEGFRVTQDQANIISANFKRLRSSLKKWSSCLAKLSRTTENCNKVILFLDKLDEFRLLNVPELRFKMIVKSQVASLLSWQXQYWKQIFKQKLVLLGGENTXFFHAMATERFRNNDISFLQDSNGNQVSDHEGKGAIFXESFKDRMGLTDNPEMVFDVSELIEDKGDLSSLCAQITTKEIDETVKKMPGDKALEPDGFDGCFFKSCXGIIAQDFCRLCTDFWGSTVNLSAIKYSYKTLVPKKPSPQSPNDFRLISLMNFFVKIICKVFADRLQPLMTTLIIEFLYFFFDLN

SEQ ID NO: 143558 - protein, 162 aa, Oryza sativa
  Clone ID: PAT_MRT4530_44455C.1.pep
MASAVSLLLLSSPRPLRRAAPVPALRSQARHPLLLGHAGETALGVWATRARLPAPPPRASNPNNDNDNSGAVEAPDRLVAAVAYLYPFLDGVHHGRFLLAQFPLFSTLLSPLAPAARLFRSSPLTPFLLFLTLYFAVVRNQQAFSRFVRFNAMQAVALDVLL

SEQ ID NO: 143559 - protein, 336 aa, Oryza sativa
  Clone ID: PAT_MRT4530_44456C.1.pep
MSPAPRVLVLVVATVVALQVSPAAGRIPGAYGGGEWQSAHATFYGGSDASGTMGGACGYGNLYSQGYGVNNAALSTALFNSGQSCGACFEIKCVNQPGWEWCHPGSPSILITATNFCPPNYALPSDNGGWCNPPRPHFDLAMPMFLHIAEYRAGIVPVSYRRVPCRKKGGVRFTINGFRYFNLVLITNVAGAGDIVRASVKGTSTGWMPMSRNWGQNWQSNSVLVGQALSFRVTGSDRRTSTSWNAAPAGWHFGQTFEGKNFRGFGLELGVMGRICAQRVAEVAAKLQLNLGVCWNDDSCRLLSVNAFSVFSVSCSMGECRNYVKGIKVKAKVRCE

SEQ ID NO: 143560 - protein, 75 aa, Oryza sativa
  Clone ID: PAT_MRT4530_44457C.1.pep
RHQASCLPFTPHMVHPSQSLLAHVRLAIDSQFIPRMINVFTCSSSRYNVRLLDNPCLLLTGLPYIPISSAEGRVG

SEQ ID NO: 143561 - protein, 264 aa, Oryza sativa
  Clone ID: PAT_MRT4530_44458C.1.pep
MSPAPRVLVLVVATVVALQVSPAAGRIPGAYGGGEWQSAHATFYGGSDASGTMGGACGYGNLYSQGYGVNNAALSTALFNSGQSCGACFEIKCVNQPGWEWCHPGSPSILITATNFCPPNYALPSDNGGWCNPPRPHFDLAMPMFLHIAEYRAGIVPVSYRRVPCRKKGGVRFTINGFRYFNLVLITNVAGAGDIVRASVKGTSTGWMPMSRNWGQNWQSNSVLVGQALSFRVTGSDRRTSTSWNAAPAGWHFGQTFEGKNFRV

SEQ ID NO: 143562 - protein, 110 aa, Oryza sativa
  Clone ID: PAT_MRT4530_44459C.1.pep
MSSLQNRSTGMNHPNPPVGLRTKQGAYPNHILEQPLYSRPGSLFNRLEIRALFPSINARVRGPPPELITPDRPAGPARRCEALDRSGPSDAPTDGRDADQSDPPLRPFPV

SEQ ID NO: 143563 - protein, 260 aa, Oryza sativa
  unsure (1)..(260): unsure at all Xaa locations
  Clone ID: PAT_MRT4530_4445C.1.pep
YDTSIPAPRTTPRRPSTPPPAASLLHRPRRRRRRHPPRRQDDGLPKKSQRIIDREETIAAAGWPASSRRSATPFAAGEATPDPSVRTFWSLGSTPKLPGGLVTPTPKKXRSRWDETPASMGSATPXGTGAATPAGYTPGPTPXGGDNLATPTPRPDCFSGPMTPEQYQLLRWERDXEERNRPLTDEELDTMXPQEGYKILEPPVFGTLLNEEEGEQLSPEXQKERKIMKLLLKVKNGXPPQRKTALRQLTDKARNLVLAH

SEQ ID NO: 143564 - protein, 533 aa, Oryza sativa
  Clone ID: PAT_MRT4530_44460C.1.pep
MAASAMRVAIATGASLAVHLFVKSFVQAQHPALTLLLPVAVFVGIAVGAKGGSGGDGKAPPGPAAVPVFGNWLQVGNDLNHRFLAAMSARYGPVFRLRLGVRNLVVVSDPKLATEVLHTQGVEFGSRPRNVVFDIFTANGADMVFTEYGDHWRRMRRVMTLPFFTARVVQQYKAMWEAEMDAVVDDVRGDAVAQGTGFVVRRRLQLMLYNIMYRMMFDARFESVDDPMFIEATRFNSERSRLAQSFEYNYGDFIPILRPFLRGYLNKCRDLQSRRLAFFNNNYVEKRRKVMDTPGDRNKLRCAIDHILEAEKNGELTAENVIYIVENINVAAIETTLWSIEWALAEVVNHPAVQSKVRAEINDVLGDDEPITESSIHKLTYLQAVIKETLRLHSPIPLLVPHMNLEEAKLGGYTIPKGSKVVVNAWWLANNPALWENPEEFRPERFLEKESGVDATVAGKVDFRFLPFGVGRRSCPGIILALPILALIVGKLVRSFEMVPPPGVEKLDVSEKGGQFSLHIAKHSVVAFHPISA

SEQ ID NO: 143565 - protein, 510 aa, Oryza sativa
  Clone ID: PAT_MRT4530_44461C.1.pep
MAIALRLAAAPLRLRLVSPAPPAIGGAGDGGRRGGGGAARIGVLGRARCRRRRGGGGRLEVAAAAADDSARCRAKGVGAAAAAAETLGGIGVGGGDQLSVVMKFGGSSVSSAARMREVAGLILAFPEERPVVVLSAMGKTTNLLLLAGEKAVGCGVIRVSEIEEWNLIKDLHIKTVEELALPRSVIHTMLDELEQLLKGIAMMKELTLRTTDYLVSFGECMSTRIFAAYLNKIGVKARQYDAFDIGFITTDDFGNADILEATYPAVAKRLHGDWIRDPAIPIVTGFLGKGWKSGAVTTLGRGGSDLTATTIGKALGLREIQVWKDVDGVLTCDPNIYPNATTVPYLTFEEAAELAYFGAQVLHPQSMRPAREGDIPVRVKNSYNPKAPGTLITKQREMDKVVLTSIVLKSNVTMLDIVSTRMLGQFGFLAKELDHVVEELEKIAVVHLLQQRAIISLIGNVRRSSLILEKVNMSLIVHDSEAKQCIKALHQAFFEDDVLTEVEEEALHMS

SEQ ID NO: 143566 - protein, 354 aa, Oryza sativa
  Clone ID: PAT_MRT4530_44462C.1.pep
FGECMSTRIFAAYLNKIGVKARQYDAFDIGFITTDDFGNADILEAAYPAVAKRLHGDWIRDPAIPIVTGFLGKGWKSGAVTTLGRGGSDLTATTIGKALGLREIQVWKDVDGVLTCDPNIYPNATTVPYLTFEEAAELAYFGAQVLHPQSMRPAREGDIPVRVKNSYNPKAPGTLITKQREMDKVVLTSIVLKSNVTMLDIVSTRMLGQFGFLAKVFSIFEDLGISVDCVATSEVSISVSLDPSKIWSRELIQQELDHVVEGLEKIAVVHLLQQRAIISLIGNVRRSSLILEKAFQVLRKSGVNVQMISQGASKVNMSLIVHDSEAKQCIKALHQAFFEDDVLTEVEEEALHMS

SEQ ID NO: 143567 - protein, 126 aa, Oryza sativa
  Clone ID: PAT_MRT4530_44463C.1.pep
MPDRRESCTHGLGEVLVCARAVSIDRSINLPACSTNLINTNSESLIMQAQAGMVEQPPQIRSVRHLGLRVNYTAMVHMLPRQIEQILKSFPRLKSLKILRCDDVTDMDWLFTIGQEVFGALHPTAI

SEQ ID NO: 143568 - protein, 575 aa, Oryza sativa
  Clone ID: PAT_MRT4530_44464C.1.pep
MHRMASLLLPPQFLCSLPCSTNSIRSHLHYKPHFLGNIMTKPKAKMRLLNRNVSSMAKKSSQDVAEGSSDDESDGETSKTKKRAPRRGRKKATIQASEGETQEGQVSTEEDESPEGTKKIKRRGRKKAATTASSSEEKDKAKKKKKRGRRKVKTVEELSDNEGEDLGEDLVPSNDRQEKISANDLESKIAALLLEDTDDNDINNLIPLVCCFGPAKYSFIPSGRPANRLIDHEIHEGMKDMFWSPDQFVRAPGGSSSNVALALAASGGRVEFMGKLGDDDYGQSTLYHLNVNGVQTRAIKMDPSAFTAMSLMKVTEDCFVQTDINPAVLKEAKMFYYNSSALLEPTTRSSLSKAIEVSKKFGGVTFFDLNLPLPLWSSSKETKSLVKEAWEAADIIEITKQELEFLCGIKPSEKFGTKDNDKSKFTHYSPEVVTKLWHENLKVLFVTNGTSKIHYYTKEHDGWVRGTEDAPITPFTGDMSQSGDAIVAALMKMLAINPHLVTDKDYLHTAMKHAITCGVIDQWLLARERGFLPRERADPTSEQFGVRFVTEKEYRTLPDSIHTEDSSESELLYVE

SEQ ID NO: 143569 - protein, 218 aa, Oryza sativa
  Clone ID: PAT_MRT4530_44465C.1.pep
MVVLTGVRGEAGPDGGFGWADGGRDYCQGQENGEAAGAAKRRHNVLTGEVFRTVLVFDTAAEEFRTMRRPCDYSQDADWTSQLNGVQGTMAASSYDADGDGVLALWLLRDYDEEAWECVYRVAAGFLGDVARMMGFFVAHMSDDSGGGDALLRSSQGHRYGVYNLKRLKRGEVVAADREFGGDDDDGDDVSSRRNMSTRRASFLPCTHRRHLPSPRRS

SEQ ID NO: 143570 - protein, 161 aa, Oryza sativa
  unsure (1)..(161): unsure at all Xaa locations
  Clone ID: PAT_MRT4530_44466C.1.pep
LLPPPFFFPCGANLQHGVQCWRDESNSDQSDESILDQSDESDFTSDSDDFCAXYGQDKISRHSLSQIRTIDHTDDHTDGSAFDSEPNTENLNLVFMAIELEQDMVLAMANXQVERLDYKKLYDEAYGKASSDSSDDEEWXTHQKGNLEDSVLNHLSMENDS

SEQ ID NO: 143571 - protein, 73 aa, Oryza sativa
  Clone ID: PAT_MRT4530_44467C.1.pep
NVYSSPGCFQKILYSLYPILWLVFIWSAQASRDIHVLLLLPPLNKLHTHFHLNHNSNTCFLCPVNTNLNQLPD

SEQ ID NO: 143572 - protein, 365 aa, Oryza sativa
  Clone ID: PAT_MRT4530_44468C.1.pep
MAGEASSSTIGKLVQFRMRNMLPSSPYGSRALVRKEKVPLGRYLLGAAYWMLHVSLANILIDKPVSYGALGGWFIQLWLTIHTNTVANRPSLLESAFPTYDSIDDQSDSQPCKSYGEAALVYPGVKPSIEGFKTWFDIFYNNDAADVLFAYDAYTEFDLPMDLDLSKLNDEEDLLLRGNYLAAISPCVLPTDVSQGRKSFSYEFYHPTSAARQLGLGQLPINLPLLKVVDSRCEILKPLAPKHSLSDRPICYAQVLKHSRGTTKILPSPIISSAPSIETFMKTPTGVLATDRLDFGKHKDPSSGITGSSPKRAKADGFAGISAEALVDNIPPSLSLSPPTRVHYAIRKVALHIRKKTFISLMAFL

SEQ ID NO: 143573 - protein, 65 aa, Oryza sativa
  Clone ID: PAT_MRT4530_44469C.1.pep
KTDGTYHVQMHHSDLFEKRVSLSEAFFNILVLEIIGTTEPAMVFVFVISCTYKSCHKLHKCILCL

SEQ ID NO: 143574 - protein, 1823 aa, Oryza sativa
  unsure (1)..(1823): unsure at all Xaa locations
  Clone ID: PAT_MRT4530_4446C.1.pep
MDAIDAELARAQEERKKMEEALAAGAPMAVSSVTFDTDLYGGGGSDPNRFAGYDTSIPASEDDSEAAVNPAARRLASYTGHAVAAADIPRAAEDDGLPKKSQRIIDREDDYRRRRLARIISPERHIPSPPKQKEQLLRDIAQKKKEEEKAKEKKALPEQQPVGAAIDGISRKMAKTSSDWDAPDATPGIGRWDATPGRVGDATPSVRRNRWDETPTPGRMADADATPAAGGITPGATPSGAWDATPKLPGGLVTPTPKKQRSRWDETPASMGSATPGGTGAATPAGYTPGPTPFGGDNLATPTXPGQIASRGPMTPEQYQLXAELPGGLPFMKPEDYQYFGTLLNEEEGEQLSPEEQKERKIMKLLLKVKNGTPPQRKTALRQLTDKAREFGAGPLFNKILPLLMQPTLEDQERHLLVKVIDRVLYKLDELVRPFVHKILVVIEPLLIDEDYYARVEGREIISNLSKAAGLATMIAAMRPDIDNIDEYVRNTTARAFSVVASALGIPALLPFLKAVCQSKKSWQARHTGIKIVQQIAILMGCAVLPHLESVVEIIEHGLSDENQKVRTITALSLAALAEAAAPYGIESFDTVLKPLWKGIRSNRGKVLAAFLKAIGFIIPLMDALYASYYTKEVMQILIREFQSPDEEMKKIVLKVVKQCVSTEGVEADYIWNDILPEFFHHFWVRRMALDRRNYKQLVETTVEMANKVGVADIVGRIVEDLKDESEPYRRMVMETVEKVVANLGASDIDARLEELLIDGILYAFQEQASDDANVMLNGFGAVVNALGQGVKPYLPQICGTIKWRLNNKSAKVRQQAADLISRIAIVMKHCQEEQLMGHLGVVLYEYLGEEYPEVLGSILGALKAIVNVIGMTKMTPLIKNLLPRLTPILKNRHEKVQENCIDLVGRIADRGAEFVPAREWMRICFELLEMLKAHKKGIRRATVNTFGYIAKAIGLQDVLATLLNYLKVQERQNRVCTTVAIAIVAETCSPFTVLPALMNEYRVPELNVQNGVLKSLSFLFEYIGEMGKDYIYAVTPLVDDALMDRDLVHWQTAASAVKHMALDALVAAYPALDDDGDNIYSRPELAMFVCSMCSLFLKSNHCITRMYDSFSFTAVLASVLSVCTVPQQMGILSLGCCLLLLKGVQCLGYISPLFTCVIKNVAPTVIYMGSVMCNPSCLPPGASSGILLGATTLPSVMLSRLIQLYRVLLADPNGREEYAYLEMQYWAVSVSCLSVLAFFVWHVRQSPSNGNSIASKYGSLLIILYPLAYLFHFLLKTDGGEAILVSSGLFLYCGDMLAHTLSKGVLLGPFLLPLLYKSSVQVLAYCRKLGRQRTQTVEECTQKRIDCDVFYVSLLVALLLLVPSWTRLIQDFEVHPFVWVFNYIFTDSRERLALCAYWIFVIYVSIRRTGTIPHTLHSSVSHSPKENCSIHGFRGVWEIYPLGHIVHQFMSAFTDHRDSEILIVSHFSLLLGCALPKWMSSGFNDRPLTPFAGILSLGIGDTMASMICYKYGVLRWSKTGTRYGLRDRSKIMPHPRYSCAIADGVQEPRTYQEAVTINEWKLAMNEELSALERTGTWDVVPLPHHAVPITCKWVFKVKTRSNGSIERYKARLVARGFQQEYGRDYDETFAPVAHMTTVRTLIAVAATRQWEISQMDVKNAFLHGDLQEEVYMQPPPGLTCPSGHVLRLRRALYGLKQAPRAWFERFSSVVLKAGFVASEHDSALFIHTSSRGRTILLLYVDDMIITGDDASHVAFVKQRLSEQFMMTDLGPLKYFLGIEVASTPNGFHLSQHRYTLDLLSRSGLSDDKTAATLMDLYLTNNV

SEQ ID NO: 143575 - protein, 74 aa, Oryza sativa
  Clone ID: PAT_MRT4530_44470C.1.pep
IRARLLSGQLVPLRVLPCLRISPRSSPRVPFAFANREVKLVEKELARNHNVDLRLVRGKKNRRTNGLGVSKKKK

SEQ ID NO: 143576 - protein, 439 aa, Oryza sativa
  unsure (1)..(439): unsure at all Xaa locations
  Clone ID: PAT_MRT4530_44471C.1.pep
PSPASSTSPNSAESRHFCQHSRDHLLIPTSQNSTCFFLGPMGDPDPTEFINXETERIPFKXSNXDLAQWKSTFSKRSHWEEVGIAQCLALSIANLKKDEPLLSAIGYFWSDTLNAFILRQGPMAPTLLDVKMLIGLDILSSINPFDVDIKCSYQLNTKKKNNGWXGFIVDHRKTGPISDEEHAAFLSLWLERFAFCGSTXALTANFLHFAEALVRKEKVPLGRYLLGAAYWMLHVSLANILIDKPLWLTIHTNTVANRPSLLESAFPTYDSIDDQSDSQPCKSYGEAALVYPGVKPSIEGFKTWFDIFYNNDAADVLFAYDAYTEFDLPMDLDLSKLNDEEDLLLRGNYLAAISPCVLPTDVSQGRKSFSYEFYHPTSAARQLGLGQLPINLPLLKVVDSRCEVSSVDTMKKLLECKFPVSADIGDFTLYQFKHVTFYS

SEQ ID NO: 143577 - protein, 64 aa, Oryza sativa
  Clone ID: PAT_MRT4530_44472C.1.pep
HAYERCFTHIALQIADYTPTAITTSTYLDDITYAMASDAPLDKGGDICTLSNVSETANMQGVNA

SEQ ID NO: 143578 - protein, 88 aa, Oryza sativa
  Clone ID: PAT_MRT4530_44473C.1.pep
CAYRKEFDPHRHSGIYTGMPETRVEKEKQLLCPPRESPCNASYQSELSMNKKGIQSLAIQLLIYPQNYHLSQLSTSKHKYAVSDTLQH

SEQ ID NO: 143579 - protein, 85 aa, Oryza sativa
  Clone ID: PAT_MRT4530_44474C.1.pep
IPRAAGSARGGISYIFLCIFFVPCMPYWYISKGVFGIPSSQLIHLVFRAHAFQTVNSAFFTKSFYTKVALKNHIDPFFKKRLANT

SEQ ID NO: 143580 - protein, 141 aa, Oryza sativa
  Clone ID: PAT_MRT4530_44475C.1.pep
GKEKKRKSREGPPAPEARRKERKRMLMPRQPSHDQIHGIQVQANPPPLAGGRDEAYGRSSCKKIRVLSNREIIKMRIQLRKHQPLPQGIFDPEIIMASNSTQQDPNHSSPFGAFFDQFCYKPTRQDRTPPLPRTPDLLVRP

SEQ ID NO: 143581 - protein, 100 aa, Oryza sativa
  Clone ID: PAT_MRT4530_44476C.1.pep
MKSSTLLVILAVQAALIMGIFAAVAKENAVGESKAIDINPGQLKCCSNCNFSFSGLYTCDDIVKKCDPVCKKCAVVKTYPVKMFKCTDTFLGMCGPPCKH

SEQ ID NO: 143582 - protein, 91 aa, Oryza sativa
  Clone ID: PAT_MRT4530_44477C.1.pep
PRRRLSSQERLGIRNQLRPRQVSSSTRHRWCRPTYHVYTCSSHAPTVQLQLQQCKYVCTSIVCVCVIDPVDFKLNNVLSVVILASLDRDLM

SEQ ID NO: 143583 - protein, 252 aa, Oryza sativa
  Clone ID: PAT_MRT4530_44478C.1.pep
MDSYEKEKKKKKQILTKNMEVKKIKSTTNNLPGADRTKSQVTGNTTEELRRKKTVEGTISAVESTKDIKLDTKKKEPLQMKSHEEVQDEKRRSQESDKSNIMAKHIKETKSQTTEVVPGADRTKAEVTRNSQSERCGSDRIDSEELRRNNTVEGCHRLQAQVTGNTQSKTCDLITSRILEKGKKSATIGSEIGKNKAQILYDQYTFLNENERLVKGGQMSYTNLMQHIILSPRVSLQANEVSEVYNLGIFKK

SEQ ID NO: 143584 - protein, 54 aa, Oryza sativa
  unsure (1)..(54): unsure at all Xaa locations
  Clone ID: PAT_MRT4530_44479C.1.pep
XSATNPNGGSFLLQGHNVQVLSLINQLDDNIHVHLTHSFTLIKLLPFSFRVSLK

SEQ ID NO: 143585 - protein, 1283 aa, Oryza sativa
  Clone ID: PAT_MRT4530_4447C.1.pep
MDAIGAGHAGAEEERKKMEEALAAGAPMAVSSVTFDTDLYGGGGSDPNRFAGYDTSIPASEDDAPEDDSEAAVNPAARRLASYTGHAVAAADIPRAAEDDGLPKKSQRIIDREDDYRRRRLARIISPERHDPFAAGEATPDPSVRTYADAMRENDLQKQKEQLLRDIAQKKKEEEEKAKEKKAVPEQQPVAAPKRRNRWDQSQDGDASAAAGSKKAKTSSDWDAPDATPGIGRWDATPGRVGDATPSVRRNRWDETPTPGRMADADATPAAGGITPGATPSGAWDATPKLPGGLVTPTPKKQRSRWDETPASMGSATPGGTGAATPAGYTPGPTPFGGDNLATPTPGQIASRGPMTPEQYQLLRWERDIEERNRPLTDEELDTMFPQEGYKILEPPASYQPIRTPARKLLATPTPLGTPLYAIPEENRGQQFDVPKELPGGLPLMKPEDYQYFGTLLNEEEEEQLSPEEQKERKIMKLLLKVKNGTPPQRKTALRQLTDKAREFGAGPLFNKILPLLMQPTIEDQERHLLVKVIDRVLYKLDELVRPFVHKILVVIEPLLIDEDYYARVEGREIISNLSKAAGLATMIAAMRPDIDNIDEYVRNTTARAFSVVASALGTPALLPFLKAVCQSKKSWQARHTGIKIVQQIAILMGCAVLPHLKSLVEIIEHGLSDENQKVRTITALSLATLAEAAAPYGIESFDTVLKPLWKGIRSHRGKVLAAFLKAIGFIIPLMDALYASYYTKEVMQILIREFQSPDEEMKKIVLKVVKQCVSTEGVEADYIRNDILPEFFRHFWVRRMALDRRNYKQLVETTVEMANKVGVADIVGRIVEDLKDESEPYRRMVMETIEKVVANLGASDIDARLEELLIDGILYAFQEQTSDDANVMLNGFGAVVNALGQRVKPYLPQICGTIKWRLNNKSAKVRQQAADLISRIAIVMKQCQEEQLMGHLGVVLYEYLGEEYPEVLGSILGALKAIVNVIGMTKMTPPIKDLLPRLTPILKNRHEKVQENCIDLVGRIADRGAEFVPAREWMRICFELLEMLKAHKKGIRRATVNTFGYIAKAIGPQDVLATLLNNLKVQERQNRVCTTVAIAIVAETCSPFTVLPALMNEYRVPELNVQNGVLKSLSFLFEYIGEMGKDYIYAVTPLLEDALMDRDLVHRQTAASAVKHMALGVAGLGCEDALVHLLNYVWPNIFETSPHVINAVMEAIEGMRVALGPAVILNYCLQGLFHPARKVREVYWKIYNSLYIGAQDALVAAYPALDDDGDNIYSRPELAMFV

SEQ ID NO: 143586 - protein, 55 aa, Oryza sativa
  Clone ID: PAT_MRT4530_44480C.1.pep
FWNPSPNPFNLSSFGRNSNGNNGLVWVRAPFLIFLFQPNWEGMKKKKVTLLLKTP

SEQ ID NO: 143587 - protein, 152 aa, Oryza sativa
  Clone ID: PAT_MRT4530_44481C.1.pep
MPPVGNRGADDGMLQANGVDLVRMFDAEPWTAGALVDTRIQIVIAVPEDQIAYVSSDPRSGRLWVRAERLLLPQDQHRRQYCVVHLKSMVRAIVLLSLPAGFRFITVDAIGSQDEIHQLAESIYVMVYMNAVASHHASLVGSEWKLYKVFCP

SEQ ID NO: 143588 - protein, 183 aa, Oryza sativa
  Clone ID: PAT_MRT4530_44482C.1.pep
MTPTATVCLMSRTAKRPRGGYSEKVSTTMGLVGIILTIPASPFFKNLGSFSNSKVDPAKEAASFTSQVIIMNHPGQIGNGYAPVLDCHTSHIAVKFAELVTKIDRRSGKELEKEPKFLKNGDAGMVKMIPTKPMVVETFSEYPPLGRFAVRDMRQTVAVGVIKNVEKKDPTGAKVTKAAAKKK

SEQ ID NO: 143589 - protein, 397 aa, Oryza sativa
  Clone ID: PAT_MRT4530_44483C.1.pep
MVARHSTPVDVALRRRLAQGDVGQRPGVAAQAPAASERRRGGGAAAASGLPLSAWSPPLPQMSVWSCMTRRRRTARRRGASHRCRPPVNQSAFIKGRSIHDNFLYVRNLARSCHRTRRPKLLFKLDITKAFDSVAAIRCASIDLDSILDGVPALRAQFPIKYLGLPLLLGRLRKTDVQPIFDKIANRVTGWRGKNIGPAGRSTLVKSVLTAQPIYLLTTLKISKEALGILDAKRRKFLWAGTGDITGGKCKPWVGLETPCDETDKLLFAAATKITIGDGNTIRFWESAWLDGQRPKDSMPLVYAISKKRSKSLREGIENDTWIDDLELNGNTTFTVELISQLVSLWSAPQDIMLNQNESDHIVWKLSNHGEYSASSAYKAQCLGIVGTNFNPLIWKS

SEQ ID NO: 143590 - protein, 117 aa, Oryza sativa
  unsure (1)..(117): unsure at all Xaa locations
  Clone ID: PAT_MRT4530_44484C.1.pep
MVAHGVLPSKEIIGWRPQPDKNKPCIVGGSDFQLHGTLHKKYFSHPFKTSNKGXHANWFYIQNPDPALPEYSCCPPKYRDVWNSLPMREKASQALELLNIMLKIKEQGLQGEQITRH

SEQ ID NO: 143591 - protein, 990 aa, Oryza sativa
  unsure (1)..(990): unsure at all Xaa locations
  Clone ID: PAT_MRT4530_44485C.1.pep
MALDVIQRLDSAQEQRELTTLEHWLRAGLKRRLLGLATLERARKRQASRVMHIKEGDANTKFFHLKVNARRRKNYIQRLRSGGGWAVSHQDKDDVIFEHFSRMMSRPEPRTCDINWQALHAPTTDLSHLDDPFTEQEIHRAIKEMPADKAPGPDGYTGNFFKVCWDIIKGDIMAVFESLNNLRCANMNLLNSANIVLIPKKEGADEVTDYRPISLIHSIAKILSKTLALRLRLHMRTLVTVNQSAFIKGRSIHDNFLYVRNLARRYHRTRRPMLLFKLDITKAFDSVRWDYLLAMMQHHGFPQKWRDWVTAILTTSTSQVLLNGIPGEKIAHGRGLRQGDPLSPLHFILAIDPLQWILSKATELNAITKLRGRAARLRISMYADDAVVFINPVREDVQAFTDILVRFGRATGLVTNMQKSQVAAIRCASIDLDSILEGVPALRAQFPIKYLGLPLLLGRLRKTDVQPIFDKIANRVTGWRGKNIRPAGRSTLVKSVLTAQPIYLLTALKISKEALGVLDAKRRKFLWVGTGDITGGKCKVNWKRTCLPTTLGGLGVLNMEMFTRALRLRWLWHEWKHPTKPWVGLETPCDETDKLLFAAATKITIGDGNTIRFWESAXLDGQRPKDSMPLVYAISKKRSKSLREGIENDTWIDDLELNXELNGNTTFTLELISQLVSLWSATQDIMLNQNESDHIVWKLSNHGEYSASSAYKAQCLGTVGTNFNPLIWKSWAPAKCKFYAWLVIQNRVWTSDRLATRGWPNSGVCPLCRMTNETVCHLLASCRYTRRIWRLTANWVAYQQLGAMPKRTRMVGNASQQKGSVQERAAILNPTHRLGNLERKEPKDLRAQGNGGPQSYGKNKGRGKNLDDGRRKTTWRIPTNLIIALIPPAALASWVEKDKATSRNGNGTEPLSPTPTQATANPKATTAFAAQPALAATAIHRTRPRYHPTPHTRAYGRTHPRHTIHRQPNKPLSRWSPLLSLPITVTFPHT

SEQ ID NO: 143592 - protein, 407 aa, Oryza sativa
  Clone ID: PAT_MRT4530_44486C.1.pep
MVAIENQSQGQRAAEAAAQPRIPREARRLLHEMAASWADVADCRALQVIPLKGAMTNEVYQVRWLNGAPATADGGEVEAEAAAREREVRKVLVRIYGDGVELFFDREDEVRTFECMSRHGQGPRLLGRFTNGRVEEFIHARTLSAADLRDPEISALVASKLREFHNLDMPGPKSVLIWDRLKNWLKTARNLCSSDESKKFRLGSLENEIAALEKEFSGDYHGIGFCHNDLQYGNIMIDEDTNMLTIIDYEYASFNPVAYDIANHFCEMAADYHSEKPHRLDYSKYPDTDEQKRFVKTYLSNSVSEEPDAEEVENLLQSIEKYTLASHLVWGLWGIISDHVNDIDFDYKERKMKMIMKKKPFRDQEFSSRNFRKVQLQEEAVGFGCFVYSLKGSEEKAPGCVFVCSTN

SEQ ID NO: 143593 - protein, 51 aa, Oryza sativa
  Clone ID: PAT_MRT4530_44487C.1.pep
IPSTNRILGSSRNSNVFLLFPFNIFIVRLRNYVSRVFLPFYMTIPTLINPP

SEQ ID NO: 143594 - protein, 35 aa, Oryza sativa
  Clone ID: PAT_MRT4530_44488C.1.pep
KVKLELLEIDKRTITTREGTKETIHRIRAETMVRR

SEQ ID NO: 143595 - protein, 152 aa, Oryza sativa
  unsure (1)..(152): unsure at all Xaa locations
  Clone ID: PAT_MRT4530_44489C.1.pep
PSWFPSPYDARPPPTLPRPDLGPPTSSHYSPPGPYLGLPRPPXTPWFGAFFSTFAPLHPTTRVLHPTLRGPSYDCPTGGPILYHPTPWGRVGXLVPCPXIPHHTIXRFRAQMPNILTDLPEVPNLPVLSLPHLVCPQQYPQRWPYITTYRPK

SEQ ID NO: 143596 - protein, 91 aa, Oryza sativa
  unsure (1)..(91): unsure at all Xaa locations
  Clone ID: PAT_MRT4530_4448C.1.pep
HLILHACVQTFDVMGEKFLFWGNLPCCRLGTTSLYNDAELASSASEHGSSPSPRERTQLPSLDSTGXFFFFLHKRHHRDRAKRPAVRALSD

SEQ ID NO: 143597 - protein, 84 aa, Oryza sativa
  Clone ID: PAT_MRT4530_44490C.1.pep
WVSQPTKPHIYFYYPTLISFSRPPFSFFRRCTCLSLSPSPPLASPVASGREDDEEGRLSRRRCPPPHLSLSRRHPPRRTRGRTR

SEQ ID NO: 143598 - protein, 310 aa, Oryza sativa
  Clone ID: PAT_MRT4530_44491C.1.pep
MAYRVLEVTLHSARDLKNVNFISRMEVYAVATISGDPLTRQCTPPDPYGGRHPAWNATLRFTVPPTAASAAGCLHVLLRAERSLGDRDIGEVIIPLADVLSGPYDLGARPPQFASYQVRKLHRSETRGVLHLSYRLGPVVAPQSVFAYPAPPPPPPQLFETAPPSPPYVPPPPDAYLRKPSPPSPPPAKLSPPPPPQTQTQPLAKPPAPATPSRAGGHVAALAPPAVAKADRHVSTPSPAKADWQMVGTPTATKGASKHGSLEFERGLNAGLVGGAIGGMLVGTEMVSDAAFYHAGYRAGLADRDGWAVY

SEQ ID NO: 143599 - protein, 484 aa, Oryza sativa
  Clone ID: PAT_MRT4530_44492C.1.pep
MGMAYHDDRNLCTRSWLMAYACDLDILLHHQDGTWSTITGSCTVVRDLKDLLLHSYFSIMDDLRFHAPPGGEPYEIRVLDIPGALFAAACGFLVDGIMFTLIAFYKFPVMLFKGWKRLIEDLVGREGPFLETACVPFAGLAILLWPFAVFGAFLASIISSIPLGAFAAVVVYQESSLIMGLNYVISSVAIFDEYTNDVLDMAPGSCFPRFKYRKNEASTEGGSLSRPASFKDKQDGKKAPSRVTSFKGSFDEFNPFKLLDHLFEECKHRGEVLVAEGVITPKDIEETKSGKIGIGVLNVGLPAYVILHALIRSAKANSDGLILSDGSEITSDNRPKNTIFDWFFDPLMVIKEQIKAQNFTEEEEAYLKKRVLLTSDPKRLKEVVPHLPSSLNERKQAEIDALSRRLQGITRSISRYPTAKRRFDDLVRSLSEELERTMGGSQSGSVSQMQKLRSGISRMLSQRSMGKRTSNRGDDREAQLTIDP

SEQ ID NO: 143600 - protein, 318 aa, Oryza sativa
  Clone ID: PAT_MRT4530_44493C.1.pep
MLRSTHPPPSSPSSSSSGGGGGGGSSASSSSEKTMVGGGGGGGGGSGSAAPSGAKLLQILNVRVVGSGERVVVLSHGFGTDQSAWSRVLPYLTRDHRVVLYDLVCAGSVNPDHFDFRRYDNLDAYVDDLLAILDALRIPRCAFVGHSVSAMIGILASIRRPDLFAKLVLIGASPRFLNDSDYHGGFELEEIQQVFDAMGANYSAWATGYAPLAVGADVPAAVQEFSRTLFNMRPDISLHVCQTVFKTDLRGVLGMVRAPCVVVQTTRDVSVPASVAAYLKAHLGGRTTVEFLQTEGHLPHLSAPSLLAQVLRRALARY

SEQ ID NO: 143601 - protein, 66 aa, Oryza sativa
  Clone ID: PAT_MRT4530_44494C.1.pep
RPRVRKDIENADEAKLIEIKNGRLAMLTMLGWIAHAFVTHVAPIDNLFTHLSHPYNKNIIHTLSSS

SEQ ID NO: 143602 - protein, 233 aa, Oryza sativa
  Clone ID: PAT_MRT4530_44495C.1.pep
MAAENYWRFADARQQQAMVAAAAAAAGMAPTAATVATAGQAAAGMPPQAAMAQQAAAAPPLKRARPDYGDVPAGQDMTGYYPRETDRTGYHALRENEAIGASYDRYLRNGMPSVAATETNRPVVGGMGGMGGMGGYPVDDRRMIGVGMDSRDIFRPFVGFREVRLVNKESRHPGGDPHVLCFVDFDNPAQATLALEALQGYKFDEHDRDSAHLRLQFSRFPGPRSAGGPRGRR

SEQ ID NO: 143603 - protein, 220 aa, Oryza sativa
  Clone ID: PAT_MRT4530_44496C.1.pep
MGQQSLIYAFVARGTVILAEYTEFTGNFTTIASQCLMKLPASNNKFTYNCDGHTFNYLVEDGFTYCVVAVESVGRQIPIAFLDRVKDDFTKRYAGGKAATAAANSLNRDFGSKLKEHMQYCVDHPEEISKLAKVKAQVSEVKGVMMENIEKVLDRGEKIELLVDKTENLRSQAQDFRQAGTQVRRKMWLQNMKIKLIVLGIIIALILIIILSVCHGFKCK

SEQ ID NO: 143604 - protein, 608 aa, Oryza sativa
  Clone ID: PAT_MRT4530_44497C.1.pep
MSSSSSGRSSRIAVVTEDRCRPSKCGQQCRKRCPVNATGRQCIEVTPSSRVSLISEELCIGCGICVKVCPFDAIQIINLPSDLDKETTHRYGPNSFKLHRLPVPRPGQVLGLVGTNGIGKSTALKILAGKVKPNLGKFTDPPNWDEIMRNFRGSELQKYFTRLLEDKMKATMKPQYLDHIPKSVTGKVGDLLSKKDERHMKNLLCDTLELNQVLDRDVSALSGGELQRFAIAARAMEEADVYMFDEPSCYLDVKQRLKAAQVIRSLLQPKNYVIVVEHDLSILDYLSDYICCLYGTPGAYGVVTLPSSVREGINIFLDGFIPTENLRFREEKLTFRVTESTEEIVEGQTYQCYRYPTMTKTRCGFKLSVTEGSFNDSQIIVMLGENGTGKTTFIRMLAGRVKPDKVGDEEVDVPEYTVSYKPQELISKYSSTVRDLLFEKVPGSCTQAQFRSDVMKPLKIEQLMDRQVPTLSGGELQRVALCLCLGKPADIYLIDEPSAHLDSEQRLLAAKVIKRFILHEKKTAFVVEHDFIMATYLADKVVVFEGKPSVDCIANAPEPLASGMNRFLSHLDVTFRKDPTTYRPRINKLGSIKDAEQKAAGCYYYLEY

SEQ ID NO: 143605 - protein, 146 aa, Oryza sativa
  Clone ID: PAT_MRT4530_44498C.1.pep
MAPPLLRGVPVLIALVVMAAVALLPAAAADDMGGVVASASGRRKMAAAAATCDGAVGECDVDDEEEVEEMALMGAAGAASGETLMRRSLAARRPTNRYVSYAALDANKVPCNKRGQSYYQNCASQKAANPYRRGCSAITRCARNTN

SEQ ID NO: 143606 - protein, 662 aa, Oryza sativa
  Clone ID: PAT_MRT4530_44499C.1.pep
MKFGLPSRLFRLMASSSSGDGGFSRPSSTDEGPMPIYSWPDKQRPRVCILGGGFGGLYTALRLESLVWPNDKKPQVMLVDQSDRFVFKPMLYELLSGEVDVWEIAPSFTELLKNTSVQFVKDSVKLLRPSDHFRRDSGGSCTARLVLALGAEAKIDVVPGSAEYAIPFTTLDDALKVESQLKMLERRRFGKNSPDIQVAIVGLGYSGVELAATISERLKNKGIVQAINVQTTICPSAPPGNRDAALKVLESRNIQLFLGYFVNCIREASASEDSSSMVTDAKEVNGDHKKLLLELQPAQRGIQSQVLEADMVLWTVGSTSQIPRLQPPDAPYVIPLNGRGQVETEETLQVKGHPRTFAIGDSAALRDPSGKLLPATAQVAFQQADFAGWNLWAAINDRPLLPFRFQNLGEMMTLGRSDAAITASFIEGLTLEGPLGHAARKIVYCLRMPTDEHRVKVGISWFTKTAVDSLASLQNAVANSFPSPDPATNRSPSAMDPDSEVAFDFQPYLCQYKSGRVFRLGGDPTVPAGTDPVTRVVSRDIHAGAARGARLPPARRRRVHREAPRRGVLYMAAGSLPCSPARVDPPRLPKRSFGPGPARLGCPCTTASRRRTRSRRRTRTRGRPCGGRRRATAPTRGCSTTPTSPACSSPAAAPAPTSPTHG

SEQ ID NO: 143607 - protein, 155 aa, Oryza sativa
  Clone ID: PAT_MRT4530_4449C.1.pep
IRRGRFPRSIFFGSFLRAIWRSKESPPKSQKGAAFAKLLLPSLLVVPGLGSHIPARKKKEPPLHLFFWPLGRSPSSRFGGKWEPNSLAVLTSPCVERRRFGSCFPPPLAPAPLLSLYIYLSDYLVHIRLRACLTLFYFDPSTGFRLPPSRHLIVA

SEQ ID NO: 143608 - protein, 987 aa, Oryza sativa
  Clone ID: PAT_MRT4530_444C.1.pep
MRVTPGLSSFADEPARAGDSLRPLIDFAREKGGAAEVRLMATAGLRLQEGRLQEAILSSCRDVLRASGFRFEDSWAEVIPGSDEGIYAWVAANYALGTLGGDPHKTIGIIELGGASAQLTFVSDEVLPPELSRNFTFGGTTYTLYSNSFLNFGQNAAQESFREILRSKDSKNGTLVDPCAPKGYSRIKEVISRPSSASKSKLENQFADSGDGDFTFFGLKQSSSLSDFVLAGEQFCNKDLSTLRKMYPNRIEYSNQVGDTQVEWALGAFISNIKGVIVEPSATGRSAHRSRPLLAVLLGVFLLGGALCLARWRKPKTKIIYDLEKGRCLRCYIVNVLQASKSQDGRVGLRRQFQETESSRKNISDGKLQCVLNYAFVWSRALFPEPLNTLQPVLNWKLNCYKRIKMLRNRIAGQMPKAFDILQDVAQHTLSNLHDIQKSLIFWQSKAEGTSSQKLYFMIFERGPRAFVEAAWQTLTRLKSNGSPVPHLLHSASDMVSTKLAVLTSMQHCLAAFLAEVYFEVDKCRKGLTESSDKSLHTLFIVLNSVFSKLEVSFRNAVEGQTLLCTHDGKSPELIFERLPEVDVESSEWTEVLSANAITLIYQNLQKFDDFISDQLYMPIHHHLQDSASILLRHWQCGHTTEACVPSALARRYQQDIHLLLLQQGYGCGSLMGSSDIDNWIQDAKESMVGFWDVHVGQPKSSILLSSIMTSFFSLRIIRSFPSGMNFLRHSNKDLNMKWKNKRSNKLKNHCAGFASCAFFIYLRMLLDFCGNTSNEKPPQDMSELAMMEIVMKRFFPFYLYLGCTQFKLTCIFSNILILKIQIEKHKLALLEAMLELDQILRANEINFAILAALPAFGVSLLLLFAVRAWATHGRGAEGRGRTARRQRRLLLADVEKRLMEFQNCMANGMEEEACCKFGLTLYTLDRLYKAVESQARETGEWSSLREDMFDLAKPGVGMEDKLVLLSRLKGMYDCLLPSPSGVLPRL

SEQ ID NO: 143609 - protein, 120 aa, Oryza sativa
  unsure (1)..(120): unsure at all Xaa locations
  Clone ID: PAT_MRT4530_44500C.1.pep
LVTREIFGPFQVGSKYFYDEPELVLKTCXRINAPFTAAVVSNDPFFLQEGLGRSVNGATYSGLRARATGAPQNPWFGPAGDPKGAGVGTPKTLXLVWFFPREVIYYLGPLPKNRALPSPT

SEQ ID NO: 143610 - protein, 41 aa, Oryza sativa
  Clone ID: PAT_MRT4530_44501C.1.pep
SVAVIFASKKLIDHGCKKNIQNLSEFLLSYPSLVLFGKINY

SEQ ID NO: 143611 - protein, 68 aa, Oryza sativa
  unsure (1)..(68): unsure at all Xaa locations
  Clone ID: PAT_MRT4530_44502C.1.pep
REGRKVLVRIYSDGLELLLDREDKERTCXCLSRHVLGCGLLLRFTNGPHWENIQPRIVYVTTFQRTEH

SEQ ID NO: 143612 - protein, 288 aa, Oryza sativa
  Clone ID: PAT_MRT4530_44503C.1.pep
MAAAAAACVESPDEGVEIREVWAGNLEAEIAAIRDEVDRYPYVAMDTEFPGIVCRPVGNFRTTDEFNYANLEANVNMLKLIQLGLTLSDEGGDLPRRGTGGRRCIWQFNFRGFDPRTDPSNADSIQMLRTCGIDFDRFAAEGADPIRFAELLMSSGVVLNADVQWITFHSGYDFGYLLRLLTGRNLPDNMPAFFDLIRIYFPVLYDIKHLMRFCSNLHGGLSRLGELLDVKRVGTCHQAGSDSLLTLGCYNKIKEVYFKGSTEKHAGVLYGLVIEDGVNRPPPTQPNE

SEQ ID NO: 143613 - protein, 611 aa, Oryza sativa
  Clone ID: PAT_MRT4530_44504C.1.pep
MPPVDPHSYTDGDHPVTAKAALAFYLDFAASTIHASALLTLSAPHSGDLLLDTRALAVHSASTASGPPSPIPFSLADAADPVLGSALTLTLPPDTTSFLLTFSTSPSASALQWLSPPQTASSLPFVFSQCQSIHARSVFPCHDTPAARITFDLLLNVPTQLSAVAAARHVSRRDPLPSDHRGACDDALWCAPGRIVEEFQMEQSVPPYLFAFAAGGIGFRDLGPRTRVYAEGGDKVLDEAAREFAGVEEMVKVGESLFGPYEWERFDLLVLPPSFPYGGMENPRMVFLTPTVIKGDAAGAQVVAHELAHSWTGNLITNKTNEDFWLNEGFTTYAERRIVEVVQGEERAALNMGIGWRGLNRMMERFKDNMEYTKLKPKMAGIDPDDVYSEVPYEKGFQFLWRIERQIGRPAFDEFLKNYISTFKFKSIDTETFLEFLKTNVPGIENQIDLQLWIEGTGIPPDAMEPESAIYKKICSLAAEFKSGKLPSEDEVADWSGQEWELYLENLPTDVEASQVTALDERYKLSESCDYEVKVAFLQLAIPTGCRCYFNEVEKCLKQVGRMKYLRPLYSSLARCSGEEKMLAHRIFSEAHEFYHPIARSVAESILSKHG

SEQ ID NO: 143614 - protein, 34 aa, Oryza sativa
  Clone ID: PAT_MRT4530_44505C.1.pep
MAGAAATWLLYRCRLGSVEFFPQDIDTVEQLYVF

SEQ ID NO: 143615 - protein, 51 aa, Oryza sativa
  Clone ID: PAT_MRT4530_44506C.1.pep
DSPFFLTLILCTTFNIYNGLLFHTMKFLYVALLVPIPSYINIFFPLTKLTI

SEQ ID NO: 143616 - protein, 194 aa, Oryza sativa
  Clone ID: PAT_MRT4530_44507C.1.pep
RFLTVRKKLVCRYNETASILKELITESVGSEAIGVDCIADFRRLLRQMESMTSVCQEYIISNHASLIPDANRTAVFLLFYNHIMGKLAQEQPRLKNQIISKLPYDGIWLGIVISNRFLRRWLNSHREYVSTGDDDMSFNWNVRSHFYVHLWIFAYSQLEVEECLYGEFPELLLEIEILLWKANEIDGLGFEDKF

SEQ ID NO: 143617 - protein, 166 aa, Oryza sativa
  Clone ID: PAT_MRT4530_44508C.1.pep
MCVCVHTHIYIYIHIYIYIYIYIYIYTYIYICVCVCVYIYICMCYICLYIMHIYIVTYVCVCAHTHIYIYIHIYIYIYIYICVCVCVYIYIYVCVYMYIYIYAYIYVCIYIYIYIYFCPIYIYIYIYIYIYIYIYIYIINGVCRKEILMEERCQSLDFSGMIWAAG

SEQ ID NO: 143618 - protein, 39 aa, Oryza sativa
  Clone ID: PAT_MRT4530_44509C.1.pep
MKRWCKTLEMMDATAKSFSKLETCIGSPRGRGKPRATWA

SEQ ID NO: 143619 - protein, 54 aa, Oryza sativa
  Clone ID: PAT_MRT4530_4450C.1.pep
MAKKKFGSRFSRRLPSPVATADRAWPFAASLAGSRPLAPPPCTGRHRAPLTPRR

SEQ ID NO: 143620 - protein, 321 aa, Oryza sativa
  unsure (1)..(321): unsure at all Xaa locations
  Clone ID: PAT_MRT4530_44510C.1.pep
MRGPPVSDTXRERRGGDATWRPIRRPGSPSGRSATAARARRGAGDGIRRWRRRGGGGSGRRQRPKATASAGGGDARGNGEGEERRCLTEGGRRAGRRWRTATANHGRTAAASGRAPACPKDEEGRTRWISAARSXRRRRRGTAASLAAASGGRSSXKRRRRVVARRGGDGELGRVRRNGEKERGSGEEREAGFDFRIPAISGAGANGRERGKGADDSAHARTWPTWPGRGGDEGAAAVSARRRERDRREEGDGTDRWAPPVGDPERREAGGRLLGWASACGRPSKEEGGEXKGNGPTAHFAKRRKKRGKRKRKRKRNFPGI

SEQ ID NO: 143621 - protein, 62 aa, Oryza sativa
  Clone ID: PAT_MRT4530_44511C.1.pep
AKKSPPVELATKTAHKQSIRWLVPRYKIYFGGSFLGLKQEVPGLTRRLITRNLRDQRRIKRC

SEQ ID NO: 143622 - protein, 137 aa, Oryza sativa
  Clone ID: PAT_MRT4530_44512C.1.pep
PNQGFWGPPAGCFRLKGGAIKWTRILGGGTLVCSYGLIVEGGVFPNPWAGNFFPLDRRNRPLGGSKTTGEDPPRNLGAPPHCKIGKLPKEVGDFNGVGFPRIKRSWSAWGKIFAQSGLLWNFVLIIKKSPGPFRLFF

SEQ ID NO: 143623 - protein, 70 aa, Oryza sativa
  Clone ID: PAT_MRT4530_44513C.1.pep
KETKYSNQNVIENSKPLSKPQPGVKQVTNRNQHRGIIRETVSVICRSRCDNTKNKISTRRKGTRNPQKIR

SEQ ID NO: 143624 - protein, 511 aa, Oryza sativa
  Clone ID: PAT_MRT4530_44514C.1.pep
MASAMVRAMSTAAAGAAPVSLDTINPKVLKCEYAVRGEIVTHAQDFLRNLDYDLHFILQNLQQELQKNPDSLPFDEILYCNIGNPQSLGQQPVTFFREVLSLCDHPALLDKSETHALYSSDAIERAWQILDKIPGRATGAYSHSQGIKGLRDEIAAGIAARDGFHASGDNIFLTDGASPAVHMMMQLLIRSENDGILCPIPQYPLYSASIALHGGSLVPYFLDEETGWGLEVDELKKQLEEAQSKGITVRALVVINPGNPTGQVLAEENQKKIVEFCKNEGLVLLADEVYQENIYVEDKKFHSFKKIARSMGYTDDDLPLVSFQSVSKGYYGECGKRGGYMEVTGFSADVREQIYKVASVNLCSNVSGQILASLIMNPPKAGDESYESFMVEKDGILSSLARRAKALEEAFNSLEGITCNKAEGAMYLFPRIYLPQKAIGAAQAAGTAPDAYYARRLLEATGIVVVPGSGFGQVPGTWHFRCTILPQEDKIPAIISKFKEFHEKFMDEFRD

SEQ ID NO: 143625 - protein, 787 aa, Oryza sativa
  unsure (1)..(787): unsure at all Xaa locations
  Clone ID: PAT_MRT4530_44515C.1.pep
QGTLVCSPYAMYELGLQLCPRQKQAIEDSGNLLKINKIHIDRNLCNEIARSYDKEKEAFNINGTFITMTLDDVYCLLGLTSKGEKIFEAPKINKPKLFNLYKKEGQTTITLQALQEAIFNSSSYDDHFIRRFILFSIGSFICRTTQRYVRSEYLNLVDDMDKMSELNGSSLILNQLMKGILSFREKTTNIEGNVCLLXIWYWEKVRLDKLAATIYYSGRQXPLIQYWDQKKXKDRISYPFGEGKVVDNIRGTIDCNEILNEKEQDKDSDTHSNQDFQCTSIQVHSITSTEQSANITLQGRLQERIQTLENNFNGFTMDFWPRMRSLILDCMXNDSKCPNXKDTMHVFEDVEQEQIDPMSLYXSNHHKETYINPNVNMTCETNDSSNQCNQSRKMLTGPTGRTYKPTNRTDFIYETRXTKKEDPFITYINNTEDNKVMVHIEEVEVKRIRMKVLTQPEFLNDDVMDAYILCLRYKEKGIRGDGKAFLEMAMKTGLLNVEGAHVEASKPRDKRWIRDMARDYLAFDMIFLPINIKDTHWYLAVLNAKRCEVQILDSLAKPISKDRPDLRRVRRGRLGRWRQRWSGEGCVGPWGGERGGGGAGRRRGEEDSSRAGGGGWRGGYVTRLARQEGGGGGQRRWGLTSRRGDAGGGEGGEGDKEGLRRREAANIGGGGRRQRGAGGGEGGEEGRVRRGSREGDGAGGGGDARTGDGGGEGDGRRRKRGWGGMATGSGEMATMREESDRDRVGKRLKNTIIPLRDFFPLTKTPFHISTSTNTNTGGSRTRSQPYN

SEQ ID NO: 143626 - protein, 625 aa, Oryza sativa
  unsure (1)..(625): unsure at all Xaa locations
  Clone ID: PAT_MRT4530_44516C.1.pep
SSCLCPPSHPSSPSPSPSPSTSPSSPSPSPSPPPPISHSHNAVQILQMKPNKRRKMDPPERDVPPTGTITALPATSSPAPATTVPVHAAPASTPVLPLATSLPPXPESSLPTXPPRASHAPPAGPARXPPGVATSALRAATPLPGCRAPLPGAPAPPPGSAASLSLGSATSPPPGSAASSLPRSAAPPPPRSAVSPPPGSPAPPPGGAASPPSSPEKRKKEKKSMAAPASTAXPPHRPPHRPLPXCSPPREAAARPPPLSDLAVASLLPSGSAAARPPRREVAFTPPWRDSASASARPQPREGPAAAARLAATARGPQASRASPGPRRVVRPPRAQADKGAIITTPPPTPMQARAGPGPRRVVRPPXPRPTRGPSSPPHPLPPCRPGRPACPILLLSPPSPASISLAASVACPAPSPSTLPRRTRPSSPPXSTASAPPSTSASPPPLISAASLRRSPSPSPSPPPLVTTSRRQSTPSPPPPPSISLAASVACPAPSPSTLPRRTRPSSPPSPPPAPLRRRPPPXPPLISAASLRRSPSSSPSPPSPPPXVSAPACEPPPSPSSSPAPLSSESRDXSPLHPPPPAGDESSSPGRLPAPPPPRYPPHGPTHPSPLHRCRHRPSRPLL

SEQ ID NO: 143627 - protein, 127 aa, Oryza sativa
  Clone ID: PAT_MRT4530_44517C.1.pep
MEMELIASRISQVAACAGKGGHLLLAYDDSATARFGEDTRGRTHSHSRTQHRECPTRVHVLIRPTARAPSSPHALVPTVRAITVRSWYTRDRAGKPFVPWVFFSLESHTGWVHTVCAARCHGFRGAP

SEQ ID NO: 143628 - protein, 229 aa, Oryza sativa
  Clone ID: PAT_MRT4530_44518C.1.pep
MGDAGGGMAAHWAALYGGGVNGGAAAGAEGTVSSPTSGGSPVAGGSPTRGGAAALPGIEGGRVAKPARRRSRASRRAPVTLLNTDTSNFRAMVQQFTGIPTPPYATAAAAGGPVISFGAGEYGGGAMPVRPSPTPASVMSFDHLGHHHRQAASSLQSQLFRPQHQHHHQYGGGGVVGYGGGGGDMFLHGFESSSAEERLLLQSIQAAQMLPAARPTTTSANNANGYNFG

SEQ ID NO: 143629 - protein, 225 aa, Oryza sativa
  unsure (1)..(225): unsure at all Xaa locations
  Clone ID: PAT_MRT4530_44519C.1.pep
MTVVAASTRPPVXQRAIGRIAIASIFITPANDTPXPPPTPFNTXRYVAPCSRPLSGAVPPSSRIAVRGLRTRQPPAAXPAPSSTASATVASPSPPRPRHASVSFAGVRQPPDAGTAQIQRRSAGSNRAEAGSGRGGVGSTVSTPRRQPCXRAPARHPRVEMGRRRGLASPPPSWLATRFSGGALRRRRGEGEEERVATEALGFPXIRPRVGDAGASTRLFPGHSK

SEQ ID NO: 143630 - protein, 134 aa, Oryza sativa
  unsure (1)..(134): unsure at all Xaa locations
  Clone ID: PAT_MRT4530_4451C.1.pep
KTLGWDPKEGXSHLDVMLRSLLLIALVKLGHDETINEGVRRFHIFIKDRKTNILPPDTRKASYLAVMRTVTTSSRAGYDALLKIYRETAEAQEKSRILGSLSSCLDKDIVLEALNFMLTDEVRNQDAFYVLGGI

SEQ ID NO: 143631 - protein, 100 aa, Oryza sativa
  Clone ID: PAT_MRT4530_44520C.1.pep
CQPPAPSSGPASLPSPELTLLVPHTPRQPPAAMTSPPPPSLVYPTTCRLLRPRLHLRLSPPSMRRIRLAPPPSARQPRHRHHSDRPPPSDPTALYLGWSP

SEQ ID NO: 143632 - protein, 176 aa, Oryza sativa
  unsure (1)..(176): unsure at all Xaa locations
  Clone ID: PAT_MRT4530_44521C.1.pep
MPQGENGAPTAPTPRHRPAIKEESQPSPRFTSIHVVGLEREKTPGWKLAAGFNTPPHSMTVIAASIKPPCQRVLGRIAVASVLLTAAIASPSPPPTGFTTXRSVAPCSRPLSPAVPRRPPPRIAVRGLRMRRPPAASPRXPSSTASATVASPSPLHPLHAPASFASGRQPPASGSR

SEQ ID NO: 143633 - protein, 365 aa, Oryza sativa
  Clone ID: PAT_MRT4530_44522C.1.pep
MDANGGNGFGVESNASAVHGGMAMAWQWHGGQMSGGSSCAAAPPPVQQPAMDSLAWSSTVSPSTGAATAASGAGFLLPPAAVRGGFGSFPVNSGGIVEPAGDCSSESKKRRSDEIAGTDHANASNALADSGNETECSKDVNGEVIGPPATAAAGGKSKGKGAKDAGEAQKEGYSHVRARKGQATNNHSLAERLRREKISERMKLLQDLVPGCSKVTGKALMLDEIINYVQSLQRQVEFLSMKLSAVNPRIDLDIESLVNNSKDVLRFPGQPSSAPMGFSFSTEMMPGLQLSRPGILQGGVHGMINPDVFTSLMQKQQQNDKGAFREPQMHQTLDGSFRNTAQMPYPQVMSSEELSIRQDQDGFHM

SEQ ID NO: 143634 - protein, 95 aa, Oryza sativa
  Clone ID: PAT_MRT4530_44523C.1.pep
RRLCSPHRRFGQSVDDGASTAASAQSEEGGGDRRPQPPTCFPRCVPPPCSPAPTTAAAFLSCSLYDTSLAIHIYIAECTNTMLPSVTKVCRLDRA

SEQ ID NO: 143635 - protein, 222 aa, Oryza sativa
  Clone ID: PAT_MRT4530_44524C.1.pep
NFSDEDISQIVSTNLAGSLLCTREAMNVMQHQQMGGHVFNMDGAGSGGSSTPLTAVYGSTKCGLRQFQASLLKESRRSKVGVHTASPGMVLTDLLLSGSSLRNKQMFNLICELPETVARTLVPRMRVVKGSGKAINYLTPPRILLALVTAWVRRGRWFDEEGRAVYAAEADRIRNWAESRARFSFTDAMEMYTENTWVSVFSLSVVCAFIILSSSGGPLPGT

SEQ ID NO: 143636 - protein, 158 aa, Oryza sativa
  unsure (1)..(158): unsure at all Xaa locations
  Clone ID: PAT_MRT4530_44525C.1.pep
QWRGFNTRWKDWIALMLSTTSSRXMLNGTAGQXNTHRRGLCQGDPLSPYIFILAXDPLQRLLNMATYQNILSPITSIVVKFRISLYADGVAIFLNPCRVDVNNLITMLQDFWQATGLQVNQSKSSVVAIRCESIDLQEVLNSFNGQRASFPITYLGCV

SEQ ID NO: 143637 - protein, 119 aa, Oryza sativa
  Clone ID: PAT_MRT4530_44526C.1.pep
MAQKYFWYIMVTEFIRKRMDIPFLLHEHGCDHVEDFPQTVKKDWPKNAQSVASALKACRKGFWESDGRNGMMTCFREQLERMARAEDAATANTSEDPGPSETATDCEGEGNEGRDHPEV

SEQ ID NO: 143638 - protein, 419 aa, Oryza sativa
  Clone ID: PAT_MRT4530_44527C.1.pep
MDDDGGASPSSSLSPSRSPSPLPVADPVTVAAAPPGHLALAIPIPKPGSSSGGGGGGGGREDAWSDGATSTLIDAWGERFVALGRGSLRHPQWQEVAEVVSSRDGYSKQPKSDVQCKNRIDTLKKKYKVEKAKPDSSWPYFHRLDTLLAPVHKPAGAYPAAAAAGAAGAGNSGSNSAAAATAARSTAPMAPRVNFPQRTRTQFLPSSGVKRRMPSPPQVSASSESSDGFPPEPPMAAANGKRRREVEEEVNGADSGHRTQGLRELAQAIRRFGEVYERVELAKREQELRMERDRLEAARELEDQRVQFFLKMQMELSKANNAGASAAAAAVGAVATAIAAADGNGTRRTAMATDVGTSSNHHVRYRFQDSRHCHAAPQQPQHQYNENNAAEAARGTGNGSDTDNKEDEDEAEDEEDESQ

SEQ ID NO: 143639 - protein, 435 aa, Oryza sativa
  Clone ID: PAT_MRT4530_44528C.1.pep
MREILHIQGGQCGNKIGAKFWEVICDEHGIDHTGKYSGDSDLQLVRINVYYNNEASGGRYVPRAVLMDLEPGTSDSVRSGPYGQIFRPDNFVFGQSGAGNNWAKGHYTEGAELIDSVLDVVRKEAENCDCLQGFQVCHSLGGGTGSGMGTLLISKIREEYPDRMMLTFSVFPSPKVYDTVVEPYNATLCHQLVENADECMVRDNEALYDMCFRTLKLATPTFGDLNHLISATMSGVTCCLRFPGQLNSDLRKLAVNLIPFPRLHFFMVGFAPLTSRGSQQYRALTVPELTQQMWDAKNMMCAADPRHGRYLTASAMFRGKMSTKEVDEQMLNVQNKNSSYFVEWIPNNVKSSVCDIPPIGLKMASTFIGNSTSIQEMWKAFLHWYTGEGMDEMEFTEAESNMNDPGLVAEYQQYQDATAEEEDYEEEEEDEEVAA

SEQ ID NO: 143640 - protein, 67 aa, Oryza sativa
  Clone ID: PAT_MRT4530_44529C.1.pep
LHQHEGVISCGMQMHVYITTDHCSLVPHSIYLLHPSHNIRILNFEGIDVRRRGYICMKILRINDANY

SEQ ID NO: 143641 - protein, 189 aa, Oryza sativa
  Clone ID: PAT_MRT4530_4452C.1.pep
MGNEEDDDDEDGDGGVEDDGEDVGCGGHGGEAERGEDAAVVGGAEEVAERRGAPRALSPPPLCPLSRRLHREREREREGGSCAERPPPYPPPLVLCYLLGAARRRRVLPALHLSAMTAAASVLVLVLHSAIAILVVLLLIPRHRARHPRRSPPHLLSSAPPAAAASSPALRHCPHAATASSPARHRQPV

SEQ ID NO: 143642 - protein, 208 aa, Oryza sativa
  unsure (1)..(208): unsure at all Xaa locations
  Clone ID: PAT_MRT4530_44530C.1.pep
RQMTENSRWMSNLDLMIGKEYITLRDNSKGKVVSRGSIRVNERFVLKDVALVCNLHFNLLSVLQPLENGHEVCFKKALSRVLDYGXDLICRILPFNRVFQADFSISSRLSWWLVTXWHRKLGQLSFDLLARLSSMGLIQRLPKLRFEKDLVCAPXFRHGKLVAASHHPVTKAMTMHPGELLHVDKIGRARISSVGTKWYVATARDDAG

SEQ ID NO: 143643 - protein, 254 aa, Oryza sativa
  Clone ID: PAT_MRT4530_44531C.1.pep
CWKRRALSTKSFTQHSKTRALIKRNQSATYAAHNHIPKVQNAAPNQIRKFRRGQRQKKKRTKIPARRRPSIPWSQRFRISAEITTALLFLHQTKPEPLVHCDLDLKPANILLDRNIPPPAVTSLPPIPIIPASPPAPTCPRRPAPPTVGRTAMRAVRCLPRTAVRHAMLRRLGPLHGHAALGLLHLGHRQHCLLREPRFLQSPPILVVPAIDGQKARPTRPGPGTAHQPSGQHSPIGTSCRAVPAHGLCLPPRH

SEQ ID NO: 143644 - protein, 446 aa, Oryza sativa
  Clone ID: PAT_MRT4530_44532C.1.pep
MREILHIQGGQCGNQIGAKFWEVICDEHGIDHTGKYSGDSDLQLERINVYYNEASGGRYVPRAVLMDLEPGTMDSVRSGPYGQIFRPDNFVFGQSGAGNNWAKGHYTEGAELIDSVLDVVRKEAENCDCLQGFQVCHSLGGGTGSGMGTLLISKIREEYPDRMMLTFSVFPSPKVSDTVVEPYNATLSVHQLVENADECMVLDNEALYDICFRTLKLATPTFGDLNHLISATMSGVTCCLRFPGQLNSDLRKLAVNLIPFPRLHFFMVGFAPLTSRGSQQYRALTVPELTQQMWDAKNMMCAADPRHGRYLTASAMFRGKMSTKEVDEQMLNVQNKNSSYFVEWIPNNVKSSVCDIPPIGLKMASTFIGNSTSIQEMFRRVSEQFTAMFRRKAFLHWYTGEGMDEMEFTEAESNMNDLVAEYQQYQDATAEEEDYEEEEEDEEVAA

SEQ ID NO: 143645 - protein, 85 aa, Oryza sativa
  Clone ID: PAT_MRT4530_44533C.1.pep
FFAGKIDLIYNGDGCFLYKGADTKGRGFFPKQGDNYIEPPRLKVNLNNLICSTQVIIMITIPTPSIICYSLTGNFSSEQTAGSNS

SEQ ID NO: 143646 - protein, 1386 aa, Oryza sativa
  Clone ID: PAT_MRT4530_44534C.1.pep
MPMLRVVAAAAAMLSLAASSAPATWTHHRDATSHSSFVRLQRSLARSRRVDLVHRALLQRPSSRLSSRAASCTHSPPSSASPRPTPSSTPLMAFQLSRFLNVAKYPFSRQCHGMFELAKTEHDKNRAICTNATNRGVEMKISLLAKRRRSTHAARELPALNPSPSLVPSPSSPYPPAAAAAAASSPETLAPFAAVAASPETLAPFAAGVAASGAEAMEDVCEGKDFSFPAEEERVLKLWSELDAFHEQLRRTKGGEEFIFYDGPPFATGLPHYGHILAGTIKDVVTRHQSMRGRHVSRRFGWDCHGLPVEFEIDKQLGITNRQQVFDLGIGKYNETCRGIVTKYVAEWEAVVTRTGRWIDFKDDYKTMDINFMESVWWVFSQLWEKDLVYKGFKNLEFICVENGIVLVMPYSTGCKTALSNFEAALDYRTVPDPAIMVSFPIIGDADNAALVAWTTTPWTLPSNLALCVNANLVYVKVKDKSTGAVYVVAESRLGQLPAKAKSSGKKQAPSKGGTAEVVQGGLDTEAYELLAKFPGSSLVGLKYKPLFDFFLELQETAFRVIADNYVTDDSGTGVVHCAPAFGEDDHRVCLAAGIIEASGLVVAVDDDGCFIEKISEFSGRYVKEADRDIINSVKDKGRLVSKGSIEHSYPFCWRSGTPLIYRAVPSWFVKVEKIRDQLLECNKQTYWVPDYVKEKRFHNWLEGARDWAVSRSRFWGTPLPLWISQDGEEIVVMDSIEKLERLSGVKVNDLHRHYVDGITIPSSRGPEYGVLKRVEDVFDCWFESGSMPYAYIHYPFENRELFEKNFPGNFVAEGLDQTRGWFYTLMVLSTALFGKPAFKNLICNGLVLAEDGKKMSKSKKNYPSPVEVIDEYGADALRLYLINSPVVRAESLRFKRSGVFGVVKDVFLPWYNAYRFLVQNAKRLEIEGFSAFSPIDQASLLKSSNVLDHWINSATESLVVPYLVKYIDNLTNIYVRFNRKRLKGRTGEEDCRVSLSTLYHALVTTCVAMAPFTPFFTETLYQNLRKVSTKPEDSIHFCSFPSTTGERDERVEQSVNRMMTIIDLARNIRERHNKALKTPLKEMVIVHPDNEFLEDITGKLKEYVMEEMNVKTVTPCNDPMLYASLRAEPNFSVLGKRLGKDMGKVSNEVKKMTQEQILAFEQSGEISFFGHCLKLDDIKVIRQFKRPANVAENEIDAAGDGDVLVVLDLRADQSLFEAGVAREVVNRIQKLRKTAQLEPTDLVDVYYKPMDDGKNTLVEIVQSQDQYIRDALGNPLIPKMAAPPDAVMICEESHNVQDMSFVIYIARVSPVVTDDLLVHAAGNREHFDALKVYLLSRSISRLKNEFQAGNGKITVDFIEGFPPIDLQLGKHVFLSTGDFYLATRS

SEQ ID NO: 143647 - protein, 85 aa, Oryza sativa
  Clone ID: PAT_MRT4530_44535C.1.pep
LVPTHAQHNHSLTLLPQIRRHCSPPHRRRPPLARAGGHRRGGGGDGEELGGGRGEREGEWERGAVEPERGTVAATSSMAVPPRRH

SEQ ID NO: 143648 - protein, 60 aa, Oryza sativa
  Clone ID: PAT_MRT4530_44536C.1.pep
RKKQHEFDLQREKEAKEKLAKKLYAKTSMMKIDGDVKRKGGKFNVGKIIVHTQFFALYTS

SEQ ID NO: 143649 - protein, 214 aa, Oryza sativa
  Clone ID: PAT_MRT4530_44537C.1.pep
MTDDKVSEIEWSPYCQPVKPHTLFIDSSTLDLVACATSECSTRDFLLLLFAIVLPEIFVKIKRPSPTGYSRFQVRKVRVRAAFPSNLCFLGGERIHTGQVPDEYRGCLVNVLRLVCRVDSSASSLPHFSSRFHAVLFDQGCFPIGCGIKGKKNRCTVHGRVHLDSSSLSPNNLAVPLKPRALIHLDINTYTTYYWEKKEIIGEKEKDSPCRNTI

SEQ ID NO: 143650 - protein, 542 aa, Oryza sativa
  Clone ID: PAT_MRT4530_44538C.1.pep
MADLGKSSSDAASLKNLYTDGAIPPKQTMAREKGGTNPSPALGRMVVVEDFIRCGFLTPPSELLLLTLNFYGISLLHLNPNSIAFLSIFAHLCEAYIGVVPFLDLFLFFYKLHWMEASRVSGCCGFRLRDDMKAKYIPFQSHSSRRQWQPTRRLLSTEAKCPQLPQVLPLTDVIVPLVDHQTSSSLKEKVVEEVAAGSAAAGGSGLKRKGWARTSGAPGSRQKSSGSEDAGRLPSPSKRRIIKRAVGKSSECLSDVGRTASTISAQSGDEVATSATPAAASPRAGTTPSVAESAPSPVVPMAALPPPTPTGPSTWSQMMAESQRLLETASREVVAEMGRVAARATASDGRVAQLMSELDVARDDLQKIREIVAGNEMQRQGLELQMNDIQDHIISIRESLRKSFTNLKSMVAERDHRILYWKTKFEGVELERSVVVVKKDQAIEALRGREVWLNSYLNSCCSAMTELEDVGQQIDNCLKEECRRASRYAGGHILACIGDHRSQMNLEFLRKGFRHSWLSANEIDQLACSFAPLAERVFSSMN

SEQ ID NO: 143651 - protein, 46 aa, Oryza sativa
  Clone ID: PAT_MRT4530_44539C.1.pep
MAIGRWCGADPEPALHSRQSRDDDEDILHYYPLAKTPKSGGDRVSF

SEQ ID NO: 143652 - protein, 47 aa, Oryza sativa
  Clone ID: PAT_MRT4530_4453C.1.pep
WFTCPDKLQLTKLPEETQTQTALGLWCDGFEEASTKAIQVAKWCAPY

SEQ ID NO: 143653 - protein, 166 aa, Oryza sativa
  unsure (1)..(166): unsure at all Xaa locations
  Clone ID: PAT_MRT4530_44540C.1.pep
XPWGWRHIMRFIGACDADGLPAPNTPRVPEESAHRPMPSTFLLAVDPIGTIYSWSDGFECTRYTQPQWCCSLGWLAQRMPVKFVVASGRHTVLCPPPIGLAVTLEWYSCDKTCPWKPWCHTPRLLVISCETTVPXILCINXPHXLEPTSMIQFTLPLGVPKKKKKK

SEQ ID NO: 143654 - protein, 76 aa, Oryza sativa
  unsure (1)..(76): unsure at all Xaa locations
  Clone ID: PAT_MRT4530_44541C.1.pep
VVHFLDFHSNHFPPQTGTIMTISKHRVKPSPIPDSWKLAENFTTAVVLGGXLAKMHVIFFRAAYKSNYFTRLSLLW

SEQ ID NO: 143655 - protein, 63 aa, Oryza sativa
  Clone ID: PAT_MRT4530_44542C.1.pep
FFFFFFLNVFIYGLYTQLLIFLIFNFKFLLFPNAFLYGLYNLLLIFLIFNSEFQFRIIFLYGL

SEQ ID NO: 143656 - protein, 202 aa, Oryza sativa
  Clone ID: PAT_MRT4530_44543C.1.pep
MGAPCTWTIGWREFVRRACDAREEGSDRGIAGGAPHRSMGPKLRGRLAGGSPSLGSPESTTLAEWQGWGGGGGGGALVGRVAHDDVIAGGCIFSIYTDTGKAGQTSEVAADMGGGGLAPAPASARRAVAPWHLPPPAPEVGVDAVVGGAVLVVVAVSPRAVAAGAAAAADALRRAAVDAGGRARRSGGDDEVRRRRRSDTGG

SEQ ID NO: 143657 - protein, 62 aa, Oryza sativa
  Clone ID: PAT_MRT4530_44544C.1.pep
MGKGGRTKEHEAPFFARRLLTRSSTDLLFEHPQLNYELAAGPTEIIEAIKIGHHYDVVMNMK

SEQ ID NO: 143658 - protein, 74 aa, Oryza sativa
  Clone ID: PAT_MRT4530_44545C.1.pep
RGGARGTVRAPCRARARRRRRDAQHYSGSSLTDTTRPRRRRRRVRMRRGGKRGGEVCGRAGEGGQEAKKGREGA

SEQ ID NO: 143659 - protein, 86 aa, Oryza sativa
  Clone ID: PAT_MRT4530_44546C.1.pep
MPHAVAGGGSIAPATPCHRRRRIRRWRHRIRHPHRSASSSAAHPSPPSPSVVTGGGSIAPATHCRHRCRIRRRRHQIRRPRRGRER

SEQ ID NO: 143660 - protein, 67 aa, Oryza sativa
  Clone ID: PAT_MRT4530_44547C.1.pep
MVVWSTTSGEGSAAGGGGATYTRLVSYMLRTGAIESVIWGLESPSTHAGSTLGERMKPSSKPFGKAN

SEQ ID NO: 143661 - protein, 92 aa, Oryza sativa
  unsure (1)..(92): unsure at all Xaa locations
  Clone ID: PAT_MRT4530_44548C.1.pep
MSEEEVNGKIMVTVENLTEEQRQQTEQFVADFQMRCLQCFIMTPEGPTQKTRFPKPIVXQILQDTVDEAVHRALFXVLANTLQNLIKRMDRS

SEQ ID NO: 143662 - protein, 611 aa, Oryza sativa
  Clone ID: PAT_MRT4530_44549C.1.pep
MADVRSPPPPPSRQRRSVGPALDALGSLPLDVLDNILSRLHIHDVVRTSALSRAWRRRWESLPTVDLTRSPGIGASDVDALLLRRTAPARSFRLATRDRSWSPTAFHDWLLRLSRGGGGGGLRDLELTLRYTYINSKLNSCLFSFRELTSLRLHCCGLPHVPTEFAGFPNLKTMYLSVVKVQRHGGRGLATLIAASPVLQEVTLIDVVLIGDGPDEDWVIRASNLRKLTIALGSEYGGRMEDLPRLEECCLFGLNYAKYLTGMARVTKLTFYCNCMLSTEVDVLERLPFLFENLRSLILGVNFCMMSHILAIFCLLRSAPVLEELDVWNWSEGAQEMEANDVFLNAQWINHMFAKLHVVRMKKVYCLNNEMHFIEFILSKARVLRVLSLTLASDSLSSIEEAIIDITEYPRASPDAQVISRGVEPLFFLSDMNGFLDLSAEFPDVEEEETSGLGSLDTVHPRRRQRSNGESVAQLQLLQEQLQELEKEKDQHHKPTVEELKEIIQEGKKNAIKFQNYFESTIQSLSKQHDLSQFRLPPLPEFPSELSSHPVTTRPGDTPVDPADNVAANVPEDSREGHATSGDADVHVRSPIDFVAKCVGNGCAESPEDQI

SEQ ID NO: 143663 - protein, 62 aa, Oryza sativa
  Clone ID: PAT_MRT4530_4454C.1.pep
TLKCWFGLWLTSQLIQEQHCMLQLPSETCMSVKINYWLSLVFTSSPSKSHSYCLIKQALLCI

SEQ ID NO: 143664 - protein, 772 aa, Oryza sativa
  unsure (1)..(772): unsure at all Xaa locations
  Clone ID: PAT_MRT4530_44550C.1.pep
MASPSPPLSSDDDARDANAELDQPSHAISAAAAAAATPAVVPVAGSAIVHVGRSGSSNSGAKACCRPPQPPIKRTTTRSKSRLAIAGAPSASTKAGAPSXPRTPEASSSANGLRLFKSMXDDEPEDDSENFGTKRKLTSVVWKDFKKVKVCGDVKAECLHCHKRLGGKSSNGTSHLHDHLKICTLRKIKMGPKTLAQSSLRFNSVEGGKVSVDTYTFDPAVARRELAAMIILHEYPLSIVDHIGFRRFVSALQPLFKMVTRNTIRKDIMDTYEEEKKRALAYMAGAKSRVGITTDLWTSDNQKRGYMAITAHFIDDSWTLRSIIMRFIYVPAPHTAEVICEHLYEALVEWNLDEKISTLTLDNCTTNDKVISELIKKIGKRKLMLEGKLLHMRCAAHILNLIVRDGLDVIKDSIAKVRESVAFWTATPKRVEKFEEIAKHVKVKMENKLGLDCKTRWNSTYRMLSIALPCARAFDRATRVFLTIFSASKXYTSRPSYCTCLLCSEMCRNYSILQGTRGTCDSTRTPTXHELTLASSNAGLHLVAVPREPVIVPRPQHDPSVLXETSSPRGAPSTPGRSSPRTRLGFIETITGQSSEESATKDGEVKDTLYDLMKEYEVEDDEDNTESSAPPLVNSDLLSSITARVTSRRPAAIRVKSELDRYLEDELVSINTENFKILDWWKVAGTSFPTLRKVARDIFAIPVSTVASESAFSTSGRVLSEHRSRLTPELLEALMCSQDWLRNKYRADNEEAASFWSCLQDIQDRIEGLALV

SEQ ID NO: 143665 - protein, 394 aa, Oryza sativa
  unsure (1)..(394): unsure at all Xaa locations
  Clone ID: PAT_MRT4530_44551C.1.pep
MQGAPSASTKAGAPSAPRTPEASSSANGLRLFKSMGXVNDSEPIQVEDDEPEDDSENFGTKRKLTSVVWKDFKKVKVCGDVKAECLHCHKRLGGKSSNGTSHLHDHLKICTLRKIKMGPKTLAQSSLRMLSIALPCARAFDRAIRVEKLFDCAPSEEEWAFAKEMSVEMIQKFDKYWKDIQGPMGLATILDPRFKIDYLLGFIETITGQSSEECATKVAEVKDTLYDLMKEYEVEDDEDNTESSAPPLLIMKKQQAFGVAFKISKIGLSGDGGSTGINYPHGGGDGERCCPVAFHGDGDGENSPPRRRRWGEDARPGRSGGGAACGKAAVAWRPAQGRRGGGRGGRRRSGVCGGRAREEARWRRRRGKKLSSASTQQSLPASMDDNGGSVLALP

SEQ ID NO: 143666 - protein, 291 aa, Oryza sativa
  Clone ID: PAT_MRT4530_44552C.1.pep
PGINRKKNNVSELEQRIRVLKQEISDLEDSARVALQTLEEPIKDLIPVQRQGINEDDFLNQFSNSLKVKGLDFHERIVKAFHTSLKVQDISALVILAGISGTGKSELPQKYADFIGAPLVMLPVQPRWDSPQDLQGFYNYIEKKYKPTQLMHYLYQYQQDRKMHGRIIMVLLDEMNLARVEYYFSDFLSKLETRRSKPTYLSLDVGSLKLPEKQRDILIPEEFLFIGTMNEDETTQSLSDKVLDRANVLTFGRPNELKLRGRKIKYEKTENYLPWNEFVKWTKEPDPLEST

SEQ ID NO: 143667 - protein, 810 aa, Oryza sativa
  Clone ID: PAT_MRT4530_44553C.1.pep
MASPSPPLSSDDDARDANAELDQPSHAISAAAAAAATPAVVPVAGSAIVHVGRSGSSNSGAKACCRPPQPPIKRTTTRSKSRLAIAGAPSASTKAGAPSAPRTPEASSSANGLRLFKSMGFTTNSTAGTGCGSSSQQESQSLPPQAESVNDSEPIQVEDDEPEDDSENFGTKRKLTSVVWKDFKKVKVCGDVKAECLHCHKRLGGKSSNGTSHLHDHLKICTLRKIKMGPKTLAQSSLRFNSVEGGKVSVDTYTFDPAVARRELAAMIILHEYPLSIVDHIGFRRFVSALQPLFKMVTRNTIRKDIMDTYEEEKKRALAYMAGAKSRVGITTDLWTSDNQKRGYMAITAHFIDDSWTLRSIIMRFIYVPAPHTAEVICEHLYEALVEWNLDEKISTLTLDNCTTNDKVISELIKKIGKRKLMLEGKLLHMRCAAHILNLIVRDGLDVIKDSIAKVRESVAFWTATPKRVEKFEEIAKHVKVKMENKLGLDCKTRWNSTYRMLSIALPCARAFDRATRVEKLFDCAPSEEEWAFASEVVDRLKLFNDITAVFSGTNYVTSNIQLLKICEAKEQIRKWAVCGDSTIEEMSVEMIQKFDKYWKDIKGPMGLATILDPRFKIDYLLGFIETITGQSSEECATKVAEVKDTLYDLMKEYEVEDDEDNTESSAPPLVNSDLLSSITARVTSRRPAAIRVKSELDRYLEDELVSINTENFKILDWWKVAGTSFPTLRKVARDIFAIPVSTVASESAFSTSGRVLSEHRSRLTPELLEALMCSQDWLRNKYRADNEEAASFWSCLQDIQDRIEGLALV

SEQ ID NO: 143668 - protein, 34 aa, Oryza sativa
  Clone ID: PAT_MRT4530_44554C.1.pep
SGANLKCTSRISYAPQLLYTEWQGARRTVSKGGS

SEQ ID NO: 143669 - protein, 197 aa, Oryza sativa
  unsure (1)..(197): unsure at all Xaa locations
  Clone ID: PAT_MRT4530_44555C.1.pep
NCPGECRSWCSPPPTRSAASSSSSSRPPSPPSMSTPTTSPSXPCSPTPSLPPPPPLLLFSPRTPTGKASSSSPSGSSSSSPSSSCCCCSSSYSSSCSCCSSSCCCESSSKPXSSSSSLPRAMTTSHPRSWTRVPSPRPRSRPTAPLSSPPSWTPISPTPGPARTTGGSSTPMTTTTTNSYSWATSSVAKVKCTCPPI

SEQ ID NO: 143670 - protein, 442 aa, Oryza sativa
  unsure (1)..(442): unsure at all Xaa locations
  Clone ID: PAT_MRT4530_44556C.1.pep
MASPSPLLSSDDDARSGSSNSGAKACSRPPQPPIKRTTTRXKSHLAGAPSASTKAGAPSAPRTPEASSSTNGXFTTNSTAGTGCGSSSQQESQSLPPQAESVNDSEPIQVEDDEPEDDSENFGTKRKLTSVVWKDFKKVKVCGDVKTECLHCHKRLGGKSSNGTSHLHDHLKICTLRKIKMGPKTLAQSSLSEEEWAFASEAKEQIRKWAVCGDSTIEEMSVEMIQKFDKYWKDIQGPMGLATILDPRFKIDYLLGFIETITGQSSEECATKVAEVKDTLYDLMEYEVEDDEDNTESSAPPLVNSDLLSSITARVTSRTPAAIRVKSELDRYLEDELVSINTENFKILDWWKVVGTSFPTLRKVARDIFAIPVSTVASESAFSTSGRVLSEHRSRLTSELLEALMCSQDWLQNKYRADNEEAASFWSCLQDIQDQIEGLALV

SEQ ID NO: 143671 - protein, 99 aa, Oryza sativa
  Clone ID: PAT_MRT4530_44557C.1.pep
RVGEESTDQSIRCCRRRGGGRGFYGPVGARVSRKKTDLATVSMKKMDPGSVIEKMVDLSLLHFIVFECFILLCSNVAHDTPCFFDVAVHFVSLLHFIVF

SEQ ID NO: 143672 - protein, 245 aa, Oryza sativa
  unsure (1)..(245): unsure at all Xaa locations
  Clone ID: PAT_MRT4530_44558C.1.pep
PLFLCPHWTRHWSLFAGVPSPRPRSRPTAPLSSPPSWTPISPTPGPARTTGGSSTPMTTTTTNSYSWATSSARCSCCATTATAPATRSSSTLTCIASSTPPTTAATTCGARWTPSATGPSLSLTTASSCPTPPRQGYAPTASTSXPPTMPPCESTITPRSGRRTATRCSTTASSTAWGPVVASPSSTPTTRHGEFLTSRRRLYLWMAIILVMIRFQVTCTAICWSSWVFRPHSDGAISVFRLNRC

SEQ ID NO: 143673 - protein, 31 aa, Oryza sativa
  Clone ID: PAT_MRT4530_44559C.1.pep
VLLPSQHIATSSVQNLSQNISSFSPTSSSKP

SEQ ID NO: 143674 - protein, 185 aa, Oryza sativa
  Clone ID: PAT_MRT4530_4455C.1.pep
MPPPSSLPSTAAAATASAAFLRPSASAHPASASAPPNAAACLRRSPRRRLVAARAAADGGGAETVFFDGGAHYGDLAANLALGLTLLWLPLTLAAVSRAFILRYRFTSRRVSVISGLSGADRTDFPYSSVTSVVVVPRFIGEWGDIVITLKDGTKVDLRSVPRFREVADYCRSMAAAEGSLAAST

SEQ ID NO: 143675 - protein, 69 aa, Oryza sativa
  Clone ID: PAT_MRT4530_44560C.1.pep
RCRDSWRSCPSWGIPSSCLFPPSLDLRQASGFCWSLALGRWCGAVRVRRHGGGNINTTRRRTVLAKVVK

SEQ ID NO: 143676 - protein, 75 aa, Oryza sativa
  Clone ID: PAT_MRT4530_44561C.1.pep
MGEKTETSTLDAVISAKDETEVFKIEYILPGHIEIGVKSSGHIDRLTTLIPIDQAKIDRCLCLRWPPPAKSPEMR

SEQ ID NO: 143677 - protein, 88 aa, Oryza sativa
  Clone ID: PAT_MRT4530_44562C.1.pep
GPVLFNRPLPRTLHLPLCAIPQELLGWYHHSLPLNLAAFGCIKAAVCVASSCVISASGHHKIPCSISFISWIKSTGSIGTSNSSWIPI

SEQ ID NO: 143678 - protein, 279 aa, Oryza sativa
  Clone ID: PAT_MRT4530_44563C.1.pep
RRILNNTAKHLYKTPIPSTRKGTIDRQVKSNPRNNLIHGRHRCGKGRNSRGIITARHRGGGHKRLYRKIDFRRNQKDISGRIVTIEYDPNRNAYICLIHYGDGEKGYILHPRGAIIGDTIVSGTKVPISMGNALPLTDMPLGTAIHNIEITRGRGGQLARAAGAVAKLIAKEGKSATLRLPSGEVRLVSQNCLATVGQVGNVGVNQKSLGRAGSKCWLGKRPVVRGVVMNPVDHPHGGGEGKAPIGRKKPTTPWGYPALGRRTRKRKKYSDSFILRRRK

SEQ ID NO: 143679 - protein, 144 aa, Oryza sativa
  Clone ID: PAT_MRT4530_44564C.1.pep
MQTRNTLTDATYASQGSTTSGLKNVTKPELPYNAPKNLTTTRSIFTCRAPALDVGEKIENGRIRRKSCPPVATIGTKEQRLDGKKKGLPAKVKAVSSSNESTSNNGGRSGEATTMNGTRKTDGKKEHMSKHGKSAEEVNICDFK

SEQ ID NO: 143680 - protein, 161 aa, Oryza sativa
  Clone ID: PAT_MRT4530_44565C.1.pep
LQTERATTRPRGVSSAATSSVGRSTSTSFAARSSLDEVGINFIGGRASPFIPSAWTGIHRPDRAHLQAKVGPCASPSWSDLPIDLLLIILERLELPHALAFAAVCTTWSSAATAAGVPRSRTPWIMSWGNHVDQRLDERRRSAVTCNLYHPDDAVDKIYSV

SEQ ID NO: 143681 - protein, 108 aa, Oryza sativa
  Clone ID: PAT_MRT4530_44566C.1.pep
MTTRIVSILVSLILLEQGDIYGYKYKPPRRRGDTPQSKQQQQINTNRYKPAHAKTSHRISTSEISLDCHVQKFPNRIPSRMCIKIPVQDRPGYTNDNVDIQIHVLQTS

SEQ ID NO: 143682 - protein, 461 aa, Oryza sativa
  Clone ID: PAT_MRT4530_44567C.1.pep
NNWRNPSKRIRFLPAMSPLAGPCASPSWSDLPIDLLLIILERLELPHALAFAAVCTTWSSAATAAGVPRSRTPWIMSWGNHVDKRLDERRRSAVTCNLYHPGDAVDKIYRVSFPKGSFVACYGASHGWLVLANDLSNLVLHNPVTLAMIPLPPITDFACVEAVYGSEGGNLENYLLETNSRFEAYRLGIWFYQKAVLSCSPSRGGDYVVMIIHNNGERLSFAKAGQSRWQVASTLSGGDRYLDCAYHKGRFHAVTLHRMVEKWDLDGASNGPTREVIYAARPYGGLGCILTRHLVSTPWGDLLQVRVILARHYPDGIAFQICKVDPDGCKGVVQGNVLMDHALFLRLNHSACLPTQNLPGIRPHCIYFSAPVIIHAFDWLLGLRVWGGVRTYDVKTGKFERTVPFCDVKEQIYGLFPSEALRPYSSSDFASLRSPATLPAVAQGYQCHFLDGVMRWLLMWR

SEQ ID NO: 143683 - protein, 392 aa, Oryza sativa
  Clone ID: PAT_MRT4530_44568C.1.pep
MESRGKILMERYELGRLLGKGTFGKVHYARNLESNQSVAIKMMDKQQILKVGLSEQIRREITTMRLVAHKNIVQLHEVMATRNKIYFVMEYVKGGELFEKVAKRGKLTEVVAHKYFQQLISAVDYCHSRGVYHRDLKPENLLLDENENLKVSDFGLSALSESKRQDGLLHTTCGTPAYVAPEVISKIGYDGAKSDIWSCGVILFVLVAGYLPFQGPNLMEMYRKIQHGPEENRILKERTLNENTTKNVAPVLGVRRKKNAHEDVKPMSVTNLNAFEIISFSKGFDLSGMFIVKEWRNEARFTSDKSASTIISKLEDVAKALNLRVRKKDNGVVKMQGRKEGRNGVLQFDIEIFEVTTSYHIIEMKQTSGDSLEYRQLLEEGIRPALKDIVLA

SEQ ID NO: 143684 - protein, 435 aa, Oryza sativa
  Clone ID: PAT_MRT4530_44569C.1.pep
GKILMDRYELGKLLGKGTFGKVHYARNLESNQSVAIKMMDKQQVLKVGLSEQIRREITTMRLVAHKNIVQLHEVMATRNKIYFVMEYVKGGELFEKVAKRGKLTEVVAHKYFQQLISAVDYCHSRGVYHRDLKPENLLLDENENLKVSDFGLSALSESKRQDGLLHTTCGTPAYVAPEVISKIGYDGAKSDIWSCGVILFVLVAGYLPFQGPNLMEMYRKIQHGEFRCPGWFSRKLQKLLYKIMDPNPSTRISIQKIKESTWFRKGPEENRILKERTLNENTTKNVALVLGVRRKKNAHEDVKPMSVTNLNAFEIISFSKGFDLSGMFIVKEWRNEARFTSDKSASTIISKLEDVAKALNLRVRKKDNGVVKMQGRKEGRNGVLQFDIEIFEVTTSYHIIEMKQTSGDSLEYRQLLEEGIRPALKDIVLAWHGDE

SEQ ID NO: 143685 - protein, 191 aa, Oryza sativa
  Clone ID: PAT_MRT4530_4456C.1.pep
MARSGGGNGGGEGGGGGGNGGGGGGLKKGPWTQAEDKLLVDHVRRHGEGNWNAVRRETGLQRCGKSCRLRWANHLRPDLRKGPFSPDEERLILRLHGLLGNKWARISSYLHGRTDNEIKNYWNTRLKRRVRAGLTPYPPEIEREIAHLRAQNLNLSAEGGGGGQIIYLVWCAFGGAVGGCGGVGVLGFFGG

SEQ ID NO: 143686 - protein, 217 aa, Oryza sativa
  Clone ID: PAT_MRT4530_44570C.1.pep
MAQCSPVKGTVGQHDGERCRGLPPATGVEGVERMDVERRRHEGSRAVARPSSSPQLIQCRRRSVVPDVDRSAPQAEASGNPGSDIWRSYSGDAIGGPTVGDQKEVLEVFSPKGVFHASRLDPPLSSLEAATATIVAPEATGVIVAPKISSGGAVFPRPRAVDRPLLTLALTAPEPLGPLSSLPNSHSRCHPLAAVTAAFTTSGAPNTAAAFTTSQSA

SEQ ID NO: 143687 - protein, 69 aa, Oryza sativa
  Clone ID: PAT_MRT4530_44571C.1.pep
PHFIHAFTSSCDIMRLTWMPGAVQAMCTPSQPTGTVFQHQHSHPPTSFNHITTHLSLQLILGSSWPATL

SEQ ID NO: 143688 - protein, 85 aa, Oryza sativa
  Clone ID: PAT_MRT4530_44572C.1.pep
GKWQENFVSSQGRQGGGRSGYSGRGGGSGRGGGGYQRDRGSQGSRGGYGGGSRFQDGGRSRTGSMAKGGGDGGARMVSLNRAGRG

SEQ ID NO: 143689 - protein, 86 aa, Oryza sativa
  Clone ID: PAT_MRT4530_44573C.1.pep
GTRICPMKMDEDVYIFRPLRFNTLPVVKIAAEPLNPSELPKMVEGLRKISKSYPLAVTKVEESGEHTILGTGELYLDSIMKDLREL

SEQ ID NO: 143690 - protein, 109 aa, Oryza sativa
  unsure (1)..(109): unsure at all Xaa locations
  Clone ID: PAT_MRT4530_44574C.1.pep
MATSIELTNEHSYVYAGLVLYPFLYSWMSFQVSXDRRKDKVMYTTMYATMYANKDAKMFNWLQNWHQNSLEMMPVIMPTLLVTLLEHPLDDPVLGVLLRRGVGLLQEGL

SEQ ID NO: 143691 - protein, 42 aa, Oryza sativa
  Clone ID: PAT_MRT4530_44575C.1.pep
LPPSSAARHHALTSSGTAEGDGTELADDVLPFPPEGFCSIKY

SEQ ID NO: 143692 - protein, 309 aa, Oryza sativa
  Clone ID: PAT_MRT4530_44576C.1.pep
MRLCWLLFLVAAMATLHLALGVPPSARDLRHCPTSCGDVNITYPFGIGTGCFRPGFELICNTTTKPPKLFFGNTTEISYQYPYGYVRASVVFNIATTPGLLGTYSRSWQAPGRVLSTYTTNSLVIVGCGIDVYLFRSHTNILQGYCRSECTNMALMDKKLSGRPCNGIGCCTIDLPGGVRAFRFNITQREETHSVALGNSTIKAFLSDSQFYFNTADLLSEKINANTIGATSLFFSVAITDQLNCSTAQLGLNKTDYACSDGSTCVDQRNQRGYSCTCPADSFDYDNPYLLHGCKQGIPIQFIATENKE

SEQ ID NO: 143693 - protein, 104 aa, Oryza sativa
  Clone ID: PAT_MRT4530_44577C.1.pep
MVVSCQLKPAPAPAAASKGGGAPHLQQLRRACVAAAAACACPPWRANSLENIVPENLPRQSARRRFNSITAAAAAESAPPPASASPDAVLPFLAPRSGMGCFSL

SEQ ID NO: 143694 - protein, 140 aa, Oryza sativa
  unsure (1)..(140): unsure at all Xaa locations
  Clone ID: PAT_MRT4530_44578C.1.pep
MVVSCQLKPAPAPAAASRGGGAPHLQQLRRACVAAAAACAVLGTAGGPGEGAVMARAPEATAAAAAGPARWSDRRQCPPWRANSLENIVPENLPRPSARRRFNSIXXXXAAESAPPPASASPDAVLPFFAPRSGMGCFFL

SEQ ID NO: 143695 - protein, 33 aa, Oryza sativa
  Clone ID: PAT_MRT4530_44579C.1.pep
ALNVDSLIDLRWVRCAYVNCFKKLSYFRVENIS

SEQ ID NO: 143696 - protein, 77 aa, Oryza sativa
  Clone ID: PAT_MRT4530_4457C.1.pep
QNTSVIPYVNYARQLTTPPLVNTKSYTVQLPTALHQENITASCSYIFTFYNTMRTALLVHNNQKMGEANPRWRSPHP

SEQ ID NO: 143697 - protein, 187 aa, Oryza sativa
  Clone ID: PAT_MRT4530_44580C.1.pep
YWRVSLSASPVVRPPRADKLPRRRPPSHVPLSATIWPPRANELPHHAPRGHCRAPTRPPMLPPCAGAVTAAPIAGRRLQSSRRRHGRPCSNRTPTPSPPLPPRVNPFAAHAVSPAPHHRRGRLCSHYALPSRSHRGLSPPPLLPPRVAAVAAAGGPPALVASPLCSRRAAGGPPRRAAAVEPSCPPS

SEQ ID NO: 143698 - protein, 110 aa, Oryza sativa
  Clone ID: PAT_MRT4530_44582C.1.pep
HPFCWPLYLATTVSSVPQCPNSRSAISGIISSRSVILVPNIERSCILFHCNSLFHDFIHIVLSRLYHFMRIPPGITVSYFMFLSSIIHAPFDPKEIALLSITYSFFADAW

SEQ ID NO: 143699 - protein, 94 aa, Oryza sativa
  Clone ID: PAT_MRT4530_44583C.1.pep
MGRRMQQERETKHFAWLSDSDRHKGREERLNDRDVSRSLDHTRRIQVATGATMAANVGHGIDLRVPMAVGLVKRRTMAVKFIPHSLLDLSRTIY

SEQ ID NO: 143700 - protein, 130 aa, Oryza sativa
  Clone ID: PAT_MRT4530_44584C.1.pep
MADGAGRDRYGLGPGKRRKTDGFTGVVKRQGRRLARLLLCVLGAGTERRKQGLGREGKGRNGGGERELAPCRFGEGERWEREALPPVFGQMQAAWLGHARWLAGQGAAEQRLGGAGVARAATARARVRGN

SEQ ID NO: 143701 - protein, 134 aa, Oryza sativa
  unsure (1)..(134): unsure at all Xaa locations
  Clone ID: PAT_MRT4530_44585C.1.pep
TAAAPAGLPPPSSGQICEGGREGRCRRLPXPPRAGGGGGVGEVELAKGGALEVEARVGGAEDEVDDERDDADEDGKDDEDAPRRRRRRRPAXGPRRRRPDFSRASSPLPPSHPSAAKFSPLPPTRRWWHSSKRW

SEQ ID NO: 143702 - protein, 55 aa, Oryza sativa
  unsure (1)..(55): unsure at all Xaa locations
  Clone ID: PAT_MRT4530_44586C.1.pep
MVSKKTSIXXAAXXAGXXGAXETXLLPXRYAGAGTATAAAXVLXGAVFXVXTSVV

SEQ ID NO: 143703 - protein, 91 aa, Oryza sativa
  Clone ID: PAT_MRT4530_44587C.1.pep
QCSCPDSNSAAPPARPVVRPGCLSVPTHIIASTGSPVCSYCVRNSVLRWAQLALLEQSRYGNLIRPNGATSTITLSRGVAYSDMQQDRGPK

SEQ ID NO: 143704 - protein, 40 aa, Oryza sativa
  Clone ID: PAT_MRT4530_44588C.1.pep
YTTGPVCQPGLVYQMYPLSVCRTLVKRQCVGRMTSPSASS

SEQ ID NO: 143705 - protein, 143 aa, Oryza sativa
  unsure (1)..(143): unsure at all Xaa locations
  Clone ID: PAT_MRT4530_44589C.1.pep
MKIIFVFALLAIVAXXLTVYFDVLGXNIMQYQMKXSLLLHQQMLSPYNVFVRQCYIIVENTFLQSAXVHLDKRPIPCMSSILLAYQSHYQNFNXVHDITNQLXLQNDVFLYIEPKXLTQSSXLLPLNLPSTYVIYPWIYMASL

SEQ ID NO: 143706 - protein, 104 aa, Oryza sativa
  Clone ID: PAT_MRT4530_4458C.1.pep
DHQRAARAAFSLGLLLGPLGPISAPQLAKWKYKVTGHGTCATRIGQDTAPLTPCPVSALHRHHTPREMPEAVSPRRRALAVHTLLSQALRDVTPECLCPHTPGC

SEQ ID NO: 143707 - protein, 229 aa, Oryza sativa
  unsure (1)..(229): unsure at all Xaa locations
  Clone ID: PAT_MRT4530_44590C.1.pep
HASADAWELVSYIKNDSSVIPRIGALREMNLEFFAIDMQGFTTDHDMAFTDLYSAQHNSKKFNDTISTMATRIATTFASLKEFPCVRYRAPKGTDPMTTPKFDMVPKWLATAVWDIVSKYKSTIPEFPQKETCELLIVDRPIDQIAPVIHEWTYDAMCHDLLEMDGQKYIYGGVESRDQNLRERRLYWEDHDPXWVELRHIHIADASEXRLYDKMNNFVSKNKAAQLHS

SEQ ID NO: 143708 - protein, 89 aa, Oryza sativa
  Clone ID: PAT_MRT4530_44591C.1.pep
MANFLDYDAYDLERGGQAEVAAVGRSGGLGEAAASSEARLHHALVVLLLVVAFCQACRRIIIELLDMRIFGSTYSVFPFRNPIYSLYEI

SEQ ID NO: 143709 - protein, 656 aa, Oryza sativa
  unsure (1)..(656): unsure at all Xaa locations
  Clone ID: PAT_MRT4530_44592C.1.pep
MSMSGSDFGAPCDDPKIFRNICRDRILKDLLQPDKDKETKSSWKVLIMDKFTVRIMAYACKMAEITDAGISLVEDLFKRREPMPSMDAIYFLQPLKENVIMLLSDMSGRCPLYRKAYIFFSSPIPKELVSYIKNDSSVIPRIGALREMNLEFFAIDMQGFTTDHDMAFTDLYSAQHNSKKFNDTISTMATRIATTFASLKEFPCVRYRAPXAXDPMTTPKFDMVPKWLATAVWDIVSKYKSTIPEFPQKETCELVRVDRPIDQCRSILKKFSIFPTAYNNFRMSAKIAPVIHEWTYDAMCHDLLEMDGQKYIYEVSKAGSEPERKEALLEDHDPLWVELRHIHIADASERLYDKMNNFVSKNKAAQLHSRDGGEISTKDLQKIVQALPQYGEQVEKLTLHIEIAGKINKFIREYGLRDIGQVEQDLVFGDAAAKEVISILRSKQDMSPENKLRLLIIYAIVYPEKFEGDKGEKLMQLAKLPHDEMDAINSLRYLVGSDTKKASRPGGFSLKFDAQKELIEKLSKGALPLNEYPSMSEPSSTEQGSTQSAAATKPAQAQPMSRRSRRTPTWAKSRNSDDSQSSDSSVLRHGSNDFKRLGNRIFVFMIGGATRSELRTVHKLTMKLKREIVLGSSSIDDPPQFISKLKMLTAGGANDV

SEQ ID NO: 143710 - protein, 245 aa, Oryza sativa
  unsure (1)..(245): unsure at all Xaa locations
  Clone ID: PAT_MRT4530_44593C.1.pep
HILYFTFAFSLSSRFVHLRSFVHFTFRSRTFVRLRTFTYNVKFMFVHVHVRFTFVHVHVRSFVHVRFVRSRSFTFSFTFVRSFTFTYVSSVHDRXFVRSRGGSGAAAWRRGCGLARRRRGAAAAWRRGIGVARRRTXEHDSAAPTMPNPTLMRPPPATTLAAASLTPEMRRRRRRRRRRRRRARDNGXIRRRRRRGDVLGSGGEGEAERDXIGEKLLSVGGEDEGAHQXIYTPRSLVPVDENNRE

SEQ ID NO: 143711 - protein, 116 aa, Oryza sativa
  Clone ID: PAT_MRT4530_44594C.1.pep
MRVLYFARGVGLGGSSSGGRRRRWGTGLPAAAHGVLGAGGGRAWGYRRRHTTRAQVESGDTTTHKSRAAGGTRVPVEHGMEFCPIDLAGVGRVRARGSRAGHGFALPVSDPARCHP

SEQ ID NO: 143712 - protein, 127 aa, Oryza sativa
  Clone ID: PAT_MRT4530_44595C.1.pep
MGGVVLSDVEASMMEQGKAAVAAMTKTTTQPSQHVRAMPGDPTVDERERFEAMDVIFKLVLTLFVTGVSFGGAVALIVVAFLNADERFRGTKLLERKRGAPSSGPSIDDHERAWQSHRALKLQHEQL

SEQ ID NO: 143713 - protein, 66 aa, Oryza sativa
  Clone ID: PAT_MRT4530_44596C.1.pep
AKKAQRCKKRPPKIPAPISPCFRVKKGNPGIIGQCGPLSKPVGFNVLKVIPAGSKSGAGKKVFPPP

SEQ ID NO: 143714 - protein, 101 aa, Oryza sativa
  Clone ID: PAT_MRT4530_44597C.1.pep
EFGGKFLGGSKGRFPFLKTQPQLPELNWPLPFFGNSGTKVRILGAFHYGHNFFHFLKRNRKINLRFQIRARAFLFSRIKAKTIIFNFFPPGGLPGGQPFYG

SEQ ID NO: 143715 - protein, 72 aa, Oryza sativa
  Clone ID: PAT_MRT4530_44598C.1.pep
TAYVSPCGPCWPRTSALCSSGLSGRGSCTRRSPVVSAGVRHGSLTGAATPWESPPRPLSERRSLSKNNCIYM

SEQ ID NO: 143716 - protein, 120 aa, Oryza sativa
  unsure (1)..(120): unsure at all Xaa locations
  Clone ID: PAT_MRT4530_44599C.1.pep
GGPSIHIYLARGNYSSPLGRAGPQAGPPRGAPERRRKRIIAGRGIGRRGGGHPHRFPSGCGLEALLVXGFFGPPSWNSERGPPLQPRVLVFNFPGFPPDPSVMVLMEQVINPFNFPCFGF

SEQ ID NO: 143717 - protein, 558 aa, Oryza sativa
  Clone ID: PAT_MRT4530_4459C.1.pep
MAETRRWELAAHRRLEKGKVVGVVVLDGWGEAAPDTFNCIHVADTPTLDALKKGGPERWRVIKAHGTAVGLPTDDDMGNSEVGHNALGAGQIYAQGAKLVDMALASGKIYEGEGFKYIQQSFENGTLHLIGLLSDGGVHSRIDQLQLLLKGASEHGAKRIRVHILTDGRDVLDGSSVKFVELIENDLAKLRDKGVDARIASGGGRMYVTMDRYENDWQVVKRGWDAQVLGEAPHKFQNALEAVKKLREDPKANDQYLPPFVIVDERGRPIGPIMDGDAVVTFNFRADRMVMLAKALEYESFDKFDRVRFPKIRYAGMLQYDGELKLPSHFLVAPPEIERTSGEYLARNGIRTYACSETVKFGHVTFFWNGNRSGYFHPNLEKYEEIPSDIGIPFNEQPKMKAVEIAKKTRDAILSRKFDQVRVNIANGDMVGHTGDIEATIVGCKAADEAVKIVLDAIEQVGGIFVVTADHGNAEDMVKRDKSGKPLRDKDGNVQPLTSHTLNPVPIAIGGPGLQPGVRFRSDLPSAGLANVAATVMNLHGFEAPDHYEPTLIEVVDK

SEQ ID NO: 143718 - protein, 378 aa, Oryza sativa
  unsure (1)..(378): unsure at all Xaa locations
  Clone ID: PAT_MRT4530_445C.1.pep
MSSSVSSVRLPLRAAPPLYGRREWRADGARAPSPALVAVKPLSCRAPASYRSALLLHRRRRYALPPVPATPTSKPVRLLATDQSAPVARRPCRRRCPPCASRCGRLLPSTAAASGGPMGPGRRLFAVPWLGMLTGLLGNLSLLSYFAKKKETGAVIVQTLGVISTYVVIAQLAMAESMPLPQFVATSAVVAAGLLLNFLNYFGWLPGTLWLLWEDFITIGGLAVLPQVMWSTFVPFIPNSLLPGIISGSLAATAVVMARMGKLSKGGINFVGSLSGWTATLLFMWMPVAQMWTNYLNPSNIKGLSAFTMLLAMIGNGLMIPRAVFIRDLMWFTGSAWASFLQGWGNLACMYWIXLWRDTIAHGNSSPVTSLKELLFGK

SEQ ID NO: 143719 - protein, 57 aa, Oryza sativa
  Clone ID: PAT_MRT4530_44600C.1.pep
TGRAFVLFLGSRIHSPSVETVTMGCYKSLPATVPLLHLHLRRNTHILNTKLAYYHSN

SEQ ID NO: 143720 - protein, 124 aa, Oryza sativa
  unsure (1)..(124): unsure at all Xaa locations
  Clone ID: PAT_MRT4530_44601C.1.pep
SRATAGGRRAARRRRRICASAPPPPVSRAAFDPPVPAPAAVVPPAAPTXSVPFSPEEESRRWRVSPKKEARRRPRPRPLPSPPPHSWPPPFTPRQCAPSTSNFSRRCHGRPLSVPPQPTPPRAA

SEQ ID NO: 143721 - protein, 278 aa, Oryza sativa
  unsure (1)..(278): unsure at all Xaa locations
  Clone ID: PAT_MRT4530_44602C.1.pep
MVYCVSRGEGARGPCPREWWAPRGSPSVHGGPGAPEGSPAGAVGSTRXPHPRAWAADGRAPRNGHTLCPEAATSARPAGGVARAPMVAGGGYRRGEAAAERGDGKGEXRRGSTAHLGATPATEEATRVEKGGGAARVDGVGGVPAVGDXNGGVDEVGEDAAMPEETTLRRGTVXGERLGXPEVDGNGGERGRRCGCESDEGGGRRDLRXGGARRGQSGGSSGRRGMIGGPHPSARVAGGPARQQCARGEGXRPSGPRGEXEKGRELGQIWPKRERRGF

SEQ ID NO: 143722 - protein, 159 aa, Oryza sativa
  Clone ID: PAT_MRT4530_44603C.1.pep
IGKLISLTDGKIRTAIDTGCGVASWGAYLLKRNILAMSFAPRDTHEAQVQFALERGVPAIIGVMGKQRLPYPSRSFDMAHCSRCLIPWHEFDGIYLAEVDRILKARGYWILSGPPINWKTHYKGWERTKEDLKEEQDNIEDVARSLCWNKVCEKGDLFI

SEQ ID NO: 143723 - protein, 300 aa, Oryza sativa
  Clone ID: PAT_MRT4530_44604C.1.pep
MRELSCFGDSSVGIAAAAAGDSGGGGGGALDRSLEAATTTVYGASLHSGKELLIRVTWTRSAAGATGLAVAFDDALSPSSRCAHHVLHKKRGSRSLATAAGTAVGVHWDTAEATYASGSSPEPTGDYYLAVVADAELALLLGEGGAARDLSRRFGDDGGGAVVLSRREQLRGAATAHTTRCRFREGGAEHEVAVHATRGGGGGGEGEVRVSIDGKRVAEVRRVGWGFRGNRAAVLADGEVVDVMWDVHDWWFGRGGGGGGAGAGAQFMVRARAEKEGRLWMADQPPARGGFFLHVQCYRR

SEQ ID NO: 143724 - protein, 98 aa, Oryza sativa
  Clone ID: PAT_MRT4530_44605C.1.pep
QCLLDTWTPSYYKLKNLSSAVCSMRETGAGTYARFAFLPLANKLMYHPTMPNLTPKTIHNFSFDIERISERRKKTSDQMISSVMLHRNGKTPMPSSQL

SEQ ID NO: 143725 - protein, 702 aa, Oryza sativa
  Clone ID: PAT_MRT4530_44606C.1.pep
MAKEYPASPKAQQLQESKKQRLTYILVVSALCVAFYVLGAWQNTTVPKPAASSAITKVGCDPAAAGQSSAVPSFGSASQESLDFEAHHQLSLDDTGAEAAVQPFPACPLNFSEYTPCEDRKRGRRFERAMLVYRERHCPGKDEEIRCLIPAPPKYRTPFKWPQSRDFAWFNNIPHKELSIEKAVQNWIQVDGQRFRFPGGGTMFPRGADAYIDDIGKLISLTDGKIRTAIDTGCGVRGEDQKKHLASGFLMSWQCAHAFASSLQVASWGAYLLKRNILAMSFAPRDTHEAQVQFALERGVPAIIGVMGKQRLPYPSRSFDMAHCSRCLIPWHEFGEHFNTFELVSMYLAPSFQAILRSKYCSLIELDVLNFLLDGIYLAEVDRILRPGGYWILSGPPINWKTHYKGWERTKEDLKEEQDNIEDVARSLCWNKVVEKGDLSIWQKPKNHLECANIKKKYKTPHICKSDNPDAAWYKQMEACVTPLPEVSNQGEIAGGALERWPQRAFAVPPRVKRGMIPGIDASKFEEDKKLWEKRVAYYKRTLPIADGRYRNVMDMNANLGGFAASLVKYPVWVMNVVPVNSDRDTLGAIYERGFIGTYQDWCEAFSTYPRTYDLLHADNLFSIYQDRCDITNILLEMDRILRPEGTAIIRDTVDVLTKVQAIAKRMRWESRILDHEDGPFNPEKVLVAVKTYWTADESEQH

SEQ ID NO: 143726 - protein, 211 aa, Oryza sativa
  Clone ID: PAT_MRT4530_44607C.1.pep
MGRSAPPSAPAAAAAPARGGRKRKRHLVTTSPAAQVGGWASLPTDLTRLVAGRVLAGDVVDYIAFRAVCSGWRACAPSPRDPTLRKHLLRPRAWVALCDGDAARPDDACEITFFHTRTARSLRVRLPELRCHRIVGFTDGLIILLHKRTTAVRVLNPFTGVAVDLPPLAPVFHQVVKNRNSLLYMLHQRHVSDDPHCRHRLVPLHGWSARL

SEQ ID NO: 143727 - protein, 159 aa, Oryza sativa
  unsure (1)..(159): unsure at all Xaa locations
  Clone ID: PAT_MRT4530_44608C.1.pep
SFTWCRPRSSTSRPTSSCRWCSGSPARGRRPRATAARRRRRRRRGRRAGGRRRCASRRXPEPARRRXPCPSSSSPLRRRRRRPGRRRRRRRGSCSTTSARSAAPRSRARPPPPRRSSPPAPAGFSTSATTSSAPSARRGRSARRPPSSTSSGRCRRSTN

SEQ ID NO: 143728 - protein, 66 aa, Oryza sativa
  Clone ID: PAT_MRT4530_44609C.1.pep
MEKQVTRMSSSVSVEKTVAGVVVGHVQTKNPSYKGLFLWGLDFIKTFFHDLELPLPNIDSLGSVLH

SEQ ID NO: 143729 - protein, 228 aa, Oryza sativa
  Clone ID: PAT_MRT4530_4460C.1.pep
MRAPRAAAQGGRDAAGGSAQLKPAGHGAVAAARGHQRIARQRRSARRRRRTAGAAARPTAAAHVGRERKGGGGSPHRRKRWRPARENEVGGDDRRCRGTDRRRRHARRRRRGVRRGDDDHGSLKRRPKMGRTARLTGVRGDRRSGGMPATRGGSRESSCGGEANGGGPSSDGARPEMGGGGGARRARRGGGRGRGWKRRGRKTRRGLGGAIYGRGRGRNGQGGPLLRR

SEQ ID NO: 143730 - protein, 76 aa, Oryza sativa
  unsure (1)..(76): unsure at all Xaa locations
  Clone ID: PAT_MRT4530_44610C.1.pep
QQCCQQLRLVAQQSXCEAISXGQAIVQPLLLQMVRGSHLDQNRERAQALMAXLNLPSICGIYPNYYIGRRSMPTSG

SEQ ID NO: 143731 - protein, 45 aa, Oryza sativa
  Clone ID: PAT_MRT4530_44611C.1.pep
FLKFLIKKKKKKKKKKKKKKKKKKKKKKKKKKKKKKKKKKKKKHK

SEQ ID NO: 143732 - protein, 786 aa, Oryza sativa
  Clone ID: PAT_MRT4530_44612C.1.pep
MARELELMASWSDGMGRHSYPTRILVDSSEQKCDASEKGAWTSSSIRAPLQGCGSFRGDVNIRFQSQYKFGPFFTPVRRKLFNRFNLQRISLWKNHNFRLVDQVSFFAVFPLQIFMSSFEAVAAAVVFSIEICTLEVSNSLQIRSPALSIKMSVRRRSESMEGLFSFDERKDRRSDVENSEDERRRLSIGSLKKKALNASNKLTHSLKKRGKRKVENRPSFTIEDVRDEEEERAVFSFQQELFSRNLLPDKHNDYHMLLRFLKARKFDTEKAIQMWAEMLQWRKEFGADTILEDFNFEELDEVLVYYPQGYHGVDRQGRPVYIERLGKVEPNKLMHITTVDRYMKYHVQEFERAFHEKFPACSIAAKRHIDSTTTILDVDGVGLKNFSKTARDMLGRMQKIDSDYYPEMFVVNAGNGFKLLWNTVKGFLDPKTASKIHVLGTKFHGKLLEVIDASQLPEFLGGACTCAAEGGCLKSNKGPWNDPNIMKLAHNKEAKFTRHTRRLSEIEQRRGSFARLHLLKGRSSDTSTVESGSDVDDLSSPMMRRPVECSRLAPVREEMQIRARDSAAYYSCDDHFVVVDKTVDYGRGGAMPDKTSAPEVRAQARPFGGSTTSYATGSSSNRGGISSSNRSRTVVPKENTDEGFFRRFFRLLLALIIKVFAFFHIAYGQQEMRVDNPLPPAEPEPTSDDHPAVETFSVDRISPVIERLQRLEGKVDELGNKPPEIPLEKERSLLESWDRIKCIESDLERTKKVLQATVMKQLEIAESIEEVIRRQLRLPVATSLL

SEQ ID NO: 143733 - protein, 680 aa, Oryza sativa
  Clone ID: PAT_MRT4530_44613C.1.pep
MAGNPAAAAPSSSGSSSVFLPPPSPSDGELLRPLHRLARDLSAVDTPAPFLRAAFASISRRSKLLAAAFDDLLLCGAAGELPRSASLCLREVLLVLQRFKAIVADCSARSRMRLLLESDEMEAELRELNHDLATLLDLLPVVELGLADDVLDVLALASRQCRRCSPAPESEEALKASVLSLIQEIEREIVPERERLEEILVEVGINDPASCSEEIESLEQEIGDRASEKWTASMIALVGLLRYAKCVLFSATPRPSDSNSKADVEAEDGEPPVPPSDFRCPISLDLMRDPVVVASGQTYDRESIDRWFSSGKSTCPKTGQVLANLELVSNKALKNLISKWCRENGVAMEACEASKSEQAQAVAANKAALEAARMTASFLVKKLSVSFSPDAANRVVHEIRLLSKSGSENRAFVGEAGAVPLLVPLLYSEDAGLQLNAVTALLNLSILEANKKRIMHADGAVEAVAHIMSSGATWRAKENAAAAVLSLASVHSYRRRLGRNQSVVEKLVHLVRTGPTSTKKDALAALLTLAGERENVGKLVDAGVAEVALSAISKEETAAAVLAALAKRGGAEAIVNIDGAVARLVAEMRRGTDWARENATAALVLLCRRLGAPAVTQVMAVPGVEWAIWELMSIGTERARRKAASLGRICRRWAAASAADGERGGGCPVATVVPPAMMAS

SEQ ID NO: 143734 - protein, 384 aa, Oryza sativa
  Clone ID: PAT_MRT4530_44614C.1.pep
MESAMRRKMAVVVMSVLMMAAAAAANYAAEPEEDCATQTTYFTNCLRRGIREGCCGVVKNHWCLCQVKREAEVKCIPGRRCDVPKALKIADMDLPCMRNLSAKRIGAKVGHVSANGAGADIVPPCAILPNPVGAETANLSANALGAEPTRAGRTPTGEEGVGGRERAADESCSERAGGGAERRWQASERSSDGELLRSLHRLARDLSAVDTPAPFLRALFASISRRSKLLAAALDDLRGAAEELPQPADIEAVRRRRELPRLASLCLREVLLVLQRFNAIVADCSVRSRMWLLLESDEMEAELRELNHDLATLLDLLPALNASVLSLIQEIEPPAPPSDFRCPISLDLMRDPIVVASGQTYDRDSSGRWSGAERRRHPATPREK

SEQ ID NO: 143735 - protein, 101 aa, Oryza sativa
  Clone ID: PAT_MRT4530_44615C.1.pep
MASCFRGGFRPEKQRTKAASGGDDDDNDGGGQLTAILNSLVQKASDKFLRGFMGVLTIAREYSTLCESLQMLRQAAESAGRTGGASGRKNLRGGYVTRTQK

SEQ ID NO: 143736 - protein, 291 aa, Oryza sativa
  Clone ID: PAT_MRT4530_44616C.1.pep
MRLRGGQASVSHDDTFAPSGGSANHCRGGGEGGLEIGSSVIPCGREGERSEHLRGSRAPAPHRLAVVAPPPPSSPSRHRHNDTTSSLCHFLLLLLDAGHRPCPCHPRLASPWQRRTKRHIANQFQPYFTTWGPINRRAERHSYWLPNRPHQVPNHLNATRRTRAGGVRSRAVVLPFANAQLPHLLRSIGRTTRARQGHHQFTHLSPRRTTGRKRKRNLASGSSRHNDSPPFGRPRRSHDRSQRGEMIPAGFVCEWRTRFCDRIGPTMHQRNNAVDSDRQHGKRQLEHINRH

SEQ ID NO: 143737 - protein, 274 aa, Oryza sativa
  Clone ID: PAT_MRT4530_44617C.1.pep
MKASVKLREDGAAPLLRAKLPVALFSVPAVASLTAGDPANLRLSLATAAPALPSIRLSYAPNRATSPLSLAVVLGSGPGGSPSSSGAAASAITMAVEVNTAGAVSFSLALKPSLGDFAVRKRFDSAAAGGGGGSGSSASAASEVTMRSAIPVRGGAAAVSVRWGVRIPAEVTAGGEEGAAALALRRLPFLVLGKVTVERRPPPPPASTAEETTTTTVEKTRRENERLTRELDELRAAATEKTERKMTSAAAGRRSSGWRSPEMAGDRKTVDLGR

SEQ ID NO: 143738 - protein, 90 aa, Oryza sativa
  unsure (1)..(90): unsure at all Xaa locations
  Clone ID: PAT_MRT4530_44618C.1.pep
MLPNLPQRKRSPPERRKRCKKNYDGRRRTAAGDELQRXLGSGRRRRRRSGDRRRRRRDGWGAPPPCAPDGGERRRRRRLGRRGGGAGHHP

SEQ ID NO: 143739 - protein, 376 aa, Oryza sativa
  Clone ID: PAT_MRT4530_44619C.1.pep
MCCHSHPDLTGLLLLVSCSLHRRRPGQQLSTMARKLRGQAASSGTQNSNGLSNSSLELPSEHHFLAARTGMNGFAPTGYQQPPPPPAASASPGGWIASTAIFMSIFFSTFLLAMAVSVYCCLLCRDRVRSDRDDTGAAAERARGGGTVAPLPVEALPPAYPYVVGSSEDGGATAASGGGGRECAVCLGAVREGEMVRRLPACEHVYHADCIDRWLAAHRTCPLCRRELDPGKNPPDQLPRAHPPSPATRRAEVDEEVGRRHRARPPKVLVTEPPLLLVTEPRRCRSSSSATSHPPAPQDPPSRESALRVPSRRIRRLQALPLSVPPSARLVATGSAASRVTEAPPVDQATARHELHRRSSRGPAGGRMERWRKEGE

SEQ ID NO: 143740 - protein, 146 aa, Oryza sativa
  Clone ID: PAT_MRT4530_4461C.1.pep
MPAERDGRRPERATAGRSGGGGRAGRSRRAKRGGRLPKRGGAGASGCRRAVAILAAADTVNDDVLARGWSSTRGCPTRGREGGGSSWRRGWRTPTAPNDDERAEKDEAAEAVVFINGEDDEATICPGSGAWFLISLIGDLNDLNLI

SEQ ID NO: 143741 - protein, 136 aa, Oryza sativa
  unsure (1)..(136): unsure at all Xaa locations
  Clone ID: PAT_MRT4530_44620C.1.pep
QLTTVHRSWIIISPSKPEAMDSPATPTDFSPLHSLAPYNESCYTKGKADVTTGARGVGRANGGHLRVEDDDANSPVQKXTMTDDGERRPATSSNGDSARVGGGGGALATGDGGEGTAGVLLLRAHPTAAKGGGGDG

SEQ ID NO: 143742 - protein, 1166 aa, Oryza sativa
  Clone ID: PAT_MRT4530_44621C.1.pep
MASAAAAAASDEPPRKRARSAGAEDRLSELPDCLLHDILALVGSRQAVRTSVLSRRWRGLWRSAPRVDIDQREFRRACGGEEGEPVVDCDGFEDFADGILSPTLLGGTGTPPLDAFRLHLLYEGRFITFGRWVRRALTRRPASVDIHVEYGGTVDWPPALTLGDGAGTGRLKRLHLFGVHLGFISGDGGRLAELLPVLEDLRMESCTFGHEPSSPTTTIAIPTLRSLALAVVPRRTARPYALTVASPRVASLRLFLPFSRTRAAAVRVAPAEEGEALASLVTASITVLETDQELNRRMNKHKLDFLASTRNMLDRFPNALLDKASQEFPTLPSLTTLLLSECDVGANCYVLKSVLRNAPNLEHLRLHRCKFLGTPKRKRGNSRSKGKSSSTCLDSLSSKCKSLQSVEIKFRPIDNARHHDLVGLGYLEADHPEAAPGPAAPEAGAGASPGEIFVPTPAQLPRHRVGSTLDPSWATGDGEGAAASRRRRRGGRDSSAAASAPPSAAELALPRDELRRLQGAGIRLRNRLKVGKAGVTEGIVNGIHERWRNAELVKIRCDDVSAMNMKRTHEILERKTGGLVIWRSGSTIILYRGTDYKYPYFHDREMKNDMDESSEHTSSDDEDADLAIIASEQSGSEEDSDNPAEHGSNHTEEGDDLTRRFGVDALEGNLDIGSAEQSINSATKDQQAILHTSTNVSRPSEISGRARSTLVAGVGSPNKFRLQLPGEVKLAEEADKLLDGLGPRFSDWWGYDPLPVDADLLPAIVPGYQNIDSDLISEKLKGLTGGTLLSRDNESIVFYRGKDFLPTAVSLAIEKRRKYGNSTISNPKLNFDKSTPQNSSKLKMATDVSLDGHECYEKKHKDETAVSDNRAESLNVFAQNVEARLSQAIAEKEKTEKLIEELEMSSEPSRAETREVISEEERYMLRKVGLKMKSFLLLGRRGVFDGTVENMHLHWKYRELVKIICKEHNIKDVEYAARTLEAESGGILVAVERVSKAHAIIIYRGKNYQRPSTLRPKSLLNKKDALKRSVEYQRYKSLKLHVLNLSKNIDYLKDQMVAGRNNVITGVAKAIKTHFKKHPLAIVNIKNRADGTPIQQLISELEEATGSVLVSREPNKVILYRGWGADVAQNSLSGNNSTEQVEKEVISPQLLEAVRLECGLHPGESE

SEQ ID NO: 143743 - protein, 395 aa, Oryza sativa
  Clone ID: PAT_MRT4530_44622C.1.pep
MSSDSQVHSSHSDESITSENLEDMMWEEINDPTEAQLEARLEAQLEMKLMARLAGNSNQRGGYTRRTDAFGKVGLSPFQKCTAAMRMLAYGTPADLMDETFGVAESTAMECMINFVQGVRHIFGKQYLRRPTEEDIQRLLQFGEAHGFPGMLGSVDCMHWEWQNCPVAWKGQFTRGDYGVPTIMLEAVASKDLWIWHAFFGAAGSNNDINVLDQSPLFTDVLQGRAPPVQYTLNESDYNMGYYLADGIYPEWATFAKSIIRPQSAKHKLYAQHQESARKDVERAFGVLQKRWAIIRHPARVWEREELADIMYSCIILPNMIVEDEKGSYDIPDDKTYEQGQFSAQITGLDHGPIYGFAEVLEKNRAIRDRSTHRRLKEDLIEHIWQKFGGQPQQD

SEQ ID NO: 143744 - protein, 64 aa, Oryza sativa
  unsure (1)..(64): unsure at all Xaa locations
  Clone ID: PAT_MRT4530_44623C.1.pep
VRTLKTVIISKPKVKKKGFKDLLGKFLAPIEGFSHAARFKSPEEGEKFXGLSKFVFGKVLAKLG

SEQ ID NO: 143745 - protein, 41 aa, Oryza sativa
  Clone ID: PAT_MRT4530_44624C.1.pep
MVGRPHAQRGMKRQSHRIPAFGFHNPTVVLLISNGSLHLIL

SEQ ID NO: 143746 - protein, 1192 aa, Oryza sativa
  Clone ID: PAT_MRT4530_44625C.1.pep
MAFIVWALLLFLLHLPTIATGSSAHFGGNNTVRCHPNQAAALLQLKQSFFWVNSPVILPTWQDGTDCCTWEGVGCDASSHLVTVLDLSGRGMYSDSFEPALFSLTSLQRLDLSMNSLGTSSTTKDAEFDRLTSLTHLNLSNSGLDGQIPMGINKLINLVSLDLSKRYVNDNSDISFNESDDEIIFTGDSYNHLQESRLMSLVENLSNLKELYLDHVDMSTNVDDWCKTLAQSVPRLQVLSLDGCSLNTPIHHSLLRLHSLTVINLQSNPGIAVNLFPDFFMGFANLTVLRLSHNNLEGWFPDKFFQLKNLRILDLSFNMNLLGHLPKVPTSLETLRLEGTNFSYAKRISSSNFNMLKELGLEGKLISKDFLTSFGLIWSLCHLELLNSELLGDSGSNLLSWIGAHKNLTCLILSEFDFSSTKPSSISNFKNLRSLWLFGCNLTRPIMSAIGDLVDLQSLDMSNCNTYSSMPSSIGNLTNLKSLYINSPGFLGPMPAAIGNLKSLKSMVFSNCEFTGPMPSTIGNLTKLQTLEIAACRFSGPIPYSIGQLKELRALFIEGCNMSGRIPNSIVNMSKLIYLGLPANYLSGKIPARLFTLPALLFLDLFGNHFSGPIQEFDAVPSYLMSLQLTSNELTGEFPKSFFELTSLIALEIDLNNLAGSVDLSSFKRLKKLRDLNLSHNNLSVIMDDEGDNSSSTYLSELKELGLACCNITKFPSILTRLSDMSYLDLSCNKISGNIPKWIWEKWSSSVVHLNLSHNMLTSMEVASYLLPFNRHFETLDLSSNMLQGQIPIPNLSAEFLDYSHNAFSSILPNFTLYLSKTWYLSMSKNNISGNIPHSICNSSLLVLNLAHNNFSGPFPSCLMEQTYFRNILNLRGNHFEGMLPTNVTRCAFQTIDLNGNKIEGRLPRALGNCTYLEVLDLGNNKIADTFPSWLGSLSNLRVLVLRSNRLYGSIGYTFEDKSGDHFPNLQIIDLASNNFTGSLHPQWFEKFISMKKYNNTGETISHRHSISDGFYQDTVTISCKGFSMTFERILTTLTAIDLSDNALEGSIPESVGKLVSLHVLNLSHNAFSGRIPPQIGGITALESLDLSSNWISGEIPQELTNLTFLTVLNLSNNQLEGKIPESRQFATFENSSYEGNAGLCGDPLPKCASWSPPSAEPHVESSSEHVDIVMFLFVGVGFGVGFAVAVQ

SEQ ID NO: 143747 - protein, 82 aa, Oryza sativa
  Clone ID: PAT_MRT4530_44626C.1.pep
YVARRSVLLMYSLERRLVPRHLVVKLLKERGLIEQDRCFFNAVAPTEEKFLEKFVVPFEGCVPGLADAYESACAGKTPVQAE

SEQ ID NO: 143748 - protein, 112 aa, Oryza sativa
  Clone ID: PAT_MRT4530_44627C.1.pep
MAMRAPTAAGLTGLRAYADMPAHLGIGCFYASRRGLAVGTMVASSCVSCLSTGGVPMRRYVDLWFPKVRNSRAGLFREHLHFEHEVQRLIFFDDRQRKFQVGIVYVRILRRI

SEQ ID NO: 143749 - protein, 275 aa, Oryza sativa
  unsure (1)..(275): unsure at all Xaa locations
  Clone ID: PAT_MRT4530_44628C.1.pep
MPTCGTPAPVSPAGQSSCAGDRAXHPPVAPPRTEVASSTAGRAFRAKPASSTGRASRANLASLHRPRLSRRAGLRCHRLRHSMPSRSPTPPPNDXHRSRCCRTHHRAXQPLTPPMRRALRPLPLHRQALPLLPQAAAAAATGTATVAHHQPRCQSPPSASLAPQSLGLLPPGLAALQASLXPAVRAPPPARISPSRRPPLAAVQVVVVASPRRNRRRRRRLVAPVSPXAVSSATSTHSGRIWPGDGQIRRRXRWIRRLLAGIGRRLSRAERGHRH

SEQ ID NO: 143750 - protein, 114 aa, Oryza sativa
  Clone ID: PAT_MRT4530_44629C.1.pep
MGGWRGEERRGRERATGDDEIQRCAVHPAPRHRRAPYAAQPPCVDQQGEERRREKSQSKVAPGRRQRTAGGAGMGATEGRLFATRLDSMTAAAASPELTVGERFTHNLCQMTST

SEQ ID NO: 143751 - protein, 139 aa, Oryza sativa
  unsure (1)..(139): unsure at all Xaa locations
  Clone ID: PAT_MRT4530_4462C.1.pep
LPAERDGWRPERAMAGRSGGGGRAGRSRGAKRGGAGASGCRRAVAIXAAADAVNDDVLXRGWSSTRGCPTRGREXGGGSWRRGWRTPTAPNDDERAEKDXAAEAVVFINGEDDEATICPGSGAWFLISLIGDLNDLNLI

SEQ ID NO: 143752 - protein, 673 aa, Oryza sativa
  Clone ID: PAT_MRT4530_44630C.1.pep
MAVQRTDAASWLRELVLVYAMCWTVSLGFVAGQTGQLNVDASPQNARKIPDKMFGIFFEEINHAGAGGLWAELVSNRGFEAGGPNTPSNIDPWLIIGNESSIIVGTDRTSCFEKNPVALRMEVLCDSKGTNNCPSGGVGVYNPGYWGMNIERRRVYKVGLHIRSSDAVSLTVSLTSSDGLQKLASHTITASKKQFAKWTKIEFHLKSSQTNTNSRLQLTTSKSGVIWLDQVSVMPSDTYMGHGFRKDLASMLANLKPQFLKFPGGNYAMGNYLRNAFRWSETVGPWEERPGHFNDAWGYWTDDGLGFFEFLQLAEDLGASPVWVVNDGSSNLHGLLGASQNEEVSTATIASLVKDVVDGIEFARGGPKTTWGSVRAAMGHPQPFNLDYVSIGNQECWMLYYRGNYQKFYSAIKAAYPDINVVSSCDKSTISPSNPADLYDVHVYTSSSDMFSRTSMFDNTTRSGPKAIVSEYAVTGKDAGKGTLVEALAEAAFLVGLERNSDVVEMASCAPLFVNDNDRRWSPDAIVFNSWQNYGCPNYWMLHFFKDSCGATFHPSNIQISSYNQLVASAITWQNSKDKSTYLKIKLVNFGNQAVNLSISVSGLDEGIKSSGSKKTVLTSSGPLDENSFQQPQKVAPVSSPVDNANEQMGVLVDPYSLTSFDLLLQPSKHSTI

SEQ ID NO: 143753 - protein, 69 aa, Oryza sativa
  Clone ID: PAT_MRT4530_44631C.1.pep
TCSCLCSPFKNITCMLGSPHKHQCRECHEESMQILIFFSWEYSEARNILDIQKSCWNKGTVFRSDEHLH

SEQ ID NO: 143754 - protein, 148 aa, Oryza sativa
  Clone ID: PAT_MRT4530_44632C.1.pep
LRAKIDLNSVRIQHACTAVVPFIPPCLCLCLCSSCAARLPLWAMAAGRAAALPERMPQPQLWKPGGRAILTSPCPPARGTHHSSRRLPMGIGGGWRRWSDDSDGESWVFSRCSVGTLSDPAASMRGGARGRGGGGGWSAGGARVPSRI

SEQ ID NO: 143755 - protein, 74 aa, Oryza sativa
  Clone ID: PAT_MRT4530_44633C.1.pep
TERSVAYQPWIWTAGNHEIDFAPEIGETVPFKPYTHRYHVPYKASQSTSPFWYSIKRASAHIIVLASYSAYGKY

SEQ ID NO: 143756 - protein, 280 aa, Oryza sativa
  unsure (1)..(280): unsure at all Xaa locations
  Clone ID: PAT_MRT4530_44634C.1.pep
QLVRDCLCGQMYDSSPVDFVSDLGTRFLLHPSVLKMSQPPRILSWMTRGIASGLDTLFIGKFEAQRAEYWDTLYSSVHVGPILIFCSEDDELAPCSIVQKFGRRLLELGGDLXLVKWQNSPHVGHYKHHPEEYRAAVTELLTKASMLYMSRRQLNSYDLGTSEHSDMLASDVHKAGTNSNNRLRRAPDDPIDHFLLPSSMEYHESSNEEPKPELFNMPSVESINNPHGVLGQMLYDVCVPKNVEGWDFKPSASINGRHINSIARQHGTFNPIKCIRRSKL

SEQ ID NO: 143757 - protein, 49 aa, Oryza sativa
  Clone ID: PAT_MRT4530_44635C.1.pep
DAGHPMAEVFRGCRRGDIERAAASLPVFCNVDIPNGVSGVCYCLPRTGY

SEQ ID NO: 143758 - protein, 80 aa, Oryza sativa
  Clone ID: PAT_MRT4530_44636C.1.pep
LPRRPPRNKSVGPRGRRRTKPYTEAGRPEAKTPTGGSGRTVDLRQAKVLLQHSARCGNVGRRHHLRAEYTGGLVPAPRWA

SEQ ID NO: 143759 - protein, 97 aa, Oryza sativa
  Clone ID: PAT_MRT4530_44637C.1.pep
MMPGHHGAPNKFNIYIYIYIYIYIYIYIYIYIYMYVCMYVCMYVCMYVCMYVCMYVCMYVCMYVCMYVCMYVCMYVCMYVCMYVCMYVCMYVCMYVN

SEQ ID NO: 143760 - protein, 213 aa, Oryza sativa
  unsure (1)..(213): unsure at all Xaa locations
  Clone ID: PAT_MRT4530_44638C.1.pep
AVAATGMVADVIGKAYTRPATSPVNKTNAWKGNAWKDGSGGDRKYSVEEAEQFLCSMLGDNSELGMGVVRDVLGQYGCDVEKALDALLDISGMSSLQNMERCFPNAQINGMSSPNIFLGNGLCEEVSTACIAKSSYQFTYEMRNMSYNRSDXNEHGFFWGELQRSYLSDACEEPHSTTSSTRSTRSISKTPQHVLDSLFKIPEQRTYEPSFMD

SEQ ID NO: 143761 - protein, 411 aa, Oryza sativa
  unsure (1)..(411): unsure at all Xaa locations
  Clone ID: PAT_MRT4530_44639C.1.pep
MRPSKKKWKKSKNPSKNGETGGESGGEKEGAQKMRPSKKXKSKKKKPSPAAAAGAAAPTTPPAAADGGAGGESCSPRSETLTLAARAAAAAVASETESSSSCEASTCSSSSSAFNPGSSGAASTSSLSAFSSSASTASSSAAGDERRDMAWLLDAFGTATIDQVDSAYREAGGDAFLAAGILGSSPATGMVADVIGKAYTRPATSPVNKTNAWKGNAWKDGSGGDRKYSVEEAEQFLCSMLGNNSARGGNAWKDGSGGDRKYSVEEVDKLKCFQALDALLDISGMSSLQNMERCFPNAQINGMSSPNIFLGNGLSEEVSTAGIEKSSYQGKHYRELAGLSEEVSTAGIEKSSYQFTDEMRNMSYNRSDNEHGFFWGELQRSYLKVACEEPHSTTSSTRSTSSISPDSCTPP

SEQ ID NO: 143762 - protein, 138 aa, Oryza sativa
  Clone ID: PAT_MRT4530_4463C.1.pep
KKNLWFPPPGAPKKNFGLNRGVAAISIWQPKQGKGSCLPQGVSQIGKWPGFKKTSPKGVLFLSQSKKEMIFLLDPLGLDFSSWGMLVHLSFRSSGQPKMLDTFKNCSGRLKKKFRFPSGTWLKNVAVRPSKRRNLWQS

SEQ ID NO: 143763 - protein, 59 aa, Oryza sativa
  unsure (1)..(59): unsure at all Xaa locations
  Clone ID: PAT_MRT4530_44640C.1.pep
FXKINPNRVNFFSILGNKNPXLKNXXXXPQKXKKPSIRGXGXLLXTXPPNQFFWGSKVP

SEQ ID NO: 143764 - protein, 91 aa, Oryza sativa
  Clone ID: PAT_MRT4530_44641C.1.pep
LCGYFILQISQQCFGPACEDLVLYKAASTPPIYVVGETTSKFFCEHGHATFTERHPCRRPCRTGVDRVEDFNGTPPISRWGSPEPNTSDMQ

SEQ ID NO: 143765 - protein, 535 aa, Oryza sativa
  Clone ID: PAT_MRT4530_44642C.1.pep
MAAGGSSSNPMSREASSSAAAAAAGVAVRDVGDDKPLPSAEVDITYWAAQEEAAALLESMAARARGEDDLPEEQLQANNQLQEDEVIALQAIFGDDMVILENKDNLRFIQIFVHYTLPDSIRVFLNLRRSGAMVGTDDSENHNGGELYHLAAKWLDEPKVSYLCAALDEVWTELPGQEVIYRWVDWLNSSSWSSIALNDEIVLDPDKTLKIGDERAIARRILVESTIPLMQSYSEKRSHKIFLESLLCMESHCKIHVKEGNLMQLACPDTNCRNPLPPSVLKSLLRDDGYAQWESFALQKLLDAMPDLVYCPRCSAACLEVDNDAQCPGCFFTFCTLCKRRRHVGDTCITPEEKIRILKGLTRMSSMRKLYSIPEEQLLKEKREIDELINIQEALRDSKQCPRCKMAISKIEGCNKMTCGNCGRFFCYRCNKAIGGYDHFWNGNCDMFEREQDENPQQQDDENFGGDPDEDAELLEPEWVLLTYPCPNCGQLGTNNHISCPGCRGHYCALCRKRVLKCSQHFGPRGCQQHTEDAR

SEQ ID NO: 143766 - protein, 148 aa, Oryza sativa
  unsure (1)..(148): unsure at all Xaa locations
  Clone ID: PAT_MRT4530_44643C.1.pep
MFQRQQHCIRCALRIVTASKYAYSSAVAEPQFMIGDVRSCRWQVRVLSPKRLSQQLEAAREEYIRATLGVRKDQRVTXPKLVESYARDARLSPERLVDAVQRCLPESLRAAVQRCRQSRPASKVVEWAPYRHSFRYVLARGLAFPHLA

SEQ ID NO: 143767 - protein, 45 aa, Oryza sativa
  Clone ID: PAT_MRT4530_44644C.1.pep
MDGPDVQAPTVEAPSLGQPVAVLDLYCARPYVLNPNISTVEDYYG

SEQ ID NO: 143768 - protein, 41 aa, Oryza sativa
  unsure (1)..(41): unsure at all Xaa locations
  Clone ID: PAT_MRT4530_44645C.1.pep
KDXXSDAVXXWWWSCHLCCGRHVSRRLSVXTARVAGEWSPT

SEQ ID NO: 143769 - protein, 623 aa, Oryza sativa
  unsure (1)..(623): unsure at all Xaa locations
  Clone ID: PAT_MRT4530_44646C.1.pep
ISLKIDKYMRSHTLIQKRETTNHFRIYCLQMTAYYFFKRSGFCPVATQEEIKGVLQVQRASFEEKYVGLPTPDGRMKATQFQPLGQRLXKRMTNWNEKYMSAGAKDVLIKSVAQALPTYTMGMFNMSDKFCEEYSQLVRNFXWGHDKGERKVHRISWEKLTSPKTFGGMGFRDIKCFNQALLARQAWRLLTMPDSLCARILKAKYYPHGNLLDTAFPSVSSPTWKAIEHGLQLLKEGVIWRIGNGTNIKIWRHRWIPKGDKSVVPRKNNRNXLYVNELLNPGTKEWNERLVRHVMKEEDATETLRMNLSGAIDEDFPAWQPERTGMFTVKSAYRLAWNLKQPTSASSSSEADGERKIWRCLWKTNVQPKVKIFAWKLAHDRLPTWENKRKRKIEQSGIFPICAQTVEDGFHATVECTKARALREGMQEIWKLPGEECFARTGPDWLLVLLDASDDAMRAHVLYLLWRSXYLRNDVIHGSGIEGISNSVIVLANYVECLVPTQQSVDDPKGKKPISAVHAEAMACVEGLRLATNWVHMPMIYEFDNSEVVANLVKKTQLRSAWAGTIREALRWMECLQQVQVHKIKRESNGVAHKLARLVVSSGIYGEWLLSSPAELTELLNLE

SEQ ID NO: 143770 - protein, 53 aa, Oryza sativa
  Clone ID: PAT_MRT4530_44647C.1.pep
MEEQMDFFHDESSIHAAGDDQQNVKRGVVMECVRSSRSADRLFYAGVNDFNDI

SEQ ID NO: 143771 - protein, 226 aa, Oryza sativa
  Clone ID: PAT_MRT4530_44648C.1.pep
MDDKEDGVWWGRDVGAGGGVVDEEDGNGGGGPRANALAMLAPAVEVERRTQSAAADRLHPTPPGPSRRANHRPASASPPSPRRRLPFHHPIPRPSPQKKRKGGEREIEKGERGRPSAPHPPSSPATAQRGAEARRRLMQREGALEAAQAVSGGPAGWCTTGGEEATREGGRCGSCSCGRLGRARRRRPRSRLGCAWRRRFGDELELGSGVVMTTAWADEDGGFGGR

SEQ ID NO: 143772 - protein, 82 aa, Oryza sativa
  unsure (1)..(82): unsure at all Xaa locations
  Clone ID: PAT_MRT4530_44649C.1.pep
MDDKEDGVWWGRDVGAGGGVVDEEDGNGGGGPRANALAVGPLLPRPCXEMLAPAVEVERRTQSAAADRLHPTPPGPSRRANH

SEQ ID NO: 143773 - protein, 57 aa, Oryza sativa
  Clone ID: PAT_MRT4530_4464C.1.pep
LGSSRATRKRVFFRSRCFPRSPWALTTQYYIYFNIIRIDSHIMFITIDSVSDNYRQI

SEQ ID NO: 143774 - protein, 198 aa, Oryza sativa
  Clone ID: PAT_MRT4530_44650C.1.pep
MDKDPSRQAQLFSGQAPCSDGDRSGSGVRGSGGRRGDGNGGRCGEGGRAAVRARGEGVRATAAAAARAGGGEGVLAAAAAAATACGRRRRLLLLLPWPLASTLRHRRPPPPPPAPTIAAAAAPVAGDDPILLDVDVGADAALLPVPCSRAAVIVTIAECIVIRIGPDTVFLLVWTTFSKMLMAQEFTMDIARRRCRRS

SEQ ID NO: 143775 - protein, 144 aa, Oryza sativa
  Clone ID: PAT_MRT4530_44651C.1.pep
TSTCSDGDRSGSGVRGSGGRRGDGNGGRCGEGGRAAVRARGEGVRATAAAAARAGGGEGVLAAAAAAATACGRRRRLLLLLPWPLASTLRHRRPPPPPPAPTIAAAAAPVAGDDPILLDVDVGADAALLPVPCSRSSPPLYFFG

SEQ ID NO: 143776 - protein, 61 aa, Oryza sativa
  Clone ID: PAT_MRT4530_44652C.1.pep
TQASVTFFPLDSPAFGETDLLDDSNWPKSMSYCIFWFADVEGLASLTVDNRRSLVKQGCGF

SEQ ID NO: 143777 - protein, 66 aa, Oryza sativa
  unsure (1)..(66): unsure at all Xaa locations
  Clone ID: PAT_MRT4530_44653C.1.pep
PKDPKGFRELKVKEIKNGPLPKFSKVGFFVQANVXGKGPLKNFADPFADPVKKKGGGDPPNLVPGK

SEQ ID NO: 143778 - protein, 80 aa, Oryza sativa
  Clone ID: PAT_MRT4530_44654C.1.pep
MPNVELMRSYIAFLRVFGLIGEKRSNEYVEFISASIKDLTPTTEAAASPPPQESPSSVSTRCSMKCPHNDMTASSNHIIE

SEQ ID NO: 143779 - protein, 386 aa, Oryza sativa
  Clone ID: PAT_MRT4530_44655C.1.pep
MRMAAPQQVHVRAAPLARALRTRVAAAAASASSPERALLGLSEPDLRQLAVDLGQQSYRGKQLHDLLYKSRAKQIQEFSHVPKVFREALVGAGWKVGRSPVHHAVTASDGTTKILLKLEDNRLIETVGIPVDDDKGPSRLTACVSSQVGCPLRCSFCATGKGGFARNLHAHEIVEQVLAIEETFQHRVTNVVFMGMGEPMLNLKSVLEAHRCLNKELKIGQRMITISTVGVPSTIKKLASHKLQSTLAVSLHAPNQKLRETIVPSAKSYPLEALMDDCKNYFLETGRRVSFEYTLLAGINDAKEHAEELAELLHTCGGGYHVNLIPYNPIQGSEYKRPYRKVVQAFVDALEARKITSPTSYQLDEKTEFMMAMHNDCRLSVHHTES

SEQ ID NO: 143780 - protein, 242 aa, Oryza sativa
  unsure (1)..(242): unsure at all Xaa locations
  Clone ID: PAT_MRT4530_44656C.1.pep
NNKSQWAVGPSLSPRSAPLPGPARSSLPLPEVLPPSLSLSGADRWALPVGSSPTSSRAPMPATTAAAPPPPLLPRPRXPFPHPPPDAAHAPSLPPRARSRGRDSISNPTLLSLSLHPTSPAKSEAFPHTSACPTTYKLSPELLFPFPVSPPLPCSYEPAPLAEAPLAPSPAVAAVARACLATQSPPLTSRRESYLGAAHFPCALPYRSPHATPEPAAPPISGRRSPPLEPPPRRTVAAVTLT

SEQ ID NO: 143781 - protein, 96 aa, Oryza sativa
  Clone ID: PAT_MRT4530_44657C.1.pep
TGQDAGDAVLPALRITAERYLSLTRKIMPEDAAVRVGESQPRPRYPERSVHLLSFAMVGLIPPFSIHGSRSLTATSANRMGTAGNRQKSEGSFPHG

SEQ ID NO: 143782 - protein, 87 aa, Oryza sativa
  Clone ID: PAT_MRT4530_44658C.1.pep
MTSSTLQGRWEKRRWPRQPPRLAGKAATAMVAASVKVAPSRQVRGRGGCQESGGGSGKRGKTTGGSCKAGFDEASAIRCGPSSTLPP

SEQ ID NO: 143783 - protein, 82 aa, Oryza sativa
  Clone ID: PAT_MRT4530_44659C.1.pep
NWLCFCSLMIMDHSHLNDIKANFTGRRTTILDTRIMRKFKKYHHGDTRIGKYHRMWHMSMIYTMVFFSSEIFRDGTKKIGMQ

SEQ ID NO: 143784 - protein, 114 aa, Oryza sativa
  Clone ID: PAT_MRT4530_4465C.1.pep
RRPVGLSSIASHFALRSPTSSSPLAKVEVSSQSALTRTTDIRGPSCTLSGSSTPPLRDTTAPKPGSSGTRAPVAPRTAPLYALAPAMSVPSSSSSSLSPSHLQPAAELSSWPQN

SEQ ID NO: 143785 - protein, 464 aa, Oryza sativa
  Clone ID: PAT_MRT4530_44660C.1.pep
MGLGVEPLGLRAMDRDFAKQIGIEDVSECPHLCALAYGYLKKTEGYEQNLLAFFHNKINSDALLVLLIEELDKCILGYFSFHWKFATEVITQVLTAEQPRRKLKTMVLEATRKMRFERVSRKLKVTRLFSTLVEELKVIGVTCNDGQLRDADADVMVPAAHRDRSPVLLLMGGGMGAGKSTVLKQIMKGLFWSGAAAHAVVVEADAFKESDVIYQAISSRGHHNDMLQTAELVHQSSIDAAASLLVTALNEGRDVIMDGTLSWEPFVLQTIAMARSVHRQRYRMGVGYKVAADGNATEQYWEPVEGAPVPSGRRPYRIELVGIICDAYLAVVRGIRRAIISGRAVRVSSQLKSHKRFAGSFRKYCDLVDSASLYSTNTIAGAKLIGWKDVGSRLLVDVEEIGLLDRVSRINEEANGVHELYPDGHPTDGAGSVWEDLVSSPARAAIQRELREAILDSEACFPSP

SEQ ID NO: 143786 - protein, 393 aa, Oryza sativa
  Clone ID: PAT_MRT4530_44661C.1.pep
MARHPVLMLLVVVVMSWHWGGAAAQVFRPPWNGTFPMGPGGGGGGSVGGGGGAAAAASVPAMFVFGDSLTDNGNNNDMTSLAKANYLPYGIDFAGGPTGRFSNGYTMVDEIAELLGLPLLPSHNDATGDAALHGVNYASAAAGILDNTGQNFVGRSPFNQQIKNFEATLQQISGKLGGGAAGKLAPSLARSIFYVGMGSNDYLNNYLMPNYNTRNEYNGDQYSTLLVQQYTKQLTRLYNLGARRFVIAGVGSMACIPNMRARNPANMCSPDVDDLIIPFNSKVKSMVNTLNVNLPRAKFIFVDTYAMISEVLRNPWSYGFSVVDRGCCGIGRNRGMITCLPFQRPCLNRNTYIFWDAFHPTERVNILLGKAAYSGGADLVHPMNIQQLAAWQP

SEQ ID NO: 143787 - protein, 46 aa, Oryza sativa
  Clone ID: PAT_MRT4530_44662C.1.pep
CCIILKRYIRTNTVVVRLDDMHQHSALRRRCVGMLLHRCKLARVTD

SEQ ID NO: 143788 - protein, 39 aa, Oryza sativa
  unsure (1)..(39): unsure at all Xaa locations
  Clone ID: PAT_MRT4530_44663C.1.pep
FFFLSLNICILLVKNKTNQHTSNDITQRQFKXLYFXSQR

SEQ ID NO: 143789 - protein, 286 aa, Oryza sativa
  Clone ID: PAT_MRT4530_44664C.1.pep
MFGLIITTAISACRLIQHDYGGEVNNGGANLKSALKFVYSIALLQGVLFCYRFTLCYEQKRLVDLVVNKYRFVTSLSESVMAYMQETMIGCEKDPSFVKGRNLVTYAVGLTKSGSPDGFLSGVRILDSLLNTPMYKYNFFLEVEVEVEEQKAMSLDCTRAYNAEAREHAARIVAHLAGDLHLEQFPQGIHCTAFLLEGPPTDCDGNIPVNYEELMCQALSIFMKLVAHEELQMLAAVLSLIVTMTRNLMDAEDLPPLIDAINRAANGFSILTELQSMVTKLSMKSK

SEQ ID NO: 143790 - protein, 766 aa, Oryza sativa
  Clone ID: PAT_MRT4530_44665C.1.pep
MTSGMEPVDDSEWEEVSSINNYALFMGHMSMAVKGLGYLLVLWTTVILLGGFVSILGKKDFWCLTIITLVQTAGVSDIFLNEKLRYTWRSFLGFFSATDTLETERGAISWFYGRSRSRSYYLNNLVVVVIWLLHLFVFATIICPLAVLYMFGLIITTAISACRLIQHDYGGEVNNGGANLKSALKFVYSIALLQGVLFCYRFTLCYEQKRLVDLVVNKYRFVTSLSESVLAYMQETMIGCEKDPSFVKGRNLVTYAVGLTKSGSPDGFLSGVRILDSLLNTPMYKYNFFLEVEVEVEEQKAMSLDCTRAYNAEAREHAARIVAHLAGDLHLEQFPQGIHCIASLLEGPPKDCDGNIPVNYRELMLQGLSILMKLAAHEDCQRSINKTEGLLAKIMAPLRSGLLNHNDDPNSAWFRTVHASMVVILRLVDAPGQTGKELRRKISGDVEAMASMERILGCQGCGLGSFHDSSLFMQALDIYTRMHEHTLSNIVTREYFIEKLLLIFTHKVYKEANIIFGLAVVGEKLATLCSHGKANAKLILQVKDDVVGDLTKILVQDRYPKEYRISAAQILEQLCVHHTDDDEYIQSLKEALKVKSPEVLVRTLRAESVDRQMLAAVLSLIVTMTRNLMDAEDLPPLIDAINREANGFSILAELQSMVTKLSMKSKVTIVNRLNTLKLITEIFILIVRHGSRYTVEEAENLIKSLSKAARNMSEIEDIMVISGCSSSLKTLGSLVKEAEELLPRARASEMEVIIEHPSCVNRNQIN

SEQ ID NO: 143791 - protein, 138 aa, Oryza sativa
  Clone ID: PAT_MRT4530_44666C.1.pep
MAERELIDRDKLVLIDLQFHGFHGVKSEEKTLGQKFVVDVDAWMDLSVAGETDSISDTVSYTDIYGIAKDVVEGPSRNLLEAVAHRIASNALLKFPQISTIRVKVGKPHVAVRGIVDYLGVEILRHRKDVGGDRQELH

SEQ ID NO: 143792 - protein, 81 aa, Oryza sativa
  Clone ID: PAT_MRT4530_44667C.1.pep
MGPSEIGEVSKRKVTATTRLALSSLRMEKTGEREAEREGDEDQGTDDKVEVVARCFLRVSSLPHRAPSLLVSIVCWYIILN

SEQ ID NO: 143793 - protein, 80 aa, Oryza sativa
  Clone ID: PAT_MRT4530_44668C.1.pep
IWAVFESKLQSFSITSTCHTHTTSQSHHLQFQLKFKLYAELNTSCVCTVLQTLLECLVGICIVMYRAASNCSVIISGHVW

SEQ ID NO: 143794 - protein, 33 aa, Oryza sativa
  Clone ID: PAT_MRT4530_44669C.1.pep
LSCRVLPRGRLWICARRPFCRPSLAVSLPFKER

SEQ ID NO: 143795 - protein, 463 aa, Oryza sativa
  unsure (1)..(463): unsure at all Xaa locations
  Clone ID: PAT_MRT4530_4466C.1.pep
MAIMHARFEVSDVVGGDGSSSGGSSPASVSGPSDSDGSSCSSSSAADELFPDARELPSTSASVPVLAGVGFHPISPTSLSVLSDIDVHMQRMARLLPAFASPAAAPRAQALGRWLAGFDVGWVLEMDAGGGRLPRREVGRRVRVWAQALSTMDRVFRLRHREARNPANEAAAAQLAALGELASASAGAMLRLATAVAALGASPSALLAALDVYVPVSEAYPGLARMFSWSTAAADAALAALVDAARRCVRGLPASIRSHYPWRMPQGGEVHPCVGFWMGYFRCMLRNRVSLYLVLAGGDGGETATTPALAPGGEGGLVADLISRLEAVLEEKSGELAFPGLRQVFMLNNTHAIVRRAVRSDLAMFLPPGWTRAREERMEGYVKSYLDASWAPVVSRLAAAATKPAARAEMLEGAQPGAPPRAPANRVGARRAXTAGVSRRLRRPPPRAPSRSWSASYRSCSKG

SEQ ID NO: 143796 - protein, 314 aa, Oryza sativa
  unsure (1)..(314): unsure at all Xaa locations
  Clone ID: PAT_MRT4530_44670C.1.pep
MAPRKPAPAAATGPDPCKIGEDCTGFLGTSLFNKADLAKLVASSTVVEKQAFFAGDAVVHRPVDGWTVVFAAFFDAGLRFPCDVLLPKVLQLFQVELPQLSPSVLVRIAIFDWICQTAGFVPXTDRFGAIFFATVHSKMVVTPVGTKKTVFGSVNFNVRAVCSDLWPVNASMPKWERHWMERWFYHTNPYGAKTDATKAIRXGRLVISPNRKLKVAIDGTIESRFTLLRRTAHRLSCCDFVEEFCMXWQITVNEDERVLDLPRLVLPGGVNLLTLTQAENEARTLIGDLTIHEYSQLLTRQVTGRANRVYNGCP

SEQ ID NO: 143797 - protein, 97 aa, Oryza sativa
  Clone ID: PAT_MRT4530_44671C.1.pep
LDLGAQGTGTGHSTASGEHLRPGCRPFWPGDAAAWHFNWHGAVHCQAPVDLWKEIEEWLQSKPCSCWDDNLSLRDEQCMRDCRCTDWCWHFGDQDND

SEQ ID NO: 143798 - protein, 384 aa, Oryza sativa
  Clone ID: PAT_MRT4530_44672C.1.pep
MGTLSGMMRAIVHVSLFMFFVAVFPFKNWYQRLSPDCLPLANGGGGGSGSVTRKPASRSCKDDDGGMAVAADSSRLSSYLPSSQLDSKPLRARAPQPSSSSAAAWSPARDHAHAHHNHHHHHHPSDSSDTASPSSNGAGTGGDVLLQWGHNKRSRCRRDASSSANAAPSSSQRRQTASAAGKILRRSSAPAEKLMPPPPPSTTTGSYTRGSNLRSASSFPTRSAAAAAVGDAHHHRSAVEERSGGGYKRSPDKAHKSALDAALHMDSKNNHHHHHHDSSVTANGGAGAGEKIGSERFELPRIYISLSRKEKEDDFLIMKGTKLPQRPKKRAKNVDKTLQYVFPGMWLSDLTRGRYEVREKKCVKKTRRGKLPRFRASVTQIGWV

SEQ ID NO: 143799 - protein, 164 aa, Oryza sativa
  Clone ID: PAT_MRT4530_44673C.1.pep
MALRLWASSAANALKISCSGATRAAPAYSISRYFSTVLDGLKYSSSHEWVKNDGSVATIGITDHAQGHLGEVVFVELPEAGAKVSQGGAFGNVESVKATSDINSPISGEVVEVNDKLSETPGLINSSPYEDGWMIKVKPSSPSELDALLDPAKYTKHCEEEDAH

SEQ ID NO: 143800 - protein, 123 aa, Oryza sativa
  unsure (1)..(123): unsure at all Xaa locations
  Clone ID: PAT_MRT4530_44674C.1.pep
EVPTSSTSSASSATSAEASTASSSSSSSAASSSASGAYPSSWXDSSGMSDSSAAPGSAKSSAAAEDEEDSKESDVASGASGRRRVERMWRPGWTGRGGGMGRRRRGRAWGGRSSRAGRGGARD

SEQ ID NO: 143801 - protein, 130 aa, Oryza sativa
  Clone ID: PAT_MRT4530_44675C.1.pep
MFSFFFSEQSDTASGMDLNCLTLGCSLQSFPAETNTSHQIDQNAKSIRTHTQATLNGEPAAQTLLPLRRGASREAGGLGRRRRRWAQRLRREEAAASAAARERSGAGGRAVGERWARRRRRQAAPRRRKA

SEQ ID NO: 143802 - protein, 136 aa, Oryza sativa
  Clone ID: PAT_MRT4530_44676C.1.pep
ERLAQLFEQAGIVEVSEVIYNRETDRSRGFGFVTMSTVEEAEKAVEMFHRYDVDGRLLTVNKAAPRGARLFSEHGKVVDARVVYDRETGRSRGFGFVTMATQEELDDAIAALDGQSLDGRALRVNVAEERPPRRGF

SEQ ID NO: 143803 - protein, 131 aa, Oryza sativa
  unsure (1)..(131): unsure at all Xaa locations
  Clone ID: PAT_MRT4530_44677C.1.pep
VGGGALPPSLEACAEVAGLGRDDGDDGGXRCGAERRHGRQARQALTAAATRRSATTARARGKQRXRGDLSGGDGKRQRERRGRALGSARLTRTRARRTGRXGREREKEKDGPRGNRPIEPGGGKLDFCGGI

SEQ ID NO: 143804 - protein, 322 aa, Oryza sativa
  Clone ID: PAT_MRT4530_44678C.1.pep
MASSIAMSLRSLAATDAFLPKPSPSSAPFLLLLSPSTPRLRLHLHLRSTRRLPLAPLAASDSFESASSSSAAALDFAEPGAAEESDVPEESDQEEEGYAPEAEEEAEADEEVEEEAVEASAEVAEEAEDVEEVGEYVEPPEEAKVYVGNLPYDIDSERLAQLFEQAGIVEVSEVIYNRETDRSRGFGFVTMSTVEEAEKAVEMFHRYDVDGRLLTVNKAAPRGARVERPPRQFGPSFRIYVGNLPWQVDDSRLVQLFSEHGKVVDARVVYDRETGRSRGFGFVTMATQEELDDAIAALDGQSLDGRALRVNVAEERPPRRGF

SEQ ID NO: 143805 - protein, 64 aa, Oryza sativa
  Clone ID: PAT_MRT4530_44679C.1.pep
QFMLYCPPFGYMGICNVGCLLIIVWCGIAFIIDCSRSRVLIFPFLCSVLRIAGVILATNCDCIV

SEQ ID NO: 143806 - protein, 157 aa, Oryza sativa
  Clone ID: PAT_MRT4530_4467C.1.pep
MACLPVPTMLLRSLFFFLLRPTSLLLLFPQQQIADRGLRASLTSTGRIRARALNYDPDIYWRDTYVVSVPFFAMLSAEMTLGWAAKGAFATSNLYSFTTGDGYERVTGVDAVEERVKEEEPNAEERDGDGRSGAPQGRATVASDAPKSARGFGRTVG

SEQ ID NO: 143807 - protein, 932 aa, Oryza sativa
  Clone ID: PAT_MRT4530_44680C.1.pep
MDHGAYEPIMLSIGPYHHGLSYLLAFEKEKWNCLDLFLKLNREIKLEDYLNLVKDLEEEARACYEDIDMQHDKFLQMLLLDSCLFVHHFRGLEGILPSTLGANICSADSSDIIMERTIHKSTTSQGNFGEQCSRDNSICTQRELVLAGSSREVTSQGTDFDHTEELESSQCNNWQIGTWFDSCIEQDLMLLENQIPFFIVRRIYELFAGNERPISFLTDKVAQSLENFIQYHPRAIQEAHRPKDFHHMLHLFQMYLKPSKKLVEGSQYLERGRYFHSFANICYRYLKIGRKLADSNHDMSPDPLLNCFQDHHPRIRGRRAVQYHQAGVQFKKKSFDRNNPHSLLDISFDNGTLMVPYLFVDQSTVSHFRNLIAFEQTCPQFGNDVTAYSAFMSFLLCRADDIAFLGRKGIIVHHLCSDGEVSAIFAKLGKNVDFDLNGRHFLKHVCHAMEEHYQSRINSECNSIVTHWRKMINLLNFPTSVVKASLINAPPHGIAHGQGRISKDDVMSIVPQNPNADEGPEAWSGSILCCEEEMDPTMQGEGVVGSQEKEVVIASSSLVIKDEMKDLLEDLVKLGMIGTRGGGSAELKLELMPNELRLEGSKNCLSWSRRAQLMLRAKGVDHFLQEDYKEPADKESSAWRMWNTTNSTVVSWLRNSVAPSIARMLETIQNAAVVWKTLSSMYSEEGSVMMMVEAQNKGLNNEFEDRRAAMFHQATLPTMEEAISAMVQEEMRLKLMRGTNPMGSAYIVADDRECYNCGQVGHVSCNCPTPRNSGGRGSMRGWYGGFGGNHGGFGGSHGGRGGDRGGRIGDHGRGRGAPQANAAMEDGKAISLTVNLLSVSSAIDQFKCIVAFDENSCLFQEKGTGRRIGTRGSSVPILGTPDSDSDSGSGLASGLAPAVGDIDATPDIAVASGIFGTDVASVVTTLPLFEFD

SEQ ID NO: 143808 - protein, 75 aa, Oryza sativa
  unsure (1)..(75): unsure at all Xaa locations
  Clone ID: PAT_MRT4530_44681C.1.pep
TNARLLLHHRRAPRPPPSXXARXERQAAAEAGRVVVRXGXVRRGXAAPDRPIWFPGSTPXXWLDGSLPGDFGFDP

SEQ ID NO: 143809 - protein, 74 aa, Oryza sativa
  Clone ID: PAT_MRT4530_44682C.1.pep
PKPFPRHAPFLCHDPAHRQSSINQVCGLTELWLLVAGGWLPACAVLRLVARGYVSTIKLGFGTPGEFFVPDLWG

SEQ ID NO: 143810 - protein, 509 aa, Oryza sativa
  Clone ID: PAT_MRT4530_44683C.1.pep
MGTTSVQKSWRKACGAIKDSTTVGLARAHSKDLDVAVVKATNHVERPPKERHLSKIIAAASGARPLADVSYCVHALARRLSKTHNWVVALKTLVVIHRALREGDAAFREELLSYRRGRGGHCLQMSSFKDDSTPLAWDCSAWVRTYALFLEERLECFRVLRYDIEAERLRTAEGAPKGQSRTRSLGKDELLEQLPALQQLLYRLVGCQVLKESFKIYCAVNDGIINLVEMFFDMTKIDAIKAFDIYRRTGHLPPSSFLGTMEEYIREAPRTAPVANKTVEYRQLEFIPNKEEEPPQPLPEVLEEPVKEEILPEPPEEPHHPAAEVDDEPEPTTTADLLGLNEVNPAAAQLEENNALALAIVSPGSNTSAGAGSGFGGMLGSSGWELALVTEPTNSSSNQLLTESKLAGGFDKLLLDSLYDDASRRQQGAQMDHPRDPFAMSTSVAPPTNVQMSMMAQQQQYFQQEQQQQMVLGMPQQFSGWPQYAGVSQANPFGDTYSGGTLHGSSSLI

SEQ ID NO: 143811 - protein, 543 aa, Oryza sativa
  Clone ID: PAT_MRT4530_44684C.1.pep
MGEVKENEVVEIFEHDHDNKIRSPENSVPPAMVLDLNEGFGEGSEEGGVGEDGDEEDDDEDDDDDDDDDGGSTSEVAGGGRSSSNNSSTNHNSGSDKDHDMNSSSSKADGGGDRVPTVRQYNRSKLPRLRWTPDLHMAFVHAVERLGGQERATPKLVLQMMNVRGLSIAHVKSHLQMYRSKKLDHESGHERGAISSVFSPMEFHMRRGDHRFHHHDMFFQRAAAAGVSPFSSRMLHENGGGFFASRNPGLPESSRLYGLFQRRQQAPMQKFDFKNCNSFSRNQEWAFNQQHAAARAAGAVNGHGPAKGLIHEMIFRKEGKPTSHLFDVRDAIASTRVTSATTAAAADHRLDGAGKAGNFDWIGSSSSRPLTRTMSAAAAATMGDHHHLRWRGGAAGSGNTTASSDPVVASEAALGSLLERAKTKATEAMRLETPVKMTAAAVAAEEINGRTPDLQLSLSPNAGDHRSAGEKRKFLSEQEVDSDKQQLPLTLSLSLRGGGDNGGGGGAEAAGRLEEEMTGSSSSKKAALGLSTLDLTMSIKALE

SEQ ID NO: 143812 - protein, 403 aa, Oryza sativa
  unsure (1)..(403): unsure at all Xaa locations
  Clone ID: PAT_MRT4530_44685C.1.pep
DDPPMEVGSLYSMIEFRSIVRQHAVKGXFQLGTKKIDKEMFRGFCTAERCPWAIVARLMPDGVCVLQDTIKKFAHSRASTGRVKIKMASYKWVANNTIPFLKKDPTMGAKQLMXDLETKYNITLRYHTVNRSMXKAKDKIFGTYLFNFKAKVELKMSKKCCGDRLQEIVDGVYFHIFYCALKPSIDGFTNGCRPYLSIHSTALNGSWNGQLASATSIDGHNWMFLVAFVFFQSETTYNWTWFMQQLHXAIREQSHLAICSDTCKGLDKAVKNVFSTTEYRECFWHLIXEFHXKFYGLVFGNIYPTATSYITDKYEHYMNNSXTNPDVRLYLETYHXLLWMRSKFLEKIKCDFITNNLVESWNKWIKDLKDHPIVDLVDGIRAKTINLLARRRKIGEKLDGARL

SEQ ID NO: 143813 - protein, 78 aa, Oryza sativa
  unsure (1)..(78): unsure at all Xaa locations
  Clone ID: PAT_MRT4530_44686C.1.pep
HAPFKXRNFYPPQRSLAPSSLMLDRFRSGTXPFLYTAVWRAMMHLRKRRIETYRGYIWKFMLVPTVMVCSLWFLRSFS

SEQ ID NO: 143814 - protein, 1113 aa, Oryza sativa
  Clone ID: PAT_MRT4530_44687C.1.pep
MEIPAVESSAAGRMPPRIRRRLLEGSRVGGGAPTSAEEIEAKLKEAELRRQQFHEWVSCKARKKPRSPSWSSQEEDQGQRLEAKLQAAEQKRLSLLAKAQNRLAKLDELRQAAKNIVEMRIEKEREELGTRVESRVRQAEANRMRLLHAHMQKRAAMKERTARSLVRKQTSERKYTERVKSLILQKRNAAEKKRLALLEAEKRKAQARILHIQRAAKTVCSKRESERRQLQEQLESKLQKAKRQRAEYLKQRVSPRSSAHADYIKHAEFLSTKLARCWKRFLKSNKTTYALVQAYDALGINEMSVKSMPFENLAMLMESPTTLQTTKAVLDRFEKRLLLSQPTGSSSAENIDHLLKRLGSPKRKAPASRSRVAAKKPAKGSETSKLSRYSLRVVLCSYMILAHPGAVLSGQGEKENLLMESAENFVKEFELLVKTVLDRPGGASMQSTDAASQKKFRTQLAAFDKAWCAYLYHFVVWKLKDAKSLEQDLVRAACKLELSMMQTCKLSSDGQSHDLSHDMKAIQKQVTDDQKLLREKIQHLSGDAGIERMNSALSDTRSKFFEAKENGNPLATSVANVSTPLSINSSGQVPNPTSKPTVEGSSFTAQSLPGAASSSSSTSPMKPPTDNEQMVNEMLHEDDVSFARNSDNVSSAEKDFQAKVKATMEKAFWDLVTDSMRGDKPDYSQLINLVKEVRNSLHELASNELKEEILENIDLEILSQVLQSGSQDTRYLGQILQYSLDMVRKLSAPAKEDDMKRSHEKLLNELAASSEVNDNGISSFVIAVIKGLRFTLEEIKQLQTEVSKARIQLMQPIIKGSAGVEYLQKAFTDRYGPPANASVSLPITKQWVSATKSIVEQEWSSHLESLQALPADHAQHVVPVLRAGHGAPAPQASSSAASSSGLPECKGEKIDKLTRVGLLQLISNVEGLNMQSTPETFQINLLRLRAVQDQFQKVIVIATSMLVLHQVLMLKIAPPELQNTISELYDALVKLLDNNADASTKEIVEAMTRSLASVGSLPEEQIQDTTELATKMLLKSLQAGDIVFGKVSRAVYFAFRGVVLGGGAKGKKLAEAPLRRLGAAKLADRVVKAGEVLIKMAVISEKVHGQWYKALAL

SEQ ID NO: 143815 - protein, 157 aa, Oryza sativa
  Clone ID: PAT_MRT4530_44688C.1.pep
MGMAPAGRLLLISCLLCVPNSFGFAFAVEEEEDGSGLMPQLSPTGSPNPLVPFLAPAPLAPFFNTTPPNLSGKCSLNFTAVGDLITTTAVDCFASFAPFLANVICCPQLQAMLTILIGQSSKQTGSLALDPTVATYCLSDVQQLLLSQGASDELHNI

SEQ ID NO: 143816 - protein, 98 aa, Oryza sativa
  Clone ID: PAT_MRT4530_44689C.1.pep
KKKKAPPKGGKTGGGPPPRLKFSPPKGKNGEGKSENPPQGPNSSFWGGGPQGPNQTPRQGGKGNPGQKGGGPKDKIPGFQGGGASPLKNMGGGFNNLL

SEQ ID NO: 143817 - protein, 64 aa, Oryza sativa
  Clone ID: PAT_MRT4530_4468C.1.pep
PSHSSFISRMDGFHFRIFTSLIDNEIASAPTRVGKQVAKIMPVWLLLASIQVVIGFHTGMVADS

SEQ ID NO: 143818 - protein, 67 aa, Oryza sativa
  Clone ID: PAT_MRT4530_44690C.1.pep
LITGVKLYFALATLRSNWRSKKRGKTEESWLLNQCIGGTLGLILAKARTWAKSRRAIGDAYSKVPTV

SEQ ID NO: 143819 - protein, 309 aa, Oryza sativa
  Clone ID: PAT_MRT4530_44691C.1.pep
MRALLRAASVLRRAAAPALGGGRAAPLPPKNLPAVCLNGYSTLLAPANEVLIPQELLSSKTVWTPDRQYEDLVARVTNFHNEDKGFMVLDGDVFDVPIRKDIVHRVGTHSTKTISEVSGTGRKPYNQKGTGRARHGTLRGPQFRGGATMHGPKPRSHAIKLQKKVRRLGLKIALSARTAEGKLLVFDDLEVPSHKTKNIVQYIGQMEGTKKVLLVDGGDIDKKLKLATQNLHYVNVLPSIQLRLLHSNMDVTAGVSEQEQLCTVAFPITGWSNGTSVLALGDKNILRVLRRHKTKKGVFVRKGEAFVPA

SEQ ID NO: 143820 - protein, 218 aa, Oryza sativa
  Clone ID: PAT_MRT4530_44692C.1.pep
MRNEKKEAAEEEEEEEKKFRWLDVVRYAAAGVVALLAVGVLVGAIVVVLRPDALVMKVIHGSMLVNLPPPSLTFTFQLEVDNPSGRDTMSFTDMSVAVLAVSVSGGGVISMANLFYLPNITDLQPGKMMQVVTTQWTTNPEAEVGDYFVRRLSRGETMAVTLRVQGILITRLDTLNGDGPVHTSKANVTYTCFNVKLGVDKSLNSTDDVSCNSKQWRI

SEQ ID NO: 143821 - protein, 60 aa, Oryza sativa
  Clone ID: PAT_MRT4530_44693C.1.pep
REIYGHVQFGRKRKNTTVLSRGFLSPRGKIIGRQITLFYTGFKEKTTTFSFFHTKFVQAV

SEQ ID NO: 143822 - protein, 135 aa, Oryza sativa
  Clone ID: PAT_MRT4530_44694C.1.pep
SFVTTKESLTGSVSHKTVLRAASKGKKKKKILLTKSPCYNQHIKQIIYLCHAHVNGCVPVFTVFLIPFTTASRTIHTIGSMHTFFFLAVRKRSNTGIQQKTLHTKRRKPGIRQTLTSVARLLFRHPESCVTEANF

SEQ ID NO: 143823 - protein, 59 aa, Oryza sativa
  Clone ID: PAT_MRT4530_44695C.1.pep
MPILLTRIWWTGSTLLIDIGESRQKQAGVAVFGGQQAATRRRGIAVFSGDLVTWRREGS

SEQ ID NO: 143824 - protein, 164 aa, Oryza sativa
  Clone ID: PAT_MRT4530_44696C.1.pep
ADDSELFPDVLEGEVSSNDTTTQQCSSEIYRAISAAAAVCDANISLEKKTSALDSTTMHALRCAALPCVRLGSATAHGAYAILALDSMPLQRRAMSRRGQAAAPRRAQVFDSRDAPRARFSAPECLKFSTDRGPRSPDISAPTLPGVAFAFSADLLQSIARSLP

SEQ ID NO: 143825 - protein, 149 aa, Oryza sativa
  Clone ID: PAT_MRT4530_44697C.1.pep
ACFAWPGSPAPAADRRECRLQNMGGLIRARSFEGGIRVWSTQPEAPPRIPPSTAPSSSRDPVDVDADSWAGWGREHQIERGPQLTCRCRRRFMGGVGKGAPHLSMARRKGRRRPATIAASDRFHPSLTDFAHRPPPVAGGHFHRPRFRP

SEQ ID NO: 143826 - protein, 68 aa, Oryza sativa
  Clone ID: PAT_MRT4530_44698C.1.pep
MPALRGQGLQRLLPTGASADCRMVWSTQPEAPPRIPPSTAPSSSRDPVDVDADSWAGWGREHQIERGK

SEQ ID NO: 143827 - protein, 145 aa, Oryza sativa
  Clone ID: PAT_MRT4530_44699C.1.pep
ARGRERTSLEFFFFFFFFFFFFFFFLDLESIHSHAGFPGSTKSSRERAREKAGGGSVLQRRAVDDGRNWSTTAEIGRRRRWSRVANVLCVRPWRGSLEEEGAVDGGMRGGASGCVDHTLIPPSKDLARIRPPIAASLPQRWRHDL

SEQ ID NO: 143828 - protein, 247 aa, Oryza sativa
  Clone ID: PAT_MRT4530_4469C.1.pep
FATEVHPSPPHPTLPCRTHRAARERETRQGRAARRSASPPEPAPARSPESPPSCPSSRPGRAPGRRAHVGGGADADAAPDVRGPHQRPPAVLPCRSPADGPSSPPFRLVVSSSVPPRVRQLLCPSSRDAPISSPVQRRREGSPSSRWKSTTPGRLPSSLLERLPRRLSLLSRRAPAPPLVAHRRRRQRLPPHPPASPKAPHPLPSQCRRRLPSILGAGASSLHPRCTVLHRVETVFFKPRSTAPGTP

SEQ ID NO: 143829 - protein, 114 aa, Oryza sativa
  Clone ID: PAT_MRT4530_446C.1.pep
MQHQGITVLHGGGWNAFVNVTDNGSFGTQGLFGTALAPAPPLLELELSQLLHLKWEPSWVELFHKMNYGGGLGFKQLHNSTSDPTTEAKFRNWSSNKHTLTKLRQGSITNLKVE

SEQ ID NO: 143830 - protein, 38 aa, Oryza sativa
  Clone ID: PAT_MRT4530_44700C.1.pep
ILGRGTYNVRCIEVSITQRRCFAVSRYHNEYQSHTLSL

SEQ ID NO: 143831 - protein, 43 aa, Oryza sativa
  Clone ID: PAT_MRT4530_44701C.1.pep
SLRYSSSITAGTAIRIVLTLIRGVPRSCIIISPSKPEAMDFSP

SEQ ID NO: 143832 - protein, 165 aa, Oryza sativa
  Clone ID: PAT_MRT4530_44702C.1.pep
MLPAATAAVTVSAIDVGDGEERPLCRNGSSCDGPTATHRPWWPWCQWPSESLSIGSGLAFDVSTGTVCSNAYSNKGQFLDQALFHLFGWAEIPALCWEKKHQVPGNDRKEYVLFRGARQWWYRGEVKKGGVLVAAASRSRFSVYYYFSVQRTTGGKRWRAMSGIT

SEQ ID NO: 143833 - protein, 472 aa, Oryza sativa
  Clone ID: PAT_MRT4530_44703C.1.pep
MEVFYYLVFGGLAAVVAGLELGKSGKDRVATTPAFNAFKNNYILVYSLMMSGDWLQGPYVYYLYSQYGFDKGDIGRLFIAGFGSSMLFGTIVGSLADKQGRKRACITYCISYILSCITKHSPEYKILMIGRVLGGIATSLLFSAFESWLVAEHNKRGFDPQWLSITFSKAIFLGNGLVAIIAGLFANLLADNLGFGPVAPFDAAACFLAIGMAIILSSWSENYGDTSDNKDLIAQFKVAAKAIASDEKIALLGAIQSLFEGSMYTFVFLWTPALSPNDEEIPHGFIFATFMLSSMLGSSIASRLLARKLKVEGYMQIVFSISAFTLFLPVVTNFLVPPSSVKGGGISFGGCLQLLGFCIFESCVGIFWPSIMKMRSQYIPEEARSTIMNFFRIPLNLFVCVVLYNVNAFPITVMFGMCAIFLFMAAILQRRLMVVSDLHRSTNADSVLKVLIMGKFPSEAVEMTGEDEPLNP

SEQ ID NO: 143834 - protein, 141 aa, Oryza sativa
  Clone ID: PAT_MRT4530_44704C.1.pep
MDRKRRRRALPPTTRGIESMLPRAGGGGAPHARAPAGFSPDGEADNPEREGIETAASSGRTRTRAPAGFCSGLPRARSPETPQMAETLTLDSERERERERERGGTRRRGEAEEGGELATAKRIKREGTERASRNFENPRSH

SEQ ID NO: 143835 - protein, 417 aa, Oryza sativa
  Clone ID: PAT_MRT4530_44705C.1.pep
RIQSEFPPPPQLSSPPPEILTPTPHRREIERWLPWRSAPPPTTGSCSTPTTPPTPPPTTTTSSRSLPPATPPPAPTKRRRTTRWGATLTATTSTAENSRRRTRRARRRRGRSRASSTTPPPTTSPGTSPSTPSAAPSTSSPTRASPPYRSTSPSSPPPAASSASAARPPAPTTSPTRPPSGGCASLATPATTSTPPSSSPSRSPPPPPPASAASASSTTTSSSPSTSGAASGPSSPSPPGHGSGVSPPGSPSSSRSSPSQVSAPTAAPSGAPPSASSTTTRRRATPTSSPRRPRWRPGRSGRSARWRATSASPAWTSASPRWRCSTSTWTSSPPMGSGRGRGPASSRAAASGTARASSCSARRAWRRSSCGTPRRSASSPWTSKAAPPATSARSQARTTREVSSPTLPQSPKSPAIK

SEQ ID NO: 143836 - protein, 1391 aa, Oryza sativa
  unsure (1)..(1391): unsure at all Xaa locations
  Clone ID: PAT_MRT4530_44706C.1.pep
MVTKTRSNETIIDMEEMNEFRVDMAALKKEVADLKGLKNEVKEIKGLLLDLCKRKEVEEAEVTAAAAAATTVTATAAAAMGTGAQSSAMGADVAQTSTQARGNQQVHTSADTAGTSMHTTQGGNVPPNTTIPFADFTFQHFQPRVERAGGSVNVFQGNPKVHVIDQQRNGHHGHFVEGNHYAEAVIKGPRLEISLFTGEDPVDWLKQCEXFFEITGTPVDQWVNLAVAHLYGRAAKWFRGVGLPWQVITWPQWCAMVCTRFSAANVHEEVELFQNVKQYGLSVEQYIDKFEEYXGLRGEIKHDVCGQKPQGLLESYWYAKNYEKAANARKTAANFNRNRNLNLNAGPPGRNAGNRAQQRGEVEKKEERKCWFCKEPWFPRHQKXGQQAEGMAAQQTEETKEELLSISLNAIEGTSRPDTFSVILKFNGKKAVGLIDSGSTSTFMDNEFAIRNQCPLIHTKTKRVVVAGGGELRYEIQILQVCAISDEENFSGSIPEEIQEVLMQFPAVLQEPXGLPPRRNCDHIINLKXGAEPPNLRPYRVPHYQKEAREDIISELIQSKEIKVSDSPYSSSALMVRKRDGSWRMCVDYHQLNAQTIKNKFPMPIIEDLLDELNGAKIFSKLDLRSGYHQIRMAEKDIPKTAFRTHLGHYEYNVMPFGLTNAPATFQSLMSQVLAPYIRKFVLVFFDDILIYSNNKEEHLGHIRLVMQALMENQLVXSGLSKVSYLGHVISEEGVSTDPKKISDIKHRNAPTSVTVLRAFLGLTGYYRRFIKGYREICRPLHNMLKKDGFSWGQSQQEAFELLKEKMCSSTVLALPNFDQPFVIEADACGYGIGAVLMQGGRPISYYSKALGPKAAAQSIYEKEAMAILEAFKKWRHYVLGGKLVIKTDQQSLKYMMGQRLVEGIQHKLLLKLLEYDYTIEYKAGKDNLVADGLSRSPNLKVGEDEQCSTVAVVIPEWVQDIKMSYEGDIQAHKFLSIIGTEVDPTGNYRXGGRVIKISRKNLCGRATYHRIKKLFYWPGLKKATENFIRSCPICQVTKAEHVHIPGLLNPLEVPDMAXTHISMDFIEGLPKSKGKDVILVVVDRLTKYAHFLALSHPFTVEDVIQVFMDNIHKLHGMPVAIVTDRDRIFTSKFFQEIFKAKRVQLRFSTAYHPQTDGQTERVNQCLDXYLRSMTFQEPQQWFTWLALAEWWYNTTFRTSIQMTPSQALYGYPPPQVNEFSIPCNVSEEARVTLKERAAILQKLRDSMGEAQRRMKHYADLNRTERVLEVGDMVYLKLQPYRQAAFGIRGSLKLRSKFYGLFKVIEKVGKVAYRLQLLEGVGIHPVFHVSQLKKHLGQHVVPMPNLPAVGPEGQIKTEPVAVLQRRMIPRNNEPVIQCLILWQNLTPADAT

SEQ ID NO: 143837 - protein, 211 aa, Oryza sativa
  Clone ID: PAT_MRT4530_44707C.1.pep
MTVAYLKEMPSTPSIPSCTSGMRSVAARLLGAGTGTRPLSFVGSNGVGGRSASGSCHAGQSRALVNYDDDRGTYIIFNIADSLFIRDLNYVCSRYPLASLYKYYIPRFSLSDRIVNPISVVRRCTGVAWVPGHEGFFVVSNADGNLFVYDKSKDVNTDWTFPTVEDQSEMKISYAKSSKSNPVARWHICQGAINAISFSPDGTYLATIGRD

SEQ ID NO: 143838 - protein, 345 aa, Oryza sativa
  Clone ID: PAT_MRT4530_44708C.1.pep
MEKKKVAVPLVCHGHSRPVVDLFYSPVTPDGYFLISASKDGNPMLRNGETGDWIGTFQGHKGAVWSCCLDTNALRAASGSADFSAKVWDALTGDELHSFEHKHIVRACAFSEDTHLLLTGGVEKILRVYDMNRPDAAPRELDKAPGNVRTVAWLHSDQTILSSCSDMGGVRLWDVRTGKIVQTLETKAPVTSAEVSQDSRFITTADGSSVKFWDANHFGLVKSYDMPCTVESASLEPKSGSKFIVGGEDMWVHVFDFFTGEEITCNKGHHGPVHCVRFAPGGESYASGSEDGTIRIWQLSPPNADDNEAVNSNGKPTVGVNEVARKIEGFHIPKEEEQQQQQAEG

SEQ ID NO: 143839 - protein, 76 aa, Oryza sativa
  unsure (1)..(76): unsure at all Xaa locations
  Clone ID: PAT_MRT4530_44709C.1.pep
MNCETCQLIELQLEPLEIMDELLCIXHTIFFHGALSLVRPKDVDXDFFEITYVQCVLPELEEEVDEKINQLCACVE

SEQ ID NO: 143840 - protein, 68 aa, Oryza sativa
  Clone ID: PAT_MRT4530_4470C.1.pep
TAFELWSNYGWTPTGCLVKRERLKLGANAVLPPLGERISPVGREIWMGVVVDGVKAPGTVPGVGPGLS

SEQ ID NO: 143841 - protein, 113 aa, Oryza sativa
  Clone ID: PAT_MRT4530_44710C.1.pep
SSSSSQATSSTSMTALLPSRAAASSWRTLTLAQKLAMSSATTTSSSVSTRKPCSSQIRNPASSVDAKGKTGSYANPSGVMDQNLAGSYRDPGYSGVHTAGSSRPSASTVDDVA

SEQ ID NO: 143842 - protein, 43 aa, Oryza sativa
  Clone ID: PAT_MRT4530_44711C.1.pep
ISCERRASEFYFGDAIKEGLRWRAGEVKLDPLKGTAVNFFEYQ

SEQ ID NO: 143843 - protein, 175 aa, Oryza sativa
  Clone ID: PAT_MRT4530_44712C.1.pep
MAAATPVTSRAGAYPHEPPATRAVSESSSSSATTVFPPTGWQARARGKEDVAAIPRLCASVSDAVLLTILRRPPLLTIHRANAGGASGDGRNGGERSDAEHADADGCSSVVAASRDASSNNKEPQMADAAKADAAAKATKMDMLEDDDESPASSGSARVAWWCVTAGACLGIDTP

SEQ ID NO: 143844 - protein, 609 aa, Oryza sativa
  Clone ID: PAT_MRT4530_44713C.1.pep
MVQAQAAAKEAAAAAIPLMAPYKMGRFELSHRVVLAPLTRCRSYDHVPQPHAALYYSQRATNGGLLISEATGVSATGEGYPEIPGVWTRQQVKAWKPIVDAVHRKGALFFCQLAHVGRASTNAAYVVIHLLGDFILRSCSSLGLRQFVVVLSQAFCVFCVSCTHPQSPCATVLALSPLELEGTCKAGEEAAETGGRTEEADYSQNGVAPRRLASGGAREGDQQPNGQAPISSTDKQITPDDSHTVYSKPRRLRTDEIPHVVDDFRVAARNAIEAGFDGVEIHGAHGYLIDQFMKDSANGRTDQYGGSLENRCRFAVEVIDAVVAEVGADRVGIRLSPYIDFMDCFDSNPEALGSYMVRQLNKHPELLYCHMVEPRMATVEGRRKINHGLLPFRKQFNGTFIASGGYDREEGNKVVDDGYADLVAYGRLFLANPDLPRRFELNAPLNKYDGSTFYTHDPVVGYTDYPFLEEKKEDSATESLSWLTGEVDDTVVDEGVTVSLPTAILAWAATVRSWRGEGGDTPGCQIPAISSSSSSSAAAAALPPPAAAMGAYSLARSCGAAPGRRFLHLIVIGGGLRATLLPLDSAPPPTGSALPSGRTAADAPPLRRI

SEQ ID NO: 143845 - protein, 104 aa, Oryza sativa
  Clone ID: PAT_MRT4530_44714C.1.pep
MSPPHDQRCNTPHATAHEIALPKPSCTSLAAAWIQGVADGSGLLAMNRSIARLKQSMPSDHHMRLSLRRASPNIDAVTSVVLKGVKMALWGGELEKRGKIGWQH

SEQ ID NO: 143846 - protein, 81 aa, Oryza sativa
  Clone ID: PAT_MRT4530_44715C.1.pep
MAAGGVDVRVSCETLINVVKHSDPEGLKKAKASRTGGTTMSSRGVKTFENAVIAGPAKAGLDFHLPLTACKSIDDVPMLHK

SEQ ID NO: 143847 - protein, 61 aa, Oryza sativa
  Clone ID: PAT_MRT4530_44716C.1.pep
CRSYSWPKLTSLICLMYSASAHHYSSLSGTCIREKWATFQLTVVYVQGCTHGDKCSISKKK

SEQ ID NO: 143848 - protein, 82 aa, Oryza sativa
  Clone ID: PAT_MRT4530_44717C.1.pep
MSISTDQDEDAVCDYVGASTLTRESWTDTGGFTCSRHGAIVLHACCRSTTPTLERINDVTVAADHGIEENMTYEATAPVTSV

SEQ ID NO: 143849 - protein, 264 aa, Oryza sativa
  Clone ID: PAT_MRT4530_44718C.1.pep
MSEGRQVGVAGGDTAACVPWVPSPYSLPRESGRRQCGRRGRISASGAERVLAWGWNDLDGEGPRGRDRSSREGSDEPTAVSSLVRALEATTSSGAQCCLGRSAEQEVAWRQLQWRRRRSSREGSDEPVAVLSSLEDERRTGSYEPPRVAAGVGFAREGGNGGEYDGGGEGVAQSTTVEARPLTSVTTDADADTDPAALARRREEDGEEAEDRRKPEEAVAEEEAVLAFAARHFLRPQILSLRPPAAAPCLAIASRPLATLASST

SEQ ID NO: 143850 - protein, 254 aa, Oryza sativa
  Clone ID: PAT_MRT4530_44719C.1.pep
MATETTSSKALSMKLLVDSKAQRVLYAEAGKDVVDFLFSLLTLPVGTVVKVLSKDSMVGSIGELYASVEDLDATYVRSADARNVLLAPAGGFDTGKLLQLPETAAPLATKLYRCSSCDYNECYDYVSTVSGLRCQIARCPGKMTVAMKLVVSSTSTTATGSASGGEAAQPAYAVAGTGFVQGVVTYTIMDDLRVAPMSTISGITLLTTFGVTDITSLQEKTVQIGYTEGLAMLKASLQSKTVLTDVFLGKKRKA

SEQ ID NO: 143851 - protein, 330 aa, Oryza sativa
  Clone ID: PAT_MRT4530_4471C.1.pep
MLTISSVTRATHPHPVSCHDAATACSPPAEAAAAPPSTARLAFFHAALYLLALAQGFHNPCSEAFGADQFAPPSDPGARASRSSYFNWYHFFNSCGYAISNSALSYVEDSQSTLFTKQGSTMDRRVGGIVVPAAALNCVVSFTMITLVPVYDRAVVPLARRFTGHPAGVTTLQRVGAGMATSCLAMVVAALVEARRLRAASDASLVDRPGATVPMGVWWLVPQYLLVGLAKVFGDIGLDEFFYDQAPDGLRSVGLAMSLSVLGVGNYVSGVLVSVIDTATRSGGESWFSDDLNRAHLDYFYWILAAFAALEVVVFVYIAKRYIYKNKGEP

SEQ ID NO: 143852 - protein, 623 aa, Oryza sativa
  Clone ID: PAT_MRT4530_44720C.1.pep
MLRKFLMKLFSLWEWNNIFPKYRNMICVILNSMSWVTVSSTVVSLTIASAGQRSSMMSIAIYLLATSLTACLTVKLVVEYAKAPLEAKAYAPRAKVLRDGMWINVHAVNLVPGDIIFLKVGDIVPANARVLRFEKINTMTCWAKRSVDCVHGFLIYYAWTVSCGQGTAVVIATGRDIPRSTLRLYPQRYTRPGQLKEGIMLVGCFCFSLVLFGTIAEVILRLLFQKHSSGAMLQGGCFMALIGVVPMAMPVVLYLALAFGSLRLCLLGVASRGTVALEDLASMDVMLFNMTGTIKCNKPSFARDKIELFAKGVNEDQAIVLASRASRSQHELYIEPIDPAILSLLDDPEQARAGVQVIEHHAHFFVSLKLMFLATYIDENGSKCCVFKGDPANASHLYNIHTTEKRVAHQCGCSKAVKERISMIMDNLAVDGYQAIAVGHQVIGVDLGQRRIGTRLREELRSKAIKDAGEAKPIQPFHVAQDGEWLGSAGLHRPSSDGPRRRPMAHGLRRCRQLACARTRAEKPYAATPVSRDSIAGGCRSAGPTRDFASARGSGSAGRVAASGWLGAGERALRKRRRNAHDAAGQRGKFGFVKTESTRIHQQEDHVRVRIDEVAIIWSFSFE

SEQ ID NO: 143853 - protein, 102 aa, Oryza sativa
  Clone ID: PAT_MRT4530_44721C.1.pep
MVEHGSNSLDMSANSFGMKHMLKLSEFDMHQDFYMVGGGLVTRLRKSSGQTMPPPPPSPGRIREGRGAAPPPPNVVEGRGKGRVRVMSRLSQAGAAYIWQPS

SEQ ID NO: 143854 - protein, 73 aa, Oryza sativa
  Clone ID: PAT_MRT4530_44722C.1.pep
METTRRRESIWRRESKASSMAGLVLAGAVDDAGVVHVDGDVEGVHRDVLHEAELLVEIVDPHEADLNASDGND

SEQ ID NO: 143855 - protein, 97 aa, Oryza sativa
  unsure (1)..(97): unsure at all Xaa locations
  Clone ID: PAT_MRT4530_44723C.1.pep
LSTGNTRRPDIEGIGVRWYEDLRSTTSSKQKTGIIPVIALIQLIWDYMTEITDYKGXVELDNTDEIVVELAVMDVLAVRFDALSPPGGLLTTNLVTS

SEQ ID NO: 143856 - protein, 170 aa, Oryza sativa
  unsure (1)..(170): unsure at all Xaa locations
  Clone ID: PAT_MRT4530_44724C.1.pep
LAIAIEKIAKKKRPPPPTDSPLDEADAVVAVDTDGERERKRGRDGRRRRLRRTPPSLRCAGETGRRAAAATAASVGKGAAAASVGEGRHCRHRRRSPPSPRRADEKGGRREVKRRRWWERRPAGGRGRGERXGERAAPPEGGEGKRRRWGEGEGEXAASVVGEAANRLGG

SEQ ID NO: 143857 - protein, 469 aa, Oryza sativa
  Clone ID: PAT_MRT4530_44725C.1.pep
MVLVAIGVVVAAAVVVSSLLLRWNEVRYSRKRGLPPGTMGWPLFGETTEFLKQGPSFMKARRLRYGSVFRTHILGCPTVVCMEAELNRRALASEGRGFVPGYPQSMLDILGRNNIAAVQGPLHRAMRGAMLSLVRPAMIRSSLLPKIDAFMRSHLAAWSSSSSSAVVDIQAKTKEMALLSALRQIAGVSAGPLSDALKAELYTLVLGTISLPINLPGTNYYQGFKARKKLVAMLEQMIAERRSSGQVHDDMLDALLTGVEGTREKLTDEQIIDLIITLIYSGYETMSTTSMMAVKYLSDHPKALEQLRKEHFDIRKGKAPEDAIDWNDFKSMTFTRAVIFETLRLATVVNGLLRKTTQDVEMNGYVIPKGWRIYVYTREINYDPFLYPDPMTFNPWRWLEKNMESHPHFMLFGGGSRMCPGKEVGTVEIATFLHYFVTQYRWEEEGNNTILKFPRVEAPNGLHIRVQDY

SEQ ID NO: 143858 - protein, 603 aa, Oryza sativa
  Clone ID: PAT_MRT4530_44726C.1.pep
MAAKVYKPAAEVNLGPDSDEFYISPNVKAPRVAGLLVKIFVWILEMPIIGSMVLYILKKDNLINKLVQDAEIPEPPLFTSTHSWEDIPEQNVCLTKPDLSPPERVQEAVSCLPASLESTLAGSPPSSPKRWTIRDFNRAYSSGEVTPVQVAKRFLAAVKECSGPGLNMAFFISYSPEDIIRQAEESTLRYQRGTPLSAMDGILVAVKDEIDCLPYPTTGGTRWLGRARACAADAAVVAQLRACGAVLAGKTNMHELGAGTSGINPHHGSTRNPHNPGRVSGGSSSGSAAAVCAGLCPVALGVDGGGSVRMPAALCGVVGFKPTAGRLSNAGVLPLNWTVGMPGILAGTVEDAAVAYSAIVDQSQPSYLRPELNLPLLKSSLSIKNIKLAKYAKWFNDSSEDIRSCCDKSLQMLHAHYGWETLDVTIPEIEEMRLAHYVTIGSECTASLAKYLDKLKRSEIGWDVRVALGVYGSFSSRAYLNSQRLRNRQMYFHKEIFKTADVIVSPMTGVTAYKLQDDALKSGELDYINGGWEACKKHYKKPEVFYDLTVMVGYDKAGLPIGLQFIGRPWSEATLLHIAFAMQEACKKHYKKPEVFYDLLKKD

SEQ ID NO: 143859 - protein, 1459 aa, Oryza sativa
  unsure (1)..(1459): unsure at all Xaa locations
  Clone ID: PAT_MRT4530_44727C.1.pep
IYDFRIWFLVFLYALRTKPRFVTKQTAKIMENKAKLDLLLKKMEETERKREEGEKRQSLEMRSFKEAVESWIPVVEKKMDVLQSAMDLLQTQVEKLASAPANLEPSIPVEYLDSPGVRPNGSTGPNGHRIQNLTREEVTGFTPRPTPVNGTYVSHNVSLIPFNFDASAMNSFQTAVSVGLSGGVVPMTCPKFDGDNPIMWKANCEAYFDLYGTHPCNWVKVATLNFTGNAAFXLQAVRSQLEGITWGELCDKVCSRFNRDRQQALIRQWIKISQSGLVADYVEQFDCIMHQMMAYDPSLKPVYFVTKFVEGLKHEIKSAMLLQRPGDLDAACTLAFLQEEALEGDKPKESKRVDTTSYQKGSHKGAMPLPLPPTTRGGPPFLSQDRRSADQVAQSKEAERLAALKSYRRSKVLCFVCGEKWSKDHKCASSIQLHVVQELMDVLHVTLLSDHEAYEFQENDTLMAISPQAVNGTESSHSIRLRGWVQGIEVLMLIDSGSTHSFVDHQLGLRLSGVKAMTEPVRVKIAYGGHLSCSLHILGCDWLTQGINFKSDFRLLALGAYDVILGMDWLEQFSPMKVDWLQKWLEFKLGNSVIRLQGTLLPNSGPVFVRPYRHTPRQKDEIERQVQEMLHNGVIQHSTSAFSSPALLVKKKDGSWRVYIDYRQLNSITQKGTYPMPVIDELLDESAGAKFFSKLDLRAGYHQIRMAAGDEHKTAFQTHSGHYEYKVMSFGLTGAPATFQSAMNDTLWSVLRKCALVFFDDILIYSPDMPSHLCHLKQVLQLLVDHQWKVKLSKCAFAQEQISYLGHIISGSGVATDPSKIQSIVDWARPTTIKKLRGFLGLAGYYRKFVKNFGTISKPLTQLLKKDVPFQWTAEVDEAFVALKQALVSAPVLALPDFNQTSTVETDASDFGIGAVLSQNQHPVAFISKALEPRTQGLSTYEKECLAIMMAVDHWRPYLHFQEFQTLTDHHSLMHLTEQRLNTPWQHKAFTKLMGLQFKIVYRKGKYNVAADALSRNVPTELSEFLAISVCSPSWLQEVVKGYEQDPVSTKLLIELAINPDAHTHYKLSQGLLKHKGRVWVGDNPSLQYQIISALHDSPMGGHSGFPVTYKRIKALFSWRHMKAAIQHQLSSCSVCLLSKPDRAKYPGLLQPLPVPEGAWQIISMDFIEALDVAKVFMLNVYKLHGLPKAIVSDRDRIFTGTLWEQLFIRLGTKLHLSSAYHPQTDGQTERVNQCLEIFLRCFVRATPSKWSEWLHLAEFWYNCSYHSSIDKSPFEVLYXLPPAHFGIREDACNIPDLDMWLSERKLMTQLLKQQLNRAQQVMKHQADKKRSFRQFQEGEWVFLKLQPYIQSFVAKRANHKLSFKYFGPYKIISRVGQVAYKLQLPSGSAIHRVFHVSQLKSSKGFKQSVQQQLPSPTANIQFPAEVLDTRVTRKADATWEREAALKQRSPNALTWGQV

SEQ ID NO: 143860 - protein, 69 aa, Oryza sativa
  unsure (1)..(69): unsure at all Xaa locations
  Clone ID: PAT_MRT4530_44728C.1.pep
DDPDQMVKPAVRPTQYVIKAAVDACTVRPLAFTSSIGGVTMDPSRATYVVAGEPXSSDRSFWKKTNNWY

SEQ ID NO: 143861 - protein, 1790 aa, Oryza sativa
  Clone ID: PAT_MRT4530_44729C.1.pep
MVGTLTYRLDLSDFSGTGWTAKIMENKAKLDLLLKKMEETERKREEGEKRQSLEMRSFKEAVESWIPVVEKKVDVLQSAMDLLQTQVEKLASAPANLEPSIPVEYLDSPGVRPNGSTGPNGHRIQNLTREEVTGFTPRPTPVNGTYASHNVSPIPFNFDASAMNSFQTAVSVGLSGGVVPMTCPKFDGDNPIMWKANCEAYFDLYGTHPCNWVKVCSRFNRDRQQALIRQWIKISQSGLVADYVEQFDCIMHQMMAYDPSLKPVYFVTKFVEGLKHEIKSAMLLQRPGDLDAACTLAFLQEEALEGDKPKESKRADTTSYQKGSHKGAMPLPLPPTTRGGPPVLSQDRRRADQVAQSKEAERLAALKSYRRSKELMDVLQVTLLSDHEASEFQENDTLMAISPQAVNGTESSHSIRLRGWVQGIEVLMLIDSGSTHSFVDHQLGLRLSGVKAMTEPVRVKIAYGGHLSCSLHILGCDWLTQGINFKSDFRLLALGAYDVILGMDWLEQFSPMKVDWLQKWLEFKLGNSVIRLQGIHSNTESCLPIAPDQLNGLAKSGGIMYLVQLDKNTEQSFQEIPAAKDEIERQVQEMLHNGVIQHSTSAFSSPALLVKKKDGSWRVYIDYRQLNSITQKGTYPMPVIDELLDESAGAKFFSKLDLRAGYHQIRMAAGDEHKTAFQTHSGHYEYKWTAEVDEAFVALKQALVSAPVLALPDFNQTSIVETDASDFGIGAVLSQNQHPVAFISKALEPRTQGLSTYEKECLAIMMAVDHWRPYLQFQEFQTLTDHHSLMHLTEQRLNTPWQHKAFTKPMGLQFKIVYRKGKYNVAADALSRNVPTELSEFLAISVCSPSWLQEVVKGYEQDPVSTKLLIELAINPDAHTHYKLSQGLLKHKGRVWVGDNPSLQYQIISALHDSPMGGHSGFPVTYKRIKALFSWRHMKAAIQHQLSSCSVCLLSKPDRAKYPGLLQPLPVPEGAWQIISMDFIEGLPRSHQQDCILVVVDRFSKYAHFMTLSHPFSALDVAKVFMLNVYKLHGLPKAIVSDRDRIFTGTLWEQLFIREDACNIPDLDMWLSERKLMTQLLKQQLNRAQQVMKHQADKKRSFRQFQEGEWVFLKLQPYIQSFVAKRANHKLSFKYFGPYKIISRVGQVAYKLQLPSGSAIHRVFHVSQLKSSKGFKQSVQQQLPSPTANIQFPAEVLDTRVTRKADATWEYEAALKQRSPNALTWGQVKFQGEGLVNSPATASSPTTVVPEELQNPQVQRAARIKYTGSEGDAISLIHRRYLVLVILSGECSQPAADRGGGREGTRSLEGRESLAGGGVHAGGLDLLSRLRELEVYLVDILAVARRREGAPVGAPRGGAAAAEEEGAPASQSPETPNNNHGHHTLERSCSSLGGRMLFVARGCSRSYEANKYPGCRRRRRGAAVPLLALQRQRQVAGSCRGRGQVLAGARPVEILTVGLVSLNSFESERDIEMGYQNSKNKSDYGLEDFFQEVQEIETLLDKMSNINHKLQEANEESKSVTKASEMKAINKRMEKDINEVGKITRTIKVKLEEMDRNNLENRKKQGCEKGTGVDRSRMSMTIALKNKLKERMKNFQNLRQIIQDEYRQGVARMVFTVTGEQPSDQVIDHLIETGSSEQIFEKAIQGIGRGQVEYRVQLHQYIICSFHVIKAGNSYNSAQMFHNCTYLQIIATVKEIHERHDVVMEIEKKLLELQQIFADMATLVDAQGETLNDIENQVQNAVDHIQRGTGELRTAKRLQKKSRKCMFIAIIILLVIAAIVVLSILKPWAK

SEQ ID NO: 143862 - protein, 35 aa, Oryza sativa
  Clone ID: PAT_MRT4530_4472C.1.pep
EVGRYARMYIGCSIYVSIHTSCDFPWDFGREVVRH

SEQ ID NO: 143863 - protein, 149 aa, Oryza sativa
  unsure (1)..(149): unsure at all Xaa locations
  Clone ID: PAT_MRT4530_44730C.1.pep
SLEGRESLAGGGVHAGGLDLLSRLRELEVYLVDILAVARRREGAPVGAPRGGAAAAEEEGAPASQSPETPNDNHGHHTLERSCSSLGGRMLFVARGCSRSYEANKYPGCRRRRRGAAVPXWPCRDSGKWLAAAEDVDKFLPEQGIEVSP

SEQ ID NO: 143864 - protein, 74 aa, Oryza sativa
  unsure (1)..(74): unsure at all Xaa locations
  Clone ID: PAT_MRT4530_44731C.1.pep
AVCTVXHVEEAIIILRMLPVFLTFVLXYDPIPCLLTXTVQQGCAMDTRLAGTSVPSASLFXCLIVYQMLILVVY

SEQ ID NO: 143865 - protein, 69 aa, Oryza sativa
  Clone ID: PAT_MRT4530_44732C.1.pep
KICQDKFFKTFLYCGRPHQFFSWLLWLAGISSVGPVQIAMVHPPWILCPLATPGKWACVEILKTNSFYN

SEQ ID NO: 143866 - protein, 124 aa, Oryza sativa
  Clone ID: PAT_MRT4530_44733C.1.pep
FASFGKNLSFVSSDQLQLVFVHFAAQVWIVHVAFLWDSERSRERHKPCWLLQCRCSHSMRRGDWRGSLALCNGGRRISAPPRRRSLSSAKRGRSLILRTPLKNNRGSESNFPSSGGRGFLLRRP

SEQ ID NO: 143867 - protein, 357 aa, Oryza sativa
  Clone ID: PAT_MRT4530_44734C.1.pep
MNYRVVNPVKVESGPSTGVANGQPPRPMDGLADGGPPPFLTKTYDMVDDPTTDAVVSWSATNNSFVVWDPHLFGNVLLPRYFKHNNFSSFVRQLNTYGFRKVDPDKWEFANEGFLRGQKHLLKSIKRRKPPNSSPSQQSLGSFLEVGHFGYEGEIDQLKRDKHLLMAEVVKLRQEQQNTKSDLQAMEQKLQGTEQKQQHMMAFLSRVMHNPEFIRQLFSQSEMRKELEEFVSKKRRRRIDQGPELDSMGTGSSPEQVSQVMFEPHDPVDSLFNGVPSDLESSSVEANGGKAQQDVASSSSEHGKIKPSNGELNEDFWEDLLHEGGLDEDTRNPAIDDMNLLSQKMGYLNSSSTKSPQ

SEQ ID NO: 143868 - protein, 52 aa, Oryza sativa
  unsure (1)..(52): unsure at all Xaa locations
  Clone ID: PAT_MRT4530_44735C.1.pep
MSAYCGKDKDRAIKNAXYIXTPXKGXLAAXESTGTIXKRXAXXNXXNXXENR

SEQ ID NO: 143869 - protein, 223 aa, Oryza sativa
  Clone ID: PAT_MRT4530_44736C.1.pep
MVDISSAVYRTDAGYAAGDEATGAGGRDVFASTARHAVGGSSMFSTAKRLTTTKNPAIQASHSFRNMGEKTLREFAAPFADNEYVAAVLIMGWTTGSSYRVSTMDSLIQGSPRCYAGGAFFSKTVRAAIDLFEKMVPTMGWSEERLQTRQRGMHTVKETEMLTTKLDLLVKKLDNQEKGKPQAAVKALDSHITCEVCGNTGHMGNDYPETREEAMFMGNNGYR

SEQ ID NO: 143870 - protein, 55 aa, Oryza sativa
  Clone ID: PAT_MRT4530_44737C.1.pep
AKRQKLKLQEFGGFTFEGKLGQGQALLSFYGAIKNGFSPRDNGGPRTISPLGGVL

SEQ ID NO: 143871 - protein, 72 aa, Oryza sativa
  Clone ID: PAT_MRT4530_44738C.1.pep
QCPPFFFFFFFFFFFFEWNTTQIALLTSEEKNEYLRESYNDNNLCQQNDRCQLPNCVINISTCNKKNRPTKI

SEQ ID NO: 143872 - protein, 109 aa, Oryza sativa
  Clone ID: PAT_MRT4530_44739C.1.pep
MSGVWVFKNGVVRLVEKQQATAGTAVAGGRRKALVHTPSGQVVSSYAALEARLTALGWERYYEDPSLFQFHKRGSLDLISLPADFSAFSSVHMYDIVVKNRDSFRVVDA

SEQ ID NO: 143873 - protein, 108 aa, Oryza sativa
  Clone ID: PAT_MRT4530_4473C.1.pep
PCSPVATPFFQLPVFSLRNCPVLPPQCFPPLRMFAPPFPCPALNSVPAFVHQLRVPPFARVFFGQRQAPAPALLALNLPAIWGFFPRFHPAPWSLPPGGGFWVLIGPG

SEQ ID NO: 143874 - protein, 86 aa, Oryza sativa
  Clone ID: PAT_MRT4530_44740C.1.pep
MGSEVVATAWSMTGDNHRPGRRWIEAAQWLYRWSYEPDVASLMRATRQRCTEDEVGEGVVEKHPEVYQLAPQGGGLDELGSKPYPF

SEQ ID NO: 143875 - protein, 633 aa, Oryza sativa
  Clone ID: PAT_MRT4530_44741C.1.pep
MDDHNLDYKGSGALEELEMLTVNAKEAQELILTKILERNQATEYLSKFMNGSTNISAFKRHVPVVTYDKVHPYILRIATGEESSILCGEYILELLRRLLLMTVINPEAQTELRLGKIVYIYFLECARLEMTGHTKLLAFSGTSRGEPRLMPSILKDLDRRTYLYSLIMPIMNKYISGLGEGKAMYLLFVKAETLTDSGIPVRSVLTSYYKSPHFLHRKHDLYNNYTSPDEVILCPDSQQSMYCQLLCGLVERQHVLRIGAVFASAFLRSISFLEQHWRDLVNDIRIGQLNSSITSPACRLAMLNFLALPNPELADQVEAICSCGSWKGILGRLWPNVKYIEAVLTGTMAQYIPMLEFYGGGAIPFVCTMYASSESYFGVNLSPLCSPADVSYTILPNMAYFEFIPLEDGLRLTDHEEVIENDKLVSLVDVKVGCYYELVVTTFSGLYRYRVGDVLQVTGFYNRAPQFKFICRRNVILSIDSDKTNEEDLHNSVTTAKKILENQNYLLLEYTSYTDISTVPGHYVLFWEIKSTHDERPAPLDAQLLESCCAAVEESLDYVYRRCRAHDRSIGPLEIRLVEAGAFDALMDLLVSHGSSINQYKTPRCIESSLALKLLNSKVIACFFSPQDPECGM

SEQ ID NO: 143876 - protein, 67 aa, Oryza sativa
  unsure (1)..(67): unsure at all Xaa locations
  Clone ID: PAT_MRT4530_44742C.1.pep
EFERRELGAMRRDCXTLDAGNPDRERRHGKCPLTPEEGGLMLRALGFGKGVHIYVASWEGYGGQSIF

SEQ ID NO: 143877 - protein, 591 aa, Oryza sativa
  Clone ID: PAT_MRT4530_44743C.1.pep
MDDHNLDYKGSGALEELEMLTVNAKEAQELILTKILERNQATEYLSKFMNGSTNISAFKRHVPVVTYDKVHPYILRIATGEESSILCGEYILELLRSSGTSRGEPRLMPSILKDLDRRTYLYSLIMPIMNKYISGLGEGKAMYLLFVKAETLTDSGIPVRSVLTSYYKSPHFLHRKHDLYNNYTSPDEVILCPDSQQSMYCQLLCGLVERQHVLRIGAVFASAFLRSISFLEQHWRDLVNDIRIGQLNSSITSPACRLAMLNFLALPNPELADQVEAICSCGSWKGILGRLWPNVKYIEAVLTGTMAQYIPMLEFYGGGAIPFVCTMYASSESYFGVNLSPLCSPADVSYTILPNMAYFEFIPLEDGLRLTDHEEVIENDKLVSLVDVKVGCYYELVVTTFSGLYRYRVGDVLQVTGFYNRAPQFKFICRRNVILSIDSDKTNEEDLHNSVTTAKKILENQNYLLLEYTSYTDISTVPGHYVLFWEIKSTHDERPAPLDAQLLESCCAAVEESLDYVYRRCRAHDRSIGPLEIRLVEAGAFDALMDLLVSHGSSINQYKTPRCIESSLALKLLNSKVIACFFSPQDPECGM

SEQ ID NO: 143878 - protein, 200 aa, Oryza sativa
  unsure (1)..(200): unsure at all Xaa locations
  Clone ID: PAT_MRT4530_44744C.1.pep
CSSRCVTTRKATTNSGSITSSTITPPPTTTATTMTHHGRRRCRCSRPTGIHWTRTKEGGVRIRRCTSWTQIAPXSSAAAAAATARTTSWWRSSSPPGRARAASWRRSSSSCSAPASGASRGRRSSTTAARARSSPTGRPTWPSPSATGGSAGSTCTAASSSAATTCSTKFPRGCSTCRSPWRPPPANSRRTATTRARGDA

SEQ ID NO: 143879 - protein, 169 aa, Oryza sativa
  unsure (1)..(169): unsure at all Xaa locations
  Clone ID: PAT_MRT4530_44745C.1.pep
QXFXXKGNXAMXXMIXRXXXXAIXXPHXKREXKSXGGLEGGPPXXFFXFXXFXTGLGPSLSFFPSERALARPFFLHPFAGAWGGPLLHPARPLVLPRRGPPTKKKAAHPPRGHRNXSRDNLLPSRHXXGTPXXLTXXPSTXLLARKWFRDSHRGMASRXLRRRATKXVG

SEQ ID NO: 143880 - protein, 116 aa, Oryza sativa
  unsure (1)..(116): unsure at all Xaa locations
  Clone ID: PAT_MRT4530_44746C.1.pep
PRVRPRVRGGGGGHIXGRVGRRVAQTREIEPRILGPVPAGIPILFILRLINRELFFYEGGGGKTKNQGGGNKNILGGGGGEAFKGAXXCTSXKLTCXEHKIDRALTSNGKSEIXLL

SEQ ID NO: 143881 - protein, 35 aa, Oryza sativa
  unsure (1)..(35): unsure at all Xaa locations
  Clone ID: PAT_MRT4530_44747C.1.pep
RHGLALFKCLXCVYDLYTYAVQSGKCNFRAQLCQL

SEQ ID NO: 143882 - protein, 352 aa, Oryza sativa
  Clone ID: PAT_MRT4530_44748C.1.pep
MGLVGVGPRTRTRVTFAPLEQQPHVASTRDLYARHRDQDFARAVDDINRVVIDGSTTIQRLGAGIPTTLLGQTQLYSGHPYRLVPVQLRTFLGRLPLRTEVSGETLGEAKVVRDMHERKSEMAKHADAFIALPGGYGTIEELLEIIAWAQLGIHNKPVGLLNVDGYYNNLLSLFDKGVEEGFIDAAARNIFVLADNAGELLTKLTEAAAAAAAAVEGGDGDQVSITFTAGLAVASSGSISLHAGKKNIERGVLVKVEHIIKNFLDHKVGRFEQDGDDRRECKIDFECLYGSGVVNIVRLFFKGWGELREEMALTHPNLVEQCDPSEYPNASLHIFISYGGSSKDSPLYFLTL

SEQ ID NO: 143883 - protein, 216 aa, Oryza sativa
  unsure (1)..(216): unsure at all Xaa locations
  Clone ID: PAT_MRT4530_44749C.1.pep
MQGEHHDHVPVYESGTEVFQKLQEKWNSTKHKRYRAMYSSVVGGIILDPSMMVIPIDDHMVHRGHGVFDTAMLSDGYLYELDSHWDRLLLSASKAKISSPFSRETLRAILVQMTAASKCRNGSIKYWLSAGPGDFLLSPKGCTAPAFYAVVIASAAADAAGGHPRLKEGVRAITSTVPMKDPFFAAMKSVNYLANALAIAXAEERGAYASVWVDGD

SEQ ID NO: 143884 - protein, 141 aa, Oryza sativa
  Clone ID: PAT_MRT4530_4474C.1.pep
KENGCWGGYWRERRREGDGGKAGRSGFASTTRRGTCRGTDACARTGSCSARRPPRTPRCRSRTPSNPRRPSPSRRRRAVPRTCSSRGSWYPPAPPWRRPRRHGAGRRLSRRRRRSRHRRSAAASAAARGWTRGAAAGKRRC

SEQ ID NO: 143885 - protein, 178 aa, Oryza sativa
  Clone ID: PAT_MRT4530_44750C.1.pep
ESSDERYQPGDPSKRAFAYFVLSGGRFIYASLLRLLVLKFVLSMSASKDVLALASLEVDLSSIEPGTTVTVKWRGKPVFIRRRTEEDINLANSVDIGSLRDPQQDAERVKNPEWLVVIGVCTHLGCIPLPNAGDFGGWFCPCHGSHYDISGRIRKGPAPYNLEVPTYSFLEENKLLIG

SEQ ID NO: 143886 - protein, 297 aa, Oryza sativa
  Clone ID: PAT_MRT4530_44751C.1.pep
MEPLLQVLAASDSTVWEGLNAQVQALADERATLEAEWAQLVADCARVDEGRRAVDDMVEVGRKMRQAQLAEIQAREKTLDSVMREMEEELQAALIASSVLDEALGDIHLYTLADLGRLVQDQAGEIAALCLTNKIGPGQLSDAVERLERAGRRVGISVRRDRKLPPTQPALALRLDGLAADLERLEEEVGEAVKSLSASLARAAVELVLASHQARDPDFLLWRALEDFPPGTEQRAREQVREAADAIVSSFEGSAPQFNLTLASDEESGSKDGGGDDGGEDWDDVVSGAGLGGPGTP

SEQ ID NO: 143887 - protein, 98 aa, Oryza sativa
  Clone ID: PAT_MRT4530_44752C.1.pep
GANVPFGPILRIRGINKAFMRHHTFNRQGPARRSAGSFSKLSFDPRGNRPRCVGVSVLINLSPLAPLLVQSIPLARILVNKLALTFLALRAILPVITQ

SEQ ID NO: 143888 - protein, 141 aa, Oryza sativa
  Clone ID: PAT_MRT4530_44753C.1.pep
MASENRVVAALCNGHRTRRRCYHNCNPLLPPPRSSLHSVAVAEPRRNRNPPPLSRSSSPSRFGENKARSEPTAVAAARSHRGHVVVAAADPTFPVMVAVALASLVDVAVDLATPVITTAGFGLELIAERRWRLWQPAVVEE

SEQ ID NO: 143889 - protein, 377 aa, Oryza sativa
  Clone ID: PAT_MRT4530_44754C.1.pep
MERALMSLMRRRSLLQSGGRAPPAMAAAAGGSPFFSTLQQAAAADPVQSPGILPGLKIRDSASQLIGRTPMVYLNKVTEGCGARIAAKLEFLQPSFSVKDRPAISMLEDAEKKGLITPGKTTLIEPTSGNMGIGLAFMAALKGYELILTMPSYTSLERRVTMRAFGAKLVLTDPTKGMGGTVRKAAELYENHPSAFMLQQFENPANVKVHYETTGPEIWEDTLGQVDIFVMGIGSGGTVTGVGKYLKEKNPNAKIYGVEPAEANVLNGGKPGPHLITGNGVGFKPEILNMDIMEKVIEVKGEDAVKMARELALKEGLLVGISSGANTVAALELAKKPENKGKLIVTVLPSLGERYLSSALFEELRAEAEAMQPVPVD

SEQ ID NO: 143890 - protein, 84 aa, Oryza sativa
  Clone ID: PAT_MRT4530_44755C.1.pep
PKSAKSSNSSRRRRKRGENSDIGKAITRSRRRLCRRSDGGRRTPAAPSAVYSLLLRRGRTTTFSEGGLALVEHQFSRFGFPTNL

SEQ ID NO: 143891 - protein, 104 aa, Oryza sativa
  Clone ID: PAT_MRT4530_44756C.1.pep
MVQYVQRNLHGYPYDRTLKGAYSVHSNYGPLDGTLARPIKGEWPSWAVLLGGLLGEAGLPWGEPFLLRPEGRLGGEPFGLGGKPFMLRLEASPRGETWWCNDIT

SEQ ID NO: 143892 - protein, 135 aa, Oryza sativa
  Clone ID: PAT_MRT4530_44757C.1.pep
MAVSSRRAARCMCGGAARLGRQRCEVRRRGGDPAQAQRPCGQHGEGAAAVLAARLAGTDVALVRGTIGGGWFFGATQVKACETLRGMASLSCRVAWWPVDAVADSPCVGDAVARDRGDVVREAMRRPFSGISQAS

SEQ ID NO: 143893 - protein, 174 aa, Oryza sativa
  Clone ID: PAT_MRT4530_44758C.1.pep
MPLPPLATTAGRGTPSAAGRGCSCPPPATTRGPAGLRPATRRRPPAAAPPPSAERRPASRRPLRPRWMGRGGGGGEEEGEELEERGRGREVCHLLYTAPSLVVYSIPLVDVHRRSGEQISRTFVFDVLHREKAAIRILGSASRDCPLFDHNSSSSSSLACYVPSSTPATASTSC

SEQ ID NO: 143894 - protein, 65 aa, Oryza sativa
  Clone ID: PAT_MRT4530_44759C.1.pep
SIGGFVHNVFSGKSKQHGEEPSHVESDKEFSNMLIRGVNCQLLSRKLEGSLSTKARRLTCISLKV

SEQ ID NO: 143895 - protein, 71 aa, Oryza sativa
  Clone ID: PAT_MRT4530_4475C.1.pep
MTSERDDCNEHRSGSPRGAISCSHARRRDMLDEEALLGVVIIQDLAPRAFRVAPGLDSPPPPRAMHGSATA

SEQ ID NO: 143896 - protein, 224 aa, Oryza sativa
  Clone ID: PAT_MRT4530_44760C.1.pep
MARPAARRGARRSRARGLLLLAAAAPVAVVVVGRRRRRVRRSATSSSSSSREGRSSSTCLAMATSRPRGAWPTTRRAGGSTAWPPTPSRRRPQPRRRAAAAATVSPSATTASSSAATRTSSSPTCSGKAPTTARVRSRRVTGRRLTRRGAGCWTASPRTRDTGQRPTATTTALVALFTTSSLASPSSTARSRLMSRVTRSSVTVSSLLMTTCRRMVLQQVLGVC

SEQ ID NO: 143897 - protein, 409 aa, Oryza sativa
  Clone ID: PAT_MRT4530_44761C.1.pep
MACPSRRAWSDGLPPELLAIIVLQLNCLADRACFSAVCRAWRDAAPYADAPQRGVPWLLLPARDAPSFFSLHSGATRRMRLPDGVRGTRFCGVHDGGWAAVAADTWRGFAVVNLFTGVRLPLPEKLRVEVPPGGNHDQFALAAGFTRHHMLIRTVVFSCPPTSPYCIAAAHVSSASNIAFCQPASLSTSWTAYRRDMDIIQDLIFHRGALLQGFHVLTNKEEVLVYAPTAPHRPGAPLKLACTRYSLRPRDDYQPDDALPPTFIATRYLAESRGKLLMVLRHYTGNPVVRRRTRMFRIFELTFGEPAEPRRAATPCWWVEIPELTGRALFLGRSCSRSVDVAQFPMLQEDTIYFLDDANLDLSMVLNNGSTYCNVDMGMYRKGEKIRPGARQFPREFTADCSPPIWLVP

SEQ ID NO: 143898 - protein, 254 aa, Oryza sativa
  Clone ID: PAT_MRT4530_44762C.1.pep
MHAYAEPGIASFFKWINKYFLNRKSMYLTNYFTGVSSWRRRFQNQKKKVKSKSFSLFSQFQSTAVSISNMNWRSEHIWIELLKGSRKRGNFFWACILFLGSLGFLAVGASSYLGKNIISVLPSQQILFFPQGVVMSFYGIAGLFISAYLWCTILWNVGSGYDRFDRKEGVVCIFRWGFPGIKRRVFLRFLMRDIQSIRIQVKEGLFPRRILYMEIRGQGAIPLTRTDEKFFTPREIEQKAAELAYFLRIPMEVF

SEQ ID NO: 143899 - protein, 157 aa, Oryza sativa
  Clone ID: PAT_MRT4530_44763C.1.pep
MASTWRGMASTWRGEDSDSGCPGRGRGRQRRSTLGISIVVSLGKGYAAGLLCCCASLKRVKGKQAGPPLATPLYRHLVPMLLEKGDMGRRRARLNQCVARVFGTKTNRTTCRYTVEVALCAAACKDYQQVELSDPPRYVCKDRFTGFDVSESYLETA

SEQ ID NO: 143900 - protein, 136 aa, Oryza sativa
  unsure (1)..(136): unsure at all Xaa locations
  Clone ID: PAT_MRT4530_44764C.1.pep
TPLCRRRRKRRRAIPIXPPPLLAAGHLALXHPRRGHKRRRPPSPPCPPRRRAPRRLKLTATKRERKKKLGDGEWRRRGVAFIYRQSEEDEEWDSVSWNLRNCPPPLTRSTVPLTGRSGALREGCIRNFAKKDLISF

SEQ ID NO: 143901 - protein, 63 aa, Oryza sativa
  Clone ID: PAT_MRT4530_44765C.1.pep
MTKLIWFCVSDVIEEFIKSGNEIEAIHIAHEAGLLERFPPVPLLKSYIKRITNKTQVALRGGR

SEQ ID NO: 143902 - protein, 131 aa, Oryza sativa
  unsure (1)..(131): unsure at all Xaa locations
  Clone ID: PAT_MRT4530_44766C.1.pep
DDLVQKRGIDGHLTYPFCAQELETTNHILLDCVFARQVWLQVLSPPGXAALSPHGNWLQNWWPSSRVCLLERLRAGFDSLILLVSWQLWKERNSRVFDSALFVXVVLESILSEGQLWSLAGVASFGDLLGV

SEQ ID NO: 143903 - protein, 143 aa, Oryza sativa
  unsure (1)..(143): unsure at all Xaa locations
  Clone ID: PAT_MRT4530_44767C.1.pep
VGRNKYPTQNGLACTSARTAVAALVFTVYDPVIXAMHVRRAAPRSPASPFHHXPPCRRGSAIAACVGRAVHGATPPISPNAFGHARPRLPVTLRHRRSDREXGRRLRNVLVVAIDLIAMTDDLLSMHDPHLVFPPPHVFSIQY

SEQ ID NO: 143904 - protein, 187 aa, Oryza sativa
  Clone ID: PAT_MRT4530_44768C.1.pep
TNKNGLIYYLFTGRGTGQFTYITRKKIHVHVQKLRLVLHASIDKFEWFGGVVLRDIILLGDGGGTRGAGLILGLEDPNNRPRKRGRGWLHFQNGDAINGERGGSGNPRRHLSGEVPLHAQPKKGPPSPQKNRCRGGLEPPGKHGVPLALVGKKGRNHRQGGGKKKPRVRGPNLEAAVKNSGVEIWGC

SEQ ID NO: 143905 - protein, 143 aa, Oryza sativa
  unsure (1)..(143): unsure at all Xaa locations
  Clone ID: PAT_MRT4530_44769C.1.pep
MEPTATSPSIHDVRAPARTAVAALVFTVHDPVVXALHVRRAAPCSPASPFRQWPPCRRGSAFATCVGRAVHGATPPISPNAFGHARPRLPVTLRHRQSDREXGRRLRNVLVVAIDLIATTDDLLSMRDXHLVFPSPHVFLIQC

SEQ ID NO: 143906 - protein, 63 aa, Oryza sativa
  Clone ID: PAT_MRT4530_4476C.1.pep
RFLAASRRSRPTRPSSAASPPPYMTKLSRLLRLPPPSLGPHWLSSMYLCKSRLGSDRPRGGYR

SEQ ID NO: 143907 - protein, 193 aa, Oryza sativa
  unsure (1)..(193): unsure at all Xaa locations
  Clone ID: PAT_MRT4530_44770C.1.pep
MWRRKHEVGIAHRQEIVSRGDEIDGDNEDVAEATTSLAIRPAMAERDRKTGPGVAEGDRRDRRGSAMDGAPDACGEHGSAVAGRPVTEGXSRRAWRGAADVXGRDDEVVDGEHEGCDCGVPGGWGQRQLGRARASATFKQGEAAGLLLGAAAMDSSRRQADGADQVGGGVKEAGGIGGFVGLVALGDGSLSRN

SEQ ID NO: 143908 - protein, 72 aa, Oryza sativa
  Clone ID: PAT_MRT4530_44771C.1.pep
KMGNMMMLFYHLLIFFILHCAFRTDILVSTPCVTFRRHRCRSSILAIVICSFTNFSFSLIFLLTRSSDLFQN

SEQ ID NO: 143909 - protein, 138 aa, Oryza sativa
  Clone ID: PAT_MRT4530_44772C.1.pep
MVLQHSDRMDSLFSPQTSWVSGPIIVGAGPSGLAVAVSLLEQGVPFTMLERADCIASLWQKRTYDRLKLHLPKQFCELPRMAFPAHYPEYPTRRQFIDYLEDYAAAFDINPLFGHTVLSARYDETSDLWRGRASSSAG

SEQ ID NO: 143910 - protein, 52 aa, Oryza sativa
  Clone ID: PAT_MRT4530_44773C.1.pep
ANFVFSFSGDPLGAQGDLKAISPPAKLPPATMSTSASPSATPSAECAEVRAH

SEQ ID NO: 143911 - protein, 696 aa, Oryza sativa
  Clone ID: PAT_MRT4530_44774C.1.pep
MECETGLVDRPLNGDPLYWGKAAEGLAGSHLDEVKRMVVEYRAPLVKIDGAMLSVAKVAAVAGEAARVQVVLDESARPRLEASREWVFDSTMNGTDTYGVTTGFGGAAHRRTKEFAALQKELIRYLNAGVFGASRSDGYTLPTEVTRAAMLVRINTLTQGYSGIRFEILEAIAKLLNANVTPCLPLRGTITASGDLVPLSYIAGLITGRQNSAAVAPDGSKVDAAEAFRIAGIEHGFFALQPKEGLAIVNGTAVGSGLAAIVLFEANVLAVLAEVLSAVYCEVMAGNPEYTDHLIHALKHHPGQIEAAAIMEHILEGSSYMRLAKDKEQGQGELDRLTKLRQDRYAIRTAPQWLGPQVEVIRFATKSIEREINSVNDNPVIDVARRKALHGGNFQGTPIGVSMDNTRLAIAAIGRLMFSQFSELASSFYSNGLPSNLSGGRNPSLDYGFNGAEVAMASYCSELQFLANPVTNHVQTAEQHNQSVNSLGLISSRMTAEAVTILKLMSSTFLIALCQAVDLRQLEESIKAAVNKCVTNVAKKSLTLAMDDDDLLALLGAAIDRVAVFTYAEDPCRSSLPLIQKLRAVLMDHALANGDNQLAKVAEFEQQLRAVLHDEVEAARAAVESGTAPNRITQCRSYPLYRFVRKELGAEYLTGEKTRSPGEEVDKVVIAMNQHKHINPLLECLSEWKGAPLPLN

SEQ ID NO: 143912 - protein, 125 aa, Oryza sativa
  unsure (1)..(125): unsure at all Xaa locations
  Clone ID: PAT_MRT4530_44775C.1.pep
LPHLQPPKQQPHQQEGRESTTATSXQAGYSTPLGHPASHQPPRNATWPSICTHLQGTHXRFIPPIKFSGKALRFVSKGSIKSSPFVVIQCHDRQCXVSILVRIHSCMHXGMSSQRPLWQPSLSXL

SEQ ID NO: 143913 - protein, 126 aa, Oryza sativa
  Clone ID: PAT_MRT4530_44776C.1.pep
MEGIFIGPCQMAFGFKMLYEEGQGDFVILFFIDWPLVDIYELIYSIGTTKSSSTGSLEIHQSISDGSKSKEDQKLKRHENKSFPLFECLDQLYEGFTSSTSNHVNLKGKDMATTNNIAEERLVDGP

SEQ ID NO: 143914 - protein, 121 aa, Oryza sativa
  unsure (1)..(121): unsure at all Xaa locations
  Clone ID: PAT_MRT4530_44777C.1.pep
XHCPFGPLVVAEPFITTAIPPAPPNTAPRIWRRRISTTPAPSAASPVLIYHCSLHAAFSTYCYILYSHYHLLFVTPGRLFLLRSSSPSPLRHPILSTLIPWLFICFSILHCLHTSSFLSYV

SEQ ID NO: 143915 - protein, 120 aa, Oryza sativa
  Clone ID: PAT_MRT4530_44778C.1.pep
MVTTDATIAHIMDEQDDIKVKASKCWNPIRPPAALLISNSRQISIRALFSAREYLMESSRSPLSNGYSLIAKFHLIEPQLKQQGIRLICTGKINNPRRGSISVGGVGRLPRSLNHDRPVA

SEQ ID NO: 143916 - protein, 110 aa, Oryza sativa
  unsure (1)..(110): unsure at all Xaa locations
  Clone ID: PAT_MRT4530_44779C.1.pep
PLSHPLHFLRIWRRDGGEEERRWLRSMQQFNSGGGRTLWSRSGGVQATGGVEEAVTTASGCGGAAAGDXDSLGSGGRTTTACYXLVRPSPARIRRQHPSLAAASGDXNGL

SEQ ID NO: 143917 - protein, 44 aa, Oryza sativa
  Clone ID: PAT_MRT4530_4477C.1.pep
MAHGGGYVCEECEPVEVETLIDQGKFLRRILEHIEPIYICVVCK

SEQ ID NO: 143918 - protein, 56 aa, Oryza sativa
  Clone ID: PAT_MRT4530_44780C.1.pep
MSYGTKIWVTQDQIAAAQRSNIISGLDLPSAVPSKLQLLDHQRSPPSEPNASPDLL
